United States Patent Application Publication US 2022/0096574 A1 - sequence listing, part 20

SEQ ID NO: 88311 - protein, 469 aa, Sphingomonas sp.
  misc_feature (1)..(469): tr|A0A518RJB3|A0A518RJB3_9SPHN Tryptophan 7-halogenase OS=Sphingomonas sp. XS-10 OX=2599297 GN=FPZ54_17070 PE= 4 SV=1
MTGPVERVAVLGGGVAAPMAALAIRRAFGRLGVSVTWHDDNTRPSRHAALVAPPDLVGFHPLLGLGDAALIDHARATLTLGQQFVGWAGGDDAFLHAYGDAGTPFASLPFLQHWVRARHAGLRVALEDFCLAAVAAKQGRVGSPRDPSTSQAVKPGRHLDAPGYAAVLRAGCKAAGVRIVAADMAVKADLIVDTRDDADADADAERDAAPLCDRVILASAAPIDPIPLHGRIVAHDAGWTALTPLADRIAITCHYASAHMNEQAALDALQRAVARPVQADPAVAVGGRRIPGWSGNRLTIAQPDGIAATLDGAGLTELQLAIAQLILLWPIDRTAMPEAALYTDELRGTRARVADFSAQHFRLATRSGSPFWDAARAAPISRELAAKIDLFAARGMVAHFDHEAHVDDGWALCMAGHGVVPRSHDAQALLVEDQALLAEFQRQLRAVAAAVRGMPTHAQALAALRSGGQ

SEQ ID NO: 88312 - protein, 496 aa, Hyphomonas sp.
  misc_feature (1)..(496): tr|A0A328K275|A0A328K275_9RHOB Uncharacterized protein OS=Hyphomonas sp. C76AD OX=1280943 GN=HY11_03610 PE=4 S V=1
MQKVRKVVIAGGGTAGWITAAAMSRMLGPLLDITLVESDDIGTVGVGEATIPTHRTFHHLLGIDEREFMRATKATFKLGIAFENWGGIGDTYIHSFGQVGKSSWMGEFYNIWLAAREKGIGEDLDAYCFELQAAKHNKFYTDEKFNINYAYHLDASLYAKFLRAFSEEKGVKRVEGLIGGVEQDGETGFITALKLKSGDRIEGDFFVDCTGFRGLLIEQTLKSGFEDWAHWLPTDSALAVQTRSVGPALPYTRSIAHQSGWQWRIPLQHRVGNGLVFCSQYMQPDAAEEILRNNIEGELLGEPRLIRYKTGRRRKVWNKNCVALGLSSGFLEPLESTSIHLIQIGASRLVQQFPFDGVSEAIANHYNEQSLRELERIRDFIILHYKVTERDDSAFWRDRRDMDVPDSLAQRLDVFRENGLAYQATDDLFRVDSWLQVMMGQRMRPKGYHHMGHMMTEDQMRRALGGLSSGIANTVAKMPTHQDFIERYCAIEAEAV

SEQ ID NO: 88313 - protein, 505 aa, Duganella sp.
  misc_feature (1)..(505): tr|A0A1E7WXV0|A0A1E7WXV0_9BURK Flavin-dependent tryptop han halogenase PrnA OS=Duganella sp. HH101 OX=1781066 G N=prnA_2 PE=4 SV=1
MTNNRIKRVVVVGGGSAGWMAAAALATYLGKQTSVRLIESEEIGIVGVGEASVPHIRMFNGQMLGIDETEFVKRTQGTIKLGIQFQDWSRIGDSYIHGFGVIGRSLGPLPFHQFWLKLFQSGRAAQIGEYSLQTVMAPQGKFVPGDRNSPPNSPLADIAYAYHFDAGLYARFLRELSEQRGVQRIEGKIVGVNQRADDGFVESVTMENGQVVDGELFIDCSGFRGLLIEQALKTGYEDWSHWLPCDRAMAVPSERIDPITPYTRATARAAGWQWRIPLQHRTGNGYVYSSQYIGDDEAAATLLANLDGKPLADPRPLRFTPGMRKKCWNKNVVALGLASGFLEPLESTSIYMVQSGITRLLGLFPGSDFNPLLAERFNRESAFEYERVRDFLILHYHATERNDTPFWDYCRTMSVPDSLKEAMDLFRSDGRYFRNGEDFFALPSWVQVMLGQRIMPQSYHPIVDDMPEDKLVQYVEDMRATLAHAVAAMPTHGQWIDRYWKASAL

SEQ ID NO: 88314 - protein, 501 aa, Sphingomonas sp.
  misc_feature (1)..(501): tr|A0A518RGP3|A0A518RGP3_9SPHN Tryptophan 7-halogenase OS=Sphingomonas sp. XS-10 OX=2599297 GN=FPZ54_11720 PE= 4 SV=1
MIDPVRVVIVGGGTAGWMTASALARFLPGVADVRLIESEEIGIVGVGEATLPHLRAFLQRLGIDEAEMMRATNATFKLGIDFRDFGAIGDRYVHPFGAYGVDLAGVGFHHYWLRAREEGSRRSLEDYSLPIVAARANRFAFPPADGDFLATSYGWAYQFDATKLAPMLRGYSEARGAVRTEGRVIGVERAGESGDVTELVLDSGERIAGDLFIDCSGFRALLIGGAMDAAWEDWSHWLPCDRAAALPTQSMPGPIEPYTRATAMSAGWRWRIPLQHRVGNGYVFSSAFLPEDAACDAILGAVEGARQAEPRILRFRAGRRAQSWVGNVVSIGLASGFLEPLESTSIHLAQMAVMRLIELFPERRIDPADRVAFNATVDYEYDRVRDFLILHYHATTRDDSDFWNHVRTMAVPDSLAEKLELWRESGRIEKYGEGLFLEPSWVAVYLGQGQLPERYDPRADNPTAPALTRTLDEIAGSIAQRVAAMPDHATALRAHGAWSGV

SEQ ID NO: 88315 - protein, 503 aa, Duganella sp.
  misc_feature (1)..(503): tr|A0A1E7WXA3|A0A1E7WXA3_9BURK Flavin-dependent tryptop han halogenase RebH OS=Duganella sp. HH101 OX=1781066 G N=rebH_1 PE=4 SV=1
MQQAAIKNIVIVGGGTAGWMTATALSTILRGQYNIRLVESDEIGIVGVGEATIPMIQRFNQVAGIDEAEFMKATQGSYKLGIEFVNWGRVGDRYIHGFGVLGQDLWTVRFDQYWQRLRGLGKARELDEYSITRMAARHNKFMPPRRDLANSPLSDIAYAYHFDASLYARYLRTVSEQRGVRRTEGKIAQVSQRADDGYVDAVVMESGERIEGDLFIDCSGFRALLIEGALKTGYEDWNHWLPCDRALAVPCESVSPLTPYTRATAHRAGWQWRIPLQHRTGNGHVYSSAFMEDDEAQRILLANLDGKPLAEPRMVKFRTGMRKLGWNKNVVAMGLASGFLEPLESTSIHLIQSSIARLVQFFPDRGFNQLEVDEYNRQSRFEYERIRDFVILHYKLNQRDDSDFWKQCAAMPVPDSLQHKLDLFRARGRVVRFDNELFAEAGWLQVMHGQNLKPEGYDPLVDLLPVEEAEKYLESIRDVIGQCVQHMPDHAEYIAQHCAATRR

SEQ ID NO: 88316 - protein, 501 aa, Alteromonas marina
  misc_feature (1)..(501): tr|A0A0B3Y3F8|A0A0B3Y3F8_9ALTE Tryptophan halogenase OS =Alteromonas marina OX=203795 GN=RJ41_12470 PE=4 SV=1
MTVSGLDSSKNQTPVKNVVIAGGGTAGWMAATALSRLLGKSIKVTLVESKDIGIVGVGEATIPPIRTFHKLLGIDEKAFMRATQATFKLGIEFENWREQAHSYIHSFGITGRECWAGEFHHFWLRAKEYGFGGEFGDYCPELIAAKQSKFATSEAMPLNFAYHFDAVAYGRFLKSLACEAGVTHKEGDIEKVTVCPQAGNIQSLQLASGEVINGDFFIDCTGFKGLLIEQALHTGYDDWRHYLFCDSAVAMQTELTAPPVPYTKSVAHKAGWRWQIPLQERMGNGLVFCSRFMSDEDAIDTLKAQVTGAPINEPRVIRFTPGKRRRGWNKNCVALGLSSGFIEPLESTSIHLIMTGLIRLMRLFPFDGITQSAIDEYNNKFDSEMSAILDFIVMHYKVTQREDSPFWQQCQRMEIPTSLEHKLALFAESGRVFLDDGDIFRVDSWTQVLMGQGMTPSQYHRVADEMSEQSLKQFMAGLKQQVDNHVAKLPSHEAFLTQYLN

SEQ ID NO: 88317 - protein, 502 aa, Massilia sp.
  misc_feature (1)..(502): tr|A0A098UC46|A0A098UC46_9BURK Tryptophan halogenase OS =Massilia sp. JS1662 OX=1519190 GN=IA69_10160 PE=4 SV=1
MTQQTPLQDIVIVGGGTAGWMAAAALARLLQGRFAIRLVESDEISTVGVGESTIPMIRLFNDVLGINEDEFVRETKATFKLGIEFRDWSLAGERYMHGFGRFGQDVMTVEFFQYWLKAHQAGIAPDLEHYSINRMGARAGKFMRPPPEAPNSPLADIVYAFHLDAGLYARYLRTYAEARGVRRTEGKVVEVRQRPHDGFIESVVLASGEVVTGDLFLDCTGFRGLLIEQTLHAGFEDWSHWLPCDRAWAVPCALSGDLLPYTIAHARPAGWQWRIGLQHRTGNGHVFSSRHMSEDEAASILLQNLDGEALAEPKLLRFTAGRRRKAWHRNVVAIGLSSGFLEPLESTSIHLIQSALSRLLALFPDKGFHQADIDEFNRQSDFEIERIRDFLILHYHATSRADTRFWNHVRTMDIPDTLRRKIDLFKAHGRVVRENEELFTTIGWQQVLHGQGVRAGGYHPLVDLMGEGELRDFLSNTERVIGRCVDVMPAHKDFVAAVAGAK

SEQ ID NO: 88318 - protein, 505 aa, Massilia sp.
  misc_feature (1)..(505): tr|A0A098U2B5|A0A098U2B5_9BURK Tryptophan halogenase OS =Massilia sp. JS1662 OX=1519190 GN=IA69_27575 PE=4 SV=1
MLDKAIRKLVIVGGGTAGWMTAAPLALKLGASCEIVLVESPEIGTVGVGESTLPTIRYYNHALGIDGADFVRRTKATFKLGIDFCDWGHLGNRFFHGFSDFGPAIENRPAFMYWLRLARDNPDMPSYEEWSISTAMAHGYRFVPPHGDQPGPTNAYSYAFQFDAGLYAQYLREYAMARGVQRVEGTVGNVEQHPETGFITALQLQDGRRIEGDLFVDCTGFRGLLIEGVYKAGYEDWSAMLPCNSAQAVPSALADRLTPYTRSTAKSAGWQWRIPLQHRNGNGHVYCNAFMSDEEAGRVLLDGLDTEALEAPRQLRFTTGRRRKSWVKNCVAVGLSSGFLEPLESTSINIIELAVGWLIQYFPDRDCNPELADEFNRLVAQRYEFVRDFIVLHYKLTNRTDSEFWRYCANMAIPDSLQHQIDLFRTSGRIVIYDREGFQADSYASMLLGHGIRPERTDPLIDRMDQARLLDHFRKVHATIRQVVGAMPDHAALVAQIAAEPMRKS

SEQ ID NO: 88319 - protein, 519 aa, Caulobacter sp.
  misc_feature (1)..(519): tr|A0A1I3WAA7|A0A1I3WAA7_9CAUL Tryptophan halogenase OS =Caulobacter sp. UNC279MFTsu5.1 OX=1502775 GN=SAMN02799 626_03250 PE=4 SV=1
MSPAGTRQGPIRRVVIVGGGTSGWMAAAALARLAPRDVTVTLVESDDIGTIGVGEATIPTLHDFNALLGIDEDQFVRQTRATFKLGIQFENWGQVGETYIHPFGVHGRTTPEYKFHQLWLRLAHEAGEDAARRAAIGDLADYNLGAVAARLGRFDRPRGGSDSVLSTIRYAFHFDAGLYARYLRNYAERGGVRRLEGVVVDVAMRPDDGFVQSVQLRDGRVVEGDLFIDCSGFRGLLINQALGVGYVDWSRYLPCDRAVALPRRRVAPPDPFTRATADLAGWRWRIPLQHRMGTGYVYCSEHLEDQAAADRLISQGDGEPLAEPRHLRFTAGHRERFWVKNCVAIGLAGGFIEPLESTSIHLAQMGVARLMMLWPECSFDPAEIDQYNTATRLEYEQTRDFIVLHYKATRRDDTAFWRRCAAMEIPDSLAHKMALFRSGGRVFRFHDDLFTEDSWLAVMLGQGVMPRSYDRLADSLDRDQLARNMARLKAVTLQAAHALPSHETFIQTHCAATPDRIAG

SEQ ID NO: 88320 - protein, 533 aa, Duganella sp.
  misc_feature (1)..(533): tr|A0A1E7WS22|A0A1E7WS22_9BURK Flavin-dependent tryptop han halogenase RebH OS=Duganella sp. HH101 OX=1781066 G N=rebH_2 PE=4 SV=1
METGKTMKTIPTPVKNVLIVGGGTAGWLTAAFLARTLGADAGPGAGGDSVRITLVESKEIGIIGVGEGTFPSIRGTLAAIGIDEARFIRECNATFKQGIKFTDWVRPPGTPGNDHYFHPFSLPSQRPGGPELLPYWLQGAAPAGVGFAAAATMQKRVADASHAPKRFNDADFMGPLNYAYHFDAGKFAALLSTHAQSLGVRHVLATVERVSLDGQGAIGAVHTREAGELTADLYIDCTGFRAALIGDALGTPFRNINDTLFVDRALAMQVPYDTADAPIPSYTIATAHEAGWTWDIGLHQRRGIGYVYSSRHTDDARAEQVLRAYIGKASDGLNPRQLKLNVGYREQHWVKNCVAVGLSGGFLEPLESSGIGLIETAAYLVSYLFPHDGDMAPVAKVFNEMMKARYERIVDFVKLHYCLTQRRDHAFWTDNTDPASIPASLRDKLAMWRRRAPHRMDFVVDLEMYPPSSWQYVLYGMEYPTAQYANASTLPRFDEARREFQMIEQMSQRALADLPTHRALIDHFLQRGERKTA

SEQ ID NO: 88321 - protein, 504 aa, Caulobacter sp.
  misc_feature (1)..(504): tr|A0A1I3PJK1|A0A1I3PJK1_9CAUL Tryptophan halogenase OS =Caulobacter sp. UNC279MFTsu5.1 OX=1502775 GN=SAMN02799 626_01308 PE=4 SV=1
MAHLNKIVIVGGGSAGWICAAMLSHYFQNGPTQVELVESEEIGTIGVGESTIPPFLQLIRTLGINEQEFIQETQAAFKLGIRFENWRAKGDVYYHPFGQIGGPLEVNEFYQCWLRAKQNGHPSGLQDFAPATVMADAGKFMLPSKAQRTMIANANYALHIDARLVALYLRRFAEARGVKRTEGVVTDVVTRPDGGIAKVILRDGREAAGDFFIDCSGFRSLLIGKTLGEPFRDWTDVLLCDRAVALQTENVGAPHPYTLAQAQDFGWRWRIPLQHRSGNGYVFCSKYLSDDEAVAALVGQVQGETVLGPTIIPFKTGMRQRLWVRNCVAIGLAGGFIEPLESTALHLIYKGMDYLLRFFPDLDADPTLAAEYNRRMTVDYEEIRDFIVLHYATTKRDDTPFWRAYQQVEIPESLRERIALFKAAGVLRDGVDDMFRAPSWQSVMEGMGVRPDRYQQLVDRIPLSVIMNLMDKSAPMLADFVATLPSHEEFLRTHCPAAPFKRSA

SEQ ID NO: 88322 - protein, 501 aa, Caulobacter sp.
  misc_feature (1)..(501): tr|B0T7S8|B0T7S8_CAUSK Tryptophan halogenase OS=Cauloba cter sp. (strain K31) OX=366602 GN=Caul_2138 PE=4 SV=1
MARTNPIRSILIVGGGTAGWMAATWLAGRLARQDIQITVVESPDIRTIGVGEATVPAIRGYFRDIGVSEAEVMAATQGTVKLGIEFRDWKRDGESFFHPFGLYGMASRGVPFHQFWLKRQAEGDTAPLAAYSLCTQLAMANQMMEPPASPPNDLGVFNWAVHFDAGLYAQFLRRKATSELGVTHVDGTVVEVAKNGENGFLTGVALADGRVLEADLFIDCSGFRSLLLGQALGVDYEDWTHLLPCDRAVALPCERDGPLTPYTRSTALAAGWQWRIPLQHRVGNGYVYSSRHISDDEATAVLMSRLEGPALAEPNLLRFQTGRRRRFWEKNCIALGLAAGFMEPLESTSIVLIQSGLERLGALFPDRGFDPALADEYNRITTLEYERIRDFLLLHYVANRREGEAMWDHVRQLALPEPLVHKMRMFASRGTMVRYEWESFHDPSWLSMYAGFDIAPRAHDPMADYFTKPELDSALRRMREAIARAQALAVPHEAFLAAQRP

SEQ ID NO: 88323 - protein, 527 aa, Rhodanobacter sp.
  misc_feature (1)..(527): tr|A0A1M7CQW8|A0A1M7CQW8_9GAMM Tryptophan halogenase OS =Rhodanobacter sp. OK091 OX=1881037 GN=SAMN05428972_075 9 PE=4 SV=1
MARIRKILVVGGGTAGWLTACYLAKTLNIAEPESIRVELVESPNIGLLGVGEATFPSIRGTLAAIGLDERRFLVGASATYKQGIQYVNWVRPPGEPGPDRFFHPFSLPSQRSGNPELLPYWLLGGAPEGMAFADAVTMQKRLIDHGRAPKRATDPDYQGPMNHAYHFDAACFAAVLAEHGQSLGVRRHLATVERAELDGSGAIARIVTKEIGELSADLYVDCTGLRGALIGTAMQSPFHSRRDVLFADRAVALQVPYPKPDTPILPFTRATAQEAGWTWDIGLQKRRGIGYVYSSRHTDATRAEQVVRDYVGDAAAGLEALHIKFETGYRPDHWRRNCVAVGLAGGFVEPLESTGIALVELAAYLITHLLPGDVGDMERTARQFNQMMVARYERIIDFIKMHYCLTQRRDNAFWIDNTDPAGIPQTLQDRLALWRHRPPHRLDFVTDLEMFMPASWQYVLYGMEFRTDLEPMRSAYPQMEAAQREFAMIQQMAGHALGDLPDHRALVEQLCREHAQRLRQKETVGVS

SEQ ID NO: 88324 - protein, 506 aa, Xanthomonas citri
  misc_feature (1)..(506): tr|D4T3Z2|D4T3Z2_XANCI Tryptophan halogenase OS=Xanthom onas citri pv. aurantifolii str. ICPB 10535 OX=427082 G N=prnA PE=4 SV=1
MIPAPLRNIVIVGGGTAGWMAAAAFARVLGPTFKVQLIESEQLGTVGVGEATVPHIKAFNNLLGIDEAEFVRQTQGSFKLGIEFVDWQRPGSTYMHGFGTQIGHPLGLLPFHQYWIKQHARGKAQPLGAYTLNTVAATRGKFMTSAGDVPANSPLANIAYAYHFDATQYAHFLRRYSQQRGVSRIEGLVEQVQLHPESGHVQSLQLASGQVVHGDLFIDCSGFGGLLIEQALHTGYHDSTHWLPCDRALAVPCEKVGPPTPYTRSTARAAGWQWRIPLQHRTGNGYVYCSAHISDDEAAATLLANLDGKPLADPRPLRFTTGRRKQCWNRNVVALGLASGFLEPLESTSIHLIQSGISKLLELFPREGISPVLVQRYNDRLAFEFDRIRDFLLLHYHATERDDSAFWRHCRHMPITPELQATLDLFRDSGRFYRNAEEMFAEISWVQVLVGQGILPQGYHPLVDQVPDRDAEGFLASVAQTISHCVDVMPSHQQFIDRYCKAVTLP

SEQ ID NO: 88325 - protein, 511 aa, Caulobacter sp.
  misc_feature (1)..(511): tr|A0A1I3PNJ0|A0A1I3PNJ0_9CAUL Tryptophan halogenase OS =Caulobacter sp. UNC279MFTsu5.1 OX=1502775 GN=SAMN02799 626_01353 PE=4 SV=1
MTDQAVRNILIVGGGTAGWMTAAALSAKLAGLPIAIRLVESAEIGTVGVGEATVPHIRHFNAALGLDEADFMRRTQATYKLGIEFRDWGKPGDSYIHPFGAYGAAIAGVGFHHHWLRARQGGDATPLEAYSLPIMAARQGRFAPPSPDLSSVASTYNYAYQFDAGLYAAYLRAYAEARGVVRTEGKVADVALRGGDGFIEAVTMESGERIEADLFIDCSGFRGLLIEQALKAGYEDWTRWLPCDRAAAVPCETVEISTPYTRCTADTAGWRWRIPLQHRVGNGYVYSSAHISDDDAAAALLAGLEGKAQADPRFLRFTAGHRRKQWSRNCVAVGLASGFLEPLESTSIHLIQVAVTTLLELFPDRGCDPADQDEYNRVMNLEFERIRDFLVLHYHANQRTGSPFWDDRRNLPIPDSLAYKMDLFRDRGVVVKYKDGFFLEPSWLAVYLGQNVVPRAYDPVSDSVPDAVLAQRLKAIRDSVADTAGAMPAHDDWVARFCAAAPVNAAQAVRA

SEQ ID NO: 88326 - protein, 500 aa, Caulobacter sp.
  misc_feature (1)..(500): tr|A0A1I4AH19|A0A1I4AH19_9CAUL Tryptophan halogenase OS =Caulobacter sp. UNC279MFTsu5.1 OX=1502775 GN=SAMN02799 626_04587 PE=4 SV=1
MTDNRIRSVVVVGGGTAGWMSAALLARALGETVRIRLVESEEIGTVGVGEATIPQIRHFNAFLGLDENAFLAATQGTIKLGIEFVDWRAPGQSYIHAFGEIGRPLGAVPFHHYWLAGRRKGDDHALWDYSLNARAARAGRFDRAVRRAAGDAGEPLTYAFQFDAALYARHLRDHAQRLGVARTEGKILGAMLREPDGFVRAVTLESGEVVEGDFFLDCSGFRGVLIEQALKTGYEDWSDLLPCDRAVAAPTANVGPPRPYTQAIARAAGWQWRIPLQHRTGNGHVFCSRFVSEDEATAQLMASLEGEPLAEPRTLKFVTGRRKRFWNRNVLALGLAGGFMEPLESTSIHLIQSGLSRLLNLFPNKGFAQRDIDEYNRQTGLEFERIRDFLVLHYWANQRAEPFWKACRDRAVPTELTRKVELFRTHGRLFREPDDLFLEASWLQVLVGQGVPPDDHHPMTGQLTDDQLRGFLADLRKITADGAAALPAHGDFLRQQRAAR

SEQ ID NO: 88327 - protein, 500 aa, Caulobacter sp.
  misc_feature (1)..(500): tr|B0T6X7|B0T6X7_CAUSK Tryptophan halogenase OS=Cauloba cter sp. (strain K31) OX=366602 GN=Caul_2064 PE=4 SV=1
MKPLKKILIAGGGSAGWMTAALCAKLFQGLYEIVLIESEEIGTVGVGEATIPAIKRFNELLGLDEDDFLRRTQGSFKLGIQFKDWSRLGSSYVHGFGVIGQDLGWLRCHQYWLRMNALGHGGDFAQLSINTAAALDNRFMRAKPEMGDSPIAHIAHAFHFDAGLYARYLSGYAQERGVRRREGKIVDVALRSDDGFVQSVTMDDGEVIAADLFVDCSGFRGLIIEQAMKTGYEAWKHWLPCDRAIAVPCERSANFTPYTRSTAREAGWQWRIPLQHRTGNGHVYSSEHIDDDEAERVLLANLDGAQRADPLRIRFVTGKRKKIWNRNCVAIGLASGFLEPLESTSLHLIQSAIIRMVRLLPDAGFDQAGIDEFNRQSDFEYERIRDFIILHYKATQRDDTAFWRYCRDMEVPATLQRKIDLFSANGRVFREDDELFTEESWIQVFLGQGIIPRGYDPLVQVQSDAQIAQYLANIETVIGKCVKVMPTHADFVAKTCQAPG

SEQ ID NO: 88328 - protein, 505 aa, Xanthomonas citri
  misc_feature (1)..(505): tr|D4T3I7|D4T3I7_XANCI Tryptophan halogenase OS=Xanthom onas citri pv. aurantifolii str. ICPB 10535 OX=427082 G N=prnA PE=4 SV=1
MTQAQIRKVVIAGGGTAGWIAACALSHQFRNLLDITLVESEQIGTVGVGESTVPPIRTFHRFLQIDEQEFLRAVAGTFKLSISFEHWRRQGERYIHPFGITGQSTLVCAFHHLWLESQRRGMPGSFGDYCLETVASRVDRFALHGEPAVNYAYHLDAALYARFLRARSEACGVKRVEGRIQQVTVQPHSGDVASLVLEDGQTIEGDLFIDCSGFRGLLIEQTLHTGYEDWSHWLPCDRAVAVQTEALGPPVPYTRAIAHEAGWRWHIPLQHRVGNGLVFSSKHLSDDEAHAKLLRDVAAPVVKEPWMVPFRTGRRLKAWNKNVVSLGLASGFIEPLESTSIHLTISAVVRLLALFPAGGIAPSQVQLFNDVSRAEMEHVRDFVILHYHATQREEPLWQQCRQMELPESLALRLRAWRERAHAWQGADELFRVDSWTHVLMGQGIAPEQHHPLTRAFSDHDLRRLLDGIAQPIQHAVQQMPSQQDFIERYCKAGEQVWGMRSPVPA

SEQ ID NO: 88329 - protein, 501 aa, Caulobacter sp.
  misc_feature (1)..(501): tr|A0A1I3PNW0|A0A1I3PNW0_9CAUL Tryptophan halogenase OS =Caulobacter sp. UNC279MFTsu5.1 OX=1502775 GN=SAMN02799 626_01356 PE=4 SV=1
MTDQRLRKIVIVGGGTAGWMTAAALGRFLKDGHTQVTLVESEEIGTVGVGESTIPQIKIFNRMLGLDEFDFVRRTKATFKLGIDFVDWKTIGHQYHHPFGPYGVDMEGVSFHAYWLRLKAMGEAADLGEYSLQAVASAQGKFMRPNQQRNSPLARIDHAYHIDAGLYARFLRGYAEERGVRRQEGRIVDVHQRTEDGFIEAVTLQNGQRVEGDLFIDCSGFRGLLIEQTLKTGFEDWSQWLLNDRAVAVPCALGGSTQPVTRATARPAGWQWRIPLQHRLGNGYAYSSQHISEDEATAYLLAHLDGEPLIDPFTLRFKAGRRKKSWNKNVVAIGLSAGFMEPLESQSIHLIQVGISRLLAMFPDKRFETPDIDRYNRVMKFEYETIRDFLILHFHATRRNDTPYWDYLREMPIPDYLADKMAVFQSYGRVFRENEELFTDTSWFAVMVGQGLEPRGHDPMADVMADDELRARMADIHAVIARSAQVMPDHMRFIADNCAAA

SEQ ID NO: 88330 - protein, 522 aa, Alteromonas sp.
  misc_feature (1)..(522): tr|A0A136I295|A0A136I295_9ALTE Tryptophan halogenase OS =Alteromonas sp. Nap_26 OX=1795869 GN=AXW14_17575 PE=4 SV=1
MKESHFQAPLTSIVVAGGGAAGWLTAAILAAEHNIKNNDRVSVTLVESPDVKILGVGEGTWPTMRDTLRKIGISEADFIASCDASFKQGTRFINWKSTESENIYDHPFSLPAGFFEGEVGAWWLSHGHQHQKSTFSEMFSTQSLLCNFSKAPKQVQTPPYAAVANYGYHLDAHKFAELLKTHCIERLGVNYVNDHIEHIKEDVEGYIASLECKSQEIRGDLFVDCTGFSASLIGKHFNSPITDVSQGLKNNSAMAVQAGYVDETVDIASATLSTAHENGWIWDIGLPHRKGVGCVYSSEFASDEKAAETLKAYLTSCKKTKDVSENDFRKITFSPGYRKTAWVKNCVAVGTSAGFVEPLEASALVMVEMSARFISEHLPNHREIMPSVSKRFNSNFTRRWERIVDFLKLHYVLSERKDSPYWRFMTNLDNASEQLKDWLLEWQYRPISLTDFCYADELFPAASYMYVLYGMKAPEQFAINFSRYSDSVMGQTLNAVKANEKLSHKHVAALPTNRELIKAIRA

SEQ ID NO: 88331 - protein, 496 aa, Caulobacter sp.
  misc_feature (1)..(496): tr|A0A1I3W6M6|A0A1I3W6M6_9CAUL Tryptophan halogenase OS =Caulobacter sp. UNC279MFTsu5.1 OX=1502775 GN=SAMN02799 626_03191 PE=4 SV=1
MQDQVVKKVVIAGGGTAGWMAAAALAKQLGPLLDITLIESDEIGTVGVGESTIPTARTFNALLGIDEPAFMRATQATFKLGISFEHWGQIGDRYIHSFGQVGKSNWMGSFHHFWLAAKAAGFGGELGDYCFELKAAEADRFSAGEGPELNYAYHLDATLYGGFLRRMSEDLGVRRVEGKISQVQQHPETGFIQALVMENGDRVEGDLFVDCTGFRGLLIEQTLEAGYEDWSHWLPTNSALAVQTRSTGPAVPYTRAIAHAAGWRWKIPLQHRVGNGLVYCNEYMSDDQARETLLGALDGERLIEPRVIRYRTGRRRKTWSKNCVALGLASGFVEPLESTSIHLIMIGVTRLMQLFPFGGVSEAVVARYNQQAVDELEKIRDFIILHYKLTERTDSPFWDRCRTMDIPDSLAQRIALFRESAQAFQAPGELFQVDSWLQVMLGQRLQPAAHHQMGRLMPPEQLRRALADLSGNIARAVGGLPNHQAFIDRYCGVAAT

SEQ ID NO: 88332 - protein, 522 aa, Caulobacter sp.
  misc_feature (1)..(522): tr|B0T750|B0T750_CAUSK Tryptophan halogenase OS=Cauloba cter sp. (strain K31) OX=366602 GN=Caul_3561 PE=4 SV=1
MDRSRRILIVGGGTAGWLTAAYLAKSLRIAEQAHLEITLLESPDIGVIGVGEATFPTIRTTLRFLGVDEARFIRETSATFKQGIRFNDWAWAQGEGGDGPQRHQYFHPFEAPFSTDGASLAPYWLLQSEATRAPFAEAMTIQARVADAQRAPKRPHEGDFSGPLNYAYHFDAAKLAVVLAERAVELGVRRLPGLLTGVELDATGAIDHVISQEHGRLEADLYIDCTGFRAELIGQALKAPFKSARPILFADRALACKIPYDRPDAPIQSFTVATAHEAGWTWDIGLNGARGVGCVYASDHMDDDRAEAILRGYVGEGVEIAPRSLSFEAGYRQKQWVKNCVAVGLSAGFLEPLESTGVVLIEAAVAIIAELFPHNGPISAPALRFNELMTARYDNIITFLKLHYCLSQRTEPFWRANADPASIPERLADLLEQWRWRPPTRYDFILDLETFAFFNYQYILYGMGFKTDLSPGRGEFPDVAAADKLFAKIKTFGDRATQDLPSHRDLISRINRFGFDRAAEHA

SEQ ID NO: 88333 - protein, 530 aa, Saccharothrix saharensis
  misc_feature (1)..(530): tr|A0A543JPX6|A0A543JPX6_9PSEU Tryptophan halogenase OS =Saccharothrix saharensis OX=571190 GN=FHX81_7318 PE=4 SV=1
MEDRRIKKVVVLGGGTAGWMAAAYLGKALGPGVTITVLEAPSIPKIGVGEATVPNLHKTFFEFLGIAEEDWMRECNASYKMGIKFTNWRTPGRGEADPRPYGDGTDHYYHLFGLLPNHENQPLSHYWAHKKLTGQTDEPFDYACYREPPILDAKLSPRFMDGTKWTNYAWHFDTNLISPFLRKWSIENQNAIHIQDLMTEAVIDQRGHVSALKTEGGLTIEGDLFIDCSGFRGLLINQAMKEPFLDMSDHLLNDSAVATQVPHDDAANGVEPYTSSIAMSSGWAWKIPMLGRFGTGYVFSSRFQTRDDATLEFCTMWGLDPETANLNQIKFRVGRNRRAWVKNVVSIGLASCFLEPLESTGIYFVYAALYQLAKYFPDKNFDSILQDRFNAEIETMFDDSRDFVQGHFSFAPRNDTAFWQACKELRLADDFQEKVRMYKAGLAVNMPITDESTYYANFDAEFRNFWNNSNYYCIFAGLDYLPDHSLPALAARQDVLDSAEPVFAQIKQTQKELLTTLPSTYEYLKQLHGK

SEQ ID NO: 88334 - protein, 497 aa, Caulobacter sp.
  misc_feature (1)..(497): tr|B0SXK4|B0SXK4_CAUSK Tryptophan halogenase OS=Cauloba cter sp. (strain K31) OX=366602 GN=Caul_4092 PE=4 SV=1
MTDNRIKSVVVVGGGTAGWMSAALLARALGGTVDIRLVESEEIGTVGVGEATIPQIRNFNAFLGLDENAFLAATQGTIKLGIEFIDWRAPGQSYIHAFGEIGRQLGAVPFHHYWLAGRLKGDDHPLWDYSLNAQAAKAGRFGCAAGAPPTEALTYAFQFDAALYAGHLRAYAEHHGVARTEGRILGANLRGVDGLVESVTLESGEVVAGDFFIDCSGFRGVLIEQALRTGYEDWSSYLPCDRAIAVPTANVGPPRPYTQAFARSAGWQWRIPLQHRTGNGHVFCSRFISEDEAVGQLMANLEGEALAEPRTLKFVTGRRKVFWSRNVLALGLSSGFMEPLESTSIHLIQSGLSRLLNLFPDKAFAQRDIDEYNRQAGLEFERIRDFLVLHYWANQRDEPFWRACREMAVPPELTRKVELFRARGRLFREPEDLFLEASWLQVLVGQGVLPERCHPMTGMITDPQLQGFLADLRKITADCAAALPAHADFIRQHAAAR

SEQ ID NO: 88335 - protein, 533 aa, Mitsuaria sp.
  misc_feature (1)..(533): tr|A0A1I6KW71|A0A1I6KW71_9BURK Tryptophan halogenase OS =Mitsuaria sp. PDC51 OX=1881035 GN=SAMN05428960_4067 PE =4 SV=1
MDTGLSSTHHNDPETFMTPIQDILIVGGGTAGWLTAAFLARQLGTAQGGVRITLVESSDIGIIGVGEGTFPSIRGTLSAIGIGEAEFLQACSATYKQGIRFDHWVRPPGTPGADHYFHPFSQPSQRPGAPELLPYWLAGEAGPTRAFAEAVTLQKAVADARHGPKRAADGDYLGPLNHAYHFDAGRFATLLATHGQALGVRRVIATVDRVDLDEQGAIAAVHTREAGTLTAGLYIDCSGFRARLIGEALGSPFRSMRDVLFVDRALAMQVPYARPEAPIASYTIASAQESGWIWDIGLQERRGIGHVYSSRHCDDADAERVLRRYIGPASDGLTPRRLTLDIGYRETHWVKNCVAVGLAGGFLEPLESSGIGLIETAAYLIGQLFPFNGDTAPVARHFNAFMKARYERIVDFIKLHYGLTQRTDTAFWRDNADPASFTDSLKEKLAMWRCRPPQRLDFITDVEMYLPASWQYVLYGMEFKTEPGAWMAPLHRGEEARREFAAIAQLGAHALRDLPPHRTLIEQILARADRRAA

SEQ ID NO: 88336 - protein, 512 aa, Caulobacter sp.
  misc_feature (1)..(512): tr|A0A1I3PJK6|A0A1I3PJK6_9CAUL Tryptophan halogenase OS =Caulobacter sp. UNC279MFTsu5.1 OX=1502775 GN=SAMN02799 626_01309 PE=4 SV=1
MQHRAQDRRIRDIVIVGGGTAGWMAAASLKQHFGAAPVKITLIESSEIGTIGVGEATIPTIRRFYQALGLSDIDVLRATGGTCKLGIRFNDWTAPGASFIHPFGLYGQDLKGVAFHHYWMRLRALGEDVPIGDYSLGASLAAGGKFTTPSRNPPSTLSVFDWALHFDAGLFARLMRQVAERNGVRRVDARIVKVNLRGEDGFIESVSLDSGATIAGDLFIDCSGFRGLLIEEALHTGYEDWSQWLLCDSALAVQSEGQGPPPPYTDVTARPAGWQWRIPLQHRWGNGYVYSSRHTTDEAARAVLTGALDERLLHEPRKIGFHPGRRRKAWNRNCIALGLASGFLEPLESTSIALIETGIEKIKQLFPSRDFDPAVVDEFNEMSRLEMERVRDFVILHYKLNRRPDTTGFWTHCREMAVPDTLQRKIDLWRAQGHFVRYRWEMFSPPSWLAIYAGFGLLPQTYDLSVDGFDAAQLSGALAEMRKAVADTVAATRSHGDFIEQYARPQQPVAAE

SEQ ID NO: 88337 - protein, 533 aa, Alteromonas sp.
  misc_feature (1)..(533): tr|A0A136I137|A0A136I137_9ALTE Tryptophan halogenase OS =Alteromonas sp. Nap_26 OX=1795869 GN=AXW14_08705 PE=4 SV=1
MTQLNEERSVKHIVVVGGGTAGWLAAGVLASKLKSTFQITLIESPSVSSIGVGEGSWPSLRDTLIDIGIEEKHFLTACKASFKQGSTFVNWRKPEQTNSLQQEHVYHHPFTVPVGYNELDIHSCWQAFASNEKYENAFSLQAAMCEANKAPKQVSTPDYAHVLNYGYHFDATALATLLHAHCTEKLNVVYKQAHITSVNNDSEGYIASVTTEDGIQINGDLFIDCSGSQGILIDKHYNVSWHSIEDTMLNNRAIAVQAPYANNDDVISSATIATAQSCGWTWDIGLQHRRGVGLVYSEHFTTQQQAEETLLAHVSKRLPKEHVSELDVRSLRFTPGYREQFWVKNCLSLGMSSGFIEPLEASAIAMVELGIRMLCDAFPQNFTHMKWVEERYNRRFHYRWQRVIDFLKLHYVLSNNNTPYWLAQRDSSTIPDSLAQLLDVWRFQSPSRLDLIENEEIFPSASYQYVLYGMEFQTLPSALQITRSSAQKAQDIRQKMQQTKTAYLQGLPTNRDLLSQIIASKNKEQTHDLIGFR

SEQ ID NO: 88338 - protein, 497 aa, Caulobacter sp.
  misc_feature (1)..(497): tr|B0T4N0|B0T4N0_CAUSK Tryptophan halogenase OS=Cauloba cter sp. (strain K31) OX=366602 GN=Caul_1853 PE=4 SV=1
MQEQVVKRVVIAGGGTAGWMAAAALVKQLGPLLDISLVESDEIGTVGVGESTIPTARTFNALLGIDEPAFMRATQATFKLGIAFENWGRIGDRYIHSFGQVGKSTWMGGFHHFWLQAKAAGFGGDLGDYCLELKAAEADRFSTGDGPELNYAYHLDATLYGGFLRRMAEALGVKRIEGKISQVEQQAETGFIQALVMENGDRVEGDLFIDCTGFRGLLIEQTLKAGWEDWGDWLPTNSALAVQTRATGPAVPYTRAIAHEAGWRWKIPLQNRVGNGLVYCSEYMSDDKARETLLESLDGERLIEPRLIRYRTGRRLKTWHKNCVALGLASGFVEPLESTSIHLIMIGVTRLMQLFPFHGVSDAVVARYNQQAVDELEKIRDFIILHYKLTERTDSPFWDRCRTMDIPDSLAQRIDLFRESAQAYQSPGELFQVDSWLQVMLGQRLEPREHHLMGRLMPADQLNRALSDLRGNIARAVTQLPSHQAFLDRYCPASAAM

SEQ ID NO: 88339 - protein, 501 aa, Caulobacter sp.
  misc_feature (1)..(501): tr|A0A1I3X3V5|A0A1I3X3V5_9CAUL Tryptophan halogenase OS =Caulobacter sp. UNC279MFTsu5.1 OX=1502775 GN=SAMN02799 626_03509 PE=4 SV=1
MTDRSIRSIAIVGGGTAGWMAACLLSQALRGTGCAVTLVESPDIGVVGVGEATIPPILDFLKLIEVDLDAFIPAVQATFKLGIKFDDWRAIGDGYWHPFGTFGVSIDRRPFHHLFHKARARGLNPTVPRFSLAAALGDAGRLAHPDPRAPGPVAGLRQALHFDATLVAGFLRGHAERRGVRRLEREVAGARLRDDGFIDALALKGGGELAADLYIDCSGFRGLLIEQALGAGYEDWTRWLPCDRALAAPTAHVGPPAPYTQAAALGAGWRWRIPLQHRAGNGYVYSSAFIDDGAAQDELLAAIGQPLAEPRRLSFTAGRRKAMWSRNCVALGLASGFLEPLESTSLHLVCSGLYKLLDHFPDRDFAPVNIAAYNRALADEYETYRDFILLHYCLTARDDTPFWRERAAAPLPDRLAERLELYRACGRIDARPGELFTDLSWFYIFEGMGVKPRAYDPLVEASNFDQVRAILPELTARIDAVVAQSPAHEAALAAILRRSAA

SEQ ID NO: 88340 - protein, 498 aa, Alteromonas sp.
  misc_feature (1)..(498): tr|A0A136HV19|A0A136HV19_9ALTE Tryptophan halogenase OS =Alteromonas sp. Nap_26 OX=1795869 GN=AXW14_15500 PE=4 SV=1
MNRPMNIVIAGGGTAGWMAANYFAHKWPSDKVKVTLVESPDIGIIGVGEGSTPTLKRFFEELKIKESDWMPKCNATYKVSIQFNDWSPSSGVKHYRHPFISQTDTFTQRAFEVNCRTRRLGLDTHVTPEDFLLNGVLAKQNKAPITPDNFPFRMEYGYHFDSALLGNYLRDVAVEKGVTHISAVISDVVLHLSGDISHLVTEKGNIEGDFFVDCTGFSSHLLQQTLGVKFNSYSDNLFNDSAVVLPTHAYETIPVETQSTALSNGWCWSIPLQNRTGNGYVYSASHLTKDKAEEELRRHLGLENSDVEARHLKMKVGQVAQHWQKNCLALGLSQGFIEPLEATALHLVQICIEYFSDTFEKSGFSSKESAAYNAFAKERFDRVRDYIVAHYKLNTRDDSDYWRANRNNMVLSDSLKSLISTWFQREDLTSEINRQNIGMHWDSVSWHCLFAGYGAFPPLEQNQPGRGDLYSEQKIKRFIQGCALNFKHHNNVLQTQQS

SEQ ID NO: 88341 - protein, 501 aa, Caulobacter sp.
  misc_feature (1)..(501): tr|B0T4L6|B0T4L6_CAUSK Tryptophan halogenase OS=Cauloba cter sp. (strain K31) OX=366602 GN=Caul_1839 PE=4 SV=1
MTDQRLRKIVIVGGGTAGWMTAAALGRFLKDGHTQVTLIESEEIGTIGVGESTIPQINIFNRMLGLDENEFVRRTKATFKLAIEFVDWKRIGHAYYHPFGPYGVDMDGVSFHAYWLRLKAMGEAADLGEYSLQALAAAQGKFMRANHQPNSPLGSIAHAYHIDAGLYARFLRDYAEDHGIRRQEGKIVEVHQRAVDGFIEAVTLQSGQRVEGDLFIDCSGFRGLLIEQTLKTGYEDWSNWLLNDRAVAVPCEPAGARAPVTRATARPAGWQWRIPLQHRLGNGYAYSSEHISEDEATAYLLANLDGAPLRDPFTLRFKAGRRKKSWNKNVVAIGLSAGFMEPLESQSIHLIQVGISRLLAMFPDKRFEQPDIDRYNRVMQFEYEKIRDFLILHFHATQRNDTPYWDYLREMPIPDYLADKIAVFESYGRVFRENEELFNDTSWFAVMIGQGLEPRGHDPMADVMSDDELRAKMKGIHGVIAKSAEVMPDHMTFIAENCAAQ

SEQ ID NO: 88342 - protein, 505 aa, Caulobacter sp.
  misc_feature (1)..(505): tr|B0T4L9|B0T4L9_CAUSK Tryptophan halogenase OS=Cauloba cter sp. (strain K31) OX=366602 GN=Caul_1842 PE=4 SV=1
MTDRAVRNILIVGGGTAGWMTAAALAAKLAGLPIAIRLVESAEIGTVGVGEATVPHIRHFNAALGLDEADFMRKTQATYKLGIEFRGWGKPGDSYIHPFGAYGAPIGGVGFHHHWLRARQAGDPTPLEAYSLPIMAARQGRFAPPSPDPRALASTYSYAYQFDAGLYAAYLRAYAETRGVVRTEGKVADVALRGEDGFIEAITMENGERIEADLFIDCSGFRGLLIEQSLKTGYEDWTRWLPCDRAAAVPCDTVERSTPYTRCTVDMAGWRWRIPLQHRVGNGYVYCSGHISDDEAAAALLAGLEGPAQAEPRFLRFVTGRRKKQWNKNCVAIGLASGFLEPLESTSIHLIQVAVTTLLELFPERDCAQADQDEYNRVMTLEFERIRDFLVLHYHANQRTDAPFWNERRTMSIPDSLAYKMDLFRDRGVVVKYRDGFFLEPSWLAVYLGQNILPAAYDPVSDGVPTAALTRRLTAIRDSIADTVRTLPTHDDWIARFCAATPAAA

SEQ ID NO: 88343 - protein, 516 aa, Mitsuaria sp.
  misc_feature (1)..(516): tr|A0A1I6IWR7|A0A1I6IWR7_9BURK Tryptophan halogenase OS =Mitsuaria sp. PDC51 OX=1881035 GN=SAMN05428960_0343 PE =4 SV=1
MSFTPPTPSVPRSPVRRVVIAGGGTAGWMMAACIAKHLGKQLDIRLVESDEIGTVGVGEATIPTMLTFHQLLGLDEREFMAATQATIKLGIQFEGWRDPDTRYIHAFGSTGIDHWTAGFQHFWMKGRERGMASDYGDYCLELRAAQQNRFAHLPGDGINYAFHLDASLYGAFLRRFSEGFGVRRIEGRIAEVLLRPDGDLRALKLQDGSEVEGDLFIDCTGMRSVLLGQTLGVGYQDWSHWLPCDSAIALQTASVRDAVPYTRAIAHPWGWQWQIPLQHRVGNGVVFSSRYTDDDTARAALLGNIEGEVLTPHRVIRFKPGQRDVVWQRNCVAVGLASGFLEPLESTSIHLIQRSAIRLLQMFPKDGIRQSDVDEYNAQMRHELEHIRDFIVLHYHLQQRTDSPMWRDLREMSVPASLQHRLDLFRESGRVFRGPNELFTENSWIQVMLGQGLMPEQHHPTADLMSDRELAGFLGGIKARIDQTVQQMPGHQQYIARYAPGTQWQMPQVPQAPVTA

SEQ ID NO: 88344 - protein, 495 aa, Duganella sp.
  misc_feature (1)..(495): tr|A0A1H8BC38|A0A1H8BC38_9BURK Tryptophan halogenase OS =Duganella sp. CF402 OX=1855289 GN=SAMN05216319_4787 PE =4 SV=1
MQNVRRVVIAGGGTAGWMAAAALSKTLGKVIDLTLVESDEIATVGVGEATIPTMITFHNLLELSEPEFMAATQATFKLGISFENWRDVNQDYIHSFGTTGTDHWSAGFQHFWRKGVAHGLASDYGDYCRELKASLLDRFAHLPDNGMNYAYHLDAGLYARYLRKFSEPLGCKRIEGKIVQVNTNPANGYISSLTMADGSQIEGDLFIDCSGFRGLLIGQTLGVEYEDWSQWLLCDSALAVQTASTSALPPLTRAIAHGSGWQWRIPLQHRVGNGLVYSSKHMDDETAHQTLMGNLAGEPLMNPRPIRFTPGQRVQTWRKNCVAIGLSSGFLEPIESTSIHMIQRSLIRLLQVFPANGPLCQSDIDEFNTQAATEVHHIRDFIIAHYKITNRRDTQFWRDCAALEVPPSLRHRIDLFRESGKVFKAAHELFAENSWIQVMLGQGILPERYHPIADRMGEQELAYFLNNIKSSVSTLANQLPSHAEYIQRYCRAQPL

SEQ ID NO: 88345 - protein, 533 aa, Caulobacter sp.
  misc_feature (1)..(533): tr|A0A1I3X7U8|A0A1I3X7U8_9CAUL Tryptophan halogenase OS =Caulobacter sp. UNC279MFTsu5.1 OX=1502775 GN=SAMN02799 626_03552 PE=4 SV=1
MGVSDRPINDILIVGGGTAGWMTAAYLARRLGSTRPDGVRITLIESSEIGIIGVGEGTFPTIQNTMRTLGVDEARFMREAGAAFKQGIRFVDWKTAPQGGVHSCYYHPFAQPRLLNGGLDLAPYWLMGEAGNIPFSDAVTLQDKVCDAMRGPKRLDDPQYGGPMAYAYHFDAGKLATLLRDVGKATGVKHLLGNVLAVNKADDGSIASVTTREHGDLVADLYIDCTGFAGALIGEAMGGAWIDRGDTLFVDRALALQVPYDRPDAPVATTTISTAHEAGWTWDIGLPDRRGTGYVYSSRHTTDDRAEQVLRGYVGRAGDGLTPRLLKLKVGHRDRHWIGNCVAVGLSGGFLEPLESTGIVLIEAAAYMLARNLPRRGGMEAAARQFNAAMTDRYLRAIDFIKLHYCLSRRTDNSFWTDNADPASIPGTLRDHLAMWRHRPPNVFDFPNLHESFKYFNYQYILYGMGFETTVDPAAHVHGGLARADFARVREAGLRAAASLPDHRALLTDVYARGFSTKVPDLATAEAGEAPRR

SEQ ID NO: 88346 - protein, 506 aa, Caulobacter sp.
  misc_feature (1)..(506): tr|B0T4L7|B0T4L7_CAUSK Tryptophan halogenase OS=Cauloba cter sp. (strain K31) OX=366602 GN=Caul_1840 PE=4 SV=1
MTHAPVRKVLVLGGGTAGWMTAAALAKVLRGQVEVTLIESDQIATVGVGEATIPPILTFNAMLGLDEREFMRATKASFKLGIEFVDWTRLGDRYMHPFGTFGLDIEAIKFHQVWRKLRDQVGPIEDFNLAAVAAKQNRFAMPDRDPAKVLSSLKYAFHFDAGLYARFLRGFAEARGATRIEGKVADVALRGEDGFIQSVTLEDGRTFEADLFIDCTGFRALLIGQTLGGGYKDWSHWLPNDRAVAIPCGAGGDGLTPYTRATADKAGWRWRIPLQHRTGNGYVYSSAHISDDDALAALIAGLDGPAQAEPNFLRFQAGRRDRAWIKNCVAIGLSSGFLEPLESTSIHLIQAGITKLLALFPDKGFDSLEIDEYNRLTALQVELVRDFIILHFKATERSDTPYWDYVRTMDIPESLRRKIELFAGRGRLFQSDYDLFAEPSWIAVLMGQGITPRQYDPLVDALPEPALVQRLQRMSDLIGQTAQAMPSHQAFIARYCAADAVANIPA

SEQ ID NO: 88347 - protein, 468 aa, Gammaproteobacteria bacterium
  misc_feature (1)..(468): tr|A0A2N2A7N4|A0A2N2A7N4_9GAMM Tryptophan halogenase OS =Gammaproteobacteria bacterium HGW-Gammaproteobacteria- 1 OX=2013791 GN=CVV05_20260 PE=4 SV=1
MAANLLAHRWRERNVDITLLESPEIGIVGVGEGSTPLLGTFFETLGIADSDWMPKCNATYKNGIRFSGWSQVKGYESYFHPFASAIDIHGQAAFFMHCAMRRNGYDVAANPDRFYLAAELARQRLAPLAAHHFPFRILHGYHFDAHLVGALLGEFAQRNGVDHRQGKVVAVERDEDGAVIAVITEDARRIEGDFFVDCSGFRSLIVQQALAVPFKPFSDNLFNDRAVVLPTPTDPTGTNSQTISTALRNGWVWNIPLRHRHGNGYVYSSRFCTPDQAEQELREHLGLLDDPVGARHLQMRVGRVEQVWEATALHLVQTTLESFIEHVERDGDLDARRRSFNDGIARDFDGVRDYIVCHYRMNRRTDTEYWRANASHDQLSDSLKAILTCWFTGQNLEHEIARQGIADIYPAMSWHCLLAGYGQFPDVAKLRAPEPGIGKADMAAIDDFRSRCALNFRDHAQVLAEMAA

SEQ ID NO: 88348 - protein, 506 aa, Rhodanobacter sp.
  misc_feature (1)..(506): tr|A0A1M7EEY9|A0A1M7EEY9_9GAMM Tryptophan halogenase OS =Rhodanobacter sp. OK091 OX=1881037 GN=SAMN05428972_184 5 PE=4 SV=1
MIDSRIRNIVIVGGGTAGWMAAAAFAKVLGADYSIRLVESEEIGTVGVGEGTVPHLKLFNNLLGIDDVEFVKNTQGTFKLGVQFNDWGRLGDSYVHGFGTIGHDVGLLPFHQYWIKARQMGRAADIGAYSLNTVAAPRGRFMPSATDAPPGSPLANVAYAYHFDAGRYARYLRGYAEQRGVCRTEGKVAQTVLHPDSGFVEAIVLESGEQIDGELFIDCSGFRGLLIEQALHTGYLDFSHWLPCDRALAVACEKVGPPTPYTRASARPAGWQWRIPLQHRTGNGYVYSSAHVSDDEATATLLGHLDGKPIGEPRLLRFTTGVRRQAWNRNVVALGLAGGFMEPLESTSIYMIQSGIARLLNLFPQRDFSPVLIERYNAQSRFEYEHIRDFLILHYHATERDDTPFWNQCRTMSIPPQLIDNIRLFRDSGRFFRDGEEMFAVVSWVQVMLGQHIVPQNYHPLVDQMPDAELAEFMASVGHVVTSCVDAMPPHQAFIDRCCRASALVA

SEQ ID NO: 88349 - protein, 499 aa, Duganella sp.
  misc_feature (1)..(499): tr|A0A1H8DC84|A0A1H8DC84_9BURK Tryptophan halogenase OS =Duganella sp. CF402 OX=1855289 GN=SAMN05216319_5288 PE =4 SV=1
METIKQVVIVGGGTAGWMTAAALARVLGDKVQLTLVESDDIGTVGVGESTIPMIKLFNQVLGIDEDEFMRATQATFKLGIEFRDWGRVGDQYMHGFGIFGQDLATLPFYQYWLRLQQAGKAPPLENYSINRMAARAGKFMRADRSHGNSPLADIVHAFHFDAGLYARYLRQYSEARGVRRIEGKVADVLTRASDGHVDALRMANGDLIGGELFIDCSGFRGLLIEEALHTGFEDWSHWLPCDRAWAVPCELGADLLPYTRASARPAGWQWRIGLQHRTGNGHVYSSKFMGDAGARQLLLDSLDGRPLAEPKLLRFTAGKRKQVWNKNVVAVGLSSGFLEPLESTSIHLVQSTIARLISFFPDRGFSAPDIAEFNRQCAFEIERIRDFIILHYHATERDDTPFWNYVRTMDIPDTLREKMELWRTRGRIVRVDNELFAEVGWLQVLEGQRVPAAGHHPLAQLLPEQEIADYLGDIASVIGKCVDQMPSHAAFIKARCAAN

SEQ ID NO: 88350 - protein, 521 aa, Xanthomonas citri
  misc_feature (1)..(521): tr|D4T1T1|D4T1T1_XANCI Tryptophan halogenase OS=Xanthom onas citri pv. aurantifolii str. ICPB 10535 OX=427082 G N=prnA PE=4 SV=1
MTDTTPSDPHQRPVRRVVIAGGGTAGWMAAAALSKLLGRHLHITLVESDEIGTVGVGEATIPSLVTFHRLLEIDEAAFMAATQATIKLGIAFEHWRDVDQHYIHSFGHAGTDHWSAGFQHFWLKGRQRGVARDFGDYCLELRAAQEGRFAHLPNGGMNYAYHLDAGLYARFLRRFSEGFGVTRVEGRIGQVETDAQSGFLTALTLQDGMRVEGDLFLDCTGFAGLLIGKTLGVGSDDWSRWLFADSALAVQTESVGPPVTYTRSRADQAGWMWRIPLQHRVGNGIVYSSRYMDQDGARAVLERHLTGRALTEPRPLRFTPNQRHRVWEKNCVALGLASGFLEPLESTNIHLIQRGIIRLLQTFPQVIIAVDIAEYNRQAAQEITHIRDFVILHYHATDRRDTPFWRDCAAMDIPDSLRHRVELFRQSGRVFHQANELFAENSWVQVMLGQGVVPQQHHPVADLMGDAELSRFLETIRTRVEAALVRLPAHADFLQRYCPAPPLPEPAARVPAPPVMATPAG

SEQ ID NO: 88351 - protein, 519 aa, Caulobacter sp.
  misc_feature (1)..(519): tr|A0A1I3TJY5|A0A1I3TJY5_9CAUL Glycine/D-amino acid oxi dase OS=Caulobacter sp. UNC279MFTsu5.1 OX=1502775 GN=SA MN02799626_02379 PE=4 SV=1
MDRRRRILIVGGGTAGWLTAAYLAKSLRIAEQAHLEITLLESPEVGIIGVGEATFPTIRTTLQFLGIDEARFIRETSATFKQGIRFNDWAWAPKEDGERHQYFHPFEAPFSTDGASLAPYWLLQDEATRAPFAEAMTIQARVADAQRAPKRPHEGNFSGPLNYAYHFDAAKLAQVLAERARELGVRHLQGRLTQVELDATGAIDHIVCAEHGRMEAELYIDCTGFHAELIGQALKAPFKSARPILFADRALACKIPYDRPDAPIQSFTVATAHEAGWTWDIGLNGARGVGCVYSSDHIDDDRARAILGDYVGRGVDIAPRALAFEAGYRTKQWVKNCVSVGLSAGFLEPLESTGVVLIEAAVAIIAELFPHNGPINAPAFRFNELMTARFDNIITFLKLHYCLSQRTEPFWRQNADPASMPERLVDLLEQWRWRPPTRYDFILDLETFAFFNYQYILYGMGFKTDLSPGRSEFPDVAAAEKLFAKIRNFGERATHDLPSHRDLIAQINRFGFDRSLEPA

SEQ ID NO: 88352 - protein, 514 aa, Caulobacter sp.
  misc_feature (1)..(514): tr|B0SVR5|B0SVR5_CAUSK Tryptophan halogenase OS=Cauloba cter sp. (strain K31) OX=366602 GN=Caul_2406 PE=4 SV=1
MVRPVKNIVIVGGGTAGWLTAGLIAAKHKARQATGFTVTLVESPNTPIIGVGEGTWPTLRTSLDKIGVSETDFFRECDAAFKQGAKFARWTTGAADDAYYHPLMLPQSFSQVNLVPHWLVGGAGRSFCDAVTPQGRLCDEGLAPKTITAAPYQGAANYAYHLDAGKFAPFLQRHCCDKLGVRHVLADVESVAMTEDGDIRGVVTEQHGEIQGDLFVDCTGFRALLLGETLGVPFRGCGDVLFCDTALAIQVPYETETSPISSHTISTAQSAGWIWDIGLPTRRGVGHVYSSRHISDEHAERELRAYIGPAGHNLPARKIAIRSGHRETFWKRNCVAVGLAAGFLEPLEASAIVLIELSAKLIAEQMPACREVMDIVAARFNATTHYRWGRIIDFLKLHYVLSQRSDSAFWRDNRARETIPDRLADLLLLWRHQPPWLHDEFDRADEIFPAASYQYVLYGMGFRTQIEPESLADERAIAERAWRETAAQTERLRATLPHHRDLIRKIVEHGLQPV

SEQ ID NO: 88353 - protein, 481 aa, Caulobacter sp.
  misc_feature (1)..(481): tr|B0T4L8|B0T4L8_CAUSK Tryptophan halogenase OS=Cauloba cter sp. (strain K31) OX=366602 GN=Caul_1841 PE=4 SV=1
MTGRSLKSVAIVGGGVAGWMTACALARVLPADCAIRVVETAAAAPRGALSTQPTLRAFHGLLGLDEPALMRAARGTFKLGSRFSGWTVADHVEGFSDTGANLDGVAFHHHWLRARERGEAGRYEDYNLAAVAGRLGRFAPPSEDPRSVLSTLSYGLHLDAAGYVAALRAAAGRVDRMAGEIVEVTPNADGGLDTVRLASGERVAADLFIDTTPDGRLIGSNAVGAWIDWSSWLPCDRLALREVAARLEPPPLTEVEAIPEGWLRRIPLRGGDAVALAYNSRLTSDDAAREILGGEATIAPLSNGRRAQAWVGNCLAIGPAAGQLEPLNGDDAHLVQSGVSRLIALLPTADGSPLAATEYNRLMAEELDRTRDTAAFRYAVAARTDPVWTLARQAPPSPALAYKLSQFESRGRVVMYDEETFVEGAWLAAFLGHGILPRRHDRLADRLPADQADAALARLRGLIRQAALAMPTQAQALKDPA

SEQ ID NO: 88354 - protein, 226 aa, Arthrobacter sp.
  misc_feature (1)..(226): tr|A0A0K2RK78|A0A0K2RK78_9MICC Tryptophan 2-halogenase OS=Arthrobacter sp. Hiyo8 OX=1588023 GN=AHiyo8_35290 PE =4 SV=1
MNQPESTTCVVVGGGPAGVMLGLLLARAGVEVTVLEKHADFLRDFRGDTVHASTIRLLDELGLGEGFRALPQSKLGNFKLPAGGKEVTLADFDRLKPPYDYVAMVPQWDLLNFLVDAAEQEPQFTLRMNTEATDLLYDDGGKVAGVAYRTRDAATGVETGTGELRATLTVACDGRGSVLRQKAGLVPASSPCRSTPGGSGSPGTRTSRNSWPRSCPASPVPMSSSA

SEQ ID NO: 88355 - protein, 252 aa, Albimonas pacifica
  misc_feature (1)..(252): tr|A0A1I3HUN8|A0A1I3HUN8_9RHOB Tryptophan halogenase OS =Albimonas pacifica OX=1114924 GN=SAMN05216258_106184 P E=4 SV=1
MTAHAPLAHALAPGDELAERLRAVVAGFGLPFGAERSVKLRAGEARHGRALFSLALGPDPRGQLLAAAEALGAPQAAVAPLLPWAGAASHLHVGAEPPATAKLYLEFAAPPPRRADLVFLAAKWRVDGAAPRALATYSRRDEPLESLLARLAPAPLHAPLRALAARTQTPPRALEVAEPPSPRLSLDLNVYDADLTLAEAAAEIRALHAALSAPGADALLAAHGAEPLGHVAAGVSRDGAPFATIYFGGGPG

SEQ ID NO: 88356 - protein, 518 aa, Caulobacter sp.
  misc_feature (1)..(518): tr|B0T3U1|B0T3U1_CAUSK Tryptophan halogenase OS=Cauloba cter sp. (strain K31) OX=366602 GN=Caul_3278 PE=4 SV=1
MNRIEKVVILGGGTAGWMTAAALSRRLGRSLRIDLVESDAIGTVGVGEATIPTIHWFNDLIGLDEAAFVRETQASFKLGIEFVDWRRPGHRYFHPFGRHGVELDQIPFHQHWLKARADGGQHPLAAFSLATTLAEANRFAKPVADPRSILSTLGYAYHFDATLYAAHLRRLAEAGGVVRHEGKVATVERDPQSGFVTALVTDTGIRVEGELFIDCSGFRAMLIGETMGAEFQDWSHWLPCDRAVAAPCARVAETTPYTRSTLRPAGWQWRIPLQHRTGNGYVYASALVSDDEAAATLLRNLDGDLLADPRFLRFQAGFRRESWRGNVVAIGLSSGFLEPLESTSIHLIQSGVAKLITLFPDRDCDPRLAHQFNSLFARDMDGIRDFLILHYHATEGHNAPLWRQARAMALPDSLTDKLAHYRRSGRLMLTPDELFREASWLAVLEGQGVSAQGFAPLADTLDSAQNLRQLNDIASLIARVAPTLPHHDAAISELIRSAGAPLTSETAAPNSTDRTSER

SEQ ID NO: 88357 - protein, 495 aa, Alteromonas marina
  misc_feature (1)..(495): tr|A0A0B3YF44|A0A0B3YF44_9ALTE Tryptophan halogenase OS =Alteromonas marina OX=203795 GN=RJ41_10725 PE=4 SV=1
MNKTVKNVVIVGGGTAGWISAAVIKRLIGAGVNVTLIESEEIGTVGVGEATIPPIITLNNVMGIDEKEFLRETNATMKLAIKFENWRVEGESYFHTFGAPGKSYAFCHFHHYFKRAQELGLSDSIWEYDLNYLACKAGKFAHIKSPDPIIEMPYAYHFDASLYARFLRKKCEAMGVTRKEGIITDVKQDADSGFITGVTLKDGAHIEGDLFIDCSGFKGLLTQQTLNTGYEDWSHWLPCDRAVAMPSERHEQTRPYTRSIAHSAGWQWRIPLQHRNGNGLVYSSNYYSDDKALDILSNNLDTKPLADPNFIRFKTGRRRKQWNKNVVAVGLSSGFLEPLESTSIHLIQSAVVRLIHLFPHEGFKQYQIDEYNKQSQLEYEQIRDFIILHYHVNERTDSHFWRDLREMEVPDSLTHKIELFRASGNLFREQNDLFLESSWLQVLLGQGIAQGDYHPLANALSEQKLQELMQNIKRIKNEPIGKIATHDDFLKQFCG

SEQ ID NO: 88358 - protein, 522 aa, Alteromonas marina
  misc_feature (1)..(522): tr|A0A0B3YFZ2|A0A0B3YFZ2_9ALTE Tryptophan halogenase OS =Alteromonas marina OX=203795 GN=RJ41_09935 PE=4 SV=1
MHQANSPLRRIVVVGGGAAGWLTASIIAVTHKHDDNISVTLVESPDVSILGVGEGTWPTMRSTLLKIGISEETFLAQCNASFKQGTSFHNWRSDTIEHQYYHPFSLPFRYFESDVAAWWQSYAAEQDFAHAVCSQAALCDHHLAPKQRQTPAYAGIANYGYHLDANKFAALLQKHATTVLGVQHIVDHVDDVVGSSSEPIAAIVGREHGNITGDLFIDCTGFAARLIGQHYGVPLTSCSNVLANDSAIAIQAPYVDSSVDIASTTHSTAQDSGWIWDIGLPSRKGVGYVYSSAHCSEDEARATLETYLKHDKKTADVDVSKARKITFSPGYRKTLWVENCVAIGTSAGFLEPLEASALVMIELSATHIAKQLPRTYKECQAAGRQFNQAFEKKWERIVDFLKLHYVLSEREASAYWRDMRNQESCSTQLQDWLTLWKSRSPISSDFELREELFPAASYLFVLYGMGFRSQYNDVYQANLHTPEQRQAYAKHVQSIQQQLSGLPTNRQFLNQVAQSQGLSMHY

SEQ ID NO: 88359 - protein, 530 aa, Massilia sp.
  misc_feature (1)..(530): tr|A0A4Y9SCL6|A0A4Y9SCL6_9BURK Tryptophan 7-halogenase OS=Massilia sp. MC02 OX=2561931 GN=E4L96_10385 PE=4 SV= 1
MARGCCAASCSSASTDNTHNRIQDRRPIVQNSSTPAGRPVRRVVIAGGGTAGWMAAAALSRILGKRLDLTLVESDEIGTVGVGEATIPTLLNFHNILEINEREFMAATMATFKLGISFENWRNVNEDYIHSFGLTGTDHWTAGFQHFWMKGRERGLASDYGDYCLELKAAQALKFAHLPNNGMNYAYHMDASRYSRFLRTMSEHHGTKRVEGKIAKVNTDAATGHITSLTLDSGSTIEGDLFIDCTGFRALLIGQTMGVPYEDWSHWLFNDSAIAVQTDATGPAVPMTRSIAHASGWQWRIPLQHRMGNGVVFSSRYIEDDAAKSLLLSTVAGEPLTDPRVIRFKPGQRPETWKGNCVALGLSSGFLEPIESTSIHLIQRGIIRLMQMFPTDGISAHDVAEFNRQSARELEHIRDFIILHYKVTNRVDSPYWRAAREMEVPASLQHRIDLFRETGRVFREPTELFAENSWIQVMLGQGIMPRTHHQTADLMGDHELSGFLNGIRDTIARTVAQLPPHQAYVQQYCGIPKM

SEQ ID NO: 88360 - protein, 504 aa, Caulobacter sp.
  misc_feature (1)..(504): tr|B0T7T4|B0T7T4_CAUSK Tryptophan halogenase OS=Cauloba cter sp. (strain K31) OX=366602 GN=Caul_2144 PE=4 SV=1
MAHLNKIVIVGGGSAGWICAAMLSHYFQNGPTQVELIESEEIGTIGVGESTIPPFLQLIRTLGINEQEFIQETQAAFKLGIRFENWLEKGDVYYHPFGQIGGPLEVNEFYQCWLRAKANGHPSSLQDFAPATVMAAAGKFMLPAKAQRTMIANANYALHVDARLVALYLRKFAEARGVKRTEGIVTDVATRADGGVEKVIMKDGREVAGDFFIDCSGFRALLIGKTLNEPFRDWSDVLLCDRAIVAQTENIGPPHPYTLVQAQDFGWRWRIPLQHRSGNGYVFASQYLSDDEATATLLSQLQGEIVLGPSVIPFKTGVRERPWVKNVVSIGLSCGFIEPLESTALHLIYKGMDYLLRFMPDMDADQTLAAEYNRRMVADYEEIRDFIVLHYVTTRRDDTPFWRAYQQVEPPESLKARIALFKAAGVLRDGVDDMFRAPSWQSVMEGMGVRPERYQQLVDRIPLSVIMNLMDKSAPMLADFVKTLPSHQEFLDAYCPAEPFKRTA

SEQ ID NO: 88361 - protein, 557 aa, Alteromonas marina
  misc_feature (1)..(557): tr|A0A0B3Y522|A0A0B3Y522_9ALTE Tryptophan halogenase OS =Alteromonas marina OX=203795 GN=RJ41_12465 PE=4 SV=1
MNNSQNQCGLHRVVIVGGGTAGWLAAGVFGAKLSTKHSVTLVESPTVSSIGVGEGSWPSLRDTLLDIGISESEFLTLCQGAFKQGSSFVNWRKNAHSYYHPFTVPAAYNELDIHACWKALAPNTPYQDAFSLQAAMCVAGKAPKQIATPDYAHVLNYGYHFDATKLADLLKQHCVDKLNVDYVSGHIGSIKSSSDGYIEKLITECGKEIVGDLFIDCSGSSGLLIDKHFNVPWIPVKRTMLNDRAVALQVPYSDTDTEIKSTTVATAQTCGWTWDIALQHRRGVGLVYCSQFTNEEQAKQVLIDYVRERYPSAQDAELSFRTLSFEPGYRSQFWVKNCLSLGMSSGFVEPLEASAIAMVELGLRMLCEAFPHNKKHMEIVSKRYNSRFAYRWQRVIDFLKLHYVLSDREEPYWIAQRDKASIPDSLAELLELWKYQSPSRLDLIENEEIFPSASYQYVLYGMGYSTSAPLLRLSEANKRKALHILKTLQRTKNAYLKGLPSNRVLLNDIAKRYNNEKQHVPSHAQCEKNEHASASSCKDIKNTSDKKDTYYDRIGFR

SEQ ID NO: 88362 - protein, 540 aa, Streptomyces sp.
  misc_feature (1)..(540): tr|A0A1Q5MKG7|A0A1Q5MKG7_9ACTN Tryptophan halogenase OS =Streptomyces sp. CB00455 OX=1703927 GN=AMK16_29650 PE= 4 SV=1
MPRSAADTRVRSVVVLGGGAAGWMTAAYLGKALQGTVEITLLESGPAPAVSLGVATVPSLQHAFFDFLGINEEEWMRKCDASFQMAVRFVNWRTEGAGEARARALPRPSQGPDHFYHPFGLLPDYDQTPLSHYWFKRTYEGTTQEPFDYACFREPPVMDAKKSPRWLDGRTATRYAWHFDAGLIAGFLRDFAVAKLGVRHVRDELAGVVKDARGFVTGLRTQGGPVIHGDLFVDCSGFRGLLINEAMAEPFIAMGDHLLGDSVITTDVPHDDAAHGVEPYTSAIAMKAGWTWKIPMPGRFGTGYVYSSRFAGREEATGELCALWGLDPATTRVGHARLRVGRGERAWVKNVVAIGPSSCFLEPLEPTGIHFITTAVHQLVRHFPDLTFQAALVERFNREIRVMFDDTRDFVQAHFHYAPRNDTPFWRAGKELALPQGIQEKVAAYRAGLPIDAPVTDESAYYGLDSGSRSAWTNGSYYCVFAGLGLMPDAPLPALAHKPESVAGAEPLFDTVKRQQRNLLETLPSTYEYLRQLHGDPRFV

SEQ ID NO: 88363 - protein, 503 aa, Duganella sp.
  misc_feature (1)..(503): tr|A0A1H7XY71|A0A1H7XY71_9BURK Tryptophan halogenase OS =Duganella sp. CF402 OX=1855289 GN=SAMN05216319_3826 PE =4 SV=1
MNVTTPPKKIIIVGGGSAGWMTALMYGDALIKQGVEITVLESPTVGVIGVGEGSTPALKRYFDSLGISEAEWMPACHATYKSGITFDGWSTKPGYESYFHQFATMVDNLTLPNFMENVHARQRGAAIDARPNRYFLSSRLSDDCLAPHAAENFPFFTTYGYHFDATLLGQFLHQRAAALGVQHKVCHVTHAVMNERGDIAAVATQEGEQLAADFFIDCSGFSALLIGKTLETPFVSYADNLFNDSAIAMPSEIGDKIPTQTVSTAMKHGWAWKIPLTNRYGNGYVYSSSFVSADEAEHELRSKLGLLESDVQARHLKMKLGRVTKHWNRNVLAVGLSQGFLEPLEATALYLTQMTAAIFLLFLEKGDLSDKAQDLYNQEIHDYFDGHRDYIVAHYKTNSRSDTPYWRANAENLGSVSDSLKHIFQTWIEGKDLAAEIRRQNIERYYPVGSWYALLAGMGTFPEIGQAPNTEALAPLDDFMRRCALNFRDHRTVLNELAQQAGM

SEQ ID NO: 88364 - protein, 513 aa, Caulobacter sp.
  misc_feature (1)..(513): tr|A0A1I3XZ84|A0A1I3XZ84_9CAUL Tryptophan halogenase OS =Caulobacter sp. UNC279MFTsu5.1 OX=1502775 GN=SAMN02799 626_03793 PE=4 SV=1
MRPIKNIVIVGGGTAGWLTAGIIAAKHRARAATGFTVTLVESPNTPIIGVGEGTWPTLRTTLATIGVSETDFFRECDAAFKQGAKFARWTTGAADDAYYHPLMLPQGFSQVNLAAHWLAGDGTQSFCDAVTPQGRLCDDGLAPKTITAGPYQGVANYAYHLDAGKFAPFLQRHCCDKLGVRHVLADVRGVALTEDGDIRGVVTEQCGEIQGDLFVDCTGFRSLLLGETLGVPFRDCGNVLFCDTALAIQVPYESETSPIASHTISTAQSAGWIWDIGLPTRRGVGHVYSSRYISDEDAERELRAYIGPAARDLSARKIPIRSGHRETFWKRNCVAVGLAAGFLEPLEASAIVLIELSAKMIAMQMPACREVMDVVASRFNATTHYRWGRIIDFLKLHYVLSQRSDTAFWRDNRDPETVPERLADLLRLWRHQPPWLHDEFDRVEEVFPTASYQYVLYGMGFRTEIEPEALADERSMAERALRENAVQTERLRANLPRHRDLIRKIVEHGLQPV

SEQ ID NO: 88365 - protein, 512 aa, Caulobacter sp.
  misc_feature (1)..(512): tr|B0T7T3|B0T7T3_CAUSK Tryptophan halogenase OS=Cauloba cter sp. (strain K31) OX=366602 GN=Caul_2143 PE=4 SV=1
MQETMHDRRIRDIVIVGGGTAGWMAAASLKQHFGNAPIGITLIESSEIGAIGVGEATIPTIRRFYQSLGLSDIDVLRATGGTCKLGIRFNDWLRPGSSFIHPFGLYGQDLKGVSFHHYWMRLRALGEDAPIGDYSLGASLATAGKFTTPSRNPPSALSVFDWAVHFDASLFARLMRQVAEQAGVKRIDARIVKTNLRGEDGFIESVTLDTGASVAGDLFIDCSGFRGLLIEEALHTGYEDWSQWLLCDSALAVQSEGQGAPPPYTDVTARPAGWQWRIPLQHRWGNGYVYSSRHTSDENAREVLTASLDERLLHEPRKIGFHPGRRLKAWNKNCIALGLASGFLEPLESTSIALIETGIEKIKQLFPNRDFDPRIVDEFNEMSRLEMERVRDFIILHYKANQRADDPTGFWTHCRQMAVPDTLQKKIDLWRVQGHFIRYRWEMFSQPSWLAIYAGFEMLPETYDLSVDGFDAGQLSEALAEMRKAVADTVASTRTHGDFIEQYARPRPVAAE

SEQ ID NO: 88366 - protein, 523 aa, Duganella sp.
  misc_feature (1)..(523): tr|A0A1H7V6D7|A0A1H7V6D7_9BURK Tryptophan halogenase OS =Duganella sp. CF402 OX=1855289 GN=SAMN05216319_3467 PE =4 SV=1
MKTLPKDGVKQVLIVGGGTAGWLTACFLAKQLGTGADGAVSITLVESKEIGIIGVGEGTFPSIRGTLATIGIDEARFIRECNGTFKQGIRFNDWVREPGTPGADHYFHPFSLPSQRPGGPELLPYWLQGAAGKDVAFAAAATMQKRVADAAHAPKRPSDADFMGPLNYAYHFDAGKFAALLSTHAQSLGVKHVQATVERVALDGDGAIGAVHTKEAGVLTADLYIDCTGFRAALIGEALGTSFRNINDVLFVDRALAMQVPYERPDAPIASYTIAQAHEAGWTWDIGLHERRGVGYVYSSRYTDDARAEQVLRNYIGKQADGLNPRQLKLNVGYRDQHWVKNCVAVGLSGGFLEPLESSGIGLIETAAYLVSYLFPHDGDFEPVAKVFNEMMKARYERIVDFVKLHYCLTQRKDHQFWIDNADMKSVPQSLQDKLAMWRKRAPQRMDFVVDYEMYPPSSWQYVLYGMEYPTELYANARTLPRTEEARHEFAMIQQMSQRALADLPTHRAMVEHLARRGERKIA

SEQ ID NO: 88367 - protein, 496 aa, Pseudoalteromonas sp.
  misc_feature (1)..(496): tr|A0A2N5LQ00|A0A2N5LQ00_9GAMM Tryptophan halogenase OS =Pseudoalteromonas sp. MelDa3 OX=888435 GN=CXF89_16865 PE=4 SV=1
MKPIKHVVIAGGGTAGWITAALLNKVLGKVINITLIESSAIGTVGVGEATIPPIIQLNNALGINEQDFINATNASIKLGIEFENWKTPGHSYMHAFGSLGKDFPFCDFYNFWVKGQITGCEDDLWDFSLNYQAAKQHKFAPLNTIPNTQLPGLSYAYHFDATLYAEYLKKLAISRGVKHIDAKISHVEQCDTGNVKSLALDNDSQISGDLFIDCTGLRALLIEQTLNTGFIDWSHYLPCDSAVAVQTKSTHELKPYTRSIAHSAGWQWQIPLQNRIGNGLVYCSRYLSDDDAKQLLLKSLPAEPITEPRIIKFKTGRRLKQWHKNVVSVGLSSGFLEPLESTSIHLIQTAVTRLIKLFPHNGISDALVTEFNKQSVIELEHIRDFIILHYKLTEREDSPFWRQCMQMDIPNSLTHKLNLFKHTGKVIREDDELFAEVAWQQVMIGQGLISDDYNSIVDSLSDDQLSDLFSTLKTLISSTVTQLPTHQNFLASIKKV

SEQ ID NO: 88368 - protein, 506 aa, Parvularcula sp.
  misc_feature (1)..(506): tr|A0A371RKZ1|A0A371RKZ1_9PROT Tryptophan 7-halogenase OS=Parvularcula sp. SM1705 OX=2292771 GN=DX908_13110 PE =4 SV=1
MSEPLRRIVILGGGSAGWMTAAALGNAIHKDCEVTLVESEAIGTVGVGEATIPPIRRFNRSIGVNEKEFVQATGATFKLGIQFIDWSRLGHSYFHPFGTFGSDFDSIPLYQYWLEARREGIAGPLDEYCMAWGAASRLKFTPPVSDRRNIQSTFDYAYHFDAGLYAGFLRRFAEAKGIKRREGQITKLDVDGSTGRLTAVHLDNGDRLEADFFVDCTGFRSLALGQTLGVGYQDWTHWLPCNRAVAVPCAHGGEFTPYTRSIARGAGWQWRIPLQHRIGNGHVYSSAHLTDDEAHEILLANLDGEAQGEPRLLRFTTGRRHYFWHKNVVAIGLAAGFMEPLESTSLHLIQSGIQRLLALFPDRHMDPLLAEEYNRITSLEYERIRDFLILHYHATSRDDTPFWRYCSNMTIPDSLSYKLAHFRRDGRIVADQYDLFVNASWLSVYVGQDEFPDRPDPMMQLRNRPEAFRNLESVHKAIKDAAEAMPRHDEFIARNCPADTGLVAAE

SEQ ID NO: 88369 - protein, 515 aa, Caulobacter sp.
  misc_feature (1)..(515): tr|A0A3R8N7S5|A0A3R8N7S5_9CAUL Tryptophan 7-halogenase OS=Caulobacter sp. 602-1 OX=2492472 GN=EIK80_15640 PE=4 SV=1
MRRRRSILIVGGGTAGWLTAAYLAKALRVADQGDLTITLLESPDIGIVGVGEATFPTIRNTLRFLGVDEARFIRETSATFKQGIRFVDWAETPADGRHHSFFHPFEAPFSTEGASLAPYWLLQDEAGRAPFAEAVTIQARVADAARAPKRPHESDFAGPLNYAYHFDAAKLAQVLAERARELGVRHLRGALSETVLDETGAIARVVSPEHGDLTADLYIDCSGFRAELIGKALGSPFKSARPILFADRALACHTPYDRPDAPIQSYTVATAHEAGWTWDIGLAGARGVGCVYSSDHMDDARAEAVLRDYLGGVEAETRRIRFDAGYRPKQWIGNCVAVGLSAGFLEPLESTGVVLIEAAVAMIAELLPHNGPVSAPARRFNELMAARYDNIIVFLKLHYALSRRQEPFWRQNADPASIPERLAELLEQWRYRPPARFDFILDLETFAFFNYQYILYGMGFKTDLAAGAGEFADVAGAARLFAKIRGFADRATQDLPSHRDLIARINASGFETEPA

SEQ ID NO: 88370 - protein, 793 aa, Methylorubrum populi
  misc_feature (1)..(793): tr|A0A160PEV7|A0A160PEV7_9RHIZ Tryptophan halogenase OS =Methylorubrum populi OX=223967 GN=MPPM_2519 PE=4 SV=1
MFRSERSAPPRLVVAGGGPAGWMAAFYLKRVLRRAGWTVTLVAAAPAAGARVALATRPSFTRFLGAFDIDEAIFMRRCAATYRLASRYDDWFAEGQGHWHPFGACGPRIAGRDLFHYWMKLRESGPEEEAGSYADYAPQALMAAAGHGPRPETGRSSLSESGDYGYHLDRAGLVRFLRELALAEGVRVVAGRVREIERDLYGDVAALVLDDGRTVEGDIFLDCTGATSQLIGTALGEAWVAGNGPGDRLTRLSLPRSAEAPPFTAYRGRAEGWTASLPLADRTEHIFVHDSRTTLPDAAAEVLQRAFAGGADVTQSQLRYGRRASPWQRNVVALGAAAGAVEPLVGFDLDLVLAGLEAFLAYLPRQGEGSDVLRSAYIARLNRAQDDAVEAVAAHYVLGRRPERFWAAARAAPLPDRLADRLDLYELAGHVEPSGEALFGEGDHYLLFSGADFLPRRPFAPVDVSDGREIARLLASIRAQSVRIAQAMAPHDRLIEALHGPAPVAAPALRPAVASAGPASLRGTPEGARLADLVAGLGQPFGYERSVKASPAGLQTERFLISLHRISLGLTPGRTLDELAARLGLPERERAEAAGLIEDADILHLGYEGGASGTLYKLYVEWSSRTDAAWSGVDAAGAEPMLVHRAYKWRPEATHPPVVTLYHWPRVRGPEEIGARLTRIAGAWGAAGTPVRDTAHAILRLARDRGRGAVHYLEAREEPGLRLSYDLNLYACGLSVADAEPLLGQAFVDLGTPPQAAAAVLGERLGETLGHVAGGIGRDGRPFLTVYSGKAGA

SEQ ID NO: 88371 - protein, 504 aa, Pseudoalteromonas sp.
  misc_feature (1)..(504): tr|A0A2C6E5R9|A0A2C6E5R9_9GAMM Tryptophan halogenase OS =Pseudoalteromonas sp. GCY OX=2003316 GN=CBQ28_16790 PE =4 SV=1
MKSQKIVILGGGTAGWMAANMMAKSWADKAIEITVVESSSIGTIGVGEGSTPQFKGFMDYLGISEAEWMPACNATYKNGIRFIGWSTKPGFSSYFHPFPAQPDDYSAPAFFHNSFVRRKAIDVEGHPDHFFLATHLADLNKSPIAAESFPFEINYGYHFDSALLGQLLARKAAEFNVKHIDATITDVRKHLDGDIAALITSDGTEIAGDIFIDCSGFKSLLLQHTLGVGFESFESNLFNDAAVVIPTKQLDTIRSETQSVARQFGWSWHIPLTNRIGNGYVYSQRYCNADQAETELRAALGLLDSDVEARHIKMKVGQVKAHWSKNCIAIGLSQGFIEPLEATALHIVQETVQSFIECYQDADFTDGNRDKHNRALSERYQAIRDYIVAHYRVNSRTDTNYWLDNANNNNLSRSLYQILQTWVSGNNLSDELVRQNVEQYYPSVSWHCLLAGYGIYPEQAQLKSGNALANQHSIEKVNDFIRRCGLNFKDHRMELESFVANVHK

SEQ ID NO: 88372 - protein, 497 aa, Methyloceanibacter methanicus
  misc_feature (1)..(497): tr|A0A1E3W2W7|A0A1E3W2W7_9RHIZ Uncharacterized protein OS=Methyloceanibacter methanicus OX=1774968 GN=AUC68_03 340 PE=4 SV=1
MVMLLNQLGLSESEFFEKTDATFKVAAHFINWNQDENGKPIEFLNILNAPGALDGRQFADYFVTFDPARTAPDAGIAYVRAFSPVAEIVRGNLAPRRPGEPDFSGEVGYTYHFDATKVAAYLRDIATSRGVKHILDDVDAVNVDERGFVTSLGLRERGEFGVDLVIDCTGFRGSILQQALGEPFEPYGEHLLNDRAAVVQIPHKDPGVIAPTTRATGFSAGWNFNIPLTTRVGTGYIFSSKFLSDEEAADELLSFYGDQAKGCEPRIIPMRTGRVRNAWVKNCVALGLSGGFIEPLEATAIFMTDLGVRWLANYLPTQDFEPELATAYNRHVRQVYEEVRDFVQLHYHLNNRADTPYWKAAREDMTLSDRLQENLRVWQHVAPEDLDLGSTFLFSSPVYTLLLIAKGFYKDRRLSRASSLSRTTYQRARDAERKARPGQLEGLISHAAFLKTGGKAPAGSVMAPHAGMAPAPELAGTKIKLKSQPARPRQSRKKKRR

SEQ ID NO: 88373 - protein, 514 aa, Caulobacter sp.
  misc_feature (1)..(514): tr|A0A3R8P9C5|A0A3R8P9C5_9CAUL Tryptophan 7-halogenase OS=Caulobacter sp. 602-1 OX=2492472 GN=EIK80_11855 PE=4 SV=1
MVRPVKNIVIVGGGTAGWLTAGVIAAKHRARQSTGFTVTLVESPTTPIIGVGEGTWPTLRTTLAKIGVSETDFFRECDAAFKQGAKFARWTTGEPDDAYYHPLVLPQSFGQINLAPHWLAGDASGSFCDAVCPQGRLCDEGLGPKTITAPPYQGAANYAYHLDAGKFAPFLQRHCCDKLGVRHVLADVRGVALAENGDIRAVVTEQAGEIEGDLFVDCTGFRSLLLGETLGVKFRDCGDILFCDTALAVQIPYERPDSPIATHTISTAQSAGWIWDIGLPSRRGTGHVYSSRHISDDEAERELRAYLGPAGKDLTVRKIAIRSGHRETFWKRNCVAVGLAAGFLEPLEASAIVLIELSAKLIAEQMPTCREVMDIVASRFNATTHYRWGRIIDFLKLHYVLSQRTDTAFWRDNRDPATIPERLSDLLLLWRHQPPWLHEEFDRADEVFPSASYQYVLYGMGFRTEVEAAALADEAALAQRALRENALQSERLLSSLPKHRDLIRKIVEHGLQPV

SEQ ID NO: 88374 - protein, 501 aa, Pararheinheimera tangshanensis
  misc_feature (1)..(501): tr|A0A5C8M2P5|A0A5C8M2P5_9GAMM Tryptophan 7-halogenase OS=Pararheinheimera tangshanensis OX=400153 GN=FU839_05 010 PE=4 SV=1
MNTKAVKNVVILGGGTAGWITASLLVKVLGKAINITLVESDDIGIVGVGEATIPPIINFNAALGLDEKAFIRETQGSIKLGIQFENWGKPGDSYMHAFGAIGKEFPFCNFHHFWLKSKQQGMGFDFWDFSLAYQAARQNNFAKLARIEGVNLPGLSYAYHFDAGLYAQFLRRFCEPLGVKRIEGTVKKVHLDPVNGEVIRLTLASGNEVEGDLFVDCTGLHSLLIDKSLNTGFEDWSHWLPADSALAVPCGSVQPITPYTKAIAHPKGWQWRIPLQHRIGNGFVYSSKYCSDDEAKQTLLSNLDGKALAEPRKISFRTGRRLKQWNRNVVSIGLSSGFLEPLESTSIHLIQSGVFRLLKFFPHSGITDAARDEFNRQSKVEFEQIRDFIILHYKLNNRGDSQYWKDYQTMDIPESLRRKIDLFSASGLIFREQDELFAEVAWQQVFIGQGIVPTDTHPLVNALKEEQLQDLLSNLKAVMQLTSQRLGSHADFLQSCHPKDM

SEQ ID NO: 88375 - protein, 507 aa, Xanthomonas campestris
  misc_feature (1)..(507): tr|A0A561P9F2|A0A561P9F2_XANCT Tryptophan halogenase OS =Xanthomonas campestris pv. translucens OX=343 GN=FHW28 _2496 PE=4 SV=1
MGQIRKVVIAGGGTAGWIAASALSHQFRDLLDITLIESEQIGTVGVGESTVPPIRSFHRFLQIDEQDFLRTVAGSFKLSISFENWRRDGERYIHPFGITGQSTLVCAFHHFWLEAQRRGMPSELGDYCLETVASRADRFALQQTPPVNYAYHLDAGLYAGLLRRHAERHGLKRVEGKIQQVLQHAESGFVEALVLEDGTRVDGDLFIDCTGFRGLLIEQTLRTGYEDWKQWLPCDRAVAVQTEAVAPPVPYTRAIAHAAGWRWHIPLQHRVGCGLVFSSAHMSDDAARAKLLHDAAAPPIKDPWLVPFRSGRRLKAWNKNVVALGLASGFIEPLESTSIHLTIAAVMRLITLFPGDGIAPAMTDIYNAVSRAEMEHVRDFIILHYHANQREEPMWQACREMALPDSLQERLRAWRERAHAWQGADELFRVDSWIHVLLGQGIVPAQHHLLARALPDHDLQRFLDAIRQPIDRAVAQMPSQEAFIARYCKAGPEVWAGRAPARAPAPA

SEQ ID NO: 88376 - protein, 494 aa, Streptomyces parvulus
  misc_feature (1)..(494): tr|A0A191VAH9|A0A191VAH9_9ACTN Tryptophan halogenase OS =Streptomyces parvulus OX=146923 GN=Spa2297_32975 PE=4 SV=1
MHRDHEFDVVVVGGGPGGSTVSTLVAMQGYRVLLLEKEEFPRYQIGESLLPSTVHGICKLLGVEDELKKAAFMPKRGGTFRWGSNPEPWTFSFSVSSTFSGPTSLAYQVERMKFDQILLENARAKGVDVRERSSVADVVEEDGRVAGVVYRDADGVRHEVRSRFVVDASGNKSRIQSRIGGTRHYSDFFKNIALFGYFEGGKRLAAPNSGNILCAAFNSGWFWYIPLTDELTSVGAVLRREALDRVQGDREKALMGLIDECPLIAEYLSEARRVEDGPYGEVRVRKDYSYCQDTFWRPGMVLVGDAACFIDPVFSSGVHLATYSGLLAARSINSTLGGDIDEAKCFEEYESRYRNEYSLFHDFLVAFYDMHQDEDSYFWTAKKVIDSSAPGLESFVDLVGGGASREGGLVNAASYTEHRETDFQEFSELANRPAGENGTDRDLFDSTLVQSVLEEGAKIQVHAALGGAVDDEGPVRDGGLVPSADGMRWAEFAY

SEQ ID NO: 88377 - protein, 412 aa, Sporocytophaga myxococcoides
  misc_feature (1)..(412): tr|A0A098L8E4|A0A098L8E4_9BACT Tryptophan halogenase OS =Sporocytophaga myxococcoides OX=153721 GN=MYP_192 PE=4 SV=1
MSSEKVDVLVIGAGPSGAVAASIIHKHGLKVKVVEKLKFPRFVIGESLLPRCMEALEEAELLEAVKAKGFQQKSGAKFVKDGKICDFNFSNQFTQGWTWTWQVPRADFDKTLTDEMERKGIPVLFETGVTDIKFNGSDSITTIEDKDGNKSTIEARFIVDASGYGRVIPKLFNLDQPSNLPARRTLFAHTVDVNRFVDEEPNRITIVSHEPGVWIWIIPFSNGNTSVGFVGDTQFFDRFTGTPEERFRAMIKTQPHTQRRFDGVDFVFEPRTLEGWSVTTNKFYGDGFVLTGNVTEFLDPIFSSGVTLATVSGATAANLVVKKLKGQSVDWEKEFMEPTMQGVNTFRSYVMGWYDGTLQDIFFAPKPDDEIKKQICSVLAGYVWDLNNPFVKKHDRVIKNLSHLIRLEEGAS

SEQ ID NO: 88378 - protein, 499 aa, Caulobacter sp.
  misc_feature (1)..(499): tr|A0A3R8NAM3|A0A3R8NAM3_9CAUL Tryptophan 7-halogenase OS=Caulobacter sp. 602-1 OX=2492472 GN=EIK80_06725 PE=4 SV=1
MTQQTVRKVVIAGGGTAGWMAAAALVKQLGPLLDITLVESEDIGTVGVGESTIPTARTFNALLGIDEAAFMRATQATFKLGISFENWGEVGDRYIHSFGQVGKSTWMGGFHHFWMQAREQGFGGDLGDYCLELKAAEQNRFYTGEESPLNYAYHLDAGLYGRFLRGMAEAEGVRRVEGKIASVRQRGEDGFVEALVMENGEVVEGDLFIDCTGFRGLLIEQTLKAGFEDWDHWLPTNSALAVQTRSTEPAVPYTRAIAHEAGWRWKIPLQHRVGNGLVYCSDFMSDDDARAKLMGEIEGETLIEPRLIRYRTGRRRKTWDKNVVALGLASGFVEPLESTSIHLIMIGVTRLMQLFPFAGISLAAVDRYNRQADDELEKIRDFIILHYKATERTDSPFWDRVREMGIPDSLAQRIELFRQSAQVYQAPGELFQVDSWLQVLLGQRIQPRAYHHMGRLMPPQQLKGALEDLKRNIDGMVARLPQHQAFLDRYCAPLVSKSA

SEQ ID NO: 88379 - protein, 501 aa, Pseudoalteromonas sp.
  misc_feature (1)..(501): tr|A0A2C6DEW8|A0A2C6DEW8_9GAMM Tryptophan halogenase OS =Pseudoalteromonas sp. GCY OX=2003316 GN=CBQ28_09780 PE =4 SV=1
MKTHLPMKTIQSLTILGGGTAGWMCAAYLAKHQPNLSVTVIESSSIGRIGVGEGSTPHLQLFMQSLGVKERDWMPACQASYKTGIYFDNWNGDNGSYFHPFFSEMDAKTAEVYFVNANARRRGSEYIDKPEHYFLAAVLADKQQAPLPQRPLPRALEYGYHFDAQKLADWLRAFSLARGVKHIQSTVSSVQHHAKEIIALTLESGEQVKSDFYVDASGFNALLIEKTLEVPFISFADQLLNDSAVAIAGAKISPLPSSTSAIAMPCGWRWRIPLQGRTGHGYVYSSAHTTPEEAEAQLREAAQLDKGQAKHLTMKVGMMARSIEGNVFAIGLAQSFIEPLEATALMVTGYSIELLNGLLSQQLEAQAINQQLSELVLGIKEYVLAHYATSKRADSPYWQDAKIAALSLNELDELLTHWRSGGDFDAWLNQHRMHSPYIRPSWYCLLGGMDHRDSTCQMPFDQAPQHIEQAAKAYLTKLSDEHFIAHTTALEQLQRVQAFRA

SEQ ID NO: 88380 - protein, 804 aa, Methylorubrum populi
  misc_feature (1)..(804): tr|A0A514KN87|A0A514KN87_9RHIZ Tryptophan 7-halogenase OS=Methylorubrum populi OX=223967 GN=E8E01_11650 PE=4 S V=1
MLRSERSVPPRLVIAGGGPAGSIAAAYLRRILRRAGWSVTLVAPEPAAGPSVALATRPAFTRFRQGFDIDEAIFLRRCAGTYRLASRFEDWFAGGRGHWHPFGACGPRIAGRDLFHYWLKLRESGARWEAGDYADYAPQTLMAAEGRGPRPQAGTSSLVQSGDYGYHLDRAGLVRVFREIALSEGVRAVPGRVRGIERDPYGDVAALLLDGGERIEGDVFLDCTGAAAQLVGTALGEPWIAEGGAGDRIAYLSTAREPEPAPFTLYRGRPEGWIAALPLAGRFDHALVYDGRTTPPETAQALLRAASGCENGDGGVCDAELRRGRRRAPWQRNVVAVGAAAGAVEPLMGFGLDLVLAALEAFVAYLPRGGRAAEVLRRAYAARMNRLHDDAEQAVAAHYVLGRRPEPFWAAARAAAVPERLADRLDLYELAGHVEPEADAVFGEGDHYLLFAGADFLPRRPFAPVDVGDGREIERLLAGVRARSAQVAQTMAPHSVLLEGLHGRAPAGPTVQVAAAAKDSAARHGPQSLRQGPEGARLADLVAGLGQPFGYERSVKATPAGLQTERFLVSLHRTSLGLDPAKTLDALAEVLGLPAPERSEAAGLIAGADLLHLGYEAGPSGALYKLYVEWSARADAAWHETDAAGAAGAEPILVHRAYKWRVEGSAPPVVTLYDWPRVRTPGEIEARLARLGESWDGAGTSLLGTARDILRLAREHGRGAVHYLEAREEPGPRLSYDLNLYACGLTMGEAEMVIGQAIVDLGVPPPDAAAVLAERRGEALGHVAGGVGRDGIPFLTVYSGMAEA

SEQ ID NO: 88381 - protein, 497 aa, Pseudoalteromonas nigrifaciens
  misc_feature (1)..(497): tr|A0A379HBA3|A0A379HBA3_9GAMM Tryptophan halogenase OS =Pseudoalteromonas nigrifaciens OX=28109 GN=NCTC10691_0 1820 PE=4 SV=1
MKPIKHVVIAGGGTAGWITAALLNKVLGKVINITLIESSSIGTIGVGEATIPPIIGLNNALGINEQDFIKATNASIKLGIEFENWKTPGHSYMHAFGSFGKDFPFCEFHHFWLKAKQQNHAPDLWDFSVNYQAAKAGKFAHLRNLPNTQLPGLHYAYHFDATLYAKLLKKLAQQRGVKRVEGKIKSVQQCQQSGDIQALTLESGSVIKGDLFIDCTGLSALLIEKTLNTGFEDWSHWLPCDSAVAVQSESANEPVPYTRSIAQNAGWQWQIPLQYRVGNGLVFSSRYLTDDEAKQQLLANLPGKAITEPRVIRFKTGRRRLQWHKNVVAIGLSSGFLEPLKSTSIHLIQTAAIRLIKLFPHNGIKHSQVTTYNLQSKTEIERIRDFIILHYKLTTRTDSAFGRQCQQMSIPETLQQKITLFKQTGKLTREDDELFSEPAWQQVMIGQGLEADDYHPLANALTDEPLLALFSDLKALINHTVEQLPSHSEFLSRMKNN

SEQ ID NO: 88382 - protein, 505 aa, Xanthomonas campestris
  misc_feature (1)..(505): tr|A0A561P8R5|A0A561P8R5_XANCT Tryptophan halogenase OS =Xanthomonas campestris pv. translucens OX=343 GN=FHW28 _2289 PE=4 SV=1
MIAAPLRNLVIVGGGTAGWMAAAALARVLGPDYRITLIESEQIGIVGVGEATVPHIKAFNNLLGINEAEFVRQTQGSFKLGIEFVDWHRPGTSYIHGFGTEIGHSLGLLPFQQYWFKQALAGKAKPLGAYTLNTVAAKRGKFMTSASDAPPNSPLANIAYAYHFDASLYAAFLRRYSEQRGVTRREGIVEEVQLHPESGDVVSVRLASGDVIGGDLFIDCSGFRGLLIEQALHTGYHDFSHWLPCDRALAVPCAKVGPPTPYTRATARAAGWQWRIPLQHRTGNGYVYSSAHISDDEAAATLLANLDGAALADPRPLRFLTGRRKQVWNRNVVALGLASGFMEPLESTSIHLIQSGISKLLELFPREGISPVLVQRYNDRIAFEFDRIRDFLVLHYTATERDDSDFWRQCRNMAITPELQATLDLFGDSGRFYRNGEEMFAEISWVQVMVGQGILPRAYHPLVDQVPAADIERFVASIEQTIGHCVDAMPPHQAFIDRYCAAAPL

SEQ ID NO: 88383 - protein, 802 aa, Methylorubrum populi; identical to SEQ ID NO: 86963
  misc_feature (1)..(802): tr|A0A177IYL6|A0A177IYL6_9RHIZ Tryptophan halogenase OS =Methylorubrum populi OX=223967 GN=AX289_00050 PE=4 SV= 1

SEQ ID NO: 88384 - protein, 503 aa, Pararheinheimera tangshanensis
  misc_feature (1)..(503): tr|A0A5C8M2Q1|A0A5C8M2Q1_9GAMM Tryptophan 7-halogenase OS=Pararheinheimera tangshanensis OX=400153 GN=FU839_00 155 PE=4 SV=1
MSYAANNSIKKIVIVGGGTAGWMTAAALSNALQQGCHITLIESEQIGTVGVGEATIPPIRLFNQSLGINENDFIRATQGSFKLGIEFINWGRQNHSYFHPFGSYGRQFDLVSLHHHWLAAKAQGKADSLDSYCMAWVAAQQGRFAPPVTDPRHVLSTHDYAYHFDAGLYASYLRQYSEAKGVLRIEGKISAVKQHSISGFIEAVQLDNGQLLEGELFIDCSGFRGLLIEDTLKTGYQDWSHWLPCNRAWAVPSERGEFTPYTKSTAHQAGWQWRIPLQHRTGNGHVFSNHFISEQQAQDVLLQNLGAKALAEPRMLQFVTGRRNLFWNKNVVAIGLASGFLEPLESTSIHLIQAGIAKLLALFPDRDFDPLLTEEYNRVAIREIENIRDFIILHYKLTERDDSEMWRYCAAMPVPDPLTYRIEQFKRQGRLIPGEMDLFGNTSWLAVHIGQLNTPQKTDAVLAYRSIEGAERLAKLSQALQAAALSLPTHQQYIDQHCKAASL

SEQ ID NO: 88385 - protein, 534 aa, Woeseia sp.
  misc_feature (1)..(534): tr|A0A2E6EA89|A0A2E6EA89_9GAMM Tryptophan halogenase OS =Woeseia sp. OX=1980636 GN=CMO98_08625 PE=4 SV=1
MRRKQVLVVGGGSAGWTAAAYLNAALNPGNQKLVDVSLIESPDVPRIGVGEATVPNINRTLATIGINELEFMKATDATFKASIRFVNWLDNKNKFYHHPFSRFGGGPNDNSGRRWLMSDRSVPFMNTISAQPVLCEMGLAPKVLEDTNLGIPVGYAFHMNALKYADYLRDFSTARGVTHYLENVVDVRITETGSITEIVTEGGKNLNADLFIDCTGFASLLIEKKLGVDWIDFSEWLLCDRAVVMPVPYETYYSGAIRPHTMATALSAGWVWDIPLQNRRGIGYVHSSAFISENDAERELHAYEGPHAKNLDTRLVKFKVGMRERAWFKNCIAIGLSGGFLEPLESTGLYLNELAAELLVEHFPYGDDMEPLAFRFNRLIQNRYYEILDFINMHYCLTNRTDTDFWREVGQPGRVNTRLQSKLDYWKIKPPSISDFIDPFFPGQPESPSAFGDASSDQRTPVDTGRLWNHHSYEAILYGMDFLRDECDEWFGKNRPRPAVHKRVLDTVNTAGDKLPPHDIWLKRMVGMQDYPKS

SEQ ID NO: 88386 - protein, 498 aa, Acinetobacter sp.
  misc_feature (1)..(498): tr|A0A4Q7BB22|A0A4Q7BB22_9GAMM Tryptophan 7-halogenase OS=Acinetobacter sp. WCHAc060025 OX=2518625 GN=EXE09_04 150 PE=4 SV=1
MINFNSIKQVCVVGAGTAGWFAALKMRKILKKDIYISVVATQEIPTVGVGEGGILNLMSSLLQLEIPLLEFLKETGAVHKLGFVYEGWRTGCANDKYYHMFPYLSKHERINGYYPILSVLTNHNTAVSNIVDSIKLREENTSQDDLTKMFVNVQNHNFLSSFHFDTYKVAQYLKKIALSRGIRYIEGKVEKININEKNGDIESLEVHGKVINSDFIIDASGFSRVFIGQHFSSKWISLANKLVMNTAIPFHLKHPLTNPDLVTRSTAMNSGWLWRIPLQERVGAGYVFNDGFISPEKAIDEVEKKLGHYVEPIRVIKFEAGFFKDIWINNVLAVGLSSGFVEPLEATSIGQMLMQLELLSRVITETEGIVSDHLIDFYNQQNRNAWEGIGDFIRMHYDTTRDDTAFWKSTKDIPMSDKYKELKEIWKYRTPRDYDFADYQMDLMHHFGTYSWLAIGQALGHIKAEVTVNELMNLTAEQRKKLGQDIGEIYQRLGLNPK

SEQ ID NO: 88387 - protein, 508 aa, Shewanella baltica
  misc_feature (1)..(508): tr|G0AV80|G0AV80_9GAMM Tryptophan halogenase OS=Shewane lla baltica BA175 OX=693974 GN=Sbal175_2927 PE=4 SV=1
MKVKQAIRKIIILGGGTAGWMAAAALANNPVFAAIELCLVESDNIGTIGVGEGSTPHLKRFMDNLGISEKDWMERCHASYKTGIDFINWNGDGQQYFHPFYFQMDVKPAEVFFINANARRRGHGNAVKPDAFFSSGVLAKHNLSPRPNKAMPYINEYGYHFDATELANYLKDYACQRGVRQIIADVVEVSTTQHQQIETLILANGERLSADFFIDASGFSAKLIHKALGVPFQSFAEELLNDSAVTVPLPVPALLDSTQTQQAKAQQAKYHTRATALSAGWLWQIPLTHRLGNGYVYSSRHLSANAAAKELLHCVNLPESTQVRFLKLRVGVSDKAWHNNVLAIGLAQSFIEPLEATSIMMTQFTLERFMSLFERYQLNKQAETLSRQTLNQAVMQLVLGIKDYIQAHYVTSQRSEPYWVAARKVAISQRLTQLLKAWYQGEDFDLLLYQYDQQLAYFRPSWYALLAGMDYRDPKLKRPFEPISADITAQAISYCQTLVEQYFQPKHS

SEQ ID NO: 88388 - protein, 493 aa, Colwellia sp.
  misc_feature (1)..(493): tr|A0A1V0KW64|A0A1V0KW64_9GAMM Tryptophan halogenase OS =Colwellia sp. PAMC 21821 OX=1816219 GN=A3Q33_17760 PE= 4 SV=1
MQKVQKVVIAGGGTAGWVTAATLSSQLGSLIDITLVESADIGTVGVGEATIPTHKAFHRLIGVDEQEFMRKTQATFKLGIEFSNWGDIGERYFHAFGQIGRSTWMGDFQHLWQHASSLGWGGELQDYCFELQAAKAGKFDKDKANYAYHLDAGLYASFLSELSQKRGVKRIEGTIESIAMDSENGHISNLVLKNGTSVQGDLFIDCTGFKGLLINGALGVGFEDWSHWLPMNSAWAVQTEGKKEIPPYTKSIAHDASWQWRIPLQNRVGNGLVFCSDYTSEQDALQLLTDNLEGDMVSQPRLLKFKTGKRNKTWFKNCVAIGLSSGFLEPLESTSIHLSQISATRLVQMFPFNGMDEVLQTHFNNYVDGEVDSIRDFIILHYNLNRRSEPFWQHVATMDIPDSLQHRLELYKRTSIAFKNDLDLFRVDSWNQVMLGQGIKVEGYHQMGRLIKDDNLRQAFNDLQEHINSTVEGLPMHADFLRQYGVLDLHRKP

SEQ ID NO: 88389 - protein, 495 aa, Trabulsiella odontotermitis
  misc_feature (1)..(495): tr|A0A0L0GHG2|A0A0L0GHG2_9ENTR Uncharacterized protein OS=Trabulsiella odontotermitis OX=379893 GN=GM31_10840 PE=4 SV=1
MLSLKGIKRVVVLGGGTAGWYTALSLRKLFSANVEIRVVESTEIGIVGVGEGGLLNFQAALHSVDIDFNEFVRETNATFKWGFCYEGWRTGERDDKYYHPFASATGSASKWEEMGHYPLFSAMINNSIPLTSYLKGFDLIVNNASQEEARNALNNQAVDIINSFHFDSYKIAKYLKKIALSRNIIHQDVIVEHVETDDKGHVTALITEEKEKIELDFLVDATGLARKVIGKVVPSEWYSFKDYLLLDRALPFYMPHPLKNPYLVSRAIAMKSGWMWQIPLVDRVGAGYVYSSKHISDDDALQEIKDYLGYEITPQQNVIKFEPGCYRQVWVGNVLTVGLASGFVEPLEATSIGQMIEVVRNFTRVLVASQGVVSDNAIREFNESNFVSWMEILDFLRMHYDCPRRDTEFWQDVAKTPLTENYRAFKECIQVRAPRLLDVESYLLYGRRGMFHVVNWMFVAVGLGLIPPNAVVNDLLAIAPEKKQAVVDFLNSLNR

SEQ ID NO: 88390 - protein, 506 aa, Caulobacter sp.
  misc_feature (1)..(506): tr|A0A426GM57|A0A426GM57_9CAUL Tryptophan 7-halogenase OS=Caulobacter sp. 602-1 OX=2492472 GN=EIK80_06255 PE=4 SV=1
MQDNRIRKLVIVGGGTAGWMAAAALRRHFQGGPLEITLVESSEIGTIGVGEATIPTIRAFYNQLGLTDIEVMRATQATCKLGIRFNGWVREGQSFIHPFGHFGQDLRGVAFHHYWRKLAQAGEPTDIADYSLGASLARAGKFMAPSRNPASTLSVFDWALHFDASLFAQLMRRVAEENGVRRVDARVTKVNLRPEDGFVASLDLHTGESVEGDLFIDCSGFRGLLIEEALQTGYEHWNDMLFCDRAWAAQSEGVGDPMPYTDVTAHTAGWRWRIPLQHRYGNGYVFSSRHIGDEDALAELKAAIPDPLLHEPRLIRFNPGRRKQVWNKNVIALGLASGFLEPLESTSIALIETGIEKIKALFPDKDFAPEIVDEFNDWSRREMERVRDFIVLHYWANKRGDTAFWRDCNDVVLPEALRRKVDLFLTRGHFVRYRWEMFAPPSWMAIYAGFELLPQTVDPSLDGIDPRTLSAPLAEMRKAVREVVANAPPHAAFLDQYCRSAAMAAE

SEQ ID NO: 88391 - protein, 480 aa, Xanthomonas campestris
  misc_feature (1)..(480): tr|A0A109HPI0|A0A109HPI0_XANCT Tryptophan halogenase OS =Xanthomonas campestris pv. translucens OX=343 GN=ATB53 _09460 PE=4 SV=1
MAAAALVRVLGAGATRITLVESEAIGTVGVGEATIPPIALFNALLGIDENAFLRATQGSFKLGIEFVDWLQPGQRYFHPFGAYGVDFGTVPFDGLWQRMHRAGRAAPLAAYSLNTLAAMRGRFLRPQQGDALLSRLGYAFHFDAALYALLLREYAEGRGVTRLEGKVEQVLRRSPDAAIASIVLACGTRIDADFFIDCSGFRGLLIEDAPGAGFVDWSHWLFNDRAVAVPSARASAFTPYTRSTAREAGWQWRIPLQHRTGNGYVYSSAHLSDDAAAATLLANLDEEALAEPRTLRFRTGRRAVFWSGNCLALGLAAGFLEPLESTSIHLIQAGIARFLEMLPDRAGNPAAIRRYNRLMAQEFDRIRDFIILHFHATARPGAYWERARTMPIPDSLAERLQIFAHSGRVLREADELFSKTSWLAVMQGQGLSARGFDPLAAAMPDAEAAARLQRVAAAAAMAVERMPTHADFIRAHCAAT

SEQ ID NO: 88392 - protein, 500 aa, Novosphingobium sp.
  misc_feature (1)..(500): tr|A0A259DXB1|A0A259DXB1_9SPHN Tryptophan halogenase OS =Novosphingobium sp. 17-62-19 OX=1970406 GN=B7X90_11895 PE=4 SV=1
MTATNLPRRIVIAGGGTAGWMTAAALARTLGPVAQVTLVESEQIGTIGVGESTIPPLVAYNRILGINEADFMRATQATFKLGINFENWRVPGEAYFHSFGGTGKDHWSAGFQHFWMNGLTRGHTAPYSEYCLELKAAEAGRFAHLPEDRMNYAYQLDSGLYARFLRGMAEADGTKRIEGKIAQVQLDGETGNIAALLLESGKRIEGDLFIDCTGFRALLIEGALRVGYDDWTHWLPCDSAIAIQTASVRPPVPYTRAIAHEAGWQWRIPLQHRQGNGVVYCSDFLGHDVALEKLLSSVEGEKLVKPNHIRFRTGARRKQWHRNCVAVGLSGGFMEPLESTSIHLIQRAILRIVRMLPAGAISQRDIDEFNDQQFTDMEQIRDFLVLHYKVTDRRDTPFWRHVSAMDVPESLTHKIELFRETGRVFRKNEELFAENSWVQVMMGQGIMPQSHHPVAAKLRDEEMAHLFGTLRDQVARTVAALPVHGDYVVRYCGADVPVAA

SEQ ID NO: 88393 - protein, 543 aa, Shewanella baltica
  misc_feature (1)..(543): tr|G0AX49|G0AX49_9GAMM Tryptophan halogenase OS=Shewane lla baltica BA175 OX=693974 GN=Sbal175_3149 PE=4 SV=1
MQQATHTAINNIVIVGGGTAGWITAALLAAEHNVDKGQLAHSPKLNITLIESPDVATIGVGEGTWPSMRNTLDKIGISETEFIRQCDASFKQGSRFIHWQHDDTERTKPFDSNQYLHPFSLPHGHQELDLCPFWLPHSDKVSFAQAVSNQDALTLLGLAPKTIATPEYHFQNNYGYHLDAGKFSQLLMQHCTEKLGIKYIRDHVTQVHSLANGDIESLATKEHGVILGDMFVDCSGTKSLLLGEHFNVPFLCQKAVLFNDSALALQVPYAEENSPIASCTLSTAQPNGWIWDIGLPTRKGVGYVYSSAHCSDDEAEQTLRAYLANDTSTNPQSASSNVVDSRKQEYRKLNINPGYHAKCWQNNCIAIGMAAGFIEPLEASALALVEWTANTLATQLPTHRGVMDTIAQRVNERYERHWQQIIDFLKLHYVVSRREVDDYWRDHREAASIPERLQQQLDLWRYQAPSSHDISYKEPLFPAASFQYVLYGMGFNTALPTHIKPSQQQVAQRLFSENQQKIHGLSQSLPSNRDLLNKVRQFGFPKI

SEQ ID NO: 88394 - protein, 495 aa, Sphingomonas sp.
  misc_feature (1)..(495): tr|A0A1H8DH43|A0A1H8DH43_9SPHN Tryptophan halogenase OS =Sphingomonas sp. S6-262 OX=1166340 GN=SAMN05192583_192 5 PE=4 SV=1
MLDDPLRSVAVVGGGIVAWSAAVAIRRRLPGVRVTLVATPPSPDALADRMACTLPSAIGFHDDLGLGEDDAVVRAGSGWRLGTRFDGWAQGSPPYVHAYGAYGQPFGTASFHHHWVRAARGGTAAPFDEHAPSAMLARAGRIAPPDMEPGSPFAGVQAGLVLDLPRYEQMLRAFGRHLGLEVRDGEVREVRLRGADGFIDALLLGDGGMVEADLFVDATGPTATLRTAIDAEWEDWSAWLRCDRIMQAEVPAGAVSPLDHVTALAAGWQWRVDAPGRVLHGICYASADLGDAEAADRLTEAGGVSTAETICFRQGTRTDPWVRNCVAIGDAATVIEPLEWTNLHLAHSAIDRIIAMMPGRACHPLETADYNRQTQAETTRVRDFVLCHYAVARRPEPFWQIAADLPPSLERTLRLFAERGRLPFFEEETFTRDSWLAVLLGQGMLPRQVDPLIDGTPPDRSDAAMAAYRAAIARSVAHFPTAADHMAAQSRRIVR

SEQ ID NO: 88395 - protein, 491 aa, Sphingosinicella ginsenosidimutans
  misc_feature (1)..(491): tr|A0A5C6TUT9|A0A5C6TUT9_9SPHN Tryptophan 7-halogenase OS=Sphingosinicella ginsenosidimutans OX=1176539 GN=FRZ 32_10150 PE=4 SV=1
MGEAIRSVLVAGGGITGWSAAAALARKLPGLSITVLPIAPAPDALADRIGGTLPSILEFHHDLGLTDADTILRAGSGLRLGTRFEGWSQGRPDYVHAYGDYGRPFGTASFHHHWLRAEKAGEAAPFDRHNAAAEIGRAGRFAPPNDDPASPLPGFLHALHINPPRYRELMRAFARHLGAIERPGEIAEVRRGADGGISGLGLVDGSEATADLYIDCTGPRALLRGTLGGDFEDWSQWLPCDRMLMAEGPPPADPPTLDDATAIEAGWRWQAASPARSSRGLVYSSAYMSDAEAAAALADGAAPIALRQGRLAEPWRRNCVAIGDAAVAVEPLEWTNLHLAHSATDRVIAMMPDRDFAAVELADYNRQAGAEADRVRDFVALHYLVADRPEPFWQSAAAAEPPPSLAHTLGLFRERGRLPFHEEETFSRDSWAAVLIGQGALPRRVDPLIDPVGPQISNRAMTELRAAIAGIVPNLPTQADYLRRLARQTAQ

SEQ ID NO: 88396 - protein, 505 aa, Shewanella baltica
  misc_feature (1)..(505): tr|G0AXQ9|G0AXQ9_9GAMM Tryptophan halogenase OS=Shewane lla baltica BA175 OX=693974 GN=Sbal175_3193 PE=4 SV=1
MNNSSLKSITIVGGGSTGWMTALYLSKLYNHSSNIIDIRLIESKEIGIIGVGEATVHSLRFFFAAMGLDENELLRETNATLKTGILFRNWMKPVDGKMHEYFHPFEQQKPSGKIDNASAWILNNQINESNSTPFAEATSLSFSLMQNNLSPKTQYLNQYQGIVPYGYHLDATLMAAFLKRKATQAGVEHVEANVTDVLVNDGNITEVVTDQGSFKSDIFIDCTGFKGLLIQSLKNDNWQSFETELPCNKAVAMQREYLPHQLPRAYTTATALSHGWAWEIDLTNRQGTGYVYDGNSLTREQAEAELKAYLGDEQEIIRTVHLDMKIGCRREFWVGNCIAMGLAGGFIEPLESTGLHLINLGARLLATHLTSSNPSQAIRTSYNTAMNGLYTDLRQFIVLHYCLTDRNDNEFWQKAAQSSAFIPALEQKITLWKDKVCEYVDLANGYSSVFTDENYRYVLYGMQHIPEIHIPCPKTEITKILDNLKTQQFRAKEQSLSHQEFLAKI

SEQ ID NO: 88397 - protein, 412 aa, Unknown
  misc_feature (1)..(412): tr|A0A0R2U8E1|A0A0R2U8E1_9GAMM Tryptophan halogenase (F ragment) OS=SAR92 bacterium BACL26 MAG-121220-bin70 OX= 1655626 GN=ABS24_04985 PE=4 SV=1
MEEQKITRLVIVGGGTAGWLTAGIIAAEHFVDSKTKTNEHSFELTLIESPDIATIGVGEGTWPSMRSTLQKMGISETDFIRECDASFKQGTLFKGWKTGHDDAYTHPFTIPHAYAETNLAPQWQSFRDKVDFAEAVSSQNTLMFKGLAPKQISTPEFAFNVNYGYHLDAGKFAEFLRRHCVEKLGVKHLRANVTGVISAENGDIASVTTDVCGDIQADLFIDCSGSRALLLGEHYGVAISSKSDVLFNDTALAAQVPYTKESDAIESSTLSTAQTAGWIWDIGLPSRRGIGHVYSSRHNSEGRATEELLAYIASTVSQQAAEAATIRRLDFMPGHRTKFWHKNCVAIGMSAGFIEPLEASALVLVELSAAMIADQLPANRHIMDIVAKRFNEKFLYRWDRIIDFLKLHYVLS

SEQ ID NO: 88398 - protein, 514 aa, Pseudoalteromonas sp.
  misc_feature (1)..(514): tr|A0A4Q0JP69|A0A4Q0JP69_9GAMM Tryptophan 7-halogenase OS=Pseudoalteromonas sp. A757 OX=2250709 GN=DRB05_00910 PE=4 SV=1
MVKKVLIVGGGTAGWLTAARLAKQFIDSGSDIEVSIVESANIPTIGVGEGTWPTIRDTLKTLDICETEFLNTCDATFKQGAKFVNWKKVADENEDIYYRHLFTSLYDPWEFNLAPFWSSGIAGEVPYSEAVSMQGDVCEQGKAPKNITTPQYEGLQGYAYHLDAAKFANLLKDKAVNKMKVRHIIADIGHVSVQSDGSIEYVETVTGEKLHADLFIDCTGFKCLLLGDAMKVPFVDLSHTLFVNRAVALQVPYENPNSPIACETISTAQPEGWIWDIGLQSRRGIGFVYSDKYISKDCAEQRIREYAGINTDDISAKHLEFQVGYREKFWHKNCVAIGLSAAFVEPLEASAIFLVEAAVNMLCDKFPHSQHEFEFIEKQFNQSFLFRWNKTIEFIKMHYVLSQRTDGQFWLDNKNINSIPDELRSKLAHWQNNPLSKYDFASAFEPFVMDSYQYVLYGMGFKTEVDSSRLSAEKTKKARAMFAEVNKYRTLVQEKLPNHRELIEKLKEYKFPKV

SEQ ID NO: 88399 - protein, 478 aa, Azospirillum sp.
  misc_feature (1)..(478): tr|D3NSY3|D3NSY3_AZOS1 Tryptophan halogenase OS=Azospir illum sp. (strain B510) OX=137722 GN=AZL_008740 PE=4 SV =1
MTLDADIAVVGAGPAGCALAIRLTQLGWRVLLLERSALPRRQSGQSLTPGVRLQLAQLGLDGLLRQCGARPAPRSRVRWQGVEAEDRVMAQDPPLLIDRGRFDGLLRGAAAGVGVRLLCPAVLIDRHPTPEGWILAIGDAAGERRVSVATLVDATGRAGLLARARTACGPATLALYADWRGPVFPDLPCIDTGPEHWAWGLPREDGLFSTLVFVDPDAMPRRAGLEAFLRRLLAASPLLGDFAAATPVGPVRAVDATAYRADAVNGPGWIAVGDAAMALDPLSSSGVQKAIRTALAAAIVLNTRLRRPEAAALADRFYADDVRDGAEQHQRWTDGFFAAVRQSVASPSDDAPFGRGTFWHRRSGRMAALAAAPPTPHSAVLYPDQPLTLAPTARLATTSCLVGDFVEERVALHHPALGRPVAWLAGVELAPLMSALPAVTNRRALIADWSITLGPQRAASLVGWLTGHDILQAACAER

SEQ ID NO: 88400 - protein, 501 aa, Shewanella sp.
  misc_feature (1)..(501): tr|A0A549ZWB0|A0A549ZWB0_9GAMM Tryptophan 7-halogenase OS=Shewanella sp. YLB-08 OX=2593656 GN=FM038_21585 PE=4 SV=1
MMDANKNKKKQKVVIAGGGSAGWMTAAALSKLLGKNLDICLIESEEIGRIGVGEATIPPIRVFNQLLGIDEQVFMRAVQGTFKLGIEFTNWGALDDNYIHSFGTTGKECWAGEFQHFWIAGKQKGIAAEFGDYCTELQAAKQGKFLGSKDSSLNYAYHMDAGLYAKYLSDFSAKQGVTHIEGIIDDVIINPTNGFIEAVRLENGQIIEGDLFIDCTGFKARLIEGALNTGFESYSHLLPCDAAVAVQTEKSGEPRPYTQSMARDFGWQWRIPLQHRVGNGLVYCSRFTSDEDAIASLMDNLESPAITEPRVFKYNTGRRLKGWSKNCVAIGLSSGFVEPVESTALHLIMSSILRLMKLFPQGEISQANINEYNKQTKEEMERIRDFIILHYKATNRDDTPFWRYCHNMEIPETLAHRIALFEDTACVCITETELFRIDSWTQVMLGQGIMPKGYHQIVDNMSDDELKRFLTGLKQMVDKKVAQFPTHQQFIDQYCKSMPIS

SEQ ID NO: 88401 - protein, 505 aa, Xanthomonas campestris
  misc_feature (1)..(505): tr|A0A109HND4|A0A109HND4_XANCT Tryptophan halogenase OS =Xanthomonas campestris pv. translucens OX=343 GN=ATB53 _12105 PE=4 SV=1
MAQIRKVVIAGGGTAGWIAACALAHQFRDLLDITLIESEQIGTVGVGESTVPPIRSFHRFLQIDEQEFLRAVAGTFKLSISFENWRRPGERYIHPFGLTGHSTLVCAFHHFWLEAQRRGMLSELGDYCLETVASRLDRFALQQSPPVNYAYHLDAGLYARLLRRHAERYGLKRVEGRIQQVRQHAESGCVEALLLEDGTLVEGDLFIDCTGFRGLLIEQTLHTGYEDWKQWLPCDRAVAVQTEAVAAPVPYTRAIAHAAGWRWHIPLQHRVGCGLVFSSAHLSDDEARAKLLHDAAAPPIKEPWLVPFRTGRRRKAWNKNVVALGLASGFIEPLESTSIHLTIAAVMRLLTLFPSEGIAPAMVDLYNAVSRAEMEHVRDFIILHYHANQRDEPMWQACREMALPDSLQQRLRAWRERAHAWQGADELFRVDSWIHVLLGQGIVPAQHHPLARALPDQQLQQFLDAIRQPIDRAVAQMPSQQDFIARYCKAGPEVWAGRAPVAAPA

SEQ ID NO: 88402 - protein, 550 aa, Methyloceanibacter superfactus
  misc_feature (1)..(550): tr|A0A1E3W1Q5|A0A1E3W1Q5_9RHIZ Uncharacterized protein OS=Methyloceanibacter superfactus OX=1774969 GN=AUC69_0 9090 PE=4 SV=1
MRSITIVGGGTAGWLAACVLNRYCKSHDSKHKLDITLIESPTIPIVGVGEASLPGMVVLLNQLGIPESEFFQATDATFKVAAHFINWNHDDKGRPVEFLNILNAPGAIDGRPLADYFVTYDPARAAPDAGMAYVRAFSPVAEIVRGNLAPRRPGEPDFSGEVGYTYHFDATKLAVLLKDVATGRGVKHVLDDVDNVNLDERGYVKSLTLRRQGEHAIDLVIDCTGFRGSILQQALGEPFEPYADYLLNDRAAVVQIPHKDPRIIAPTTRATGFSSGWNFNIPLTTRVGTGYIFSSQFISDEKAIEELLAFYGDQAKGCEPRIIPIRTGRVRKAWVKNCVALGLAGGFIEPLEATAIFMTDLGARWLQHYLPTQDFEPELAAAYNRQVSRVYEEVRDFIQAHYHLNNRQDSEYWRTAREGMKLSDRLQENLKLWRHTTPESLDLDSSYLFGSPVYTLLLIAKGFYKDARLAKAPSLSRTAYDRYRAAERKARPDQLAGLVSHAEFLKTGGKAPVGLFTSPQVVDAPAFASATRIKLPPSPAFSHGRRKPKR

SEQ ID NO: 88403 - protein, 499 aa, Pararheinheimera tangshanensis
  misc_feature (1)..(499): tr|A0A5C8LTD1|A0A5C8LTD1_9GAMM Tryptophan 7-halogenase OS=Pararheinheimera tangshanensis OX=400153 GN=FU839_11 535 PE=4 SV=1
MLEPIQTIVIVGGGSSGWMSAALLAKLTGQRYRIELVESEQIGTVGVGEATIPAIKLYNHLCGINEQEFIRATGATFKLGIEFANWGQQGDSYFHAFGALGRQWEWLSFYQYWLKLKQQGLALPFEHYCIASQMAQQHKFMPADPGKPKSPVSEIAYAYHFDASLYARYLRSLSEKRGVIRHEGVIRHVERDAVSGHIRHLLLEDGRQVAGDLFIDCSGLRALLIGQTMGVGYDDWSHWLPNDSAWAVPSATLNPLPPYTRATAHEFGWQWRIPLQHRTGNGLVFSSAYASDDVAQQRLLQTLEQPASADPRLIRFTTGKRKQMWVGNCVAIGLSSGFLEPLESTSLHLVQTAITRLVNLFPDRSFAKANTDHYNLLAAQEMEQIRDFIIAHYKVTERDDSEYWRYLKQMTVPDSLQQKLDIFQSYGRVHRVADELFREDSWVQVLLGQRLMPERYDPMVDNKTLAQITDFAASTAHVISACVEKMPTHTDFIAGIAAH

SEQ ID NO: 88404 - protein, 508 aa, Pararheinheimera tangshanensis
  misc_feature (1)..(508): tr|A0A5C8LX32|A0A5C8LX32_9GAMM Tryptophan 7-halogenase OS=Pararheinheimera tangshanensis OX=400153 GN=FU839_09 190 PE=4 SV=1
MSKAVKKLVIVGGGTAGWLSAAIIAAQHRSNTQDGLQVVLVESSDIPTIGVGEGTWPTMKNTLQQIGIKEADLFQRCHAVFKQGGRFVNWVHGNEDFYYHPFTVPMGYGRIDLAPYVQDISQFAVESNFQHQICEAGLAPRGFSEGEYQGQCNYAYHLDAGAFADLLKEHCKNNLGVQHRIGTVERCQLSQDGQIQALYLTDGTAPLEADLFIDCSGFSSLLLGKALGVPFEPVEHLLFNDSALAMQVPYDTPDAAIPCHTIATAQNAGWIWDIGLTHRRGVGHVYAGKYLSDDEAEFNLRRYIGPAAQGISARKISYQTGHRSKFWQHNCVAIGMSAGFVEPLEATAIMLVEISARFVADNLPADLATMPLVATRFNQQMLYRWQRILDFLKLHYLLTKRPEPYWQDHLKPESIPQSLQDDLKIWQHRGPQIQDFHGALELFPAASYQYVLYGMGFKPDFSRQSYLYQQQSQAEQIIRRNQQLTAQLLQTLPSHRDYITGWLSSNRG

SEQ ID NO: 88405 - protein, 495 aa, Pseudoalteromonas sp.
  misc_feature (1)..(495): tr|A0A4V1K7A3|A0A4V1K7A3_9GAMM Tryptophan 7-halogenase OS=Pseudoalteromonas sp. A757 OX=2250709 GN=DRB05_12400 PE=4 SV=1
MKTIQSLTILGGGTAGWMCAAYLAKHQPNLSITVIESSKIGRIGVGEGSTPHLQLFMQSLGVKERDWMPACQASYKTGIYFDNWNGDNGSYFHPFFSEMDAKTAEVYFVNANARRRGNEYIDKPEHYFLAAVLAGKQQAPLPQRPLPRALEYGYHFDAQKLADWLRAFSLARGVKHIQSTVSSVQHHAREIMALTLESGEQVKSDFYVDASGFNALLIEKTLEVPFISFADQLLNDSAVAIAGAKTNPLPSSTSAIAMPCGWRWQIPLQGRTGHGYVYSSAHTTPEEAEAQLRQAAQLDKGQAKHLTMKVGMMARSVEGNVFAIGLAQSFIEPLEATALMVTGYSIELLSRLLSQQLEAQAINQQLSELVLGIKEYVLAHYATSNRADSPYWQDAKVAALSLNELDELLTHWRSGADFDAWLNQHKKHSPYIRPSWYCLLGGMDHRDSTCQMPFDQAPQHIEQAAKAYLTKLSDEHFTAHTTALEQLQRAQAFRA

SEQ ID NO: 88406 - protein, 532 aa, Ktedonobacterales bacterium
  misc_feature (1)..(532): tr|A0A4P6JJC6|A0A4P6JJC6_9CHLR Tryptophan 7-halogenase OS=Ktedonobacterales bacterium SCAWS-G2 OX=2509675 GN=E PA93_03080 PE=4 SV=1
MEYHIKHVVILGGGTAGWMSACYLAKNLEGSVAITVVEAPSIPRIGVGEATIPNLHKTFFASLGLREDEWMRACNASFKMGIKFINWRTSGSGEAHPRRWGNSYDAFYHIFGQLPEYERLPLSHYWFARKYRDQTTEAFDYACYKEPPALDANLAPCGQDGKPWTNYAWHFDAQRVADFLKDFAIRKLNVQHREEEMTEALLDERGFITALRTKSGLLLEGDLFMDCSGFRGLLINQAMREPFLDMSDFLLCDRAVATAIPHDDETKGIEPYTSAIAMRAGWAWKIPMPTRFGSGYVYSSRFVSQDQATKDFCQLWNLKPEEAELNHVRFRVGRNRRAWVKNCVSIGLSSCFLEPLESTGIYFITAALYQLVKHFPDNRFDPILLERYNREIETMFDDCRDFIQAHFYFSPRSDTSFWKANKELTLSENIREKIAMYRVGMPVNLPVVDESTYYGNFEAEFRNFWTNSNYYCIFAGLGFLPDHPLPLLTYRNASAEGASPLFEKIKEQQRELLSSLPTNYAYLCQLHGKQAG

SEQ ID NO: 88407 - protein, 507 aa, Erythrobacter sp.
  misc_feature (1)..(507): tr|A0A259K182|A0A259K182_9SPHN Tryptophan halogenase OS =Erythrobacter sp. 34-65-8 OX=1970335 GN=B7X57_06205 PE =4 SV=1
MAVNQRAPIEHVLIVGGGSAGWMTAAALAQTLGPGCRIILVESEEIGTVGVGEATIPPIRHFNQRLGIDEATFVRETGGSYKLGIEFVDWGRLGHSYFHPFGQHGAEFDTVPFYHYWMREHLAGRIGGPIDDFSMGWAMARAGKFVHPSPDRRMIQSTYDYAYHFDAVLYARFLRGYAEARGVTRVEGKVVDVALDGASGDIRSVTLDDGRVLEAELFIDCSGFRGLLIEGALEAGYENWQHWLPCDRAVAAPSLRQADIAPYTRSTARTAGWQWRIPLQHRTGNGYVHCSAFIGEQEAHDTLVDSLGDELAGDPRLLRFVTGRRRAFWHRNCVAIGLSAGFMEPLESTSLHLIQYGILRLLALFPDKAMSPLLAREYNAQTAVEYERIRDFLILHYKATERDDAELWRYCAAMPVPDSLQYKIDHFREFGVLVADERELFNNPSWIAVYLGQGIVPERAPAMATMRSHVPVAERMQSIAGAMQDAVAAMPSHSQFIEQHCRSAVAA

SEQ ID NO: 88408 - protein, 510 aa, Planctomyces sp.
  misc_feature (1)..(510): tr|A0A142WRZ0|A0A142WRZ0_9PLAN Tryptophan halogenase OS =Planctomyces sp. SH-PL14 OX=1632864 GN=VT03_06115 PE=4 SV=1
MTPEPFDIAILGGGFGGTITALVLHRLGFRVIVIDRGVHPRFAIGESSTPIADLVLRDLAIRYDLPRLLPLVKYGTWKAAYPDVTCGLKRGFSYYEQPQGERFAPREDHANELLVAASHDNARSDTHWFRADVDAFLAREVTDAGIPYLDRTEVTIGATGPWLLMARRIGEMRPITAQFLIDGTGDAGVLKGYLGLRDQAERLKTHSRALFAHFAGVKRWGPLIEERGANVTDHPFPTDDAAQHMVLPRGWMWQLRFDTDVTSLGFMLDTRHDPLDTSLSPSEEWEEWLRRFPSIADQLAGAALVDPPGGLRRTGRIQRWIDRAAGPDWALLPHSAGFIDPLNSTGIAHTLCGIEKLALAFERSFGKPALADEMATYAEAVSREIELIDELISGCFDAMPHFPAFVTWSMVYFAVVTSYEHGRSMGEIPPGTPFLGADSEARWSMVRGARQKLMDRLSRIEDKASESSARSEADAWLSEHVCQAIAPYNIAGLCNPQVKNMYRYTAADKG

SEQ ID NO: 88409 - protein, 504 aa, Sphingomonadales bacterium
  misc_feature (1)..(504): tr|A0A2M7HJ09|A0A2M7HJ09_9SPHN Tryptophan halogenase OS =Sphingomonadales bacterium CG12_big_fil_rev_8_21_14_0_ 65_65_10 OX=1974094 GN=COW16_05975 PE=4 SV=1
MAIENIVIVGGGTAGWMAAAVLSRMGNGRGIDVTLVESEAIGTVGVGEATIPPFVDFNKLLGISEAEMLAAVGGTFKLGIQFVNWGKLGDSYIHPFGNYGYEIDGVSFHHIWHAMKEAGDMRPIQVFNLETIAAHFGKFARTEDYQKSGDLPPSNYAYHLDAGRYAKFLRKFAEDRGVVRQEGKVSEVNLDPESGFVFSITLEGGQEISGDLFIDCTGFRGLLIEQALETGYEEWTHWLPCDRAVALPCGRDDGSPPLPYTRATAHSAGWQWQVPLQHRNGNGHVYCSQFMEADEATDILVGNIAGKPQADPNHLRFVTGHRKKFWNRNVVALGLSAGFMEPLESTSIHLINTGLNKLVSLLSSNGITQAQEDAFNRFTLKEYERIRDFLILHYKATERTDSEFWNYCRTMSVPDSLTEKIELFRHNGQIFREEDELFTETSWAAVMMGQGIAMEGHNIMVDPSKLAALKGEIDGIEQSIRWLTQHMPTHQQYLAKYCPAKDAA

SEQ ID NO: 88410 - protein, 511 aa, Sphingosinicella ginsenosidimutans
  misc_feature (1)..(511): tr|A0A5C6TUH2|A0A5C6TUH2_9SPHN Tryptophan 7-halogenase OS=Sphingosinicella ginsenosidimutans OX=1176539 GN=FRZ 32_10140 PE=4 SV=1
MRDDLIRKVVIVGGGTAGWMAAAAMSRIIGGMPGLSIELVESEQIGTVGVGEATIPQLVLFNQLLGIDEDEFIKATHGTYKLGIEFRDWVRIGHRYIHPFGFYGPDMKGIEFYHYWLKGRGLGDATPLDAYSISAMAALSTKMMRPRPDLPNSPVSKIAYAFQFDASLYARFLRTRAEAWGVVRTEGRIVEVAQDAESGFIEAVLLEDGRRIEGDLFIDCSGFRGLLIEQTLRSGFEDWSKWLPNDRAIAIPTESSGDETPLTRATARPAGWQWRIPLQHRVGNGHVYSSAHMSDEDALDLLLANLDGAPLADPNRLRFKAGYRRQAWVKNVVALGLAGGFLEPLESTSIHLVQSGIARLMTLFPSRRWNDAEIRRYNERTIREYEDIRDFLVLHYLATQRDDTPYWDYCRNIDPPPGLAEKLEMFRSNGRVFREHEELFTETSWQAVLIGQEIEAGGYHPVADLLSDEETLTRLRHIREVIADTVRQLPTQREFLRMNNSASDVVMKRAS

SEQ ID NO: 88411 - protein, 513 aa, Shewanella baltica
  misc_feature (1)..(513): tr|G0AXR0|G0AXR0_9GAMM Tryptophan halogenase OS=Shewane lla baltica BA175 OX=693974 GN=Sbal175_3194 PE=4 SV=1
MTSRKDIKSVVIVGGGTAGWISACHLAKKLNARTPQIQVILVESPNIPTIGVGEGTVPILRETLKYFGIREDDFIHRCDVTFKQSVKFIDWNEPNSGEYYHHLFDYPYFKDFTSTWLNKSLSDRGRYADLVSVQGHLIDAGFGPKAMTQPQYRGAMHYAYHLDAAKFTKLLTEFGVEQLGVKHLLAEVIDTKIDAQGNILELYTDNAGVLTADLYVDCTGFSAQLIGSACNVPFVDKSDILFVDSALVVQLPYEDKYTPIPCFTKSTAQEAGWIWDIGLSERRGVGYVYSSQYSSIEQAESVLREYLGKAAEEISFRHIPMKVGYREKSWQGNCVAIGLSSGFVEPLEATGLLMFDATARMLAECFPANTDVMPLVANRYNQRVSNAWNRVIDFIKLHYVTAKRMDTPFWVDNKNEISIPDSLKEHLELWRYHIPTAYDFTSTLEFFNLENYLYVLYGSDFESKLKMTLNDEEERLFSEMTDKLDKQVTLLKSQLLPHRELIERIKLYGIQLN

SEQ ID NO: 88412 - protein, 498 aa, Colwellia sp.
  misc_feature (1)..(498): tr|A0A1V0KWF7|A0A1V0KWF7_9GAMM Uncharacterized protein OS=Colwellia sp. PAMC 21821 OX=1816219 GN=A3Q33_17865 P E=4 SV=1
MSNEQQIKTFVIVGGGTAGWISAAILSRALLNLPCKIRLIESPHVPTIGVGEATIPSIVDMLEYLKIPLAEFILKTNATFKLGIKFCDWHKLGSHYWHPFGHVGNKIEGKPFYQHWLKNKLNGGTSEFTDFSPAIALAKQNRFFIPDPQNPTNLSASTYALHFDATLVAEFLSQYCQNNSVEHIKGHVQNVVLDTQGNISQLTLENGALVDGDFFIDCSGQQSLLLGKALRIGYENWQHYLPVNKAVAAQSKVMRPLPSFTSSFAHEHGWRWQIPLQNRTGNGYVYCDQYCSDQQAQDLLAKNVGDFITEPRIISFTTGKRHKMWHKNCLAVGLSSGFLEPLESTSIYLIMKAMLNFVQTIPSKKLHQAPIDEFNRKMDHEYECIRDFIVLHYSETKRTDSPFWQMWQNLAIPDSLETKLDLFRSQGQLFHDTDDLFATDSWYSVLEGMGVRPNEYDPLIDASDYSKIQQALVSSQIALDQSAAKALEHMAYIKKIKF

SEQ ID NO: 88413 - protein, 496 aa, Colwellia sp.
  misc_feature (1)..(496): tr|A0A1V0KV89|A0A1V0KV89_9GAMM Tryptophan halogenase OS =Colwellia sp. PAMC 21821 OX=1816219 GN=A3Q33_15610 PE= 4 SV=1
MTNKIKKVVVLGGGTAGWMSASLIKKLMGKSIDVELVESEDIASVGVGEATIPPIRLFNSVLGINEAEFLRETKATIKLGIKFENWKNTEESYFHTFGAAGKSSPFCHFHHYLKRAQDNGLKDNLWDYDLNYLCATQGKFAQIKSKDPIIDIPYAFHFDAGLYAQFLRKFNEKIGVKRTEGMVEKVEQCKKTGNVNSLVLKSGEVIKGDLFIDCSGFRGLLIQQTLNTGYENWGHWLPCDRAVAVPSERFDETVPYTRSIAHAGGWQWRIPLQHRNGNGLVYSSKHYSDDQAKALLLANIESEPLAEPRVIKFTTGRRRKQWHKNVIAVGLSSGFLEPLESTSIHLIQSAIVRLIHMFPQNGISSAQVDEYNRQSKVEYEQIRDFIILHYHVNQRDDSQFWRDLREMDIPESLAEKIKLFKESGKIFREQNDLFNEGSWLQVMLGQGIEPEDYHPMANDMPLEQLNSMLEKIKAIKHEPLSKLPSHDEYLTNFCRL

SEQ ID NO: 88414 - protein, 385 aa, Unknown
  misc_feature (1)..(385): tr|A0A0R2UAX9|A0A0R2UAX9_9GAMM Tryptophan halogenase (F ragment) OS=SAR92 bacterium BACL26 MAG-121220-bin70 OX= 1655626 GN=ABS24_08745 PE=4 SV=1
QHFWLKGKERGISKEFGDYSVELQAAKANKFAVLPNNGLNYAYHIDASLYAKFLRRLAERHNTKRVEGKITVVNQHDNGDIKSVVLASGKIIQGDLFIDCSGFAGLLIEKTLNTEFEDWSQWLPCDSAIAVQTRSVRDPIPYTRAIARESGWQWRIPLQSRVGNGLVFCSKYLTDQEATQTLLSNLEGEVLTEPRVIKFRTGQRTQHWNRNCIALGLAGGFVEPLESTSIHLIQRGIIRLMQMFPFDGVVEPDVQEFNSQMKDEFYFIRDFIVMHYHLTERTDTEFWRHCKAMKIPDSLQHRLDLFKKTGRIFQQAGDVFAENSWSQVMLGQGLIPEHYHPIVDMMSDDELEQFLKKISISVEQTVSQLPSHQQFLSQYCPAKSI

SEQ ID NO: 88415 - protein, 505 aa, Sphingosinicella ginsenosidimutans
  misc_feature (1)..(505): tr|A0A5C6TV38|A0A5C6TV38_9SPHN Tryptophan 7-halogenase OS=Sphingosinicella ginsenosidimutans OX=1176539 GN=FRZ 32_10155 PE=4 SV=1
MTAGGEQVNIVVVGGGTAGWMTAAALVKLLPRRCTVHLVESEAIGIVGVGEATLPHIRAFNEKLGIAEAEFMARTRATFKLGIEFQGWGKPGDSYIHPFGTFGTGQSEVDFHQYWLRCIHQGIPVPPIQELSAACMIARMNRFDLPSTDPNRLESTFGYAYQFDANLYAPYMRAFAEAMGAKRTEGRIVDVHRNGETGDIESVQLESGERIAGDLFVDCSGFVSLLLGKALGEPFQDWSKWLPCDRAVAMPCRTETALTPYTGVIAMPGGWRWRIPLQHRTGNGYVYSSAFMGDDEARAGLVAAVEGEPIAEPRVLRFRAGRRERSWVHNCVGIGLASGFLEPLESTSIYLTQQAITALLELFPEREVSPIDRAEFNRLVDMEYDRVRDFLILHYHATTRAGMPFWDYVRTMEIPDSLAEKLELFRRRGRIVKYREGAFLDASWIAVYLGQGVMPEGHDPRADIPSAESLARGMAALHEEIRAAATRLPDHRQHIESYCPMADAA

SEQ ID NO: 88416 - protein, 503 aa, Lysobacter sp.
  misc_feature (1)..(503): tr|A0A514BVL9|A0A514BVL9_9GAMM Tryptophan 7-halogenase OS=Lysobacter sp. SJ-36 OX=2591633 GN=FKV23_16040 PE=4 SV=1
MTDNRIRKVIVVGGGSAGWMTAAFLSQAVGTDIELRLIESDEIGIVGVGEATIPPIVNFNTALGIDEDEFIKATQATFKLGIQFRDWGAQGETYTHGFGTMGHSTGVVDFHHYWLKMRQAGKVDGIENYSINLLACDRNRFMRASDQYPNSPLQDIAHAFHFDAGLYARFLRGYAEGHGAIRTEGRIASVQQHPESGFVTSVTLANGDVHEADLFVDCSGFHGLLIERTLQTGYEDWSHWLPCNRALAVPCRSVAPLTPYTRSTAHAAGWQWRIPLQSRIGNGHVYCSEFMSDDEAAGILMRNLDGEALAEPRPIRFTTGRRKRFWNRNVVAIGLAGGFMEPLESTSIHLVQKAIARLVAFFPNRHFDPADIDEFNRQSVQEYEQIRDFIILHYHATRRDDSAFWNHCRTMPIPDTLRHKIELFKSNGRVQRLNNELFTEVSWFQVMYGQGIHPRGYHGLADVKSEAKVEGMLADVRRVIHGVVELMPTHEEFIAQNCKAEPV

SEQ ID NO: 88417 - protein, 502 aa, Pseudooceanicola batsensis
  misc_feature (1)..(502): tr|A3U2I3|A3U2I3_PSEBH Tryptophan halogenase OS=Pseudoo ceanicola batsensis (strain ATCC BAA-863 / DSM 15984 / KCTC 12145 / HTCC2597) OX=252305 GN=OB2597_03933 PE=4 S V=1
MRVVIAGGGTAGWMAAAALAKYFGGTVAITLVESDEIGTVGVGEATIPQIRLFNSGLGIDEREFLRETNGTIKLGIEFVDWRRRGERYFHGFGEVGRAIGLVPFHHYWLRYAGEGGELPLEEFSPNAVAAREGRFGPGAGVAGARLPASAYHFDATLYARFLRRYAEARGVTRREGKVLSCTRNGGTGFIEALEMEKGDRIAGDLFIDCTGFRALLIGETLGIDYEDWSHWLPCDRAFALPSEGRGRLDPFTRSTARGAGWQWEIPLQHRTGNGHVFASAFTDEQAALATLTGTLPGKALAEPRLLRFATGKRRRMWHGNCVALGLSSGFLEPLESTSIHLIQAGIARLLALFPDRSCDPALVEEFNRQLDFEYEAIRDFLILHYHATDREDTEFWRYCRTMAIPESLSDKMELFRASGRIVRFNTELFDVPSWLQVMWGQGLRPRTYHPMVDAAPDADLTRYIAMNAGEVRQQVDTLDLHETYIARVARAGRDTAAPAGGG

SEQ ID NO: 88418 - protein, 503 aa, Stakelama pacifica
  misc_feature (1)..(503): tr|A0A4R6G0M7|A0A4R6G0M7_9SPHN Tryptophan halogenase OS =Stakelama pacifica OX=517720 GN=EV664_101603 PE=4 SV=1
MGSPMNRHMVIAGGGTAGWMAAAALARFLPNTVRITLVESEAIGTVGVGEATIPQIRLFNQRLGIAEDQLLAATHGTIKLGIEFDGWNGPESRYIHAFGTIGRPLGNVPFHQHWLRHCCTGRAGALHEYSVAACAAHQNRFAPDLGRPELPTGLAWAYQFDAARYAALLRAHAEQAGVTRLEGRINHVAVDDRGHIASLHLDDGRAVSGGFFIDCTGFSARLIGDALGVGHEDWSRWLPCDRALAVQSAATAPLDPYTRATARTAGWQWRIPLRHRTGNGMVWCSAYQEEQDAADLLLANLDGAPLTDPRPLQFATGRRKAAWQANCVALGLASGFLEPLESTSIHLIQSGIDRLLQLFPAGDPIPAEVAEYNRQTAREWECVRDFLILHYHAANRPEPFWAAYRNQPAPDRLAHRIELFRATGRLFRDSDDLFTDVGWLQVLMGQGIMPERHDPLADTVPERDLDEFLTLARRHVANVVSRMPDHQAYLMREAAPGKNGEPN

SEQ ID NO: 88419 - protein, 530 aa, Colwellia sp.
  misc_feature (1)..(530): tr|A0A1V0KW09|A0A1V0KW09_9GAMM Tryptophan halogenase OS =Colwellia sp. PAMC 21821 OX=1816219 GN=A3Q33_17620 PE= 4 SV=1
MMQSEINKIVIVGGGTAGWITAGLIAAKHLAANSTSLSITVIESPNVPTIGVGEGTWPSMRETLKTIGINEADLFTYCDASFKQASKFVNWEKLPNEGVATHPLDNAYFHPFSLPTGINKLDLGTYIGEQSSLVLSPQTFSQQVCFQSILCERNLAPKQITHKAYDYVANYGYHLNATKFAELLKIHCLNKLGVQYISAHITEINNDKLGDITSLSTDKADVIEGDLFVDCSGSQSLLLGKHYNIEFCSKKSILFNDSALAVQIPYEHPDATIASSTLSTAQTAGWIWDIGLQSRRGVGHVFSSRHTSDENAKQALLHYIKQSGTTINIDDDSIRKLSFSPGYYKKFWHRNCVAVGMSAGFIEPLEASALAMVEQAAKMISEQLPTTKRTMEITAKRFNEKFTQHWQQIIEFLKLHYVLSKRTDSSYWLDNKDPLTIPQSLQNMLELWKFQSPSSYDIPHNNPLFPAASYQYVLYGMNFTTERLRVNIQNEPLMHQMLLDIQNKRQQLVKVMGANRDLIHKIKQYGLTNI

SEQ ID NO: 88420 - protein, 503 aa, Colwellia sp.
  misc_feature (1)..(503): tr|A0A1V0KVW6|A0A1V0KVW6_9GAMM Tryptophan halogenase OS =Colwellia sp. PAMC 21821 OX=1816219 GN=A3Q33_17475 PE= 4 SV=1
MHLCIVGGGSAGWMTAAALAKKFSRLKLQITLVESQEIGTVGVGEATLPHIRFFNQTLGIDERDFMRKTKATFKLGIEFVDWGSKGDSYIHPFGDFGEKINSVDFYQYWLLAQKNNDMGKLEDYAFGIAAAKSNKFTIPELGAPDLKNSFGYAYQFDSSLYAKYLREFSCKLGVNTIEGKVVNTSLNETNGNISALTLENGQRISADLFVDCSGFRGLLIEQSLQSGYQDWSNWLPCDRAIAVPCERTQQLTPYTRSTAKEAGWIWRIPLQHRTGNGHVYCSQFISDDAAQHSLLEQLDGKVLAEPRKLRFKTGRRNHFWKNNVIAIGLSAGFLEPLESTSIHLIQEGITKLIELFPAFDDQQTTSNTLTIDELDITEYNAQMSLEYERIRDFLLLHYVANDRSDSPLWAYFKNMTLPDSLQEKLDLWMHRAYIQRYEIGAFLPPSWVAVLLGQNLIPHNVDPRVQAFGTSDIRSKANAMREDIKLGLHQAEGHQAFLNRYIS

SEQ ID NO: 88421 - protein, 483 aa, Colwellia sp.
  misc_feature (1)..(483): tr|A0A1V0KY63|A0A1V0KY63_9GAMM Tryptophan halogenase OS =Colwellia sp. PAMC 21821 OX=1816219 GN=A3Q33_17490 PE= 4 SV=1
MSAAALSSMLRPDDVQIVLVESEEIGTVGVGEATIPDIISFNRMLGIDEAEFLKATNATFKLGIEFSDWGKLGDKYFHPFGNHGADMNGIDFHQYWLHTRQAGNTNSLEEYSMCAVAAKSMKFALPNDNPRSLLSQIGYAYHFDATAYALFLRNYAQKRGVIRIEGRIDLVLLNEQTENISALVMQNNERVEGDFFFDCTGFKSKLLGETLGVPFHDWSKWLPCNSAQAVPSERRGELLPYTKSMAKTAGWQWRIPTQHRTGNGHIYSTDFMNDQQATDILMQGLDAPALSDPRTLRFTTGCRDKFWHKNCLAIGLASGFLEPLESTSIFLIQQGISRFISLYPSLTPAPKVVEEYNRLMTREFHQVRDFIILHYKATQRTDSEFWRYCKNMSIPDSLQHKMELFQCAGRVFRDDHELFSTSSWVAVMLGQNIYPETADPMLLGVPIQNIEQSLQSMQRAMQQTSLQMPTHAEFIKNYAGSSV

SEQ ID NO: 88422 - protein, 499 aa, Sphingomonas sp.
  misc_feature (1)..(499): tr|A0A1H8CUK6|A0A1H8CUK6_9SPHN Tryptophan halogenase OS =Sphingomonas sp. S6-262 OX=1166340 GN=SAMN05192583_175 7 PE=4 SV=1
MDQQPVTIVIAGGGTAGWMTAAALGQFIESGYRIRLVESEEIGTVGVGEATIPQLRLFNSALGLDENAFLRATQGTFKLGIEFDGWRRPGESYLHAFGDIGRDVGLIAFQHYWLRARSLGVAGPLSHYALNDIAARAGRMHRGPAVTANTIPSLPYAFHFDAGLYAAYLRRFAEMRGVARTEGRIAHVERHGDSGDVAALHLASGERVEGDLFIDCTGFRGMLIEETMAAGFESWAHWLPCDRALALPTSNIAPPPPYTRAIARGAGWQWRIPLQHRTGNGLVYSSVHLSDDEAASALLGNLEGETLADPRPLRFTTGRRRQAWKGNVVAIGLASGFLEPLESTSIHMIQSAISRLLKFLPGRRIDPAERREYNRQTDYEIERIRDFLILHYHANERSEPFWQAMRAMPIPDTLAERIALWRGKGHIVREHEELFTEVAWFQVFAGQGVDPAGWHPLANAIPERDLGEFMETIEALYRREVGRWPAHDAFIAQHCAARR

SEQ ID NO: 88423 - protein, 505 aa, Croceicoccus marinus
  misc_feature (1)..(505): tr|A0A1Z1FB79|A0A1Z1FB79_9SPHN Tryptophan halogenase OS =Croceicoccus marinus OX=450378 GN=A9D14_07250 PE=4 SV= 1
MSDVTPTRVVVAGGGTAGWIAAMALARQLGRLVDVTLVESDDIGTIGVGEATIPTARSFHEFLRIDERAFVEATGATFKLGIQFENWARPGDQYIHSFGTFALQNWVADFQHFWLEARHAGIDTPMGAYCLEHEAALAGRFSNEGKPALSYAYHLDAGRYAAFLRTIAETNGAQRVEGRIADVRHQPESGDIAALVLEDGREIEGDLFVDCTGFRALLIGQAMGSGYDDWSEWLATDAAWAVQTETDEAPPPLTRAIAHDAGWQWRIPLQHRTGNGLVFASDYLDPDKARDRLMGSITGRPRSEPRLIRYKTGKRQQMWRGNCLALGLSSGFVEPLESTSIHLVMIGVTRLIQMFPFAGSDQAVRDRWNTMADTELEKVRDFIILHYKLTERDDSAFWRRCRDLAIPDSLRHRIASFTSSAQAWQAPDDLFRAESWLQVMLGQRLQPEHWHRIGALMSEGRLEGELERQRAAIAAHVDRLPKHQDFIERLLSGKAQAGAGLVHSG

SEQ ID NO: 88424 - protein, 501 aa, Nitrospirillum amazonense
  misc_feature (1)..(501): tr|A0A248K153|A0A248K153_9PROT Tryptophan halogenase OS =Nitrospirillum amazonense CBAmc OX=1441467 GN=Y958_249 10 PE=4 SV=1
MSNRRIRKVVILGGGTAGWMTAAALAKVNTPPQFEVTLIESDDIGIIGVGEATIPTIHWFNRLVELDEAQFLRETKATFKLGIEFVGWNGGNSRYFHPFGRYGGPADAQMFFHRWIRASLGGFPHGHQDYSLATLAAMANKFGPPAPDPKSLFSTLGYAYHFDAGLYAAHLRRRSEARGVKRVEGKVERIEQDPETGFVTRLTTHRGQVVEGDLFIDCSGLRALLIEGVMNSGFEDWSHWLPCDRALAVPCERVTAPVPYTRATAHAFGWQWRIPLQHRTGNGIVYSSRFAGDDEAASTLMANLDGKALADPRLIRFQTGRRRRSWIKNVVAIGLSSGFLEPLESTSIHLIQSGIAKLLSLFPTRDCPEETAGQFNRVYGADVESVRDFLVLHYSRTQGRDEPLWRHCQAMAVPEGLSLKERHFTRTGRIVLSTDELFREASWFAVLMGQGLRATDYNPLLDTMPADENLAHLLRLRDQMAKAAATLPSHEEYLRRVMGTA

SEQ ID NO: 88425 - protein, 519 aa, Streptomyces sp.
  misc_feature (1)..(519): tr|A0A2S6X266|A0A2S6X266_9ACTN Flavin-dependent tryptop han halogenase RebH OS=Streptomyces sp. MH60 OX=1940758 GN=rebH PE=4 SV=1
MSTHNPGKVVIVGAGVAGAMTAAYLKAAFGDRTEVVLVGFPPAGEPAGHESTLGDIRDFFDFLGLAEEDWMPACDATCKLAVRVQDWSGPGQYFYLPFEPARRAGGFPLTEWWLRQRPSGRFDRDCFVSAWLCDAGRVPRPAADTGPGADAAAVPYGYHLDSAALTRLLTRYAAERGAVSLTGAPTDVRLDARGWIECLVTEEHGEVHGDLFVDCTGERGLLLHRALKVPRVSYRDTLPNDSLVTLEAPADMRTRGIPPYTTVTARGTGWMWTVPLFDRIGAGHAYAGEYCTPEEAERALREHVGPEAAGAAAVHTPLLPGRGAQAWKHNCVAVGASAGRAEPLGTVGDASAAHHALEREFATLHYQGAARDDTQYWRDAKTLALPGGLAERLAGWRVLPPGPEHPGDGHRGRPAHAYTSVLIGTGGAPPRAPAALPLVGDAVALREFAAVRHTAAALTGTSPTGYEYLAQLGATSPPAERRSVLSTGQRPRPPQVGEQEFPHQGPTGGGTLDCGRAQG

SEQ ID NO: 88426 - protein, 505 aa, Lysobacter sp.
  misc_feature (1)..(505): tr|A0A514BWJ4|A0A514BWJ4_9GAMM Tryptophan 7-halogenase OS=Lysobacter sp. SJ-36 OX=2591633 GN=FKV23_02880 PE=4 SV=1
MSDNRIRNVVVVGGGSAGWMAAATLATYLGKGASIRLVESEEIGIVGVGEASVPHMKTFNSEMLGIKEVDFVTHTQGTFKLGIEFRNWGRIGDSYIHGFGKIGQGIGPLPFHQFWLKLFLAGRAADIGAYSLQTVAAPQGKFMVSPGNAPAGSPLSDIAYAYHFDAGLYARFLRNLSEKRGVKRTEGKIVDVIQRAEDGFIEAVLMEGGERIEGELFIDCSGFRGLLIEQALKTGYVDWSQWLPCDRAMAVPCENVGPPTPYTRSTALKAGWQWRIPLQHRTGNGYVYSSQHISDDEAAAALLTNLDGKALADPRALRFTTGMRRKFWNRNVIALGLASGFLEPLESTSIYLVQSGLGRLLSLFPGRDFDPLLAERFNRESTFEYERTRDFLILHYNATERDDTPFWDYCRTMPIPDTLREAIDLFRSDGRYFRNGEDFFALPSWVQVMLGQRIVPRGYHPIVDEMPEDDLVAHVEHMRQVIANCVTAMPLHQDFIDQYCKAPKT

SEQ ID NO: 88427 - protein, 501 aa, Erythrobacter sp.
  misc_feature (1)..(501): tr|A0A259K4C2|A0A259K4C2_9SPHN Tryptophan halogenase OS =Erythrobacter sp. 34-65-8 OX=1970335 GN=B7X57_00685 PE =4 SV=1
MAIEKIVIVGGGTAGWMAAAALSRIVGARGVTITLIESEEIGTVGVGEATIPPFVEFNNLLGIDEREMMAACQASFKLGIQFVNWGQVGDSYIHPFGAYGYHMGGIAFHQIWHRFREMGDKRPIQAFNLETMAAYFGKFSRTEDYAREDLPPINYAYHIDATRYARYLRSYAEQRGVLRREGRVADVTLDAESGYVASVTMADESVIPGDLFVDCSGFRGLLIEQALETGYEDWRHYLPCDRAVALPCEREDGSGPPPFTRATAHSAGWQWCVPLQRRNGNGHVYCSEHMSDDEAHGILVNNLAGKPAAEPNFLRFITGRRKKFWNRNVVALGLAAGFMEPLESTSIHLVHTGINKLIALLSLDGITQAQIDAFNRLTTKEYLRIRDFLILHYNATERTDSPFWNHVRTMPVPDTLTEKVELFRANGQIFREEDELFTETSWAAVMMGQRIAMGGHNAIADKIAGPDLKKELDEMESSIRYLVQHMPTHAAYLDKYCPAAA

SEQ ID NO: 88428 - protein, 516 aa, Sphingosinicella ginsenosidimutans
  misc_feature (1)..(516): tr|A0A5C6TW93|A0A5C6TW93_9SPHN Tryptophan 7-halogenase OS=Sphingosinicella ginsenosidimutans OX=1176539 GN=FRZ 32_10145 PE=4 SV=1
MNEHSIREVVIVGGGTAGWMAAAAFARFLNNGYTRITLIESAEIGTIGVGEATIPPLITFNRMLGINENEFLRATKGTFKLGIEFVGWGGEGERYFHPFGYHGHDLEGVHFHQLYLRERKRRVMQDISAWSMSAVAAQLGKFARPPADARPPFGQLLYAFHFDASLYGQFLRAYAEGRGVRRIEGKVVDVAQDGESGHVRSVTLADGQVIEGDLFIDCSGFRGLLIEQTLKTGYEDWSNWLPCDRAIAVPSEHAVAPDPYTRVTTRRAGWQWRIPLQHRMGNGYVYSSAHISDDDAERELLANLEGPPLDQPRRLSFVTGRRTLAWNANVVSLGLASGFIEPLESTSIHFIQAGIARLISLFPDKRFNPVERDEYNRQMQNLFEDVRDFIVLHYKATRGTTDFWKRCQALEIPSTLQTKIDLFRAKGRVFREGFELFATTSWVAVFLGQHIVPEDYEPAVDALDEDKIAQALEQMRIGYLETAQAMPTHAEFVARCCAPPQPQAEAPFAFASGFGA

SEQ ID NO: 88429 - protein, 498 aa, Stakelama pacifica
  misc_feature (1)..(498): tr|A0A4R6FKL2|A0A4R6FKL2_9SPHN Tryptophan halogenase OS =Stakelama pacifica OX=517720 GN=EV664_10857 PE=4 SV=1
MKPVQRIVIAGGGTAGWMAAAAIAHNMGETVDLTLVESDAIGTVGVGESTIPPLATFNRVIGVKEADFMAATNATFKLGIWFEGWRTGAADDRYFHSFGITGRDHWTAGFQHFWLHGREKGHHQPYDDYCLELVAAREEKFAHLPDNRLNYAFQLDATAYGRFLRRLAEQNGARRVEGRIAEVELDGASGDIAALKLESGERIEGDLFIDCTGFRALLIDGALHAGFEDWTHWLPCDSAIAIQTESGRPAPPFTRAMAHDAGWQWRIPLQHRTGNGLVYCSRYLSRDDALARIEGNLEGAAITSPNFLRFTTGARRRQWHRNCVAIGLSGGFMEPLESTSIHLIQRAILRLIRMMPAGGVISERDIAEFNDQQLLDMEQIRDFLILHYKATERRDSAFWRHCAAMEIPDSLAQKIELFRETGRVFRRNEELFAENSWVQVMMGQGIVPQRYHPIAAKLGEAELDRLLSGLRQDVARTVASLPSHTDYIARYCAADTTA

SEQ ID NO: 88430 - protein, 510 aa, Sphingomonas sp.
  misc_feature (1)..(510): tr|A0A1H8DGP8|A0A1H8DGP8_9SPHN Tryptophan halogenase OS =Sphingomonas sp. S6-262 OX=1166340 GN=SAMN05192583_192 3 PE=4 SV=1
MRRDAIRRVVIVGGGTAGWMAAAAISRVLGEMPGLSIELVESEEIGTVGVGEATIPQIVLFNQMLGIDEAEFVRETRATYKLGIEFVDWLRPGHRYVHPFGFYGLDMKGIEFHHFWLKGQALGQHAPLDDYSLCIVGGLQGRFAHPRPDQPGSPLSKIGYAFQFDAGLYARFLRRRAEGHGVVRTEGRIVDVERDGTTGHVAAVLLQSGQRVEGDLFLDCSGFKGLLIEGAMEAGFEDWTRWLPCDRAVAVPCENGGDRQPLTRSTARGAGWQWRIPLQHRIGNGYVYASQHISDDEATATLLVHLDGTPLAEPRQLRFTAGHRRSAWVGNVVALGLAGGFLEPLESTSIHLVQSAIARLLTYWPNRRFDQREIDRFNAAHVADYVDIRDFLLLHYRATERDDTPFWTYCRTLEPPPGLAEKLAIFRANGRIFRNHDELFTETSWLSVMVGQGVLPGDYHPAADLLSDDETLSRLHHIRQVVADTASIMPMQDDYLGQIGCTLHHAGIRS

SEQ ID NO: 88431 - protein, 131 aa, Pseudomonas sp.
  misc_feature (1)..(131): tr|A0A2N7XTY7|A0A2N7XTY7_9PSED Tryptophan halogenase (F ragment) OS=Pseudomonas sp. GP01-A4 OX=2070571 GN=C1X83 _34965 PE=4 SV=1
VMATVEAFLDAVDANGFTPAASAPFNDTIAARYDGVRDYIVAHYRLNQRATDPIGYWAAARALSHLSDPLKSLMSAWFTGADMAALIEQMGIGRYYSAISWHCLMAGYGTFPDDARLVPAGPEIERIDMLK

SEQ ID NO: 88432 - protein, 499 aa, Colwellia sp.
  misc_feature (1)..(499): tr|A0A1V0KVZ7|A0A1V0KVZ7_9GAMM Tryptophan halogenase OS =Colwellia sp. PAMC 21821 OX=1816219 GN=A3Q33_17495 PE= 4 SV=1
MQSMDVKNVVIVGGGTAGWMSAAAMSKLLGSKKINIRVIESESIGTVGVGEATVPHIQYFNRLLGIDENSFIKKTNATFKYGIEFVDWHKRGESYFHSFGPYGMDMEGIHFHHMWLRQQQAGTAKPIDEFNLQIQAAKAGKYMPARPELQGSPLSALSYAFQFDAALYAAFLRDYSEKNGVTRIEGKIVNVTQAANTGHIESVTLEDGECIKGDLFIDCSGFKGLLIEETLKTGYDDWSLYLPCDSAVTRLSERMAELPPYTRATAKAAGWQWRIPLQSRTGNGYVYSSQFLSDEDAIESLNKDLDTAPISDPRQLKFKTGIRKQTWNKNVVSIGLSSGFLEPLESTSIHLIQTAIARLMTNFPDMSFNQPDIDYYNERTKAEYMQIRDFLILHYKATTRDDSPFWDYVREMDIPVSLEKRIAIYKENARLYSEDKVLFNHSSWFAVFNGQGIHPQRYHPIANFLEEKEMERRMAEIHTVTQKCLSIMPSHDEFLSKMI

SEQ ID NO: 88433 - protein, 521 aa, Xanthomonas sp.; identical to SEQ ID NO: 83183
  misc_feature (1)..(521): tr|A0A3Q9Q561|A0A3Q9Q561_9XANT Tryptophan halogenase OS =Xanthomonas sp. ISO98C4 OX=1680158 GN=AC801_20100 PE=4 SV=1

SEQ ID NO: 88434 - protein, 503 aa, Shewanella baltica
  misc_feature (1)..(503): tr|G0AXM1|G0AXM1_9GAMM Tryptophan halogenase OS=Shewane lla baltica BA175 OX=693974 GN=Sbal175_3152 PE=4 SV=1
MTRAIKRVVIAGGGTAGWMAAAALTKLMGKHLEIVLVESDEIGTVGVGEATIPTLHIFHRLLGLKEQEVMAATNATFKLGISFENWQDINKNYLHSFGFLGKDCWACGFQHFWLKGKQLGMVSEIGDYCAEHLAARQGRFAVLPNQDYNHAYHMDASLYAKYLRKMAEQHGIHRIEGKIKQVLQHHDSGNIKALVLENDETIEGDLFIDCTGFRALLIEQTLNTGFEDWSHYLPCDSAIAVQTQSVGAPIPYTRSIARDSGWQWRIPLQNRTGNGLVFCSKFISDEDATELLLANLEGEPLNKPRVIKFKTGTRRLHWHKNCVAVGLSGGFLEPLESTSIHLIQRSIIRLMQLFPSAGIVQSDIDEFNQQTKLEMDNIRDFIILHYKATEREDSRFWRYCKNMDIPASLKHRIEMFADSGKVYKYGSELFGESSWIQVMMGQGIMPKHYHPIVDVMEEPELEAFLNNIKSTVKRKVESLPAHIDFIQHYCPAEVLANTKPMAM

SEQ ID NO: 88435 - protein, 290 aa, Caulobacter sp.
  misc_feature (1)..(290): tr|A0A257WTA7|A0A257WTA7_9CAUL Tryptophan halogenase (F ragment) OS=Caulobacter sp. 12-67-6 OX=1970329 GN=B7Z44 _19045 PE=4 SV=1
PTAAASAQAADGSLKTGYDDWRSWLPMDSAIAVPCASVTPLTPFTRATAREAGWQWRIPLQHRTGNGHVFCSDYIDAAQATDVLMRNLDGAPLADPRQLTFTTGRRKRFWNRNVVAMGLASGFMEPLESTSIHLVQSALSRLIALFPNADFNTVEIDEYNRQTALEYEYIRDFLVLHYKATTREDTPFWRACKAMEIPDTLKARIELFAQSGRIFSKEDDLFKEASWVQVLIGQGVLPGAAHPLTGVVTDQQLDEYMANIRQIMGRAVEALPDHADFIARQCAAASRPAA

SEQ ID NO: 88436 - protein, 512 aa, Pseudoalteromonadaceae bacterium
  misc_feature (1)..(512): tr|A0A2E9T306|A0A2E9T306_9GAMM Tryptophan halogenase OS =Pseudoalteromonadaceae bacterium OX=2026783 GN=CMK63_1 1395 PE=4 SV=1
MSKIINNIVIIGGGAAGWLTAGLLAKEHPHLHITLIESADIGISGVGEGTWPSMRNTLQRIGVKETDFLRQCDASFKQGSKFINWRGEQQGDNYYHPFMIPEGYYEYDVHAAWKQLFSQQKYADAMNMQSFICQAALAPKQINTPQYAGVTNYGYHLDAHKFARFLTQHCVNTLNVKHIVDNVICANNDEQGYIKSVSTQHNGAITGDLFIDCSGSQGLLIAKHYQIPFLDQSHILFNNTAVAAQIPYESQSQNIASATLSTAQSAGWIWDIGLPTRRGIGYTFSDKYCDEASAIETLKSYAAQTIGTQQADTIETRTLRFTPGYREIFWHKNCVAIGMSQGFIEPLEASALAMVELSISMLSEQMPVDQDHMQLLSTRFNKRFKYRWEQVINFLKLHYVLSNRDDNGYWHANRNPNSIPLELQNLLTLWQYQAPSRFDLVENEEIFSSASYQYVLYGMGFETSLTTKLDGQKCHKAEQLYQLNRNKIAQYLQKLPTNRLLLEQLQGSKVAT

SEQ ID NO: 88437 - protein, 440 aa, Nonomuraea sp.
  misc_feature (1)..(440): tr|A0A429AFN0|A0A429AFN0_9ACTN Tryptophan halogenase OS =Nonomuraea sp. WAC 01424 OX=2203200 GN=DMB42_42895 PE= 4 SV=1
MSVEEFDVVVAGGGPAGSTVAALVAMRGHRVLLVEREVFPRYQVGESLLPSTVHGVCRMLGVTDELAAADFRVKRGGTFRWGARPEPWTFSYAASARLTGPASFAYQVERARFDEILLNNAKRKGVEVREGCPVTGVVEEDGRVTGLRYTGPDGGDHEVRARFVIDAAGHESGLSAGGTRKHSDVFPGVALFGYFGAGKRLPDPHSGNILTVAFDSGWFWYVPLTGGLTSVGVVVRRDLAAKVEGDREKAFRALIDECPPIAELLSEAMRVTAGKYGKLRIREDYSYHQSTFWRPGMMLVGDAACSMDPVFSSGVHLATYGGLLAARSINSVLAGDLDEKTALTEFEARYRREYEVFREFLTSFYEMDANEESYFRHAKKVTDNEHSELESFADLVGGVSSGEAALTAPDGPDAAPETPLLAGGPAASPDGMTWMPHHPA

SEQ ID NO: 88438 - protein, 502 aa, Stakelama pacifica
  misc_feature (1)..(502): tr|A0A4R6FUK2|A0A4R6FUK2_9SPHN Tryptophan halogenase OS =Stakelama pacifica OX=517720 GN=EV664_102253 PE=4 SV=1
MTDHAIRDVVIVGGGTAGWMTAAALSRFLGGGGTRIRLIESEQIGTVGVGEATIPTIATFNQMLGIDENDFLRHTQGTFKLGIEFVDWRQIGERYFHPFGQFGRDIEGANFHQLFLKLASRGLAADIWHYAPCAMAAAAGRFNRTVDPTFGPMPYAFHFDASLYARYLRGYAEARGVERIEGRISDVALRGEDGFVDTLTLDDGRSVTGELFIDCSGFRGLLIEEALESGYEDWRHWLPCNRAVAVPTANIGDPPPYTRATARSCGWQWRIPLQHRTGNGYVYTNEYLSDEDACAALLNSVEGEPLGEPRFLSFVTGRRNRFWNRNVVAIGLSGGFLEPLESTSIHLIQTGIAKLLALFPDTRFLEVEAGEYNRLMRAAYDGVRDFIILHYHATTRDDSPFWNHVRTMDVPETLARKIDLFRAKGRFFRYDDELFSLASWVAVLLGQGIIPKGHDPLVGAMDENSLAHRVEELRQSVRRSVAAMPSHAEFLRAHCAAAPLQR

SEQ ID NO: 88439 - protein, 497 aa, Pseudoalteromonadaceae bacterium
  misc_feature (1)..(497): tr|A0A2D7N3Z3|A0A2D7N3Z3_9GAMM Tryptophan halogenase OS =Pseudoalteromonadaceae bacterium OX=2026783 GN=CMK62_1 6450 PE=4 SV=1
MKPIKHVVIAGGGTAGWITAALLNKVLGKVIKITLIESSTIGTIGVGEATIPPIIQLNNALGINEQDFINATNASIKLGIEFENWKTPSHSYMHAFGSFGKDLPFCDFYNFWVKGHISGAKESLWDFSLNYQAAKQHKFAPLNTLPNTQLPGLSYAYHFDATLYAEFLKNLATSRGVEHIDAKIEQVEQCPLSGNIKSLTLGNSQQINGDLFIDATGQRALLIEQTLNTGFVDWSHYLPCDSAVAVQSQGTSELKPYTRSIAHSAGWQWQIPLQSRIGNGLVYCSRYLSDDAATQLLLNNLPAKPMTEPRVIKFKTGRRLKQWHKNVVSVGLASGFLEPLESTSIHLIQSAVTRLIKLFPHNGISEALVTEFNKQSVIEIEHIRDFIILHYTLTAREDSPFWRQCKQMDIPDSLAHKLKLFKQTGKAVRENDELFAEVAWQQVFIGQGLIPEDYNSIVDSLSSEQLNDLFSTLKTLITSTVDQLPTHKNFLAKIKKA

SEQ ID NO: 88440 - protein, 504 aa, Sphingomonas sp.
  misc_feature (1)..(504): tr|A0A0Q4I864|A0A0Q4I864_9SPHN Tryptophan halogenase OS =Sphingomonas sp. Leaf22 OX=1735687 GN=ASE70_11630 PE=4 SV=1
MAIDQVPVRSVAIVGGGSAGWMTAAALARFLPADTRVTLIESDAIGTVGVGEATIPQLRLFNQHLGIDEDDFVARTGGSFKLGIEFAGWNGADSRYLHAFGTIGRSLGLVPFHQYWLAAGGGDAPESLWSHSACAAAASANRFDRDPGNPQAPSGIAWAYHFDAARYAAYLRERAEAGGVERAEGRVVAVGLNDVGIDTVTLDDGRTIAADFFVDCSGFAALLIGRLAGDRWDDWSALLPCDRALAVPCAATQPVTPYTRATARSAGWQWRIPLQARTGNGLVYSSAHLSDDEAAATLLGNLDGAALADPRPLRFTTGRRHAPWIGNCVALGLAAGFLEPLESTSIHLVQSGIARLLSLWPASRPRPADIAAFNRQSEREWLGVRDFLIAHYALNGRDEPFWQERRATPLPDSLAERIALFRESGRIVRDEHELFAEVAWVQLLVGQGVRAGGYHPLADALPAERRSQFLDMSSKHVAATVARMPTHDQFLRAHCPAPDAKVAA

SEQ ID NO: 88441 - protein, 503 aa, Sphingomonas sp.
  misc_feature (1)..(503): tr|A0A0Q4I659|A0A0Q4I659_9SPHN Tryptophan halogenase OS =Sphingomonas sp. Leaf22 OX=1735687 GN=ASE70_00415 PE=4 SV=1
MSEANIRSIVIVGGGTAGWMAAAALSHMLAGSGMAIRVVESEAIGTVGVGEATIPHIQYFNRLLGIDEDDFVRRTCATFKLGIEFVDWGQIGERYIHPFGTYGQEMEGIHFHHFWYRHAQAGGALPLDRFSIGVGAARAGKFMRPDPSRRGSPLAGISYAFQFDAALYAKYLRERAEAAGVVRTEGRIVDVALNGANGHVDHVLLDDGSRVAGDLFIDCSGFRGLLIEGALNAGYDDWCEWLPCDRAVARPCARVGDPTPYTRATATSVGWRWRIPLQSRTGNGHVYCSDYVDDDTALAMLNDGLDGAPLADPNFLRFTAGCRRKAWDRNVVALGLAAGFLEPLESTSIHLIQTGIARLLTNFPDRSFNQPDIDYYNRRTRLEYEQVRDFLILHYKATARNDSPLWRRCRDMAIPASLEERIAIFRENARLYRHDNELFSATSWLAVLHGQNIHPKRHHPIADILSADELDRRMTHIAGAMDAGVRAMPDHMAFIDRFCRSPS

SEQ ID NO: 88442 - protein, 511 aa, Ponticaulis sp.
  misc_feature (1)..(511): tr|A0A2E0U551|A0A2E0U551_9RHOB Tryptophan halogenase OS =Ponticaulis sp. OX=2020902 GN=CMK06_04180 PE=4 SV=1
  misc_feature (94)..(94): Xaa can be any naturally occurring amino acid
  misc_feature (129)..(129): Xaa can be any naturally occurring amino acid
  misc_feature (204)..(204): Xaa can be any naturally occurring amino acid
  misc_feature (207)..(207): Xaa can be any naturally occurring amino acid
  misc_feature (441)..(441): Xaa can be any naturally occurring amino acid
MNKAIRKIVVVGGGTAGWITAGLIAARHPDRSENGVQITLIESPDVPTIGVGEGTWPTIRKTLSRIGIREADFLRACDASFKQGSRFDGWVSGXPEDSYHHPFDLPVSQYGTDLIHAWTSFAGDRPFAXAVCAQVGPGLDGLAPRQSGMPDFIGATNYAYHLDAVKLATLLREHVLGQLGVTYIQDHVTEVVAAPDGDISSVKXREXGPVEGDLFVDCTGQASLLLGQHYGVEFVDQSRILFNDRAVIAQVPVAPDSQIASQTISTAHEAGWIWDIGLPTRRGVGCVYASGFMSADVAEATLREYIGPQEEVRTRHIQFRSGHRKTFWQNNCVAIGLSAGFLEPLEASAIVMVELSAEMIAENLPVTRAAMNFEADRFNATFRYRWSRIIDFLKLHYVLSRRTDPYWQENRKSETIPDRLKSLLQVWQYRPPAMEDFEHAXEVFSVSSYLFVAYGMGMRPQPHPTLQPRQQAELCKEMQTIARKQRSFASGLPTNRAYLSAFSDPPVRQPA

SEQ ID NO: 88443 - protein, 504 aa, Halioglobus sp.
  misc_feature (1)..(504): tr|A0A165RYG7|A0A165RYG7_9GAMM Tryptophan halogenase OS =Halioglobus sp. HI00S01 OX=1822214 GN=A3709_08090 PE=4 SV=1
MNNNDSRTITVVGGGSSGWMTALYLNTLFNKEQLNYQIRVIESPDIGIIGVGEATVHSVRFFFAAMGLDENELLRETNGSLKLGILFRNWMKPVDGKTHEYFHPFEQQRLGRGMDISSMWHMSGRGTRERYDEAVSLSSELVAHRHVPKTANSQAYQGVVPYGYHIDATLLARFLRRKAVAEGVEHIEATVTSATTEGEMIQSVETDKGSFTADFFIDCTGFRGLLIDQLKQDNWESFADALPCNKAVAIQRELPDDLGAKPYTTATALSNGWAWQIDLQNRQGTGYVYDGNRLSKEEAEQELRDFLGPDAAVLKCAHLNMKVGCRKEFWVGNCVAIGLSAGFIEPLESTGLHLINLGAGLLATHQPNREVDQSIRDSYSRLMRGFYQDLKQFIVLHYCLTDRNDTDFWRAAPATVEHTPWLQSQLQIWKHKICEFHDLAGSFSTTFNDENYRYILYGMQHNPALTQSVDAAASEQLFAQAKANAERARQLTSAQGDYLSQLNL

SEQ ID NO: 88444 - protein, 510 aa, Erythrobacter sp.
  misc_feature (1)..(510): tr|A0A259JXC3|A0A259JXC3_9SPHN Tryptophan halogenase OS =Erythrobacter sp. 34-65-8 OX=1970335 GN=B7X57_08785 PE =4 SV=1
MQNQGQGAQGIRRLVIVGGGTAGWIAAAAFARLLGERLAITLVESDAIGTVGVGEATIPQIIRLNSILGFDEHDFVRRTQGTFKLGIEFVNWSAPGSRYLHTFGDTGMNLGNVHFHHYWRRHMMAGGAESLWHYSLHQLAADQNRFGKLERVGNTAMAGLAYAYHFDASLYARYLRAYSEKLGVTRQEGTIESVQRDGESGDVTAVTLAGRVRVEGDFFIDCSGFRSLLLGQELGVEYTDWSHWLPCDRAMAVPSERLPDLPPYTRSTARQAGWQWRIPLQHRTGNGHVYCSSFLSDDEAADTLMANLDTPALADPRPIRFTTGHRKQFWAHNVVALGLSSGFLEPLESTSIHLIQSNVSRLIELFPRGRVCAADRAEYNRRTIHEFAQIRDFLILHYHQTGRDDTEFWRYCQHMSVPESLTHKIALFASSGRLGRDVDDLFREASWVQVMLGQGVVPADYNPMADRLEAAQLGQFMGDVRRLVEKAVSGLPTHADYVAAHCSAADSAGP

SEQ ID NO: 88445 - protein, 168 aa, Moraxellaceae bacterium
  misc_feature (1)..(168): tr|A0A4Q6CLW6|A0A4Q6CLW6_9GAMM Tryptophan halogenase (F ragment) OS=Moraxellaceae bacterium OX=1889775 GN=EOO68 _40550 PE=4 SV=1
ASGFMEPLESTSIHLVQAAISKLIDLFPQKDFRPEVINKFNTQLSFEYQSIRDFLILHYKATQRNDSAFWDYCRTMDVPQNLLDKIALYKEGGRVYRDSEESFSGISWLAVLRGQGIITDRYNPVADVYDEERLLARIENIYEVTQRSVEACPTHEEYIDKYCRARPN

SEQ ID NO: 88446 - protein, 528 aa, Serratia rubidaea
  misc_feature (1)..(528): tr|A0A2X5AXV3|A0A2X5AXV3_SERRU Geranylgeranyl reductase family OS=Serratia rubidaea OX=61652 GN=NCTC10848_0201 0 PE=4 SV=1
MSKPIKNIVIVGGGTAGWMSASYLIRALQQQANITLIESAAIPRIGVGEATIPSLQKVFFDFLGIPEREWMPQVNGAFKAGIKFVNWRESPDRSHNDYFYHLFGNVPNCDGVPLTHYWLRKREQGFQQSMAYACYPQPGALDGNLAPCLHDGSRQMSHAWHFDAHLVADFLKRWAVDRGVNRVVDEVVEVNLNDHGFISSLSTKEGRKLEADLFIDCSGMRGLLINQALKEPFIDMSDYLLCDSAVATAVPNDDAQAGVEPYTSSIAMNAGWTWKIPMLGRFGSGYVFSSKFTSRDRATADFLKLWGLSDNQPLNQISFRVGRNKRSWVNNCVSIGLASCFLEPLESTGIYFIYAALYQLVKHFPDTAFDPRLSDTFNAEIVYMFDDCRDFVQAHYFTTSREDTSFWLANRHDLRLSDAIQEKIERYKAGLPLTTTSFDDATYYDTFDYEFKNFWLNGNYYCIFAGLDMLPDRSLPLLQLRPESVEKAEAMFARIQREAERLRASLPTNYDYLRSLHQGNRPASTESL

SEQ ID NO: 88447 - protein, 520 aa, Novosphingobium sp.
  misc_feature (1)..(520): tr|A0A259E5V4|A0A259E5V4_9SPHN Tryptophan halogenase OS =Novosphingobium sp. 17-62-19 OX=1970406 GN=B7X90_00925 PE=4 SV=1
MVRAVRDVVIVGGGTAGWLTAAIIAAKHKARIGHDFSVTLVESPNVPIIGVGEGTWPTLRSTLKSVGVSETDFFRECDAAFKQGALFAKWTTGAEDDAYYHPLVLPQRFGQLNLAPHWLAGTLNEGGDNGETFCDAVCPQGRICDENRAPKSMTNAEFEGQANYAYHLDAGKFAPFMQRHCTEKLGVRHVLADVREVLQDESGDIRAIDTDQAGEIAGDLFVDCTGMRSLLLGGTLGVGFKDCNDVLFCDTALAVQVPYPDDQAPVATHTISTAQSAGWIWDIGLPTRRGVGHVYSSRHISREEAEAELRAYIGPQHADLPVRKIDIRSGHRELFWKNNCVAVGLAAGFLEPLEASAIVLIELSAKMIADQMPPAREVMDIVAKRYNEKTLYRWGRIIDFLKLHYVLSKRRDTTFWRDNMDPETIPERLQELLALWQYQPPYMHEEFDRVDEVFPSASYQYVLYGMGFRTEVSARALEPEVRDARRARRDNADQTARMVAALPTHRDLIQRIVKYGLQPV

SEQ ID NO: 88448 - protein, 516 aa, Kutzneria sp.
  misc_feature (1)..(516): tr|W7SW11|W7SW11_9PSEU Tryptophan halogenase PrnA OS=Ku tzneria sp. 744 OX=345341 GN=KUTG_08926 PE=4 SV=1
MVIVGGGTAGWMTAAYLKTAFGDRLSITVVESSRIGTIGVGEATFSDIQHFFQFLNLREQDWMPACNATYKLGIRFENWRHVGHHFYQPFEQIRPVYGFPLTDWWLHDAPTDRFDTDCFVMPNLCEAGRSPRHLDGTLADEDFVEEGDELANRTMSEHQGKSQFPYAYHFEAALLAKFLTGYAVDRGVEHVVDDVLDVRLDQRGWIEHVVTAEHGEIHGDLFVDCTGFRGLLLNKALGVPFVSYQDTLPNDSAVALQVPLDMQRRGIVPNTTATAREAGWIWTIPLFGRVGTGYVYAKDYLSPEEAERTLREFVGPAAADVEANHIRMRIGRSQESWRNNCVAIGLSSGFVEPLESTGIFFIHHAIEQLVKHFPAADWNPKSRDMYNSAVAHVMDGIREFLVIHYRGAARADNQYWRDTKTRPLPDGLAERIECWQTQLPDTETIYPYYHGLPPYSYMCILMGGGAIRTPASAALALTDQGAAQKEFAAVRDRAAQLRDTLPSHYEYLARMRGLDV

SEQ ID NO: 88449 - protein, 265 aa, Moraxellaceae bacterium
  misc_feature (1)..(265): tr|A0A4Q6EX02|A0A4Q6EX02_9GAMM Tryptophan 7-halogenase (Fragment) OS=Moraxellaceae bacterium OX=1889775 GN=EOO 68_01575 PE=4 SV=1
FNENLFNNAAVVMPSMISEIIPPETRSTALSNGWAWKIPLRNRYGNGYVYSSDHITPEQAETELRRHLGLLDSEVAARHLHMKVGCAEKHWVKNCLAVGLSQGFIEPLEATALALSYETITLFMKHYESGHYTNKFESVFNVEINGKFEGVRDYIVCHYKANQRKDTDYWRDNAINTKVPDSLNKILYLWRTSQNFAKDMQAHNLEGSYQAKSWACLLAGYGVLPPLDAGAVSAHGKSSHDMNQLADFIRRCGLNFKKHNELLTH

SEQ ID NO: 88450 - protein, 498 aa, Sphingomonas sp.
  misc_feature (1)..(498): tr|A0A0Q4HZ96|A0A0Q4HZ96_9SPHN Tryptophan halogenase OS =Sphingomonas sp. Leaf22 OX=1735687 GN=ASE70_01440 PE=4 SV=1
MAAAINGVVIVGGGTAGWMTAALLAKVIGPQVRITLIESDEIGIIGVGEATIPPIQHVNAVLGIDEAEFLRETRATIKLAIRFDDWGAIGESYYHTFGAAGRNTAFCSFHHYWNRAKRAGIAGDYWDYDLNYLCAREGKFARIQVDDPLWHLPYAYHFDSGLYGQYLRRYSEARGVERIEGLVEQVARDGESGNVTALIMRDGREITGDLFIDCSGGRGLLIQRQLNVGYEDWGHWLPCDRAMAVPTARHDDTPPYTRSTARSAGWQWRIPLQHRVGNGLVYSSRHLTDDQAADLLLGNLDGEVLAEPRIIPFRTGRARRQWDHNVVAIGLSSGFLEPLESTSIYLIQSAIVRLLHLFPHAGFDDRQIAEYNRQSRIEFETVRDFIILHYHATRRDDSDFWRHVRTMALPDRLADKIALFRATGTLTQDPLDIFMEPSWVQVLMGQGIEPADYHPLADGPTDAELAEQLRQLAAMKREPVPNMPAHDRWLSGFGGAAG

SEQ ID NO: 88451 - protein, 485 aa, Sphingomonas sp.
  misc_feature (1)..(485): tr|A0A0Q4IB54|A0A0Q4IB54_9SPHN Tryptophan halogenase OS =Sphingomonas sp. Leaf22 OX=1735687 GN=ASE70_01435 PE=4 SV=1
MSPSIVILGGGTAGWIAAHLFERAWPDAAITVVESPEIGTIGVGEGSTPSLKRFFEIIGAAEADWMPRCGATYKAGIRFVDWSPAAPWRDYRHPFTTQIDVHTEDAFVLNCRNRRLGHDVPVRPDDFLLNGVLSAKGLAPVAPPNFPFRIEYGYHFDAGLLGQYLRELAVARGVVHRPAKVTEVRRAENGDIAALVTDREETIAGDIFVDCSGFNGLLIERTLGVPFHSFKDHLFNDAAVVLPTEMTGRPPVETVATALSNGWCWSIPLRHRVGNGYVYARDCQSSDAAETELRRTLGVGDEVAARHLTFRVGQVARHWERNCVAVGLSQGFVEPLEATALHLVLGTVEQFIRHYRDGGCTDRHRAAFNTVAAERMDGVRDYIVAHYKLNTRTDTDYWRANAANEALPDPLLHILDRWFRRGDIAEELARQGQRSHFGNLSWHCLLAGYGAFPAVSEARRDDMDFYAARTVSAFLEGCSLNFAQA

SEQ ID NO: 88452 - protein, 510 aa, Alteromonas sp.
  misc_feature (1)..(510): tr|A0A1L8MH34|A0A1L8MH34_9ALTE Tryptophan halogenase OS =Alteromonas sp. V450 OX=1912139 GN=BK026_15675 PE=4 SV =1
MNHSSHTSQKQRIVIVGGGTAGWLTAAIVAAKHKVAAGECGLDITLVESSDIPTVGVGEGTWPTMRNTLKDIGLSEKEVFRRCSAAFKQGGKFVNWVNGDGDFYYHPFTVPLGYGRVEMAPYVGDIANFANATNFQQHVCERNMAPRTLNEQEYSSAQSNYAYHLDAGAFADMLRDFSKTELGVKHIVATVENVAATSNEHIESVTLNNGMALKADLFVDCSGFRSLLLGETLGESVVSTDDVLFNNSALALHVPHEEDFEIKPYTQATAQEAGWIWDIGLSSRRGVGHVYSTEFTTDERAEEVLREYVGDKHGDLKARTIRFNSGYKKRIWKGNCIGVGLSAGFVEPLEATALMLIEISARYIAEQMPLPESAMPIVSQRFNKQMNYRWQRIIDFLKLHYIFNQRSEPYWVANRDAASIPDSLKEDLEIWKYRGPQIADFSAAIELFPAASYQYVLYGMGFSPDFSLQSHFYNDRDLADKVIQQNQLITQQKLSSLPNHRDYIEQWLAS

SEQ ID NO: 88453 - protein, 504 aa, Sphingomonas sp.
  misc_feature (1)..(504): tr|A0A0Q4I737|A0A0Q4I737_9SPHN Tryptophan halogenase OS =Sphingomonas sp. Leaf22 OX=1735687 GN=ASE70_00410 PE=4 SV=1
MSAPLLRRIVIVGGGSAGWMTAAALSSLLDPKDVAITLVESDAIGTVGVGEATIPDILAFNQMLGVNEAEFMAATQATFKLGIEFVDWGARGDRYVHPFGQHGVDMQGIDFHQYWLRAREHGAPQPIEEYSLCAVAARAGRFALPDPNPRSVLSQIRYAYHFDATLYARFLRRYAEKRGVVRIEGIVGAVGRGADGAITGLTLADGRGVAGDFFFDCTGFRALLAGETLGSGFVDWSHWLPCDTALAVPSEHAGPPTPYTRATARDAGWQWRIPTQRRVGNGHIFASAFTTEEAASATLLAGLDAPALADPRRIRFRAGCRDTFWSGNCIAIGLAAGFLEPLESTSIYLIQEGISRFISLFPRGDIPDILRTEYNRHMRTEFEQVRDFIILHYAATTRDDTPFWNHCRTMRLPDTLLHKIELFRETGRVFRYNDELFTRPSWVAVMLGQGIVPTSSDPIVATLPERDVARSLASMRDAMAAAVARMPTHGDFLARYCPAPAMAA

SEQ ID NO: 88454 - protein, 517 aa, Halioglobus sp.
  misc_feature (1)..(517): tr|A0A165RYG1|A0A165RYG1_9GAMM Tryptophan halogenase OS =Halioglobus sp. HI00S01 OX=1822214 GN=A3709_08085 PE=4 SV=1
MDNGRINSVLVVGGGTAGWLAACHLARKLHPSDPQGVRVTLVESPDIPTIGVGEGTVPAMRNSLQYLGISETEFIRHCEATFKQSIRFDGWMAAPDHSYHHVFDYPRRDPVDVTPYWLLGGEEQSYAQWVGIQAGICDAGLGPKQMTQPEYAGVANYAYHLDAGKFAELLTRHATEKLGVEHLKANVREVKLAANGDIEALDTDRLGELRADLFIDCTGFNSMLLGKALGVEFIDRSDVLLADHALAVQVPYPEPDSPIPSQTIATARSAGWIWDIGLVTRRGTGYVYSSNHIDHDAAELELRDYLRQSLGDWVDDLACRRIPMQVGYRERFWFRNCAAIGLSQGFVEPLEATGLLMFDATARMLAEQFPASRDLMPLLSERFNRRVQFAWERVIDFIKLHYCISDRDDTAFWRDNRDPAGIPESLQENLALWRHQVPSEYDFSSKLEIFNLENYLYVLYGMNYGTAIEPLAYRYRDSALAAKAVQRTQAVVEEARANLLPHRELIEKIHRYGLQPV

SEQ ID NO: 88455 - protein, 496 aa, Colwellia sp.
  misc_feature (1)..(496): tr|A0A1V0KWB9|A0A1V0KWB9_9GAMM Tryptophan halogenase OS =Colwellia sp. PAMC 21821 OX=1816219 GN=A3Q33_17635 PE= 4 SV=1
MNSSAIKNVVIAGGGTAGWMAAAAFGKLLGKNLNITLVESDLIPTVGVGEATIPTLHIFHDLLKIKEADVMKATNATFKLGISFENWRDVNQDYIHSFGYLGQGCWAAGFQHFWVKGKQQGMVSEIGDYCPEHLASRRGKFAVVPKQDRNYAYHLDAGLYAKFLRTMAEEHGVQRVEGKINQVNVNEENGFIQSIALDNSKIIEGDLFIDCTGFKGLLIEQALHTGYEDWSHWLPCDSAIAVQTKIQNKTVPYTRSIAHKAGWQWQIPLQNRMGNGVVFCSKHLSDEDAKALLLSNIEGELLNEPRVIKFKTGSRRKHWNKNCVAVGLSSGFIEPLESTSIHLIQQSIIRLMQNLPSKNMEQANIDDFNNKMRFEIDNIRDFIVLHYHVTQRADSPFWRYCKNMEIPETLKQRIDLFIENGNAYKTERELFGETSWIQVMIGQGLMPKYYHQIVNMMSDTELKSFLDNIKMTIERRVNSFPDHNEFIKNYCKSTVA

SEQ ID NO: 88456 - protein, 503 aa, Colwellia sp.
  misc_feature (1)..(503): tr|A0A1V0KW65|A0A1V0KW65_9GAMM Uncharacterized protein OS=Colwellia sp. PAMC 21821 OX=1816219 GN=A3Q33_18010 P E=4 SV=1
MDKVKTEQIKSYVVVGGGTAGWISAAVLARALTNTDVKITVVESPHVPTIGVGEATIPSIVDLLEYLRIPLKEFILATNSTFKLGIKFIDWKEKGHHYWHPFGFVGNKIEGKLFYQHWLKHQFENPQFEFTDFSPAIALAKQNKFYIPDPKVKNNLSSSTYALHFDASLVAKYLADYCKNKGVNLIKGHIQATNLNENGQVDKLILADGQAISGDFFIDCSGQQALIMHKALRVGYENWQHYLPVNKAVTAQTAIEHPTPPYTQATAHEHGWRWKIPLQNRIGNGYVYCSDYCSDDAALALLKSNSAPFITEPRFLSFTTGKRDKIWYKNCLAVGLSSGFLEPLESTSIYLIMKTMLNFVQNMPNKKLYQAPIDEFNRLIDDEYIAIRDFIVLHYCTTKRTDSPFWQMWQHLEIPKTLQTKIELFTCQGKLYENQYDLFSADSWYSVLEGMGVRPNSYDPLIDASSFNQIEQAFRQSISALSNNVAKTLTHDEFINRLIAAKE

SEQ ID NO: 88457 - protein, 514 aa, Shewanella sp.
  misc_feature (1)..(514): tr|A0A549ZWN7|A0A549ZWN7_9GAMM Tryptophan 7-halogenase OS=Shewanella sp. YLB-08 OX=2593656 GN=FM038_21580 PE=4 SV=1
MMIDAIKEVTIVGGGTAGWLTAAVIAAEHHSHLADTINVTLIESPEVSSIGVGEGTWPSMRSTLEKIGISEVEFITCCDASFKQGSQFIGWKNGQQDDRYYHPFMTPQGYAQANLYRAWQEFSPEQSFAETTSIQAAVCDAGRAPKQAGTPDYAAVTNYGYHLDATKFAKLLMQHCTTKLGVKHVLDHMIDIISDGNGDIAEICTKRSGNISGDLFIDCTGMSSLLLGKHFNIPFIEKRHILFNDSAMALQVPYYEDDTQIASTTKSTAQSNGWIWDIGLPSRQGVGYTYSSSHTSDQQIQDDLITYVAKSIGQVRAEQLSPRKISFTPGHRDKFWHKNCVAVGMASGFIEPLEASALALIELSASMISEELPVHRAQMDITAKRYNQRFTYRWSRVIDFLKLHYVLSERQDSDYWLDNRHNNTLPDSLQEQLELWKYKVPNRHDLMQNEEVFPSASYQYVLYGMGFQTLLPKIAKQSDNLNVAKTSFDDIQQNKRKYITGLPTNRELLKLLTQ

SEQ ID NO: 88458 - protein, 447 aa, Streptomyces parvulus
  misc_feature (1)..(447): tr|A0A191VAA6|A0A191VAA6_9ACTN Tryptophan halogenase OS =Streptomyces parvulus OX=146923 GN=Spa2297_32570 PE=4 SV=1
MAKETADVVVIGGGPAGSVCAYMLAKQGHSVVLLEKELNSRFHIGESLLPYMMGLFERIGLRETVAAQGYVPKFGGEFIDPTEKKFFEGVFRADFTKQGAGRHDNAFQVERARFDRMLAEQAEAAGARVLFGADVGELLMEGDRMVGARYQRDGETHEVRAAYVVDASGRSGRIANRFGLRKTLEKLRMVAVFRHYSGLDESHNLGVEGDIQVGAHDDGWVWAIPLTKDTISVGTVMPRDVLRGSTANERFEEHLARVPRIVSRLTGTRPSMDLKVETDYCYHTDTVTGPGWLMVGDAGCFGDPMFSGGVLVATATAVRAAETLGEVLADPSAEDRQMERYSNYFKTGYDTYIRLIHAYYDGELVAMAADAARSTDRETLEKYLVRLIGGDFWSEHNSVAQEMRRRKEWDTFEPFQRVYGCPSYPHLDDIDRKERSEARVRRVTAGR

SEQ ID NO: 88459 - protein, 529 aa, Dyella sp.
  misc_feature (1)..(529): tr|A0A370K5S5|A0A370K5S5_9GAMM Tryptophan 7-halogenase OS=Dyella sp. DHG54 OX=1920168 GN=DVT68_12930 PE=4 SV=1
MAQLKKVLVVGGGTAGWLAACYLAKAVNAVDPNSVQVHLVESANIGLLGVGEATFPSIRGTLAAIGLDERRFLVGATATYKQGIHYRHWVRPPGTPGADHFFHPFSMPSQRPGGPELLPYWLLGAAPEGATFADAVSMQARLVKHGKGPKRTKDADYQGPLNHAFHFDAAYFAKVLAEHGEQVLGVKRHLATVERTELDEQGAIARVVTKELGELTADLYVDCTGLRGSLIGGVMKSPFRSRRDVLFADRAVAIQVPYKRPDTPIPPYTISTAQEAGWVWDIGLQTRRGAGYVYSSRHTDAERAEHVFRQYLGAAADGIQATHIKFETGYRPEHWRKNCVAVGLAGGFVEPLESTGIALVELGTYLLTHLLPGDTHDMERAARHYNEMMIARYDRIIDFIKMHYCLSQRRDSQFWIDNTDPISIPQTLQDKLALWKLRPPHRLDFVSDLEMFMVSSWQYVLYGMEFRTDLEPTRHLYTRTEEAKQEFANIQQAASYALNDLPDHRALVEQMCREHQERVSAAEALEVVG

SEQ ID NO: 88460 - protein, 508 aa, Shewanella sp.
  misc_feature (1)..(508): tr|A0A550ADG2|A0A550ADG2_9GAMM Tryptophan 7-halogenase OS=Shewanella sp. YLB-08 OX=2593656 GN=FM038_11970 PE=4 SV=1
MDIKKVVIVGGGTAGWLAANHLGKALFNTENVSVTLIESPDIPTIGVGEGTVPAIKKSLQSFGISESEFIAQCDVTFKQSIKFSNWLDQDNHGKGNFFHHLFDMPSPMGEDLTPLWLSKQGHDYASCVSPQFTACEALKAPKKITTPEYAGSLGYAYHLNAAKFAKLLAKNGREKFHVEHVIANVSEVKLNDSGAVSSLVTDTHGELKFDLYIDCTGFESLIIDKALKVPFVDKSKQLLVDRALVVQVPTDVNESIPPFTLATAHQAGWIWDIALPNRRGVGFVYSTKYMDDKTAIKKLDKYLGGGLSDFNYRFLPMKVGYREKFWHQNCICLGLAQGFLEPLEATSILLTDFAAGYIANRFPKSVAKMEDIQTQFNQVMKYAWERVVEFIKLHYCLSDRTDSQFWIDNRDPKTIPDELARKLSLWETYVPNREDFFSKFEVFDLENYLYVLYGMKYKTQVDALTDEQMSLANKQSLHLAEIGKQLTEELPEHRELLNKIKEHGLQSI

SEQ ID NO: 88461 - protein, 528 aa, Sphingomonas trueperi
  misc_feature (1)..(528): tr|A0A543LP50|A0A543LP50_9SPHN Tryptophan halogenase OS =Sphingomonas trueperi OX=53317 GN=FHW45_4361 PE=4 SV=1
MLSAALRPLPGPPRRRSVGAMNPKRRILILGGGTAGWLTAAYLARYLDVAHQRRFAITLLESPALGIVGVGEGGFPTIRETLQFLGIDERSFVRQASATFKQGIRFDDWLHAPQPDGTRHRFLHPFEAPFHTEGAGLVPYWLLQPEAQRAPFAEAMTIQNRVAAQGRAPKRAEEAGFGGPLTYAYHFDAVRLAQLLRDRAIELGVTHLEGEVFSAHTDAEGAIDRIETREHGSLTADLYIDCSGFEAALIGKALGAPLSSVRHQLFTDRALACKLPYADPEAPIATTTVAAAHEGGWTWDIGLQHARGIGCVYSSAHLSDDRAADILDAHLGGAPHAPRLITFEPGYRRTPWVKNCVAVGLSGGFLEPLEATGVVLIEAAAAMIAELFPHAGPVDAPAARFNALMTARYERIVDFLKLHYCLSRRDEPFWRDNRDPASIPDTLRALLEQWRHRPPSRFDFLLDVESFAFFNYQYILYGMDFRTDLSGAREGFPHAEAAARQFARIRGFGEQAVADLPAHRELIRQLAG

SEQ ID NO: 88462 - protein, 495 aa, Pseudoalteromonas lipolytica
  misc_feature (1)..(495): tr|Z5XQW7|Z5XQW7_9GAMM Tryptophan halogenase OS=Pseudoa lteromonas lipolytica SCSIO 04301 OX=1452721 GN=AT00_04 725 PE=4 SV=1
MTNHFTKHVVIAGGGTAGWMAAAALAKLLGNEITITLIESDEIGTVGVGEATIPPIRTFHKLLGIDEQRFMTQTQATFKLGISFENWHKPNSDYIHSFGMTGKECWAGEFHHFWLHAQNQGVKDDFGDYCYELQAAKHGKFGFNKQNPINYAFHLDANRYALFLRDFAEQHSVKRIEGKIEHINKSATNGFIESVTLKNGTTVSGDFFIDCTGFKGLLIEQALHTGFEDWSHLLPCDSAVAVQTTGSDEILPYTRSIAHQSGWQWQIPLQNRTGNGLVYCSRYLTDADATHLLLNNISGEILTDPKVIKFKTGRRLKGWNKNCLALGLASGFLEPLESTSIHLIMTGIIRFIRLFPFTHISQHAIDEYNKQLKSELESIRDFIVLHFRVTDRDDSEFWRHCKTMEITQTLSHKIALFKQTGRVFLDDGDIFRVDSWVQVMLGQGIKPQQYHHVASLMSEQELMQFLHGIKQQIAHRLAQLPNHKEFVSKYCSQNN

SEQ ID NO: 88463 - protein, 513 aa, Shewanella baltica
  misc_feature (1)..(513): tr|B8EFB0|B8EFB0_SHEB2 Tryptophan halogenase OS=Shewane lla baltica (strain OS223) OX=407976 GN=Sbal223_3217 PE =4 SV=1
MTSRKDIKSVVIVGGGTAGWISACHLAKKLNARTPKIQVMLVESPNIPTIGVGEGTVPMLRETLKYFGIREDDFIRRCDVTFKQSVKFIDWNEPNSGEYYHHLFDYPYFKDFTSTWLNKSLSDRGRYADLVSVQGHLIDAGYGPKAMTQPQYRGAMHYAYHLDAAKFTKLLTEFGVERLGVKHLLAEVIDTKIDAQGNILELHTDNAGVLTADLYVDCTGFSAQLIGNACNVPFVDKSDILFVDSALVVQLPYEDKYTPIPCFTKSTAQEAGWIWDIGLSERRGVGYVYSSQYSSIEQAESVLREYLGKAAEEISFRHIPMKVGYREKSWQGNCVAIGLSSGFVEPLEATGLLMFDATARMLAECFPANTDVMPLVANRYNQRVSNAWNRVIDFIKLHYVTAKRMDTPFWVDNKNEISIPDSLKEHLELWRYHIPTAYDFTSTLEFFNLENYLYVLYGSDFESKLKMTLNDEEERLFSEMTDKLDKQVTLLKSQLLPHRELIERIKLYGIQLN

SEQ ID NO: 88464 - protein, 513 aa, Cellvibrio sp.
  misc_feature (1)..(513): tr|A0A4R7B862|A0A4R7B862_9GAMM Tryptophan halogenase OS =Cellvibrio sp. YR554 OX=2135765 GN=C8K91_107144 PE=4 S V=1
MQKKVVILGGGTAGWIMAARLAAERLHIDTVPISITLVESSDIPTIGVGEGTWPSMRGTLEKIGIRESEFLQFCQATFKQGSRFINWRAGIGERYDHPFTIPPMVAGASLGANFQQAGSQQSFSHWVCLQSHMMDAKRAPKQLHTPDYAGVLNYGYHLDAGKFAQLLKMHAVDRLGVKHIIGHFQSAELDEAGQIKALNLADGTVLDGDFFIDASGTHNQLIGGALASEFISLSHASPNDRALAVQVPYVNQDDAIHSATLSTAQEAGWIWDIGLQNRRGVGYVYSSAFSTEARAREVLTQYVAAINPDADASAARQLIIKPGYRATPWVGNCVAIGMAAGFIEPLEASALVMVELTAAYLCENLPATSSALKGIANRYNQLFSERWERIRDFLQLHYLLSERRDTEYWRYVAESIPATDRLNSLLEEWRYRDPVLNDFGHFMELFPSASYQYVLLGMQPNYFTARFSRTNEKTAELLKEIENLKVKREHYLAHLPANRDFFSQLKEKQLVVS

SEQ ID NO: 88465 - protein, 378 aa, Corallococcus sp.
  misc_feature (1)..(378): tr|A0A3A8S7R1|A0A3A8S7R1_9DELT Tryptophan halogenase OS =Corallococcus sp. AB032C OX=2316717 GN=D7X99_05555 PE= 4 SV=1
MDTLRYDVAVLGGGPAGAALALALCRHSGLRVVLFERSTYAQPHLGETLPPDSRRLLARLGVWEAFARQGHLRSMGSCSRWGDSALGDNDHLRSPWGTGWHLDRSRFDRMLADEALRFGVDVRIGSVVTDWTPLENGGHRLFVPTEGDAPRDFVDARFVVDATGRSAVFATSQGARRHTVDRTLGLCGTFALQPGRAVDALTLVESCEDGWWYSARMPGDQIVFGLMGDKDSLQGLMPEDAEAWRARMERAPETRRRLEACVFTGEPLLAVSANVACLDRLHGEDWLAVGDAACMLDPLSSQGTSQALRTANQAADVVSRYLRGDSAALRLHEVRTRHEFQEHLRIREGYYRLERRWPGAPYWRNRQQSCAPVLSSPP

SEQ ID NO: 88466 - protein, 500 aa, Amycolatopsis thailandensis
  misc_feature (1)..(500): tr|A0A229S1D5|A0A229S1D5_9PSEU Tryptophan halogenase OS =Amycolatopsis thailandensis OX=589330 GN=CFP71_22975 P E=4 SV=1
MSTARHEEFDVAVVGGGPAGSTLASLVAMRGHRVLLLEKETFPRYQIGESLLPSTIHGICHLLGVDEEIAEAGFLRKRGGTFRWGANPTPWNFAFSVSPKVAGPTSFAYQVERSKFDKILLDNSARKGVDVRQNRTVTDVVEGEDGRVRGLRYTDPDGTEHEVSARYVVDASGNTGRLHKRVGGSRKYSDFFRSLALFGYFENGKRLPAPNSGNILCVAFSHGWFWYIPLSDTLTSVGAVVRREDAARIQGDPEEAMRALIDECPMIGEYLAGATRVTTGQYGQLRVRKDYSYHHTNFWRPGMVLVGDAACFVDPVFSSGVHLATYSALLAARSINSVLDGKVGEQRAFDEFEARYRREYSVFYEFLTSFYDMHIDEDSYFWSAKKVTKSSDTELESFVELVAGMSSTEFNLTDTEAGVLRLKQRSAEFADAVDTLVEAREENMTPLFRSSVVRQAMQEGSQVQTRAQLGDEAGEVAPVFDGGLVATPDGMSWSEPDPVR

SEQ ID NO: 88467 - protein, 514 aa, Allokutzneria albata
  misc_feature (1)..(514): tr|A0A1G9WPW5|A0A1G9WPW5_9PSEU Tryptophan halogenase OS =Allokutzneria albata OX=211114 GN=SAMN04489726_3743 PE =4 SV=1
MIKSVVIVGGGTAGWMTATYLKEAFGDRVDVTLVESKRVGTIGVGEATFSTVRHFFDYLGLDEREWMPECSASYKLAIRFEDWRRKGHHFYHPFERLRVADGFTMADWWLRLGDGGEDFDRHIYLTPTMCENNLSPRLLDGSLFVSNLDGSLGRSTLDEQRSQFPYAYHFDADLLAKFLAKFGTKRGVRHVTDDVVEIGQDERGWVSHVRTKENGDLRGDLFVDCTGFRGILINQTLGEQFESFQDVLPNNRAVALRVPREGELAKTMQPYTTATAMDAGWIWTIPLYKRNGHGYVYSDEFCSPEEAERTLREKVAPGQDHLEANHIRMRIGRNQRSWVNNVVAIGLSSGFVEPLESTGIFFIQHGIEQLVKHFPDERWDPGLADAYNTKVARVIDGVKEFLVLHYRATKREDTPYWKETKLRAIPEGLVPRMEYARSLLIDESAMYPHYHGFESYSWITMTLGLGLRPEHPRPALAHIDPVNANAEFERLAAEAKELVENLPTCYEYIDSING

SEQ ID NO: 88468 - protein, 504 aa, Cellvibrio sp.
  misc_feature (1)..(504): tr|A0A4R7BAS0|A0A4R7BAS0_9GAMM Tryptophan halogenase OS =Cellvibrio sp. YR554 OX=2135765 GN=C8K91_10690 PE=4 SV =1
MNPLKKIVILGGGTSGWIAASMLAAHLKRELCEIELVESDDIGSIGVGESTIPPVVRLITSLGIDEEEFIRETQACYKLGIKFVDWRNKGQSYFHPYGALGKRIGSQDFYQCWLKATMAGEQYNLQDFSPCAVMAAQERFFPPSQAMNTPIGGAGYAIHLDAKLVAAYLRRYAEARGVVRSEGNCAQVLRNDSGFIEALVLAGGRKISGDFFIDCSGFKALLIEKELGVEFEDWSRFLPCDRAIVVKTQVAGSRIPYTTATARKAGWAWRIPLRNGTGHGYVYSSKFCTDAEAKTTLLKNLDAPRINDPRVIQFRTGRRTEFWKDNCLALGLSGGFIEPLESTAIHLIARGMDFFLRFFPDAECEPSLQREYNRRMAADYEEVRDFIVLHYCATEREDSDFWRWCKTMPLPDTLRERIDLFKGHGILREDNDELFRSTSWQSVFEGMGIRPQKYSPRVDNLDFEQISDTLKLARSAIFNMVKSLPSHEAYLQEHYGADPDTPKS

SEQ ID NO: 88469 - protein, 499 aa, Sphingomonas trueperi
  misc_feature (1)..(499): tr|A0A543M4V4|A0A543M4V4_9SPHN Tryptophan halogenase OS =Sphingomonas trueperi OX=53317 GN=FHW45_1119 PE=4 SV=1
MGQHIIIAGGGSAGWMAAALFARLRPAPDTRITLVESDAIGTIGVGEATVPILRDFNRLLGLHEPDFVAATQGSFKLGIEFVGWGEAGNRHFHGFGDFGAPIEGLAPHHHWLRLRAAGRIADPIDGWSMPALAAAQDRFAPPEALRGEAAEYRYAYHFDAGLYAPLLRSYAEARGVTRIEGRILAAECDPSTGDLAALRLEGERRIAGDLFIDCTGFASRLLGEALGTPFVDWSRWLPADRALAQGCTRAGRFTPFTRSTAHAVGWQWRIPLQHRTGNGLVYSSAYLSDNEAAAQLAANLDGEPLGDPRPLRFTTGRRERFWAHNVVAIGLAAGFMEPLESTSLQLVQTGLVRLAELLPSIGAADPAVISEYNRETIGEYERIRDFLIAHYCISRRPEPFWRDMAAMALPDTLAHKLALWDAIGRLPLYDRESHAEASWVAVLLGQGRFPRGHEPTADRPPLDALDRLFAQRRAELEAALPRLPAHDRFVAKTCRADDA

SEQ ID NO: 88470 - protein, 507 aa, Sphingomonas trueperi
  misc_feature (1)..(507): tr|A0A543M4Z1|A0A543M4Z1_9SPHN Tryptophan halogenase OS =Sphingomonas trueperi OX=53317 GN=FHW45_1141 PE=4 SV=1
MRAAGQPLRSILIVGGGTAGWMAAALLERLLDRQPVTITLLESPDIRTVGVGEATVPAIRDYFRAIGVSEAEVLREAKGTAKLGIEFRDWARPGDSFFHPFGLYGIASRGVEFHHYWLKRRASGDQTPLADYCLATQMALRGLVMPPAENPPNDLGIFDWAVHFDAGLFARFLERLATGRGVRHVEGTVATVEQDGESGFLTGVTLQDGSRIEADLFLDCTGFRSLLLGGTLGVPYVDWSHLLPCDRAVAMPCTHGDAFTPYTRSTALAAGWQWRIPLQHRVGNGYVYASAHLSDDEAQAVLRGGLEGQALAEPNFLRFTTGHRARVWEKNVIALGLAAGFLEPLESTSLTLIQSGVERLGNLMPDRGFAPELADEFNRITALEYARVRDFLLLHYWANGRVGEPLWDACRSLALPEELAYKVALFRSSGVFARYEWESFRDPSWLSMYAGFDLLPDRYDPLADHFTDGELEGAFARMREAIGRAMSLAQPHRDYLRAIGGLAGAGV

SEQ ID NO: 88471 - protein, 500 aa, Sphingopyxis indica
  misc_feature (1)..(500): tr|A0A239DDE7|A0A239DDE7_9SPHN Tryptophan halogenase OS =Sphingopyxis indica OX=436663 GN=SAMN06295955_101201 P E=4 SV=1
MNEEKHVRRIVIAGGGTAGWMAAAAIARTLGPAVDLTLVESEAIGTIGVGESTIPPLVNYNRLLGINEADFMRATQATFKLGILFDDWKDVGTRYFHSFGLTGKDHWSAGFQHFWMHGRAKGHEQPYDDYCLELVAALDGKFAHLPDDRMNYAYQLDSGLYARFLRRMAEKDGTKRIEGRIGRVELDAESGDIAALVLDGDRRIEGDIFLDCTGFRALLIEGALHAGFDDWTHWLPCDSAIALQTPNVRPPVPYTRAMAHDAGWQWRIPLQHRSGNGLVYCSRYLDRDAALERLLGNIEGEPLTEPNFLRFTSGVRRRQWYRNCVAIGLSGGFMEPLESTSIHLIQRAVLRFVRMLPAGRVSARDVAEFNDQQGQDMEQIRDFLVLHYKVTNRRDSAFWRQCADMPIPDSLTQKIELFRETGRVFRRNEELFAENSWVQVMMGQGIEPQSYHPIATKLRDDELEKLLATIRGQVSDTVAKLPEHHAYVARYCGAEAAEAA

SEQ ID NO: 88472 - protein, 501 aa, Shewanella baltica
  misc_feature (1)..(501): tr|B8E7V9|B8E7V9_SHEB2 Tryptophan halogenase OS=Shewane lla baltica (strain OS223) OX=407976 GN=Sbal223_2945 PE =4 SV=1
MKVKQAIRKIIILGGGTAGWMAAAALANNPVFAAIELCLVESDNIGTIGVGEGSTPHLKRFMDNLGISEKDWMEQCHASYKTGIDFINWNGDGQQYFHPFYFQMDVKPAEVFFINANARRRGHGNAIKPDAFFSSGVLAKHNLSPRPNKTLPCANEYGYHFDATELANYLKDYACQRGVRQIIADVVEVSTTQHQQIETLILANGERLSADFFIDASGFSAKLIHKALGVPFQSFADELLNDSAVTVPVPALMDSTQTQQAKYHTRATALSAGWLWQIPLTHRLGNGYVYSSRHLSANAAAKELLHSVNLPESTQVRFLKMRVGVSDKAWHNNVLAIGLAQSFIEPLEATSIMMTQFTLERFMSLFERYQLNKQAETLSRQTLNQAVMQLVLGIKDYIQAHYVTSQRSEPYWVAARKVAISQRLTQLLKAWYQGEDFDLLLYQYDQQLAYFRPSWYALLAGMDYRDPKLKRPFEPISAEITAQAISYCQTLVEQYFQPKHS

SEQ ID NO: 88473 - protein, 503 aa, Cellvibrio sp.
  misc_feature (1)..(503): tr|A0A4R7BQI5|A0A4R7BQI5_9GAMM Tryptophan halogenase OS =Cellvibrio sp. YR554 OX=2135765 GN=C8K91_101738 PE=4 S V=1
MQVTANPLNSICIVGGGTAGWMAAALLSNMLKGTHTKITLVESPDIATIGVGEATVPSFMAFLSSANINPKEFIEATAGTFKLGIRFDDWYKKDHNFFHPFGKIGRSIDGHDFYQVWLKTLAQGDESRLMDHAPAAIMAEQGRFMLEQPLQSTPLAHYNYALHLDAVMAARYLRKIATDNSVARVEATVAQVTTDARQFIESIRLASGEAVAADFFIDCTGFKGLLIEETLKVGYDNWSNYLPCNRAVAVQTENVHEPAPFTIATARAAGWTWKIPLQHRTGNGYVFASDFCSDDEAIQTLLNTVEGKLVNEPRIIPFVTGKRKKIWHNNCLALGLASGFLEPLESTAIHLIYRTLVHFIRHFPDRDFSPLLEQQCNAQIDQDYLEIRDFIILHYCTSTRDDTDFWRWCQSMPVPASLQEKIRQFRERGHLHHHSENLFGVDSWCSILEGMNIRPKKYHPLVDALDGKKLARSLMQGKQAIYDSVMRLPKHGDFIQQICRSKM

SEQ ID NO: 88474 - protein, 499 aa, Shewanella baltica
  misc_feature (1)..(499): tr|B8E576|B8E576_SHEB2 Tryptophan halogenase OS=Shewane lla baltica (strain OS223) OX=407976 GN=Sbal223_2301 PE =4 SV=1
MNKIKDIVIVGGGSSGWMTAAMLARLFKSTLNITLIESEDIGTVGVGEATIPPLQIFNNVLGISEADFINATQATFKLGIQFENWGKPDEAYMHAFGNIGKDIGFTQFHHYWLSTSPKEVNSFWDYSVNYQAAKHNKFQVLQQIPNSPLAGLTHAYHFDAALYAQFLRRFSEQLGVKRIEGKITAVELTPNGDIESVILGTGQTVKADFFIDCSGFAALLIEKALKVGFDSYQHWLPCDSAYAVPCEKTPAITPYTRSIAHDAGWQWRIPLQHRTGNGLVYCSRYINDNAAKQLLLNNLDGKPLAEPKKINFTTGRRIKQWHKNCVAIGLSSGFLEPLESTSLHLVQSAIIRLSKLFPHQGIAQANVDEFNRQSQLEFEQIRDFIILHYHLNQREDAQENGFWHQCRTMVLPESLQQKIALFRATGTVFRHQDELFTEAAWIQVMLGQGIRPRDFNPLAATIQPQALSEFLLNMRTIIDNTVTKLPTHDQYLAHLSTHK

SEQ ID NO: 88475 - protein, 508 aa, Pseudoalteromonas lipolytica
  misc_feature (1)..(508): tr|Z5XV20|Z5XV20_9GAMM Tryptophan halogenase OS=Pseudoa lteromonas lipolytica SCSIO 04301 OX=1452721 GN=AT00_04 730 PE=4 SV=1
MNTHINNIVIVGGGAAGWLTAGLLASEHPDKIITLIESVNIGISGVGEGTWPSMRNTLQRIGIKETDFLRHCDASFKQGSKFINWQTELEGDNYYHPFMVPQGYTECDIHAAWQYLSPEHKYADTVNMQSFVCQAALAPKQAQTPDYAAVTNYGYHLDAHKFAHFLAHHCVNKLNVKHIVDDVLNANNDSHGYIQSVNTLSNAAISGDLFIDCSGSAGLLIAKHYQIEYLNQNHILFNNCAVTTHLPYQDPHDNIASATLSTAQQAGWIWDIGLPTRRGIGYTFSDKYCDEATAIKTLKHYAEQSIGSKLAEQLDTRTLRFTPGYRKEFWHKNCVAVGMSQGFIEPLEASALAMVELSISMLSEQMPSNRQHMTLLSARFNERFNYRWQKVIEFLKLHYVLSKRNDSPYWLDNRQTNTIPTALQKLLELWCYQPPSRFDLIENEEVFPSASYQYVLYGMGFHTRLPAHMSTKQQEFAQQLCKLNRERIGHYLKNLPSNRLLLQQLLAK

SEQ ID NO: 88476 - protein, 480 aa, Burkholderia pseudomallei; identical to SEQ ID NO: 84753
  misc_feature (1)..(480): tr|A0A0E1UI82|A0A0E1UI82_BURPE Putative tryptophan halo genase OS=Burkholderia pseudomallei Pakistan 9 OX=59549 8 GN=BUH_1789 PE=4 SV=1

SEQ ID NO: 88477 - protein, 501 aa, Sphingomonas trueperi
  misc_feature (1)..(501): tr|A0A543M4D2|A0A543M4D2_9SPHN Tryptophan halogenase OS =Sphingomonas trueperi OX=53317 GN=FHW45_0932 PE=4 SV=1
MSVPLSHIAIIGGGTAGWMAAAALGRVLDTRAIAITLVESEAIGTVGVGEATIPPIQAFNALLGIDEAEFLRATKGTAKLGIEFVDWRAKGTRYFHPFGIHGIDFGAIPFEALWQRARLADEAAPLEAYSICAEAARLGRFQRPVTSGNNPLTHLGYAYHFDAALYAGFLREKAEQWGVRRQEGRIVTVERSEDGAIAGVVLEDGTRIAADFYIDCSGFRSLLLGETLGVPFEDWAQWLPNDRAVAVPCTLGPEGRSPFTRSTARGAGWQWRIPLQHRVGNGLVYASAHCSDAEAEAQLLGSLEGTPLAEPRLLRFQAGRRARFWEKNCVALGLASGFLEPLESTSIHLIQAGIARLLEMLPVGGGTPADIRRYNRLMATEFETIRDFLILHFHATARDDTDYWRHLRAMDLPDTLADRIAIYRASGRLYREADELFSKTSWLAVLHGQGIDSSGYDPIADGMPRDEAAARLARIAEVTALAASRMTTHEAFLHQSGALQR

SEQ ID NO: 88478 - protein, 530 aa, Sphingomonas trueperi
  misc_feature (1)..(530): tr|A0A543LNX2|A0A543LNX2_9SPHN Tryptophan halogenase OS =Sphingomonas trueperi OX=53317 GN=FHW45_4249 PE=4 SV=1
MNEHSIRDVVIVGGGTAGWMAAAAFSRFLNNGYTRVTLIESDEIGTVGVGEATIPPILRFNQMIGLDENEFLAATGGTFKLGIEFVDWGGLGERYFHPFGNYAQDLQGVHFHQLYLRERARRAIPDIAEWSMSAVAASMGKFGRPSPTAQTPVRELFYAFHFDAGLYAQLLRRLSESRGITRIEGKITDVTLRPDDGFVQSVTLEDGRTVAGDLFIDCSGFRGLLIEEALQAGYEDWRHWLPCDRAVAVPCANVRDPDPFTRSTARAAGWQWRIPLQHRMGNGHVYCSEFLDDDTAERQLMASLEGPALADPRRLRFTTGRRRESWSRNVVALGLSSGFLEPLESTSIHLIQSGIVRLIALFPDKRFDPIERQEYNRQMRDLYEDIRDFIILHYKATTRTDTPFWNRVRTMDIPESLANRIALFQSKGRLFREGTELFTNTSWVAVCLGQHIVPREHEPAADALDENLVAQALEQMRQGYWETAQKMPTHAEFLARIAPQPASQPPPAAEPLPVFSFAQDAPFATPGSPV

SEQ ID NO: 88479 - protein, 502 aa, Cellvibrio sp.
  misc_feature (1)..(502): tr|A0A4R7BQK5|A0A4R7BQK5_9GAMM Tryptophan halogenase OS =Cellvibrio sp. YR554 OX=2135765 GN=C8K91_101739 PE=4 S V=1
MSEIHQVNSIVIAGGGTAGWMAAAKLSQHFAKTNIKITVVESSAIGTIGVGEATIPTLRRFYQSLGMDDMEVMRKTRATVKLGIEFKDWYKPGTSFIHPFGLFGHEANGIRFHHYWLKLQAQGDTSKLEEYSLGSVLARANKFTFPAEKPSSPLSVFDWALHFDAGKFAALMRDYALAKGVVHIDAKIESIQLNPGNGFIQSLALDNQQQLDGDLFIDCTGFNGLLIKGALQTGYEDWSQWLLCDRALAVQSELVGEPAVRTVSMAHTAGWQWKIPLQHRQGNGHVYASQLMDEAEAESILLQHIDGKILHAPRKFNFTAGRRAQAWNKNCIAIGLAAGFLEPLESTSIALIETGIEKICGSFQGPFFSQKNIDYFNQVTATEWERIRDFIILHYKANQRTDSEFWRYCRAMTVPDSLQKKLDAYQERGELLHFSWEIFHPDSWLAIYNGFHSYPKHYDKNVDRLNSDYLQQSLSAMRKSIADAVAGVQSHSEFIAQHCKAE

SEQ ID NO: 88480 - protein, 504 aa, Sphingomonas trueperi
  misc_feature (1)..(504): tr|A0A543LP86|A0A543LP86_9SPHN Tryptophan halogenase OS =Sphingomonas trueperi OX=53317 GN=FHW45_4251 PE=4 SV=1
MTGQPSLRVVIVGGGTSGWMTAAALARLLPERCSLHLIESEAIGVIGVGEATLPHIRGFVEKLGIREADFMAWTRGTFKLGIEFRDWGKIGDSYVHPFGTFGRGTGEVDFHHYWTRLRLAGVEVPSLERFSYGCMLARGNRFDLPASDPAMIASTYGYAYQFDALLFAPYLRSIAEGLGARRTEGKVVEVLRDGASGNITAVRLDDGQVIEGDLFVDCSGFRSLLLGEALAEPLEDWNHWLPADRAVAMPCRTATSVTPYTSAIAMPAGWRWRIPLQHRTGNGYVYASAFTSDEAAAQALTGAVEGAALADPRVLRFRAGRRRRSWVKNCVAIGLASGFLEPLESTSIYLVQQAITALIELFPEAPDAPIERDEFNRLIDLEYDRIRDFLILHYHATTRTDTDFWTYVRTMTVPDSLAEKIELFRHAGRVVKYREGVFLDASWIAVYVGQGILPEGYDPRADAADPTALLQGMRTLEAEIAATVAQVPEHLRYIDRYCAMAAAA

SEQ ID NO: 88481 - protein, 503 aa, Cellvibrio sp.
  misc_feature (1)..(503): tr|A0A4R7BE67|A0A4R7BE67_9GAMM Tryptophan halogenase OS =Cellvibrio sp. YR554 OX=2135765 GN=C8K91_10466 PE=4 SV =1
MNDLQIRKLIIVGGGTAGWMAAAACARYFHQQPIEIVLVESEEIGTVGVGEATVPVMKMFNDLLGVNEWEFIKQTSGSFKLGIHFRDWSNTGSRYFHGFGDFGADIEGIPPHHFWLRLHAQGDKTALADYSFPAQAALHNRFAPPPQQGNNTVAAYKYAYHFDASRYAKFLRAYAEARGVIRVEGEIEQVHLSAEDGRLTHVQLKSGTCVDGDFFIDCSGFKSLLVGKTLSVPYIEWRQWLPCDSALVAQCERTGEFTPYTVSTARAAGWQWRIPLQHRVGNGYVYASAFTDTETVHNTFLDNLESEPLTAPRTLNFTTGHRREFWKKNCVALGLAGGFLEPLESTSIQLIQTGLLRFLENFPTTHINEVTIAEYNRITTNEYARIRDFLILHYCTSKRDDGDLWRYCRTMALPDELQHKIDVYTHTGRVPMLSEESYSEASWVTIFTGQGVIPSRYATQANFIDLGALKTGMNQRRQNIAKFVSAMPEHREFIARVCPSDIR

SEQ ID NO: 88482 - protein, 517 aa, Marinicauda algicola
  misc_feature (1)..(517): tr|A0A4S2GW35|A0A4S2GW35_9RHOB Tryptophan 7-halogenase OS=Marinicauda algicola OX=2029849 GN=E5163_16310 PE=4 SV=1
MAIDDIVIVGGGTAGWMTAAALSRLSASGRANVTLIESEAIGTVGVGEATIPHFVAFNKLLGIDEAVLLAEVQGTFKLGIHFENWGAQGASYFHPFGGYGYEFDGLSFHHIWHMMRRGGDRRPLHVFNAETMAAQAHKFARTGPDHPEDLPPINYAYHLDAGRYARFLRKHAEARGVSRAEGRVTDVSLDGESGFVTAVTLDDGRQVRGDLFVDCSGFRGLLIEQALETGYEDWTHWLPCDRAVALPCARKGPPMPYTRSTAWSAGWQWTVPLQHRNGNGHVYSSAFMSSDEALDILLRNIDSEPAADPNHLRFVTGRRKKFWNRNVVAVGLAAGFMEPLESTSIHLISTAVSKLLSLLSLDAITPVQEDTFNRLTEKEYVRIRDFLILHYKVTDRCDSPFWDYCRTMSIPDTLEEKLALFRHNGHVFREEDELFTETSWVAVMLGQGLVPEKCSPLAETYAGPNLIHEVNEIERSIRYLVQNMPGHQQFVERYCPAPALETSAQSPARPRAARPVP

SEQ ID NO: 88483 - protein, 543 aa, Shewanella baltica
  misc_feature (1)..(543): tr|B8EBW8|B8EBW8_SHEB2 Tryptophan halogenase OS=Shewane lla baltica (strain OS223) OX=407976 GN=Sbal223_3178 PE =4 SV=1
MQQATHTAINNIVIVGGGTAGWITAALLAAEHNVDKGQLAHSPKLNITLIESPDVATIGVGEGTWPSMRNTLDKIGISETEFIRQCDASFKQGSRFIHWQHDDTEHTNPFCSNQYLHPFSLPHGHQELDLCPFWLPHSDKVSFAQAVSNQDALTQLGLAPKTIATPEYHFQNNYGYHLDAGKFSQLLMQHCTEKLGIKYIRDHVTQVKSLANGDIESLATKEHGVILGDMFVDCSGTKSLLLGEHFNVPFLCQKAVLFNDSALALQVPYAEENSPIASCTLSTAQPNGWIWDIGLPTRKGVGYVYSSAHCSDDEAERTLRAYLTNDTSTNPQSASNNAVDSRKQECRKLNINPGYHAKCWQNNCIAIGMAAGFIEPLEASALALVEWTANTLATQLPTHRGVMDTIALRVNERYERHWQQIIDFLKLHYVVSRREVDGYWRDHREAASIPERLQQQLDLWRYQAPSSHDISYKEPLFPAASFQYVLYGMGFNTALPTHIKPSQQQVAQRLFSENQQKIHGLSQSLPSNRDLLNKVRQFGFPKI

SEQ ID NO: 88484 - protein, 501 aa, Lysobacter sp.
  misc_feature (1)..(501): tr|A0A522Y955|A0A522Y955_LYSSP Tryptophan 7-halogenase OS=Lysobacter sp. OX=72226 GN=EPO46_00010 PE=4 SV=1
MGSRITQVVIVGGGTAGWMAAAALSKVLNRDYSIRLIESEDIGTVGVGEATIPMIKLFNAALDLDENEFVRATRGSFKLGIEFVNWGRLGDSYIHGFGKIGQDLGLVSFHHYWLKMRALGRAAPLDEYSINTFASRHNRFMRAVTDRPNSPLADIAYAYHFDAGLYAAYLRRYAEGRGVERIEGKVVDVSLRGGDGFVESLTLDGGRVVGGQLFIDCSGFRGLLIEQALRTGYTDWTQWLPCDRAVAVPCAHGGPITPYTRSTARQAGWQWRIPLQHRVGNGHVFSSRHISEDEATATLMANLEGEALAEPRTLRFVTGKRNRTWNRNVVALGLASGFMEPLESTSIHLVQSGIARLTAFFPHEGFHQPDIDEFNRHADVEVEAIRDFLIAHYHATERSDTPFWDYCRTMDVPESVTRRIELFRSNGRVFREGNELFAEPSWVQVLDGQRVHPRGYHAMVDVYSDEKITEYLASVRGVISNCVQAMPTHEEFIARHCAAPA

SEQ ID NO: 88485 - protein, 538 aa, Burkholderia pseudomallei; identical to SEQ ID NO: 82926
  misc_feature (1)..(538): tr|A0A0E1UKF8|A0A0E1UKF8_BURPE Tryptophan halogenase Pr nA OS=Burkholderia pseudomallei Pakistan 9 OX=595498 GN =BUH_7113 PE=4 SV=1

SEQ ID NO: 88486 - protein, 220 aa, Sphingomonas sp.
  misc_feature (1)..(220): tr|A0A520JM04|A0A520JM04_SPHSX Tryptophan 7-halogenase (Fragment) OS=Sphingomonas sp. OX=28214 GN=EOP67_09580 PE=4 SV=1
EAIDGGWRLTSCLPGRTDTAIVYASGARHEPGDVSRFRSGRGSRAWVGNVVAIGEAHCVVEPLEAAPLHVLHTQIDRLVASLPDRDFDEVELAYYNRETGQEADRLRDFLILHYATSDRPEPFWQAARDATLPPELAETLTLFRERGRLPIRDGESFDRDSWHAVLLGQGILPRRGDVLAAAIDPKGARAAMADFRARLSKAVAAAPTHRAYLASLRTNA

SEQ ID NO: 88487 - protein, 286 aa, Sphingomonas sp.
  misc_feature (1)..(286): tr|A0A520JG14|A0A520JG14_SPHSX Tryptophan 7-halogenase (Fragment) OS=Sphingomonas sp. OX=28214 GN=EOP67_20800 PE=4 SV=1
LLIGDAMGTTFEDWSHWLPCDRAVAVPCERVAETTPFTRSTLRPAGWQWRIPLQHRTGNGYVYASDFVSDDEAAATLLAGLDGAPLADPRVIRFTAGFRREAWRGNVVAIGLSSGFLEPLESTSIHLIQSAIAKLITLFPDRNCDPALARRFNALLGADMDGIRDFLILHYHATEGHQQPLWQHTRNMRLPDTLIEREEQYRRAGRLMLDADELFREASWLAVLNGQGIHADGPSPLADTLDQTANRNQLKQIEAVIARAAPTLPTHDAAITTLIAPPEPVAPPVL

SEQ ID NO: 88488 - protein, 503 aa, Cellvibrio sp.
  misc_feature (1)..(503): tr|A0A5J6NYE5|A0A5J6NYE5_9GAMM Tryptophan 7-halogenase OS=Cellvibrio sp. KY-YJ-3 OX=454662 GN=D0B88_13300 PE=4 SV=1
MQQPFRIIIVGGGTAGWMTAAAISSLYKDRSRFQITLVESEEIGSIGVGEATLPSIKSFNDQLGIDEVEMMRRTQATFKLGIQFNDWGRLGASYIHPFGLYGSLKNSSDFYQYWSHVASKKTIPDISKYSFAVQLCERNQFTFPSKDSGQIESTFSYAYHFDAALYAAYLREISERAGVLRVNGIVEAINNDPDTGNITAVFLRDGKTLSGDFFIDCSGFRSLLLHKNLQSEFEDWSHWLLCDRAVAMQSEQPKDIPPYTMSTAKEAGWQWRIPLQHRAGNGYVYCSNLISDDQAHDSLLKGLAGKPLTDPRFIKFKAGRYKKSWQKNCVAIGLSSGFLEPLESTSIYLIHIAIICLLRVFSFQSNKNLSILSDEYNRLIDNEYERIRDFLILHYRLNDRTDSELWRHCQSMKVPDSLMQKMDLFKRRGYSESFKYGLFSTPSWLAVFHGQGLFQQGIDPFISSIPTEKIEPILAEVSGMIDKGLQAASTHEHFIKQHCNAAT

SEQ ID NO: 88489 - protein, 491 aa, Cellvibrio sp.
  misc_feature (1)..(491): tr|A0A5J6NXZ4|A0A5J6NXZ4_9GAMM Tryptophan 7-halogenase OS=Cellvibrio sp. KY-YJ-3 OX=454662 GN=D0B88_05355 PE=4 SV=1
MTAIKNLVIVGGGTAGWMAAAAITKLYGKIVNVTLVESEEIGTIGVGEATIPTMVFFHQLLGINEAEFLSATQGTFKLGIRFENWRAQGKHYLHAFGVTGNDCWAAGFQHFWRRGLELGIAGEFGDYCFERQAAEQLRFAHMPNNGLNYAFHLDASRYAKFLRQFSEAQGATRIEGTIKQVTTEPQTGFIQSVTLNSGKIIEGDFFFDCSGMRGLLIEQALHTGYEDWSHWLPCDRAIAVQTESVREPVPYTRSIAHSAGWQWQIPLRQRVGNGLVYCSKYLADEDAKKLLLENVEGKLLTEPRLIQFRTGRRLQQWNKNCLAVGLSGGFLEPLESTSIHLIQQNIVRFMRMFPAQGIVQSDIDEFNKQAKFDLEHIRDFIILHYCVTERADSPFWNHCRTMSLPDSLAHRIKLFKETGRMFREGNELFDDSWLQVMIGQGLMPSSHNPLVDTMSRDELTVFLLKIKDTISKKLNGLPLHAEYLKKYPLPD

SEQ ID NO: 88490 - protein, 517 aa, Cellvibrio sp.
  misc_feature (1)..(517): tr|A0A5J6P5L0|A0A5J6P5L0_9GAMM Tryptophan 7-halogenase OS=Cellvibrio sp. KY-YJ-3 OX=454662 GN=D0B88_11755 PE=4 SV=1
MTKAIKSIVIVGGGAAGWITAGTLAAKIRSQHSEGIQISLVESPKTPIIGVGEGTWPTMRNTLKKMGVRETDFLRECNVSFKQGAKFVHWCTGQKDDFYYHPLVLPQGFSEINLAPHWLANPHNQSFSNAVCVQETLCEAGLAPKLITTPEYAAVANYAYHLDAGAFAEFLKKHCTTNLGVTHLLADVIHVNAADNGDITSIATDTQGDIAGDLFIDCSGFNSLLLGKHYKVPFISCKDVLFIDTALAVHLPYENDNSPIASHTISTAQDSGWIWDIGLPSRHGIGHVFSSAHTSTEQAEEKLHQYLRQHSSNTEQISVRKIPITPGHRAKFWEKNCVAVGLSAGFLEPLEASALVLIEISAAMIADQLPATRPAMDIIAKRFNETFLYRWQRIIDFLKLHYTLSKRDDSDFWRDNRRLSSIPESLQELMTLWRYQPPWHMDFDRAAEVFPAASYQYLLYGMGYTTEASTLGMSQHNQQLAQVLFNKNATLAQQLKSQLPSNRELINKIKEYGLQPV

SEQ ID NO: 88491 - protein, 314 aa, Sphingomonas sp.
  misc_feature (1)..(314): tr|A0A520J8Z7|A0A520J8Z7_SPHSX Tryptophan 7-halogenase (Fragment) OS=Sphingomonas sp. OX=28214 GN=EOP67_33830 PE=4 SV=1
LDGETGHVRDVTIAGDRRIEGDLFIDCSGFRGLLIEQTLHAGYEDWTRWLPCDRAVAMPTANMGTAITPYTRSTARAAGWQWRIPLQHRTGNGYVYSSAHCSDDEAAATLLAGVDGTPLAEPRILRFTAGRRRKQWIGNVVALGLASGFTEPLESTSIHMVQTGISKLLALFPDQGFSPVEIGTYNQLVETQFDQVRDFLILHYHATRRDDSPFWREARHRAIPDSLAEKIALWRRRGRLFRWEDDLFAEASWVAVLLGQGIVPAGWDRLVDLVDAREVNARFDRLRAMFADTAARMPRHEDYLARTCPTGVRA

SEQ ID NO: 88492 - protein, 500 aa, Cellvibrio sp.
  misc_feature (1)..(500): tr|A0A5J6P1A0|A0A5J6P1A0_9GAMM Tryptophan 7-halogenase OS=Cellvibrio sp. KY-YJ-3 OX=454662 GN=D0B88_18655 PE=4 SV=1
MKIIIVGGGTAGWLTAAIIAAQHNGHLPGAPELVLIESENVPTIGVGEGTWPTMRNTLSSIGLKECDVFKRCNAAFKQGGKFVNWVNGNNDYYYHPFTVPTGYGRIDLAPYLSDITNFATLTNFQQDVCEAGLAPRTLAEQEYQGSCNYGYHLDAAAFGVLLKEKCINDFGVTHIVDDVKRVAVSPNGEIMGLTLENQGEISGELYIDCSGMHSILLGKALNVPMVDVSAVLFNDRALAVQVPYPSDAAPLASHTIATAQNAGWIWDIGLTSRRGVGHVYSSRYLSDDEAESNLRRYIGDAMNTLTPRKIEFNSGYRAEFWKNNCVAVGMAAGFVEPLEATAIMLVELSARYIADNLIPDSAATRVIAKRFNEQMHYRWQRIIDFLKLHYMLTKRQEQYWKDHTNPETIPDSLKDDLAIWHCRGPRVEDFKSAYELFPAASYQYVIYGMGFKPEFEKQEYLYQRKNEVESILRRTQQLTTQLLQNLPPHREYIAKWLSQH

SEQ ID NO: 88493 - protein, 504 aa, Cellvibrio sp.
  misc_feature (1)..(504): tr|A0A5J6NVG3|A0A5J6NVG3_9GAMM Tryptophan 7-halogenase OS=Cellvibrio sp. KY-YJ-3 OX=454662 GN=D0B88_00730 PE=4 SV=1
MIKKIVILGGGTAGWMAANILAKRWAKYSVEIALVESSDIGIIGVGEGSTPQLKSFFDYMEIAEAEWMPACNATYKTGIRFCNWSTKPGFENYFHPFPAQPDDYSAPAFFYNCFVRRKGADVYAHPDKFFLATYLAKHQLGPKPAHHFPFQLGYGYHFDSSLVGLFLKQHAAKLGVAHIDARITEVKLDAQGYISHLLTENQQPLAADLFIDCSGFAGVLIQQALKVPFINFSSNLFNDSAVVMPTSAAMDITPQTTATALNAGWMWNIPLVNRIGNGYVYSSNYLSADMAETELRQKLNLLDKDVPVRHLKMKVGRLQHHWAKNCLAVGLSQGFIEPLEATALHLVQETVLGFAEAIELGDFTDREQANFNRSINQRFEAVRDYIVCHYRVNSRTDTQYWRDNANNNSLSDSLRELLQVWVGGGNLTQEIERQKIGCYYPSASWHCLLAGYGLFPTQDQLLPGNEVAHKYKMENIENFISRCALNFSSHREQLNDLVAKQQVM

SEQ ID NO: 88494 - protein, 107 aa, Sphingomonas sp.
  misc_feature (1)..(107): tr|A0A520HS12|A0A520HS12_SPHSX Tryptophan halogenase (F ragment) OS=Sphingomonas sp. OX=28214 GN=EOP67_70370 PE =4 SV=1
MANHPLRIVIAGGGTAGWMAAATFARFLETGYEIDLIESDAIGTVGVGEATIPQIHLFNDALGLDEDAFLRATGGTFKLGIEFVDWFKPGHRYMHAFGDVGRDVGLL

SEQ ID NO: 88495 - protein, 132 aa, Sphingomonas sp.
  misc_feature (1)..(132): tr|A0A520I7W6|A0A520I7W6_SPHSX Tryptophan 7-halogenase (Fragment) OS=Sphingomonas sp. OX=28214 GN=EOP67_60015 PE=4 SV=1
MTACLIAHRWRDRGVRVTLVESPEIGIVGVGEGSTPQLKHFFDTLGIAEAEWMPACDATYKLGIGFEGWSDRAGYERYFHPFPTALDGHTAPQFFYNARARRTGRDVDAHPDQFLLPARLAATHCAPQPAAN

SEQ ID NO: 88496 - protein, 400 aa, Sphingomonas sp.
  misc_feature (1)..(400): tr|A0A520J8L8|A0A520J8L8_SPHSX Tryptophan 7-halogenase (Fragment) OS=Sphingomonas sp. OX=28214 GN=EOP67_34565 PE=4 SV=1
MEDLAIRRIVVVGGGTAGWMAAAALSRVLGRAVEIELIESEAIGTVGVGEATIPHLQYFNRLLGIDEDDFVRRTAATFKLGIEFVDWGRIGDRYFHPFGTYGQEMEGLHFHHFWLRQAQLGGALELDRFSIGADAARAQRFQRPDHSRAGSPLGTISYAFQFDASLYARYLRERAEAGGVRRTEGRIVDVALDSGNGHVQAVTLEDGSRVAGDLFIDCSGFRGLLISEALGAGFEDWSHWLPCDRAVARACRRTTDPLPYTRATAKAAGWQWRIPLQSRTGNGYVYCSDHLSDDAALDGLNAALDGDPLSEPNFLKFKAGVRHKAWDRNVVALGLASGFLEPLESTSIHLIQSAIARLLTNFPDRRFNQHDIDYYNRRTRVEYEQVRDFIILHYATTTRD

SEQ ID NO: 88497 - protein, 161 aa, Sphingomonas sp.
  misc_feature (1)..(161): tr|A0A520HML2|A0A520HML2_SPHSX Tryptophan halogenase (F ragment) OS=Sphingomonas sp. OX=28214 GN=EOP67_72925 PE =4 SV=1
LIQRAVLRLLRLFPSGPVSPRDVAEFNDQQHTDMLQIRDFLILHYKATNRRDSAFWRQCAAMPIPASLEHKIELFRETGRVFRKNEELFAENSWVQVMLGQGIVPRSYHPIATKLRDDELARLLGGLRDGTNATVAGLPEHAEYVARYCGAAPAPSPVLAA

SEQ ID NO: 88498 - protein, 488 aa, Sphingomonas sp.
  misc_feature (1)..(488): tr|A0A520JDS0|A0A520JDS0_SPHSX Tryptophan 7-halogenase OS=Sphingomonas sp. OX=28214 GN=EOP67_24955 PE=4 SV=1
MTITPRRIVVAGGGTAGWMAAAAIARTMGGTAAVTLIESDAIGTVGVGESTIPPLVLLGISEADFMRATQATFKLGILFDGWKDGRDRYFHSFGTTGKDHWSAGFQHFWLNGRARGHNESYDAYCLELAAAMEGKFAHLPDEGMNYAYQLDSTLYAKFLRGMAEKDGTTRIEGRIARVELDGENGDVAALHLESGAVVEGDLFLDCTGFRALLIEQALHAGFDDWTHWLPCDSAIAVQTENVRPPVPYTRAMAHDAGWQWRIPLQHRTGNGIVWCSRYMDRDAALERLLGNLEGEVLTEPNHIRFVTGARRRQWHRNVIAIGLSGGFMEPLESTSIHLIQRAILRLIRMMPQGAISPRDVAEFNDQQFADMEQIRDFLILHYKATDRRDSPFWRQCAAMPIPDSLAQKIELFRETGRVFRRNEELFAENSWVQVMMGQGIVPRAHHPIADKLGDEELTRFLSTLRENVSRTVAGLPRHADYVAHYCGG

SEQ ID NO: 88499 - protein, 530 aa, Rhodanobacter sp.
  misc_feature (1)..(530): tr|A0A5A7VY02|A0A5A7VY02_9GAMM Tryptophan 7-halogenase OS=Rhodanobacter sp. T12-5 OX=2024611 GN=CIW53_03235 PE =4 SV=1
MARIQKILVVGGGTAGWLTACYLAKALNSAAPGSIRVELVESPNIGLLGVGEATFPSIRGTLAAIGLDERRFLVGASATYKQGIQYVNWVRAPGEPGPDRFFHPFNQPSQRSGSPELLPYWLLGGAPAGTRFAEAVSMQAHVVEHGRAPKRAGDPDYQGPLNHAYHFDAACFAAVLAEHGQSLGVRRHLATVERAELDESGAIARIVTREIGELSADLYVDCTGLRGALIGSVMQSPFHSRRDVLFADRAVALQVPYPRPDAPILPFTRATAQEAGWIWDIGLRKRRGIGYVYSSRHTDATRAEAVIRDYVGDQAAGLDALHIKFETGHRPEHWRRNCVAVGLAGGFVEPLESTGIALVELAAYLITHLLPGDVDDMERTARRFNEMMVARYERIIDFIKMHYCLSQRRDHAFWIDNTDPASIPQTLQDRLALWRHRPPHRLDFVTDLEMFLPASWQYVLYGMEFKTDLEPMRSAYPQMEAAQREFAMIRQMAGHALNDLPDHRALVEQLCREHAERVGQEDSETAERVA

SEQ ID NO: 88500 - protein, 494 aa, Cellvibrio sp.
  misc_feature (1)..(494): tr|A0A5J6PBV3|A0A5J6PBV3_9GAMM Tryptophan 7-halogenase OS=Cellvibrio sp. KY-GH-1 OX=2303332 GN=D0C16_11325 PE= 4 SV=1
MTKSIKKILIVGGGTAGWMTAAFLARWIAKTGVEVTLVESEQIGTIGVGEATVPGIHQFMRDLGINETEFIKATNATFKLGIEFEGWSAPDKHFFHPFAGYGVQIEERPFYQTWWSAKQKGYTEGLDSFCLCTQLARQGKFAQPSFDEDSRLAWYNYAYHFDASLFARYLRQFAERLGVTRVEGKVGSINLDETNGFIASVQVEEGMLLEADLFVDCTGMSALLIHKTLGVEYEDWSHWLLSDSALAVQTKSVVAPDPFTRSSARSAGWQWHIPLQHRVGNGYVYASQFISDEQAREELVANLRGELVTEPRLIRFTTGMRKDFWHKNCVAIGLSSGFLEPLESTSISLIQTGISKMAAFLVNFVLDEKLVAEANRLNRLEYERIRDFIILHYKLNGRTGAYWNHVRDMAIPATLVDKIETFKASGSIQMLEQESFREDSWVSMYSGFGVDPQGLVASEHSDRAWLLMDKMKRAILKGCDVAGSHEEFLGTVIP

SEQ ID NO: 88501 - protein, 512 aa, Cellvibrio sp.
  misc_feature (1)..(512): tr|A0A5J6P7Q2|A0A5J6P7Q2_9GAMM Tryptophan 7-halogenase OS=Cellvibrio sp. KY-GH-1 OX=2303332 GN=D0C16_13105 PE= 4 SV=1
MTASINPLKKIVILGGGTSGWIAASMLAAHLKLGSCEIELVESDDIGSIGVGESTIPPVVRLVTSLGIDEEEFIRETQACYKLGIKFVDWRAKNQSYFHPYGALGKRIGSQDFYQCWLKATKEGDAYDLQDFSPCAVMAAQEKFFLPSQAMNTPIGGAGYAVHLDAKLVAAFLRRYAEARGVVRSEGNCVNVLRKENGFIDAIELAGGRKIHGDFFIDCSGFKALLIEKAMEVAFEDWSHYLPCDRAYVVKTEKAGSRMPYTTATARKSGWGWRIPLRNGTGHGYVYSSRFCTDAEAKTILLKNLDAPRINDPRVISFNTGRRKEFWKDNCLALGLSGGFIEPLESTAIHLIARGMDFFLRFFPDAECERSLQREYNRRMAADYEEVRDFIVLHYCATEREDSDFWRWCKTMELPSSLQERIELFRGHGILREDNDELFRAASWQSVFEGMGIRPQKYNPRIDNLDYQQISETLKLARSAIFNMVKSLPSHDEYLAEHYGLELDSQGRKSGN

SEQ ID NO: 88502 - protein, 504 aa, Sphingomonas sp.
  misc_feature (1)..(504): tr|A0A525HEZ5|A0A525HEZ5_SPHSX Tryptophan 7-halogenase OS=Sphingomonas sp. OX=28214 GN=E7773_11760 PE=4 SV=1
MSDPQRSIVILGGGTAGWMAANLFAHHLGPTVAVTVVESPEIGIVGVGEGSTPQLKAFFDTLGIAEAEWMPRCNATYKTGIGFRGWSEAWGFEGYFHPFATDLDGFTAPAFFVNAYARRHNADVWAHPDRFFLPTALAGHRLAPLVPDNFPFKVGYGYHFDAHLVGAFLRDHAVGLGVRHLQHRVVDIAVTDGDVTHLIAEDGVTIAGDFFVDCSGFRSVIAQGALGVPFLPFASNLFNDSAVVMPTPRDPSGTNCQTISTAFRHGWAWDIPLTSRTGNGYVYASSYCSADDAETELRAHLGLLDAPVEARHLKMKVGRIADSWSGNCLALGLAQGFIEPLEATALHIVQATVEGFVAAWRDGGFGPLHRTAFNRTIAARYEGIRDYIVAHYRMNRRTDTSYWRDNAANQDLSDSLKGIITCWFTGRDLEEEIARQDIGKYYSAASWHCLLAGYGQFPDPAQVDRNAPLPPTDMTEVDAFITGCALNFASHDEALAALDGPTRE

SEQ ID NO: 88503 - protein, 358 aa, Sphingomonas sp.
  misc_feature (1)..(358): tr|A0A520ICG0|A0A520ICG0_SPHSX Tryptophan 7-halogenase (Fragment) OS=Sphingomonas sp. OX=28214 GN=EOP67_54625 PE=4 SV=1
YAFHFDAVALAGLLREHAVRNGVRHLTDTVSEVLLAEDGAIGGVRTERNGMLDADLYIDCTGFRAELIGKAMKVPFRSCRDVLFCNRAIAAQRPYAKPGDPIASYTISTAQESGWIWDIGLDRRRGIGHVYSSDHSDDETAERVLRGYLGAGGDEAEVRHFKFDAGYREVNWVKNCVAVGLSSGFFEPLEATGIAFAEVSAGMIANLFPWGGDYETSARQFNANMLRRYERALDFIKLHYCISERRDTAFWRDNVADASVPDSLLELLDRWRFRPPNELDIDGQVDIFTDASWQYVLYGMGWKTDLSAKAGALRYAEDARRAFAEVRRQADYAVRNLPSNRDLVTYAQHHHFGARAAA

SEQ ID NO: 88504 - protein, 505 aa, Sphingomonas sp.
  misc_feature (1)..(505): tr|A0A1Y2QVL5|A0A1Y2QVL5_9SPHN Tryptophan halogenase OS =Sphingomonas sp. IBVSS1 OX=1985171 GN=CAP39_03890 PE=4 SV=1
MRDDNIRSVCIVGGGSAGWMAAAALARNLPHGVTIHLVESEEIGTVGVGEATIPPIKLFNQMLGLNEADFVRATQGSFKLGIEFVGWGKAGHRYFHPFGTFGADFDSVAMHHWWNRQRLAGDPTPLDDYSMAWVAAKSNRFAPPAQDRRLVQSTFDYAYHFDAGLYARALRALAEALGVTRHEGRITGVARAGETGHVTAITLADGRTVEAEFWIDCSGFRGLLIAETLETPFIDWTHWLPCDRALAVPCAHANGTDGAGFTPYTRSTAHAAGWQWRIPLQHRIGNGHVFSSAFMGEDEAAAILMANLDGPALADPRLLKFTTGRRAQSWAHNVVAIGLAAGFMEPLESTSLHLVQSGLMRLLALWPTRAMDAHVRDEFNRMSATEWERIRDFLILHYHLNSRDEPMWRHCAAMPIPDTLANKIAHFASHGRLVSDGPELFLNASWLAVHVGQFNLPRRYDPLADARAANVDAPRLLSGLARVMREAAAEMPTHAAFIARHCAAN

SEQ ID NO: 88505 - protein, 183 aa, Sphingomonas sp.
  misc_feature (1)..(183): tr|A0A520J8L2|A0A520J8L2_SPHSX Tryptophan halogenase (F ragment) OS=Sphingomonas sp. OX=28214 GN=EOP67_34560 PE =4 SV=1
HRRQFWRGNCIAIGLAAGFLEPLESTSLYLIQEGISRFISLFPNGDIPDILRVEYNRYMQKKFEQVRDFIVLHYVATNRDDTPFWRYCRSMSVPDSLQHKMELFRETGRIFRYDDELFARPSWVAVMLGQGIMPKRCDPIVAALPARDVANSLQSMASAMKDAASRMPTHASFIASYCAATEG

SEQ ID NO: 88506 - protein, 499 aa, Rheinheimera sp.
  misc_feature (1)..(499): tr|A0A0M0M4U8|A0A0M0M4U8_9GAMM Tryptophan halogenase OS =Rheinheimera sp. KL1 OX=1635005 GN=WH43_11030 PE=4 SV= 1
MLEPIQTIVIVGGGSSGWMSAALLAKLTGQRYRIELVESEQIGTVGVGEATIPAIKLYNHLCGINEQEFIRATGATFKLGIEFANWGQQGDSYFHAFGALGRQWEWLSFYQYWLKLKQQGLALPFEHYCIASQMAQQHKFMPADPGKPKSPVSEIAYAYHFDASLYARYLRSLSEKRGVIRHEGVIKHVERDAVSGHIRHLLLEDGRQVAGDLFIDCSGLRALLIGQTMGVGYDDWSHWLPNDSAWAVPSATLNPLPPYTRATAHEFGWQWRIPLQHRTGNGLVFSSAYASDDVAQQRLLQTLELPASVDPRLIRFTTGKRKQMWVGNCVAIGLSSGFLEPLESTSLHLVQTAITRLVNLFPDRSFAKANTDHYNLLAAQEMEQIRDFIIAHYKVTERDDSEYWRYLKQMTVPDSLQQKLDIFQSYGRVHRVADELFREDSWVQVLLGQRMMPERYDPMVDNKTLAQITDFAASTAHVISACVEKMPTHTDFIAGIAAH

SEQ ID NO: 88507 - protein, 506 aa, Sphingomonas sp.
  misc_feature (1)..(506): tr|A0A5E7Z787|A0A5E7Z787_9SPHN Tryptophan halogenase OS =Sphingomonas sp. EC-SD391 OX=2038398 GN=SPHINGO391_440 278 PE=4 SV=1
MDMRKTRVVVVGGGTAGWMTAAALVRLLPVACSVHLVESADIGIVGVGEATLPHIRAFVERLGLDEADFMRATHATFKLGIDFRDFGAIGDSYIHPFGSFGRPLDDVGFHHYWLRLAAAGRAGPIGDYSVAVAAAKRHRFAIPDGAPDDLAASFGYAYQFDATLFGPYLRHFAEAHGARRTEARIVSVDRDPLNGDVRALRLDSGEAVEGDLFVDCSGFRSLLLGDAMAEPWEDWSRWLPCDRAVAMPCTSPHGPIEPYTRATAKPAGWQWRIPLQHRVGNGYVYSSAHLSDQAAADALVTSVEGAPLADPRVLKFRAGRRRSSWVGNVVAIGLASGFLEPLESTSIYLAQMAITQLIELFPQNMRADGIAAADRTEFNRMVDMEYDRIRDFLILHYHATTRDDSDFWNHVRTMEVPATLADKIDLFRRAGRVTQYSEGLFLEPSWIAVYLGQGIVPQAWDQRADRPGLDGLDRAIASLRDRVAATATAMPDHGTFIARRNATIAA

SEQ ID NO: 88508 - protein, 380 aa, Sphingomonas sp.
  misc_feature (1)..(380): tr|A0A520I176|A0A520I176_SPHSX Tryptophan halogenase (F ragment) OS=Sphingomonas sp. OX=28214 GN=EOP68_00635 PE =4 SV=1
AACDADLAPRQRAMPDYAGALNYAYHLDAGKFAALLARHGVAKLGVRHVRDHVVAVAQAEDGDVVAVETRDHGAIAGDLFVDCTGHAALLIGGTFGVPFVDRSGELFNDRALAVQVPAAPGSAIASQTTATAHAAGWIWDIGLPTRRGVGCVYASAYMTDDEARATLADYLARTAPGADLDALAPRRLTFRSGHRERFWVRNCVAIGLSAGFLEPLEASAIVLVELSLEALLAGFPATRDAMDVHARRFDQLFRYRWDRIVEFLKLHYVLSERIEPYWRAHRDPATIPPRLADQLRVWRDQPPSTLDLPHADEIFPAASYQYVLYGMGAAPPPARPAPGAAVAAVAQVDQRARALVAGLPTNRAYLDALARDHASLEATA

SEQ ID NO: 88509 - protein, 163 aa, Sphingomonas sp.
  misc_feature (1)..(163): tr|A0A520IHG5|A0A520IHG5_SPHSX Tryptophan halogenase (F ragment) OS=Sphingomonas sp. OX=28214 GN=EOP67_51330 PE =4 SV=1
GFMEPLESTSIHLIQRAILRLIRMMPAGAISPRDIAEFNDQQFADMEQIRDFLILHYKATDRRDSPFWRQCAAMEVPESLAQKIALFRETGRVFRRNEELFAENSWVQVMMGQGIMPATYHPIAAKLRDEELAKFLSNLRDNVTRTVAGLPGHAEYVAHYCGG

SEQ ID NO: 88510 - protein, 505 aa, Sphingomonas sp.
  misc_feature (1)..(505): tr|A0A520JM60|A0A520JM60_SPHSX Tryptophan 7-halogenase OS=Sphingomonas sp. OX=28214 GN=EOP67_09585 PE=4 SV=1
MSEHTIREVVIVGGGTAGWMAAAALSKFLGGGKEQGQPRIRLIESEEIGTVGVGEATIPTIATFNQMLGIDEDDFVAKTQGTFKLGIEFVDWRKIGERYFHPFGQFGHDIEGLNFHQFFLKLAKQGKCADIWHYAPCAVAAAAGRFARQSPDPRSPFGTLPYAFHFDAGLYARYLRSYAEARGVERIEGRIVDVALRGEDGFVEALTLEDGRRIEGELFVDCSGFRGLLIEGALKTGYEDWRHWLPCDRAVAVPTANVGDPVPFTRATARSAGWQWRIPLQHRTGNGYVYSSAHISDEDAQATLLSTVEGSPIADPRRLSFVTGRRKRFWNRNVVALGLSGGFLEPLESTSIHLIQTGIAKLLALFPDRRFLQVEAGEYDRLMGSAYDGVRDFIILHYHATTRDDSPFWNHVRTMTVPDSLRRKTELFQAKGRFFRYDDELFSLASWVAVMLGQGVTPEGYDPIVDGLDERKLVEAVERMRLGIRQTIAQMPSQSDYIRAHCAAI

SEQ ID NO: 88511 - protein, 349 aa, Sphingomonas sp.
  misc_feature (1)..(349): tr|A0A520IIV7|A0A520IIV7_SPHSX Tryptophan halogenase (F ragment) OS=Sphingomonas sp. OX=28214 GN=EOP67_50280 PE =4 SV=1
GYHLDAGKLAALLARHAVTRLGVRHVRDHVVDVERTADGIVTAVQTRESGAVTGDLFLDCTGHAALLVGDVPFIDRSDVLFNDRALAVQVPVAPDSPIAAQTDATAHAAGWIWDIGLPTRRGVGCVYSSAHMSDDDAAAMLAKYLGTSEPISPRRLTFRSGHRARFWNGNCLAIGLSAGFLEPLEASAIVTIELSLDALLDDWPTRETMALVATRFNTLFRYRWDRIVEFLKLHYVLSRREGAYWRDHRDPASVPPRLVELLALWKHRPPTRADFPMVDEVFPAASYQYVLYGMGGHLPEAGPLKPGASPAFAPIAQRTRGLTSALPTIRAYLDACRMTYRPTALEQLS

SEQ ID NO: 88512 - protein, 524 aa, Sphingomonas sp.
  misc_feature (1)..(524): tr|A0A520JNI6|A0A520JNI6_SPHSX Tryptophan 7-halogenase (Fragment) OS=Sphingomonas sp. OX=28214 GN=EOP67_06740 PE=4 SV=1
MNEHSIRRVVIVGGGTAGWMAAAAFARFLNNGYTQVTLIESEEIGTVGVGEATIPPLINFNRMLGLDENAFLAATAGTFKLGIEFVNWGAIGERYFHPFGSYGHDLQGIHFHQLWLREKAQRPIEDISAWSMNAMAAQHGTFGRANEDARSPVRELFYAFHFDASLYARHLRDYAEKAGIVRLEGKIATVAQRPDDGYVEAVTLEDGRRVEGDLFIDCSGFRGLLIEETLHTGYESYAHWLPCDRAVAVPCALPRPGEPDPFTRSTAHQAGWQWRIPLQHRMGNGLVYCSDYLDDDAAEAQLLASLEAEPLADPRRLRFTAGRRRESWSRNVVALGLSSGFIEPLESTSIHLVQAGIQRLLALFPDKRFDPTERDEFNRQMHDLYEDVRDFIILHYKATRRDDSPFWDKVRTMEIPDSLQCKIDLFAGKGRLFREGYDLFTSPSWVAVCLGQGIVPESWEPAADALDEQKVAIALEQMRRGYLDTAQRLPTHGDFLRRTAPSPLAAPPPAAAPAAKEDVPFFSF

SEQ ID NO: 88513 - protein, 131 aa, Sphingomonas sp.
  misc_feature (1)..(131): tr|A0A520I692|A0A520I692_SPHSX Tryptophan halogenase (F ragment) OS=Sphingomonas sp. OX=28214 GN=EOP67_61115 PE =4 SV=1
SEAVVARYNDQARQELEAVRDFIILHYHLNQRDEPFWRERREMTIPDSLKARIALFEEAALAYQDAGDLFRVDSWLQVMLGQGVTPRTHHPMARIMPPADLARALGDIKRNIDDGVARLPQHQAFLDRYCA

SEQ ID NO: 88514 - protein, 83 aa, Sphingomonas sp.
  misc_feature (1)..(83): tr|A0A520B4U1|A0A520B4U1_SPHSX Tryptophan halogenase (F ragment) OS=Sphingomonas sp. OX=28214 GN=EOP64_05830 PE =4 SV=1
RIALFTKTAGAWQGQDDLFRIDSWVSVMLGQGVEPRAHHRIARIIKEQELQTSFADLSRGITSTMRALPRHCDFLAQYCLADG

SEQ ID NO: 88515 - protein, 505 aa, Cellvibrio sp.
  misc_feature (1)..(505): tr|A0A5J6P030|A0A5J6P030_9GAMM Tryptophan 7-halogenase OS=Cellvibrio sp. KY-YJ-3 OX=454662 GN=D0B88_18625 PE=4 SV=1
MDKLLRIVILGGGTAGWMAANLFAKRWPREQVQITLMESPEIPIIGVGEGSTPSLKRFFKQLDLPEQEWMPACHATYKTNIRFVGWSPASSMQEYSHPFYSQPDVFNERAFFTNCRTRRLGLDVVTDPEKFFINGELARQGKVPIASANFPFQMEYGYHFDSQLLGRYLAGVATARGVIHYQAKLAEVLRNDRGEITALQTDAGDFIAGDFFIDCTGFASLLMQQALAVQFHSYQQQLFNDSAVVMPTAALEKPPVETRSTALSAGWCWQIPLTHRTGNGYVYSSQFISRDQAEAEFRAHIGMSESAQECRHLTMRVGQLAQHWSHNCVGLGLSQGFIEPLEATALHLVQLTIEALMDALDEHNFTSNGRDNFNRTVANHFDGVRDYIIAHYKLNTRGVNNSLGSDYWRANRDNKQLPESLLQILDVWYRCGDLAAELAQRKIKPAFNTASWHCLLAGYGAFPPLAANQPGQGKGDLYRECEVKKFVEGCALNFPLQTDMIKMAR

SEQ ID NO: 88516 - protein, 223 aa, Streptomyces djakartensis
  misc_feature (1)..(223): tr|V9XQT4|V9XQT4_9ACTN Tryptophan 5-halogenase (Fragmen t) OS=Streptomyces djakartensis OX=68193 PE=4 SV=1
GGGTAGWMTASYFKAAFGERINITLVESGNIGAVGVGEATFSDIRHFFDFLGLKEKDWMPACNATYKLAVRFENWREEGHYFYHPFEQMRSVNGFPLADWWLREKPTDRFDQDCFVMPSIIDAGLSPRHLDGSLIDQPFVEGADEMQGLTMSEHQGKTQFPYAYQFEAALLAKYLTTYSVERGVKHIVDDVQQVNLDERGWIRNVTTAEHGEIGGDLFIDCSG

SEQ ID NO: 88517 - protein, 502 aa, Cellvibrio sp.
  misc_feature (1)..(502): tr|A0A5J6PG03|A0A5J6PG03_9GAMM Tryptophan 7-halogenase OS=Cellvibrio sp. KY-GH-1 OX=2303332 GN=D0C16_18930 PE= 4 SV=1
MQKNTLNSICIVGGGTAGWMAASLLSSALQGSRINITVIESPDIATIGVGESTVPSIMDFLRVCQINLKEFVEATSATFKLGIRFDDWLKPGEQFFHPFGTVGQSIHGFEFYQAWLKTCADGNRTRWVDHSPCAVMAENRRFMLRPPQHQNWVLRSYAHALHLDAILAARYLRDLSLARGVERIEATVMNVVVDERQFISALELTGGDTITSDFFIDCTGFKGILIEEALKVGYEDWTDYLPCNRAIAVQTTNTGEPSPFTQAKARDAGWTWKIPLQHRTGNGYVYSSRYCSDDKAIDTLLGAVDGELLSDPRVIPFTTGRRKKIWHNNCLALGLASGFLEPLESTAIHLVYKTLVHFIRYFPDLDFESHTEQAFNQKINADYQEIRDFIILHYCTTQRDDTDFWRWCQSMPVPDSLQEKIRLFRERGQIDHLPGEFFTSDSWCSILEGMSVRPKKYHPLMDAFDSKMLARTLQETAQNVYQTVMQMPNHYDYIQQHCPAKK

SEQ ID NO: 88518 - protein, 506 aa, Cellvibrio sp.
  misc_feature (1)..(506): tr|A0A5J6P9P5|A0A5J6P9P5_9GAMM Tryptophan 7-halogenase OS=Cellvibrio sp. KY-GH-1 OX=2303332 GN=D0C16_16005 PE= 4 SV=1
MKKIVIVGGGTAGWMSALIMARQWNTQGFQIELLESPEVGIIGVGEGSTPALKVFFDLLGIAEAEWMPECNATYKCGISFENWSTRAGYERYFHPFSAALDRQTLPMFMHNVQTRLRGADLYAHPDRFFIASRIARECLAPVAPENFPFDVHYGYHFDAVLLGQFLRKKAIARGVVHRVCHVVQVQQDDAGNIVAVVSDTGDVHAADFFVDCTGFASLLLQKTLQTPFVSYRNNLLNDAAVAMPSDIGEKIPSETVSTALNNGWAWKIPLTNRYGNGYVYSSQFCSADEAEHELRARLGLLDADIPVRHLKMNIGRVREHWVKNCLAVGLSQGFIEPLEATALFLVQQTIAIFAEDFTRGEFTDRYRTEFNQRINGHFDGVRDYIVTHYKTSSRTDTEYWRANTADQQDVSQTMLELYSSWFAGKDLAAEVQRLNISSYYPAPSWYCILAGMGILPKAEQVRKPTAEEARFDLPAMDNFLRRCTLNFSDHRWYLEKLASNFPVYTE

SEQ ID NO: 88519 - protein, 514 aa, Cellvibrio sp.
  misc_feature (1)..(514): tr|A0A5J6PBT7|A0A5J6PBT7_9GAMM Tryptophan 7-halogenase OS=Cellvibrio sp. KY-GH-1 OX=2303332 GN=D0C16_20380 PE= 4 SV=1
MDKPWRILILGGGTAGWMAANLFAKQWPREQVQITLIEAPEIPIIGVGEGSTPSLKRFFKTLDIPECEWMPQCQATYKANIRFVDWSPASGVSNYSHPFYSQPDVFNERAFFTNCRTRRLGLDVVTEPERFFINGELARQGKAPVAPKNFPFQMEYGYHFDSQLLGRYLARVAAARGVVHRQATFAQVLRNDAGDISALQTRAGDLIRGDFFIDCTGFSSLLMQRGLAVPFRSYAQQLFNDSAVVMPSAAAQDYPVETRSTALTAGWCWHIPLIHRTGNGYVYSSQFINKDQAEAEFRAHLGVIDSAQECRHLQMRVGQLEQHWVFNCVGLGLSQGFIEPLEATALHLVQLTIEALIDALNQHQFTCAGREQFNRTVNNHFEGVRDYILAHYKLNTRGLVNGAGDDAGYWRANRDNKHMPESLLQLLDVWFRCGDLAEELVQRKIKPAFNAASWHCLLAGYGAFPPLAPNQPGQGKGDLYRECDVAKFVEGCALNFPLHKTLLMNDRKLIEPGA

SEQ ID NO: 88520 - protein, 507 aa, Cellvibrio sp.
  misc_feature (1)..(507): tr|A0A5J6P8G4|A0A5J6P8G4_9GAMM Tryptophan 7-halogenase OS=Cellvibrio sp. KY-GH-1 OX=2303332 GN=D0C16_14205 PE= 4 SV=1
MTDSRIRSIVILGGGTAGWMAAAALANRFKQGITRITLIESAEIGTIGVGEATVPYIKEFLQDLNINEVDFMRATQATYKLGIDFDGWYKPSEKFIHPFAGYGARIARIPFHHYWAKLRAQNKAQTLDTYCLAVQMARHNKFALPKANNDIELSSFNYAFHFDAGLFAQYLSSLAQGMGVNRIEANVEQVAQDPDTGFIQSLTLSNGEKIQGEFFIDCSGFNGLLIEQRLKTGYESWSQWLRCDRAVAMPCASTLAPQSATRALAMEAGWQWRIPLQHRVGNGYVYCSDYISDEIAAEKLQENLQGDALAEPKFIRFTTGMRKQAWNKNVFCLGLASGFMEPLESTSIYLIQSSLTLLLNHFPNNQFNQTLVNTVNNNLRIRQEKLRDFLILHYYANQRHGQAFWDECRNMAIPDTLSARIEYFKATGQPQVDELDFFDTNSWLAMFSGFNIQPQHYHPVVDDFDVQLVEQELKAIAASIANTVKDLPDHLHFMQRNIFIKSSQVVE

SEQ ID NO: 88521 - protein, 450 aa, Sphingomonas sp.
  misc_feature (1)..(450): tr|A0A520IUA7|A0A520IUA7_SPHSX Tryptophan 7-halogenase (Fragment) OS=Sphingomonas sp. OX=28214 GN=EOP67_42270 PE=4 SV=1
TIHWFNQLIGLDEEAFVAATKASFKLGIEFVDWARPGTRYFHPFGRYGVDLGPVPFHQHWLRAKGDGLDRPLSTYSLAAQLAAAGRFAKPVDDPRSILSTLGYAYHFDAGLYARHLRQLAEKRGVVRHEGMLRDIERDPETGFVTALTSDRGERLEGDLFIDCSGFRALLIGETMGAQFEDWSHWLPCDRAVAVPCARIAATTPFTRSTLRPAGWQWRIPLQHRTGNGYVYASSFVSDDEAVATLLSNLDGEALADPRMLRFTAGFRREAWRGNVVAIGLSSGFLEPLESTSIHLIQSGIAKLITLFPDADCDPALARQFNTLFARDMDGIRDFLILHYHATQGHDAPLWQHTRHMTPPPTLVDKMAQYTRAGRLMLSADELFREASWLAVLEGQGVGALGHAPLADTLDAATNRRQLNQIETVIARATPTLPLHDAAIAALVAPQVAAR

SEQ ID NO: 88522 - protein, 502 aa, Sphingomonas sp.
  misc_feature (1)..(502): tr|A0A520HVG6|A0A520HVG6_SPHSX Tryptophan 7-halogenase OS=Sphingomonas sp. OX=28214 GN=EOP68_06255 PE=4 SV=1
MGEDSKVRIIVVGGGTAGWMTAATLAMSFAGRVAAVTLVESDEIGTVGVGEATVPHIRFFNQTLGIDEADFVRRTNATFKLGIEFRDWGRIGDSYIHPFGDFGHEIAGLPFHQHWLHAARDGAADVPPLEACSLPIVAARANRFAPPLDDPRAVGSTYSYAYQFDAGLYAAYLRDYAEARGVVRIEGRVDAVEQRDGGIAAIRLAGGERIEGDLFVDCSGFRALLIEGALQAGHEDWSHWLPCDAAWAVPSANTGPLTPYTRATAREAGWQWRIPLQHRTGNGHVFSTRFTDPERARDLLLANLEGEALAEPRMLRFRTGRRTRQWIGNCVAIGLSAGFLEPLESTSIHLIQLAIGKLVELFPSGGVLDPADAAEFNRAMALEYDRVRDFLVLHYCATERDDTPFWRHMRTMALPPSLTETIAAFRDRGVVASYREGMFLPASWLAVCYGQRIVPDRVNPLVATTPVAESRARVAAVAAACRGAADAMPAHDAHLARIRAAA

SEQ ID NO: 88523 - protein, 523 aa, Cellvibrio sp.
  misc_feature (1)..(523): tr|A0A5J6P313|A0A5J6P313_9GAMM Tryptophan 7-halogenase OS=Cellvibrio sp. KY-GH-1 OX=2303332 GN=D0C16_02290 PE= 4 SV=1
MGGGTAGWMTAMLFQHAFQDCTITLVESAATGIIGVGEGSTPALKAFMDALGISESEWMSVCQATYKSGISFRGWSTRNGFEEYFHPFFSHFDRDHIKALIFNSELRRAGKRVHAHPNLFSYASYLAANSLCPITPYAFPFEVQYGYHFNAAMLGSFLKEKAIERGVVWKSAHVENIALNAEGDIAHLAFEGGAILEGDFFVDCTGFASLITGKTLGTPFIPYSDVLFNDRAVTLASPVEKVISTQTVATALNNGWAWKIPLQNRVGNGYVYSSAFCSEAEAEEELRAHLNMNNGEGEARHLKMRVGRAKTMWNRNSLAVGLSQGFLEPLEATALALVQLTLVRFVKLYKAGVYTNQYAEQLNSEIAEAFDNVKDYIHTHYLTSDREDTPYWRACRQNSAAASNRLKLVLQTWLSGADISEALQSTGLNRHYKVNSWVYLLSGMGIFPPEHQLVQASPDDLAKVPLDSIVDFFERCALNHMPQAEALNILRTGASPFSVEGRNKASKEQALARLLGLNFAVSS

SEQ ID NO: 88524 - protein, 498 aa, Sphingomonas sp.
  misc_feature (1)..(498): tr|A0A520JMY3|A0A520JMY3_SPHSX Tryptophan 7-halogenase OS=Sphingomonas sp. OX=28214 GN=EOP67_07950 PE=4 SV=1
MKRVQRLVILGGGTAGWMTAAALSATFGDLLQISVLESDAIGTVGVGEATIPTIHWFNQLIGLDEAAFVAATQASFKLGIEFVDWARPGARYFHPFGRYGVDLGPVPFHQHWLRAKADGLEQPLAAYSLAAQLAAAGRFAKPVDNPRSILSTLGYAYHFDAGLYAGHLRALSEKRGVVRYEGLLRDIERDPVTGFVTALTSERGDRLDGDLFVDCSGFRALLIGETMTSRFEDWSHWLPCDRAVAVPCASTRATTPFTRSTLRPAGWQWRIPLQHRTGNGYVYASSFVSDDEATATLLANLDGEALADPRMLRFTAGFRREAWRGNVVAIGLASGFLEPLESTSIHLIQSGIAKLITLFPDAACDPALARQYNTLLARDMDGIRDFLILHYHATQGHGAPLWQHARTMALPDALVDKMAQYRRAGRLMLSPDELFREASWLAVMEGQGVSAQGHAPLADTLDAAINRRQLEQVEAIVARAVPTLPLHDEAIAALVAAR

SEQ ID NO: 88525 - protein, 387 aa, Sphingomonas sp.
  misc_feature (1)..(387): tr|A0A520AC59|A0A520AC59_SPHSX Tryptophan 7-halogenase (Fragment) OS=Sphingomonas sp. OX=28214 GN=EOP64_12305 PE=4 SV=1
ATFKLGIEFRDWGRIGDSYIHPFGDFGHDIDGLPFHQYWAHASRGDTDGLPTLEDCSLPIVAARDNRFTPPLEDQRSIRSTYSYAYQFDATLYAAYLRDYAEARGVVRIEGRVDAVEQSAGSIEAVRLADGRRIAGDLFIDCSGFRALLIDGALKVKYEDWSHWLPCDAAWAVPTANAGALTPYTRATAREAGWQWRIPLQHRTGNGHVFSTRFTDPETARAVLMDNLEGEALAEPRMLRFRTGRRDLQWVGNCVAIGLSAGFLEPLESTSIHLIQLAIGKLIELFPSGGVFDPADAAEFNRAMALEYDRVRDFLVLHYCATERDDTPFWRYMRTMTLPSSLTEKIAEFRERGIVASYREGMFLPASWLAVYYGQRIMPDRVNPLIA

SEQ ID NO: 88526 - protein, 412 aa, Sphingomonas sp.
  misc_feature (1)..(412): tr|A0A520HJY6|A0A520HJY6_SPHSX Tryptophan halogenase (F ragment) OS=Sphingomonas sp. OX=28214 GN=EOP68_15240 PE =4 SV=1
MTIGAPVRRIVIVGGGTAGWMAAAALARLIPTGASITLIESDAIGTVGVGEATIPPIRGFNAMLGIDEAEFLAATAGSFKLGIEFVDWGALGERYLHPFGGFGFDIEGVRFHQYWRRRRAAGIVEDIEAYSLCAVAARAGRFMPPSPDPASVLSQMAHAYHFDAGLYARFLRGRAERDGVVRVEGDVVDVALDGETGHVRHVTLAGDRVIEGDLFLDCSGFRGLLIEQTLGAGYEDWTHWLPCDRAVAMPTANAGPAITPYTRSTARAAGWQWRIPLQHRTGNGYVYSSAHCSDDEAAATLHAGVDGTPLAEPRLLRFTAGRRRKQWIVTAQLLLGAILLVLSTLNPMTSLGWFSLLAGIGAFASATQDVVIDAWRVDVADEVATIDILSTVYQMGYRIAALVGGALALFLA

SEQ ID NO: 88527 - protein, 510 aa, Sphingomonas sp.
  misc_feature (1)..(510): tr|A0A520J6M4|A0A520J6M4_SPHSX Tryptophan 7-halogenase OS=Sphingomonas sp. OX=28214 GN=EOP67_37455 PE=4 SV=1
MIDGLGQHIVILGGGTAGWMTACLIAHRWRGRGVRVTLVESPEIGIVGVGEGSTPQLKHFFDTLGIAEAEWMPACDAIYKLGIGFEGWSDREGHERYFHPFPTALDGHTAPQFFYNARARRTGRDVDAHPDQFLLPARLAAANCAPQPAAHFPFEVSYGYHFDAYKVGAFLAKHATERLDVVHLQRRIASVERAQTGDITVLIDTDGEPISGDFFIDASGFRGTIFNALGMPFVSYAGALFNDRAVVMPTAHTPSAPIPSQTRATALSAGWAWHIPLTSRNGNGYVYSSRHLTEAQAEAELRAHIGAEAGEARHLKMRVGRVRDSWSRNALAVGLAQGFLEPLEATALHLVIATVEAFLDMVDQGGATDAVRTAFNTRIAARYDGVRDYIVAHYRLNQRHDDPTGYWAEARGIEALSDDLKMLMSTWFTGADMVAAIDRAGLGRYYSAISWHCLFAGYGTFPDAARLIPPGADIDPIDLPKIDDFLTRCASNFGSHASRLRAAADHKDTV

SEQ ID NO: 88528 - protein, 497 aa, Cellvibrio sp.
  misc_feature (1)..(497): tr|A0A5J6P731|A0A5J6P731_9GAMM Tryptophan 7-halogenase OS=Cellvibrio sp. KY-YJ-3 OX=454662 GN=D0B88_07935 PE=4 SV=1
MLMSNKPVNHIVIAGGGTAGWMTAAYLARWLEPTNIQVTLVESELIGTVGVGEATVPGIHQFIKHLGVKESEFIAATHATFKLGIEFEGWVAPEQTFFHPFAGYGVPIEDRPFHKTWWSAKQEGYSASLAEFCLCTQLAGAGKFAQPSFDPDSRLAWYNYAYHFDASLFAKYLRGYAEQRRVTRIEGKIQQVTLDPDSGFIQSLQLESGQVIGGDLFVDCSGMSALLIEKALGVGYEDWSQWLLSDSALAVQTRTVAEPDPFTRSTARSAGWQWHIPLQHRVGNGYVYSSQFISEDQARAELLANIEGERLTEPRLIRFTTGMRDHFWHKNCVAIGLSSGFLEPLESTSISLIQTGISKLAAFLVNFEINDQHVAEANRLNRLEYERIRDFIILHYKLNGRPEPLWQHVQAMDIPASLTEKIAHFKATGDIQLLEQESFVEESWISMFAGFGLSPAALTPSRDSAKMHTVMDKMRAAIVKGREYAPSHADFLRTLGS

SEQ ID NO: 88529 - protein, 503 aa, Cellvibrio sp.
  misc_feature (1)..(503): tr|A0A5J6PCA7|A0A5J6PCA7_9GAMM Tryptophan 7-halogenase OS=Cellvibrio sp. KY-GH-1 OX=2303332 GN=D0C16_20815 PE= 4 SV=1
MKPLKKILIVGGGTAGWIAASILSKQLEKANGAASSVQIQLVESEEIGTIGVGESTIPPFLEMLNNLEINEQEFIKYTQASFKLGIQFVDWRVKGESYFHPFGTISAGMKEFTFYQLWLKSLQQGETLGLQDFSPCNLMAQHGRFYLPQLADKTAIGEARYALHLDAKLVAQYLRNYAEAKGVQRTEGKIMQVVQRDDGGIASVVLCTGEEISADFFIDCSGFHALLIEKALGASYCDWTQYLPCDRAVAVQTENVGDTTPYTRATARDHGWTWRIPLQKRTGNGYVYSSRYCSDDEAINTLMGAVDGKALIEPRVIPFKTGVRNEIWKKNCLAIGLASGFIEPLESTAIHLVVRGIIHFVRNFPDQDCDAALIRNYNRGMTREYEEIRDFIVLHYCLTEREDTPFWRYCKTMELPQSLQDFIDYFKVHGGLPEMIDALFHPVSWRSVCEGMGLRPQKYSPVIEEMNYADLYGGMHRYAIALETFVKKLPTHDQFIRDNCSAF

SEQ ID NO: 88530 - protein, 505 aa, Cellvibrio sp.
  misc_feature (1)..(505): tr|A0A5J6NS48|A0A5J6NS48_9GAMM Tryptophan 7-halogenase OS=Cellvibrio sp. KY-YJ-3 OX=454662 GN=D0B88_00160 PE=4 SV=1
MKPVNNVVIVGGGTSGWMCAAAIARMAPPNASITLVESETIGVIGVGEATIPPLLEFNQFLGLDEHEVLRECQGTYKLGIEFVDWLDLGKRYFHPFGFYGRDTPEFAFHQLWLRLRAVSETGKAPADLAGDINDYNLCAMAARLGRFTQPQGGSDAILSTLRHAYHFDSMRYGQLLRRYAEQRGVRRVEGLVDSVQQHPDHGMIESVTLADGQVLAGELFIDCSGFKSLLIEGAMNSEFIDWSRYLPCDRALALSTTGTGAPDPFTRATADNAGWRWRIPLQTRMGNGYVYSSAFADEDHVHRALLVGAEGEALGEPRPLRFRTGHRRLFWEKNCVAIGLAGGFIEPLESTSIHLAQIGIQRLINLWPGRGINAAEIAHYNRIMTADYERLRDFIVLHYSATQRRDTEFWRYVGHMKIPDTLASKLEIFRGSGRVIAAPDDLFTPHSWLAVMLGQGINPTHYDALVDRVPETALIQNMRHLKESIAKTAAALPSHEAYLKRYCAA

SEQ ID NO: 88531 - protein, 499 aa, Cellvibrio sp.
  misc_feature (1)..(499): tr|A0A5J6PE39|A0A5J6PE39_9GAMM Tryptophan 7-halogenase OS=Cellvibrio sp. KY-GH-1 OX=2303332 GN=D0C16_07190 PE= 4 SV=1
MTEHTAVNSIRKIVIAGGGTSGWLAAAAIAKVLGKNLDITLIESPEIGRIGVGEATIPTLRVFHKLLGINDMELMANVQGTFKLGIEFSNWANKGDKYFHSFGLTGKECWACQFQHFWMAGKKYGINIPFGDYCPESKAARLEKCSGENDGVNYAYHFDANLYADYLKAFSVKLGVKQIEGFIERVNVSPENGYIDSLLLKDGQTIAGDLFLDCTGFKAMLIDGALNTPYVPYSHYLPCDSAIALQTENVHSPRPYTQSIAHDFGWQWRIPLQHRAGNGLVFSSRHVSDDEAINTLMSNLEGRPVTEPRVIKYKTGRRIKAWNKNCIAVGLASGFLEPLESTSIHLAMSTIYRLLRYFPQHEISMSNVDEFNRQSSEEMDRARNFVILHYHATQREDTEFWRYCKNMEIPEILARRIKLFKDTGTIMLEDKELFLNDSWVQVMMGQGIMPAAYHPVVDMMEEKELKGFLAFLRDDVHKKVAAMPSHQELINKYCKAMPV

SEQ ID NO: 88532 - protein, 506 aa, Cellvibrio sp.
  misc_feature (1)..(506): tr|A0A5J6PGK4|A0A5J6PGK4_9GAMM Tryptophan 7-halogenase OS=Cellvibrio sp. KY-GH-1 OX=2303332 GN=D0C16_20560 PE= 4 SV=1
MNKNDALDNIKKMVIVGGGTAGWMAAAAFSKFFKNQFCEVVLIESDDIGTIGVGEATIPQIQVFNKSLNIDEDDFIRRTQGSFKLGIEFVNWGGIGESYIHAFGGVGNDMDSIPFYHYWLKLNKQGGSADIGEYCFNSLASRKNKFMRSIDAGNSPLSNIAYAYHFDAGLYARYLREYSEKLGVKRIEGKISNVNLDSDTGYIKSLSLESGQEIDGEFFVDCSGLHALLIGKALGVEYEDWSHWLPCDTAWAVPSEKLDPLPSYTRATAHTAGWQWRIPLQHRTGNGHVFSRRFTDVDTAKKTLLENIQGEILAEPRLIKFLTGRRKQFWHKNCVAVGLSSGFMEPLESTSIHLVQSAIARIMSVFPRKHISQVEIDIYNEQVGFEYERIRDFLILHYKVTNRNDSEFWNYCRQMPVPDSLVQKIEVFKQNAHVHRFNSELFNEISWVEVMLGQGLYPKGYHPLVDVVPQEEFARRLAHIKRVLETAVDYLPAHESFISQHCKAPI

SEQ ID NO: 88533 - protein, 493 aa, Cellvibrio sp.; identical to SEQ ID NO: 84914
  misc_feature (1)..(493): tr|A0A5J6P331|A0A5J6P331_9GAMM Tryptophan 7-halogenase OS=Cellvibrio sp. KY-YJ-3 OX=454662 GN=D0B88_16255 PE=4 SV=1

SEQ ID NO: 88534 - protein, 513 aa, Cellvibrio sp.
  misc_feature (1)..(513): tr|A0A5J6PJL3|A0A5J6PJL3_9GAMM Tryptophan 7-halogenase OS=Cellvibrio sp. KY-GH-1 OX=2303332 GN=D0C16_19885 PE= 4 SV=1
MNPGAPARKKIVIIGGGTAGWMAANLMIARWGKLGFDIHLVESPQIGIIGVGEGSTPQLKGFMDSLGIEESEWMPECNATYKVGISFRNWSVIPGFTSYFHPFPAQPDDYTAPGFFHNSFVRRKGIDVEGHPDHFFLASYLAQQKLAPVAAEHFPFEINYGYHFDSSSLGKFLGRKAVARGAVHKEATINQVNLSENGDIASVTTDTGETIAGDIFIDCSGFSGLLIQKTLKVSFKSFGENLFNTSAVVMPTPIGEQIESQTISTALKYGWAWSIPLTSRIGNGYVYSSHFCSKDDAETELRAHLGLLDSDVQARHLQMNVGRVEQHWAKNCVAVGLSQGFIEPLEATALHLVQETVQEFINCFESGQFTDKKRDEFNFSINKRFEAVRDYIVCHYRVNSRKDTDYWVENGRNEKVSDSLRAVLHAWVSGNNLSDELDRQKIDNYYPSISWHCLLAGYGIYPTPAQLKPGNEFANKYNLEKISNFIQRCGMNFKPHRQQLASWSSTVVKPAPV

SEQ ID NO: 88535 - protein, 263 aa, Sphingomonas sp.
  misc_feature (1)..(263): tr|A0A520D505|A0A520D505_SPHSX Tryptophan 7-halogenase (Fragment) OS=Sphingomonas sp. OX=28214 GN=EOP65_14980 PE=4 SV=1
MRGEDDGAIRRIAIIGGGTAGWMAAAALARVLGPHGPAITLVESEEIGTVGVGEATIPPIQAFNALLGIDENDFVRATGGTFKLGIEFVDWRALGHRYFHPFGVYGIDLGAVPFEALWRRLQAEGAAGPLSDYSICAAAAAAGKFMRPQPGNTPLAHIGYAFHFDAALYARFLRGRAEAAGVVRREGRVVDVVLRGADGFIEAVTLADGGRVEADLFVDCSGFRSVLLGDALGAGFEDWSAWLPNDRAVAVPSAVTGPPPPFT

SEQ ID NO: 88536 - protein, 498 aa, Sphingomonas sp.
  misc_feature (1)..(498): tr|A0A520DRD5|A0A520DRD5_SPHSX Tryptophan 7-halogenase OS=Sphingomonas sp. OX=28214 GN=EOP65_01700 PE=4 SV=1
MTASVTTIVIAGGGTAGWMAAAALGGFLESGYRIRLIESDAIGTVGVGEATIPQIRLFNQALGLDEDAFLRATGGTFKLGIAFDGWRAPGHSYMHAFGDVGRDVGLIAFQHYWLRARRLGLARPLDAYCLNDIAARAGRMHRGGPLTAPTIPALPYAFHFDAGLYAAYLRRFAVNRGVERTEGRIAHVERDGESGDVAALLLDSGERIAGDLFLDCTGFGGLLIEGALATGYEDWSRWLPCDRAIAVPSANVGPPPPYTRAIARAAGWQWRIPLQHRTGNGHVYCSAFTSDDAAADTLLADIEGEAQGDPRQLRFVTGRRKRAWSHNVVAMGLASGFLEPLESTSIHLIQSAIARLIKLLPALPVAAALRDAYNRETGTEIERIRDFLILHYWANGRDEPFWRACRDMALPDTLRAKIALWQEAGTIVREQEELFTEDGWLQVLAGQGVEARAHHPLADQIEPGDLGEYMETLELLYRREAAAMPTHAAFIDRHCKVR

SEQ ID NO: 88537 - protein, 506 aa, Cellvibrio sp.
  misc_feature (1)..(506): tr|A0A5J6P7N8|A0A5J6P7N8_9GAMM Tryptophan 7-halogenase OS=Cellvibrio sp. KY-GH-1 OX=2303332 GN=D0C16_02295 PE= 4 SV=1
MLKSHSKKIIVLGGGTAGWVTGAILSKKWETHGYQIVVVDTAEIPTIGVGEASIPTIYDLLNYIEISDQDLVKHCQATFKYGIQFENWSRPGERYMHGFGNMGHNLGQAEFFKIWLSTARYFKNPDLTPYIPSAVAAYSDKFSRGSKAPENTNGLFYPLSNLLYALHFDASLLARLLREKALHNGAIHISKHIVKVETDENGITALIAEDGETLSADLYVDCSGMHGVLNKQALKANFDNWQAYLPCDTAIAAQTTLNKAPRLYTRSIAHAAGWRWEIQLQNRTGNGIVYCSKNMDYDTAKQHLLEGIEGDLLTTPRKIEFITGRLSSPWTLNSVAIGLSAGFLEPLESTSIHLICAYARKLRDSIDNNELNAVGREKFNRAWCSETEGVRDFLMVHYLCNQRDEDSFWKERKSGPRPASLDKLLNEFSKTGWISPPEASIFGTDSWLEVLIGQKFFLNYEKFSMPADIAPHYIQFLQNVSYAIKNEVNKIPDSHQSILGTLRAEI

SEQ ID NO: 88538 - protein, 485 aa, Cellvibrio sp.
  misc_feature (1)..(485): tr|A0A5J6P1H0|A0A5J6P1H0_9GAMM Tryptophan 7-halogenase OS=Cellvibrio sp. KY-YJ-3 OX=454662 GN=D0B88_13305 PE=4 SV=1
MNDGIKKIVIVGRDLDAWITAFFLKSVLDKSRDSYEVTLVELGTLLTEHDIFAVLPSYKMLHKTLGANEDKLRQTAKARPFFGQRFTGWNPELPEFFHAYDRLGINFNGVDFFQYWMKAVNNGLKLPLEDFSLGVAAAKHGRFVASTGQADFSHLAYGYHLSAIEYVNAIARAAMEVGVKRENGNIITINRNNDVIDSLSLDDGTVLKADFFIDASGADALLINSLTDNNFESWEDWFLCDRIITASSAPLSPAPAFSQVTAFSSGWCGLYPLNNRTAIQTLYSSRHTDFSGVVAEMKMRVGVNISQGVERPIKCGMLSRPWIGNCLAVGTAAANMEPLDALQEHSLVISMVMLKQLFPNSNEYQNERDVYNKKMHSFIENLRDFQIVHYALNSRDELFWEACKNLELPHVLKEKIDIFKCCGYASVREDETFQEENWISVFNGHGLAPEFYSPLVDNMSDDEMIQNFQKILRMIKERINSSPLV

SEQ ID NO: 88539 - protein, 506 aa, Cellvibrio sp.
  misc_feature (1)..(506): tr|A0A5J6NYA8|A0A5J6NYA8_9GAMM Tryptophan 7-halogenase OS=Cellvibrio sp. KY-YJ-3 OX=454662 GN=D0B88_14240 PE=4 SV=1
MVHAMNYLTKVKKVVIVGGGTAGWMAAASFAKLLGKSVAVILVESDEISTVGVGEATVPPLILLNRYLGINEQELLTFVKGTIKLGISFENWKNINDCYIHSFGHTGKDTWAASFQHFWLRGLDIGVDDPLGDYSLEYAAALHNKFAHMSNPPLTYAYHIDAGFYAKFLRRIAENAGALRIEGKVENVVLDDSGYIKNIRLASGTVVEGDFFIDCSGFRGLLIEEALHTGYEDWSHWLPCDSAIAVQTESVREPVPYTRAIAHHAGWQWQIPLQHRVGNGLVYCSQYMSDEDARTLLLEKIDGQLISEPRVIKFKTGQRLKHWNKNCVALGLASGFIEPLESTSIHLIQRGITRLIQMFPHDGIRACDMDEYNNQMKTEILTIRDFVIMHYHLTEREDSGFWRYCKNMPIPESLEHRIRLFRETGKLFVESPYKLFAESSWLQVMVGQGLVPERYHVVANEMTDAELKTFLSDIRSQVKHSVQKMPGHHDYLQYYCKATAWGDACE

SEQ ID NO: 88540 - protein, 587 aa, Microcystis aeruginosa; identical to SEQ ID NO: 87844
  misc_feature (1)..(587): tr|A0A5D5B8U1|A0A5D5B8U1_MICAE Tryptophan halogenase OS =Microcystis aeruginosa KLA2 OX=2605423 GN=FXO09_21380 PE=4 SV=1

SEQ ID NO: 88541 - protein, 518 aa, Cellvibrio sp.
  misc_feature (1)..(518): tr|A0A5J6P079|A0A5J6P079_9GAMM Tryptophan 7-halogenase OS=Cellvibrio sp. KY-YJ-3 OX=454662 GN=D0B88_16250 PE=4 SV=1
MSESIKKIIIVGGGTAGWLAAGLLAAEFRHNEAGVSITLIESPDVNTIGVGEGTWPSMRATLRKIGISETDLIRECFASFKQGSKFVGWKTGAADDIYHHPFSIPHGYAECNLAAAWQAQFADRPFAEVVSSQFVVAEQGCAPKQITTPEYAGVLNYGYHLDAGKFAALLQRHCTTALGVIHILDHVTQVVADDSGDIAGVDTKASGVIYGDLFVDCSGLSCLLLGQHFGVPFVDKKHLSLNDTALAMQVPYPEQSSPIESCTVATAQSAGWTWDIGLSSRRGVGYVFSSSYLSEEKAEMELRAHIAKSVGQSVANSLSSKKLSIRAGHRQEFWHRNCVAVGMSAGFIEPLEASALALVELSMNMICEEFPADKVAMKIVAKRFNEVFSYRWDRIIDFLKLHYALTERNDSDYWRDMSAPEALPEHLRELLLLWKHRPPHRSDFIQVEEIFPSASYQYVLYGMGFSMDASRLPRTSDNLPMATARIRETVEKTRKYLSGLPSNRALIDHVMKHGMPLI

SEQ ID NO: 88542 - protein, 517 aa, Cellvibrio sp.
  misc_feature (1)..(517): tr|A0A5J6PA43|A0A5J6PA43_9GAMM Tryptophan 7-halogenase OS=Cellvibrio sp. KY-GH-1 OX=2303332 GN=D0C16_14100 PE= 4 SV=1
MSASKIDILIIGGGTAGWLAAGILAAELKKNSSGQITLVESPNISTIGVGEGTWPTMRDTLRKIGVSEIDFLVECDASYKQGTQFVNWKDNTESDNYYHPFAVPNGYFDANLYAYWNEKQKNIDFASAFATQPKVCHAHKAPKQLSTPEFAAVNNYGYHLDAGKFSAFLKKHCVEKLGVKYIADTITDIISDQEDYIHAVQTTQNGQLKADLFIDCSGTHGVLIKQHFKIPFIDKSDVLFNDRAIAVQVGYPNSTYPIESATISTAQKSGWIWDIGLSSRRGIGFVYSSQHTNQQAAEETLLNYLLKSGSEKNIITEPRTIKILPGFHQQFWHKNCVAIGMSAGFIEPLEASALVLVELAAGMIREELPTTRETMAIVAKRFNNTFLYRWERIIDFLKLHYILSQRRDSDYWIDQQDKSHQSDQLQELLKLWEFRSPSKNDFPQIQEIFPSASYQYILYGMGYKTTSKNILNDKKSLATAEKYFFGNRKLTELHLSGLPTNRELLQKLKERYSCNIK

SEQ ID NO: 88543 - protein, 505 aa, Cellvibrio sp.
  misc_feature (1)..(505): tr|A0A5J6PDA4|A0A5J6PDA4_9GAMM Tryptophan 7-halogenase OS=Cellvibrio sp. KY-GH-1 OX=2303332 GN=D0C16_20375 PE= 4 SV=1
MNKPIKKIVIVGGGTAGWMSAALLKKMLQQRVEIELVESEEIGIIGVGEATIPPIQTFNAVLGLNEAEFLRETRATIKMAIRFDHWKQCGDSYFHTFGAPGATLGYSSFQHYWLRARQQGLSSAGLWEYDLNYLCCNAGVFGKFNSKDPLYQLPYAYHFDSALYGRYLRKLSEQAGVVRTEGKISSVNVHPDSGFVESVQMENGQLIGGDLFIDCSGMRGLLIQGALHTGYEEWGHWLPCDRALAVPSQRFEKTLPYTRAIAHKVGWQWRIPLTHRNGNGLVYSSQYLSDDEAAHMLMSNLDSVALADPKPIQFNTGRTLQQWNKNVIAVGLSSGFLEPLESTSIHLIQSAIVRLAKNFPNAGFSVAQVNEYNQDSKREYETVRDFIILHYHLNERDDHDFWRYLRNMPIPERLAHKMELFRETGAVVNDAGDIFLDSSWLQVMMGQGIMPRDYHASADLPPAAELSAMLEQIAAAKRKPLAQLPSHDDFLFQYAGVTREVTQGG

SEQ ID NO: 88544 - protein, 250 aa, Sphingomonas sp.
  misc_feature (1)..(250): tr|A0A520I7T4|A0A520I7T4_SPHSX Tryptophan halogenase (F ragment) OS=Sphingomonas sp. OX=28214 GN=EOP67_59665 PE =4 SV=1
TAVTPYTSAIAMRSGWRWRIPLQHRTGNGYVYASAFVSDDDARHALETAVEGEALAAPRVLRFKAGRRRRSWVGNCVAIGLASGFLEPLESTSIYLVQQAITALIELFPEKRISATDRDEFNRVIDMEYDRIRDFLILHYHATTRSDSPFWDYVRTMPIPDTLSEKLDLWRTCARIVKYREGVFLDPSWVAVYLGQGIVPEGWDPRVDTVATDALLHSLETLRAEIAGDVARRPDHRSFIERYCAMAQAA

SEQ ID NO: 88545 - protein, 502 aa, Cellvibrio sp.
  misc_feature (1)..(502): tr|A0A5J6NV55|A0A5J6NV55_9GAMM Tryptophan 7-halogenase OS=Cellvibrio sp. KY-YJ-3 OX=454662 GN=D0B88_06805 PE=4 SV=1
MNSIKKIVILGGGVSGWIAASMLAAQVRRDLCEIELIESEDIGSVGVGESTIPPVVRLITSLGIDEEDFIRETQACYKLGIKFVDWRSKNQSYFHPYGALGQRIGTQDFYQCWLKATMAGGDYPLQDFSPCSVMAAQGRFFLPSQAMNTPIGGAGYAIHLDAKLVAAYLRRYAEARGVVRSEGNYVAVERRDNGFISALVLADGRKIEGDFFVDCSGFRALLIDGAMAAGFEDWAQYLPCDRAIVVKTGAAGSRMPYTTATARKAGWSWRIPLRNATGHGYVYSSRFCSDTEAKSTLLGNLDAPRINDPRLISFKAGRRLEFWKNNCLALGLAGGFVEPLESTAIHLIARGMDYFLRFFPDLECEPSLRREYNRRMAADYQEVRDFIVLHYCTSERSDSDFWRWCQTMPLPDSLRERIELFKGHGIVREERDELFRSASWQSVFEGMGIRPAKYSPRVDNIELAQINENLKLARSAILNMVKTLPTHDDYLAGRFGVPAVDQ

SEQ ID NO: 88546 - protein, 499 aa, Cellvibrio sp.
  misc_feature (1)..(499): tr|A0A5J6PEQ1|A0A5J6PEQ1_9GAMM Tryptophan 7-halogenase OS=Cellvibrio sp. KY-GH-1 OX=2303332 GN=D0C16_07425 PE= 4 SV=1
MTEHTAVNSIRKIVIAGGGTSGWLAAAAIAKVLGKNLDITLIESPEIGRIGVGEATIPTLRVFHKLLGINDMELMANVQGTFKLGIEFSNWANKGDKYFHSFGLTGKECWACQFQHFWMAGKKYGINIPFGDYCPESKAARLEKCSGENDGVNYAYHFDANLYADYLKAFSVKLGVKQIEGFIERVNVSPENGYIDSLLLKDGQTIAGDLFLDCTGFKAMLIDGALNTPYVPYGHYLPCDSAIALQTENVHSPRPYTQSIAHDFGWQWRIPLQHRTGNGLVFSSRHVSDDEAINTLMSNLEGRPVTEPRVIKYKTGRRIKAWNKNCIAVGLASGFLEPLESTSIHLAMSTIYRLLRYFPQHEISMSNVDEFNRQSSEEMDRARNFVILHYHATQREDTEFWRYCKNMEIPEILARRIKLFKDTGTIMLEDKELFLNDSWVQVMMGQGIMPAAYHPVVDMMEEKELKGFLAFLRDDVHKKVAAMPSHQELINKYCKAMPV

SEQ ID NO: 88547 - protein, 517 aa, Cellvibrio sp.; identical to SEQ ID NO: 88490
  misc_feature (1)..(517): tr|A0A5J6PE43|A0A5J6PE43_9GAMM Tryptophan 7-halogenase OS=Cellvibrio sp. KY-GH-1 OX=2303332 GN=D0C16_02500 PE= 4 SV=1

SEQ ID NO: 88548 - protein, 503 aa, Sphingomonas sp.
  misc_feature (1)..(503): tr|A0A1Y2QYE9|A0A1Y2QYE9_9SPHN Tryptophan halogenase OS =Sphingomonas sp. IBVSS1 OX=1985171 GN=CAP39_03875 PE=4 SV=1
MPDQPFQRLVIAGGGTAGWMTAAALARFCGPAWQIHLVESDAIGTVGVGEATIPQIRLFNAGLGIDEADFLGATQGTLKLGIEFVDWWQPGHRYMHNFGEVGRGLGVVPFQHWWAAARAAGVAADYGHYSLNERAARMGRFAPFAGDNTLPPLVWAYHFDAGLYAAYLRRYAQQRGVTRHEGRIARVESQGETILALHMDDGRRIAGDVFIDCSGFRSLLLGETLGSGWHDWSHWLPCDRAVAVPCAHAPAAPLTPYTRSTARTAGWQWRIPLQHRIGNGHVFSSAHLSEDEATAVLLANLDGPALAEPRSLRFEAGRRDRVWIGNCMAIGLSAGFLEPLESTSIHLIQSAIARLLALLPGDAGELPVLAAEANRQAAREMEWIRDFIILHYKATARADTPFWAQVQAMAVPPDLVERMALFQETGRIRRDHDELFTELAWAQVLIGQGLPPARPHPLTAGIGRDDLAGFMTSLDRAIAAGAAALPGHEDWLAKHAPAREVRS

SEQ ID NO: 88549 - protein, 499 aa, Sphingomonas sp.
  misc_feature (1)..(499): tr|A0A520B4U7|A0A520B4U7_SPHSX Tryptophan 7-halogenase (Fragment) OS=Sphingomonas sp. OX=28214 GN=EOP64_05785 PE=4 SV=1
MPGTGPLRSIVIVGGGTAGWMAATLLARRLDRQSVAITVVDSTDIRTVGVGEATVPGIRDFFRQIGVTEQEVMAAAQGTVKLGIEFVDWKRQGERFFHPFGLYGMRSRGVAFHHYWRKMNAAGHPTPLSDFCLATALAERNLFMQPTDSPVHDLLFFDWAVHFDAGLFATFLAKKASEWGVGRVDATITNVRVDRATGFIAGLDTTCGKTIDGDLFIDCSGFRSLLLGDALGVPYEDWTNLLPCDRAVAMPCERSGPLTPFTRSTALSAGWQWRIPLQHRVGNGYVYASRHISDDEAAGTLKGRLEGAALAEPNIIRFRTGRRHAFWQGNCVALGLAAGFMEPLESTSITLIQTGLEKLLALLPDRGFDQALAEEYNRTTGLEYERIRDFLILHYFANDRRGEPLWDRCRDTALPEPLARKMRLFKARGHLVRYEWESFQDPSWLSMYAGFGIDAAAHDPLADHFSVSDLEAAFERMKGSIRDAVALAEPHETFLKASA

SEQ ID NO: 88550 - protein, 387 aa, Sphingomonas sp.
  misc_feature (1)..(387): tr|A0A520IMM9|A0A520IMM9_SPHSX Tryptophan 7-halogenase (Fragment) OS=Sphingomonas sp. OX=28214 GN=EOP67_47635 PE=4 SV=1
MTACLIAHRWRDRGVRVTLVESPEIGIVGVGEGSTPQLKHFFDTLGIAEAEWMPACDATYKLGIGFEGWSDRAGYERYFHPFPTELDGHTAPQFFYNARARRTGRAVDAHPDQFLLPARLAATHCAPQPAANFPFEVSYGYHFDAYKVGAFLATHATEKLDVVHQQCLIASVERAQTGDIAALIDTDGERISGDFFIDASGFRGTILNALEIPFVSYADALFNDRAVVMPTAHPPGAPIPSQTRATALSAGWAWHIPLTSRNGNGYVYSSRHLTEAQAEAELRTHIGNQAGEARHLKMRVGRVRDSWSHNALAVGLAQGFLEPLEATALHLVIATVEAFLDMVDQGGATEAVRTAFNTRIAARYDGVRDYIVAHYRLNQRHDDPTGY

SEQ ID NO: 88551 - protein, 376 aa, Sphingomonas sp.
  misc_feature (1)..(376): tr|A0A520I461|A0A520I461_SPHSX Tryptophan 7-halogenase (Fragment) OS=Sphingomonas sp. OX=28214 GN=EOP67_63410 PE=4 SV=1
SLNTHAALAERMQRGPARTARTLPSMPYAYHFDAGLYARYLRRYSETRGVNRIEGKIVSVARDGESGDVSGLVLENGTTMAADLYIDCTGFRGLLIEEALGTGYEDWTHWLPCDRAIAVPSARSEAFTPYTRSTAHAAGWQWRIPLQHRTGNGVVFSSAHMSQDEATATLLAGLDTPAMADPRTIAFRTGRRKRMWNRNVVALGLAAGFMEPLESTSIHLIQSAISRLLKLLPGRVIAEADRTEFNRQSDFEYERIRDFIILHYKATARDDTPFGRQCRDMAVPDTLAAKIDLWRGNGHIVREPEELFTEVGWLQVLAGQGIMPAGHHPLADAISTNDLGEFMDTIDKLNAREAGQMQDHAAFVAQHCASPAGLGA

SEQ ID NO: 88552 - protein, 300 aa, Sphingomonas sp.
  misc_feature (1)..(300): tr|A0A520ABE6|A0A520ABE6_SPHSX Tryptophan 7-halogenase (Fragment) OS=Sphingomonas sp. OX=28214 GN=EOP64_13030 PE=4 SV=1
MGGLSVTDGAGTTHHSGPLRSIVIVGGGTAGWMAATLLARRLDRQSVTITVVESSDIRTVGVGEATVPGIRDFFREIGVTEQEVMAAAQGTVKLGIEFVDWKREGERFFHPFGLYGMRSRGVAFHHYWRKLNAAGQPTPLSDFCLATALAERNLFMRPTDSPVHDLLFFDWAVHFDAGLFAKFLAKKAGEWGVKHVDAKITDVLVDQVTGFISSVDTQCGKTIAGDLFIDCSGFRSLLLGDALGVPYEDWTNLLPCDRAVAMPCERAGPLTPYTRSTALTAGWQWRIPLQHRVGNGYVYA

SEQ ID NO: 88553 - protein, 506 aa, Sphingomonas sp.
  misc_feature (1)..(506): tr|A0A520JL13|A0A520JL13_SPHSX Tryptophan 7-halogenase OS=Sphingomonas sp. OX=28214 GN=EOP67_11530 PE=4 SV=1
MDQAPTRVVVVGGGTAGWMTAAALVRLLPTVCTVHLIESAEIGIVGVGEATLPHIRAFVERLGLDEADFMRATHATFKLGIDFRDFGAIGDSYIHPFGTFGRPLNDIAFHHYWLRLAAEGRAAPIGDYSVAVAAAKRHRFSIPNGTPDDLAASFGYAYQFDATLFGPYMRRFAEANGARRTEARIIGVEQDSISGNVRALRLDTGETVEGDLFVDCSGFRSLLLSDAMAEPWEDWSRWLPCDRAVAMPCTSPDGPIEPYTRATAKPAGWQWRIPLQHRVGNGYVYSSAHISDDAAADALVASVEGAPLADPRFLKFRAGRRANSWVGNVVAIGLASGFLEPLESTSIYLAQMAITQLVELFPQRAGLQGISAIDRTEFNRMVDMEYDRIRDFLILHYHATTRDDSDFWNHVRTMDVPITLADKMELFRSSGRVTQYSEGLFLEPSWIAVYLGQGIIPRSWDQRADRPGLDGLDRAVTNLRDHVAATVTAMPDHAAYIARRNATVAA

SEQ ID NO: 88554 - protein, 426 aa, Sphingomonas sp.
  misc_feature (1)..(426): tr|A0A520JD79|A0A520JD79_SPHSX Tryptophan 7-halogenase (Fragment) OS=Sphingomonas sp. OX=28214 GN=EOP67_25990 PE=4 SV=1
ATFKLGIEFRDWGRIGDSYIHPFGDFGHDIDGLPFHQYWAHATRCGADGLPTLEACSLPIVAARDNRFTPPLEDPRSIGSTYSYAYQFDATLYAAYLRDYAEARGIVRIEGRVDAVEQKDDGIGAVRLADGRRIAGDLFIDCSGFRALLIDGALKVGHEDWSHWLPCDAAWAVPTANAGALTPYTRATAREAGWQWRIPLQHRTGNGHVFSTRFTDPETARAVLMDNLEGEALAEPRMLRFRTGRRHRQWVGNCVAIGLSAGFLEPLESTSIHLIQLAIGKLIELFPSGGVFDPADEAEFNRAMALEYDRVRDFLVLHYSATERDDTPFWRYMRTMTLPSSLTEKIAEFRERGIVASYREGMFLPASWLAVYYGQRIMPDRVNPLIADIPIATSRAHVTRVAAACASAAKAMSLHEDYIARIKAAA

SEQ ID NO: 88555 - protein, 503 aa, Sphingomonas sp.
  misc_feature (1)..(503): tr|A0A1Y2QHS5|A0A1Y2QHS5_9SPHN Tryptophan halogenase OS =Sphingomonas sp. IBVSS1 OX=1985171 GN=CAP39_11605 PE=4 SV=1
MNKAASPLRVVVAGGGTAGWMTAAALAHTLGPVIELTLVESDAIGTIGVGESTIPPMQLFNRLLGINEAEFMRATQATFKLGIMFENWRDVGHKYFHSFGTTGKDHWSAGFQHFWMHGLTQGHEHPYDDYALELQAAMQSKFAHLPDDRLNYAYQLDSALYARFLRQRAEAGGATRIEGRIAQVELNGENGDIAALVLDGDRRIEGDLFIDCTGFRALLIEGALHAGFDDWSHWLPCDSAIAIQTSSVRPAVPYTRAIAHDAGWQWRIPLQHRQGNGIVYCSRYLSQEAAQERLFATIEGDKLVKPNIIKYQTGVRRRQWHRNCVAVGLSGGFMEPLESTSIHLIQRAVLRICRMLPAGRVSERDIAEFNEQQFTDMEQIRDFLILHYKVTDRRDSPFWRHVASMAIPDSLAHKIELFRETGRVFRKNEELFVENSWVQVMMGQGIMPQSWHPVAAKLRPEELNAFLSGLRDSVARTVAGLPDHHAYVSRYCAAAEPRDNKAA

SEQ ID NO: 88556 - protein, 494 aa, Sphingomonas sp.
  misc_feature (1)..(494): tr|A0A520DQQ2|A0A520DQQ2_SPHSX Tryptophan 7-halogenase OS=Sphingomonas sp. OX=28214 GN=EOP65_02110 PE=4 SV=1
MTSIDAPIARIAVIGGGIVGWSAAVALRRRVPGVAVTIVATPPPPDALADRIAQTLPSTIGFHDDLGLGEDDAVLRAGGVWRLGTEFEDWAPGRPPYVHAYGPCGQPFGTASFHHHWLRAARDGTAAPFEAHAPAAMLARAGRMPIPPTGIVAEAQAAVMLDVPRYRAMLEAFARHLGVEVRDGDVATVRLRGEDGFVDAVLLADGSAVTADVFVDAAGPGAVVRGAIDDMWEDWQRWLRCDRLVTAEGAAERSTGLDRVQAMPAGWRWRTPTPDRTSHGCCYASAFMSDADAQQALATAGATVMAPAVAFHQGTRPEPWARNCVAIGDAATVIEPLEFTNLHLAHSAIDRIVAMLPGRACHPLEIADYNRQAQAEVVRVRDFVLCHYATAQRAEPFWRDLPALPDSLARTLAAFRERGRLPFFEEETFSRDDWLTVLIGQGAMPRRIDPLIETTDVADSERAMAAYRAAIGQAVSRCPDLDAYLHSQRKRLGR

SEQ ID NO: 88557 - protein, 329 aa, Sphingomonas sp.
  misc_feature (1)..(329): tr|A0A520I7G7|A0A520I7G7_SPHSX Tryptophan 7-halogenase (Fragment) OS=Sphingomonas sp. OX=28214 GN=EOP67_60010 PE=4 SV=1
DLVTHVDVGPNGHIAGVATRDHGVLDADLFIDCSGFRAELIGGALGEPVKSVRSHLFTDRAITAKLPYDRARSPLPSFTGATAHEAGWFWDIGLAHAHGVGCVYSSAHIDDARASEILHAYLGMEPGSVPTRMLEFEPGYRERQWIGNCVAVGLAGGFLEPLEATGIVMIEAAVAMIAEMLPHGGPIDAPAARFNALMRARYDNVVTFLKLHYCLSRRREPFWRDNADRASWPVRLGELIDQWRYRAPGRFDLTLDTETFAYFNYQYVLYGMNEDAALPSGLNRLANAEIADRQFARIRSLGDRAKRELLPNRELLETIGGQEARARRG

SEQ ID NO: 88558 - protein, 443 aa, Sphingomonas sp.
  misc_feature (1)..(443): tr|A0A520AI76|A0A520AI76_SPHSX Tryptophan 7-halogenase (Fragment) OS=Sphingomonas sp. OX=28214 GN=EOP64_09405 PE=4 SV=1
PTARSFHAFLGIDEAAFMRATQATFKLGIAFENWRQVGDRYFHPFGSIGRSVAIADFQHFWLEARARGFGGAYGDYSLEQQAAGAGLFGHDEQHSLAYAYHLDATAYARFLRTLAEPWGVRRVEGCIERVERDGEGGDIAALVLASGERIAGDLFVDCTGFRALLTEGTLETGFEDWSEWLATDRALAVQTETVGPPVPYTRAIAHGAGWRWQIPLQTRTGNGLVYSSAHMSDDEAHETLIGALDGRPLFEPRPLRFRSGMRRQAWNRNCIALGLAAGFIEPLESTSIHLIMNAVIRLIQLFPFRGDDHVALAARFNAQSRHEWEHVRDFIILHYHVTQRDDSPFWRDCAHMTIPDSLAERIALFTKTAGAWQGQDDLFRIDSWVSVMLGQGVVPLAHHRIASIIKEHELQTSFEDLSRGIASTVRALPRHCDFLARYCAADG

SEQ ID NO: 88559 - protein, 494 aa, Cellvibrio sp.
  misc_feature (1)..(494): tr|A0A5J6P993|A0A5J6P993_9GAMM Tryptophan 7-halogenase OS=Cellvibrio sp. KY-GH-1 OX=2303332 GN=D0C16_15225 PE= 4 SV=1
MKKNNRIVIVGGGSAGWMAAAALSNAFGATQQITLIESEAIGTVGVGEATIPAVKSFNKLLGIDEAEFLKTTQGTFKLGIQFENWGAQGDVYMHPFGLVGKDSWMANFQHFWLKAKRMGVAKSYFDYSLNIRTAKANKCMIDPNSGLDYAYHFDAGLYAAYLRKYSEARGVKRIEGFIESVQTRDDGFIESVKLQAGDIIAGELFIDCSGFRALLIEHTLHTGFEDWSHWLPCDRALAVQTESVGEPIPYTRSIAHSAGWQWRIPLQHRVGNGLVYCSRYSSDEDAKKLLLENVEGEVRTEPRLIKFRTGRALKQWNKNCIAIGLSSGFLEPLESTSLHLIQTGIVRLIRMFPGDAINQTEIDEYNRQSRYEYERIRDFIILHYHVTQRSDSAFWNYCRRMSIPETLARKIEVYKNTTSVFKEQDELFHEGSWQQVMLGQGITPTAYHPVVDKLSDEELVKLMNSIENEHNQYLARFPSHQQFINHYCKAIAPG

SEQ ID NO: 88560 - protein, 510 aa, Cellvibrio sp.
  misc_feature (1)..(510): tr|A0A5J6PAE1|A0A5J6PAE1_9GAMM Tryptophan 7-halogenase OS=Cellvibrio sp. KY-GH-1 OX=2303332 GN=D0C16_16010 PE= 4 SV=1
MSHPSAQHTPIRKIVIVGGGTAGWMAAASLSRFAQGRSLDITLIESTTIGTVGVGEATIPSIVQFNNSVGLDELEFIRATRASFKLGIQFENWHKQGSQFFHPFADYGINFNGVEFQHYFYRLKKNNPTADLHDYSIGTQLAKHNNFAQPQENPNNPLADFSYAYHFDASLYAKVMRELSISRGVTHIDQKIEKVNLRNADGFIESVLLDNGELIAGDLFIDCTGFKGLLIEETLNTGYEDWQQWLLCDGAVAVQSLNTNEPTPYTRVTALDAGWMWKIPLQHRTGNGYVFCSRFLDKAQAEETLLQRISGHPITTPKPFAFKAGRRKKVWNKNCYALGLASGFIEPLESTSISLIQTGITHLLTFFPDMSFDPAMIAEVNRRHQHEMERIRDFIVLHYKLTQRTDTEFWRYCQAMEIPESLAHKIELFKSSGHILQHEPEAFERSSWLSIYHGFGIVPARTDNRIDHFSDETIAAQLAKIKQTLDQAGRSATSHAEFIRRHCVAPDFEH

SEQ ID NO: 88561 - protein, 506 aa, Cellvibrio sp.
  misc_feature (1)..(506): tr|A0A5J6PBV9|A0A5J6PBV9_9GAMM Tryptophan 7-halogenase OS=Cellvibrio sp. KY-GH-1 OX=2303332 GN=D0C16_20550 PE= 4 SV=1
MIKKYVILGGGTAGWMTAAAFARFVSSENAQIVLIESDAIGTVGVGEATIPHIRAFNDMLGIKESHFMQSVNATYKLGIRFTGWGNETSDYYHPFGDHGFPIKGVGFHHYWLGAKNAGAGIAPFDSFSVGNVLAREKKFSYPSANPDDVLSTFSYAYHIDATAYAKLLRTYAEDRVTRIEGQVVTVNKNTETGFIESLTLASGQCVEGDLFIDCSGFRSRLLGQELGVEFQSWKKWLPCDSALAVPTEGNVVMQPYTHSTAKTAGWCWKIPLTHRIGNGHVFSSEFTNSEQALRELEANLSGDMIRDPALIKFEAGVREKTWKNNCIAIGLACGFLEPLESTSIYLVEVAILKLLELLPRDCKNCALEEDEFNRQMENEYLKVRDFIILHYALNDRPEEFWRHCANMTLPNSLQEKIDIFKTTAHVVEYDTGLFMPPSWLAVYLGQGLFPGNLDSRLTESNIHEAIGLIRGMPAHLNQIVSQLGESATSVAAHPPASRMSLYGIRR

SEQ ID NO: 88562 - protein, 430 aa, Cellvibrio sp.
  misc_feature (1)..(430): tr|A0A5J6NVM5|A0A5J6NVM5_9GAMM Tryptophan 7-halogenase OS=Cellvibrio sp. KY-YJ-3 OX=454662 GN=D0B88_07010 PE=4 SV=1
MGGESSDYLHPFGDHGFPIKGIPFHHYWLRARQQAEVEAFDRYSLANVMAAGERFIYPSAKQDSVESTFSYAYHLDAGAYAVFLRDYSEARGVQRVEGEVVSVKLNQDSGFIESLNLSNGEIIAGDFFIDCSGFRARLLGQELKVPFTSWNRWLPCDRAYAMPSELIAAIRPYTRSSAKSAGWCWQIPLQHRMGNGHVFCSSFCSDQQAVDILLAHVQGKPLADPRRIDFEAGMRHRAWEKNCVSIGLASGFLEPLESTSIYLIQVGIYKLLELLPISSDFELDAKEFNRMVADEYEKIRDFIILHYHLNNRTEGFWQQTANMSVPDSLQHKMQVFKESAVVVEYDAGLFMPPSWLAVYLGQGFFPERTDSRVQQIPPQELLPLIQKIPNHLRSLVEKMPSHMAALQKLSAGERAANYVKPRMSLYGGAL

SEQ ID NO: 88563 - protein, 111 aa, Sphingomonas sp.
  misc_feature (1)..(111): tr|A0A520H8M1|A0A520H8M1_SPHSX Tryptophan halogenase (F ragment) OS=Sphingomonas sp. OX=28214 GN=EOP68_20840 PE =4 SV=1
AHYRLNARSEPFWRERAAAPVPQGLAEKLALFRAGGRIFREADELFNETSWLALLTGQDAPLVGHDPICDSVPIEAVASRLAQIERVVATSMTHMPPHAQALAPLASKRIV

SEQ ID NO: 88564 - protein, 459 aa, Sphingomonas sp.
  misc_feature (1)..(459): tr|A0A520IJ30|A0A520IJ30_SPHSX Tryptophan 7-halogenase (Fragment) OS=Sphingomonas sp. OX=28214 GN=EOP67_50130 PE=4 SV=1
LAAAVLSRQLGMILDITLVESEEIGTIGVGEATIPTMRAFQSLLGVDEREFMRATKASFKLGIAFEGWTRPGDRYVHSFGEVGKSTWMGDFQHFWLEARAQGKASDFGDYCFELKAAEAGRFATDENARINYAYHLDAGLYARFLRTRAEADGLARIEGKIATVEQDPENGHIRALVLQSGQRVEGDLFIDCTGFAALLIERTLGIGYEDWGHWLATDSAFAVQTAAVEPARPYTRAIAHGAGWRWKIPLQHRVGNGLVYASAHLSDDEAHARLLASIEGERLIEPGLIRFRTGRRLKTWEGNCIALSLAAGFVEPLESTSIHLIMTGLARLVQAFPFDGISPAVVDRFNAQSREEMERIRDFIVLHYHLNQRDEPFWKAHRENDVPQTLKDRLALFGEQAQAYQAPDELFRVGSWMQVMLGQNLTPRAHHAMARMMPTDQLAGALNDLKGNIDRAVER

SEQ ID NO: 88565 - protein, 189 aa, Sphingomonas sp.
  misc_feature (1)..(189): tr|A0A520JGF7|A0A520JGF7_SPHSX Tryptophan halogenase (F ragment) OS=Sphingomonas sp. OX=28214 GN=EOP67_21535 PE =4 SV=1
MTEHPIRRVVIAGGGTAGWMAAAAIARTMGSTIELTLVESDAIGTVGVGESTIPPMITFNRLLGINEAEFMRETQATFKLGILFDDWKDRGERYFHSFGITGKDHWSAGFQHFWLHGLTKGQAQPYDDYCLELRAALQGKFAHLPDDRMNYAYQLDSTRYAKFLRKMAEADGTRRLEGRIAQVELNGES

SEQ ID NO: 88566 - protein, 519 aa, Cellvibrio sp.
  misc_feature (1)..(519): tr|A0A5J6PEM7|A0A5J6PEM7_9GAMM Tryptophan 7-halogenase OS=Cellvibrio sp. KY-GH-1 OX=2303332 GN=D0C16_14095 PE= 4 SV=1
MKNIKNIVIAGGGSAGWLAAAMLAAEYHNSQSQIKITLIESDRIGTIGVGEGTWPTMRTTLKKIGISEKDFLLTCDASFKQGSKFINWRSTDKGDFFYQPFEPPIGFPYVNIAHNWIKEKEQGLSTSFSKSVCFQEAISELHLAPKTPHTPDYDAVANYAYHLDASKFVAMLAKHSINVFGVMRIEGEINKVNVDKEGFIESLSLNDGSRIEGDLFIDCTGLKSLLLGDALDVKFTSKKDILFTDSAIAVQAPYENEDQVIPSPTLSTAQTQGWIWDISLYSRRGIGHVFSSAHSTETQALDNLANYLHKNNGKNVDISSAKTIKFSPGHRKFFWKNNCVAIGMASGFLEPLEASALAMVEYSANLIIKKLPGSKEALHGAAKSFNKEMQYHWEKVIEFLKLHYLLSKRTDSDFWNDNRNLQSIPDSLQNFLEELRYRVIDFDELSHANEVFPAIGYQYVIYGMDFLPVKERQVRNSYINFDASRLFQQNAANKSAATEKLPSNRQYLNWLRQKKMTTE

SEQ ID NO: 88567 - protein, 254 aa, Sphingomonas sp.
  misc_feature (1)..(254): tr|A0A520HVS9|A0A520HVS9_SPHSX Tryptophan 7-halogenase (Fragment) OS=Sphingomonas sp. OX=28214 GN=EOP67_68245 PE=4 SV=1
ATGTPIPSQTRATALSAGWVWDIPLTTRTGNGYVYSSRHLTPAQAEAELRTHLGVGDAGEARHLKMRVGRVRDSWSHNALAVGLAQGFLEPLEATALHLVIATVEAFLDAVDRGGTTPETRTAFNATIAARYDGVRDYIVAHYRLNQRNDDPVGYWAEARAVAPSDSLKGLMSAWFTGADMAAAIDQAGLGRYYSAISWHCLMAGYGTFPDAARLMPPGADIDRIDMARIDDFLTRCARNFDAHDRHLPHKDFP

SEQ ID NO: 88568 - protein, 176 aa, Sphingomonas sp.
  misc_feature (1)..(176): tr|A0A520HJD8|A0A520HJD8_SPHSX Tryptophan 7-halogenase (Fragment) OS=Sphingomonas sp. OX=28214 GN=EOP67_74655 PE=4 SV=1
MGKRILIVGGGTAGWLTAGYLAKRLGADLPDGVAITLVESRDIGILGVGEGTFPTIRRTLATIGIDEADLVRRCGATFKQGAKFVHWRHAPGQGATDHYSHPFQVADSSDGLELLPYWLLGHGGTENWDEVSNPQKKAADRHRAPKLATNPDYVGPLNYAFHFDAVALAGLLREQA

SEQ ID NO: 88569 - protein, 499 aa, Sphingomonas sp.
  misc_feature (1)..(499): tr|A0A520JM86|A0A520JM86_SPHSX Tryptophan 7-halogenase OS=Sphingomonas sp. OX=28214 GN=EOP67_09425 PE=4 SV=1
MARPVRIVIAGGGTAGWMAAATFARFLEVGFEIDLIESEEIGTVGVGEATIPQIRLFNDALGLDEDAFLRATQGTYKLGIEFVDWLKPGHRYMHAFGAVGRDVGLLPFHQYWLRARTLGIAGDLAAYSLNNQAALADRMQRGPARTARVLPDMPSAFHFDAGLYARHLRRYSETRGVNRIEGRIVRVDQGETGDVSALVLEDGTTHAADLYIDCTGFRGLLIEQTLKTGYDDWTHWLPCDRAIAVPSARSSAFTPYTRSTANSAGWQWRIPLQHRTGNGIVYSSAHMSEDEATATLLAGLDGEPLADPRPIAFRTGKRRRMWNRNVVALGLAGGFMEPLESTSIHLIQSAIARLMTLLPGTTIADADRAEFNRQSDFEYERIRDFIILHYHAQDRTELFWRMCREMQIPDTLAAKIALWRGNGHITREHEELFTEVGWLQVFAGQGVMPAGHHPLADAIPAADLEEFMDTIDKLNAREVAQMPSHADFVARHCAAPVPA

SEQ ID NO: 88570 - protein, 509 aa, Sphingomonas sp.
  misc_feature (1)..(509): tr|A0A1Y2QFI6|A0A1Y2QFI6_9SPHN Tryptophan halogenase OS =Sphingomonas sp. IBVSS1 OX=1985171 GN=CAP39_11590 PE=4 SV=1
MGVTEDGAFRIVIAGGGTAGWLTACVLAARHPQLDITLVESPDIPTIGVGEGTWPTMRETLASIGLGEAEFMAACDASFKQGSRFDGWVTGAEDDICLHPFTLPPPGNMAALLHAWASTAPARRFAEVMTAQAAACAQDLAPRQRGMPDYAGALNYGYHFDAGKFAQLLTRHATSRLGVKHVPAEIVGTIAADNGDVAALVLADGRQLAGDLFIDCTGQAARLIAGHCGVAWIDRSHVSFNDRALAVQVPVAQGSPIASQTIGTAHRAGWIWDIGLPTRRGIGCVYASRFMSDDEAHAVLCAHVAAKVPGADVTALAPRRLAFATGHRARFWQGNVVAVGLSAGFIEPLEASAIVLIELSARALADALPASRAAMDIHARRFDAMFHTRWDRIVDFLKLHYVLSRRSEPYWQAQREPASLSPRLAEDLVLWREQPPSARDFPLHDEMFPPASQHYILYGMGHALPPAPPAPAIAAAAARLAEVQARSRQLGAALPENRIYLAAGAAQAA

SEQ ID NO: 88571 - protein, 484 aa, Cellvibrio sp.
  misc_feature (1)..(484): tr|A0A5J6PJF9|A0A5J6PJF9_9GAMM Tryptophan 7-halogenase OS=Cellvibrio sp. KY-GH-1 OX=2303332 GN=D0C16_16020 PE= 4 SV=1
MAAAKLSQHFSKTDIRITVIESSVIGTVGVGEATIPTLRRFYQSLGMDDMEVMRKTNATVKLGIEFKDWYKPHTSFIHPFGLFGHEANGIRFHHYWLKLQQAGDAAELEKYSLGIAMARANKFTFPAERPSSPLSVFDWALHFDAALFAKLMREHALTKGVTHIDAKITSVNLHPDTGFIDSLTLDDERYIAAELFIDCTGFNGLLIADSLKTPYIDWSQWLLCDRAMAVQSELVGEPAVRTVSIAHGSGWQWKIPLQHRQGNGHVYASNFIDDEQAEATLLQHIDGKVLHAPRKFQFTAGRRAQAWNKNCIALGLAAGFLEPLESTSIALIETGIEKICGSFPYAFFNQEKIDHFNQVTAIEWERIRDFIILHYKLNQRDDSEFWRYCRAMAVPDPLQQKITAYSEQGDLLHYPWEIFHPDSWLAIYSGFNLYPKIYNQNVDRLNADYLKQSLAAMRSSIANAVADLPSHQEFIDQHCKMSMA

SEQ ID NO: 88572 - protein, 507 aa, Sphingomonas sp.
  misc_feature (1)..(507): tr|A0A520HRX8|A0A520HRX8_SPHSX Tryptophan 7-halogenase OS=Sphingomonas sp. OX=28214 GN=EOP68_10020 PE=4 SV=1
MDTAITKIVIVGGGTAGWLAACRIAAAAHPAAADPITVTLVESPDVPTIGVGEGTWPTMRATLERIGIGEAEFLLSCDASFKHGSRFRGWANGAPGDVYFHPFTPPVEADPRTLVAAWQAEAAGEPFADVVTPQPHVARQCLAPRQRAMPDFAGALNYGYHLDAGKLAALLQRHATEKLGVRHLRDHVIGSDRADDGTITAVRTRHNGAVAGDLFLDCSGHAALLVGDVPFIDRSDVLFNDRALAVQVPVAPDSPIAAQTDATAHAAGWIWDIGLPTRRGVGCVYSSAHMSDDEALATLAAYLGTPEPIAPRRLRFRSGHRAQFWTGNCLAIGLSAGFLEPLEASAIVTVELSLDALLDDWPTRVTMPLVAERFNTLFRYRWDRIVEFLKLHYVLSRREGRYWRDHRDPASIPPRLAELLALWQHRPPLRTDLPMVDEMFPAASYHYILYGMGASPPATGPLREGALPSLAPIAQRTRSMVAALPPIRAYLDACRAARQPIAMEQFS

SEQ ID NO: 88573 - protein, 355 aa, Sphingomonas sp.
  misc_feature (1)..(355): tr|A0A520IJD3|A0A520IJD3_SPHSX Tryptophan 7-halogenase (Fragment) OS=Sphingomonas sp. OX=28214 GN=EOP67_49950 PE=4 SV=1
VLSTLFYAFHFDAALYAKFLRDMAEQDGVVRVEGRVVAVERDAGTGFIEAVRLEGDHRIDGELFIDCSGFRSLLLGDALDVPFTSWKHWLPCDRAWAVPSQRQGGLTPYTRATADTAGWRWRIPLQHRVGNGYVYSSANIDDDDARRALLAGLEGEALGEPRQLRFEAGRRDRLWERNCVAIGLSGGFLEPLESTSIHLIQSGITRLMSLFPDLGFGVTEIDEYNRVMLREYEQVRDFIILHYHATERSDSPFWDQCRTMAIPASLSAKLALWSGKARVFREQGELFTPDGWIAVLLGQGIRPASFDPLASALPADESARFLAHVRDMIDKTAAAMPTHEAFIAQNCAARTHQAA

SEQ ID NO: 88574 - protein, 506 aa, Sphingomonas sp.
  misc_feature (1)..(506): tr|A0A520JNB8|A0A520JNB8_SPHSX Tryptophan 7-halogenase OS=Sphingomonas sp. OX=28214 GN=EOP67_07060 PE=4 SV=1
MDERARLRIVIVGGGTAGWMTAATLGLTTGTPSAARLADITLVESEEIGTVGVGEATVPHIRFFNQRLGIDEADFVRRTKATFKLGIEFCDWGRIGDSYIHPFGDFGHDIDGLPFHQHWLHATRGKPDETPALAACSLPIVAARAGRFTPPLDDPRSVGSTYSYAYQFDAGLYAAYLRDYAEARGVTRIEGRVEHVERGPSGIAALRLADGQRIEGDLFVDCSGFRALLIEGALKAGHEDWAHWLPCDAAWAVPTANTGPLVPYTRATARDAGWQWRIPLQHRTGNGHVFSTRFTDPERARAVLLDNLEGEVLAEPRMLRFRTGRRHRQWIDNCVAIGLSAGFLEPLESTSIHLVQLAIGKLIELFPNDAVLDPADAAEFNRAMALEYDRVRDFLVLHYCATERDDTPFWRHMRTMDLPPSLAGKIAAFRDRGIVEQYREGMFLPASWLAVYYGQRIMPERIHPLVAALPVADSRARVAAVADACRRTAAGMPSHADYLARIGAAA

SEQ ID NO: 88575 - protein, 508 aa, Sphingomonas sp.
  misc_feature (1)..(508): tr|A0A520DQQ8|A0A520DQQ8_SPHSX Tryptophan 7-halogenase OS=Sphingomonas sp. OX=28214 GN=EOP65_02100 PE=4 SV=1
MREDAIRRVVIVGGGTAGWMAAAAMSRVLGEMPGLSIELIESDEIGTVGVGEATIPQIVLFNKMLGLDEAMFMRETRATYKLGIEFVDWVRPGHRYVHPFGTYGLDMKGIEFHHFWLKGQALGDTTPLDAYSLAIVAGMQGRFSHPRPDQPGSPLSKLSYAFQFDAGLYAQLLRRLSEANGVRRIEGRIVGAERDGETGHVSAVSLASGTRVAGDLFIDCSGFRGLLIEGEMQAGFEDWSRWLPCDRAVAVPCAHGGDRQPLTRSTARAAGWQWRIPLQHRIGNGYVYASDHLSDDEAAATLLANLDGAPLGDPRFLRFTAGHRRRAWVGNVVALGLAGGFLEPLESTSIHLVQSAIARLLTYWPTRRFDQVEIDRFNAAHVADYLDIRDFLVLHYKATQRRDTAFWDYCRMLAPPPGLAEKLAVFAANGRVFRENDELFTETSWLSVMVGQGVPAGGYHPAADLLSDAETLSRLDHIRRVVADTAGLLPRQDDLLAQYGCTLTGVAA

SEQ ID NO: 88576 - protein, 507 aa, Sphingomonas sp.
  misc_feature (1)..(507): tr|A0A525HLR6|A0A525HLR6_SPHSX Tryptophan 7-halogenase OS=Sphingomonas sp. OX=28214 GN=E7773_03540 PE=4 SV=1
MTQPPRPLKTITIVGGGTAGWMTAALLSHVFKSYRIRLIESDEIGIIGVGEATIPAIRDYLALAGIDQVEMIRATQATFKLGIDFVGWRDGTDRYFHGFGRIGQDFMWLHTHQLWLRARADGEVVEHFDHYALNCLAARQNKFAFPDPRQPQSPLSGLDYAFQFDASLFACFLRTRSEGQGVERIEGRIVDVALDGERGHVSHVVMADGRTVDGDLFVDCSGMRALLIGDALGVEYEDWNHWLLNDRALAVPCERVSPLTPYTRVTAHPHGWQWRIPLQHRTGNGHVYSSNHLSDDEAAATLLANLDARPLADPRPVRFRPGKRARAWEKNVVAIGLSAGFLEPLESTSIHLIQTGIVKLLGLFPHSAFAAPDVAEYNRQHDFEFTDVRDFIVAHYKVTEREDTPYWAYLKHMAVPDSLTERLELFASSGRFYKRAAQELFRVESWTQVLIGQGLGRGHDPLVDTIPGGTIAEFLGDIAEVTADVAAAMPDHAAFIDRHCKAPPLAA

SEQ ID NO: 88577 - protein, 503 aa, Sphingomonas sp.
  misc_feature (1)..(503): tr|A0A520I180|A0A520I180_SPHSX Tryptophan 7-halogenase OS=Sphingomonas sp. OX=28214 GN=EOP68_00620 PE=4 SV=1
MNLDKRVRRIVVAGGGTAGWMAAAAIARTMGRTVEVTLIESEAIGTIGVGESTIPPLVTYNRLLGINEAEFMRATQATFKLGILFDGWRDGTDRYFHSFGTTGKDHWSAGFQHYWLHGLTKGHTRPYDDYCMELVAAMRGKFAHLPDEGMNYAYQLDSGLYAKFLRAMAEKDGTTRVEGRIAHVELDPATGDIAALRLDGDRRVEGDLFLDCTGFRALLIEGALHAGFDDWTHWLPCDAAIAVQTENVRAPVPYTRAMAHDAGWQWRIPLQHRTGNGIVYCSRYLSKDDAQARLLGNVEGRVLTEPNVLRFVTGARRRQWHRNCVAIGLSGGFMEPLESTSIHLIQRAILRLIRMMPLRGVSPADVAEFNDQQHQDMLQIRDFLILHYKATSRDDSPFWRYVREMPVPDSLQQKIDLFRETARVFRRNEELFAENSWVQVMMGQGIAPQSHHPIAEKLSDDELTRLLRLLRDQVERTVSGLPDHAAYVAQYCGATAPLSAAAA

SEQ ID NO: 88578 - protein, 199 aa, Sphingomonas sp.
  misc_feature (1)..(199): tr|A0A520HNY7|A0A520HNY7_SPHSX Tryptophan halogenase (F ragment) OS=Sphingomonas sp. OX=28214 GN=EOP67_72050 PE =4 SV=1
MTTPPIHRVVIAGGGTAGWMAAAAIARTMGRTVAVTLVESEAIGTVGVGESTIPPIVTFNRLLGINEAEFMRETQATFKLGILFDNWKDRGDTYFHSFGTTGKDHWSAGFQHFWLHGLTRGHHQPFDDYCLELRAALQGKFAHLPDGRMNYAYQLDSGLYARFLRKMAEADGTTRIEGRIAQVELNGESGDIAALTLDS

SEQ ID NO: 88579 - protein, 79 aa, Sphingomonas sp.
  misc_feature (1)..(79): tr|A0A520HIW4|A0A520HIW4_SPHSX Tryptophan halogenase (F ragment) OS=Sphingomonas sp. OX=28214 GN=EOP67_74960 PE =4 SV=1
EFRERGIVASYREGMFLPASWLAVYYGQRIMPDRVNPLIADIPMATSGDHVARVAAACASAAKAMPLHEDYIARIKAAA

SEQ ID NO: 88580 - protein, 530 aa, Unknown
  misc_feature (1)..(530): tr|S5UC52|S5UC52_9BACT Tryptophan halogenase OS=uncultu red bacterium esnapd7 OX=1366614 PE=4 SV=1
MNDNRIKKILVLGGGTAGWMAASYLGRALGSSVQITVLEAPAIPKIGVGEATIPNLQRVFFDYLGLSEEDWMPECNASFKMGIRFINWRTPGAGTAQPRPYGTHGDQFDHLFGLLPNHDDLPLSHYWTYKKLTGQTDQPFDRECYAQPAIFDRKLAPRHLDGRRWASYAWHFDADLVADFLRKFATSKQGAVHIEDKFVTAETDQRGHITAVNTEAGRRLEADLFIDCSGFRSLLMNQVMKEPFLDMSDHLLNDRAVATRIQHDDEEHGVEPYTSSIAMSSGWAWKIPMLGRFGTGYVYSSRFASQDEATEEFCRMWNISPDTHPMNHVRFRVGRNRRAWVKNCVGIGLSSCFLEPLESTGIYFTYAALYQLVKHFPDKRFDPAVTKRFNGEIETMFDDTRDFIQGHFSFAPRDDTPFWRACKELELAPEFVDKVARYKAGLGVDLPVTDESNYYGNFEAEFRNFWSNANYYCVFAGLGVTPDHHSTLLDHRPNAVESAEAVFAEVKQRRDELLESLPTMHAYLRHLYGK

SEQ ID NO: 88581 - protein, 326 aa, Pseudomonas fluorescens
  misc_feature (1)..(326): tr|A0A172WBZ5|A0A172WBZ5_PSEF5 Tryptophan halogenase (F ragment) OS=Pseudomonas fluorescens (strain ATCC BAA-47 7 / NRRL B-23932 / Pf-5) OX=220664 GN=prnA PE=4 SV=1
DLFIDCSGMRGLLINQALKEPFIDMSDYLLCDSAVASAVPNDDAREGVEPYTSAIAMNSGWTWKIPMLGRFGSGYVFSSKSTSRDQATADFLKLWGLSDNQQLNQIKFRVGRNKRAGVNNCVSIGLSSCFLEPLESTGIYFIYAALYQLVKHFPDTSFDPRLRDAFNAEIVYMFDDCRDFVQAHYFTTSREDTPFWLANRHELRLSDAIQEKVERYKAGLPLTTTSFDDSTYYETFDYEFKNFWLNGNYYCIFAGLGMLPDWSLPLLQHRPESIQKAEAMFASIRREAERLRTSLPTNYDYLRSLRDGAQLSRNQHGPTPAAQERL

SEQ ID NO: 88582 - protein, 521 aa, Xanthomonas euvesicatoria; identical to SEQ ID NO: 84140
  misc_feature (1)..(521): tr|A0A4U0TDD1|A0A4U0TDD1_XANEU Tryptophan halogenase OS =Xanthomonas euvesicatoria pv. citrumelonis OX=189396 G N=TP41_07545 PE=4 SV=1

SEQ ID NO: 88583 - protein, 508 aa, Rheinheimera sp.
  misc_feature (1)..(508): tr|A0A0M0M3B6|A0A0M0M3B6_9GAMM Tryptophan halogenase OS =Rheinheimera sp. KL1 OX=1635005 GN=WH43_13790 PE=4 SV= 1
MSKAVKKLVIVGGGTAGWLSAAIIAAQHRSNTQDGLQVVLVESSDIPTIGVGEGTWPTMKNTLQQIGIKEADLFQRCHAVFKQGGRFVNWVHGNEDFYYHPFTVPMGYGRIDLAPYVQDISQFAVESNFQHQICEAGLAPRGFAEGEYQGQCNYAYHLDAGAFADLLKEHCKNNLGVQHRIGTVERCQLSQDGQIQALYLTDGTAPLEADLFIDCTGFSSLLLGKALGVPFEPVEHLLFNDSALAMQVPYDTPDAAIPCHTIATAQNAGWIWDIGLTHRRGVGHVYAGKYLSDDEAEFNLRRYIGPAAQGISARKISYQTGHRSKFWQHNCVAIGMSAGFVEPLEATAIMLVEISARFVADNLPADLATMPLVATRFNQQMLYRWQRILDFLKLHYLLTKRPEPYWQDHLKPESIPQSLQDDLKIWQHRGPQIQDFHGALELFPAASYQYVLYGMGFKPDFSRQSYLYQQQSQAEQIIRRNQQLTAQLLQTLPSHRDYITGWLSSNRG

SEQ ID NO: 88584 - protein, 520 aa, Sphingomonas sp.
  misc_feature (1)..(520): tr|A0A520JJY5|A0A520JJY5_SPHSX Tryptophan 7-halogenase OS=Sphingomonas sp. OX=28214 GN=EOP67_13515 PE=4 SV=1
MPAKPSDGARARASEITSICIVGGGTAGWMTAAALANKLKGLPVTITLIESAEIGTVGVGEATLPHIRAFNVALGIDEAELMRATEATFKLGIEFCDWGRIGDRYIHPFGDFGPAIDGVPFYHYWLRLQAAGATGRLADYSFPIVAAEHSRFQHPSPDLDRVESTFGYAYQFDASLYAAFLRRYAEKHGVERHEGKVVDTVLDGQTGFIDTITLADGRAIKADLFVDCSGFRGLLIEGALASGYDDWSNWLPCNRAVAVPTQSRGPLGPFTRATARTAGWQWRIPLQHRVGNGHVYCNSFISDDDAERQLVENLDAPMQATPRRLSFTTGRRRDFWKRNVVAIGLAGGFLEPLESTSIHLIQDGITELLALFPDRGFDAPSIAEYNRRMGLHYERVRDFLLLHYVATQRDDSPFWRHFRALKLPDSLQQKIDAWTTRGYVIPYEFGLFLPPSWVAVMMGQNLMPTGHDPRAHAIGDAALTARAAAIRDSVAGAVRATPDHADYIRRMGGAGSLSRAATAA

SEQ ID NO: 88585 - protein, 262 aa, Sphingomonas sp.
  misc_feature (1)..(262): tr|A0A520JGG2|A0A520JGG2_SPHSX Tryptophan 7-halogenase (Fragment) OS=Sphingomonas sp. OX=28214 GN=EOP67_20035 PE=4 SV=1
RPDDPIASYTISTAQKNGWIWDIGLDRRRGIGHVYSSDHGDDETAERVLRDYLGAAGEKADVRHFKFDAGYREVNWYKNCVAVGLSSGFFEPLEATGIAFAEVSAGMIANLFPWGGDYETSARQFNANMLRRYERALDFIKLHYCISERRDTAFWRDNVADASVPDSLLELLDRWRFRPPNELDIDGQVDIFTEASWQYVLYGMGWKTDLSAKAGALRYHEDARRAFAEVQRQARYAIANLPSNRDLVAYAQTHSFGARAAA

SEQ ID NO: 88586 - protein, 149 aa, Sphingomonas sp.
  misc_feature (1)..(149): tr|A0A520J3I5|A0A520J3I5_SPHSX Tryptophan halogenase (F ragment) OS=Sphingomonas sp. OX=28214 GN=EOP67_38520 PE =4 SV=1
MTAASLAKQFVDQPVTVTLIESDEIGTVGVGEATVPHIRFFNARLGIDEADFMRRTQATFKLGIEFRDWARLGDSYIHPFGRFGEDLDGIAFHHHWARLRRNERGEDPDRYSLAAMAARQNRFAHPSGDPDSVSGSYSYAFQFDAGLYA

SEQ ID NO: 88587 - protein, 513 aa, Sphingomonas sp.
  misc_feature (1)..(513): tr|A0A520DPK7|A0A520DPK7_SPHSX Tryptophan 7-halogenase OS=Sphingomonas sp. OX=28214 GN=EOP65_03210 PE=4 SV=1
MHQIRNIVIVGGGTAGWLTAGVIAARHQGQRPHGFTVTLVESPNVPIIGVGEGTWPTLRSTLKRMGVSETDFFRECDASFKQGARFNRWTTGAVDDGYYHPLMLPQQFGSVNLAPHWLAGDGDGSFCDTVTPQGRICDEGLAPKTMATPEYEGQANYAYHLDAGKFSHFLERHCCETLGVRHVRADVTEVRKDESGDIVGLDTEQGIGIEGDLFVDCTGFAALLIGKAMGVPFRSCADTLFCDTALAIQVPYAQADDPIASHTISTAQSAGWIWDIGLPTRRGVGHVFSSSHIDVDAAERELRAYIGPAGADLPVRRLAIRAGHRTRFWERNCVAVGLAAGFLEPLEASAIVLIELSAKMIAEQLPPCREVMDVVARRFNDTTHYRWGRIIDFLKLHYALTQRTDTDFWRDNVRPETIPDRLRGLMELWQHQSPWLHDEFDRAEEVFPSASYQYVLYGMGARSTVLPGTIEADAELARRARRENAVQTQRMVASLPRHRDLIERIVRHGLQPI

SEQ ID NO: 88588 - protein, 524 aa, Sphingobium sp.
  misc_feature (1)..(524): tr|A0A521PZC2|A0A521PZC2_9SPHN Tryptophan 7-halogenase OS=Sphingobium sp. OX=1912891 GN=EPO45_12565 PE=4 SV=1
MRDEKNTLNPNAVRKVVIAGGGTAGWMTAAALSVDLADAGVEIELIESPEIGAIGVGEATVPFIHLFNKMLGIDQADFMKQCNATFKLGIEFINWGNLNESYFHSFAHFGPNFKDVSFYHMYLRQAELMAAKGVETVVEDSNVGAVAARNNRFRHPQTVEKSGLPSHFYAFHFDATLYASYLRDFATQRGVRHVSGRIIDVEQNPENGFIRSVRLQDGREFEADLFVDCTGLYGLLIEKVLKSPYEEWSHWLPCDRAVAVPSARVEAPVPYTKSTAEKSGWRWRIPLQHRTGNGMVYSGAFAESDDAVEAKLLDVLDGKALASPRRLRFTPGRRREVWVKNCVSIGLASGFLEPLESTNIHLVQSSILKLLSYFPDKNFAQAEIDAFNADMQKEIEQIRDFIILHYKVTGREDTPFWKYCKYMAVPDTLQRRIDMFKPHGRLFVKPDEFFNYNSWLSVMHGQGLRANGLVPQLDRLTDQEVLAYFEAFNGRVRSVVGAMPLHGDYLHAFAGASEQTPVPAFGEL

SEQ ID NO: 88589 - protein, 183 aa, Sphingomonas sp.
  misc_feature (1)..(183): tr|A0A520IZD1|A0A520IZD1_SPHSX Tryptophan halogenase (F ragment) OS=Sphingomonas sp. OX=28214 GN=EOP67_40270 PE =4 SV=1
RRKQWIGNVVALGLASGFTEPLESTSIHMVQTGISKLLALFPDQGFSPVEIDTYNRLAETQFDQVRDFLVLHYHATRRTDSPFWREAGARAIPDSLAEKIALWRRRGRLFRWEDDLFAEASWVAVLLGQGIVPEGWDRLADTVDPRDVDARFDRLRVMFADAAARMPRHEDYLARTSPARVRA

SEQ ID NO: 88590 - protein, 224 aa, Sphingomonas sp.
  misc_feature (1)..(224): tr|A0A520HX78|A0A520HX78_SPHSX Tryptophan 7-halogenase (Fragment) OS=Sphingomonas sp. OX=28214 GN=EOP67_67495 PE=4 SV=1
QHRVGNGFVYASRHLSDDEAVASLRAGLEGEPLAEPNLIRFRTGHREQFWRGNCVALGLAAGFMEPLESTSITLIQTGIEKLLALFPDRDFDPALAGEYNRSTTLEYARIRDFLLLHYWANDRRGEPMWDQCRDTALPEMLAHKVRLFEAKGHLVRYEWESFHDPSWLSMYAGFDIAARTHDPAADYFSVPDLQAALARMRESIGKAVALAEPHDSFLAGYGVG

SEQ ID NO: 88591 - protein, 280 aa, Sphingomonas sp.
  misc_feature (1)..(280): tr|A0A520JBK5|A0A520JBK5_SPHSX Tryptophan 7-halogenase (Fragment) OS=Sphingomonas sp. OX=28214 GN=EOP67_29050 PE=4 SV=1
MERVRKIVILGGGTAGWMTAAALSATYGATASISVLESDAIGTVGVGEATIPTIHWFNELIGLDEAAFVRETNASFKLGIEFVDWTRPGNRYFHPFGRYGVDLGTVPFHQRWLRARADGLDRPLSAYSLATQLAEAGRFAKPTGDPRSILSTLGYAYHFDAGLYARHLRTLAEARGVTRHEGLLARIDRDPLNGFVTALATDRGETLKGELFVDCSGFRALLIGEAMGAPFEDWSQWLPCDRAVAVPCARVAETTPFTRSTRRDAGWQWRIPLQHRTGNG

SEQ ID NO: 88592 - protein, 162 aa, Sphingomonas sp.
  misc_feature (1)..(162): tr|A0A520I7U1|A0A520I7U1_SPHSX Tryptophan 7-halogenase (Fragment) OS=Sphingomonas sp. OX=28214 GN=EOP67_59670 PE=4 SV=1
MRDGASRLMRGDRLERIVVAGGGITAWCAAAALKRRAPFLDVTILACAPSPDALADRIACTLPSLLGFQEDLGISGADGIVRTGSGYRLGTLFAGWANGLPDYVHAYGRYGASFGPTAFHLHWVRSAQDGTAAPFDSHSPAAALARAGRFVPPTANSPFADH

SEQ ID NO: 88593 - protein, 426 aa, Sphingomonas sp.
  misc_feature (1)..(426): tr|A0A520IE37|A0A520IE37_SPHSX Tryptophan 7-halogenase (Fragment) OS=Sphingomonas sp. OX=28214 GN=EOP67_53200 PE=4 SV=1
MTTRRTILIVGGGTAGWLTAAYLAKALGPSVGITLLESPDIGIIGVGEGTFPTIRDTLRFLGIDEAAFVRETSATFKQGVRFRDWLRPPGGNGDGHAYFHPFEPPFYAEGTSLVPYWLLQDDASRPPFAEAVTIQNRVAEAQRGPKQSSEGDFEGPLNYAYHFDAIGLSRVLADRARQLGVTHLPGRVGEVAKAENGWIDHLDTDVGRLRADLYIDCTGFRAELIGRAMRSPFRSVADQLFTDRAITCKLPYERPDAPIASYTVATAHEAGWIWDIGLAGARGIGCVYASRYIDDDRAAAILAEYVGAGAGEVSTRRLSFEAGYREQPWVGNCVAVGLSGGFLEPLESTGVVLIEAAVGMIAELFPHHGPADLPARRFNELMTARYATIVTFLKLHYCLSQRPEPFWRDNADPSTIPERLRDLLDQ

SEQ ID NO: 88594 - protein, 455 aa, Sphingomonas sp.
  misc_feature (1)..(455): tr|A0A520IRW2|A0A520IRW2_SPHSX Tryptophan 7-halogenase (Fragment) OS=Sphingomonas sp. OX=28214 GN=EOP67_44985 PE=4 SV=1
MNHTSEPPRTRVVVAGGGTAGWIAAAAIVRQLGPLVDVTLVESDEIGTVGVGESTIPTARSFHAFLGIDEAAFMRATQATFKLGIAFENWRQVGDRYFHPFGSVGRSVAIADFQHFWLEARARGFAGAYGDYSLEQQAAGAGLFGHDEQHSLAYAYHLDATAYARFLRTLAEPWGVRRVEGRIERVERDGEGGDIAALVLASGERIAGDLFIDCTGFRALLTEGALGTGFEDWSEWLSTDRALAVQTETVAPPVPYTRAIAHDAGWRWQIPLQKRTGNGLVYSSAHMSDDEAHATLIGALDGRPLFEPRPLRFRSGIRRQAWNRNCIALGLAAGFIEPLESTSIHLIMNAVIRLIQLFPFRGDDHVALAARFNAQSRHEWEHVRDFIILHYHVTQRDDSPFWRDCARMTIPDSLAERIALFTKTAGAWQGQDDLFRIDSWVSVMLGQGVEPRAHH

SEQ ID NO: 88595 - protein, 258 aa, Sphingomonas sp.
  misc_feature (1)..(258): tr|A0A520JJ50|A0A520JJ50_SPHSX Tryptophan 7-halogenase (Fragment) OS=Sphingomonas sp. OX=28214 GN=EOP67_14955 PE=4 SV=1
AWAVPSERRGPLTPYTRATADTAGWRWRIPLQHRVGNGYVYSSAHIDDDDARRALLAGLEGEALAEPRQLRFEAGRRDRLWDRNCVAIGLSGGFLEPLESTSIHLIQSGITRLMSLFPDLGFGATEIDEYNRVMLREYEQVRDFIILHYHATKRSDSRFWDQCRTMAIPASLSAKLALWSGKARVFREQGELFTPDGWIAVLLGQGIRPESIDPLAATLPAGESARFMAHVRDMIDKTATAMPTHEDFIARHCAAPPR

SEQ ID NO: 88596 - protein, 281 aa, Sphingomonas sp.
  misc_feature (1)..(281): tr|A0A520D4D0|A0A520D4D0_SPHSX Tryptophan 7-halogenase (Fragment) OS=Sphingomonas sp. OX=28214 GN=EOP65_16045 PE=4 SV=1
RSVLLGDALGAGFEDWSAWLPNDRAVAVPSAVTGPPPPFTRATARGAGWQWRIPLQHRVGNGYVFASDHVSEDEATATLLANLEGEALAEPRTLRFRTGRRSALWVRNCVALGLSGGFLEPLESTSIHLIQSGIARLLEMLPTRAFEPADIRRYNRLMATEFDSIRDFVILHFHATGRRDTAYWRRLAEMPIPETLAERIAIYRRTGRVFRETDELFTKTSWLAVMDGQGLTASGYDPLGAALPLAEARAALDRIGKVTAAAAAHMPPHRDFIARHCPAPR

SEQ ID NO: 88597 - protein, 515 aa, Sphingomonas sp.
  misc_feature (1)..(515): tr|A0A520DTH0|A0A520DTH0_SPHSX Tryptophan 7-halogenase OS=Sphingomonas sp. OX=28214 GN=EOP65_00075 PE=4 SV=1
MADAAPADHPNPPLKTITIVGGGTAGWMTAALLARLFLGAYTIRLIESEEIGTIGVGEATIPALRTYNGLAGIDEFEMVRATQATFKLGIEFRNWRTPGSSYIHGFGKIGQDLYWLHCHQFWLKEAARGRAKHLDHYALNALAARMNRFAMPDPSNPHSPLADLDYAYHFDAALFARFLRGRAEAAGVERIEGRIVAANRRSHDGFLDHVVLADGRTIDGDLFIDCSGMRGLLIGDAMGVGYEDWDRWLLCDRALAVPSARSGPLTPYTRSTAHGSGWQWRIPLQHRTGNGHVYASRFVSDDAAAATLLAHLDTPALADPRPVRFRPGKRHRAWDKNVVALGLAGGFLEPLESTSIHLIQTGILRLIALFPGRGFNPADIAEYNRQTDFEYRDVRDFIIAHYKVTERDDTPFWRHVRHMDVPDSLTERLDLFAASARFFMHGKAELFREESWVQVLLGQGMRAQYDPMVDMIPDQQTTAFLKDIEAVIGDVAATLPTHEAFIARHCRAPAITVGV

SEQ ID NO: 88598 - protein, 497 aa, Sphingomonas sp.
  misc_feature (1)..(497): tr|A0A5E8ACD1|A0A5E8ACD1_9SPHN Tryptophan halogenase OS =Sphingomonas sp. EC-SD391 OX=2038398 GN=SPHINGO391_510 064 PE=4 SV=1
MTEQRIKKVVIAGGGTAGWLAAAALSRQLGQLLDITLVESEEIGTIGVGEATIPTMRSFHAILGLDEREFMRATQATFKLGISFENWARDGDRYIHSFGDLGKSTWMGDFHHFWLAAKAAGDPSEIGDYCLELQAAKAERFALPSEGEINYAYHLDAGLYARFLRARSEANGLKRIEGRIASVDRDGETGFIRALVLDSGERVEGDLFIDCTGFRGLLIEGTYAAGYEDWSHWLPTNSALAVQSAATGPAHPYTRAIAHDAGWRWRIPLQHRVGNGLVYASEHLSDDEAHARLLGAIDGAPLTEPRLIRFRTGRRRQVWMGNCVALSLASGFVEPLEATSIHLVMTGVTRLMQAFPFGGIAPAAVTRFNEQAQAELERVRDFIILHYHLNERPEPFWAARRDMPIPDTLVERIALFAEAAQAYQGGDDLFRVASWVQVMLGQRLMPRDHHRLGTIMGGPQLTGVLAKMRSDITDVVAAMPTHQQFLDRHLLRPPRAA

SEQ ID NO: 88599 - protein, 516 aa, Sphingomonas sp.
  misc_feature (1)..(516): tr|A0A520JJX8|A0A520JJX8_SPHSX Tryptophan 7-halogenase OS=Sphingomonas sp. OX=28214 GN=EOP67_13545 PE=4 SV=1
MTKRILIVGGGTAGWLTAGYLAKRLGADLPGGVAITLVESRDIGILGVGEGTFPTIRRTLATIGIDEADLVRRCGATFKQGAKFVHWRHAPGQGATDHYSHPFQVADSSDGLDLLPYWLLGLGGTENWDEVSNPQKKASDRHRAPKLPTNPDYVGPLNYAFHFDAVALAALLREQGVKNGVRHLTDTVSEVLLDADGAIGGVRTERNGILDADLYIDCTGFRAELIGKAMKIPFRSCRDVLFCNRAIAAQLPYARPDEPIASYTISTAQENGWIWDIGLDRRRGIGHVYSSDHGDDEAAERVLRGYLGAAGEKADVRHFKFDAGYREVNWYKNCVAVGLSSGFFEPLEATGIAFAEVSAGMIANLFPWGGDYETSARQFNANMLRRYERALDFIKLHYCISERRDTAFWRDNVADASVPDSLLEMLDRWRFRPPNELDIDGQIDIFTEASWQYVLYGMGWKTDLTAKAGALRYGSDARRAFAEVQRQAAYAIANLPSNRDLVDYAQTHSFGARAAA

SEQ ID NO: 88600 - protein, 495 aa, Sphingomonas sp.
  misc_feature (1)..(495): tr|A0A520DP07|A0A520DP07_SPHSX Tryptophan 7-halogenase OS=Sphingomonas sp. OX=28214 GN=EOP65_03815 PE=4 SV=1
MKPRRIVIAGGGTAGWMAAAAIARVMGRAAAVTLVESDAIGTVGVGESTIPPLITFNRLLGINEADFMRATQATFKLGIAFDGWKQAGDSYFHSFGLTGTDHWAAGFQHYWLDGQTRGHGQPYDDYCLELIAAREGKFAHLPDERMNYAYQLDSGLYGRFLRRMAEADGARRVEGRIAQVQLDGESGDIAALLLDSGMRIEGDLFLDCTGFRALLIEQALHTGFDDWTHYLPCDAAIAVQTESVAPAVPFTRAMAHDAGWQWRIPLQHRVGNGIVYCSRYLDHDAALARLLGNVEGRVLTEPNRIRFVTGARRRQWHRNCIALGLSGGFMEPLESTSIHLIQRAILRLIRMMPAGDVSPRDIAEFNDQQHTDMLQIRDFLILHYKVTERRDSPFWRQCATMAIPDSLAQKIELFRETGRVFRKNEELFAENSWVQVMLGQGIVPRSHHPIAAKLGDDDMARLLSTLRQNVATTVRGLPPHAAYVAQYCGVAPDAA

SEQ ID NO: 88601 - protein, 88 aa, Sphingomonas sp.
  misc_feature (1)..(88): tr|A0A520JED1|A0A520JED1_SPHSX Tryptophan halogenase (F ragment) OS=Sphingomonas sp. OX=28214 GN=EOP67_23850 PE =4 SV=1
MNDTSEPPRTRVVVAGGGTAGWIAAAAIVRQLGSLVDVTLVESDEIGTVGVGESTIPTARSFHAFLGIDEAAFMRATQATFKLGIAFE

SEQ ID NO: 88602 - protein, 150 aa, Sphingomonas sp.
  misc_feature (1)..(150): tr|A0A520JM00|A0A520JM00_SPHSX Tryptophan halogenase (F ragment) OS=Sphingomonas sp. OX=28214 GN=EOP67_09665 PE =4 SV=1
RLMSLFPDTAFSAVEIAEYNRQMLREYDQVRDFIILHYHATTRTDSAFWRHCQSMTLPPSLQAKLDLWAGRARIFREQGELFTPDSWIAVLLGQGIWPASVDPLTAGLPVAESAMFLDHVREMVAKTAEAMPRHADFIARHCAAPLRTAA

SEQ ID NO: 88603 - protein, 52 aa, Sphingomonas sp.
  misc_feature (1)..(52): tr|A0A520ICF5|A0A520ICF5_SPHSX Tryptophan halogenase (F ragment) OS=Sphingomonas sp. OX=28214 GN=EOP67_54630 PE =4 SV=1
MTAAAMARLVESGVAVTLVESEEIGTVGVGEATIPSLLDYNRMLGIDEDDFV

SEQ ID NO: 88604 - protein, 298 aa, Sphingomonas sp.
  misc_feature (1)..(298): tr|A0A520I6F7|A0A520I6F7_SPHSX Tryptophan 7-halogenase (Fragment) OS=Sphingomonas sp. OX=28214 GN=EOP67_61005 PE=4 SV=1
RLADGRRIAGDLFIDCSGFRALLIDGALKAGYEDWSHWLPCDTAWAVPTANTGPLTPYTRATARQAGWQWRIPLQHRTGNGHVFSSRFTDPERARDILMSNLEGEPLAEARMLRFRTGRRHRQWIGNCVAIGLSAGFLEPLESTSIHLIQLAIGKLIELFPADGMPDPVDTAEFNRAMALEYDRVRDFLVLHYCGTERDDTPFWRHMRTMPLPPSLTEKITEFRDRGVVAQYREGMFLPASWLAVYYGQRIVPNRVHPLIGDTPAANRARYSSCAGIVAAASRQAAATASTQALDAAA

SEQ ID NO: 88605 - protein, 502 aa, Sphingomonas sp.
  misc_feature (1)..(502): tr|A0A520J7I2|A0A520J7I2_SPHSX Tryptophan 7-halogenase (Fragment) OS=Sphingomonas sp. OX=28214 GN=EOP67_36475 PE=4 SV=1
LTAGYLAKRLGADLPGGVAITLVESHDIGVLGVGEGTFPTIRRTLATIGIDEADLVRRCGATFKQGAKFVNWRNAPGEGATDHYSHPFQVADASGGLELLPYWLLGEGGTENWDEVSNPQKKAADARRAPKLPSHEDYVGPLNYAFHFDAIALAGLLREQGIANGVRHLIDTVTQVSLDADGAIDSVSTERNGLLTADLYVDCTGFRAELIGKAMNIPFRSCRDVLFCDRAVAAQLPYTGERDPIASYTISTAQQAGWTWDIGLDRRRGIGHVYSSDHTDDETAERVLRGYLGAAGADAEVRRFKFDAGYRETNWHKNCVAVGLSSGFFEPLEATGIAFAEVSAGMIANLFPWGGDYETSARQFNLNLRRRYERALDFIKLHYCISERRDTEFWRDNVAAASIPDSLHEMLDRWRYRWPNELDIDAQIDIFTEPSWQYVLYGMGWKTDLSAKAGALRYYDDARRAFAEVRRQADYAIANLPSHRDLVDYARTHRFGQGRAAA

SEQ ID NO: 88606 - protein, 222 aa, Sphingomonas sp.
  misc_feature (1)..(222): tr|A0A520DHK9|A0A520DHK9_SPHSX Tryptophan halogenase (F ragment) OS=Sphingomonas sp. OX=28214 GN=EOP65_07715 PE =4 SV=1
WQWRIPLQHRTGNGHVYASAFTDDDTAERVLLANLDATPTAPPRRLSFTAGRRRQSWAGNVVALGLAGGFLEPLESTSIHLIQEGISKLFALFPDARFSPVERDEYNRLMGNHYTAVRDFIILHYAATRRDDTPFWRHVRTMDLPETLARKIALFREKGRIFRYDDELFTVPSWVAVLLGQGIMPTGYDPIVDALDADRVAGALRQMRRQNAALAQQLPLAG

SEQ ID NO: 88607 - protein, 106 aa, Sphingomonas sp.
  misc_feature (1)..(106): tr|A0A520IZU5|A0A520IZU5_SPHSX Tryptophan halogenase (F ragment) OS=Sphingomonas sp. OX=28214 GN=EOP67_40005 PE =4 SV=1
TQGHDAPLWQHTRAMAVPATLLDKMAHYRRTGRLMLEPEELFREASWLAVLNGQGVEAHGHVPLADTLDGANNRAQLEQIETVIARAVPTLPLHDAAIRALTGAAA

SEQ ID NO: 88608 - protein, 422 aa, Sphingomonas sp.
  misc_feature (1)..(422): tr|A0A520JNN0|A0A520JNN0_SPHSX Tryptophan 7-halogenase (Fragment) OS=Sphingomonas sp. OX=28214 GN=EOP67_06620 PE=4 SV=1
FVDWFKPGHRYMHAFGDVGRDVGLLPFHQYWLRARSLGLAGKLGAYSLNTHAALAERMQRGPARTARTLPSMPYAYHFDAGLYARYLRRYSETRGVNRIEGKIVRVTRDGESGDVSGLVLENGTTVAADLYVDCTGFRGLLIEEALGTGYEDWTHWLPCDRAIAVPSARSEAFTPYTRSTAHTAGWQWRIPLQHRTGNGVVFSSAHMSEDEATATLLAGLDTPAMADPRTIAFRTGRRKRMWNRNVVALGLAAGFMEPLESTSIHLIQSAISRLLKLLPGRVIAEADRTEFNRQSDFEYERIRDFIILHYKATARDDTPFWRECRDMAVPDTLAAKIDLWRGNGHIVREHEELFTEVGWLQVLAGQGIMPTGHHPLADAISTSDLGEFMDTIDKLNAREAGQMQDHAAFVAQHCASPAGLGA

SEQ ID NO: 88609 - protein, 499 aa, Sphingomonas sp.
  misc_feature (1)..(499): tr|A0A5E7YG57|A0A5E7YG57_9SPHN Tryptophan halogenase OS =Sphingomonas sp. EC-SD391 OX=2038398 GN=SPHINGO391_370 003 PE=4 SV=1
MTEHPIRRVVIAGGGTAGWMAAAAIARTMGSTIALTLVESDAIGTVGVGESTIPPMITFNRLLGINEAEFMRETQATFKLGILFDDWKDRGESYFHSFGITGKDHWSAGFQHFWLHSLTKGHDQPYDDYCLELRAALQGKFAHLPDDRMNYAYQLDSTRYAQFLRKMAEADGTRRVEGKIAQVELNGESGDIAALVLDSGARIEGDLFLDCTGFRALLIEGALHAGFDDWTHYLPCDSAIAIQTESVRPALPYTRAMAHDAGWQWRIPLQHRTGNGLVYCSRYLDRDAALDRLLGNIEGKTLTEPNMIRFVTGARRQQWHRNCIAIGLSGGFMEPLESTSIHLIQRAVLRLLRLFPSGAVSPRDVAEFNDQQHTDMLQIRDFLILHYKATNRRDSAFWRQCAGMPIPDSLDQKIELFRETGRVFRKNEELFAENSWVQVMLGQGIVPQSYHPIATKLRDEELARLLGGLRDGTNATVAGLPEHAAYVARYCATTRPVAA

SEQ ID NO: 88610 - protein, 516 aa, Sphingomonas sp.
  misc_feature (1)..(516): tr|A0A5E7Y556|A0A5E7Y556_9SPHN Tryptophan halogenase OS =Sphingomonas sp. EC-SD391 OX=2038398 GN=SPHINGO391_350 221 PE=4 SV=1
MTKRILIVGGGTAGWLTAGYLAKRLGADLPAGVAITLVESRDIGILGVGEGTFPTIRRTLATIGIDEADLIRRCGATFKQGAKFVHWRHAPGQGPTDHYSHPFQVADSSDGLDLLPYWLLGHGGTENWDEVSNPQKKAADRHRAPKLASNPDYVGPLNYAFHFDAVALAGLLREQAVKNGVRHLTDTVNEVLLDADGAIGGVRTERNGMLDADLYIDCTGFRAELIGKAMRIPFSSCRDVLFCNRAIAAQLPYARPDEPIASYTISTAQEAGWIWDIGLDRRRGIGHVYSSDHSDDEAAERVLRGYLGAAGEKADVRHFKFEAGYREVNWYKNCVAVGLSSGFFEPLEATGIAFAEVSAGMIANLFPWGGDYETSARQFNANMLRRYERALDFIKLHYCISERRDTAFWRDNVADASVPDSLLEMLDRWRFRPPNELDIDGQIDIFTEASWQYVLYGMGWKTDLSAKAGVLRYGDEARRAFAEVQRQARYAIANLPSNRDLVAYAQSHSFGGRAAA

SEQ ID NO: 88611 - protein, 515 aa, Sphingomonas sp.
  misc_feature (1)..(515): tr|A0A520JNK7|A0A520JNK7_SPHSX Tryptophan 7-halogenase OS=Sphingomonas sp. OX=28214 GN=EOP67_06730 PE=4 SV=1
MPLTAGADVRVVVVGGGTAGWMTTAALARLLPGHASVHLVESETIGVVGVGEATLPHIRAFNERLGIDEADFMARTRATFKLGIEFRDWGRIGDSYIHPFGTFGRGNGAVDLHHYWTRLLREGKSLPSLESLSYACAMARGGKFDRPATDGMLAGTYGYAYQFDALLFAPYLRQIAEQSGARRTEGTVASVDRDGESGDIKAIVLDSGERIAGDLFVDCSGFRSLLLGSALEEPFVDWSHWLPTDRAVAMPCCTRTAVTPYTSAIAMPSGWRWRIPLQHRTGNGYVYASAFVSDDDASRALERAVEGEALAAPRVLRFKAGRRRRSWVGNCVAIGLASGFLEPLESTSIYLVQQAITALIELFPERRISTTDRDEFNRVIDLEYDRIRDFLILHYHATTRSDSPFWDYVRMMPIPDTLSGKLDLWRTRARIVKYREGVFLDPSWVAVYLGQGIVPEGWDPRVDAVSTDALLASVEALRAEIAGDVARRPDHRSFIEGYCAMAQAAERYCAMAQAA

SEQ ID NO: 88612 - protein, 346 aa, Sphingomonas sp.
  misc_feature (1)..(346): tr|A0A520IZD6|A0A520IZD6_SPHSX Tryptophan 7-halogenase (Fragment) OS=Sphingomonas sp. OX=28214 GN=EOP67_40275 PE=4 SV=1
MTDALRSVTIVGGGTAGWMAAVAFGRLLGPAGTRVTLIESDDIPTVGVGEATIPPIRTFHAMLGIDEDAFLRATGGSYKLGIRFEGWTRPGESYVHPFGQIGTDIAGVPFAAQWLRARQAGLAAPLGAYSLEARAAETGRFSRPIANGDSPLSRIGYAYHFDAGHYAAFLRTQAEAYGVVRHEGLVERVERGPAGIAAVHLADGSRIAGDLFIDCSGFRALLIEGAMEAGWTDWSEWLSCDRAVAVPSVADAAPLPLTRAIAERAGWRWRIPLQHRTGNGHVFSSRHMSEDEATATLLAGVEGESLADPRVIRFATGHRNRFWSGNCIALGLSAGFMEPLESTSIH

SEQ ID NO: 88613 - protein, 341 aa, Sphingomonas sp.
  misc_feature (1)..(341): tr|A0A520HIN5|A0A520HIN5_SPHSX Tryptophan halogenase (F ragment) OS=Sphingomonas sp. OX=28214 GN=EOP67_75050 PE =4 SV=1
VGGGTAGWLTAGVIAAKHQARRQHGFTVTLVESPNVPTIGVGEGTWPTLRSTLKKMGVSETELFRQCDASFKQGARFNRWTTGAPDDGYYHPLMLPQHFGQVNLAPHWLADEGSATFCDTVTPQGRICDEGLGPKTIATPEYDGHANYAYHLDAGKFSHFLQRHCCDTLGVRHVKADVTEVHLDESGDIASLDTEQGISIAGDLFIDCTGFAALLIGGAMKVPFRSCTDILFCDTALAMQVPYDLPEDPIASHTISTAQSAGWIWDIGLPTRRGVGHVFSSSHISADAAEQELRDYIGPAARDLTARRLAIRAGHREQFWVRNCVAVGLAAGFLEPLEASA

SEQ ID NO: 88614 - protein, 277 aa, Sphingomonas sp.
  misc_feature (1)..(277): tr|A0A520J9V9|A0A520J9V9_SPHSX Tryptophan 7-halogenase (Fragment) OS=Sphingomonas sp. OX=28214 GN=EOP67_33825 PE=4 SV=1
MTGPQSIVIVGGGTAGWMAAVALGQLLGAGGSRVTLIESDTIATIGVGEATIPPIRTFHAMLGIDEDAFLRATGGSYKLGIRFEGWGRPGESYVHPFGQIGTDIAGVPFSPQWLRARQTGQADALGRYSLEARAAEAGRFSRPIVNGDSPLSRIGYAYHFDAGRYAIFLRAEAEKRGVVRHEGLVDRVETGPNGIAAVHLAGGERIAGDLFFDCSGFRALLIQGAMKAGWEDWSRWLPCDRAVAIPSQPDAAPLPLTRSVAMRAGWRWRIPLQHRTG

SEQ ID NO: 88615 - protein, 510 aa, Sphingomonas sp.
  misc_feature (1)..(510): tr|A0A5E7Y7N9|A0A5E7Y7N9_9SPHN Tryptophan halogenase OS =Sphingomonas sp. EC-SD391 OX=2038398 GN=SPHINGO391_350 222 PE=4 SV=1
MTDTRPGQITKVVIVGGGTAGWMAAAALSRLVAGGVSVTLVESQEIGTVGVGEATIPSLLDYNRMLGIDEVAFVRATGATFKLGIEFRDWRRLGEAYLHPFGTHGRDIDGVSFHQLWLRQAASGTPDPGPIGDYCLSSVAARRGRFTRPSANPQSVLSTLSYAFHFDAALYARFLRDMAEQDGVVRVEGRVVAVDRDVETGFIEAVRLEGDRRIEGELFVDCSGFRSLLLGETLDVPFTSWKQWLPCDRAWAVPSARQGPLTPYTRATADTAGWRWRIPLQHRVGNGYVYSSAHINDDEAKQALLAGLDGAAQGEPRQLRFEAGRRERLWDRNCVAIGLAGGFLEPLESTSIHLIQSGITRLMSLFPDRGFGSAERDEYNRVMLREYEQVRDFIILHYHATERSDSPFWDHCRTMTVPESLLAKLGLWSGRARVFRDQGELFTPDSWIAVLLGQGVCPDSFDPLTAALPPSETARFMAHIRDMIDKTAAAMPMHEDFIAQHCAAPSRRSA

SEQ ID NO: 88616 - protein, 344 aa, Sphingobium sp.
  misc_feature (1)..(344): tr|A0A521PF66|A0A521PF66_9SPHN Tryptophan 7-halogenase (Fragment) OS=Sphingobium sp. OX=1912891 GN=EPO45_20760 PE=4 SV=1
MQQLKRILIVGGGTAGWMTAALMSKLFKGLYEITLIESEAIGIIGVGEATIPAIKKYNELLGLDENEFMQRTQGSFKLGIQFVDWWKQGASYIHGFGVIGRDLEWLRCHQYWLKLNAQGAASDFANYSINTAAALENKFMRADPKMTDSPLGHIAHAFHFDAALYAKYLRGLAEASGVRRREGKVADVTLRGEDGFVQSVTMDDGAVIEADLFIDCSGFRGLIIEQAMKTGYEDWTHWLPCDRAMAVPCARVEPFTPYTRSTARASGWQWRIPLQHRTGNGHVYSSRYMEDDEAERFLLSNLDGEQLAEPNRLRFVTGKRKQIWNRNCVAIGLAGGFLEPLEST

SEQ ID NO: 88617 - protein, 441 aa, Sphingomonas sp.
  misc_feature (1)..(441): tr|A0A520IEK4|A0A520IEK4_SPHSX Tryptophan halogenase (F ragment) OS=Sphingomonas sp. OX=28214 GN=EOP67_53265 PE =4 SV=1
HIVVCGGGLAAWMTVASLARQLAPAIRITFVDIGGTAESDLFYGNVTAPSAYAFNLAAGVAEPALTLDSDTAFSWGTRYDHWAGGKRSWTQCFALPFPVVDGVLLHQYLAAVGIDRLEPYLVAAMAAKRGAFAHPPRDPAKAAQHPLSRADYGYQFDPASYARLFETAVADAPGRVIRIADALASVEIDADAIAGVRLSDGRALSADLYVDCSGPAGVLLSHLVPQGEAGRRIGIAASDAPAARPGRPVRTVTPTPYGWRSDVPLRGRTRRVTVYDPADRDAGLAAHGPAPELVAEATLHRRAHAWAGNCVGIGHAAHVLEPLTPAPMMLLERDVDRLLSLIPNTGGMAVERAEYNRRYQENTQNAALFACAMFATNGLPETPYWRAAQGEPRPDALVRKLEMFETRGLLVAYDLEPFHPEDWTILHLGMGRRPARHDRLA

SEQ ID NO: 88618 - protein, 498 aa, Sphingomonas sp.
  misc_feature (1)..(498): tr|A0A520JGE8|A0A520JGE8_SPHSX Tryptophan 7-halogenase OS=Sphingomonas sp. OX=28214 GN=EOP67_20030 PE=4 SV=1
MTSDGAARVTKVVIVGGGTAGWMTAAALSRLVPSGVSVTLVESEEIGTVGVGEATIPSLLDYNRMLGIDEDAFVRATGATFKLGIEFRDWTRLGDAYLHPFGTHGRDIGGVSFHQLWLRQAALDAATDGAGAGPIGDYCLSSVAARRGRFTRPSANPQSVLSTLSYAFHFDAGLYARFLRDLAESDGVVRVEGRVVDVERNAGTGFVEAVRLAGDRRIKGELFIDCSGFRSLLLGGALDVPFTSWKQWLPCDRAWAVPSARRGALTPYTRATADVAGWRWRIPLQHRVGNGYVYSSAHIDDDAAKQALLAGLDGEAMGEPRQLRFEAGRRDRLWDRNCVAIGLSGGFLEPLESTSIHLIQSGITRLMSLFPDLGFSAVEIGEYNRVMLREYEQVRDFIILHYHATERSDSAFWEHCRTMALPASLEAKLALWSDKARVFREQGELFTPDRPIATQFRSHNRSRRPASKRNWRGSPIASPSSPASSACFVASSSIWALE

SEQ ID NO: 88619 - protein, 397 aa, Sphingomonas sp.
  misc_feature (1)..(397): tr|A0A520JC59|A0A520JC59_SPHSX Tryptophan 7-halogenase (Fragment) OS=Sphingomonas sp. OX=28214 GN=EOP67_28050 PE=4 SV=1
MTACLIAHRWRDRRVRVTLVESPEIGIVGVGEGSTPQLKHFFDTLGIAEAEWMPACDATYKLGIGFEGWSDRAGYEQYFHPFPTALDGHTAPQFFYNTRARRTGRDVEAHPDQFLLPAHLASANCAPQPAENFPFEVSYGYHFDAYKVGAFLATHATETLGVVHLQRRIASVERASTGEITALINTDGERIGGEFFIDASGFRSTIFGALHVPFVSYADALFNDRAVVMPTAHAPGTPIPSQTRATALSAGWAWHIPLTGRNGNGYVYSSRHRTEAQAEAELRSHVGADAGKARHLRMRVGRVRESWSHNALAVGLAQGFLEPLEATALHLVIATVEAFLDMVDQGGATDAVRTAFNRRIAARYDGVRDYIVAHYRLNQRHDDPTGYWAEARRPRRR

SEQ ID NO: 88620 - protein, 184 aa, Sphingomonas sp.
  misc_feature (1)..(184): tr|A0A520JGM4|A0A520JGM4_SPHSX Tryptophan halogenase (F ragment) OS=Sphingomonas sp. OX=28214 GN=EOP67_21145 PE =4 SV=1
VWMGNCVALSLASGFVEPLESTSIHLIMTGITRLMQTFPFGGIAPALVKRYNDQAQAELERVRDFIILHYHLNERPEPFWAARRDMPIPDTLVERIALFTEGAQAYQGGDDLFRVASWVQVMLGQRLTPRDHHRLGSIMGGPQLAGVLGNIRSTIADAVAGMPTHQQFLDRYLAAPVTASHGMR

SEQ ID NO: 88621 - protein, 334 aa, Sphingomonas sp.
  misc_feature (1)..(334): tr|A0A520GTI9|A0A520GTI9_SPHSX Tryptophan 7-halogenase (Fragment) OS=Sphingomonas sp. OX=28214 GN=EOP68_26405 PE=4 SV=1
MAGGGTAGWMAAAAIARVMGRAAAVTLVESDAIGTVGVGEATLPHIRAFNERLGIDEAEFMARTRATFKLGIEFRDWGQIGDSYIHPFGTFGRGSGAVDFHHYWTRLLREGKPLPSLDSLSYACALARGGRFDRPATDRTLAGTYGYAYQFDAPLFAPYLRAIAEEAGARRTEGTVASVERDGESGDIAAIVLNSGKRIEGDLFVDCSGFRSLLLGSALEEPFVDWSHWLPTDRAVAMPCRTRTAATPYTSAIAMPSGWRWRIPLQHRTGNGYVYASAFVSDDDARRALETAVEGEALAAPRVLRFKAGRRRRSWVGNCVAIGLASGFLEPLES

SEQ ID NO: 88622 - protein, 324 aa, Sphingomonas sp.
  misc_feature (1)..(324): tr|A0A520JFM5|A0A520JFM5_SPHSX Tryptophan 7-halogenase (Fragment) OS=Sphingomonas sp. OX=28214 GN=EOP67_21500 PE=4 SV=1
VEGRVVAVDRDAETGFIEAVRLEGDRRIEGELFVDCSGFRSLLLGETLDVPFTSWKQWLPCDRAWAVPSARQGPLTPYTRATADTAGWRWRIPLQHRVGNGYVYSSAHIDDDDAKQALLAGLDGAAQGEPRQLRFEAGRRERLWDRNCVAIGLAGGFLEPLESTSIHLIQSGITRLMSLFPDRGFGSAERDEYNRVMLREYEQVRDFIILHYHATERSDSPFWDHCRTMTVPESLLAKLGLWSGRARVFREQGELFTPDSWIAVLLGQGVRPDSFDPLTAGLPPSETARFMAHIRDMIDKTAAAMPMHEDFIAQHCAAPSRRSA

SEQ ID NO: 88623 - protein, 497 aa, Sphingomonas sp.
  misc_feature (1)..(497): tr|A0A520JNL4|A0A520JNL4_SPHSX Tryptophan 7-halogenase OS=Sphingomonas sp. OX=28214 GN=EOP67_06735 PE=4 SV=1
MRDGASRLMRGERLKRIVVTGGGITAWCAAAALKRRAPFLDVTILACAPAPDALADRIACTLPSLLGFQGDLGIGVADGIVRTGSGYRLGTLFSGWAAGLPDYVNAYGRYGASFGSTAFHLHWLRSAQDGTVAPFDSYSPAAALARAGRFVQPIAGSPFADHEFGLTLDIPRHVTMLRAFGLHVGVREIVGEIAEVTLDVDKAIAAVALIDGSALSADLFIDATGPEARLRGAIDAVRDDWSAWLPCDRVLLAEPGVEPTVLTTVTAHEAGWHWSSGGQAGFAYAAHTISDAKAERVLCDASGAMPGEPIRIRPGTRPQPWRGNCLAIGDAATEVEPLEWCNLHLALSAIDRLITMLPGRLATPVEISEFNRQTRAEAERVRDFLAMHYRTARRDDPLWRTLAATAPPASLAHTLAQFAERGRLPFHEEETFARDNWAAVLIGQGFLPRRIDPLVSAVPAAAVRAAMARQTAAIAAALPNVPTHAAYLTAQTRHLTR

SEQ ID NO: 88624 - protein, 497 aa, Rheinheimera sp.
  misc_feature (1)..(497): tr|A0A0M0M948|A0A0M0M948_9GAMM Tryptophan halogenase OS =Rheinheimera sp. KL1 OX=1635005 GN=WH43_02045 PE=4 SV= 1
MNNQHNRIKKVVIAGGGTAGWMTAAGLTKLLGKNLEVVLVESDDIGTVGVGEATIPTMHIFHRLLNIKESEVMAATNATFKLGIQFENWKNLGEDYIHSFGFLGKDCWACGFQHFWVKAKQKGIATEIGDYCVEHLGARQGRFAVLPNQDLNHAYHMDASLYAKFLRRMSEQHGIRRIEGKIREVQQHMDGNISALLLESGELLEGDLFIDCTGFRALLIEQTLNTGFEDWSHWLPCDSAYAVQTKTTQEPVAYTRAIARQAGWQWKIPLQSRVGNGLVFCSKFITEAEAKQMLVDNLEGEMMFEPRLIKFKTGTRRQHWNKNCVAIGLSSGFLEPLESTSIHLIQRSIIRLLQMFPSNGINSADVAEFNRQTKIEMDNIRDFIILHYKATERTDTKFWRYCKDMEIPDTLAHRMELFKQSGKVYKFAQELFGESSWLQVLIGQGLMPEQYHPIVDLMPDSELNDFLMSIKQNVKRTVSQFPTHHEFIQHYCKSSLV

SEQ ID NO: 88625 - protein, 568 aa, Microbispora corallina
  misc_feature (1)..(568): tr|E2IHC5|E2IHC5_9ACTN Tryptophan-5-halogenase OS=Micro bispora corallina OX=83302 GN=mibH PE=4 SV=1
MARSEESNTLARLFDVLGDDAAAAREWVTEPHRLIASNERLGTAPEAPADDDPEAIRTVGVIGGGTAGYLTALALKAKRPWLDVALVESADIPIIGVGEATVSYMVMFLHHYLGIDPAEFYQHVRPTWKLGIRFEWGSRPEGFVAPFDWGTGSVGLVGSLRETGNVNEATLQAMLMTEDRVPVYRGEGGHVSLMKYLPFAYHMDNARLVRYLTELATRRGVHHVDATVAEVRLDGPDHVGDLITTDGRRLHYDFYVDCTGFRSLLLEKALGIPFESYASSLFTDAAITGTLAHGGHLKPYTTATTMNAGWCWTIPTPESDHLGYVFSSAAIDPDDAAAEMARRFPGVTREALVRFRSGRHREAWRGNVIAVGNSYAFVEPLESSGLLMIATAVQILVSLLPSSRRDPLPSNVANQALAHRWDAIRWFLSIHYRFNGRLDTPFWKEARAETDISGIEPLLRLFSAGAPLTGRDSFARYLADGAAPLFYGLEGVDTLLLGQEVPARLLPPRESPEQWRARAAAARSLASRGLRQSEALDAYAADPCLNAELLSDSDSWAGERVAVRAGLR

SEQ ID NO: 88626 - protein, 350 aa, Sphingomonas sp.
  misc_feature (1)..(350): tr|A0A520IB71|A0A520IB71_SPHSX Tryptophan halogenase (F ragment) OS=Sphingomonas sp. OX=28214 GN=EOP67_56795 PE =4 SV=1
MHEIQNIVIVGGGTAGWLTAGVIAAKHQARRQHGFTVTLVESPNVPTIGVGEGTWPTLRSTLKKMGVSETELFRQCDASFKQGARFNRWTTGAPDDGYYHPLMLPQHFGQVNLAPHWLADEGSATFCDTVTPQGRICDEGLGPKTIATPEYDGHANYAYHLDAGKFSHFLQRHCCDTLGVRHVKADVTEVHLDESGDIATLDTEQGVSIAGDLFIDCTGFAALLIGGAMKVPFRSCTDILFCDTALAMQVPYDVPDAPIASHTISTAQSAGWIWDIGLPTRRGVGHVFSSSHISADAAEQELRDYIGPAARDLTARRLAIRAGHREQFWVRNCVAVGLAAGFLEPLEASA

SEQ ID NO: 88627 - protein, 346 aa, Sphingomonas sp.
  misc_feature (1)..(346): tr|A0A520JAQ4|A0A520JAQ4_SPHSX Tryptophan 7-halogenase (Fragment) OS=Sphingomonas sp. OX=28214 GN=EOP67_30725 PE=4 SV=1
YARFLRKMAEADGTTRIEGRIAQVELNGESGDIAALTLDSGARIEGDLFLDCTGFRALLIEQALHAGFDDWTHFLPCDSAIAVQTESVRPALPYTRAIAHDAGWQWRIPLQHRTGNGIVYCSRYLDHDAALERLLGTVEGPTLTEPNRIRFVTGARRQQWHRNCVAIGLSGGFMEPLESTSIHLIQRAILRLLRMFPSAGISPRDVAEFNEQQHTDMLQIRDFLILHYKATNRRDSAFWRQCASMPVPDSLAHKIALFRETGRVFRKNDELFAENSWVQVMLGQGIVPESYHPIATKMRDDELVRLLGGLRDTTNATVDALPDHAAYVAHYCSTAPSASAGSPHLG

SEQ ID NO: 88628 - protein, 353 aa, Sphingomonas sp.
  misc_feature (1)..(353): tr|A0A520JHU3|A0A520JHU3_SPHSX Tryptophan halogenase (F ragment) OS=Sphingomonas sp. OX=28214 GN=EOP67_17435 PE =4 SV=1
LDAGKFAGFLQRHCCEKLGVRHVLADVQHATQAENGDILSVVTEQAGEIPGDLFIDCTGFAALLIGKTLGVPFKSCADTLFCDTALAVQLPHEDPDGPIASHTISTAQSSGWIWDIGLPTRRGVGHVFSSSHISDDAAEEELRAYLGPAGKDLPVRKLAIRAGHRETFWKNNCVAVGLAAGFLEPLEASAIVLIELSAKLIAEQMPVCREVMDIIAARFNATTHYRWGRIIDFLKLHYVLTKRTDSDFWRDNVRPESIPDRLSDLLTLWQYQPPWFHDEFDRVEEVFPAASYQYVLYGMGFQTQVERAAIAGDTRIADQARREAATQTARMRQGLPRHRDLIRKIVERGLPTI

SEQ ID NO: 88629 - protein, 504 aa, Sphingomonas sp.
  misc_feature (1)..(504): tr|A0A520DDC3|A0A520DDC3_SPHSX Tryptophan 7-halogenase OS=Sphingomonas sp. OX=28214 GN=EOP65_09820 PE=4 SV=1
MRGRGSVQAEQRIRVVIVGGGTAGWMTAAALATLAPGAAEVALVESQEIGIVGVGEATLPHLRAFVTRLGIDEAAFMAATHATFKLGIEFRDFGAIGDSYIHPFGSYGRPLDGVGFHHYWLRRHHAGATAAIGDYSTAVVAAAAQRFTRPGSDPHDLASAFGYAYQFDATRFAPFLRAHAEARGAVRTEGLVTSVERDAESGDVVAITLADGRRIEGDLFIDCSGFRALLIGGAMDEAWEDWSHWLPCDRAVAAPCASPDGGIEPYTRATAMAAGWRWRIPLTHRIGNGYVYSSAHLSEGAATDALVDALESPPLAEPRHLRFRAGRRRRSWVGNVLSIGLASGFLEPLESTSIYLVQMAITQLVEHFPAARVTDADRDGFNALVDAEYDRLRDFLILHYHATTRDDSPFWDHVRTMTIPDSLAEKMALWRQTAQVSRYSHGLFLEPSWVAVYLGQNVVPDGWDPRADLPDGAALDRALAALRGGIAAAVATMPDHAAYLRAAA

SEQ ID NO: 88630 - protein, 495 aa, Sphingomonas sp.
  misc_feature (1)..(495): tr|A0A520JGQ2|A0A520JGQ2_SPHSX Tryptophan 7-halogenase OS=Sphingomonas sp. OX=28214 GN=EOP67_19495 PE=4 SV=1
MTDALRSVTIVGGGTAGWMAAVAFGRLLGPAGTRVTLIESDDIATVGVGEATIPPIRTFHAMLGIDEDAFLRATGGSYKLGIRFEGWTRPGESYVHPFGQIGTDIAGVPFAAQWLRARQAGAAKPLGAYSLEACAAEAGRFSRPIANGNSPLSRIGYAYHFDAGRYAAFLRTQAEAYGVVRHEGLVERVERGPAGIAAVHLADGSRIAGDLFLDCSGFRALLIEGAMEAGWTDWSEWLPCDRAVAVPSVADAAPLPLTRAIAERAGWRWRIPLQHRTGNGHVFSSRHMSEDEATATLLAGLHGEALAEPRVIRFATGHRNRFWSGNCIALGLSAGFMEPLESTSIHLVQSGLQHLLRMLPTGAPPAPALVERYNRIMTAQYTRIRDFLVAHYHLNARAEPFWRDRAAAAIPEGLAEKLALFRAGGRIFREADELFNETSWLAVLTGQNAPVSGYDPICDGIPIETAANRLAQIERVVATSLTHMPSHAHALARLA

SEQ ID NO: 88631 - protein, 83 aa, Sphingomonas sp.
  misc_feature (1)..(83): tr|A0A520JL07|A0A520JL07_SPHSX Tryptophan 7-halogenase (Fragment) OS=Sphingomonas sp. OX=28214 GN=EOP67_11520 PE=4 SV=1
MPSPSPAVLGAADKFVHPSEEPNAPLSGFGYGLRLDPPRYRDLLRALARHLGIVPTPGIFAAVERAADGSAAALVLADGRRIV

SEQ ID NO: 88632 - protein, 181 aa, Sphingomonas sp.
  misc_feature (1)..(181): tr|A0A520J848|A0A520J848_SPHSX Tryptophan halogenase (F ragment) OS=Sphingomonas sp. OX=28214 GN=EOP67_35395 PE =4 SV=1
CIAIGLSGGFMEPLESTSIHLIQRAVLRLLRLFPAGAVSPRDVAEFNDQQHTDMLQIRDFLILHYKATNRRDSAFWRQCAAMPIPASLEQKIELFRETGRVFRKNEELFAENSWVQVMLGQGIVPRSYHPIATKLRDDELARLLGGLRDGTNATVAGLPEHADYVARYCGAAPARPSTVVA

SEQ ID NO: 88633 - protein, 505 aa, Sphingomonas sp.
  misc_feature (1)..(505): tr|A0A525HFB4|A0A525HFB4_SPHSX Tryptophan 7-halogenase OS=Sphingomonas sp. OX=28214 GN=E7773_12420 PE=4 SV=1
MSKRAPLEIVIAGGGTAGWTAAATLARFLGNYATVALVESDAIGTVGVGEATIPQIHNLIVGLGLDQAEFLRDTNASFKLGIEFTDWVRPGHKYFHSFGQVGRGVGLIPFRQLWLRARELGQAGDYGDYSNNVAAARLERFAIADGRDGAAPDLAYAYHFDAHLFAQMLRRYAEDLGVNRVEGMIERVERDPESGDIRALRLDRDRAVAGSFFIDCTGFRSLLLGNTLGVPFVDWRRWLPCDTALAVPSENVPAMRPYTQSGARPAGWQWRIPLQHRVGNGHVFCSEFMGVDEASEILLANVEGKALADPRPIRFVSGHREQFWSHNCVALGLAAGFMEPLESTSIHLVQSGIGRLLNVLAGDLTDTTAARDTFNKLSTIEWERIRDFIVLHYVANERVGEPFWDHCRAMELPATLAEKIDLFREAGLFVREEDELFLDDSWGQVMIGQGIMPRGWSPLADNVPAQDIGPFLQAIAKSCRVKAEALPDHRAFIATMTGRALEQFA

SEQ ID NO: 88634 - protein, 501 aa, Cellvibrio sp.
  misc_feature (1)..(501): tr|A0A5J6PGN6|A0A5J6PGN6_9GAMM Tryptophan 7-halogenase OS=Cellvibrio sp. KY-GH-1 OX=2303332 GN=D0C16_20810 PE= 4 SV=1
MREVNSIIIVGGGTAGWMTAASLKQHFKQRIDITLIESSEIGTIGVGEATIPTIRQFYQQLGLSDLDVIRATGATCKLGIQFSDWHKPGSQFIHPFGGYGQSLRGTDFHHYWLKLQQKKRVGRLGDYSLGAVLAQHNKFTFPAQKPPSELSVFDWALHFDAALFAGLMRKHAEANGVRRIDAKITKVNRRADDGFIESLQLGYGASFSADLFIDCSGFKGILIEESLNTGYEHWHHWLLCDRAFAVQSKSVAAPNSYTNVVARPAGWQWQIPLQHRDGNGHVYASQFIRDELARDLLIKNVAGELLHEPRKIMFMPGRRKRAWNNNCIAIGLAAGFLEPLESTSIALIQTGIEKIRHLLAVGKYNDSIVREFNETTALEYERVRDFIILHYKLNARDDTEFWRHCRAMDIPDSLQHKMELFKSSGHVVNYRWEMFGLPSWLAIFEGFDYLPHAYDMQVDQLDENMLAANLERMRESLRATVADTPDHGDFIAQHCAVPEVA

SEQ ID NO: 88635 - protein, 518 aa, Cellvibrio sp.
  misc_feature (1)..(518): tr|A0A5J6NUD5|A0A5J6NUD5_9GAMM Tryptophan 7-halogenase OS=Cellvibrio sp. KY-YJ-3 OX=454662 GN=D0B88_05690 PE=4 SV=1
MNNKIASVVIVGGGTAGWLTAGRIAAQHRTQTGSTISVTLVESPTIPIIGVGEGTWPTMRSTLMKLGISETDFIRECDASFKQGAKFARWVTGTPDDFYYHPLMLPQGFGKTNMAAHWQALRNEQQLQESFSAATCFQEAICELGLAPKMITTPEFNSVANYAYHLNAGKFSTFLQKHCTEKLGVLHVLADVVSINSADNGDIRSVTTAQAGEISGDLFVDCTGFQSLLLGQHLQVPFVDCSDVLFIDNALAVQIPYDSDDAPIASHTISTAQDAGWIWDIGLIHRRGVGHVYSSRHTSEDQATAKLAAYIGPAFNNASLRKIPLPCGHRDIFWKNNCVAVGLSAGFLEPLEASALVLVELSASMIAEQLPACRALMDITAKRFNETFRYRWDRIIDFLKLHYILSKRTDNAFWIDNRDPATIPASLQELMQLWRYQPPGDHDFTSNNEVFPAASYQYVLYGMGFETCYDYSEHLLRDNQFAQEQFMKNKKTIEQVTRSLPSNRELLQKIHLHGLQTL

SEQ ID NO: 88636 - protein, 492 aa, Cellvibrio sp.
  misc_feature (1)..(492): tr|A0A5J6PK51|A0A5J6PK51_9GAMM Tryptophan 7-halogenase OS=Cellvibrio sp. KY-GH-1 OX=2303332 GN=D0C16_18210 PE= 4 SV=1
MPDKKMKIVIAGGGTAGWITAAALSNQMGELLDITLVESQDIGTIGVGEATIPPMRTFHRLLGINEQEFMRATNATFKLGIQFENWKTIGDKYFHSFGVTGKQTLITDFIHFWLRGRELGIAQEFGDYCLEFKAALLERFSTNSEARMNYAFHLDAGRYASFLRARSEARGVKRVEGKIAKVNLNSDSGFIASLDLESGQNIEGDLFIDCTGMRALLIEQALHTGYEDWDKWLPCNRAIAIQTESTGPALPYTRSVAHHAGWRWKIPLQHRVGNGVVFSAEHMSEEEAKQLLFASVDGKVLTEPNVIKFRTGRRKKGWNKNCIAVGLSAGFLEPLESTSIHMIMTAVTRLLQLFPQGGVSQALVDEYNMQAESEAARIRDFIILHYKATERDDSAFWRYCRDMEVPEELAHRMKLFEEHAKSFQVEGELFRLDSWTQVMLGQGIIPTSYHPIVKLMSAKELHHFLTTIAADVDKNIAMMPYHNDFVNKYCTQ

SEQ ID NO: 88637 - protein, 501 aa, Cellvibrio sp.
  misc_feature (1)..(501): tr|A0A5J6NT71|A0A5J6NT71_9GAMM Tryptophan 7-halogenase OS=Cellvibrio sp. KY-YJ-3 OX=454662 GN=D0B88_03075 PE=4 SV=1
MKNIVIVGGGTAGWMSALVMAREWIQQGVSIRVIESPDIGIIGVGEGSTPALKLFFDRLNIAESEWMPACNATYKCGIRFDGWSTHAGFESYFHPFSAALDRQTLPMFMHNAQMRLRGADVYAQPDRFFIAARLAQQCLAPVAPEHFPFDVHYGYHFDSTLLGQFLRKKALALGVIHESAHVVAVQQRENGDIASVQSADQRIIAADFFVDCTGFSSLLLQQTLQVPFISYANNLLNNAAVAMPSTIGEKIPSQTLATAMSCGWAWQIPLTNRYGNGYVYSADFCSADQAETELRAHLGLLDADVPVRHLKMKIGRVEQHWAHNCLAVGLAQGFIEPLEATALFLVQQTVAIFAEYFARGEFTNRLQAEFNQRMNNHFDGVRDYIVTHYKTSSRRDTDYWCANTANQQDVSPVMLELYRSWYAGKDLAAEINRLQLGNYYPAPSWYSIFTGMGIVPKGEQLRRATAEEACFDIAAVDEFLRRCSLNFNDHRALLMRWQLSG

SEQ ID NO: 88638 - protein, 504 aa, Cellvibrio sp.
  misc_feature (1)..(504): tr|A0A5J6NXW2|A0A5J6NXW2_9GAMM Tryptophan 7-halogenase OS=Cellvibrio sp. KY-YJ-3 OX=454662 GN=D0B88_04890 PE=4 SV=1
MNTAAQNTGSQQPVKRVVIVGGGTAGWMAAAALAKKFGDLFSIQLVESDEIGTVGVGEATIPPMRVFHKLLGIDEQEFMRATSATFKLGIRFENWGRDGDNYIHSFGKTGKETWLGDFHHFWLRARELGLPFEFSDFCLELQAAKANKFITGNNVDINYAYHLDASRYAIFLRALSEKNGAQRIEGKIEQVVQDPHSGFVQAVRLQSGQVIEGDFFIDCSGFIGLLIEKTLHTGYDDWSHWLPCDSAQAVQTEAVGPPPAYTRSMAHASGWQWRIPLQHRVGNGLVYCSRYMNDEQARAHLLNNLEGKTLTEPRVIKFRTGRRRKSWNKNVIALGLASGFLEPLESTSIHLVMMGITRFMRFFPFNGIEPTLVQEFNEQSREEVEKIRDFIILHYKTTERDDSPFWRQCKNMDIPDTLAHRMELFKKTGHAYQADGELFRIDSWTQVMLGQRLMPEHYHHIAQLMSERELQHFFSGMKQNILQSVEKMPSHQAFIAQYCAANSA

SEQ ID NO: 88639 - protein, 484 aa, Terrabacteria group
  misc_feature (1)..(484): tr|A0A537K664|A0A537K664_9BACT Tryptophan 7-halogenase OS=Terrabacteria group bacterium ANGP1 OX=2569760 GN=E6 H00_04400 PE=4 SV=1
MTAAALTKSFGKLLQVTLVESEEIGIIGVGESTVPHLRDFNRLLEIDEADFVRRTKGTFKLGIQFRDWRRLGDSYVHGFGTIGRSLGLLDFHQYWLKARKLGLAKDIGHYSINTLAAPQGRFLVPPSDAPPNTPLADIVYAYQFDAGLYARYLRDYAEGRGARRIEGKIVEVKQNGESGFVESVRLESGATVAGDLFIDCSGFRALLIGGTLRSGFQDWTHWLPLDRAIAVPCEKVEPPTPYTRVTAREAGWQWRIPLQHRTGNGHVYSSRFVSDDEAMAVLLKNLDGKPLADATKPIRFAAGKRDKLWHKNVVAIGLAGGFLEPLESTAIFLIQSGIFRLVQLFPRRDFDPTLEQTYNAQAQFEYERIRDFLILHYCATEREDSELWRYCRSMKIPDSLREYIRLFADAGRFFRNGTELFAVTSWVQVMLGQGIRPRSYHPAADWVTDSDLRSFVESVEKLIARCVSIMPSHEDFIARHCAAV

SEQ ID NO: 88640 - protein, 115 aa, Terrabacteria group
  misc_feature (1)..(115): tr|A0A537JSX5|A0A537JSX5_9BACT Tryptophan 7-halogenase (Fragment) OS=Terrabacteria group bacterium ANGP1 OX=25 69760 GN=E6H00_17820 PE=4 SV=1
MTTATLFNYSYSPTSGRNPHPAPVPVRRIVIVGGGTAGWMTALILARSLIARGVEITLLESPTVGIIGVGEGSTPWLRGFFDSLGLEESEWMPACHATYKCGIRFDGWSTKPGFG

SEQ ID NO: 88641 - protein, 519 aa, Cellvibrio sp.
  misc_feature (1)..(519): tr|A0A5J6P9I2|A0A5J6P9I2_9GAMM Tryptophan 7-halogenase OS=Cellvibrio sp. KY-GH-1 OX=2303332 GN=D0C16_15215 PE= 4 SV=1
MNNPIKKIMIVGGGSAGWLTAGVIAAEHLVDPDNGLELVLVESPDVPTIGVGEGTWPSMRSTLKKIGVSETEFFRECDASFKQGSKFVDWLKPAGGAYYHPFSLPDGGNDFNLAEQWLAHRDQVNFSDAVCPIRFISDRNLAPKLITSPEYGGASNYGYHLDAGKFSNFLKKHCTEKLGVTYIQDHVIKINSAENGDIASISTKMNGDLVADLFIDCTGFASLLLGEHYQIPLNEERRVLFNDSALAVQIPYGETESPIQSCTVSTAQDCGWIWDIGLPTRRGIGHVFSSAHTSDEQVLKNLQDYLEPAIGKAAAEKIMPRKLTFNPGYRKVLWHKNCVGVGIAAGFIEPLEATALVLIELSAQMIAEQLPATRAVMDTVAKRFNQQFFDHWQRIIEFLKLHYVLSERRDTDYWRDHLADSTQPDGLRELLDLWRYHVPWKHDIRGDEMFPWASYQYVLYGMGFDTQISSVAKRAAAANSEKAGELFNANMKKTQSFINNLPTNRALLNKVREFGFQKI

SEQ ID NO: 88642 - protein, 471 aa, Unknown
  misc_feature (1)..(471): tr|A1XNE8|A1XNE8_9PROT Tryptophan halogenase OS=proteob acterium AI21 OX=380364 PE=4 SV=1
MRCHFLSIRSKFINWLDKKKHSSNAYHHLFSNPSVRGLDLTSLWLQQQGDYASYVSPQAAVVAANLAPKSITTAEYQCTVPYAYHFDARKFAKLLHANATGSFRVQYMQADVTDIRTDEEGFITHLVTAQQGELAFDFVIDCTGFQASLLGDKLKIPFQSCADQLFTDTALAVQVPYSQEPELPPYTLASAHQAGWVWDIAFDQPARVGFVYSSAHMHEDVAYQKLERYVGKTQLAGLNVRKIPMRVGRREKFWHKNCVAIGLSQGFVEPLEATAILLADFSAELLSQCFPAHRGEMSLVAERFNQRMLHAWDRVLDFIKLHYCISDRTDSDFWHDNRAVSSIPESLQQKLELWKYHAPSREDFFSKFEVFDLDNYLYVLYGMKYPTRKPQLSSSYKTRAEMLAKQVQQQAESIVSELIPHQELLAKIKQYGLQKGISARGKSHRFIINQVVLTASKNFFLSALAGYGNLQ

SEQ ID NO: 88643 - protein, 515 aa, Rhodanobacter sp.
  misc_feature (1)..(515): tr|A0A5A7VYE4|A0A5A7VYE4_9GAMM Tryptophan 7-halogenase OS=Rhodanobacter sp. T12-5 OX=2024611 GN=CIW53_03260 PE =4 SV=1
MNDPRIRHVVIVGGGTAGWMTAALLSQALGSQVQIRLVESSEIGIVGVGEATIPQIRHVSKFLGIDEDELLKASRGTIKLAVQFNDWRRIGDTYLHAFSDVGLPLGLAGFQHYWLRDLQERTSDASAGAASRRGNSVPDLWAYSINAQAANLNRFARMDKVGDSPLTGIRYAYHFDAARFGQLLRRHAEQRGVVRTEGKVVDVALREIDGFIESIRLESGETVAGDLFIDCSGFRGLLIEGALKTGYDSWQHWLPCDRAVVIASEHGDTIRPYTQASAQKAGWQWRIPLQHLDSNGHVYCSRHVSDDEATATLLSHLEGPALDEPRQLRFHTGMRKNVWNRNCIAMGLASGFIEPLESTSIHLMQSAVGRLLTMFPDKNFDPSLVAEYNRQTRFEYERTRDFIALHYHATERDDTEFWRQCATMELPEGLAHRIELFRQSGHVFRDGEELFTPMGWLQVMIGQGIQPVRYHPLADGLSQVQLDGFLTDIRTLVERAVATMPEHAEFIARHFKADS

SEQ ID NO: 88644 - protein, 508 aa, Cellvibrio sp.
  misc_feature (1)..(508): tr|A0A5J6NUZ1|A0A5J6NUZ1_9GAMM Tryptophan 7-halogenase OS=Cellvibrio sp. KY-YJ-3 OX=454662 GN=D0B88_07020 PE=4 SV=1
MHSFINNQDNHIKRVIIVGGGTAGWMSAATLSRYLKNNRYEIILIESDDIGTVGVGEATIPQIQLFNKSLNIDEDDFIRKTHATFKLGIEFVNWGQKGDSYIHAFGSVGHDMESLPFYHYWLKLQKQGRSKDIGDYCLNTLASKKNKFMRSIDAGNSPLSNIAYAFHFDAGLYAKYLREYSEKLGVKRVEGKIVEVNLESSTGYIRAVTLASGEQVAGDLFIDCSGFQGLLIAQSLGVGYQNWSHWLPCDSAWAVPSQKLDPLPSYTRATAHSAGWQWRIPLQHRTGNGHVFSSKFMDEEEAKKILLKNIQGEKLAEPRLIKFVTGRRDKFWHKNCIAIGLASGFMEPLESTSIHLVQSALARIMAMFPHKKFNQDEIDSYNEQVGFEYEKIRDFLILHYKVTERNDSAFWNYCREMDIPPSLQQKINVFKANGHVFRFNNELFNEISWVEVMLGQRMTTEGYHPLVDVLPEEEFDRRMAQVKRVIDTAIDYMPSHAEYIEKTCKSTV

SEQ ID NO: 88645 - protein, 536 aa, Cellvibrio sp.
  misc_feature (1)..(536): tr|A0A5J6NT09|A0A5J6NT09_9GAMM Tryptophan 7-halogenase OS=Cellvibrio sp. KY-YJ-3 OX=454662 GN=D0B88_02155 PE=4 SV=1
MQQNKTQQDAMQQQGLQKKGLQKTVQSIVIVGGGTAGWMTAAALSHFLSAQHYHITLIESDQIGTVGVGEATVPHIRYFNQTLGIDENEFIRQTNATYKLGIEFIDWGKLGDAYIHPFGIYGRTINDVSFHHYWLKAKLAGDSRPIGDYSLAVQAALQSKFSYPSANPESLASKYSYAFHIDASRYAQFLRTYAEQKGITRREGKIQQVNQCTDSGCITSVILDDGSTIGGDLFVDCSGFRGLLIEKTLQVGYDDWSQWLPCDRAIAVPSEKMSPPLPYTKATAKAAGWQWRIPLQNRNGNGQVYCSHYVTEEQVAENLLASLDGKPLANLNHIRFTTGCRKKTWYKNCVAVGLSSGFLEPLESTSIYLIQMAITKLVEYFPRTQNDITLTEEFNRDMRLEYERVRDFLVLHYTATTRDDTEFWRYMRNMKKPASLDEKIALFVEQGHVMQYKKGMFLEPSWVAVYLGQGIVPTGYHPAVESLSKTELDSHMANLRAEINNYCTDMPPHSLAIEKHTNAMSNVWPPAALSLYEVFS

SEQ ID NO: 88646 - protein, 603 aa, Microcystis aeruginosa
  misc_feature (1)..(603): tr|A0A5D5BAV0|A0A5D5BAV0_MICAE Tryptophan halogenase OS =Microcystis aeruginosa KLA2 OX=2605423 GN=FXO09_21395 PE=4 SV=1
MKNMSNRPYDVIIMGAGLAGLCQARHLMLKIPNIRIAMIDPRPENRTEKDLKLGESTVEVATLFFGKDLGLYEYLIENHPPKYGLNFHWPKRNERTKTIDDYFHIWANRQPDLASTQLNRPKFERDLLKMNREMGADFYNGRVVDIDLTPNDQLHTVKVKLPNESIELQGKHLVDAAGRRFLIGKKTNNISFDSKDLYGVNTGSAWVRVQNVDRTIFHSGYDPTGASCSHYYATNHWFGKGHWLWMIPTDIETMELSIGVIHHHDYISSESLNSKEKFYEFLKANHNILYQLVTSAENIDFHYWPRLAHTSKTLYSPDNWYVIGDSACIFDAFYSLGSTMIVSAIDSITEIIRAKLAGEVNAAEKCQAYNQFNLTLINSINLFMHNHSRHLGDASIMSWRIYFENMIWFGILIPIFVGKWHLDLEFIPQFVQTFQTTLRSLVYEIHDQFDQLVDQKKNIGLMDCYRSDQLIWDYHTPKRYTHALENAQYEPKQTSVFTSMKKTFFYLTIWYLKLQWKSGGLSQVCHHRSLGTMAKLLTTSIYIGLGDIIYSLTWNHGSESQSIAEMRQAFQEYQYGDTLQPWIVEGVDTKSLEVEAEKVPLQV

SEQ ID NO: 88647 - protein, 495 aa, Cellvibrio sp.
  misc_feature (1)..(495): tr|A0A5J6NXM3|A0A5J6NXM3_9GAMM Tryptophan 7-halogenase OS=Cellvibrio sp. KY-YJ-3 OX=454662 GN=D0B88_04320 PE=4 SV=1
MDMSQKIKKVVIAGGGTSGWCTAVALSRQLGTLLDITLIESAEIGTVGVGEATFPTICSFHKIHGIDEQEFLSATLGSIKLGISFENWARKGDRYIHPFGSFGKASWIGDFYHYWLAAKARGYEGELEDTCFELQAAKAHKFSITENPKLNYAYHFDASLYAKFLRRLSEEKGVRRVEGKIVQVKQHADSGFIEYVVLESGACIEGDLFIDCTGFRGLLIEETLKAGYEKWGHWLRNDSAVALQTEFSGDIPPYTRAIAHDSGWQWKIPLQHRQGTGHVYSSAYISDEAARNTLLENLDGDIRAELRLLKFNTGRRKQAWVKNCVAIGLAGGFVEPLESTSIHLIQIGVSRLLQLFPFEGCNEHLIRRYNKMSHAEYENVRDFIILHYKATERDDTPYWRDCRDMTIPDSLAERIELFKQTGHVHHETNEVFGVTSWLQVMIGQRITPQGYSHFPHVISDEQIVAGLMSMKSKIAKTLEKIPSHADFLKSYCAVK

SEQ ID NO: 88648 - protein, 503 aa, Cellvibrio sp.
  misc_feature (1)..(503): tr|A0A5J6NW77|A0A5J6NW77_9GAMM Tryptophan 7-halogenase OS=Cellvibrio sp. KY-YJ-3 OX=454662 GN=D0B88_02145 PE=4 SV=1
MNDNAKRRIKKIIIVGGGTAGWMTAAAFSKVLGTSCYDIVLIESDDIGTVGVGEATIPLITSFNQILGLDESQFMKKTQATFKLGIEFVNWGNIGDRYIHPFGVYGKGIGSLAFYNFLLKQQKIKPDTDVGDYSINIQAARHNKFMRAPNLPNSPLADIRYAYHFDAGLYALYLRNYAEQQGAIRVQGEITNVSLDDDSGCITSVTLKDGQTHSADFFIDCSGFRGLLIEQALKTGYEDWSHLLLSDTAVTVPSEVIHPLPSFTRSTAHSAGWQWCIPLQHRTGNGHVFSSRFMSEDEATSLLLQHLPTPALAGPRTVKFKTGIRRKLWNKNCVAIGLSSGFIEPLESTSIHLIHSAIHKLLTFFPTGALSQVDIDKYNDVMRTDIEFIRDFILLHYKATSRTDSAFWNHCRTMDVPDGLRKKMELYIKSGRLYRDNNELFTEDSWFAVMEGQGVKVEDYHPLVDSVEQVKFDAMLGDIARAIRESTDVIPSHAEYIARYCKA

SEQ ID NO: 88649 - protein, 518 aa, Cellvibrio sp.
  misc_feature (1)..(518): tr|A0A5J6NXJ1|A0A5J6NXJ1_9GAMM Tryptophan 7-halogenase OS=Cellvibrio sp. KY-YJ-3 OX=454662 GN=D0B88_11510 PE=4 SV=1
MTNNLIQSVVIVGGGTAGWLTAGIIAAEHQHKIKQGELQITLCESPSIPIIGVGEGTWPTMRATLKKIGVSETAFIRECDVAFKQGSKFLRWKDGSEKDFYYHPFSVPQGQSSINLAEHWLNTNDPMSFSTAFHPQEAICEASLAPKTITTAEYDAIVNYGYHLNAGRFAEFLRKHCLTNLHVHHILAEVTEITQQENGHIQSLITDRAGIITGDLFVDCTGFTAMLLGETLGVEKISISDTLFTNCALATQIAYPYEDSPIASATLSSAQTAGWIWDIGLPTRRGVGHVFAKEYQSIDHATQQLIDYIHETGGDSSQISIREIHFNSGYRKEFWKHNCVAVGLSAGFLEPLEASALVMVELSALMIAEQLPKTTSAIPIIAKRFNERFSYRWERAVDFLKLHYLLSQRNDSPFWQDNRQPSTVPQDLSERLLLWQNTSPQHYDFDRTGEIFHALSYQYVLYGMGFKTNLAFSTPLETQKMATELVMQNNMITRQLLDILPTQRELLQKINLYGLSSI

SEQ ID NO: 88650 - protein, 507 aa, Cellvibrio sp.
  misc_feature (1)..(507): tr|A0A5J6P740|A0A5J6P740_9GAMM Tryptophan 7-halogenase OS=Cellvibrio sp. KY-GH-1 OX=2303332 GN=D0C16_10855 PE= 4 SV=1
MKIKRIAIVGGGTAGWLAANHLGVELSRDPDIEITLIESKDIPIIGVGEGTVPQIKATLKKFGIAEVDLLASCDATFKQGIKFSQWMDVKKHGEKHFYYHPFSSPFPSGYDVTNYWLNNKEDCDFSKLSEIYSIAESNRSPKQKSSPPYVGAVDYAYHFNAVKFAELLANNAREKFAVKHIYETIAQVTTSDDGSLSGFIYGDGRTQQFDFFVDCTGFASLLLGKTLGVPFLNKSDQILTDTALALQEPIAQTDEIQPYTSATAHAAGWIWDIPLTTRRGIGFVYSSEHMSESQAVEGFSAYLGRDLHSANLRKIPMQIGYRESFWQKNCVALGLAQGFVEPLEATSILVTDFAALQLARNFPVFAQDIAAVSDYCNKVVRYTWERVIDFVQLHYYISDRRDSRFWQESTENSMLSDVLRERLALWKIAAPKKSDFFSAFDIFGVENYLFVLYGMHYPTRAGVVGVKEVDRAKELINSVQEKSRHMSGALLSHRRWLTELQQALASR

SEQ ID NO: 88651 - protein, 517 aa, Cellvibrio sp.
  misc_feature (1)..(517): tr|A0A5J6NSG3|A0A5J6NSG3_9GAMM Tryptophan 7-halogenase OS=Cellvibrio sp. KY-YJ-3 OX=454662 GN=D0B88_00155 PE=4 SV=1
MSKSVLIVGGGTAGWICAAYMARMLAADTPGGVTITLVESDEIGILGVGEGTFPIIRKTMSRIGLDESALIREADATFKQGIRFNNWKKNPADDPQDTYFHPFQVASQHTDMDLLPYWLLGVAGDVPWAEACTVQERVVDAKLAPKLITHPNYNAPLNYAYHFDAGKLAQVVCRQAMAMGVKRLIDTIDDVKVDEQGIASVQGRTHGELKADLYIDCTGFRARLIGEALGSEFTSYKDQLFCNRAVAMQVPYDRPDAPIPSCTYTSAQDAGWIWDIGLHNRRGVGYVYASNYCSDDEALATLKRYIGPAADNLKHRKLAFEAGFRKTQWHKNCIGVGLSVGFIEPLEATGISFAEVAALMLCNLFPWSGDYERSAQQFNQAMTKRFEHVIDFIKLHYYLSERTDTAFWRDNRAPASASDYLKGKLEQWRHRPPSFLDIDASHDIFDENSWQYILYGMGFKTDISARAGALRFYDDAKREFESIRQQSNKAMTAVPSHRDLINEVVARGFRNASGGQR

SEQ ID NO: 88652 - protein, 502 aa, Cellvibrio sp.
  misc_feature (1)..(502): tr|A0A5J6PJ52|A0A5J6PJ52_9GAMM Tryptophan 7-halogenase OS=Cellvibrio sp. KY-GH-1 OX=2303332 GN=D0C16_18940 PE= 4 SV=1
MNSEQQKPKKILIVGGGTAGWMAANLMASRWRDIEVSLLESADIGIIGVGEGSTPHLKFFFDTVGLAESEWMPRCNATYKNGISFAGWSAIPGYESYFHPFPAQTDDMLTVPHFFSSINARMQGHDAVAHPDHYFLETYLTRENLGPIPNETFPFGVAYGYHFDATLLGQFLAETGVSRGVKRIIGTVTEVVLGPYGAIASLRLDDGSFIDSDVFIDCSGFKSLLMQGALKASYKSFSDNLFNNAAVVMPSEISAVIPPETKSTALSNGWAWKIPLTNRFGNGYVYSADYLTPDQAETELRRHLGLLDSDVDARHLQMKVGRVEKHWEQNCLAVGLSQGFIEPLEATALALSLETITRFMSFYERGEFTNEFADAFNKEINAKFDGVRDYIVCHYKVNQRRDTDYWRNNAANMHLSDSLSKILHFWWNSKDFAKDMYMNNLTGSYQPKSWACLLAGYGVFPALSQNSMNDQYASTQNMAQLADFIRRCGLNFKSHNEQLNIR

SEQ ID NO: 88653 - protein, 522 aa, Alteromonas sp.
  misc_feature (1)..(522): tr|A0A520WMP6|A0A520WMP6_ALTSX Tryptophan 7-halogenase OS=Alteromonas sp. OX=232 GN=EVA22_04455 PE=4 SV=1
MHQANSPLRRIVVVGGGAAGWLTASIIAVTHKHDDNISVTLVESPDVSILGVGEGTWPTMRSTLLKIGISEETFLAQCNASFKQGTSFHNWRSDTIEHQYYHPFSLPFRYFESDVAAWWQSYAAEQDFAHAVCSQAALCDHHLAPKQRQTPAYAGIANYGYHLDANKFAALLQKHATTVLGVQHIVDHVDDVVGSSSEPIAAIVGREHGNITGDLFIDCTGFAARLIGQHYGVPLTSCSNVLANDSAIAIQAPYIDSSVDIASTTHSTAQDSGWIWDIGLPSRKGVGYVYSSAHCSEDEARATLETYLKHDKKTADVDVSKARKITFSPGYRKTLWVENCVAIGTSAGFLEPLEASALVMIELSATHIAKQLPRTYKECQAAGRQFNQAFEKKWERIVDFLKLHYVLSEREASAYWRDMRNQESCSTQLQDWLTLWKSRSPISSDFELREELFPAASYLFVLYGMGFRSQYNDVYQANLHTPEQRQAYAKHVQSIQQQLSGLPTNRQFLNQVAQSQGLSMHY

SEQ ID NO: 88654 - protein, 487 aa, Terrabacteria group
  misc_feature (1)..(487): tr|A0A537K6A8|A0A537K6A8_9BACT Tryptophan 7-halogenase OS=Terrabacteria group bacterium ANGP1 OX=2569760 GN=E6 H00_04410 PE=4 SV=1
MAAAALAKVLERSCAIRLIESEEIGTVGVGEATVPHLKLYNTILEIDEAEFIREVRGTFKLGIQFVDWGRIGDRYIHGFGTIGHDYGLLPFHQYWLKQFLAGKAADIGAYSLNTAAAPLGKFMTSAQDVPPTSPLANITHAYHFDAGLYAAYLRRYAEARGVRRTEGKVVDVDLRGSDGFIEAVKLEDGERVSADLFIDCSGFRGLLIEQALHTGYENWTHWLPCDRAMAVPCENVGPPTPYTRSTARTAGWQWRIPLQHRTGNGYVYSSAYISDDAARETLMPNLDGRALAEPRILKFTTGKRRKFWNRNCVAIGLASGFMEPLESTSIYLIQSGVARLLNLMPDRSFSPVLIERYNAQAAFEFERIRDFLILHYFATERRDSPFWQYCANMSIPEQLADNIALFRDSGRFFRHAEEMFALTSWVQVMLGQHILPRNYHPAVDLIPEREVNELVSGVRNVIANCVQAMPTHEQFLARYVQAGAAAA

SEQ ID NO: 88655 - protein, 71 aa, Alteromonas sp.
  misc_feature (1)..(71): tr|A0A520WQQ8|A0A520WQQ8_ALTSX Tryptophan halogenase (F ragment) OS=Alteromonas sp. OX=232 GN=EVA22_00830 PE=4 SV=1
MTVSGLDSSKNQTPVKNVVIAGGGTAGWMAATALSRLLGKSINVTLVESKDIGIVGVGEATIPPIRTFHKL

SEQ ID NO: 88656 - protein, 369 aa, Citreicella sp.
  misc_feature (1)..(369): tr|D0D9Q3|D0D9Q3_9RHOB Tryptophan halogenase OS=Citreic ella sp. SE45 OX=501479 GN=CSE45_3262 PE=4 SV=1
MIADTTFESCDVAVLGGGPAGAACAIALARAGVGRVVLCESEEVRPFRLGETIPPDSRAILDRLGVLDAFLADEHMTCHGSCSSWGSDGLGYNDFMLRPYGHGWHIDRPRFEELLLENAAQAGAELWLGAQFAGTERIDGGHRLAFRGAPTLEARFVVDATGCSAAFARRQEAQRTGLDTLHCIAARFRKAAPGLSRLTWLEAVPEGWWYASRLPSDRLLVLFASDADVVRDHGFSDPETWLAALRRTRHIRALLEHVSDAHERPRAGAAPSFCLDRVAGDDWAALGDAASACDPVTARGLWKALSGALVLADAVQAALAGDTAPLDAYAGAVRQDFTTYLAMRRDLYGLETRWPDAPFWARRHASVTA

SEQ ID NO: 88657 - protein, 504 aa, Cellvibrio sp.
  misc_feature (1)..(504): tr|A0A5J6P0F3|A0A5J6P0F3_9GAMM Tryptophan 7-halogenase OS=Cellvibrio sp. KY-YJ-3 OX=454662 GN=D0B88_18630 PE=4 SV=1
MNNIIKKIVIAGGGTAGWMTAALLKKVLQQRVEIQLVESEEIGIIGVGEATIPPIQTFNSVLGLHEPEFLRETKATIKMAIRFDNWKQQGDSYYHTFGAPGTTIGFSAFQHYWLRAQKQGLNTSIWDYDLNYLCCEAGVFGKFDGKDPLYQVPYAYHFDSALYGRYLRKISEQAGVVRTEGKIREVRLNTDSGFVETLLMENGSEIQGDLFIDCSGMRGLLIQGALQTGYEDWSHWLPCNRALAVPSERFEKTLPYTRSIAHKAGWQWRIPLTHRNGNGLVYSSHHLSDDEATTILLSNLDSTALAEPKPIKFKTGRTLQQWNKNVIAVGLSSGFLEPLESTSIHLIQSAIVRLLKHFPNAGISQTQVDEYNRDSKHEYETVRDFIILHYHLNERDDSEFWRYLRNMRIPERLAHKIALFQETGAVMNDPGDIFLDSSWLQVMMGQGIMPRDYHPTADIPGAEQLQSMLARIASAKRQPLTQLPSHDEFLHQYAGVTRAGINRG

SEQ ID NO: 88658 - protein, 501 aa, Cellvibrio sp.
  misc_feature (1)..(501): tr|A0A5J6P0F8|A0A5J6P0F8_9GAMM Tryptophan 7-halogenase OS=Cellvibrio sp. KY-YJ-3 OX=454662 GN=D0B88_18680 PE=4 SV=1
MQNQVPKQIVIVGGGTAGWMAASILLHAWKTHQVEITLVESEDIGIIGVGEGSTPALRKFFSYLHIAEKEWMPACNATYKAGIYFDNWGEIPEYESYFHPFYTAWDQEGAHAFVAAANKQRQGLTTSPHPNSYFLAYHLAEANKAPLPTDPQLGNQVNYGYHFDSALLGKFLRDRAKQLGLTHLIDNVEQVTLTAEGDISSIQTRQHGSIGADFFIDCTGFASLLMGKTLLEPFLSFKENLFNDAAVTLPTAIDEEIVPATRSTALGYGWAWKIPLTNRYGNGYVYSRDFISPEQAEQELRNHLGDAAKDSPARHLTMRVGRIHNHWKKNCLAVGLSQGFIEPLEATALAIVQSTLENFVDCFDQPVSETTKENYNNYINELIDGIRDYIVTHYLLNTRTDTTYWRACREQAKPSTKLEALISCWDNQGDFMDLLFKQQRAKVYKPESWFCIFAGMGRFTHLRTTKANITPTNIELTLQEKLNNIGNLYFIDHKKRLNIHY

SEQ ID NO: 88659 - protein, 509 aa, Cellvibrio sp.
  misc_feature (1)..(509): tr|A0A5J6P0X5|A0A5J6P0X5_9GAMM Tryptophan 7-halogenase OS=Cellvibrio sp. KY-YJ-3 OX=454662 GN=D0B88_17740 PE=4 SV=1
MKIKRIAIVGGGTAGWMAANHLGVELSRDPEIQITLIESKDIPVIGVGEGTVPQIKATLKKFGISEIDLLTSCDATFKQGIKFAQWMDAKKSGTNNFYYHPFSSPFPLGFDVTNYWLHNKSICDFSRLSEIYTIAEQNRSPKQISSPPYVGAVDYAYHFNAAKFSDLLAKNARGKFAVKHCIETIAQVLLHDDGSIRALTYESGTTEEFDFYIDCSGFAALLIGETLGVSFLDKSSQILTDTALALQEPTADTDEILPYTLATAHKAGWIWDIPLTNRRGIGFVYGSNFMSEDEAVQQFSAYVGRDLQQANLRRVPMKIGYRESFWQKNCVALGLAQGFVEPLEATSILVTDFAAQLLARSFPQYQDDIPLLADYCNKVVSYTWERVMDFVQLHYFISDRRDSDFWIENTEKLSLSPLLQERLALWKLAPPKRSDFFSAFDIFGLENYLFVLYGMGYPTRPGRLGVAEAEKSAGLINEVQKKSKHSATSLLSHRVWLTELKKALVSQQR

SEQ ID NO: 88660 - protein, 509 aa, Cellvibrio sp.
  misc_feature (1)..(509): tr|A0A5J6PA47|A0A5J6PA47_9GAMM Tryptophan 7-halogenase OS=Cellvibrio sp. KY-GH-1 OX=2303332 GN=D0C16_14150 PE= 4 SV=1
MSAIQSLVVVGGGTAGWMAAAFFAKRFAGTPLNITLVESATIGTIGVGEATVPAMKVFLSDLGIDEREFMLNTQATFKLGIEFDGWNKPNESFFHPFAMFGAKIASIPFHHYWANLRTQQQAGPIDDYSLATQLARSNKFARPKENALDIARFNYAYHFDAGLFANYLSRFSQRQGVTRIEAQISHATRDATTGNISELVLESGEIISGDFFIDCSGFRGLLIEETLHTGYEHWNQWLPCDRAIALPSSSDEQIPSYTRALACSAGWQWRIPLQHRVGNGYVYSSQQISDEQALAELQKNITGTSLAEPKLIHFATGMRRKIWNHNVFALGLASGFLEPLESTSIYMVQTAINTLFTYFPQTQDCATIAQHANHTLAQHNQRLRDFIILHYYLNQRTGEPFWNECQNMTIPESLQARIEEFRYTANLRFDDLDFFQISSWLSLFSGFNLLPTHHHPKVAFFDKQHVIRELADMRSAIQRAVGDLPSHQHFLNPENATNTRRTAQHELPT

SEQ ID NO: 88661 - protein, 514 aa, Alphaproteobacteria bacterium
  misc_feature (1)..(514): tr|A0A537M920|A0A537M920_9PROT Tryptophan 7-halogenase OS=Alphaproteobacteria bacterium OX=1913988 GN=E6G94_03 175 PE=4 SV=1
MTEPAPLEIVIVGGGTAGWMAAAALGSLLPPGRCNIRLIESEEIGTVGVGEATLPHMKSFNDAIGVDEAEMMRRTSGTFKLGIDFVDWGFKGSSYVHPFGIHGNPAAGNSFHHHWLRALQAGEAAPIEDYSFAIVASRRNRFAFPAEDKTAIESTFSYAYHFDASLYAVFLREFSEARGVKRTEGKVLEVVCDPESGDVASLRLESGEIVAGDFFVDCSGFRSLILGQTLGVAFEEWTKWLPCDRAFAVPTQRQGELTPYTRSTCREAGWQWRIPLQHRTGNGYVFSSGFIGEDEAAASLMANLDAPALAEPRMLRFKAGRRANSWERNCLALGLASGFLEPLESTSIYLVQIAIMNLIALLPDRKVDPALREEYNRRQDLEYERIRDFLILHYHATSRDDSELWRYCRAMEVPDSLKAKIEMFRHRGYIEHYKDGLFTPPSWLSVYLGQGIAPEGYHPMAEGMPIERLTADLRTLREEISRGVDAMPAHGEFVERYCPHPAAPSEMSASEARL

SEQ ID NO: 88662 - protein, 506 aa, Gammaproteobacteria bacterium
  misc_feature (1)..(506): tr|A0A2E1ZNU2|A0A2E1ZNU2_9GAMM Tryptophan halogenase OS =Gammaproteobacteria bacterium OX=1913989 GN=CMQ08_1089 5 PE=4 SV=1
  misc_feature (96)..(96): Xaa can be any naturally occurring amino acid
  misc_feature (277)..(277): Xaa can be any naturally occurring amino acid
  misc_feature (350)..(350): Xaa can be any naturally occurring amino acid
MDDSNLKNIVVLGGGTAGWMTASLLQKQWQHLGIKITVVESPDIGIIGVGEGSTPLLKVFFDSLEISESEWMPECNATYKNGISFNNWSTVSGYEXYFHPFPCSLDFATFGLLYKYAALRRKGLDVLAHPNRFSLMAGLTEKKLAPIPSENFPFHFQYGYHFDSVLIGNFLRRRAKEIGVEHIEATVQDVEQNSNGDIKSLKLNNNQTLSGDFFIDCSGFASVLLQKTLKVPFLNFAENLFNDSAIAMPTEIEPNIPSETVSTALTNGWAWKIPLTXRFGNGYVYSSKYCSPDEAETELRAHLGVLDSDIEARHLKMKVGRAEESWRNNCVAVGLSQGFIEPLEATALQXVYATVDEFAKAFEQGEFTPQYRQEFNNRMNKNFEGIRDYIVLHYKTNSRSDSQYWIDNRENQNLSNNLKEMLNCWYGVEDIEAALTRLDIGTYYSQRSWACLLAGVGTFPREENLISADLENAQSLQDDLKYVDNFIEGCSLNFEPHENMLTSKTP

SEQ ID NO: 88663 - protein, 110 aa, Mesorhizobium sp.
  misc_feature (1)..(110): tr|A0A4R9Y933|A0A4R9Y933_9RHIZ Tryptophan halogenase (F ragment) OS=Mesorhizobium sp. M1C.F.Ca.ET.212.01.1.1 OX =2500527 GN=EN855_035195 PE=4 SV=1
SVQALVLEDGQVIEGDLFIDCTGFRGLVIEQTLGTGYEDWHEWLPCDRAVAVQTEAVAPPVPYTRAIAHEAGWRWHIALQHRVGCGLVYSSRHLSDDEATAKLLRDVGAP

SEQ ID NO: 88664 - protein, 493 aa, Gammaproteobacteria bacterium
  misc_feature (1)..(493): tr|A0A349X1R3|A0A349X1R3_9GAMM Tryptophan halogenase OS =Gammaproteobacteria bacterium OX=1913989 GN=DCW52_0112 5 PE=4 SV=1
MNKRINKVVIVGGGTAGWMAAASLAKLLGKTINITLIESDDIPTVGVGEATIPTLVTHHELLGINEQEFMARVNATFKLGISFENWRDVDEDYIHSFGFTGRDCWAAGFQHFWLKGRKLGIAKEFGDYCSELVAAKEEKFAVMPKLGLNYAYHMDAGLYAQFLREIAEKHGAIRQEGKVVEVGLNGESGYIENVKLESGKVIEGDLFIDCSGFQGLLIEKTLHSGYDDWSHWLPCDSAVAMQTEAVAEPIPYTRSIARDAGWQWRIPLQSRVGNGMVFCSRYKSDDDAIQMLTDNVEGKPLNDPRVIKFRTGTRRKHWNKNCIAMGLSSGFIEPLESTSIHFIQRSITRLMQMFPFDGIRQPDVEEFNTQMDNEMTHTRDFIILHYHVTNRTDTPFWRFCKSMDIPDSLKHRIELFKQTGRVFKNPTELFGENSWTQVMLGQGLMPEQYHPIVNMMSDEELKVFLDTIEERVAKQLQNMPKHNDFIQHYCRSA

SEQ ID NO: 88665 - protein, 503 aa, Sphingomonas sp.
  misc_feature (1)..(503): tr|A0A4R2PGQ4|A0A4R2PGQ4_9SPHN Flavin-dependent dehydro genase OS=Sphingomonas sp. BK235 OX=2512131 GN=EV292_10 657 PE=4 SV=1
MLIVGGGTAGWLTAAYLARALGGAVSITLLEAPELGTIGVGEGTFPTIRETLRFLGIDEAAFVRDAGATFKQGVRFAEWQPPVAGVPHSYFHPFDPPYQGAGLVPHWLRQDARARAPFAEAVSIQQRVAAARRAPKQPGEGDFDGPLHYAFHFDAARLAALLATRARALGVAHRSARLRAVVGAADGGIARVETDIGALTADLYVDCTGFRAEMIGEALRSPFHSVADQLFTDRALTCKIPYDSPDTPLESATVATAHAAGWIWDIGLAGARGIGCVYASGYMGDDAAAETLGRYLGRDPAAIAPRRIAFTPGWRERSWIGNCVAVGLASGFLEPLESTGVVLIEAAAAMIAELLPSDGPVDAPAARFNALLAARYENIAAFLKLHYCLSARPEPFWRDHRDPATIPPRLRDWLDQWRHRPPSRFDFQLESETFAHFNYQYILYGMGYATAGGSADAAATERGERLLARVRTFGERAARELPPHRALVEQLAAAPISPARTGS

SEQ ID NO: 88666 - protein, 499 aa, Rheinheimera sp.
  misc_feature (1)..(499): tr|A0A0U4UYW3|A0A0U4UYW3_9GAMM Tryptophan halogenase OS =Rheinheimera sp. F8 OX=1763998 GN=ATY27_07595 PE=4 SV= 1
MQANKPVREVVILGGGTAGWISASLLVKLLGKSIRITLVESDEIGIVGVGEATIPPIMTFNAALGIDEKAFVRATKGTIKLGIEFENWRQIGDRYMHAFGSIGKEFPSCNFHHFWVRSQKLGMPYDFWDFSLAYQAAVKHKFGHLAKIEGVNLPGLSYAYHFDAGLYAQFLRQFSENLGVRRIEGKVGQVLRHANSGDVATLVLQNGEQVHGDLFIDCSGLHALLIEKTLNTGYEDWSHWLPADSALAVPCASVEPITPYTKSIAHAKGWQWRIPLQHRIGNGFVYSSKYCSDEEAKATLLANLDGEPLAEPRKISFKTGRRRKQWSHNVVSIGLSSGFLEPLESTSIHLIQSGVLRLLKFFPNNGISPAMRDEFNRLSQIEFEQIRDFIILHYKLNERTDSQYWLDCARMDVPETLRRKMAMFRDTGMVQREQDELFSEIAWQQVMIGQGAIPQDYHPLVEALNETQLRDLMDNLKAVMQVTVNRLPPHQDFIDYCVR

SEQ ID NO: 88667 - protein, 520 aa, Gammaproteobacteria bacterium
  misc_feature (1)..(520): tr|A0A3B9NSH5|A0A3B9NSH5_9GAMM Tryptophan halogenase OS =Gammaproteobacteria bacterium OX=1913989 GN=DCG72_1046 0 PE=4 SV=1
MSSAIRNIVIIGGGSAGWLTAGIIASTYAPNSQDKGLRVTLIESPDIKTIGVGEGTWPSMRRTLKRIGLSETDFIRFCDASFKQGTAFYGWMSDPSACYTHPFMPPNNFDALNPVDGYLAAHASARFDDTVCPQVALFANHLAPKQITTPEYAGQANYGYHLDAGKFATMLQRHCTEQLGVHQIVANVTEVLCRPNGDIDRLKTDRTDDLEGDLFIDCSGSQGLLINGLYEVGFIGRDDVLFNNRAIAAQTPYLDETAPIASCTHSTAQSAGWIWDIGLPTRRGTGYVYSAQHQSDAAAEQTLRQYIERTSTSEIAESVQTLTIVFEPGHRERFWHRNCVALGMAAGFIEPLEASALVLVELGATMIADELPADRSDMDSVGKRYNDRFRYRWDQIIDFLKLHYVLSTRTEAYWADHRNPSSIPESLQSLLTTWAYRAPWHHEGYHKDEMFPSASYQYVLYGMGFRPSRALPKHRHVEQDLAAAHHTFAQVTKQANQFRNQMPSNRDLLETLKQHRFQTV

SEQ ID NO: 88668 - protein, 508 aa, Novosphingobium fuchskuhlense
  misc_feature (1)..(508): tr|A0A117UTY0|A0A117UTY0_9SPHN Tryptophan halogenase OS =Novosphingobium fuchskuhlense OX=1117702 GN=AQZ52_1322 5 PE=4 SV=1
MSTAVQHIVIVGGGTAGWLSACVLAARLPDKRITLVEAPDIPTIGVGEGTWPTMRETLATIGIPESEFLATCDAAFKQGSRFDGWRDGSAADSYLHPFSAPPAAEMRALASAWQTGGASGPFAAAITPQHAVCAAHLAPRQRSMPDYAGALNYGYHLDAGKFAALLMRHATQRLGVTRIAAQVGGVTCAANGDIAALVLQDGEQLPGDLFLDCSGQAGILIAGQCGADWVDRSDVSFNDRALAVQVPVEPGSPIAAQTIGTAHEAGWLWDIGLPARRGIGCVYASRFLSDERADEILRAYVAARVPGTDVAALTPRKLTFRTGHRDRFWIGNCLAVGLSAGFIEPLEASAIVLIELSLKALVENVPQTRAAMDIHAARFNEVFRYRWDRIVEFLKLHYVLSARTEPYWQAQRAAETIPARLAECLTLWRDQSPSAWDFPRVDEMFPAASQQYVLHGMGFPVPLSGEDPSPARLAEVAAKARALAAALPTARDYLDRLAAQSAAARIPA

SEQ ID NO: 88669 - protein, 505 aa, Sphingomonas sp.
  misc_feature (1)..(505): tr|A0A0Q4CU87|A0A0Q4CU87_9SPHN Tryptophan halogenase OS =Sphingomonas sp. Leaf9 OX=1735674 GN=ASE58_01720 PE=4 SV=1
MTDRRIASVCIVGGGTAGWMTAAALANRLGGLNVAVRLIESEEIGTVGVGEATLPHIRAFNATLGIAEADLMRATEATYKLGIEFCDWGRLGDRYIHPFGNYGPSDDAIPFYHQWLRLRSMGDTSRLDDYSYPIVAAEQNRFRHPASEPGRVESSFGYAYQFDASLYAAFLRRYAEARGVERVEGKVVDVALDAESGFVRHVTLADGRVVGAELFIDCSGFRGLLIEGALQSGYDDWSRWLPCNRAVAVPTVSHGPLGPYTRATARTAGWQWRIPLQHRVGNGHVYCSDFISDDEAQQQLVDNLDAPMQAEPRRLRFTTGRRRDFWKRNVVAIGLAGGFLEPLESTSIHLIQDGITELLGLFPDQEFAAADIDEYNRRMALHYERVRDFLLLHYVATERDDSPMWRHFRALTLPDSLQHKIDTWRARGYIVPYQFGLFLPPSWVAVMLGQGLVPDAFDPRVAGIEGGALAKRAAALRAEVAGAVRATPDHAEYIRQSPAAAGLAA

SEQ ID NO: 88670 - protein, 489 aa, Sphingomonas sp.
  misc_feature (1)..(489): tr|A0A0Q4CST9|A0A0Q4CST9_9SPHN Tryptophan halogenase OS =Sphingomonas sp. Leaf9 OX=1735674 GN=ASE58_01310 PE=4 SV=1
MMRIVIAGGGTAGWLAAALLTRQLAGLVEVTLVESEAIGTVGVGEATIPTIRSFHALLGLDEREFMAATGASFKLGIAFEHWARAGDRYLHSFGEVGRSTWMGDFQHFWLEAQRQGAAADIGAYCLEHEAAEAGRFLGGPDTPLNYAYHFDAGRYAAYLRGRSEAQGLTRIEGKIAQVERDGDSGDIAALVLDDGQRVAGDLFLDCTGFHALLIEQALGVGFEDWGHWLPTDRALAVQTRATGPALPYTRAIAHDAGWRWQIPLQHRIGNGLVYSSRHLGDDAARDRLMASVEGQPLTEPRLIRFRTGRRLAMWERNCVALSLSSGFVEPLESTSLHLVMIALTRLVQLLPFGHPGAAARTRFNDQSRREIEAVRDFVLLHYHLNQRPEPFWRERREIAPPDSLNERIALFAEGAHTYQSADDLFRTGSWTQVMLGQRLTPASWHPLARAMPPGELGTALDGLRSNIAATVARLPTHQQFLDQYCRSGD

SEQ ID NO: 88671 - protein, 503 aa, Stenotrophomonas sp.
  misc_feature (1)..(503): tr|A0A4Q7RR82|A0A4Q7RR82_9GAMM Tryptophan halogenase OS =Stenotrophomonas sp. BK441 OX=2512175 GN=EV592_1847 PE =4 SV=1
MTPDAHALPDTPVRRVVIAGGGTAGWMAAAAISKILGRQLDITLVESEQIGTVGVGEATIPPLVTFHRLMEIDEREFMSATQGAIKLGILFENWLEIGHRYFHSFGTTGRDHWTAGFQHFWMRGRERGLASEYADYNVESVAAREKRFAHLPKMGMNYAYHFDASLYGRFMRAIAERHGTRRVEGKIAEVLLHEDTGCIRSLRLESGDEIAGDLFIDCTGFRALLIDKALGVPFEDWSHWLFNDSAQAVQTAAVEEAAPYTSAIAEEAGWQWRIPLQRRVGNGIVYSSRHMDDARAREIFEGSLRGEQTSRYLQIRFRPGRRTRSWHRNCIALGLSGSFIEPLESTTIHLIQRGITRLMQCFPKVITAVDIEEYNRQMGEELVHVRDFVVLHYALTRRRDTDYWRACSEMTLPPSLQHRIDLFRETGTVFHQPNELFAENSWIQVMMGQGNLPRQHHPTADLMGDEELARFLNAARDHAARTVAALPSHQAYLDRWCPTAPTP

SEQ ID NO: 88672 - protein, 502 aa, Sphingomonas sp.
  misc_feature (1)..(502): tr|A0A0Q4CQJ4|A0A0Q4CQJ4_9SPHN Tryptophan halogenase OS =Sphingomonas sp. Leaf9 OX=1735674 GN=ASE58_07850 PE=4 SV=1
MTDNRIRTIVVLGGGSAGWMAAAALATYLGRGVSVRLVESEEVGIVGVGESSVPHMKTFNSETLGIDERTFVTRTNATFKLGIRFTDWGRIGDSYIHGFGTIGQGLGPLPFHQLWLRRFLAGKAAPLGDYSLQTVAAPAGRFQWNGPPGSLLSDIAYAYHLDAVLYARFLRELAERRGVERIEGKVVDVEQQGENGHVAAITLADGRRVEGEFFIDCSGFRGVLIEQTLKTGYLDWRHWLPCDRAFAVPSETVGPPMPYTEAAARSSGWQWRIPLQHRVGNGHVYSSAYESDEQAMATLLDTLQGQALDVPRQLRFTAGRRVKAWSGNVVALGLAAGFLEPLESTGIYLAQAGIRRLLGLFPGRDFDPALADRFNRETALEYERTRDFLVLHYKATTRDDTPFWRYCRTMDVPDPLREAIELFRADGRYFRNGEDFFALPSWVQVMIGQGIVPADYHPIVDAMPEGHLDQYLARVRGEIAGAVAAMPPHHQFIDHHCKATVA

SEQ ID NO: 88673 - protein, 503 aa, Gammaproteobacteria bacterium
  misc_feature (1)..(503): tr|A0A2E4JZH7|A0A2E4JZH7_9GAMM Tryptophan halogenase OS =Gammaproteobacteria bacterium OX=1913989 GN=CMQ32_0496 5 PE=4 SV=1
  misc_feature (163)..(163): Xaa can be any naturally occurring amino acid
  misc_feature (182)..(182): Xaa can be any naturally occurring amino acid
MKVKSIVILGGGTAGWMTANALQKKWQHLGINITLVESPDIGIVGVGEGSTPKLKHFFDSLGIKESEWMPECNATYKNGISFKNWSTVSGYEEYFHPFGCSLDFVTLKFLYDNATLRRKGVDVIAHPNRFSLMASLAEKKLAPIASKNFPFHFQYGYHFDSVXIGKFLQKKAAEVGGINHIXATVKSVELNSNGDITSLKLNNDQILSGDFFVDCSGFASILLEKTLKVPFISFSDNLFNDSAITIPTEIEPNIPSQTVSTALTNGWVWRIPLTNRIGNGYVYSSQYCTQDEAEKELRAHLGVLESDIEARHLKMKVGRAKESWRNNCVAVGLSQGFIEPLEATALQFVISTIEEFATAFEEGGFTHQFKELFNQRMNMNFEGIRDYIVLHYKTNSRSDSQYWIDNRENKNIPNNVKDMLGCWYNIQSLEDELKRLNIGSYYTKMSWNCMLSGMGLFPPKESLTSADAQTAQADLEFVDKFIGGCSMNFKPHKKMLIGANTST

SEQ ID NO: 88674 - protein, 495 aa, Gammaproteobacteria bacterium
  misc_feature (1)..(495): tr|A0A2A4VKL4|A0A2A4VKL4_9GAMM Tryptophan halogenase OS =Gammaproteobacteria bacterium OX=1913989 GN=COB35_1351 0 PE=4 SV=1
  misc_feature (23)..(24): Xaa can be any naturally occurring amino acid
  misc_feature (35)..(35): Xaa can be any naturally occurring amino acid
  misc_feature (38)..(38): Xaa can be any naturally occurring amino acid
  misc_feature (65)..(65): Xaa can be any naturally occurring amino acid
  misc_feature (74)..(74): Xaa can be any naturally occurring amino acid
  misc_feature (83)..(83): Xaa can be any naturally occurring amino acid
  misc_feature (86)..(86): Xaa can be any naturally occurring amino acid
  misc_feature (117)..(117): Xaa can be any naturally occurring amino acid
  misc_feature (133)..(133): Xaa can be any naturally occurring amino acid
  misc_feature (142)..(142): Xaa can be any naturally occurring amino acid
MVIVGGGTAGWMAANLFANKWSXXQVQVTLVESPXVGXIGVGEGSTPTLKRFFDMLNIAESTWMXRCNATYKMXISFNDWSPXSGXKSYSHPFTSQIDTFTSRAFLVNGRTRRLGLXVNITPSDFLINGVLAXQGKGPLTPXNFPFKMEYGYHFDSNLLGKFLADFAVSKGIFHKRAHVERVERANNGDINAIVTRDGEVIKGDFFVDCTGFSALLIQKTLGVKFNAYKDNLFNDSAVVMPTTVSDKIPVETTSTALSTGWCWKIPLRNRFGHGYVYSSGFISADDAETELRTHLGCLDADIPARHLKMNVGSLDQHWSHNCLALGLSQGFIEPLEATALHLVQLSIEMFITKLEQGGLKSLIARNQVREEYNHFVKERFERVRDYIVAHYKLNTRDDSDYWRANRDNQHLSDSLLHILDVWYKREDLAAEIKRQGLNNHFDAVSWQCLLGGYGAFPPLARNQPNQGDLYVEQNVAQFLRGCALNFSSHQDNLNK

SEQ ID NO: 88675 - protein, 493 aa, Gammaproteobacteria bacterium
  misc_feature (1)..(493): tr|A0A4V2AB65|A0A4V2AB65_9GAMM Tryptophan 7-halogenase OS=Gammaproteobacteria bacterium OX=1913989 GN=EOO52_05 285 PE=4 SV=1
MLEKKMKIVIAGGGTAGWIAAAALSNQMGGILDITLVESQEIGTIGVGEATIPPMRTFHRLIGIDEQEFMRATNATFKLGIQFENWKQIGEKYFHSFGITGKQTLITDFIHFWLRGRELGIASEFGDYCLEFKAALMDRFSLTENAKINYAFHLDAGRYANFLRQRAESRGVKRVEGKIAEVQQNPNSGFISLLKTESGEEIPGDLFLDCTGMRGLLIEQCLKTGFEEWGHWLPCDSAIALQTESIAPAVPYTKSIAHHAGWRWQIPLQHRVGNGLVFSSKYMSKDEALNMLLSSVDGKVLTEPNVIKFKTGRRKKSWNKNCIAVGLASGFLEPLESTSIHMIMTAITRLLLLFPHGEIKQSTIDEYNIQAESEYVKIRDFIILHYKATERSDSLFWQYCKDMEVPDELMHRMTLFKEAGKSFQVEGELFRLDSWTQVMLGQGIMPSTYHPIVGLMPAPDLKRFLSNIAADVDKNISMMSLHQDFVTTYCGKM

SEQ ID NO: 88676 - protein, 494 aa, Gammaproteobacteria bacterium
  misc_feature (1)..(494): tr|A0A2D9STD9|A0A2D9STD9_9GAMM Tryptophan halogenase OS =Gammaproteobacteria bacterium OX=1913989 GN=CMQ11_1810 5 PE=4 SV=1
  misc_feature (66)..(66): Xaa can be any naturally occurring amino acid
  misc_feature (96)..(96): Xaa can be any naturally occurring amino acid
  misc_feature (128)..(128): Xaa can be any naturally occurring amino acid
  misc_feature (156)..(156): Xaa can be any naturally occurring amino acid
  misc_feature (162)..(162): Xaa can be any naturally occurring amino acid
  misc_feature (174)..(174): Xaa can be any naturally occurring amino acid
  misc_feature (189)..(189): Xaa can be any naturally occurring amino acid
  misc_feature (215)..(215): Xaa can be any naturally occurring amino acid
  misc_feature (276)..(276): Xaa can be any naturally occurring amino acid
  misc_feature (293)..(293): Xaa can be any naturally occurring amino acid
  misc_feature (365)..(365): Xaa can be any naturally occurring amino acid
  misc_feature (493)..(493): Xaa can be any naturally occurring amino acid
MKNQAVKNVVIVGGGTAGWMTAAALTKLIGKNLHISLVESDQIGTIGVGEATIPTFFALHQLLQIXEAEFLAEVHGTIKLGIAFENWKQLDHQYIXAFGYTGQSCWAAGFQHFWLKAKTLGISEEYSXYSPELMAAVAGKFGLLQQNGLNYAYHIXATRYAXYLRRLAEKSGAXRIEGKIIQVKQTQDXDIASLHLDNGQTVQGDFFIDCSGFAXLLIDKTLNTGFQEWSQWLPCDRAVAVQTRSVSPPIPYTRSIAQACGWQWRIPLQSRVGNGXVYSSDYLSDDQATSLLXTNIQGDTLIEPRVIPFKTGQRHFHWKKNVVALGLAAGFLEPLESTSIHLIQRGIIRLMQMFPYGGINQPDQXEFNQQMSDEYEFIRDFIIMHYHITERTDTEFWRRNSAMSIPGSLQHRLSLFQESGRVFQAEGDVFGENSWTQVMLGQGLTPASYHPIVDMMSDHELRQFMRHQLQRVELVIKQLPDHNAFIAKYCPAXL

SEQ ID NO: 88677 - protein, 504 aa, Sphingomonas sp.
  misc_feature (1)..(504): tr|A0A4R2PB99|A0A4R2PB99_9SPHN Tryptophan halogenase OS =Sphingomonas sp. BK235 OX=2512131 GN=EV292_11046 PE=4 SV=1
MERSERQRVVVVGGGTSGWMTAAALAKLLPARCTVDLVESEAIGIIGVGEATLPHIRAFNERLGVAEAEFMAATRATFKLGIEFRDWARIGDSYIHPFGTFGRGTGEVQFHHYYTRLLHAGVALPPIEAFSMACSLARANRFGAPSVDPRQIASTFGYAYQFDAVAFAPYLRRLAEGLGARRTEGRIVDVARDPLSGDVTAVVLEDGRRVEGDLFVDCSGFVALLIGKTMGEPFDDWSRWLPADRAVALPCRTATAVTPYTSAIAMPSGWRWRIPLQHRTGNGYVFASDFLDEGAAADALVAAVEGTPLAEPRVLRFKAGRRARSWVNNVVAIGLASGFLEPLESTSLYLVQQAITALVELFPERRIAAADRDEFNRLVNMEYDRVRDFLILHYHATQRDDSPFWAYVRNMEIPASLAEKMALFRRRGRVVKYREGAFLDASWVSVYLGQRVLPDGHDPRADGPPLDSLAAGMERLRGEIATAIGGMADHRDFLAGYCPMPAAA

SEQ ID NO: 88678 - protein, 503 aa, Gammaproteobacteria bacterium
  misc_feature (1)..(503): tr|A0A4Q5Q7H5|A0A4Q5Q7H5_9GAMM Tryptophan 7-halogenase OS=Gammaproteobacteria bacterium OX=1913989 GN=EOO53_07 920 PE=4 SV=1
MKNTIPKSILIVGGGTAGWMAANILLHAWHAHEVQITLIESADIGIIGVGEGSTPALRKFFSYLKVAEKEWMPACNATYKAGIQFSGWAAENAYKNYFHPFYSQHDIEHSQYFFHNVNLRRHGVDCVTKPDEYFLTAELARQHKDPAPLDRKLTNQIEYGYHFDSVLLGKFLRDRAKSFGLIHIVGNVSDVLLTHDGAIASVNTTDNKLNADFYIDCTGFAGLLINKALQEPIRTFKENLFNDSAVTIATDSDEKILPSLTLSTALPHGWAWKIPLTNRFGNGYVYSSDFISSDQAEIELRNHLGDKAKDKSARHLKMRVGRVENHWKANCLAVGLSQGFIEPLEATALAIVQSTLENFVDRFDHPITPNTIREFNSYINSLIDGIRDYIVTHYFLNTRNDTDYWKACREQVKLPDALQELLDAWDSGGDFMQTLFSQKREKIYKPESWFCILAGMGRFSTLNDQSSKRNLAAPEKIALLNNRIFSEKMFIDHKEYLNRLSQP

SEQ ID NO: 88679 - protein, 558 aa, Gammaproteobacteria bacterium
  misc_feature (1)..(558): tr|A0A2E4Y9M4|A0A2E4Y9M4_9GAMM Uncharacterized protein OS=Gammaproteobacteria bacterium OX=1913989 GN=CMD92_02 245 PE=4 SV=1
MKSKLNKLVIVGGGINGWFTAGYMKNKHPWLDVKIIESDTIPIIGVGESVVPQVNDLLETLGLEERDWMSYTNSIYKLGNKFVGWSSPGKRHHVTDHWNAPKEDVQYYSFSFALPEKHLTSSFYNQLTTDDYFTNSKGEAGVDDKWNDYWLQLVREGKRNPKEASQDTHEQHYLMDGNKAPFDMNDNPLLGDWQSYSFHLDANRFPELIRDKVALPKGVQHIIGDVKEIIKDEDGYITKLLLEDGTEHEADLFVDCSGLHKVLVGGMNNEWHDYDFIHTQDAVVGPLKYKDVYNEFRPYTQTYAQDEGWNFIISLYNRMGSGYIFDRTEISPEDAMEKFKKYWEGYEFIKPPKHISWKAGRMVTPWNKNVLSIGMSHSFIEPMEGNAMYISQWGIQLLDRFVNRQQEDDEIISAGSIHAYNKSMNGLEDHVANFIAYHYTLTNREDTNFWKKQKEYGKKHNHKEAIWKEYKNPYNQIGNSLYPDYMWMTVATAMGHFDDTVELNTKKELMNKADIMFEYCRKLSEAQGEMAPHAYDWHRKFLFNGKSHEEVLEEALKK

SEQ ID NO: 88680 - protein, 500 aa, Rheinheimera sp.
  misc_feature (1)..(500): tr|A0A0U4VKS3|A0A0U4VKS3_9GAMM Tryptophan halogenase OS =Rheinheimera sp. F8 OX=1763998 GN=ATY27_01525 PE=4 SV= 1
MMKKQRVVIAGGGTAGWMTAAALGKLMGKQLDITLIESDEIGTVGVGEATIPTLHLYHRLLNINEADMMAATNATFKLGIMFENWRDVGKDYLHSFGFLGKDCWACGFQHFWLKGREMGLASEIGDYCAEHLAAREGRFAALAGQDQNHAYHFDASLYAKFLRGIAETHGVKRIEGKIAEVQQHVFAPQHPQNGFIKALLLESGQLLEGDLFIDCTGFRGLLIEQTLMTGYDDWTHWLPCDSAVAVQTVSNGTPVPYTRSISHPAGWQWRIPLQSRVGNGLVYCSKYLSDMDAKTLLKANVQGEMLTEPRLIKFRTGTRRKHWNKNCIAIGLSSGFLEPLESTSIHLIQRSIIRLLQMMPAGDVVQADVDEYNLQTKIEMENIRDFIILHYKVTERNDSAFWRHCAAMEIPPSLAHRIEMFGEAGKVYKFAQELFGESSWIQVMLGQGLTPKQHHPIVDLMPQSELAQFLGNIKTNVARQVQAWPPHYDFVQHYCKSRMM

SEQ ID NO: 88681 - protein, 495 aa, Gammaproteobacteria bacterium; identical to SEQ ID NO: 85080
  misc_feature (1)..(495): tr|A0A2D7FW44|A0A2D7FW44_9GAMM Tryptophan halogenase OS =Gammaproteobacteria bacterium OX=1913989 GN=CMP96_0223 0 PE=4 SV=1

SEQ ID NO: 88682 - protein, 502 aa, Alteromonadaceae bacterium
  misc_feature (1)..(502): tr|A0A1Y6BZ09|A0A1Y6BZ09_9ALTE Tryptophan halogenase OS =Alteromonadaceae bacterium Bs31 OX=1304903 GN=SAMN0274 5866_01738 PE=4 SV=1
MVFDMQFKVRKIAVLGGGTAGWSAASMLAERFRKHDVQITLVESPRIASVGVGEATVPGILGVHRSLNIDEREFIKATNATLKLGIEFRAWNYSGGRFFHPFSQFGAAIDKVDFHQCWNRLNKEKRYTNIEDYSLCASLAKAGRFALPDNGSNNPLAWYGYAYHFDASLYARFLRDYAESRGVIRLSDTVHAVQKNPDNGFIDTLHLESGEKISADLFFDCSGFRSRLLGAEMAVETIDWSKHLPCDRAVAVQTESEGPLLPYTSSTAMSEGWRWRIPLQNRTGNGYVYSSNYIDDEQAENDFLSQLSEPLRTEPRVIQFKAGMRKKFWEKNCIAIGLASGFIEPLESTSISLMHTGVDKAIVHMPDLLVSDEGIDRANELNRLEYEGIRDFIILHYWASKRDDSQFWRDVRKAPIPDTLATKIAAYMENGALLQYPQESFREPSWLAMYNGFELHARDCDSSAKALPIEQIDTLFSKMRSAIEKGVSHAPSHADFLRSVYD

SEQ ID NO: 88683 - protein, 503 aa, Gammaproteobacteria bacterium
  misc_feature (1)..(503): tr|A0A2A4VQE8|A0A2A4VQE8_9GAMM Tryptophan halogenase OS =Gammaproteobacteria bacterium OX=1913989 GN=COB35_1010 0 PE=4 SV=1
MSKPNHIVIVGGGTAGWMAANLMAQAWQSQGIKITVIESTRIGTIGVGEGSTPYLRQFFHRLNIPEAEWMPACHATFKCGISFPDWSTNKGYENYFHPFYSMIDAPNAPLFFENCSYRRQGSDVFAHPNDFFVTSKLAQAKKSPIAATPPRKPVEYGYHFDAELLGQYLAKKALEKGVNHIDDKVLSVETIADGSISHLITENSGELHADFFVDCSGFSGLLIQQTLGEKITSKKGYLKCDSAVALPTPLNLQNNVPSETVSKALKYGWVWNIPLTKRFGNGYVYCSDYISKAEAEAELRQHLGMENSDAKAVHLHWQPGRLENHWRKNCVAIGLSQGFLEPLEAPMLYLVQRTTENFIAYFQHENFNSDLKTRFNREINLLIDGTVDYLQAHYKANTRDDSQFWIDCRENTCMSPSLSAILSGWDESRNFEMVMQEQANTQVYQRASWYCLLAGMGRFKPISEADNNVNKNRAEQNHQNANQDCTAQSEVFIAHNEHLRTMT

SEQ ID NO: 88684 - protein, 519 aa, Kangiella sp.
  misc_feature (1)..(519): tr|A0A2G2L2Q2|A0A2G2L2Q2_9GAMM Tryptophan halogenase OS =Kangiella sp. OX=1920245 GN=COA86_10495 PE=4 SV=1
MAFKKVVIVGGGSAGWITAAYMNAILNSREHQFVEFVVIESPTLPRISVGEATVPTINRLLQTLRINEKDFMKATDATFKQGIKFVNWFKENDHSYYHTFDRRESQASGHLASKNWLNSDRSIPFAETVSIQPQLCEMNYSPKLPTDGHYQSPLTYAYHMDAEKFANYLCTYSKSQGIKHIQDDVVDVMVTADQNISAIITKTGLKIESDLYIDCTGFSSLLIGKKLGVGFKDYSQWLICDRAVTMQIPYQYYYPQEIRPYTTSTALSSGWVWDIGLVNRRGIGYVYSSEFISDADAEKELRQYEGEHSSGIACRTVKFSVGRRESFWKSNCVAIGLSAAFVEPLESTGLNMIEFAATTLAEHFPMGDEMKPLADRYNKIMSNRFDDALDFINLHYCLSRRTDSAFWREVQKPKRILSSVQQQLDLWKLKSPSEADFDNHFILFNHTNYEYILYGMSFMETDAIDNGYSSKDNIKDKARNKSKVPQMIVDNIQAAKNNLVPHERWLQEEIGMKKYTNKK

SEQ ID NO: 88685 - protein, 520 aa, Gammaproteobacteria bacterium
  misc_feature (1)..(520): tr|A0A3C0L0J1|A0A3C0L0J1_9GAMM Tryptophan halogenase OS =Gammaproteobacteria bacterium OX=1913989 GN=DCL32_0502 5 PE=4 SV=1
MSSAIRNIVIIGGGSAGWLAAGIIASTYAPNSQDKGLRVTLIESPDIKTIGVGEGTWPSMRRTLKRIGLSETDFIRFCDASFKQGTAFYGWMSDPSASYTHPFMPPNNFDALNPVDGYLAAHASARFDDTVCPQVALFGNHLAPKQITTPEYAGQANYGYHLDAGKFATMLQRHCTEQLGVQQIVANVTEVLCRPNGDIDRLKTDRTDDLEGDLFIDCSGSQGLLINGLYEVGFIGRDDVLFNNRAIAAQTPYLDETAPIASCTHSTAQSAGWIWDIGLPTRRGAGYVYSAQHQSDATAEQTLRQYIERTSTPEIAESVQTRTIVFEPGHRERFWHRNCVALGMAAGFIEPLEASALVLVELGATMIADELPADRSDMDSVGKRYNDRFRYRWDQIIDFLKLHYVLSTRTEAYWADHRNPSSIPESLQSLLTTWAYRAPWHHEGYHKDEMFPSASYQYVLYGMGFRPSRALPKHRHVEQDLAAAHHTFAQVTKQANQFRNQMPSNRDLLETLKQHRFQTV

SEQ ID NO: 88686 - protein, 495 aa, Gammaproteobacteria bacterium
  misc_feature (1)..(495): tr|A0A4Q5QA73|A0A4Q5QA73_9GAMM Tryptophan 7-halogenase OS=Gammaproteobacteria bacterium OX=1913989 GN=EOO53_08 280 PE=4 SV=1
MDTAIKKVVIAGGGTAGWMAAATISHHFSSVLDIRVIESEEIGTVGVGEATVPPMQAFHKLLNIDEQEFLRATQGTFKLGINFENWARKGDEYIHSFGITGKVFWIADFVQFWTKARGMGLENDYGDFCLELQAAKLGKFALTENPAINYAYHFNASLYAKFLRKYSEARGVRRTEGKIVEVATHTDNGFIKSITLASGEVVEGDLFIDCTGFRGLLIEQTLHTGYEDWSQWLLNDSAIAAQTKNPGPALPYTRAVAHQAGWQWHIPLQSRIGTGFVYCSKYISDEDARKTFINNLPGELINEPIVLKFKTGRRKKSWNKNCVALGLSSGFIEPLESTSIHLIMSSALRLVKFFPANGIKEANVAEYNQQTVTEIERIRDFVILHYKATERDDTPYWRYCRDMVAPETLTHRINLFKETGIAYRTEGEIFEKDSWSQVMIGQRIVPEDYHRYVDEVNHKDLLKYMRDYAKGVKDHAMQLPSHEDFVRGYCSENDV

SEQ ID NO: 88687 - protein, 518 aa, Kangiella sp.
  misc_feature (1)..(518): tr|A0A2G2L8H2|A0A2G2L8H2_9GAMM Tryptophan halogenase OS =Kangiella sp. OX=1920245 GN=COA86_05545 PE=4 SV=1
MTDDSKNSVTGQNIRNVVIVGGGSAGWMTAAALIKVLGKQNISIKLIESKTIGTVSVGEATIPQIRNFNNMLGINENDFLKHTHGTFKLGIEFVDWNNINHTYMHPFGPYGSSMGGVHFHHFWLKDRDNKDYKGVLETEHYQDDLLEYCLEGYAAKQNRFTRPLNVPNTPLSTVNYAFHFDAILYAKYLRVFAEHLGVNRIVGTVEEVITNQDDGFIQSVRLSNGDIIEGDLFIDCSGFKGLLIEQTLKNGFDDWSHWLPCNSAAAQSSESLEDIKPYTISTAQNCGWQWQIPLQSRIGNGHVYSNAHMSDDEAIAILQKNMPSAPMGEPRILNWRNGRRKKTWIKNCIAIGLSAGFLEPLESTGLQLIQASIERLLSLFPNKAFHQANIDSYNRFANAEIEQIRDFIILHYKQTNRTDTVFWESCKNMDIPDSLQRKINLYQSSGRIIRESSELFSEISWLSVLNGQGIKPKNYHPLVDINSDDNRIEQMQKMKFIIRQCAEKMPLHRDYINKQCAM

SEQ ID NO: 88688 - protein, 603 aa, Microcystis aeruginosa; identical to SEQ ID NO: 88646
  misc_feature (1)..(603): tr|A0A552BNS1|A0A552BNS1_MICAE Tryptophan halogenase OS =Microcystis aeruginosa Ma_OC_LR_19540900_S633 OX=24862 61 GN=EWV62_06645 PE=4 SV=1

SEQ ID NO: 88689 - protein, 518 aa, Gammaproteobacteria bacterium
  misc_feature (1)..(518): tr|A0A2A4VUB2|A0A2A4VUB2_9GAMM Tryptophan halogenase OS =Gammaproteobacteria bacterium OX=1913989 GN=COB35_0705 5 PE=4 SV=1
MSKTAVKSIIIVGGGSSGWMSALYLNHLYNQQQQNIQITLIESKDIGTIGVGEATVHSIRFFFAAMGIDEDELLKETNATLKNGILFKNWMKPNKTGEEHQYFHPFEHVQIDSGLDISSRWLLSGREQHERFDQGTSLAAHLIAKGHSPKAANSRAYEGIVPYGYHLDATLMGRYLRRKAIAAGVIHIEGKVNDVVVDNGNIKSLHTEHGEHNADVFIDCSGFKGILINQLKADNWRSFEDALPCNRAVAMQIAYPENVTPKPYTMATALDNGWAWEIDLVNRRGTGYVYDGNRLTKEQAEQALKEHNGVDAKILKTVHLKMNIGCREQFWLGNCITIGLSGGFIEPLESTGLHIVNLGVRLLATHLSSSQVEQSVRDSYNRLMAGVYDDLKQFIVAHYCLTDRDDTEFWRQAQKSVGYCPDLKRNLAVWNHKVCEYFDLAGGYSTTFTDENYRFILYGMQHYPQLNMPIDLNESKQVFEKLGRRAQEVVKHTLSHQDYLQSLHDMPLTDIAAMWKVN

SEQ ID NO: 88690 - protein, 507 aa, Gammaproteobacteria bacterium
  misc_feature (1)..(507): tr|A0A4V1ZR82|A0A4V1ZR82_9GAMM Tryptophan 7-halogenase OS=Gammaproteobacteria bacterium OX=1913989 GN=EOO53_01 695 PE=4 SV=1
MNKNTIRKVVIVGGGTAGWMTAAALSKVMGCQNYDITLVESDQIGTVGVGEATIPMIMFFNKVLEINEFEFVRETNATFKLGIEFVNWKNIGSSYFHPFGLMGVDMDGVTFSHFWQRWKNEGGNLDFSKFNIETEAALSCKFMKTDHERGPAILPPINYAYHFDAGLYAAYLKKYSEKRGVIRQEGKITQVKQNPTTGYIESVVLESGVEVKGDFFIDCSGFRGLLIEETLKAGYHDWSHWLPVNRAVAVPCESAGELLPYTRATAQEAGWQWRIPLQHRTGNGYVFCNNFISEDEATSKLMSRLDGAPRAEPRVLKFVTGARKKCWDKNCLAIGLASGFLEPLESTSIHLVQVTIAKLLTMFPRDGFNELLIKRFNDEMHWEYDDIKDFLIAHYKITEREDTEFWRYVKNMPIPDRLQEKLDTFRARGEMMVPLNELFKENSWFSVLAGQGFMPEAYHPVADSISDDELRLRLTKIRSGIQNRLNSMPKHADFIRDNCASAMMKHA

SEQ ID NO: 88691 - protein, 499 aa, Gammaproteobacteria bacterium
  misc_feature (1)..(499): tr|A0A2D6VBU5|A0A2D6VBU5_9GAMM Tryptophan halogenase OS =Gammaproteobacteria bacterium OX=1913989 GN=CMP82_0882 5 PE=4 SV=1
MQHSKVQKVVIVGGGTAGWMAAASLAKLLGKNLHVTLVESDEIGTVGVGEATIPTLLTLHELLKIKEQDFVAAVQGTFKLGISFENWRNVGEDYIHSFGYTGKDCWAAGFQHFWLKGKQLGLSEEFGDYCTELVAAKDQRFAVLPNNGLNYAYHFDASLYAKFLRGIAEDNGAVRQEGKVRQVLQDPSDGFITGVELESGQLIEGDFFVDCSGFRGLLIEQTLHTGYDDWSHWLPADSAVAVQTHSVGEPLPYTRSIAHESGWQWRIPLQHRVGNGLVYCSKFWSDDEATAKLLGNLEGEPLTDPRVIKFTTGTRRKHWNKNCVAMGLASGFMEPLESTSIHLAQRAIIRLMQMFPYDGVRQPDIDEFNSQMTFEIENIRDFIVLHYHVTERDDSRFWRHCRSAQIPDSLQHRIDLFKETGRVFKVPTELFGENSWVQVMLGQGLLPEQYHPIVNMMDAKELEEFLTSIKGSVNNMVRQLPPHQRFIDHYCKAPQPQIA

SEQ ID NO: 88692 - protein, 500 aa, Gammaproteobacteria bacterium
  misc_feature (1)..(500): tr|A0A2E9ZKC0|A0A2E9ZKC0_9GAMM Tryptophan halogenase OS =Gammaproteobacteria bacterium OX=1913989 GN=CMQ12_1146 5 PE=4 SV=1
MKVKNIVILGGGTAGWMTANLLHKKWERLGINITLVESPDIGIIGVGEGSTPRLKAFFDSLDINESEWMPECNATYKNGISFKNWSTVSGYEEYFHPFPSGLDFVTFKFLYNNATLRRKGADVIAHPNRFSLMASLSEKKLAPIASKNFPFHFQYGYHFDSVLIGKFLQKKAAEVGINHIQATVENVELHSNGDIRSLKLNNDQLLSGDIFVDCSGFASILLEKTLKVPFISFSDNLFNDSAVAIPTEIDPNIPSQTISTALTNGWVWQIPLTNRFGNGYVYSSKYCTQDEAEKELRAHLGVLESDVEARHLKMKVGRAQESWRKNCVAVGLSQGFIEPLEATALQFVYSTIDEFARAFEEGGFSNQFREEFNQRMNMNFEGIRDYIVLHYKTNSRNDSQYWIDNRENKNISNNLNDMLNCWYNTQNLETELKRLNIGSYYSQMSWTCLLSGMGLFPPKEKLTSADTKTAQADLDFVDNFIDGCSMNFKPHEQMLTRGLS

SEQ ID NO: 88693 - protein, 515 aa, Gammaproteobacteria bacterium
  misc_feature (1)..(515): tr|A0A2D7BUJ3|A0A2D7BUJ3_9GAMM Uncharacterized protein OS=Gammaproteobacteria bacterium OX=1913989 GN=CMQ75_03 900 PE=4 SV=1
MKIKNIVIVGGGSSGWMTASAIAHNLPEINLTLIESPNIPNIGVGESTLGHINRFFRLLDLTDQDWMKECSATYKNSIQFTNFHKIGTRFQYPFGGFVMPPDDDKYKYSTEFDIPIFLDLQRLFPEEISCEDFVRFYNINSLLAEYNKQTTKDVCGFDFFNHTAYHLDADALAIFLKNRYSNRITHILDEVNNIECNELGITKIISTNHTLTADLFIDCTGFKSLLIEKTLDVDWYQFPHLPNNKAVTARIPYTTIEDQKNSIHNVTDCKALSSGWLWDIPLWKRKGAGYVYSSEFLTKDQAEEEFRKETGWNDNVNHISFRHGYHKKAFHKNVLAIGLSYGFIEPLESTGLLTTHENIIKFIKLMQLHEGHVNKLDKILFNTSCEAQMSGLSDFVGVHYALSRRDDTPYWHYVTNEIDQSRYEYDLHVKEENIAQSLHEIFTFDRFDSRKEGMFCILMGNNYNPAERVQFNYSTEQLKNINFKKNFIIDSIKSRIDFVKNLPSSYDFLYNHIYK

SEQ ID NO: 88694 - protein, 499 aa, Gammaproteobacteria bacterium
  misc_feature (1)..(499): tr|A0A2D5L8I8|A0A2D5L8I8_9GAMM Tryptophan halogenase OS =Gammaproteobacteria bacterium OX=1913989 GN=CMP86_0240 5 PE=4 SV=1
  misc_feature (296)..(296): Xaa can be any naturally occurring amino acid
MQHSKVQKVVIVGGGTAGWMAAASVAKLLGKNLHVTLVESDEIGTVGVGEATIPTLLTLHELLKIKEQDFVAAVQGTFKLGISFENWRNVGEDYIHSFGYTGKDCWAAGFQHFWLKGKQLGLSEEFGNYCTELVAAKDKRFAVLPNNGLNYAYHFDASLYAKFLRGIAEDNGAVRQEGKVRQVLQHPNDGFITGVELESGQLIEGDFFIDCSGFRGLLIEQTLHTGYDDWSHWLPADSAVAVQTHSVGEPLPYTRSIAHESGWQWRIPLQHRVGNGLVYCSKFWSDDEATAKLLGXLEGEPLTDPRVIKFTTGTRRKHWNKNCVAMGLASGFMEPLESTSIHLAQRAIIRLMQMFPYDGVRQPDIDEFNAQMTFEIENIRDFIVLHYHVTERDDSRFWRHCRSAQIPDSLQHRIDLFKETGRVFKVPTELFGENSWVQVMLGQGLLPEQYHPIVNMMDAKELEEFLTSIKGSVNNMVRQLPPHQRFIDHYCKAPQPQIA

SEQ ID NO: 88695 - protein, 532 aa, Rheinheimera sp.
  misc_feature (1)..(532): tr|A0A0U4X426|A0A0U4X426_9GAMM Tryptophan halogenase OS =Rheinheimera sp. F8 OX=1763998 GN=ATY27_02830 PE=4 SV= 1
MQSQPQHKNNNTAEQPIQTVVIVGGGNAGWLTAGRIAAKHNCQAGAIRVVLIESPGVPPIGVGEGTWPTMRSTLLALGISETEFIRECDATFKQGAKFARWVNGATDDFYYHPLVLPQGFGKADMAAYWLQGKTATDLAGPLSSFSNDLCYQEAICEQGLAPKTIRHAEYAAVANYAYHLDSGKFGLFLQRHCIEKLGVEHIQDDVIAVQSADNGDIAAVQTQNHGPIAGDLFVDCTGFKSLLLGEHYQVPFKRCDDVLFIDTALAVQVPYDSPDAPIASHTISTAQDCGWIWDIGLQHRRGVGYVYASRYCSEQQARDTLAAYVGPKIAELAVRKIPIVSGHRQHFWQNNCVAVGLSAGFLEPLEASALVLVELSAQMIAEQLPATRGVMDIVARRFNETFLYRWDKIIDFLKLHYILSQRTDSAFWRDNRDPATIPQSLKDLMQLWAHRAPGDLDFTSNNEVFPAASYQYVLYGMGFRSDTSRLRHQLTNWDFATAQLQQNRKMIDQALTLLPTHRELINKIRQYGFQTI

SEQ ID NO: 88696 - protein, 511 aa, Porphyrobacter sp.
  misc_feature (1)..(511): tr|A0A2L0GML7|A0A2L0GML7_9SPHN Tryptophan halogenase OS =Porphyrobacter sp. HT-58-2 OX=2023229 GN=CHX26_12975 P E=4 SV=1
MPSGIEENVTIERIIIVGGGTAGWMAAAALSRLKTGGSVEITLIESESIGTVGVGEATIPPFVGFNQLLGIDEREMLAEVGGTFKLGIQFENWGRRGDSYIHPFGAYGYTMGGISFHHVWHRMAQGGDKRPIQVFNLETMAAAFGKFARTEDYQRDDLPPVNYAYHLDAGRYAAFLRKFAEKRGVVRQEGRIADVALDGQSGFVTGVKLEDGREFGGDLFIDCSGFRGLLIEQALKTGYDDWSNYLPCNRAVALPCKRDDGSPPPPFTRATAHSAGWQWQVPLQHRNGNGHVYCSAYMEDQKALDILLGNIAGKPQAEPNWLRFVTGRRKKFWNKNVVALGLAAGFMEPLESTSIHLINTGIDKLISLLSLDGITQVQEDTFNRLTGREYARIRDFLILHYNATQRDDSDFWNYVRTMPVPDTLTEKVELFRANGQIFREEDELFTETSWAAVMMGQGITMGSHNAMADALDPARTRTEVDEMEKSIRYLVQHMPGHGDYLARYCPAPMAA

SEQ ID NO: 88697 - protein, 495 aa, Gammaproteobacteria bacterium
  misc_feature (1)..(495): tr|A0A2E9FJF1|A0A2E9FJF1_9GAMM Uncharacterized protein OS=Gammaproteobacteria bacterium OX=1913989 GN=CMD60_01 120 PE=4 SV=1
  misc_feature (182)..(182): Xaa can be any naturally occurring amino acid
MKRIKRLVIVGGGTAGWITASWFARRWSNHFEVVIIDKSQPERIGVGEATLLSFPNVMKMMGYKPTDWLREVDATFKSGILFPGWGHEDAEIWHPFSFTSVGDSKTPLYDIWQTYQEKYDLKDISPMYNSSLKNKIETNYVHDSYAFQIDCGKLVQFLMRHTTPYCKYIQSDVVDVIRDGQXDDITKSDIKELVLDDGSRITGDIFVDCTGWKQLLVGKDNVDLSDRLYINAALAGRVKYEDYRKEQHPYTACPAQEHGWIWKIPTRSRIGTGYCFNRDVNDPDEVRQAFSDHWNGRIKPDEMRLLDWKPQYVNKFWVGNVVPIGLSAGFIEPLESTGLALMIRGVEYLEESLYGGYFETKVEAPFYDAKMKCSYESAVDYVNMHYSYCRREGKFWDYVRSKYKKSSMQEMFEGYIQDPNVRTPQTGKVGSFFDGTNWQVWLLQLMTEKINPKEYWKKDSSVIPRFHNFVNNDLRENQANSVIQSQYISHLDTLE

SEQ ID NO: 88698 - protein, 519 aa, Sphingomonas sp.
  misc_feature (1)..(519): tr|A0A4R2PG24|A0A4R2PG24_9SPHN Tryptophan halogenase OS =Sphingomonas sp. BK235 OX=2512131 GN=EV292_10653 PE=4 SV=1
MSTPAPVRAVTIVGGGTAGWMTAAALSRLVAAGVSVTLVESAEIGTVGVGEATIPSILDFLAMLGIDEHAFVRATGATFKLGIEFSDWGARGERYMHPFGAAGRDIAGVAFHQLWQRAARAGVADAGTLDDYSLCTVAARQHRFDRASSDPAAVRSTLRHALHFDATLVARFLRAYAEAAGVRRVEGRVDSVALAPETGHIAALRLADGRQLGGELFVDCSGFRALLIGETLGVGFESWRHWLPNDRALAVPSAAASDPAPYTRAMAERAGWRWRIPLQHRTGNGHVYASDVVAEEEAHRLLLAGLTEPALDTARSIRFEAGVRRRWWEGNCVAIGLAGGFLEPLESTSIHLIQLGITRLLALFPDTGFAAPERDTYNRSLRRDYEQARDFIILHYKATRRDDSDYWRHCRTMAVPDTLAERLALWRGAGRVLHDRGELFTPASWIAVLAGQEPPSRAVDPLAATLPLDETERFLRHVRDMVAKTAAAMPRHADYVARHCAAPARPAWGDGGGAQTGAG

SEQ ID NO: 88699 - protein, 495 aa, Gammaproteobacteria bacterium
  misc_feature (1)..(495): tr|A0A4Q5Q1Q4|A0A4Q5Q1Q4_9GAMM Tryptophan 7-halogenase OS=Gammaproteobacteria bacterium OX=1913989 GN=EOO53_19 130 PE=4 SV=1
MLHKNSVKRVVIAGGGTAGWMAAAALSKVLGKHIDITLIESDAIGTVGVGEATIPTLLSFHHLLGINEPEFLRATNGTFKLGISFENWETRGKNYIHSFGKTGREFWAGEFQHFWLRGLGLGIDVPFGDYCLELQAAKAGKFAISKNPWTNYAYHMDATAYAKYLRSFSEGYGVKRIEGMIEQVKLNHDSGFIEAIILKDGRVIEGDLFIDCSGFKGLLIEQAMHTGFEDWSHWLPTDSAVAVQTESVTPPLPYTRAIAHESGWQWRIPLQHRVGNGLVYCSRYQSDENAQQTLLSNIEGNTLTEPRLIKYRSGRRLKSWNKNCVALGLATGFIEPLESTSIHLVSSGLIRLMRLFPLGGIRQVEIDEYNRQANLEIENVRDFIILHYCATKRTDSLFWRHCRTMSIPDSLAHRINLFRETGRIFVGADELFRVDSWTQVMIGQGIIPEQYHPAVHEMSDIELTQFLTKERNLIAEMVAKLPSHQDFINAYLRQK

SEQ ID NO: 88700 - protein, 503 aa, Gammaproteobacteria bacterium
  misc_feature (1)..(503): tr|A0A2D8N488|A0A2D8N488_9GAMM Tryptophan halogenase OS =Gammaproteobacteria bacterium OX=1913989 GN=CMP90_0356 0 PE=4 SV=1
  misc_feature (151)..(151): Xaa can be any naturally occurring amino acid
  misc_feature (154)..(154): Xaa can be any naturally occurring amino acid
  misc_feature (163)..(163): Xaa can be any naturally occurring amino acid
  misc_feature (186)..(186): Xaa can be any naturally occurring amino acid
  misc_feature (196)..(196): Xaa can be any naturally occurring amino acid
  misc_feature (233)..(233): Xaa can be any naturally occurring amino acid
  misc_feature (273)..(273): Xaa can be any naturally occurring amino acid
  misc_feature (375)..(375): Xaa can be any naturally occurring amino acid
  misc_feature (398)..(398): Xaa can be any naturally occurring amino acid
  misc_feature (483)..(483): Xaa can be any naturally occurring amino acid
MKVKSIVILGGGTAGWMTANALQKKWQHLGINITLVESPDIGIVGVGEGSTPKLKHFFDSLGIKESEWMPECNATYKNGISFKNWSTVSGYEEYFHPFGCSLDFVTLKFLYDNATLRRKGVDVIAHPNRFSLMASLAEKKLAPIASKNFPXHFXYGYHFDSVXIGKFLQKKAAEVGGINHIQATVXSVELNSNGDXTSLKLNNDQILSGDFFVDCSGFASILLEKTLKVPFIXFSDNLFNDSAITIPTEIEPNIPSQTVSTALTNGWVWRIPXTNRIGNGYVYSSQYCTQDEAEKELRAHLGVLESDIEARHLKMKVGRAKESWRNNCVAVGLSQGFIEPLEATALQFVISTIEEFATAFEEGGFTHQFKELFNXRMNMNFEGIRDYIVLHYKTNSRXDSQYWIDNRENKNIPNNVKDMLGCWYNIQSLEDELKRLNIGSYYTKMSWNCMLSGMGLFPPKESLTSADAQTAQADLEFVDKFIXGCSMNFKPHKKMLIGANTST

SEQ ID NO: 88701 - protein, 514 aa, Gammaproteobacteria bacterium
  misc_feature (1)..(514): tr|A0A4Q5Q822|A0A4Q5Q822_9GAMM Tryptophan 7-halogenase OS=Gammaproteobacteria bacterium OX=1913989 GN=EOO53_06 955 PE=4 SV=1
MNTAIKSIVIVGGGTAGWITAGRIAAKHKSNTSAGIKVTLIESPTINIIGVGEGTWPTMRTTLMKMGISETEFMRECDATFKQGAKFAKWVDGTPNDFYYHPLMLPQGFNKVDLPPYWQTEFSHQSFSDAVCFQEQVCEHGLAPKLITTAEYASVANYAYHLNAGKFATFLQKHCVNKLGVNHILGDVIQINSAENGDIKSVTTAQQGEIFGDLFIDCTGFSSLLLGEHLAVPFVDRSDVLFIDTAIAAQVPYEQEDAPIASHTISTGQAAGWIWDIGLIHRRGTGYVYSSKHTSHDEAEQTLRDYIGPAAKDLNFRKIPIQSGHRKLFWKNNCVAVGLSAGFLEPLEASAIVLVELSAEMIAEQLPACREVMDITAKRFNETFLYRWDRIVDFLKLHYILSKRSDNSFWSDNRNPETIPESLQELMQLWRYRSPGNQDFTSNNEVFPAASYQYVLYGMGFKMDASLIAHTLDAKHLAAEQISQNAATIKKALNMLPTNRELMKKIHEFGFASV

SEQ ID NO: 88702 - protein, 501 aa, Gammaproteobacteria bacterium
  misc_feature (1)..(501): tr|A0A4Q5Q5W8|A0A4Q5Q5W8_9GAMM Tryptophan 7-halogenase OS=Gammaproteobacteria bacterium OX=1913989 GN=EOO53_11 505 PE=4 SV=1
MNQINPIKKIVIVGGGTSGWIAASMLSYHLKSELCEIELVESDDLGTIGIGESTIPPVVRLIQNLGIDEREFIKSTQACFKLGIKFIDWRQKNESYFHPFGVIGKRIGSHDFYQCWLKATTQGDTSRLQDFSPCSVMAEQEKFFWPTQLQNTPIGGASYAVHLDAKLVVNYLNKYASERGVKRTEGTVEHVTQTESGAIEKLILTDGREIHGDFFIDCTGFKALLIEKKLGVEFEDWSKYLPCDRAVVVKTSAQEKRLPYTTATARKSGWSWKIPLRNSTGHGYVYSSKFCSDAEAKSTLLKNLDGPRINDPRVIPFSTGRRKNMWEKNCLSLGLASGFVEPLESTSIHLIARGMDFFLRFFPDRDCDPSLIKEFNRRMATDFEEVRDFIVLHYCTTQRTDTEFWRWCKDIELPESLQERIALFKGHGLIREGTDELFRSSSWQSVFEGMGIRPNKYCPRVDNMDYQEISDTLKIARQAIQSMVKTLPTHDDFLRQNCGDE

SEQ ID NO: 88703 - protein, 509 aa, Sphingopyxis sp.
  misc_feature (1)..(509): tr|A0A095B5J7|A0A095B5J7_9SPHN Tryptophan halogenase OS =Sphingopyxis sp. LC81 OX=1502850 GN=FG91_00023 PE=4 SV =1
MNSAIERVVIVGGGTAGWLAACLLASARRAAKLDVTLIEAPDIPTIGVGEGTWPTMRATLAAIGIGEAEFLAACDGSFKQGSRFDGWVTGAEGDRYLHPFTSPPTAPTAELLAAWQAGAPDLPFAAAMTAQAHVCDLDLAPRQRAMPDYQGAANYAYHLDAGKFAALLAMHAVQRLGVRHISDHVVDVTRDDDGGIASVATRRNGDISGDLFIDCSGHAALLIGNHLDVEWIDRSDTLFNDRALAAQVPVAPGSPIASQTVSTAHSAGWIWDIGLPGRRGIGCVYASRFIDDDAAEATLRAYIARVLPDAPDVPARRLTFPTGHRARFWEGNCVAIGLSAGFIEPLEASAIVMIELSLKALIDNFPVRHAAMPIHADRFNELFRYRWDRIVEFLKLHYALSRREEPYWRVQRDPAHMPPRLTEMLELWRDQPPSVWDFPRVDEIFSAESHQYILYGMGYPVPADLPASERAAALLAENRQRARALAAALPANRDYLDALAPGAHSAAAR

SEQ ID NO: 88704 - protein, 517 aa, Gammaproteobacteria bacterium
  misc_feature (1)..(517): tr|A0A2D6VBS9|A0A2D6VBS9_9GAMM Tryptophan halogenase OS =Gammaproteobacteria bacterium OX=1913989 GN=CMP82_0884 0 PE=4 SV=1
MEHAIQRIVVVGGGSAGWITAGLLAAEHGHESAADFSVTLLESPNVPIIGVGEGTWPSMRSTLQKLGLSEIEFLRECDASFKQGTEFVNWSNHDAPARYIHPFSLPSEFASLNLANYWLDQRQHSDFADFVSPQAQVALSGLAPKQCQTPEFAFNVNYGYHFDAGKFAQFLQRHVTQALGVEHVLGHFEQVISDEQGDIAALVLSDGRHIEGDLFIDCTGQRSLLIGQHFGTPLEPVDALLFNNRALAVQVPYADAQAPIASTTRATAQQVGWIWDIGLQSRRGIGYVYSDQYQDLQGAESTLRAYIAATSPGVETASLALRPIEFQPGFRQQFWVRNCVAVGLSAGFVEPLEASALALVEQSANIITDHLPRTRQVMDIVAKRFNEKMHYHWQSILEFLKLHYVLSKRSEPYWQDNARRESCPDALVEKLRLWQQQPPWHEDAPRIDELFPSASYQYVLYGMGFEPAQGGSARASHIREQAKAAQVVRMNRERTEKLRQGLPSNRELLTALVGQSG

SEQ ID NO: 88705 - protein, 503 aa, Gammaproteobacteria bacterium
  misc_feature (1)..(503): tr|A0A2A5D371|A0A2A5D371_9GAMM Tryptophan halogenase OS =Gammaproteobacteria bacterium OX=1913989 GN=COA74_0441 5 PE=4 SV=1
MNNQSEKSSNGKIQNVVVVGGGTAGWVTASLLSKVLGKSINITLIESDKIGIIGVGEATIPPIISLNNALGINESDFMKATKATIKLGIQFENWGNKGDSYMHAFGEIGKNFPFCEFHHFWTKSQQLGDQSSFWDYSLNYQAAISGKFSKINNIEGTNLPGISYAYHFDATLYAKFLRQFSENLGVKRVEGLITKVNQDPQNGYIESVDLEEGATVKGDFFIDCTGLAALLIEKTLSTGFDDWSQWLPCNRAVAVPSESTDKIRPFTRAIAHEYGWQWQIPLQHRTGNGLVYSSKHMTDDEAKEKILSSIEGKPLAEPKVIGYRTGRRRKQWNRNVVCIGLASGFFEPLESTNIHLIQTGAIRLLKFFPHNGIKNEEIAEYNRQSTNEYERIRDFIILHYKLTNRNDTQFWRQCQQMEVPDTLAQRMELFRESGKVFREQEDLFTEIAWKQVMIGQGGAPHDYHPLVDSLSEPQITELMANLKTLINRTVDKMPSHDEFIREI

SEQ ID NO: 88706 - protein, 536 aa, Gammaproteobacteria bacterium
  misc_feature (1)..(536): tr|A0A2A4VMH3|A0A2A4VMH3_9GAMM Tryptophan halogenase OS =Gammaproteobacteria bacterium OX=1913989 GN=COB35_1182 5 PE=4 SV=1
MSSSNTNRLTTKKSTTNFTKPFKNIVILGGGTAGWMAANLMALNWQSKGINITLVESPAIGTVGVGEGSTPQLKTFFDKIGVSENEWMPRCNATYKNGILFKNWSTRPSFEQYFHPFASPIDAHSAPAFIYNSVYRRQSADVDSHPDRFFLAAYLAKHHKTAIPDHNFPFPISYGYHFDSNLLGKFLVEKAIARGVKHLQATVSKVHLHTNTANNNELDGCIESLELDDGRKLFADLFVDCSGFRAELIQNKLKVPFISFKENLFNDSAVTLSTPAKNHLNSQTISTAMKHGWAWDIPLRNRTGNGYVYSSDYCSADQAETELRAKLGLLNSDVEARHLKMKVGRVKQHWAKNCLAVGLSQGFIEPLEATALHLVQETIENFIDVFSAGSFTDAHQDSFNDKINERFDGIRDYIVAHYRLNSREDTQYWHDNAANPNISQHLKSIIQAWLNGEDLNKTLAQSRQGQEKNQNEIISYYPPVSWHCILAGYGIFPPSLQKVSADHPAHKYDLKHIDDFIERCGLNFKDHLQFLNTNLM

SEQ ID NO: 88707 - protein, 499 aa, Gammaproteobacteria bacterium
  misc_feature (1)..(499): tr|A0A354VN66|A0A354VN66_9GAMM Tryptophan halogenase OS =Gammaproteobacteria bacterium OX=1913989 GN=DDZ32_1368 0 PE=4 SV=1
MQHSKVQKVVIVGGGTAGWMAAASLAKLLGKNLHVTLVESDEIGTVGVGEATIPTLLTLHELLKIKEQDFVAAVQGTFKLGISFENWRNVGEDYIHSFGYTGKDCWAAGFQHFWLKGKQLGLSEEFGDYCTELVAAKDQRFAVLPNNGLNYAYHFDASLYAKFLRGIAEDNGAVRQEGKVRQVLQDPSDGFITGVELESGQLIEGDFFIDCSGFRGLLIEQTLHTGYDDWSHWLPADSAVAVQTHSVGEPLPYTRSIAHESGWQWRIPLQHRVGNGLVYCSKFWSDDEATAKLLGNLEGEPLTDPRVIKFTTGTRRKHWNKNCVAMGLASGFMEPLESTSIHLAQRAIIRLMQMFPYDGVRQPDIDEFNSQMTFEIENIRDFIVLHYHVTERDDSRFWRHCRSAQIPDSLQHRIDLFKETGRVFKVPTELFGENSWVQVMLGQGLLPEQYHPIVNMMDAKELEEFLTSIKGSVNNMVRQLPPHQRFIDHYCKAPQPQIA

SEQ ID NO: 88708 - protein, 493 aa, Sphingomonas sp.
  misc_feature (1)..(493): tr|A0A0Q4CDW2|A0A0Q4CDW2_9SPHN Tryptophan halogenase OS =Sphingomonas sp. Leaf9 OX=1735674 GN=ASE58_07935 PE=4 SV=1
MSVTRVVVAGGGTAGWMAAAAIARTMGHMVEVTLVESEAIGTVGVGESTIPPLVTYNRLLGINEAEFMAATAATFKLGILFDGWHTPDSRYFHSFGTTGRDHWAAGFQHYWLNGRTRGHDQPYDDYCTELVAALQGRFAHLPNDATNYAYQLDSGRYAQFLRTMAERDGTQRIEGRIARVELNAETGNIAALLLDGDRRVEGDLFLDCTGFRALLIEGALHAGYDDWTHWLPCDAAIAVQTESVGPPLPYTRAMAHDAGWQWRIPLQHRVGNGIVYCSRYLERDAALDRLLGNVEGGVRTEPNFLRFTTGARRRQWHRNCVAIGLSGGFMEPLESTSIHLIQRAVLRLIRLFPQGGVQPADVAEFNDQQLQDMEQIRDFLILHYKVTDRRDSPFWRQCAAMDVPESLQQKIDLFRQSGRVFRRNEELFGENSWVQVMMGQGIVPEGHHPIAGKLSDGELDRLLSMIRRQVADTVATMPPHGDYVARYCPADRP

SEQ ID NO: 88709 - protein, 515 aa, Gammaproteobacteria bacterium
  misc_feature (1)..(515): tr|A0A4Q5V6V1|A0A4Q5V6V1_9GAMM Tryptophan 7-halogenase OS=Gammaproteobacteria bacterium OX=1913989 GN=EOO52_19 310 PE=4 SV=1
MKPIKKIVIVGGGTAGWLTACIIAARHKGREASGFSVTLIESANTPIIGVGEGTWPTMRSTLSRIGVSETEFFRQCDASFKQGALFSRWTTGEASDAYFHPLMLPQGFSQINLVPHWLQQNLHKNSEQNFCDTVCAQGIICQKGLAPKTISHAEFEGVANYAYHLDAGKFAPFLQQHACTQLNVKHLIADVTQVKLTDTGDIDKLMLNEEQEISGDLFIDCTGFRALLIGDAMQVPFKDCKDVLFCDTALAVQVPYEDEFAPIASHTISTAQSAGWIWDIGLPTRRGVGHVYSSQHISDEYAERELAAYLGKDSISPRKIKIHSGHRETFWKNNCVAVGLSAGFLEPLEASAIVLIELSAKLIAEQLPVDREVMDIIAKRFNSTTLYRWGRIIDFLKLHYVLTQRRDSDFWRDNLEPSSIPERLKDLLLLWSYQSPWFHDEFNQVEEIFPAASYQYVLYGMKFKTQVETDTLQNTAKYAERLLRENRNLTEKLGLSLPYHRDLIMKIHERGLQTV

SEQ ID NO: 88710 - protein, 519 aa, Gammaproteobacteria bacterium
  misc_feature (1)..(519): tr|A0A349X1R0|A0A349X1R0_9GAMM Tryptophan halogenase OS =Gammaproteobacteria bacterium OX=1913989 GN=DCW52_0111 0 PE=4 SV=1
MSEQVKRVTIVGGGSAGWLVAGVLASRFKEQAQGGIDITLVESPDVKAIGVGEGTWPSMRTTLQSIGVSETEFMRECDVSFKQGSYFKNWRTGDDDYYHPFSPPGEFSQVNLVSPWQQMHNGSSFADAVSPQIEICRQNKAPKQITTPEYAFILNYGYHLNAAKFGEFLKRHCVDNLQVRYISDHVVGINSNDDDSIKSLQTKQNGDLVADIFVDCTGFASILLGEHYKIGLNKVDRILFNDTALATQVVYKDDQQPISSQTTATAQSAGWVWDIALPQRRGCGYVYSSAHIDHDIAQKEFIDYLSQTIPEAQAQDLSFRKIDINSGYRKNFWHKNCLAIGLSAGFVEPLEASALVMVEMSAKMLADEFPVTKELIPIVANRFNKKFTEHWEQIIDFLKLHYCLTERCDSEYWVDNASQSSYTESMLENLALWQYRPPWHMDTPTIDALFPSASYQYVLCGMGYVSDVTQLPTRSYDQQLNIAQQIFNDVHAKKQKMMSALPTNRELIGKVRAHGFNKI

SEQ ID NO: 88711 - protein, 490 aa, Planctomycetes bacterium
  misc_feature (1)..(490): tr|A0A517PQD7|A0A517PQD7_9BACT Tryptophan halogenase OS =Planctomycetes bacterium HG66A1 OX=2527967 GN=HG66A1_3 3710 PE=4 SV=1
MQQFDVVILGAGFGGSLTALLLDRIGLSVALFDRGTHPRFAIGESSTPAAGYLLQSLAAQYDLPQFEPFCKYGTWQQAHPDISCGIKRGFSYFAHTPHQPFQTQPAHGSELLVTANLSDTLADTHWYRADVDHWFARQVAASGIVYRDQTEVELQHNAPGWQIQGTRLGECIDLQANFLIDATGAAGIVARALGIEAETEFKTHSSAIFGHFRNVAPWQTILNGQGISQNNYPFYCDHSALHHVLDEGWMWQLRFNNGITSAGFVLDGETGQQNWETLLDRYPSIQAQFVSAECVDPEDGLQTTGRLQRGWKECAGPDWALLPHTVGFIDPLHSTGIAHTLCGIERLVTVLEQHTGQGTLTEALATYSHSLQTERSLIDTLVACCYRSRHDFERFWLSTLFYFAAATSYEHLRFHEQQRPWLLCADDERFRQAVTDWYQLVSRQDHSAGHKTDWLQTARELLAPWDRVGLFEPAVPHMYYYTAAPEAEPR

SEQ ID NO: 88712 - protein, 500 aa, Gammaproteobacteria bacterium
  misc_feature (1)..(500): tr|A0A2E8NPM9|A0A2E8NPM9_9GAMM Tryptophan halogenase OS =Gammaproteobacteria bacterium OX=1913989 GN=CMQ25_1218 5 PE=4 SV=1
MKNIVILGGGTAGWMTANLLQKKWRQRGIQISVVESPDIGIIGVGEGSTPLLKEFFDSLEISESEWMPQCNATYKNGISFNDWSTVPGYESYFHPFPCSLDFATFGFLYKYTELRRKGADVLAHPNRFSLMAGLTERKLAPLPAENFPFHFQYGYHFDSVLIGKFLREKAKESGVSHIEATVEKVEQESDGSIKSLLLNTGQILSGDFFVDCSGFASILLQKTLKVPFVSFAENLFNDSAVAIPTDIETEIPAETLSTALSNGWAWKIPLTNRFGNGYVFSSKYCSPDEAETELRSHLNILESDAEARHLKMKVGRVQETWAKNCVAVGLSQGFIEPLEATALQFVYSTIEQFSQALEEGNFSGKNRDEFNARMNANFEGVRDYIVLHYKTNSRSDSQYWIDNRENQKISDNLRAMIECWYAIEDTQEALTRLNIGSYYSQRSWTCLLAGVGVFPKQENLVIPDKENVGMAMKDLKYVDDFIKGCSMNFESHGKLLSRQV

SEQ ID NO: 88713 - protein, 500 aa, Gammaproteobacteria bacterium
  misc_feature (1)..(500): tr|A0A2A5D3P4|A0A2A5D3P4_9GAMM Tryptophan halogenase OS =Gammaproteobacteria bacterium OX=1913989 GN=COA74_0295 5 PE=4 SV=1
MQNNPIKNIVIVGGGTAGWMTAAALSRYLPPKDYTIKLIESDQIGTIGVGEATIPGIRDFNNKLGIDENEFMRATKATYKLGIEFIDWTKKGHAYVHPFSYFGHDLNGVPFHNYWLKQKQLGDTTNISEYSIGYTAAKLNKFSHPTSDQKSVLSKFFYAFHLDATLYANYLRKFSSKAGVERIEGKVINVSTRKSDGFIEKLTLESGQTIQGDLFIDCSGFRGLLIEQTLKTGYQDWSHWLPCDRAIAVQTVSTEDAIPYTKATAREAGWQWKIPLQSRVGNGYVYSSQYISDEQAKQTLLSNIEGEMITEPKFIPFKAGKRNKLWNRNCVAIGLSSGFLEPLESTSIHLIQTSIMKLITHFPDQAFNPVDIQDYNNQMNRQFEQVKDFLILHYKTTQRDDSPFWKYCKSMAIPKELEHRINLFIETGHIVNCEKEVFVYSNWAAVLLGQELFPKVYHPRVDCINPEQLKILLAQMKLTIAKSVSTMPSHLETINRFCKA

SEQ ID NO: 88714 - protein, 521 aa, Gammaproteobacteria bacterium
  misc_feature (1)..(521): tr|A0A2E1PQP9|A0A2E1PQP9_9GAMM Tryptophan halogenase OS =Gammaproteobacteria bacterium OX=1913989 GN=CMQ80_0371 0 PE=4 SV=1
  misc_feature (34)..(34): Xaa can be any naturally occurring amino acid
  misc_feature (38)..(38): Xaa can be any naturally occurring amino acid
  misc_feature (51)..(52): Xaa can be any naturally occurring amino acid
  misc_feature (114)..(114): Xaa can be any naturally occurring amino acid
  misc_feature (134)..(134): Xaa can be any naturally occurring amino acid
  misc_feature (162)..(162): Xaa can be any naturally occurring amino acid
  misc_feature (170)..(170): Xaa can be any naturally occurring amino acid
  misc_feature (179)..(179): Xaa can be any naturally occurring amino acid
  misc_feature (190)..(191): Xaa can be any naturally occurring amino acid
  misc_feature (195)..(195): Xaa can be any naturally occurring amino acid
  misc_feature (201)..(201): Xaa can be any naturally occurring amino acid
  misc_feature (209)..(209): Xaa can be any naturally occurring amino acid
  misc_feature (216)..(216): Xaa can be any naturally occurring amino acid
  misc_feature (233)..(233): Xaa can be any naturally occurring amino acid
  misc_feature (248)..(248): Xaa can be any naturally occurring amino acid
  misc_feature (256)..(256): Xaa can be any naturally occurring amino acid
MNDKAIKDIVIIGGGSAGWLAAGIIAAEHNNPKXDVHXINVTLIESPNISXXGVGEGTWPSMRTTLKKIGISETAFIKDCDVSLKQGTLFAGWKNGSDVYTHPFTVPHGYAEHXLVNEWQESSSHIPFAEAVCXQNTLMLRNQAPKNITTPEYSFNLNYGYXLDAGKFAXKLNTHCTEXLGVIHKRAEVXXINSXENGDLXSLQLDSGXIIQGDLXIDCSGSRSLLLGKHYGXPFSSKQKYLFNDSAXASQVPYSXDDDPIASSTLSTAQSSGWIWDIGLPSRRGIGHVFSSSYTDATLAETELRHYIKNLVGEEVAEQVSTRKIEFSPGHREKFWHKNCVAIGMAAGFIEPLEASALVLVELSANMIAEQLPQNRKIMDIVSKRFNEKFLYRWDTIIEFLKLHYILTERDSSEYWRDNVSRESIPASLQEKMDLWKWQGPYHKDTLHIDEMFPSASYQYILYGMGFKTNPGNFRRSNQETSAVALDLFDENAMRTKQLVSSMPTNRDFIAKVHQYGLQKI

SEQ ID NO: 88715 - protein, 81 aa, Gammaproteobacteria bacterium
  misc_feature (1)..(81): tr|A0A349KJ21|A0A349KJ21_9GAMM Tryptophan halogenase (F ragment) OS=Gammaproteobacteria bacterium OX=1913989 GN =DCS89_03405 PE=4 SV=1
NCWYNTQNLETELKRLNIGSYYSQMSWTCLLSGMGLFPPKEKLTSADTKTAQADLDFVDNFIDGCSMNFKPHEQMLTRGLS

SEQ ID NO: 88716 - protein, 318 aa, Gammaproteobacteria bacterium
  misc_feature (1)..(318): tr|A0A3B9NSN1|A0A3B9NSN1_9GAMM Tryptophan halogenase (F ragment) OS=Gammaproteobacteria bacterium OX=1913989 GN =DCG72_10010 PE=4 SV=1
RIEGRIVDVLQKDNGDIASVVLANGNKISGDLFIDCSGFYGLLIDKTLGVGFDDYGDWLPCDRAIAVQTQSTRPPRPYTRSIAHSAGWQWQIPLQHRVGNGLVFSSQHYSEDEALHRLRQNITGDERTDPRLIKFQTGQRQAHWVKNCVAIGLSASFIEPLESTSIHLIMRAIIRLMQMYPHQQTSASDIQEFNNQMRAEVEFVRDFIILHYHRNDRTRDPFWRDMANLRIPDTLRHRLDLFQETGRVFQAQGDVFGENSWTQVMLGQGLRPKRYHHIVDMMPEAELKAFLNTQRSRVEAMVKVLPSHQDFLSAYLSP

SEQ ID NO: 88717 - protein, 498 aa, Gammaproteobacteria bacterium
  misc_feature (1)..(498): tr|A0A2E1U298|A0A2E1U298_9GAMM Tryptophan halogenase OS =Gammaproteobacteria bacterium OX=1913989 GN=CMQ00_0949 0 PE=4 SV=1
MKNIVILGGGTAGWMAANLLQKRWRQKGVNITVVESPDIGIIGVGEGSTPLLKEFFDSLDISESEWMPQCNATYKNGISFNNWSTVSGYESYFHPFPCSLDFATFGLLYKYTALRRSGVDVLAHPNRFSLMAGLTQKKLAPLPAENFPFHFQYGYHFDSVLIGKFLRGKAKESGVSHIEGTVETVEQDSDGNIKALKLKNGDILSGDFFIDCSGFASILLQRTLKVPFLSFSENLFNDSAVALPTEIEADAPVETLSTALTNGWAWKIPLTNRFGNGYVFSSQYCSPDEAETELRAHLGILDSDVDARHLKMKVGRAQESWAKNCLAVGLSQGFIEPLEATALQFVYSTIDQFAQALEQGDFTNEHREAFNDQMNANFEGIRDYIVLHYKTNSRSDSQYWIDNRENQKISEHLRAMIECWYGIEDMQEALTRLEIGSYYSQRSWTCLLSGVGIFPRQENLAVPSASDALKAKEDLEYVDHFISGCSMNFESHNKFLGR

SEQ ID NO: 88718 - protein, 498 aa, Sphingomonas sp.
  misc_feature (1)..(498): tr|A0A4R2P718|A0A4R2P718_9SPHN Tryptophan halogenase OS =Sphingomonas sp. BK235 OX=2512131 GN=EV292_11229 PE=4 SV=1
MSDGAIRHVVVVGGGTAGWMAAAMLSSRLPRERTRVTLVESAEIGTVGVGEATIPPILDLNRLLGIDEDELIRRTHGTYKLGIEFRDWGAIGQRYFHPFGSYGADIGGVAFHHHWLRLREGELADYSLPTVAAEAGRFAHPAQDPRDVRSKLAYALHFDASLYAAFLGERAIADGTERVEGRIVAVERDGASGDVTRLRLADGRAIDGDLFLDCSGFRGLLIEEALGTGYEDWSRWLPMDRAIAVPTERIAPPVPFTRSTAGAAGWRWRIPLQHRTGNGHVYCSRFLDDDTAERQLLDALDAPALAAPRRLRFTTGRRRRAWNHNVVALGLASGFIEPLESTSIHLVQQGVQTLMSLFPRGAIEPAEVAQYNRLMQRDYEQVRDFVILHYKQTARDDTPFWRMAAAMAVPDTLAERMALFAANGRIVPEPGELFTPTSWAAVMLGQGLSPRGYDGQADLYPEETMGAQLRRMADLVRRGAAALPTHADYLAQPQRASG

SEQ ID NO: 88719 - protein, 498 aa, Gammaproteobacteria bacterium
  misc_feature (1)..(498): tr|A0A2E4G710|A0A2E4G710_9GAMM Tryptophan halogenase OS =Gammaproteobacteria bacterium OX=1913989 GN=CMQ31_0484 5 PE=4 SV=1
MKNIVILGGGTAGWMAANLLQKRWRQKGVNITVVESPDIGIIGVGEGSTPLLKEFFDSLDISESEWMPQCNATYKNGISFNNWSTVSGYESYFHPFPCSLDFATFGLLYKYTALRRSGVDVLAHPNRFSLMAGLTQKKLAPLPAENFPFHFQYGYHFDSVLIGKFLRGKAKESGVSHIEGTVETVEQDSDGNIKALKLKNGDILSGDFFIDCSGFASILLQRTLKVPFLSFSENLFNDSAVALPTEIEADAPVETLSTALTNGWAWKIPLTNRFGNGYVFSSQYCSPDEAETELRAHLGVLDSDVEARHLKMKVGRAQESWSKNCLAVGLSQGFIEPLEATALQFVYSTIDQFAQALEQGDFTNEHREAFNEQMNANFEGIRDYIVLHYKTNSRSDSQYWIDNRENQKISENLRAMIECWYGIEDMQEALTRLEIGSYYSQRSWTCLLSGVGIFPRQENLAVPSASDALKAKEDLEYVDHFISGCSMNFESQNKFLGR

SEQ ID NO: 88720 - protein, 508 aa, Sphingomonas sp.
  misc_feature (1)..(508): tr|A0A4R2PAI4|A0A4R2PAI4_9SPHN Tryptophan halogenase OS =Sphingomonas sp. BK235 OX=2512131 GN=EV292_11043 PE=4 SV=1
MRADSIRRVVIVGGGTAGWMAAAAIARVLGEIPGLSIELVESEAIGTVGVGEATIPQIVLFNKMLGIDEAEFLRETRATYKLGIEFVDWLRPGHRYVHPFGFYGLDMKGIEFHHFWLKGRALGDDTPLDAYSLAVVAGLQGRFAHPRPDQPGSPLSKLGYAFQFDAGLYARFLRRLAEANGARRTEGRIVAVERDGESGHVAAVVLESGARVEGDLFLDCSGFRGLLIEETLGTGFEDWRHWLPCDRAVAVPCANGGDRQPLTRSTARAAGWQWRIPLQHRIGNGYVYASQHLSDDEAAATLLANLDGAPLGDPRPLRFTAGHRRRAWVGNTVALGLAGGFLEPLESTSIHLVQSAIARLLTYWPTRRFDQREIDRFNAAHVADYRDIRDFLVLHYKATERRDSPFWDYCRTLEPPPGLADKLAIFAANGRIFREGDELFTETSWLSVMVGQGIAAGGYHPAADLLSDAETLARLDHIRRVVAETAALLPRQDDHLRGLGCELVGLAA

SEQ ID NO: 88721 - protein, 503 aa, Gammaproteobacteria bacterium
  misc_feature (1)..(503): tr|A0A4V1ZQR1|A0A4V1ZQR1_9GAMM Tryptophan 7-halogenase OS=Gammaproteobacteria bacterium OX=1913989 GN=EOO53_11 450 PE=4 SV=1
MTFGQADAIQKIVIAGGGTAGWMTAAALANALGKTCEIHLVESAEIGTVGVGEATIPHIQLFNEMLGVDEDEFMRKTQATFKLGIDFVNWKQKGHRYVHPFGSYGEDIAAVPFHHYWLKLSQAGIAPALEEFSITIQAAYANKFMRPVDIPDSPLSAFNYAFQFDAGLYAAFLRDYAGQRGVQRFEGKIAQVKLRAHDGFIESLALENGQLMSADLFIDCTGFRGLLIEQALNTGYDDWSQWLPCDRAIAVPCANADVLTPYTRATAHTAGWQWRIPLQHRIGNGHVYSSRFMSDDEACAILMKNLDGEAMAEPKQLRFKAGKRKKMWVKNCVAIGLASGFMEPLESTSIHLIQTAIARLISLFPSRAFHQREIDFYNQHGAYEYERIRDFLILHYKATERNDSPFWDHCRNMEIPQYLQDKIDLYQNSGRIYRENDELFGVTSWLAVFEGQGIKARAYHPMVDKLATGEIQARVADYQKVLRKCTSLMPAHIDYIQQHCRSF

SEQ ID NO: 88722 - protein, 493 aa, Sphingomonas sp.
  misc_feature (1)..(493): tr|A0A4R2P8Q6|A0A4R2P8Q6_9SPHN Tryptophan halogenase OS =Sphingomonas sp. BK235 OX=2512131 GN=EV292_11045 PE=4 SV=1
MLDDPIRSVAVVGGGIVGWSAALALRRRVPGLTVTILASPPAPDALADRMPQTLPSTIGFHDDLGLREEDAVVRAGGTWRLGTLFEGWVEGLPPYVHAYGSYGRPFGTASFHQHWVRAARAGAAAPFDSHAPAAALARAGRVGTGATDPLLGDVQPGLVLDVEDYRAMLAAFARHLGVGVREGSVAAVRLRGDDGFVERLVLDDGASLEADLYVDASGPGAIVRGAIDQEREDWSAWLRCDRLVTGEGTPAPLSPLDRVTATDGGWRWRSAAPGRTLHGLCYAGAALSDAAAGKALAAAGATTIAAPVSFRQGTRPAPWARNCVAVGDAATVIEPLDFTNLHLAQSAIDRIVAMLPGRACHPLELADYNRQTSAEVARVRDFVLCHYATARRPGAFWQPPAALPESLERTLRLFAERGRLSFFEEETFARDDWLALLLGQGVLPRRVDPLIDVTAAADSDRAMAAYRAAIAQAVARCPTADDYLATARGRLAR

SEQ ID NO: 88723 - protein, 495 aa, Gammaproteobacteria bacterium
  misc_feature (1)..(495): tr|A0A4Q5Q745|A0A4Q5Q745_9GAMM Tryptophan 7-halogenase OS=Gammaproteobacteria bacterium OX=1913989 GN=EOO53_08 285 PE=4 SV=1
MNLPIKKVVIAGGGTAGWMAAATISHHLGPVLDIRLIESEEIGTVGVGEATVPPMQTFHKLLNIDEQEFLRATQGTFKLGINFENWGQKGDEYIHSFGITGKELWMADFVHFWVKAKGMGLKQDYGDFCLELQAAKMGKFAITENPRTNYAYHFNASLYAKFLRKYSEARGVRRTEGKIVEVATHSDNGFIKSVTLASGEVVEGDLFIDCTGFRGLLIEQTLHTGYEDWSQWLLNDSAIASQTKNPGPALPYTRAVAHQAGWQWHIPLQSRIGTGFVYCSKYISDEDARKTFIDNLPGELINEPIVLKFKTGRRKKSWNKNCIALGLSSGFIEPLESTSIHLIMNSALRLVRFFPSNGIQEANVAEYNQQTVNEIERIRDFVILHYKATERDDTPYWRYCRDMAIPETLAHRINLFKETAIAYKAEGEIFFMDSWSQVMIGQRIIPSAYHPYVDAINHQDLCKYMEEFSEDIKKRAMVLPSHEDFVRAYCSENDA

SEQ ID NO: 88724 - protein, 501 aa, Sphingomonas sp.
  misc_feature (1)..(501): tr|A0A0Q4CQF2|A0A0Q4CQF2_9SPHN Tryptophan halogenase OS =Sphingomonas sp. Leaf9 OX=1735674 GN=ASE58_10670 PE=4 SV=1
MHAFDRVRRVVVLGGGTAGWMTAAALSKSFGDTVAITLLESDAIGTVGVGEATIPTIHWFNELVGIDEAEFLRATKATFKLGIEFVDWTAPGHRYFHPFGQFGATLPGVAFHHRWLKAQAEGMDVPLPALSLAAQLAVQGRFAKPAGDARSILSTLGYAYHFDAGLYAAYLRKLSEAAGVIRVEGTLHQVERDGETGFVTALTTDRGDRIEGDLFIDCSGFRALLIAGEMGEGYEDWSHWLPCDRAVAVPCARIAATTPYTRSTARSAGWQWRIPLQHRTGNGYVYASRYLSDDEAAATLLANLDGEALAEPRFLRFTAGTRRRPWRGNVVAIGLSSGFLEPLESTSIHLIQSGITKLLTLFPTRDCDPALADRFNHVFARDMDGIKDFLILHYHATSGRDDPLWRHCRTMALPETLRARVDQYRRSGRIILDPDELFREASWLAVLNGQGIVAQGHNPLADAIDGATNRAQVRQIADVIARAAPTLPLHDAALAALIGTA

SEQ ID NO: 88725 - protein, 501 aa, Gammaproteobacteria bacterium
  misc_feature (1)..(501): tr|A0A4V1ZQA2|A0A4V1ZQA2_9GAMM Tryptophan 7-halogenase OS=Gammaproteobacteria bacterium OX=1913989 GN=EOO53_18 385 PE=4 SV=1
MNAKQVLIVGGGTAGWMTALIMARSWIKLGFEISLLESPDVGIIGVGEGSTPALKQFFDKLDIKEEEWMPECNATYKCGISFDNWSTKPGCESYFHPFASTMDMHTLKFFIHNARMRVSGVNVYAHPNRFFLSAQIAEKNLSPIAHYNFPFDVLYGYHFDAVLLGQFLKKKAIAMGIEYRVGHLQDVILNESGDIESIKLDDGDSIGADFFVDCTGFRSLLSQQALKTPFKSFSNNLFNNAAVAMPTAIGDLIPSQTVSTALKHGWAWKIPLTNRVGNGYVYSSDFCSADDAEFELRERLGLLDADVPVCHLKMKIGQVEKHWNHNCLAVGLSQGFIEPLEATALFLVQQTAAIFVEMFEAGKFTAEYRDKFNKRIYDHFEGVRDYIVTHYKTSSRSDTEYWRANTKDQADVSETMKILYSAWMNGLDIQAEVKRLRIENYYTAPSWICIFAGMGIFPSEKRLRAASPGESIFSFDNLDDFLKRCSLNFDDHKNYLEQNFK

SEQ ID NO: 88726 - protein, 501 aa, Sphingomonas ginsenosidimutans
  misc_feature (1)..(501): tr|A0A2A4I2C8|A0A2A4I2C8_9SPHN Tryptophan 7-halogenase OS=Sphingomonas ginsenosidimutans OX=862134 GN=COA17_03 030 PE=4 SV=1
MSTDRRISRIVILGGGTAGWMTAAALSRSFGPTVAITLLESDEIGTVGVGEATIPTIHWFNDLIGLDEAEFLRETKATFKLGIEFVDWTRPGHRYFHPFGQYGAPLPGVAFHHRWLKARAEGSALPLSALSLAARLAGDGRFARPVGDARSILSTLGYAYHFDAGLYARYLRRLAEAGGVVRVEGRLRDIVRDGDSGHVTALVTERGETLEGELFVDCSGFRALLIDGAMGEALEDWSHWLPCDRAVAVPCARVAATTPYTRSTARAAGWQWRIPLQHRTGNGYVYASAHLSEDEATATLLANLDGEPLAAPRTLRFTAGTRRRPWRGNVVAIGLSSGFLEPLESTSIHLIQSGITKLLTLFPDRDMDPALADRFNGLFGRDMDGIKDFLILHYHATSGRDAPLWQHCRTMTLPDTLVARVAQYRRSGRLILDSDELFREASWLAVLDGQGVTASGYNPLADALDADTNRAQVEQIAQVIARAAPTLPMHDDALAQLIGAP

SEQ ID NO: 88727 - protein, 514 aa, Sphingomonas sp.
  misc_feature (1)..(514): tr|A0A4R2PD31|A0A4R2PD31_9SPHN Glycine/D-amino acid oxi dase-like deaminating enzyme OS=Sphingomonas sp. BK235 OX=2512131 GN=EV292_10652 PE=4 SV=1
MRKRVLIVGGGTAGWLTAGYLAKRLGADLADGVAITLVESKDIGVLGVGEGTFPTIRRTLATIGVDEAELVRRCGATFKQGARFVHWQRAPGTLGRDHYMHPFQVAEAPGGLELLPYWLSGAAGDAEWDEVSTPQKAAADAARAPKLPTHPDYVGPLNYAFHFDAVALAGLLRERAVANGVTHLIDTVTHVALDHSGAIERVETERHGALTADLYVDCTGFRAELIGKAMGVPFRSCRDVLFCDRALAAQLPYEAADAPIASQTISTAQEAGWIWDIGLDRRRGIGHVYSSDHSDDDAAERALRRYLGARGEQAEVRRFRFEAGFREVNWRRNCVAVGLSSGFFEPLEATGIAFAEVSAAMIANLFPWSGDHETSARQFNANLLRRYERALDFIKLHYCLSERRDTDFWRDNVAGSSNTASLLELLDRWRHRWPNELDIDPQVDIFTEASWQYVLYGMGWRTDLSARAGALRYRDDARRAFGEVRRQVGVALANLPAHRALVEAAQHRGFGGGA

SEQ ID NO: 88728 - protein, 504 aa, Gammaproteobacteria bacterium
  misc_feature (1)..(504): tr|A0A2E7DK72|A0A2E7DK72_9GAMM Tryptophan halogenase OS =Gammaproteobacteria bacterium OX=1913989 GN=CMQ41_0306 5 PE=4 SV=1
MDKPSVKNIVILGGGTAGWMTANLLNQKWQHLGVKITVVESPDIGIIGVGEGSTPLLKVFFDSLGISESEWMPECNATYKNGITFNNWSTVNGYEGYFHPFPTSLDFATFGFLYKYSALRRKGLDILAHPNRFSLMANLTEKRLAPLPAESFPFHFQYGYHFDSVLIGKFLREKAKGLGVEHIEATVENVEQGENGDIKFLMLNTGQNLSADFFVDCSGFASILLQKTLNVPFQSFAENLFNDSAIAIPTEIEPNIPSETISTALSYGWVWKIPLTNRFGNGYVYSSKYCAPDEAEKELRAHLGLLDSDIEARHLKMKVGRSEETWRNNCVAIGLSQGFIEPLEATALQFVYSTIDEFAKAFEEGGFTNQHREEFNTRMNLNFEGIRDYIVLHYKTNSRNDTQYWIDNRENQNLSNNLKEMIECWYAIEDIEATLTRLNIGQYYSQRSWTCLLAGMGIFPRQENLDSADAENAKAAQSDLDYVDNFITGCSLNFQAHEKMLVKG

SEQ ID NO: 88729 - protein, 523 aa, Sphingomonas sp.
  misc_feature (1)..(523): tr|A0A4V2SP87|A0A4V2SP87_9SPHN Tryptophan halogenase OS =Sphingomonas sp. BK235 OX=2512131 GN=EV292_104227 PE=4 SV=1
MSDNQRHDDSAVRQVVVVGGGSAGWIAACRLAAQAQRSGSPVTVTLVESARIPTVGVGEGTWPTMRNTLAKIGITETDFVRGCDAAFKQGARFVGWADDSPDDGYYHPLNPPAGATELDLAPHWRAQADTPGAQDFAGWVDFQAALCDAGLAPKAITMPEWVGQANYAYHLDAGKFATLLRDHAVERLGVRHVIGDVARVDQAPDGDITALVLADGDMVAGDLFVDCTGFAALLIGGVYGVPFRGCGDVLFADRAVALQVPYDSEDAPIACHTVATAQPAGWIWDIGLWTRRGVGHVYSSAHTSDDAAEAALRRYIGPAADALVARRITIEGGHRERFWQNNCVAVGLSAGFIEPLEASALMLIEASMDAIADRLPRTRGAMRVAARQFNHAFTHHWARIIEFLKLHYAITRRTDTDFWRDHAAPATWPDGLDERLALWRTHPPAPHDFAHAREVFSWPSYQYVLHGMGFATDYAAVAPAAPESALARRMIARTDRLRAEAVQRLPRHRDLLRAVREHGLQVV

SEQ ID NO: 88730 - protein, 496 aa, Gammaproteobacteria bacterium
  misc_feature (1)..(496): tr|A0A4Q5QA17|A0A4Q5QA17_9GAMM Tryptophan 7-halogenase OS=Gammaproteobacteria bacterium OX=1913989 GN=EOO53_07 705 PE=4 SV=1
MNKLIKKVVIVGGGTAGWMSAALLKKTLGSVVEIELVESEEIGRIGVGEATIPPIRYFNQALGVNEADFLRETKASIKLAIKFEGWRVPDESYYHTFGATGKDFVWCPFYHFWIRANQLGHTTNLWDYNLNYLCAEANKFAPLTAKDTALEMPYAYHFDASLYAIFLRKFSENLGVKRTEGLVEQVNVNPDSGYVENLALKNGTKINGDLFIDCSGSRALLIQQKLETGFEDWSHWLPCDRAIAVPSERLDITLAYTRSIAHAAGWQWRIPLQHRVGNGIVYSSNHCSQDEATNILLNSLGSKPMADLNFISFKTGRRLKQWNRNVIAIGLSSGFLEPLESTSIHLIQSALVRLLKLFPRAGIDEANVSEYNKQSKIEFEQVRDFIILHYHVNERTDSQFWRDLRTMKIPESLTHKINLFRSTGKIIREHDDLFSESSWLQVLVGQGIMPRDYHPLADGISEKDLLEMLANMRKIKQSPISHLPSHDEFLKQVCAV

SEQ ID NO: 88731 - protein, 495 aa, Gammaproteobacteria bacterium
  misc_feature (1)..(495): tr|A0A2E1PQV5|A0A2E1PQV5_9GAMM Tryptophan halogenase OS =Gammaproteobacteria bacterium OX=1913989 GN=CMQ80_0372 5 PE=4 SV=1
  misc_feature (467)..(467): Xaa can be any naturally occurring amino acid
MQVEKDTVKKIVIVGGGTAGWMAAASISSLIGKDFEITLVESDEIGTVGVGEATIPTFFALHQLLKIDEAEFLSEVQGTIKLGISFENWHKLNETYIHAFGHTGKSCWAAGFHHFWLKGKECGYSDDYGCYSAELAAAKAEKFGFLKQNKLNYAYHLNAGLYAKYLRKLAEKNHVVRQEGRIKTVNQDASGNIASVVIESGKTIVGDFFVDCSGFSGLLIDKALKTEYQDWSHWLPCDRAIAIQTKSTQAPVPYTRSIAHESGWQWRIPLQSRVGNGLVYSSRYMNDEVALETLMSNIDGEVLSTPNFIKFKTGQRTQHWNKNCVAIGLSAGFLEPLESTSIHLIQRAIIRLMQMFPFQGVTDSDRDEFNKQMSDEYEYIRDFIIMHYHVSQRDDSKFWRDCRSMEIPSTLQHKLDLFVEAGRVFHGEGDVFAENSWTQVMLGQGLMPNQYHPIVNMMSDSELENFXSSLKTMVDQSVKQLPSHELFLSKYCPAT

SEQ ID NO: 88732 - protein, 498 aa, Gammaproteobacteria bacterium
  misc_feature (1)..(498): tr|A0A4Q5QAJ6|A0A4Q5QAJ6_9GAMM Tryptophan 7-halogenase OS=Gammaproteobacteria bacterium OX=1913989 GN=EOO53_02 065 PE=4 SV=1
MPNKKMKVVIAGGGTAGWIAAAALAHQMGEILDITLVESQEIGTIGVGEATIPPMRTFHRLLGINEQEFMRATNATFKLGIQFENWEKIGGKYFHSFGITGKQTIVTDFIHFWLRGRELGIAQEFGDYCLEFKAALKNRFSINEQAKVNYAFHLDAGRYASFLRERAEARGVKRFEGKIAQVKQNPESGFITSLKMESGQDIPGDLFLDCTGMRGILIEQTLQTGFEEWGHWLPCDSAIAIQTESTGPAVPYTKSIAHHAGWRWQIPLQHRVGNGIVFSSQHLSKDEALNMLLSSVDGKGLTEPNVIKFKTGRRKKSWNKNCIAMGLASGFLEPLESTSIHMIMTAVTRLLLLFPHGEIKQSIVDEYNSQAESEFIRIRDFIILHYKATERDDSPFWRYCKDMEIPHDLMHRINLFKDFGRSNQVEGELFRLDSWTQVMLGQGIIPASYHPIVDLMPERDLQLFLNSIATDVDKNIAMMSTHQDFLKKYCPSVVSNIK

SEQ ID NO: 88733 - protein, 497 aa, Gammaproteobacteria bacterium
  misc_feature (1)..(497): tr|A0A4V1ZQN8|A0A4V1ZQN8_9GAMM Tryptophan 7-halogenase OS=Gammaproteobacteria bacterium OX=1913989 GN=EOO53_13 620 PE=4 SV=1
MTSEKPKKILIVGGGTAGWMAANLMASRWEDIDVCLLESTEIGIIGVGEGSTPHLKFFFDSIGVSESEWMPRCNATYKNGISFANWSSVPGHESYFHPFPAQTDDFTVPTFFSNAKARIQGNNVNAHPDNYFLETYLTKKNLGPIAAESFPFQIFYGYHFDATLVGQFLAEKAVGRGVKRIFGTVTEVVLGAKGEITAVRLNDDSFLEADFFIDCSGFKSLLLQDALKVTFNSFKENLFNNAAVVMPSAISEIIPPETKSTTLSNGWAWKIPLVNRYGNGYVYSGDYITPDQAETELRQHLGLLESDVAARHLQMKVGRAEKHWEKNCLAIGLSQGFIEPLEATALALSYETITGFIKHYENGFYTNKFAEIFNNEINAKFDGVRDYIVCHYKANQRKDTNYWKDNAVNPKVSDSLNKILYLWRTSQNFANDMRIHNLEGSYQAKSWACLLAGYGVLPPLESSATNAGYTSPHDLDQLADFIRRCGLNFKNHNDLLN

SEQ ID NO: 88734 - protein, 490 aa, Oleiphilus messinensis
  misc_feature (1)..(490): tr|A0A1Y0I4M3|A0A1Y0I4M3_9GAMM Tryptophan halogenase OS =Oleiphilus messinensis OX=141451 GN=OLMES_1344 PE=4 SV =1
MDNSECDIVVIGGGPAGSTIARQLARYGYRVCLLEKSRFPRNKVGESLPPGILPVLDSIGLRSRIENAGFLRPSRARVVWSTGTDELRNQAGEPGFQVCRAKYDAILLDEAVQCGVQVMQPVQIESITKLEENHWMVTFSVEGTHHRDSKRSELRARFLVDASGKKGVLKSLVSGRMRRLSTPTLALYGYWSPGREHSIESRIEAGNNAWFWGAVLPDGRINKAVFVSANSLQIQRDERKHEAITRLYLEKLAESRLLHRFGSKCLGPVVACNASSYIAEQSVGDDFIRVGEAGLAIDPLSSQGVQTAMNSAIQGAIVVHTLLQKPEARDQAKQFFEARQTETAQRNMQWSKAMYADQNVVEDSEFWRQRAHYPVSILPDTGHKEDPRFAEPNNTPLSFDVAVKLSDWLVIEPTPVISQNVITERAAAAHPALPRPVAFLEQVELVPLLATVVAGEHLGMIVRRWTNWMPLQKSLDIVLWLWRHHILVPV

SEQ ID NO: 88735 - protein, 157 aa, Gammaproteobacteria bacterium
  misc_feature (1)..(157): tr|A0A3B9NS72|A0A3B9NS72_9GAMM Tryptophan halogenase (F ragment) OS=Gammaproteobacteria bacterium OX=1913989 GN =DCG72_10005 PE=4 SV=1
MTNPNPQSNVVIVGGGTAGWMAAAALSKLLGKTLNVRLVESEEIGTVGVGEATIPTLMTLHRLLKIDEAAFLKATQGTIKLGIQFENWQKEGHQYFHSFGYTGEGCWAAGFQHFWLKGQQLGFGDPDYGQYAPELVAAQAEKFGFLKPAALNYAYHM

SEQ ID NO: 88736 - protein, 517 aa, Gammaproteobacteria bacterium
  misc_feature (1)..(517): tr|A0A2D5L8J6|A0A2D5L8J6_9GAMM Tryptophan halogenase OS =Gammaproteobacteria bacterium OX=1913989 GN=CMP86_0242 0 PE=4 SV=1
MEHAIKRIVVVGGGSAGWITAGLLAAEHGHNSAADFSVTLLESPNVPIIGVGEGTWPSMRSTLQKLGLSEIEFLRECDASFKQGTEFVNWSNQKAPERYIHPFSLPSEFASLNLANYWLEQRQHCDFADFVSPQAQVALSGLAPKQCQTPEFAFNVNYGYHFDAGKFAQLLQRHVTQVLGVEHVLGHFEQVISDHQGDIGALALNDGRHIEGDLFIDCTGQRSLLIGEHFGTPLQAVDTMLFNNRALAVQVPYADAQAPIASTTRATAQQVGWIWDIGLQSRRGIGYVYSDQYQDLQGAESTLRAYIADTSPGVETMSLALRPIEFQPGFRQQFWVRNCVAVGLSAGFVEPLEASALALVEQSANIISDHLPRTRQVMDIVAKRFNEKMHYHWQAILEFLKLHYVLSKRSEPYWQDNARRESCPDALVEKLRLWQQQPPWHEDAPRIDELFPSASYQYVLYGMGFEPGQGGRARASHLREQAKAAQVVRLNRERTEKLRQGLPSNRELLTALVGQTG

SEQ ID NO: 88737 - protein, 525 aa, Gammaproteobacteria bacterium
  misc_feature (1)..(525): tr|A0A2E1IC99|A0A2E1IC99_9GAMM Tryptophan halogenase OS =Gammaproteobacteria bacterium OX=1913989 GN=CMQ88_0382 5 PE=4 SV=1
MKNTINRIVIVGGGTAGWLTAGIIAAEHYIASSLSSGENNFHLVLIESPDIPTIGVGEGTWPSMRSTLKKIGISETDFFRQCSASFKQGTEFHNWTEGKDDTYTHPFTMPHNFHESNLAPHWQQIREKVNFANAVNPQSALFDSQLAPKNIATPEYAFHVNYGYHLDAGKFAELLRQHCVGKLGVEHVSANLTAINSAENGDIASISTDTQGEVFGDLFIDCSGSRALLLGEHYGIPLVSKSQYLFNNSALAAQVPYENPDDPIQSATLSTAQTAGWIWDIGLPTRRGIGHIYSSDYTTEQSARTELLDYIAKTAGKQAAAEATIRKITFDPGHREKFWHKNCVGIGMSSGFIEPLEASALVLVELSAAMIAEQLPANRKIMDLVAKRFNEKFLYRWDRIVDFLKLHYVLTQRTDSQYWIDNCKPSSIPQSLQDLLEIWQFQPPWHRDTQHADEMFPAASFQYILYGMNYKTQIDPSSRRSDRETSGKAMELFAENAKRTQQLMHTMPTNRELINKIYKYGFQKI

SEQ ID NO: 88738 - protein, 511 aa, Massilia sp.
  misc_feature (1)..(511): tr|A0A4R2W2R9|A0A4R2W2R9_9BURK Tryptophan halogenase OS =Massilia sp. GV090 OX=2135673 GN=C8K01_11086 PE=4 SV=1
MDQGRGRAICKIVIVGGGTAGWMTAAPLALRLGKACEIVLVESPEIGTVGVGEATLPTIAYYNRALGLDPADFARKTKATFKLGIEFKDWGHVGNRFFHGFGDFGPAIENRSPYMYWLRLAREFKDMPSYEDWSAATAMARANRFMEPYGDQPAVTNAFSYAYHFDAGLYAAYLRDYAMQRGVARIEGMITAVEQHPETGLITAVRLRDGSRVEGDLFIDCSGFRGLLIEGVYQAGYDDWSAMLPCNSAQAVPCARVEPLTPYTRSTAQSAGWTWRIPLQHRTGNGHVYCNGFTSDEEASRVLLAGLDGRALDEPRQLRFTTGRRRKSWVKNCVAIGLSSGFLEPLESTSINIIENSVGWLLQHFPDRDFQPALADEFNRLVSRRYESVRDFIVMHYKITQRDDSEFWRYCASMPVPDTLLHQIELFRETGRVAIYDPEGFQVSSHISIMAGLGITPKTYDPLIDLMDLQALRTHFNRVRDTISRAVQAMPDHGAYASQLAAEPPLSGLAA

SEQ ID NO: 88739 - protein, 519 aa, Kangiella sp.
  misc_feature (1)..(519): tr|A0A2G2KYP5|A0A2G2KYP5_9GAMM Tryptophan halogenase OS =Kangiella sp. OX=1920245 GN=COA86_13495 PE=4 SV=1
MSKIIKDIVIVGGGTAGWLTACNLAKQLNVKAKNSFTITLVESPDIPTIGVGEGTWPTMRKTLHRLGIDEAEFMKECDATFKHGTKFVNWRQSPKDGSSEYYYNLFTSYVDPSEFNLAPYWKMGYAGEGKSYPDSVSMQEQVSEHGLAPKKITTPQYDGIVGYAYSLNAGKFGKMLNRLAVEKLGVEHKLANVNSVELDEEGFIESITTDRLGTIKGDFFVDCTGARALLIGEALGIEYIPFTDTILTNQAIFMQVPYENENSPIVPCTVSTAQECGWTWDIGLTNRRGVGYVYSDAYCDAERAEKVLRDYIGPQSEQLTAKQVKVNVGQRKRSFHKNCLALGMAAAFVEPLEASAIFLMEAGSNMLADLFPRHRDALPQVEKTFNESFNYRWAKTVDFIKMHYYLSRRDDNDFWLDNRDLKTVPESIQIKLAHWKTQPISKYDFPNTFEPFAMESYQYILYGMENDIDFSQHSAGFGEVDKAKRIFNEVERATEIALRELPNHRTLINKIHQFGLPRV

SEQ ID NO: 88740 - protein, 501 aa, Streptomyces griseoflavus
  misc_feature (1)..(501): tr|A0A0L8MQA2|A0A0L8MQA2_9ACTN Tryptophan halogenase OS =Streptomyces griseoflavus OX=35619 GN=ADK76_31385 PE=4 SV=1
MPASSEEFDAVVVGGGPGGSTAAALIAMAGHRVLLLERERFPRYQIGESLLPSTIHGIGRLLGVEEELHEAGFMRKRGGTFRWGSAPGTWTFSFADAPGLGETGGYAYQVERMRFDALLLDHAGRVGADVREECAVRAIHHHDGRVTGLTYRSPEGTEAEIRARYVIDASGNTGRLHTAAGGRRVYSPFFRNIAVFGYFEGGRRLPPPNQGNILCAAFDTGWFWYIPLTDRLTSVGAVVNREHADQVQGNPEQALAKLVNQCALIRDHLADARRVTEGTYGRVRVRKDYSYCNTRFWAPGVALVGDAACFIDPVFSSGVHLATYSAMLTARSVNSVLGAGMDEGRAFGEFEARYRREYTVFHDFLAAFYSMQAPKDTYFWQAHKVTGGRAGALASFINLVGGLASGDRVLIDADQLTGRLATASRVLDETADGYQADPAGDPWDESPMLAETFAQSDALAGQGVARGDFAEKTPQFPGGLVATADGMHWAEPAGEPPGGTP

SEQ ID NO: 88741 - protein, 158 aa, Pseudomonas avellanae
  misc_feature (1)..(158): tr|A0A261WL00|A0A261WL00_9PSED Tryptophan halogenase (F ragment) OS=Pseudomonas avellanae OX=46257 GN=CFN58_101 10 PE=4 SV=1
MIPAPLRNIVIVGGGTAGWMAAAAFARVLGPTFKVQLIESEQLGTVGVGEATVPHIKAFNNLLGIDEAEFVRQTQGSFKLGIEFVDWQRPGSTYMHGFGTQIGHPLGLLPFHQYWIKQHARGKAQPLGAYTLNTVAAARGKFMTSAGDVPANSLLANI

SEQ ID NO: 88742 - protein, 502 aa, Alteromonas sp.; identical to SEQ ID NO: 88058
  misc_feature (1)..(502): tr|A0A010QHG1|A0A010QHG1_9ALTE 2-polyprenyl-6-methoxyph enol hydroxylase-like oxidoreductase OS=Alteromonas sp. ALT199 OX=1298865 GN=H978DRAFT_3365 PE=4 SV=1

SEQ ID NO: 88743 - protein, 507 aa, Porphyrobacter sp.
  misc_feature (1)..(507): tr|A0A2L0GN21|A0A2L0GN21_9SPHN Tryptophan halogenase OS =Porphyrobacter sp. HT-58-2 OX=2023229 GN=CHX26_14675 P E=4 SV=1
MADGLPAPLRHIVIVGGGSAGWMTAAALADAVGQSCAITLIESEAIGTVGVGEATIPPIRHFNQRLRIDEATFVRETQGSYKLGIEFVDWGRKGHRYFHPFGQYGAEFDSVPFYHHWMREHLAGRVDGPIDDFSMCWAMAKAGRFTHPSPDRRMIQSTFDYAYHFDAGLYAAFLRRFAESRGVRRLEGKVVDVSLRGENGFIEAVTLDDGTRVAGEFFIDCSGFRGLLIEEALAAGYDNWQHWLPCDRAVAVPCERGEFTPYTRSTAREAGWQWRIPLQHRTGNGYVHCSEFISEDQATATLLANLDGQPLADPRPLRFVTGRRREFWKRNCVAIGLSAGFMEPLESTSLHLIQYAILRLIALFPDSAMSPLLSREYNAQTAREYELIRDFLILHYKASERQDSELWRYCSAMPIPDSLQYKIDHFKEHGMLVADGQELFANPSWIAVYLGQGIVPQRAPALAHMRGAVPVAERMAQVRAAMSEAVAAMPSHSEFIARHCAAPQVAA

SEQ ID NO: 88744 - protein, 536 aa, Sphingopyxis sp.
  misc_feature (1)..(536): tr|A0A095B2C2|A0A095B2C2_9SPHN Tryptophan halogenase OS =Sphingopyxis sp. LC81 OX=1502850 GN=FG91_01208 PE=4 SV =1
MSVVRAANYRLLKALCGSIAFRVAKRSILIVGGGTAGWLTAAYLARFFDLPRNPRLSITLLASDEIGSIGVGEGAFPTIRNTLQFIGIDESAFVRATSATFKQGIRFDDWVRTPADGRSSHYLHPFEAPYHGDGYSLVSYWLLQNEATRRPFAEAMTIQNRVAEAQRAPKRPGEGEFTGPLNYAYHFDAARLAEVLSAEARAMGVTHLSGTLTGVGLDATSGAIDHVVTAEHGTLAADLYIDCSGFRAELIGGALQSPFKGVKHQLFTDRALACKLPYERPDVPIESYTIAAAHEAGWTWDIGLAGARGIGCVYSSDHMGDDRAAEILAAYTGGRSHDVNVRSIPFEAGYRPASWVKNCVAVGLSGGFLEPLESTGLVMIETAAAMIAEMFPLAGPVGAPARRFNDLMAARYDNTINFLKLHYCLSQRKEAFWRDNGDPASIPDRLKELLEEWRYRPPGRFDFILDLESFAFFNYQYILYGMEYRTDLSPVREEFPDTAEAERIFARIKSFGDRAASELPAHRAMIDQINAGAAYA

SEQ ID NO: 88745 - protein, 518 aa, Stenotrophomonas sp.
  misc_feature (1)..(518): tr|A0A4Q7RRH5|A0A4Q7RRH5_9GAMM Tryptophan halogenase OS =Stenotrophomonas sp. BK441 OX=2512175 GN=EV592_1850 PE =4 SV=1
MTHSIRHVVILGGGSAGWLTAGVLAAEHGGPGADDLRITVIESPDVPIIGVGEGTWPTMRDTLRRIGVSEADFIRECEGAFKQGSQFVDWTDAGPHDTYYHPFHLPGGYDEADLVGGWRAHHPGAQFDHLVCAQPHLCDANKGPKQFATPEYASVANYAYHLDAAKLGGFLRQHCVSRLNVRHVPDLVTDVLSHDNGDIAALRTREHGDIAGDLFIDCTGLRALLIGQHLGEPLLPQQHLLFNDRAIPTQVPYTDPRAPIACQTISTAQQFGWIWDIGLQGRRGIGHVYSSAYGSEQDAHDALVRYIVRTGGREQDITWVPRVRIEPGYRLRPWRNNCVAVGLSSGFLEPLEASSLVLVELAAAMIADQFPATRDTMDILAARFNDTFRYRWERVVDFLKLHYVLSRRDDSDYWRDHRRQDTWPERLRELLALWRHQPPSRYDLYRIEEVFPWASYQYILYGMGFVPQGRAGTVQAAAVQRAERCFRQTAEQTARMLAALPGHRELIDHIRARGLPRV

SEQ ID NO: 88746 - protein, 520 aa, Kangiella sp.
  misc_feature (1)..(520): tr|A0A2G2L1F8|A0A2G2L1F8_9GAMM Tryptophan halogenase OS =Kangiella sp. OX=1920245 GN=COA86_13500 PE=4 SV=1
MKELVNRVLVVGGGTAGWLTAGILAKQLNSKQLDSVKVTLVESPNIPIMGVGEGTWPSLRATLQKLEIDEGEFMRECDATFKQGTEFVNWMKPNDGKKHSYYHPLSAVFHAAHDFNLSPYWLLGDAGKQSYDLAVSSQANICSLGFAPKKITTPAYDAIQNYSYHLNANKFATFLAKHCVEKLGVEHLIANVNNVDLDEDGYISSVTTDVQEIETINADFFVDCSGSRSILMGDALGVEWKGISDIIFNDTALAVQVPYPEIDTPIATHTIATAFDSGWTWDIGLHNRRGTGYVYSSRHTSDEKAEETLMKYINQTDDNLEVRKIKLNVGYREEFFNKNCVAIGMSAVFIEPLEASAIFLIDAGANMLADQFPRTRESMKWVEKKYNKTFKLRWEKTLDFVKLHYCISNRRDSQYWIDNCQPETIPDSLKERLEHWKSHPPSKYDFDYAYEPFVLDSYLYVLYGMNFNSDIKHNQSTFAEHERAKMMFSDVEKLTEHLSNELPKQRDLVESVYKYGFQTI

SEQ ID NO: 88747 - protein, 497 aa, Massilia sp.
  misc_feature (1)..(497): tr|A0A4R2W1I4|A0A4R2W1I4_9BURK Tryptophan halogenase OS =Massilia sp. GV090 OX=2135673 GN=C8K01_11091 PE=4 SV=1
MEAAQHSAYKRIVVVGGGAAGWMAATALATALPASTVELVESEEIGIIGVGEATFPSIRAFHKILGIDEAEFLRATNGTYKLGIEFCGWRAQGERYFHTFGDLGALAGPQALWGQHRRLGSDSLGTLGEQCLPSVMASQGRFQVPPEREQFFNYAYHFDAVLYAGFLRALALKRGVRRTEGRIVEVARRADGGVALLRLGDGRTVAGDLFIDCSGFASLLLGRALDEPFVDFSHWLPVDRAWACPSGRSGPDLAPYTRATALEAGWAWRIPLSNRTGHGHVFASRYIDEERARAQLLQQMDGPALAEPRLLRFTTGHRERFWVHNVVALGLSSGFLEPLESTSIFLVQSGLGRLIELLLPGAAPVAPAVADYNAAMVRQFERVRDFIILHYCLTGRRDSKLWRAMASMELPETLAFKIHAWRQAGALHQYSDEGFDATSWLAIHAGMDHWPERADPALRELAPDAVRQALRQRRDSIAAVVAAMPTHDAYLRSVLGR

SEQ ID NO: 88748 - protein, 510 aa, Rhodanobacter sp.
  misc_feature (1)..(510): tr|A0A1E4Q513|A0A1E4Q513_9GAMM Tryptophan halogenase OS =Rhodanobacter sp. SCN 68-63 OX=1660134 GN=ABT19_03825 PE=4 SV=1
MSDSRVKNIVIVGGGTAGWMAAAAFAKVLGPEYSIRLVESEEIGTIGVGEATVPHLKLFNNLLGIDEIEFVRRVQGTFKLGIQFNDWGQLGDSYIHGFGELGTMLGLLPFHQYWVRAAQLGLAADLGQYSLNTLAAPQGKFMASASDVPATSPLANIAYAYHFDSGLYAKLLREYAEARGVRRTEGKIAQVRQRAEDGFVQSVVLESGDAVEGELFIDCSGFRGLLIEQTLHAGYDNWTHWLPCDRALAVACKKVGPPTSYTRSTARTAGWQWRIPLQHRTGNGYVYSSAHISDDEAAATLLANLDGEAMGDPRPLRFTTGLRRKVWDRNVVALGLASGFMEPLESTSIFLIQSGISRLLNLFPRQSFSPVLIDRYNTQTRFECERIRDFLILHYHATQRSDTPFWNQCRTMDIPASLKDNIALFRDSGRFFREGEEMFALVSWVQVMIGQGIAPRSYHPLVDQLAPKELEAFMQHVQRVIAGCVEAMPAHEAFIARYCQAAPSGAPMAA

SEQ ID NO: 88749 - protein, 502 aa, Sphingomonas sp.
  misc_feature (1)..(502): tr|A0A4R2PL07|A0A4R2PL07_9SPHN Tryptophan halogenase OS =Sphingomonas sp. BK235 OX=2512131 GN=EV292_10278 PE=4 SV=1
MTHAPIRSITIVGGGTAGWMAATWLARRFAHLRLAITVVESAAIGTVGVGEATVPAIRDFLAAVELGEAEVLRQTEGTIKYGIRFRDWQRDGHDFFHPFGLYGVAARGVAFHHYWLKLRQAGDPTPLGAYCVATQLAERDLFLPPAERPANDLGVFNFALHFDASKFAALLKRLALANHVRHVEGRITEVLRHGERGTVAAVRLEDGTRLEGDLWIDCSGFRSLLLGEAMEVPYVDWRRWLPCDRAVAIPCRASGPHRPLTTATARPAGWQWHIPLRHRTGNGYVYCSDFASDDAAEALLRESIEGEALAPANRLRFTAGHRARFWEKNVVGLGLASGFLEPLESTSISLIQSGLDRLAPLFPDQGFDPRLAATYNRQSVLEFERIRDFLLLHYLPNRREGEPFWDAIRAVPPTDGLQAKLDAWRAAGEFVRREWDTFQDPSWLSLYAGFDDLPARPSPLADQYDVATLADSLTRMREAIAGTLRLAEPHQDFLRRVAAGGQ

SEQ ID NO: 88750 - protein, 487 aa, Sphingomonas sp.
  misc_feature (1)..(487): tr|A0A4R2PIV3|A0A4R2PIV3_9SPHN Tryptophan halogenase OS =Sphingomonas sp. BK235 OX=2512131 GN=EV292_10359 PE=4 SV=1
MRTIVIAGGGSAGWMCAAAFSHLLGPGWRVRLVESEAIGTVGVGEATIPQIRTFNQALGLDERAFLDATQGTYKLGIEFVGWGAPGERYLHAFGDVGRDSGLVPFHQRWLRARAAGVVAPLGDHSLNDLAAREGRMQLGRARTAALLPEMPYAFHFDAALYAALLRRFAEARGVERIEGRILGVERAGEALTALRLDGDRRVDGELFVDCTGFAALLIGEAMAVPYEDWTRYLPCDRALALPCARVAPPIPYTRATAHDAGWQWRIPLRHRTGNGIVYSSAHLDDAAAEQVLRAGLDGSTEAAPRAIRFTTGRRREPWCGNVVAIGLAAGFMEPLESTSLHLVQSAIARLIALLPGAAAGPATRDAFNRQSATEWERIRDFLVLHYHANRRDGGFWRDCRELPLPEALAAKLALWREQGVVLREQDELFTEVAWVQVLIGQGVLPDGHHPLADAEPLEEAREFLSLWAQLVRREVAQMPAHATLVGG

SEQ ID NO: 88751 - protein, 501 aa, Alteromonas sp.
  misc_feature (1)..(501): tr|A0A010PC32|A0A010PC32_9ALTE Tryptophan halogenase OS =Alteromonas sp. ALT199 OX=1298865 GN=H978DRAFT_3484 PE =4 SV=1
MTVSGLGSSNNHTPVKNVVIAGGGTAGWMAATALSRLLGKSIKVTLVESKDIGIVGVGEATIPPIRTFHKLLGIDEKAFMRATQATFKLGIEFENWREQGHSYIHSFGITGRECWAGEFHHFWLRAKEYGFGGEFGDYCPELIAAKQNKFATSEAMPLNFAYHFDAVAYGRFLKSLACEAGVTHKEGDIEKVVVCPQSGNIQSLQLASGEVVSGDFFIDCTGFKGLLIEQALHTGYDDWQHYLFCDRAVAMQTELTAPPVPYTKSVAHQAGWRWQIPLQERMGNGLVFCSRFMSDSEAINTLKSQVSGAPINEPRVIRFTPGKRRRGWNKNCVVLGLSSGFIEPLESTSIHLIMTGLIRLMRLFPFDGITQSAIDEYNNKFDSEMSAILDFIVMHYKVTQREDSPFWQQCQRMDIPPSLKHKLALFAESGRVFLDDGDIFRVDSWTQVLMGQGLTPRQYHRVADEMSEQSLKQFMAGLKQQVDNHVAKLPSHEAFLTQYLK

SEQ ID NO: 88752 - protein, 503 aa, Sphingobium sp.; identical to SEQ ID NO: 87904
  misc_feature (1)..(503): tr|A0A4U6P481|A0A4U6P481_9SPHN Tryptophan halogenase OS =Sphingobium sp. MP9-4 OX=1761936 GN=A0U87_20845 PE=4 S V=1

SEQ ID NO: 88753 - protein, 602 aa, Microcystis aeruginosa
  misc_feature (1)..(602): tr|A0A552G2G3|A0A552G2G3_MICAE Tryptophan halogenase OS =Microcystis aeruginosa Ma_QC_Ca_00000000_S207 OX=24862 51 GN=EWV91_02355 PE=4 SV=1
MNPTATKSLEYDVIIMGAGFAGLCQARHLMLNIPGIRVAMIDPRPMERTDKDLKIGESLIEVAALFLCKELGLHDYLIENHTPKSGLNFHWPKDTSKTASLDDYYHVWANRQTPVGSFHLQRAKFEQDLLAMNCQMGADFYNGRVKDVDLTQGDDLKTVYAKVGEENITLQAKHVIDAAGRNFIIGRKTDNVLSGPENLLGVNNGSAWLRVKNIDRTIFHSGYHPEGASTSHYYATNHYFGQGHWLWMIPIDKKSMELSIGIIHHHDVIPAKSINNLEKFSSFLDANHTILSRLIDSGEVVDFHYWPKIAHKSKVLFSSDNWYIIGDAAHIFDAFYSYGTTMIAFEVESVTEIIRAKLAEEAAAEQKRSAYNDFNLAYARTVNCLYRDHAYQLGHASVMSWRIYFEYMWWFGVHIPTYIGKWHLDLNFIPRYVKIANGNVDGIFADLCKEFHQLVEEGANIGLMDAYRADQLWGNYGTLKHFDDFLENTKFEPRRCNVFASMKAVYFYIAIWYALFQWKAFGLAGWLTPRHWYYFGRMLSLSVQATIAEVIYKWKTRGIPDNTQMEKMREEFKSYHYQPQDKYSFPVEEVANKAVKIESFAS

SEQ ID NO: 88754 - protein, 495 aa, Colwellia sp.
  misc_feature (1)..(495): tr|A0A3S9Q100|A0A3S9Q100_9GAMM Tryptophan 7-halogenase OS=Colwellia sp. Arc7-635 OX=2497879 GN=EKO29_00275 PE= 4 SV=1
MTDTTLKHVVIAGGGTAGWMTAAAFSKLLGNNIKVTLIESDDIATVGVGEATIPPIKNFHKLLGINEQEVMKATHATFKLGINFENWGQVNDQYIHSFGVTGKECWAGEFHHFWLHGKQKGHHDEFGDYCFELQAAKQNKFALGHDRPINYAYHLDATLYAKYLRTFSEKLGTERIEGKISQVDKCMKTGNISAITLASGQTIAADFFIDCTGFRGVLIEQALHTGYEDWSHWLPCDSAVAVQTKSVSKPIPYTRSIAHDAGWQWQIPLQHRVGNGLVFCSKYLSDDEAKNLLLENIVGETITEPRVIKFKTGRRRKGWHKNCVAIGLSSGFIEPLESTSIHLIMTAIVRLLRLFPYNGVTPSAVDEYNNKLDSELNAVRDFIILHYKVNERADSKFWQHCQHMEVPPSLAHKIRLFKETGRVFLDDGDIFRVDSWTQVMLGQGLMPMQYHQIANIMNDDELTKFLTSLKSAISNAVSELPEHDDFIKQYCSSSA

SEQ ID NO: 88755 - protein, 506 aa, Caulobacter sp.
  misc_feature (1)..(506): tr|A0A2G5QYS6|A0A2G5QYS6_9CAUL Tryptophan halogenase OS =Caulobacter sp. X OX=2048901 GN=CSW60_13735 PE=4 SV=1
MADNRIRKLVIVGGGTAGWMAAAALRRHFQGGPLEITLVESSEIGTIGVGEATIPTIRGFYQQLGLSDLEVMRATQATCKLGIRFDGWLREGHAFIHPFGLFGQDLRGIPFHHYWRKLAQAGEPTDIQDYSLGASLAAAGKFRAPPRNPKNSLSIFDWALHLDAGLFAQLMRRVAEDNGVRRIDARITKVNLRPEDGFVASLDLDTGATVEGDLFIDCSGFRGLLIEEALGTGYESWSDLLLCDRAFAVQSEGVGDPAPYTEVKAHTAGWRWRIPLQHRYGNGYVFSSRHISDEAALAELKAAVPDRPLHEPRLIRFNPGRRKQAWNRNVIALGLSSGFLEPLESTSIALIETGIEKILALFPDKDFAPELVDEFNDWSRREMERVRDFIVLHYWANRRGDTAFWRDCNAVALPDSLRRKVELFRQRGHFVRYRWEMFQPASWMAIYAGFELLPEMIDPALDGVDAKALSAPLAEMRKAIAEVVASAPPHAAFLDQYCRPAPVAAQ

SEQ ID NO: 88756 - protein, 514 aa, Emcibacter congregatus
  misc_feature (1)..(514): tr|A0A2G4YW34|A0A2G4YW34_9PROT Tryptophan halogenase OS =Emcibacter congregatus OX=2043170 GN=CRD36_01340 PE=4 SV=1
MTYKKIMIVGGGSAGWITAALMNGIMNKNGQKKVDISLIESPDIPRIAVGEATVPNIRQILITLGIDELDFMKSTDATFKQGIKFNNWLHNTGDSYYHQFSRYTPNMVDTFGQEWLKSDRSIPFADTISVQPALCEMNLSPKLIGLRQHQIPVSYAYHLNALKMADYLRDIAVGQGVTHYLDNITKVDMTEQGDIAAVNTEKGSRYEADLFVDCTGFASLLIEKELGIGWEDFSDYLFCDRACVMQVPYETYYPGRVNSVTQATALSAGWIWDIPLTNRRGIGHVYSSAFITDDDAEKELRTYEGAHSDHLSTRVVHFQVGRRKKTWAANCVAIGLSGGFLEPLESTGLYLVQTAALLLAEHFPFDGQMKELSDKFNILMSDRFDEILSFINLHYCLTQRTDTDFWQEVQRPEHILRALQEKLDYWKIKPPSQSDFKDQYTLFTHQNHELVLYGMDFLKDHYRQKYGPELSSPIVPGFIQQRLQAMQSQLPLHDEWLHHSLGMPRYPSAYASGV

SEQ ID NO: 88757 - protein, 512 aa, Shewanella sp.
  misc_feature (1)..(512): tr|A0A2M7LV89|A0A2M7LV89_9GAMM Tryptophan halogenase OS =Shewanella sp. CG_4_10_14_3_um_filter_42_91 OX=1975535 GN=COZ42_07055 PE=4 SV=1
MDQTIIKNIVIVGGGTSGWMTAAMLAKLFNKQLNITLIESDAIGTIGVGEATIPPLQIFNSVLGISETDFIKATQATYKLGIEFQNWHQQGEAYMHAFGNIGRDLGFTSFHHYWLSAQANLSPSNPSQANGSQYNANDFWQYSLNYQAAKHNKFQPIQTIAQAQMSGITHAYHFDAGLYANLLRQYSVQRGINRVEGIITSTELSVDGSIKRVTLQNGPCISGDLFIDCSGFSALLIEQALGVEYENWQHWLPCDSAYAVPCESTSPLTPYTKATAHHAGWQWRIPLQHRTGNGIVYSSQHMSDEQAKQHLLANLDGKPLAEPRKINFTTGRRVKQWHKNCVAIGLSSGFLEPLESTSLHLVQSAIIRLTKLFPRNGIQPQHIDEFNRQSQTEFEQIRDFIILHYHLNAKQSADNERGLWQQCRDMDIPESLQHKIDLFKATATVFRHQDELFTEAAWIQVMLGQGIIPEDYHPLTQAVSQDDLTDYLTNIRKVITTTVSQMPNHKDYIAAL

SEQ ID NO: 88758 - protein, 498 aa, Rheinheimera sp.
  misc_feature (1)..(498): tr|A0A349LR92|A0A349LR92_9GAMM Tryptophan halogenase OS =Rheinheimera sp. OX=1869214 GN=DCS87_03665 PE=4 SV=1
MNNSIKKVVIVGGGTAGWMAAALLKKVLLNTVDIELVESEEIGIVGVGEATIPPIQIFNQYMGFDEREFLKETNATIKLAIKFENWRVQGESYYHTFGAPGTQLGFTSFQHHWLKAKQLGLAQSVWDFDLNYLCCQQEKFNIIKTPNPLYEVPYAYHFDATLYGRYLRKLAEKAGVVRSEGMISHVQVNEITGDVQSLLLRDGRQIHGDLFVDCSGIRGLLIKQALQVPYENWSHYLPANSALAVPSERHADTKPYTRSIAHHAGWQWRIPLTHRNGNGMVYNSDFLSDDEAASILLGNLDSKALAEPRKISFTTGRTTQQWHKNVVAVGLSSGFLEPLESTSIHLIQSAIVRLLKVFPHHGIDASLQQYYNQDSKAEFETIRDFIILHYHVNERRGEKFWDQMRHMAVPERLAQKIQLFKQTGHVFNDANDIFRDASWLQVMLGQGVMPLDFHPSVNAIPDAALLSSLEQIRQAKWQPLTQMTGHDDFLRRYTSSLT

SEQ ID NO: 88759 - protein, 503 aa, Micropelagos thuwalensis
  misc_feature (1)..(503): tr|U2XQF8|U2XQF8_9PROT Potassium uptake transporter NAD -binding subunit TrkA protein OS=Candidatus Micropelago s thuwalensis OX=1397666 GN=trkA PE=4 SV=1
MTLTMSAENEFKLRKIVIAGGGTAGWMAAAALSKTLGELVDIKLIESEQIGTVGVGEATIPPIITFHRMLDIPENEFMRETQATFKLGISFENWRVDGEKYIHSFGTTGKDHWTSGFQHFWLNGLKRGHKTSYDDYCLELKAALDNKFSHLPNEGMSYAFHLDSSRYAKFLRRFSEKNGVERVEGKINKVNLNGETGFISSLDIDDGTTLEGDIFIDCTGFRGLLIGEALGIEFEDWTDHLPCNGAIAVQTESTQPAVPYTRSIAHEAGWQWRIPLQHRTGNGIVYCNDFLDENGALDKLLQTVEGKTITDPNFIKFRAGTRKKQWHKNCIAVGLSSGFMEPLESTSIHLIQRNILRFIRMMPYNEISQRDIDEFNNQADWDMETIRDFLVLHYIANERDDPFWKMCADINLTDSLNQKIELFRETGRVFRQNEELFAENSWIQVMMGQGIMPVSHHPIASKMTDQELNTFLKTIREGVEKTVKGLPMHHDYVKQYCGVKEIA

SEQ ID NO: 88760 - protein, 500 aa, Luteimonas sp.
  misc_feature (1)..(500): tr|A0A290XCM5|A0A290XCM5_9GAMM Tryptophan halogenase OS =Luteimonas sp. 100111 OX=2006110 GN=CNR27_04160 PE=4 S V=1
MQETPPNTAVRRVVIAGGGTAGWMAAAGISRTLGPMLDIVLVESDEIPTVGVGEATIPTLVTFHRALGLDEREFMAATQATFKLGIRFADWKARGEEYVHSFGTTGKDHWSAGFQHFWHRGRSRGLAGDYGDYCLELRAALEDRFAHLPENGLNYAFHMDAGLYARYLRRFSESHGVRRIEGRIAEVQADRASGNIEALVLASGERIEGDLFIDCTGFRGLLIEQALGVGYEDWSHWLLCDSAIAVQTASVGPAVPYTRSTAREAGWQWRIPLQHRVGNGIVYASRYIDDAQARETLLANLQGERLVEPRTIRFRPGQRERTWHGNCVALGLASGFLEPLESTSIHLIQRGIIRLLQLFPAAGIRQTDVDEYNRQSREEIESIRDFVILHYKVTDRDDTPFWRACREMQVPDSLAHRIALFADSGRVFREGFELFAENSWVQVMLGQGLVPRSHHPTADLMDDAELSRFLGQIRERVARTLAQLPAHETYVRGYCPAAPV

SEQ ID NO: 88761 - protein, 501 aa, Streptomyces sp.
  misc_feature (1)..(501): tr|A0A0M8VS53|A0A0M8VS53_9ACTN Tryptophan halogenase OS =Streptomyces sp. AS58 OX=1519489 GN=ADL00_07620 PE=4 S V=1
MSASYLKAAFGERISVTVVESDRVPTIGVGEATFSTVRHFFEYLGLKETDWMPACNATYKLGIRFQNWSGVGEHFYHPFERLRVVDGFPLTDWWLKQRPSERFDADNFVMAALGDNLRSPRFLDGTLFERGNSDLGPGGAAFRSTLTEQDTQFPYAYHFDAALLAKYLTEYGVSRGVRHVVDDVVDVKLDDRGWISAVATAEHGDLEGDLFVDCTGFKGLLLNKALEEPFVSYQDTLPNNRAVALRVPVDTAERGIPPYTRATAMEAGWIWTIPLFDRIGTGYVYADEYCSPEEAERTLREFVGPGAEGLEANHIRMRIGRSRNSWTKNCVAVGLSSGFVEPLESTGIFFIQHGIEQLVKHFPQQDWSQRLRDSYNRAVNNCMDGVREFLVLHYRGAARNDNQYWQDAKTRKVPDALQGRLEQWQNKLPDAENIFPHYHGFEAYSYVAMLMGLKGIPLRAAGALDLMDGTAAAEEFERVRATAKDLLRTLPSQHEYLAQLH

SEQ ID NO: 88762 - protein, 538 aa, Burkholderia sp.
  misc_feature (1)..(538): tr|A0A228GCI4|A0A228GCI4_9BURK Tryptophan halogenase OS =Burkholderia sp. AU15512 OX=2015345 GN=CFB43_33040 PE= 4 SV=1
MSNPIKHIVIVGGGTAGWMSASYLVRALQQQASITLIESEAIPRIGVGEATIPNLQKVFFDFLGIPEREWMPQVNGAFKSAIKFVNWRKSPDRSRDDHFYHLFGSVPNCDGVPLTHYWLRKREQGFQQPMAYACYPQPEALDAKLAPCLLDGTRQMHHAWHFDAHLVADFLKRWAVGRGVKRVVDEVVEVHLNERGDIASLSTKEGRTLEADLFIDCSGMRGLLINQALKEPFIDMSDYLLCDSAVASAVPNDDARVGIEPYTSAIAMNSGWTWKIPMLGRFGSGYVFSSKFTSRDQATADFLNLWGLSDQQPLNQIKFRVGRNGRAWVNNCVAIGLSSCFLEPLESTGIYFIYAALYQLVKHFPDTGFDPRLRDAFNAEIVYMFDDCRDFVQAHYFTASRDDTPFWLANRHDLRLSDAIKDKVERYKAGLPLTTTSFDDATYYETFDYEFKNFWLNGNYYCIFAGLGLLPDRSLPLLQHRPASVDKADAMFARIRREAERLRASLPTNYDYLRSLRDGDAGRARSRPGPAVAAPETL

SEQ ID NO: 88763 - protein, 501 aa, Plantactinospora sp.
  misc_feature (1)..(501): tr|A0A248YVV1|A0A248YVV1_9ACTN Tryptophan halogenase OS =Plantactinospora sp. KBS50 OX=2024580 GN=CIK06_16755 P E=4 SV=1
MVERADVVVIGGGPGGSTVATLLARRGHRVVLLEKETFPRYQIGESLLPSTVHGIGRMLGVTEELEKASFMVKRGGSFRWGTNPVPWNFLFAVAPELSGPTSYAYQVERMKFDEILLRNAARHGVDVRENSPVADVLGDDERVRGVRYTDPDGVEREIHASFVVDASGNRSRVHQHVRGERIYSEFFRNIALFGYFTGGRRLPAPDSGNILCAAFDEGWLWYIPLSDTLTSVGAVISREHAARLQGDQEEALLGFVDRCAIVKDFLADATRVTEGTYGQIRTRKDYSYTNSTFHRPGMVLVGDAACFIDPVFSTGVHLATYAGLLAARSINSVLAGDVTEERAFDEFEGRYRREYRVFYEFLSAFYDMQGSEESYFWRARKVTNVAATNLEAFVSLVGGVHSGEAALTSADALIGEFRESSGALADAVERTGSMQTPSGERMHHLFGTPVVREVMQEMNNIQVRGVQGEQARELPLLDGGLVPAPDGLSWMEPTAVLEEAR

SEQ ID NO: 88764 - protein, 515 aa, Caulobacter sp.
  misc_feature (1)..(515): tr|A0A2G5R2F1|A0A2G5R2F1_9CAUL Tryptophan halogenase OS =Caulobacter sp. X OX=2048901 GN=CSW60_20265 PE=4 SV=1
MKRGRSILIVGGGTAGWLTAAYLAKALRIAEQTHLSITVLESPEIGAIGVGEATFPTIRGTLQFLGIDEARFIRQTSATFKQGIRFVDWGDAPAEGRRHSFFHPFEAPFSTDGVSLAPYWLLQDEAARAPFAEAVTIQARVADAARAPKRPHESDFSGPLNYAYHFDAAKLAEVLAERARELGVRHLQGHVGEVALDDAGAIARIASPEHGDLTADLYIDCSGFRAELIGKALNAPFKSARPVLFADRAVACRAPYARPDAPIQSYTIATAHEAGWLWDIGLSGARGVGCVYSSNHIDDARAEAILRDYVGAEVETRRIAFEAGYREKQWIGNCVAVGLSAGFLEPLESTGVVLIEAAVAMIAELFPHTGPVSAPARRFNELMAARYENIIVFLKLHYALSRRPERFWRENTDPATIPERLQELLEQWRHRPPARFDFILDLETFAFFNYQYILYGMGFATDLADGADEFPDTAGAAKLFAKIRGFADRATQDLPSHRDLIAQINRFGFEERALA

SEQ ID NO: 88765 - protein, 484 aa, Caulobacterales bacterium
  misc_feature (1)..(484): tr|A0A1F8IVC7|A0A1F8IVC7_9PROT Tryptophan halogenase OS =Caulobacterales bacterium RIFCSPHIGHO2_01_FULL_67_30 O X=1797584 GN=A2795_01160 PE=4 SV=1
MTAAALARLVAPSGVQITLVESEAIGTVGVGESTLPHIRAFNERLGIDEAAFMKATRATFKLGIQFENWGQIGGSYIHPFGDYGAPGGEAPFHHYWLRGRELGDVGPIDDYSLPVVAAREGRFAPPSDDPRSLLSTYRYAYQFDATLYARFLRGMAETEGVRRIEGRIQNVAQDGESGAITKVTLDDGRQIEGDLFVDCSGFRALLIEQTLKAGFTDWSHWLPCDRAAALPCESDQPTVPYTRATALEAGWQFRIPLQHRVGNGYVYSSAFIDEAAALDRLVGRLEGKPLKAPNVLKFTAGQRTRNWAANCVSVGLSSGFIEPLESTSIYLIQIAITKLIELWPTAVIDPATEAEFNRQMDLEYIRIRDFIILHYCATARNDTPFWDYVRTMPLPDTLSEKIELFRARGIVQDYREGLFLHPSWVAVYLGQDILPRRHHPLVDAVSATQLMSSLERLRRMVREASSRLPSQDDYIARYCAHLPL

SEQ ID NO: 88766 - protein, 525 aa, Rheinheimera sp.
  misc_feature (1)..(525): tr|A0A349LSK9|A0A349LSK9_9GAMM Tryptophan halogenase OS =Rheinheimera sp. OX=1869214 GN=DCS87_06040 PE=4 SV=1
MNKLKVVIAGGGTAGWMTAAALGKLLGKNLDITLIESDLIGTVGVGEATIPTLHLYHRLLGLQETDVMAATNATFKLGIMFENWRDVGKDYLHSFGFLGKDCWACGFQHFWLKGMQQGLASDIGDYCPEHLAARAGRFAVLPNQDQNHAYHLDATLYAKFLRSFAEQHGVKRLEGMITQVQQWDEQAGDKAGYIKALQLDNGMLLEGDLFIDCTGFKALLIEQTLLTGFDDWTHYLPCDSAIAVQTTQTQALVPYTRSIAHGAGWQWRIPLQTRVGNGLVFSSKFLSDADAIELLKANISGELINEPRVIKFRTGTRRKHWNKNCVAIGLSSGFLEPLESTSIHLIQRSIIRLLQLMPSGPDLVNADIDEFNHQTMIEMHNIRDFIILHYKVTERRDTPFWRHCAAMEVPESLSHRIEMFGESGKVYKFAQELFGESSWIQVMLGQGITPKRYHPIVDQMSPDELASFLQNIRQGVLRHVQNWPAHTDFLRHYAATKVDKEPPSAVSGSDVLKAMPMIKSSMSAG

SEQ ID NO: 88767 - protein, 516 aa, Aliiglaciecola sp.
  misc_feature (1)..(516): tr|A0A553L5D8|A0A553L5D8_9ALTE Tryptophan 7-halogenase OS=Aliiglaciecola sp. M165 OX=2593649 GN=FM019_07945 PE =4 SV=1
MQDDSIKSIIIVGGGTAGWMTAAALSNLLTHTNITLIESDRIGTVGVGEATLPHLRYFIKRLGIDEQEFMRATNATYKTGIEFVNWGKVGDAYIHPFGDFGEPIKGIDFHHYYVKLRQNGHINPIGDYSLPVVASKAQKFDYPDTDERSILSTFSYAFHMDAGLFAKYLREYSTQRGVTRQEGIVTQVKQHQDSGFIQSVTLEDGTQLSADFFVDCSGFKGLLIEDCLNTGYDDWRHWLPCDRAIAIPCQANTPPLPYTRATAREAGWQWRIPLQNRVGNGHIYSSPYMDDNTALDILLKNLDGEPTAEPNFLRFTTGKRKKVWNKNCVAIGLSAGFLEPLESTSIHLIQLGIMKLLDFFPNKHCEAVRVDEYNRMMQLEFERLRDFLVLHYHATQRDDSDFWKYVRTMQLPQGLAHKIDLFKERGRVVQYTEGLFLKASWLAVYFGQGIIPKHYDWQLDALPIEQIKRRLDEVKSQVSLASAQMPMHAESLAKHCDLETGWQTPPPPANLSLYGC

SEQ ID NO: 88768 - protein, 516 aa, Caulobacter sp.
  misc_feature (1)..(516): tr|A0A2G5QYW2|A0A2G5QYW2_9CAUL Tryptophan halogenase OS =Caulobacter sp. X OX=2048901 GN=CSW60_13740 PE=4 SV=1
MTHTHPNAIRKIVIVGGGSAGWITAAMLSHYFQAGGCAIELVESEEIGTIGVGESTIPPFLRLLASLGIDEREFIQATQASFKLGIRFEDWKSLGDRYMHPFGVIGGPFGPHEFYQCWLRAKAAGHPSGLHDFAPGAVMAEQGKFMLPFKAERTLIGGANYALHVDARLVARYLRDYAEARGVKRTEGIVSDVITHEDGSVAKVRMKDGREIEGDFFIDCTGFRGLLIGKTLETPFEDWSDMLLCDRAVVVQTENVGAPHPYTLSKAEAGGWRWRIPLQHRAGNGYVFSSRHISDDEARATLLSQLEGRALMEPMFIPFKTGVRQRLWEKNVVAVGLSGGFIEPLESTALHLIYRGVDFLLRFFPDRDFDPALRDEYNRRMVADYEEIRDFIVLHYCKTQRDDTPFWRAVREAPIPDSLKERMALFERSGVLREGVDDMFRNPSWQSVMEGMGVRPQRYQQLVDTIPYEVISQTLDQSAPMLAAQVAGLPSHGEFLAKHCPAPPPEAPMAPFKTVA

SEQ ID NO: 88769 - protein, 506 aa, Aliiglaciecola sp.
  misc_feature (1)..(506): tr|A0A553L4L5|A0A553L4L5_9ALTE Tryptophan 7-halogenase OS=Aliiglaciecola sp. M165 OX=2593649 GN=FM019_08915 PE =4 SV=1
MSEQIKKIVIVGGGTAGWLSAAVIAAQHKSAPGQGLEVLLVESSDIPTIGVGEGTWPTMKNTMQQIGIKESDLFSRCHAVFKQGGKFVEWVHGNGDFYYHPFTVPLGYGRLDLAPYVSNIESYAVESNFQHHICEAGLAPRTMAEREFNGQCNYAYHLDAGAFAELLKEHCKNNLNVTQIIGTVDKVNLTEDGGIKSIQLQAGEEIAGDLFVDCTGLASLLLGKALGVPFKQCNDVLFNDTALAMQVPYPDPASPIASHTIATAQNAGWIWDIGLTHRRGVGHVYSSEYLSDDDALANLQNYLGEQAKGLEPRKITFDSGHRERFWHKNCVAVGMAAGFVEPLEATAIMLVEISARYIAENMPADTDIMAITAKRFNQQMDYRWQRIIDFLKLHYMLTKRSEPYWQAHCNPDTIPESLQEDLAIWKTRGPVSGDFDSAIELFPAASYQYVLYGMGFKPDFEKRQYLYQQSEQAQQIIQRNAKLTQQMLQTLPPHREYIETWLSTAR

SEQ ID NO: 88770 - protein, 542 aa, Streptomyces sp.
  misc_feature (1)..(542): tr|A0A0H4CIJ8|A0A0H4CIJ8_9ACTN Tryptophan halogenase OS =Streptomyces sp. PBH53 OX=1577075 GN=QR97_37415 PE=4 S V=1
MSVSDNIEHIVILGGGTAGWMSAAYLGKALQGAVRITVLEAPAIPKIGVGEATVPNLQRVFFDFLGIPEDEWMRECNASFKMAVKFINWRTPGEGSPTARTLNGRPDHFYHPFGILPQEDGVPITHHWSDRAARGETDLPFDYSCFVDPVLMDRNLAPRHPDGRPATRYAWHFDAHLVADYLRRWSVEKQQVQHVQDRMVDVQLDQNGFIRSLRTESGRTIEGDLFIDCSGFRGALINKVMEEPFLDQSDHLLCDSALACPVPHDDAAHGIEPYTSSIAMKSGWAWKTPLLGRFGTGYVYSSAFATEDEAVRDFTALWGLSADQEFNRIRFRVGRNRRSWVKNCVSIGLSSCFLEPLESTGLYFTYAAIYQLAKHFPDKSFSPIFADRFNKEIAAMFDESRDFLQAHFYFSPRTDTEFWRANKELTLGEEIREKAEMYRKGIPVNLPTADESTYYGNFEAEFRNFWTNGSYYCIFAGLGMLPERPIAPLAYGRDGRASAQRMFDGVAQRQRELVETVPTMYDYLRDFHGAPAGPDDRDRHGR

SEQ ID NO: 88771 - protein, 506 aa, Colwellia sp.
  misc_feature (1)..(506): tr|A0A5C6QV08|A0A5C6QV08_9GAMM Tryptophan 7-halogenase OS=Colwellia sp. C1TZA3 OX=2508879 GN=ESZ39_08765 PE=4 SV=1
MSKTVKNIIIIGGGTAGWLTAAIIAAHHKDAKKTELKITLVESSDIPTIGVGEGTWPTMKNTFHKIGLKESDVFKKCHAAFKQGAKFVEWVHGNGDFYYHPFTVPLGYGHIDLAPYVSNIENFARESNFQYDICEAGLAPRNLAESEYQGQCNYGYHLDAGALAELLKRHCIDKLNVEHIVDTLDECISENGERIDAVVLNKQGKLTANLFVDCSGSRSLLLGQTLNVPFKKVDHVLFNNRALAMQVPYESEDMPLASHTIATAQNAGWIWDIGLTSRRGVGHVYASDFLTDEEAEQNLRNYLGEAANGLVARKISFEPGHREQWWKGNCVAIGMAAGFVEPLEATAIMLVELSARYVAENLPADESLMPLVAKRFNKQMAYRWQRIVDFLKFHYMLTKRTEPYWQAHCDPTTFPDSLKEDLSLWQYRGPTTNDFTSAMELFPAASYQYVLYGMEFKPDFSRQGYLHNQQQKAEQVINRNEQLTQQMLQSLPPHRDYIEKWLATST

SEQ ID NO: 88772 - protein, 494 aa, Catenovulum maritimum
  misc_feature (1)..(494): tr|A0A0J8GRL1|A0A0J8GRL1_9ALTE Tryptophan halogenase OS =Catenovulum maritimum OX=1513271 GN=XM47_08895 PE=4 SV =1
MNHINKVVVVGGGTSGWMSAALLKKILGNTVNIELIESKTIGIIGVGEATIPPIQTVNEVLGINEAEFMRETKASIKLAIKFENWWQKGQSYFHTFGAPGQSLPFCHYHHLWTRAESLGLKTNLWDYDLNYLAATAGKFAKLETQDPMYEMKYAYHFDSALYGQFLRKHSEKSGVIRTEGLIENVNLNPATGNVESLTLTGGGTVTGDLFIDCSGMRGLLINQALGTGFEDWSHWLAADRAIAIPSERDTKTLPYTRSIAHSKGWQWNIPLQHRNGNGIVYSSRYCSDDEAQDTLIKNIKNKTLADPNLIKFKTGRTRKQWNKNVIAIGLSSGFLEPLESTSIYLVQSAIVRLLKFFPHKGIQASSVNEFNNQSQREYELIRDFIILHYCATSRTDSQFWRDMKALELPRRLTEKLDMFKENGTLVHDDLDVFWEPSWLQVMLGQGIKPMGYHPLASQYSQAKLTEIFTNTRRAKSAPLEKMPSHDEFLKLYLE

SEQ ID NO: 88773 - protein, 370 aa, Duganella sp.
  misc_feature (1)..(370): tr|A0A1E7VC04|A0A1E7VC04_9BURK Flavin-dependent tryptop han halogenase RebH OS=Duganella sp. HH105 OX=1781067 G N=rebH_2 PE=4 SV=1
MAARHNKFMPPRRDLANSPLSDIAYAYHFDASLYARYLRTVSEQRGVRRTEGKIAQVSQRADDGYVDAVVMESGERIEGDLFIDCSGFRALLIEGALKTGYEDWNHWLPCDRALAVPCESVSPLTPYTRATAHRAGWQWRIPLQHRTGNGHVYSSAFMEDEEAQRILLANLDGKPLAEPRMVKFRTGMRKLGWNKNVVAMGLASGFLEPLESTSIHLIQSSIARLVQFFPDRGFNQLEVDEYNRQSRFEYERIRDFVILHYKLNQRDDSDFWKQCAAMPVPDSLQHKLDLFRARGRVVRFDNELFAEAGWLQVMHGQNLKPEGYDPLVDLLPVEEAEKYLESIRDVIGQCVQHMPDHAEYIAQHCAATRR

SEQ ID NO: 88774 - protein, 499 aa, Caulobacter sp.
  misc_feature (1)..(499): tr|A0A2G5RED1|A0A2G5RED1_9CAUL Tryptophan halogenase OS =Caulobacter sp. X OX=2048901 GN=CSW60_05975 PE=4 SV=1
MAQQRIRKVVIAGGGTAGWTAAAALVRQLGPLLDITLVESEDIGTVGVGESTIPTARTFNAMLGIDEAEFMRATQSTFKLGISFENWGEIGDRYIHSFGQVGKSTWMGGFHHFWMQAQAQGFGGDLGDYCLELKAAEGERFFTGDNGPLNYAYHLDAGLYGQFLRRMAEADGVKRVEGKIASVRQSAADGSIEALVMESGQAVEGDLFIDCTGFRGLLIEQTLKAGYEDWDHWLPTNSALAVQTRSTEPAKPYTRAIAHKAGWRWKIPLQHRVGNGLVYCNEFMSDDEAHAMLLGEIEGETLIPPRLIRYRTGRRRKTWDKNVVALGLSSGFVEPLESTSIHLIMIGVTRLMQLFPFDGISPSVIDRYNRLADDELEKIRDFIILHYKATERTDSPFWDRVREMEIPDSLAQRIDLFRESAQVYQAPGELFQVDSWLQVLLGQRVQPKSFHAMGRLMPTQQLKQALDDLKRNIAGTVGRLPQHQAFLDAYCAPPVSKSA

SEQ ID NO: 88775 - protein, 510 aa, Halieaceae bacterium
  misc_feature (1)..(510): tr|A0A4R5LV34|A0A4R5LV34_9GAMM Tryptophan 7-halogenase OS=Halieaceae bacterium GH4-78 OX=2547392 GN=E2F43_0290 0 PE=4 SV=1
MNNAIKSVVIVGGGTAGWMAAASLQSHYANTDITFTVVDSSQIGTIGVGEATIPTIRRFYRNLGLSDREVMQATQATAKLGIQFNDWHSRGSSFIHPFGLYGQELRGIGFHHFWLKMRQNGLQSRLADYSLGASLALNEKFVPPSANPPSSLSVFDWALHLDASRFAAYLKKYALERGCKHVDDVITDVRRRPEDGFITAVRLEGGSDLEGDLFIDCSGFRGLLIEETLGTGYEDWSHWLRCDSAYAVQTENQREPRPYTQVTALESGWQWKIPLRHRTGNGHVFSGRYTDDQRALDLLLSRLEGEPITEPRKLSFVPGRRKQAWNKNCISLGLSAGFLEPLESTSIALIETGIERIKQLFPTQGFSQACIDEFNQVTAEEYERVRDFIILHYKATARRDTEFWRDCAAAEIPTTLEKKIALFKDRGYFLKYRWEMFHPASWLAIYEGFDILPETYDPGVDAFEEGYIANSLAAMQKSLNGAVAAAPSHQNFLDELYDNNEAETERYGTH

SEQ ID NO: 88776 - protein, 499 aa, Colwellia sp.
  misc_feature (1)..(499): tr|A0A5C6QJP6|A0A5C6QJP6_9GAMM Tryptophan 7-halogenase OS=Colwellia sp. C1TZA3 OX=2508879 GN=ESZ39_11815 PE=4 SV=1
MQSMDVKNVVIVGGGTAGWMSAAGMSKLLGSKKINIRVIESESIGTVGVGEATVPHIQYFNRLLGIDENSFIKKTNATFKYGIEFVDWHKRGESYFHSFGPYGMDMEGIHFHHMWLRQQQAGTAKPIDEFNLQIQAAKAGKYMPARPELQGSPLSALSYAFQFDAVLYAAFLRDFSEKNGVTRTEGKIVNVTQAANTGHIESVTLEDGECIKGDLFIDCSGFKGLLIEETLKTGYDDWSHYLPCDSAVTRLSERMAELPPYTRATAKAAGWQWRIPLQSRTGNGYVYSSQFLSDEDAIESLNKDLDTAPISDPRQLRFKTGIRKQTWNKNVVSIGLSSGFLEPLESTSIHLIQTAIARLMTNFPDMSFNQPDIDYYNERTKAEYMQIRDFLILHYKATTRDDSPFWDYVREMDIPVSLEKRIAIYKENARLYSEDKVLFNHSSWFAVFNGQGIHPQRYHPIANILEEKEMERRMAEIHTVTQKCLSIMPSHDEFLAKLL

SEQ ID NO: 88777 - protein, 516 aa, Caulobacter sp.
  misc_feature (1)..(516): tr|A0A2G5QXP0|A0A2G5QXP0_9CAUL Tryptophan halogenase OS =Caulobacter sp. X OX=2048901 GN=CSW60_22160 PE=4 SV=1
MAALLFERAFPGSQITLVESSEVGTIGVGEGSTPALKAFFGALGISEADWMPRCNATYKSGIRFTGWSGAPGFEGYFHPFLTHFDRDHIKALEHNSKLRRAGVDVHAHPDLFCYSYYLADRRLCPATPRSFPFSVQYGYHFSAGLLAAYLREVALARGVVCHDARISSVDQDADGDVTHVTTNDGQVLAADFFVDCSGFASVIAKKALGAGWRSYGDALFNDTAVTIATPREPILSSQTTSTALRHGWAWRIPQQDRVGNGYVFSSKYCSPEDAERELRAHLGLGPEDGEARTVPFKSGRLETFWNRNTLAVGLSQGFLEPLEATALALVQLTLVRFVKAFGEGGGANAQAHLFNQEIAAAFDGVKDYIHTHFITSDRRDTPYWRDCAANGAAVSPRLRAVLETWFAGGDLAETLNAVGLDRHYKLNSWLYILSGMGVYPPHESLRPPRAEELQAVPLDSIRGFFECCSLNHVEQARALENLAAGQPPMAGMAGGMTQAEAMASLLGLGFASSGHR

SEQ ID NO: 88778 - protein, 478 aa, Aliiglaciecola sp.
  misc_feature (1)..(478): tr|A0A553L715|A0A553L715_9ALTE Tryptophan 7-halogenase OS=Aliiglaciecola sp. M165 OX=2593649 GN=FM019_06365 PE =4 SV=1
MTANLLQHTLSQHEFTVTLIESPDIGIIGVGEGSTPHLKVFFDTLGIEEQQWMPKCNATYKNGITFKGWSLEPGFEHYFHPFPSRPDRQTAGGFLINSLLRRQGHDVDPHPNQYFLSAYLAKHFKHPKTQAKFPLSINYGYHFDSALLGEYLKRVAIDRGVKHIEAKIDEVKTHLSGDIQALIDENGHSYTADWFVDCSGFAAVLLQKTLGTEFVEYKDNLFNDAAVAIPSAATKPRNVETISTAMSAGWSWDIPLTNRTGNGYVYSTQYIEPEQAELELRSKLGLLDAEVPVKHLKMRVGCAKQHWVKNCLAVGLSQGFIEPLEATALHLVLYTVETFISAFTSGQFSNQHQAEFNQLISSRFEGIRDYIVCHYKVNSRNKGNYWLDNANNKHLSDSLLHILDCWDKGGDLTQEINRQNIGHYYPAVSWHCLLAGYGRFPPLGASSPATHDVNIAEIQHFIRQCAQGFLEQGIDERC

SEQ ID NO: 88779 - protein, 496 aa, Colwellia sp.
  misc_feature (1)..(496): tr|A0A5C6QP79|A0A5C6QP79_9GAMM Tryptophan 7-halogenase OS=Colwellia sp. C1TZA3 OX=2508879 GN=ESZ39_10130 PE=4 SV=1
MNSSAIKNVVIAGGGTAGWMAAAAFGKLLGKNLNITLVESDLIPTVGVGEATIPTLHIFHDLLKIKEADVMKATNATFKLGISFENWRDVNQDYIHSFGYLGQGCWAAGFQHFWVKGKQQGMVSEIGDYCPEHVASRRGKFAVVPKQDRNYAYHLDAGLYAKFLRAMAEEHGVKRVEGKINQVNVNEENGFIQSIALDNGKLIEGDLFIDCTGFKGLLIEQALHTGYEDWSHWLPCDSAIAVQTKIQKKTVPYTRSIAHKAGWQWQIPLQNRMGNGVVFCSKHLSDEDAKELLLNNIEGELLNEPRVIKFKTGTRRKHWNKNCVAVGLSSGFIEPLESTSIHLIQQSIIRLMQNLPSKNMEQANIDDFNNKMRFEIDNIRDFIVLHYHVTQRADSPFWRYCKNMEIPETLQQRIDLFIENGNAYKTERELFGETSWIQVMIGQGLMPKYYHQIVNMMSDTELKSFLDNIKMTIERRVNSFPDHNEFIKNYCKSTVA

SEQ ID NO: 88780 - protein, 517 aa, Colwellia sp.
  misc_feature (1)..(517): tr|A0A5C6QYG7|A0A5C6QYG7_9GAMM Tryptophan 7-halogenase OS=Colwellia sp. C1TZA3 OX=2508879 GN=ESZ39_01640 PE=4 SV=1
MNKPLKKIVIVGGGSAGWLTAGIIAAEHATGQDSGIEITLIESADVATMGVGEGTWPSMRGTLKKMGISETEFLIECDASFKQGSKFTNWITNTDECYYHPFTLPHGFNEINLSPYWQPFRDKISFADAVCEQSHLGAHGLAPKQITTAEYSFAANYGYHLDSAKFGRFLRKHCTEKLHVKHIIDHVSKINSAKNEDIASITTTKHGDISADLFIDCTGSASILLAKHYNIPFISKKHILFNDSALAVHVPHENENSPIASFTSSTAQTAGWIWDIGLPSRRGVGYTYSSAHISDTKAEEELIEYITPLMGKKSANAATIRKIVLNPGHREKFWHKNCVAVGMSAGFIEPLEASALALVELSAKMISEQLPLNRQAMDIVAKRFNSKFLHRWDNIIDFLKLHYVLNKRTDSDYWCDNKNATHIPESLQEQLALWQYQAPYKYDAIHTEEMFPPASFQFVLYGMGFVTQASHKKRTDQSAKADALFNENVQRTKQLLSALPTNRELINKIKKYGLPKI

SEQ ID NO: 88781 - protein, 503 aa, Aliiglaciecola sp.
  misc_feature (1)..(503): tr|A0A553KYP9|A0A553KYP9_9ALTE Tryptophan 7-halogenase OS=Aliiglaciecola sp. M165 OX=2593649 GN=FM019_16805 PE =4 SV=1
MIYMIPQTILIVGGGTAGWMSANLLKKSWPTVKITLVESDSIGTIGVGEGSTPFLKQFFKRIGASEREWMPQCFATYKAGIEFSRWSEKPGFTHYFHPFFSQLDIKPAEPFFHNAKLQRQGIEADAHPDAYFVNAQMAKQCKAPLAKRRLNFDLDYGYHFDAGRLGLWLKDRAIADGVEHIIDDVTQVEVRDSGEIAAVIGAKSGRMAAELYVDCSGFKGLLIQQALSVPFKSYKQNLFNDAAVAIQTPLADEQDIPTRTLSTALTNGWAWEIPLTNRVGNGYVYSSEHISGEQAEVELRRHLGLADDTDISAKHLKMKVGRVEQHWAKNCLAVGLSQGFIEPLEATALMLVQFTLEKFVTAKQSLQQESLVRDNYNADINKMMEGIRDYIVTHYALNSRTDSDYWRRCREDIEVSDNLQALFQAWKSHEQFESELNKQASHLVYLRPSWYVIMAGMGNFPMDLLTPSQGQVAPVNLSKQYCIDLVEDLFPSHKAVLSQLAAG

SEQ ID NO: 88782 - protein, 507 aa, Burkholderia sp.
  misc_feature (1)..(507): tr|A0A2J6MY00|A0A2J6MY00_9BURK Tryptophan halogenase OS =Burkholderia sp. WAC0059 OX=2066022 GN=CY652_01310 PE= 4 SV=1
MLNFRAMRDFVVLGGGTAGWFAALELHRLFGERASITVVESPRVSVIGVGEGGILNLPAALQRYGIDEDEFASKTGAVIKLGFEYAGWNTGRDDETFYHLFHHVPQRVDRQSVDSIVPWWAMLVAHGIGVQYAVDSLPLILDNASQDEVRAARASAGERMPASMHFDAHRVAAWLKQVATSRGIALRTANVLGLDVASESGWVRGLRLEGEEALLPVDFMVDASGFARMALQRTYGMPMRSFGEHLILDRAIPFYIAHPRKNPRLVTRSLAMNAGWMWQIPEHERVGCGYVFSSAHIGEDEALAEIEARLGQKVEPERTISFSAGHFEDVWVGNVMAVGLASGFIEPLEATSIGQMLGQVCAFGDTVAASGYVVPRTTIRTFNHRNRLDWEGIRDFLRLHYDVRRRDTAFWRDVTSQALPESYAALKEAWQHRLPRTVDLNAYRAGHVMHFDFTSWMAVGQGVGVIPEQAAAADLAGLPRGVVLEAHEFMKGVTRRFPQAVGGHAPH

SEQ ID NO: 88783 - protein, 425 aa, Colwellia sp.
  misc_feature (1)..(425): tr|A0A5C6QK32|A0A5C6QK32_9GAMM Tryptophan 7-halogenase OS=Colwellia sp. C1TZA3 OX=2508879 GN=ESZ39_11935 PE=4 SV=1
MRKTQATFKLGIEFSNWGDIGERYFHAFGQIGRSTWMGDFQHLWQHASSLGWGGELQDYCFELQAAKAGKFDKDKANYAYHLDAGLYASFLSELSQKRGVKRIEGTIESIAMDSENGHISNLVLKNGTSVQGDLFIDCTGFKGLLINGALGVGFEDWSHWLPMNSAWAVQTEGKKEIPPYTKSIAHDASWQWRIPLQNRVGNGLVFCSDYTSEQDALQLLTDNLEGDMVSQPRLLKFKTGKRNKTWFKNCVAIGLSSGFLEPLESTSIHLSQISATRLVQMFPFNGMDEVLQTHFNNYVDGEVDSIRDFIILHYNLNRRSEPFWQHVATMDIPDSLQHRLELYKRTSIAFKNDLDLFRVDSWNQVMLGQGIKVEGYHQMGRLIKDDNLRQAFNDLQEHINSTVEGLPMHADFLRQYGVLDLHRKP

SEQ ID NO: 88784 - protein, 497 aa, Aliiglaciecola sp.
  misc_feature (1)..(497): tr|A0A553KYQ5|A0A553KYQ5_9ALTE Tryptophan 7-halogenase OS=Aliiglaciecola sp. M165 OX=2593649 GN=FM019_17040 PE =4 SV=1
MQQPVRKVVIAGGGTAGWMTAALLRKVLQQQIEIQLIESDDIGIVGVGEATIPPIQIFNQYLGLDEKEFLRETNGTIKLAIKFENWRVPGESYYHTFGAPGAQMGFCSFQHYWMRAQQAGLKESMWEFDLNYLCCERGLFNKIKTENPIYDLQYAYHFDSGLYGQYLRKRATKSGVIRTEGIIEHIKTDDASGFITGLQLKSGELVEGDLFIDCTGFRGLLLRKTLGVNYESWADLLPADSAWAVPTERFEKTLPYTRSIAHPVGWQWRIPLTHRNGNGIVYSSKYISDERALEALMNNLDSKPLDEPRKIQFETGRTAQQWHKNVVAIGLSSGFLEPLESTSIHLIQSGIVRLLKMFPNQGITPGVIDLYNAESKFEFETIRDFIVLHYYVNEREDSQFWKDMRNLTLPERLRVKLEAFKESAAIFNDPSDIFKDASWLQVMMGQGAMPKDFHPAAKISTENELLAVMKKILDAKHQPLDKMLSHDEFLARYTGAA

SEQ ID NO: 88785 - protein, 514 aa, Caulobacter sp.
  misc_feature (1)..(514): tr|A0A2G5RBX5|A0A2G5RBX5_9CAUL Tryptophan halogenase OS =Caulobacter sp. X OX=2048901 GN=CSW60_01395 PE=4 SV=1
MVRPVKNIVIVGGGTAGWLTAGVIAAKHKARRVSGFTVTLVESPNTPIIGVGEGTWPTLRTTLAKIGVSETDFFRECDAAFKQGAKFARWTTGAEDDAYYHPLVLPQAFAQVNLAPHWLANGGDVSFCDAVCPQGVLCDEGLAPKTITAAPYQGAANYAYHLDAGKFAPFLQRHCCEKLGVRHVLADVQRVDLAEDGDIRAIITEQAGEIEGDLFVDCTGFRSLLLGEALGVPFKDCGDVLFCDTALAIQVPYESESSPISTHTISTAQSAGWIWDIGLPTRRGVGHVFSSRHISDEDAERELRAYVGPAGRDLPVRKIAIRSGHREIFWKRNCVAVGLAAGFLEPLEASAIVLIELSAKLIAEQMPACREVMDVIAGRFNAATQYRWGRIIDFLKLHYVLSQRNDSAFWRDNHDPDTIPERLSDLLRLWRHQPPWLHEEFDRVEEVFPAASYQYVLYGMGFRTEVEREALADEAAVAQRALRENALQTERLRAALPRHRDLIRKIVEHGLQPV

SEQ ID NO: 88786 - protein, 529 aa, Colwellia sp.
  misc_feature (1)..(529): tr|A0A5C6QNZ2|A0A5C6QNZ2_9GAMM Tryptophan 7-halogenase OS=Colwellia sp. C1TZA3 OX=2508879 GN=ESZ39_10145 PE=4 SV=1
MQSEIKKIVIIGGGTAGWITAGLIAAKHLAANSTSLSITVIESPNVPTIGVGEGTWPSMRETLKTIGINEADLFTYCDASFKQASKFVNWEKLPDEDVATHPLDNAYFHPFSLPAGINKLDLGAYIGEQSSLVSSSQTFAQQVCFQSILCEKNLAPKQITHKVYDYVANYGYHLNATKFAELLKAHCLNKLGVQYISAHITQINNDKVGDISSLSTDIAGVIEGDLFVDCSGSQSLLLGKHYNIEFCSKKSVLFNDSALAVQIPYENPEATIASSTLSTAQTAGWIWDIGLQSRRGVGHVFSSRHTSDENAKQELLQYIKQSGTSVNIDDHSIRKLSFTPGYYKKFWHRNCVAVGMSAGFIEPLEASALAMVEQAAQMISEQLPTTKLTMEITAKRFNEKFTQHWQQIIEFLKLHYVLSKRIDSSYWLDNKDPLTIPQSLQNMLELWKFQSPSSYDIPHNNPLFPAASYQYVLYGMNFTTERLRVNNQNEQLMHQVLSDIQNKRQQLVKAMGTNRDLINKIKQYGLTNI

SEQ ID NO: 88787 - protein, 513 aa, Rheinheimera sp.
  misc_feature (1)..(513): tr|A0A349LYF1|A0A349LYF1_9GAMM Tryptophan halogenase OS =Rheinheimera sp. OX=1869214 GN=DCS87_16520 PE=4 SV=1
MSFANSSTGAALPAPHRIVIVGGGTAGWMTAMLMTHHWREQPVQISLIESPDIGIIGVGEGSTPTLRRFFHELNIGEDEWMVRCNATYKVSIRFANWSPATGAASYSHPFISQLDQFSELPFYQNCFARRQGLAVTTAPELFLFNGYLANAKLAPHTPANFPFRIEYGYHFDSALLGQFLRDKASAIGVRHVPHTVQKINQHPDGRIASVVCDNGEQLDGDLFVDCTGFRAELIQKTLGVAFEPFKSNLFNNAAVVFPTEVLTDLPPETRATALSNGWAWQIPLQHRTGNGYVYSRDFQSADAAETELRAHLGLLDSEISARHLQMNVGQVRQHWAKNCVAVGLSQGFIEPLEATALHLVQTAVETFIEDYQQGGFSDRFQQRYNQSIAQRFEATRDYIVAHYKFNSRDDSDYWRANRANENLSDSLQQIMQTWFQLGDLGQTLAKQQRETMFGNTSWHCLLAGYGVFPHLAAAQPTAAQLAERDQFIAQGLQPLFSGCALNFKTQRERFASK

SEQ ID NO: 88788 - protein, 539 aa, Aliiglaciecola sp.
  misc_feature (1)..(539): tr|A0A553L431|A0A553L431_9ALTE Tryptophan 7-halogenase OS=Aliiglaciecola sp. M165 OX=2593649 GN=FM019_07940 PE =4 SV=1
MDVDVHMQQKPIEPLSHTQPSNTPLNTIVVVGCGLYAWTVAACLARRLYKTPTKVMVVEELNAPVDNLGESTLPAIDYFHRVLGLTERQLMAVTKGTYKLATEYVLPDSTLAAETSQSNVFYHAMSPYGSVIDNIAFQHHLTKAKRAGVPIDLNRFSLPAAAAGKGKFGLPQAGAQNLPFSYAIHVDAKRYAAGMKDFAKKLGATSVVGEISAVKTVNIGSENDKQCTHIQSICLDNTQHISADLFIDCTAHSRLIDQALQVGFVDYSDYLPCDNSIQYVTDNKPKPKATTQINPNQAGFNLNFPLQAQTVNEYHYSSAHQTQEEALASLDLDSAALETVIFRQQKSQRVASFWVGNCVAMGDAAGSLGRIAASNFHLVQSAVLRLIDLLPDRSLNEHVECPSRDEYNNLCEEEYARVLDYHCAYFALLAREKAPIDSPFWRAQTQAKCPESLMHKMKLFEQTGRFPFYERETFSEKTWLSLFLGLGLWPKEYDRLLDVGQQNLQDSLDAFEQLAGLIDQISDKMPAHYHFLQQFCGAK

SEQ ID NO: 88789 - protein, 501 aa, Sphingopyxis sp.
  misc_feature (1)..(501): tr|A0A0W1D8A8|A0A0W1D8A8_9SPHN Tryptophan halogenase OS =Sphingopyxis sp. H115 OX=1759073 GN=ATE71_08745 PE=4 S V=1
MGDRFELVIVGGGTAGWMCAAACAAKLDPVRFRVRLVESEEIGTVGVGEATLPQMKDFNDFLGLDEVEFMKATQASFKLGIEFVNWGCEGDRYIHPFGTFGRPIGEADFFSYWIRANRAGTAAPLFDYCFPIVTALQNRFMLPVGDGNDVRSAFAYAYHLDAFLYARYLRGWAEARGIERVEGRIVEVEQDNESGDIAAVKLASGTHVAGDMFVDCSGFRSLLLGQTLGVEIEDWSHWLPCDSAQAVPSVRSADFTPYTRSTRRTAGWQWRIPLQHRTGNGYVYSSADISDDEAAATLLANLDGEALADPRVLRFKAGKREQAWAKNCVGMGLAGGFLEPLESTSIYLVQMAIMHMLTLMPSERATDPALPSEFNRVMDVEYDRIRDFLILHYVANEADAPLWERVTAIDLPDTLAGKIERFRHRGYIEAYRDGLFGPPSWQAVFVGQGVEPAAADRLADVLPAATVNERLANLAATIADAAATLPSHADFIARYCPAPAP

SEQ ID NO: 88790 - protein, 509 aa, Caulobacter vibrioides; identical to SEQ ID NO: 84540
  misc_feature (1)..(509): tr|Q9A4M3|Q9A4M3_CAUVC Tryptophan halogenase, putative OS=Caulobacter vibrioides (strain ATCC 19089 / CB15) OX =190650 GN=CC_2807 PE=4 SV=1

SEQ ID NO: 88791 - protein, 497 aa, Rheinheimera sp.
  misc_feature (1)..(497): tr|A0A349LYA0|A0A349LYA0_9GAMM Tryptophan halogenase OS =Rheinheimera sp. OX=1869214 GN=DCS87_16260 PE=4 SV=1
MQTIKKVVILGGGTAGWLSASLLKKVLGQAVDIELVESETIGIVGVGEATIPPIRLVNQVLGIREADFLRETKATIKLAIRFENWKKPGDMYYHTFGAPGRSMAFCNFHHLWVRAQQLGDSSSLWDYDLNYLCATHGKFAPITAKDTVLELPYAYHFDAGLYAMYLRKLSEQMGVVRTEGLVQQVMQQINGDIKSLVLSDGREVTGDLFIDCSGFAQLLIQKTLGVGYDDWTHLLPCDRAIAVPSERFEQTLPFTRSIAHSAGWQWRIPLQHRNGNGLVFSSNHYTEQQAIDLLMSNLDSKPLGDPRVIKFRTGRMRKQWQRNVIAVGLASGFLEPLESTSIHLIQSAIVRLLQLFPHNGIQPSKVAEYNRQSELEFTQIRDFLVLHYHVQQRDDSQFWRDMRNLEVPATLKQKVAIFADDGSLFRDQNDLFLESSWLQVMLGQGVMPKDYHPIANNYNREQLFDVLAGIKAIKQEPLSKFPSHDEFIQRALQIAPM

SEQ ID NO: 88792 - protein, 520 aa, Rheinheimera sp.
  misc_feature (1)..(520): tr|A0A5C7TPX9|A0A5C7TPX9_9GAMM Tryptophan 7-halogenase OS=Rheinheimera sp. OX=1869214 GN=E6Q75_03455 PE=4 SV=1
MTATLSATSQPFHFVILGGGTAGWMAALLFADKWLKPAAANQRAVTITLLEAPDIGIIGVGEGSTPSLKRFFQKLGIPDNEWMPACQATYKTNIRFVNWSPAAQVMGLGADYSHPFISQPDLHSETAFYSNCFKRRLGLAVETSPEKFLLNGYLAAEKLAPLPSANFPFRIEYGYHFDSGLLGQFLKQKALALGVNYHAMTVTQVNQLSDGCIGSLTGETADGGAKVTQVISADFFVDCTGFRSSLLQQTLQVPFESFASNLFNDAAVVLPTDAFAMPPVETRATALSNGWAWQIPLRHRTGNGYVYSSAFIAKDAAELELRQHLGLPDTEVNARHLQMKVGQVSRSWEKNCLALGLSQGFIEPLEATALHLVQSSIEQFIDAFADFTAKGQAEFNRQVHQRFEAVRDYIVAHYKLSSRSDSHYWRANSSNMQLSESLRQILDVWFRQGDLANEIARQQLDSHFGATSWHCLLAGYGVFPPLRQPQPAGVSDAFTELQLAAFFQGCSLNFQPQHLLWRAE

SEQ ID NO: 88793 - protein, 497 aa, Shewanella sp.
  misc_feature (1)..(497): tr|A0A2M7LYI8|A0A2M7LYI8_9GAMM Tryptophan halogenase OS =Shewanella sp. CG_4_10_14_3_um_filter_42_91 OX=1975535 GN=COZ42_03455 PE=4 SV=1
MNKTIKKVVIAGGGTAGWMAAAAFSKLLGKNLDIVLVESDEIGTIGVGEATIPTLHIFHRLLGLKEQDVMAATNATFKLGIQFENWHDVNKDYLHSFGFLGKDCWACGFQHFWLKGQQKNMVSEIGDYCTEHLAARQGRFAVLPNQDYNHAYHMDSSLYAKFLRKFAEQHGMRRIEGKIADVLQHEDTGNIRALQLENGEFIEGDLFIDCTGFKALLIEQTLNSGFEDWSHWLPCDSAIAVQTEAVQNPIPYTRSIARESGWQWRIPLQTRTGNGLVFCSKYLSDADATELLLNNIEGQPINKPRVIKFKTGTRRQHWNKNCIAIGLSAGFLEPLESTSIHMIQRSIVRLLQLFPSQGIIQADIDEFNQQTKIELDNIRDFIILHYKVTDREDSRFWRYCKNMPIPTSLQHRIDMFSQSGKVYKYGSELFGESSWIQVMMGQGLQPKEYHPIVDMMDDAELQSFLNSIKATVKRKVDTLPVHHDFVQHYCKSTAMQG

SEQ ID NO: 88794 - protein, 530 aa, Rheinheimera sp.
  misc_feature (1)..(530): tr|A0A5C7TEU7|A0A5C7TEU7_9GAMM Tryptophan 7-halogenase OS=Rheinheimera sp. OX=1869214 GN=E6Q75_13585 PE=4 SV=1
MPNCPPAKTEVLIVGGGAAGWLTAAVLSATHNLDEGVLAAQPRVQVTVLESPDVPTIGVGEGTWPSMRQTLKLIGLPETEFFRCCDVSAKQGSLFVDWSEPGSHYLHPFTLPAGWPEFNLATCWLPFAGDIAFADAVTTQYQLSTAGFAPRLPQAPDYQPVLNYGYHLNAGKFTALLQRHCQDKLGVRYVPAHLKEVLLRADGAIDKLLATPAGSAELGAYQADLYVDCTGMQSLLLGKALQTPLTSVKHILFNDRALAVQVLYPDADTPIVSNTISTAQNSGWVWDIGLPTRRGVGFVYASDYCSDDEADACLRNYLKKTAGSTQATLFFAEQAEPRQLQFQPGYRNGCWQHNCVAVGMAAGFIEPLEASALALVEWSAKTLAAALPLDPSLYSLAGAKMNRTFLRHWQQIIEFLKLHYVLSKRDTPYWRAHRDSASIPQTLQDQLQLWQQQVPQPLDFAYQDLLFPAASYQYVLYGMGALTQTLPAKPSQQARARALFAQNYQDLTKLQQLLPDNRQLLQQLALKNQN

SEQ ID NO: 88795 - protein, 479 aa, Altererythrobacter sp.
  misc_feature (1)..(479): tr|A0A419R3R1|A0A419R3R1_9SPHN Tryptophan 7-halogenase OS=Altererythrobacter sp. Ery12 OX=2306996 GN=D6858_055 60 PE=4 SV=1
MAAATLARFLGDHASITLVESDAIGTVGVGEATIPQIHNLLVGLGIDQAEFVDATEATFKLGIEFDGWLREGESYIHSFGTTGRGAGLIPFRQLWLRGRKIGVAESFGAYGLNVVAARKGRFAFGKDANLPYAFHFDASKVAVVLRRYAEERGVKRYEGKISSVTRDAATGDIAALVLDGDRRIEGNLFIDCTGFASLLLGKSLGVGFEDWSHWLPCDTALAVQSENVAPPPPFTRSIARPAGWQWRIPLQHRTGNGHVFCSAYMEQDEAARVLLENLDGKPLTDPRAIRFTTGHRREHWSHNCIALGLAAGFMEPLESTSIHLVQSALARLLNLLPNDLSNLSTARSMFNRLSGAEWERIRDFLVLHYVANDRRGEPFWDHCRQIELPDTLAEKIALFEESGLFVREDDELFLDDSWGQVMLGQGIDPRGYSPLADNVPGEDIGPFLASVAKAARVKAEAMPTHAEALQSLVGERARA

SEQ ID NO: 88796 - protein, 512 aa, Colwellia sp.
  misc_feature (1)..(512): tr|A0A5C6QK18|A0A5C6QK18_9GAMM Tryptophan 7-halogenase OS=Colwellia sp. C1TZA3 OX=2508879 GN=ESZ39_11825 PE=4 SV=1
MNKNEVHEANSVNSPNSKKLDIVIYGHSIAAFISALTIHNALADHVTLSLILPADQAHSDILYGGTSPPDAYNLHLAMDISEPELFQETNSSFSFGTHYQNWNGEKFDWVQAFSLPFTSQYGMDFHQVLLKHKQNLQAYLVGAQSALHDKFAHPPQNQPASPLSRAEYGYNFDYQNYALFLLSKIKQRKIRLIQSDLLEAKVVDEHITSLRLNDGSCIEADLFIDCSGTDARLMSTLGVKKRVHSKINLSLLTNENDTQMKPCNIVSGHVNAWQSTLYLQNSSQVLKAASFVDSAENSAKETSAENKNSANTIASISADIGAQEQAWVGNCVAISLSAAVLEPFSNAPFRLLKLDIERLLELIPISNNMRIEQKEYNRRYRLDVQHARLFNLALTDTRHFLQHEHSTKNQFLASDVDSDTQALLDRKLAQYLHRGLMVSYDYEPFNTEDWIILHFGMRRFPRRLDSLCDNIDNSDVKQHLLHTKNAIAAMVPKMPPCSLYTQKFLNYLKRQS

SEQ ID NO: 88797 - protein, 505 aa, Rheinheimera sp.
  misc_feature (1)..(505): tr|A0A5C7TPN9|A0A5C7TPN9_9GAMM Tryptophan 7-halogenase OS=Rheinheimera sp. OX=1869214 GN=E6Q75_03460 PE=4 SV=1
MHQTPATCSAGKPIRKVVVAGGGTAGWMTAALLKKVLADSVEIELVESDDIGIVGVGEATIPPIQIFNQYLGLDEKAFLRDTHATMKLAIKFENWRKPGESYYHTFGAPGASLGFCNFQHYWLRAKQAGLKQSLWDYDLNYLCCEAGKFNIIKTPNPVYEMPYAYHFDSALYGQFLRKIAEAAGVKRTEGMIEAVEQHGMSGHIEALQLKDGRKISGDLFVDCTGLRALLIRKTLGVAYESWSKYLPANSALAVPSERFAKTVPYTRSIAHKAGWQWRIPLTHRNGNGIVYSSDYLSDDEAHSTLMGNLDSKALAEPRKISFETGRTSSQWAKNVVAIGLSSGFLEPLESTSIHLIQSGIVRLLKVFPNQGITDAVVDYYNADSKQEFETIRDFIILHYHANERDDSAFWRDMRNMTVPERLRDKMALFRQSAQVFNDHNDIFRDASWIQVMLGQGIVPQDYHPAAKVPTETELLATLAKVQDAKQQPLAQMLSHDDFLARYSKA

SEQ ID NO: 88798 - protein, 503 aa, Colwellia sp.
  misc_feature (1)..(503): tr|A0A5C6QJD5|A0A5C6QJD5_9GAMM Tryptophan 7-halogenase OS=Colwellia sp. C1TZA3 OX=2508879 GN=ESZ39_11830 PE=4 SV=1
MHLCIVGGGSAGWMTAAALAKKFSRQKLQITLVESEEIGTVGVGEATLPHIRFFNQTLGIDERDFMRKTKATFKLGIEFVDWGTKGQSYIHPFGDFGEKINSVDFYQYWLLAQKNNDMGKLEDYAFGIAAAKSNKFTIPELGAPDLKNSFGYAYQFDSSLYAKYLREFSCKLGVNTIEGKVVNTSLNETNGNISALTLENGQRISADLFVDCSGFRGLLIEQSLQSGYQDWSNWLPCDRAIAVPCERTQQLTPFTRSTAKEAGWLWRIPLQHRTGNGHVYCSQFISDDAAQNTLLEQLDGKVLAEPRKLRFKTGRRNHFWKKNVIAIGLSAGFLEPLESTSIHLIQEGITKLIELFPAFDDQQTTSNTLTIDELDITEYNAQMGLEYERIRDFLLLHYVANDRSDSPMWAYFKNMTLPDSLQEKLDSWMHRAYIQRYEIGAFLPPSWVAVLLGQNLIPHNVDPRVQAFGTNDIRSKANAMREDIKLGLHQAEGHQAFLNRYLS

SEQ ID NO: 88799 - protein, 514 aa, Caulobacter sp.
  misc_feature (1)..(514): tr|A0A2G5RC33|A0A2G5RC33_9CAUL Tryptophan halogenase OS =Caulobacter sp. X OX=2048901 GN=CSW60_01565 PE=4 SV=1
MQPLKKILIAGGGSAGWMTAALCSRLFQGLYEIVLIESEQIGTIGVGEATIPAIKKFNELLGLDEDDFLRKTQGSFKLGIQFRNWWRKGESYLHGFGVIGQDLGWLRAHQYWLRMRELGKAPPFDHLAINNAMALSDKFMRARADMSESPIGHIAHAFHFDAGLYAKHLSTYAQARGVKRREGKIVDVTLRPEDGFVQSVTLDDGETITADFFVDCSGFRGLIIEQALKTGYEDWTHWLPCDRAIAVPSERSEHFTPYTRSTAHDAGWQWRIPLQHRTGNGHVYCSKFIDDDEAERVLLSNLDGAQRADPLRIRFTTGKRRKIWNKNCVAVGLAAGFMEPLESTSLHLIQSSVIRMVRLLPDASFDQATIDEFNRQTDFEYERVRDFIILHYKATERDDTAFWRHCRDMEVPATLQRKMDLFRANGRVFREDDELFTEESWIQVYLGQGVIPRGYDPLVRVQSDEAIAQYLHNIETVIGKCLAVMPSHAEFVARACEAPPPAALQAAPPLVPTP

SEQ ID NO: 88800 - protein, 498 aa, Colwellia sp.
  misc_feature (1)..(498): tr|A0A5C6QX33|A0A5C6QX33_9GAMM Tryptophan 7-halogenase OS=Colwellia sp. C1TZA3 OX=2508879 GN=ESZ39_01655 PE=4 SV=1
MKTQNKKIKKVVIAGGGTAGWMTAAALSKLMGKGIDVVLIESDEIPTVGVGEATIPTLHIFHQLLGINEQEFMAATNATFKLGISFENWRDISKDYIHSFGFLGQGCWAAGFQHFWLKGRAKGLVSEIGDYVPEHLGARAGKFAVLANQELNHAYHLDAGLYAKFLRNLAEKHRTTRIEGKISQVNLNKETGYISSITLASDKIIEGDLFIDCTGFQGLLIEGALNTGYEDWSHILPCDSAVAVQTKMVRKPVPYTRAIARDSGWQWQIPLQNRTGNGLVFCSKYMTDEEAKQTLLANVQGELLNEPRVIKYKTGTRRKHWNKNCVAIGLSSGFIEPLESTGIHLFQKAIVRLLQMFPSQGINQSDVDEFNSQARTEVDNIKDFIILHYHLTERTDSPFWRYCKNMEIPETLKHRMSLFKESGQVFKKAEELFGETSWIQVMMGQGLMPEQYHPIVDLMSDEELTSFLNNIKSAVKRKVDNWPDNNDFINHYCKSTTT

SEQ ID NO: 88801 - protein, 493 aa, Altererythrobacter sp.
  misc_feature (1)..(493): tr|A0A419R3R6|A0A419R3R6_9SPHN Tryptophan 7-halogenase OS=Altererythrobacter sp. Ery12 OX=2306996 GN=D6858_055 35 PE=4 SV=1
MSDNGKPPRVVVLGGGSAGWITACLLHKQWAERGGSVTLVESPEIGIIGVGEGSTPQLKALWDHLGIDEAAFMTACDATYKLGIRFTGWSERPGFESYFHPFPSPVDLHTEGAYFAACALARRGVDLPVRPDRWFLAARLAGARKGPHPTPNFPFPPTYGYHFDAYKLGAFLRDWAVPRGVVHRTAKVGEVELSADGDVAALLTENGERIEGDLFVDCSGFAGVIGQRALGVRFTPFAENLFNDRAVVMPTAHAKPYRQQTDAIAMSAGWRWSIPLTTRVGNGYVYSSAHISDEDAEAELRTACNSEADARVLRMKVGRVEETWHCNCLSAGLAQGFIEPLEATALHIVISTALDFVDAFEAGGFTPMHRARFNAKTAARYEGIRDYIVAHYRMNQRTDTAYWRDNRANQALSDNLKAMITAWFTQGDVGRTNATTYGEPAYSAMSWHALFAGYGGFPDATKMAPAPSSMFGAFARVDDLLSASETNFERVST

SEQ ID NO: 88802 - protein, 498 aa, Halieaceae bacterium
  misc_feature (1)..(498): tr|A0A4R5LUT5|A0A4R5LUT5_9GAMM Tryptophan 7-halogenase OS=Halieaceae bacterium GH4-78 OX=2547392 GN=E2F43_0289 5 PE=4 SV=1
MEPIKKIVIVGGGTSGWIAASVLSNQFRPDVLEVELVESEDIGTIGVGESTIPPFVGLIRNLGIDEQHFIQKVHATFKLGIRFPEWSNLGESYFHPFGSIGVRFGIYEFYQAWLKAKSMGHDSGLQEFAPCSVMADKHKFFLPQEAQKTPIGGASYAMHIDARLAADYLRGYAENRGVTRTEGMVTEVTQKEDGSIASLRLKSGKEVHGDFFIDCTGFFSLLIEKTLGVGFEDWSRFLPCDKAVAVQTENTGEALPYTISTAREAGWTWRIPLQHRTGNGYVYSSEHCSDDEARARLLECVDGKLLTEPMLIPFRTGIRESFWKKNCVSVGLAGGFIEPLEATAIHLVVRGMDFFLRYFPDKSCEPALINEYNRRMRMDYEEIRDFVVLHYCVTEREDTPFWQHCKTMAIPDTLRERIELFKAHGTLREGVDELFRSPSWQSVFEGMGIRPANYSPRIDNLDYKLIEDTLAEARKSIAAMVETLPSHDQFIRQKYLAL

SEQ ID NO: 88803 - protein, 496 aa, Colwellia demingiae; identical to SEQ ID NO: 82639
  misc_feature (1)..(496): tr|A0A5C6QE34|A0A5C6QE34_9GAMM Tryptophan 7-halogenase OS=Colwellia demingiae OX=89401 GN=ESZ36_13330 PE=4 SV= 1

SEQ ID NO: 88804 - protein, 517 aa, Aliiglaciecola sp.
  misc_feature (1)..(517): tr|A0A553L8W6|A0A553L8W6_9ALTE Tryptophan 7-halogenase OS=Aliiglaciecola sp. M165 OX=2593649 GN=FM019_04960 PE =4 SV=1
MMMSNQAINSVVIVGGGTAGWITAGRIAAEHQHNPSIEVTLIESPDISPIGVGEGTWPTMRTTLLKLGISESDFINQCDGSFKQGAKFAKWVTGEDDDFYYHPLVLPQGFHKTNLAKYWHEQHQKSGKSFSELVCYQEAICEQGLAPKTIRHGEFDALANYAYHLDSAKFSAFLQQHCTEKLGVKHVLANVESITSHDNNDIASVITKEAGEIFGDLFVDCTGFSALLIGKHYDVEFVPCDDVLFIDTALAVQVPYELDDSPIASHTISTAQDAGWIWDIGLQHRRGVGHVFSSRHTSKERAYEQLGKYVGEGFEQLQLREIPIKSGHRKIFWKNNCVAVGLSAGFLEPLEASALVLVELSAQLIAEQLPACRQVMDVVANRFNQTFDYRWQRIIDFLKLHYMLSKRTDNAFWVDNRNPDTIPNSLQELMTLWQYHPPADHDFSSNNEVFPAASYQYVLYGMGFVTENLTHAVCDRDHNLALQQFQLNQQAISKASRLLPSNRELINKIRQYGLQSV

SEQ ID NO: 88805 - protein, 544 aa, Rheinheimera sp.
  misc_feature (1)..(544): tr|A0A349LSL2|A0A349LSL2_9GAMM Tryptophan halogenase OS =Rheinheimera sp. OX=1869214 GN=DCS87_06055 PE=4 SV=1
MKMQQPQQLIIVGGGTAGWLTACVIAAEHKAQAGIAASVKIQLIESPDIPTIGVGEGSWPSMRQTLQKIGISETEFFRACDVSPKQGSKFVHWLHAPQAAASADEAYLHPFTVPAGYPDTALALSFLHSPVAERGSYAAAMTPQGRLSLAGKAPKTIGTPDYQFMQNYGYHLNAGKFAALLQRHATQVLGVEHIADTVTQVQVSQGQIAGVTTSQHGLLQADFYIDCSGTQSLLLGGALAEPFISCKAMLGNDRALALQLPYDLGGACDAPASAIFSNTVATAQQAGWIWDISLPNRCGIGHVYASEFLSDEQAYANVLAYAERRLSACNHQFASASAQQKHALLDGLMVKKLQINPGHYQRCMVGNCMAIGMAAGFIEPLEASALALVEWSAKTIAKALPLHANARSRVADRINQQFVKHWASIIDFLKLHYVLSQRDEPYWQMQRAMVPASLAKLLDLWQYQVPDVSDFPDAEQLFPAASYSYVLYGMGFEPRWLRPLKSHEWLRSQQLQAQLRHDVQQLSQLLPDNASLVTQIAAQGLSRL

SEQ ID NO: 88806 - protein, 505 aa, Colwellia sp.
  misc_feature (1)..(505): tr|A0A5C6QKD8|A0A5C6QKD8_9GAMM Tryptophan 7-halogenase OS=Colwellia sp. C1TZA3 OX=2508879 GN=ESZ39_11820 PE=4 SV=1
MNQSSTNRIRKIVIAGGGTAGWMSAAALSSMLRPDDVQIVLVESEEIGTVGVGEATIPDIISFNRMLGIDEAEFLKATNATFKLGIEFSDWGKLGDKYFHPFGNHGADMNGIDFHQYWLHTRQAGNTNSLEEYSMCAVAAKSMKFALPNDNPRSLLSQIGYAYHFDATAYALFLRNYAQKRGVIRIEGRIDQVLLNEQTENISALVMQNNERVEGDFFLDCTGFKSKLLGETLGVPFHDWSKWLPCNSAQAVPSERRGKLLPYTKSMAKTAGWQWRIPTQHRTGNGHIYSTDFMDDQQATDILMQGLDAPALSDPRTLRFTTGCRDKFWHKNCLAIGLASGFLEPLESTSIFLIQQGISRFISLYPSLTPAPKVVEEYNRLMTREFHQVRDFIILHYKATQRTDSEFWRYCKNMLIPDSLQHKMELFQCAGRVFRDDHELFSTSSWVAVMLGQNIYPETADPMLLGVPIQNIEQSLQSMQRAMQQTSLQMPTHAEFIKNYAGSSV

SEQ ID NO: 88807 - protein, 544 aa, Rheinheimera sp.; identical to SEQ ID NO: 83510
  misc_feature (1)..(544): tr|A0A2D4U293|A0A2D4U293_9GAMM Tryptophan halogenase OS =Rheinheimera sp. OX=1869214 GN=CML21_14955 PE=4 SV=1

SEQ ID NO: 88808 - protein, 507 aa, Shewanella sp.
  misc_feature (1)..(507): tr|Q0HS98|Q0HS98_SHESR Tryptophan halogenase OS=Shewane lla sp. (strain MR-7) OX=60481 GN=Shewmr7_3023 PE=4 SV= 1
MTIRKIAIIGGGTSGWLAANHLGRVLQGRSELSITLIESPDIPIIGVGEGTVPSIRKSLQSFGISESEFIRSCDVTFKQSIKFVNWLDKARHGKDNFYHHLFDIINLQGVDTVSAWLGEKQGDFADYVSPQHLVCEAAKAPKLITTPEYAGVLGYAYHLNAAKFAKLLAKNAIEKFNVEHIFATVQDVRLGDDGAISSLLTEQGTLSFDFYIDCSGFESILLAKALKVPFISKAHQLFIDTALVAQIPTQPTDIIPPYTQATAHRAGWIWDIALTQRRGTGFVYSSTHMAQSEAERKFDHYLGGKLADVPHRKIPMTVGHRQQFWVKNCVALGLAQGFLEPIEATSILLTDFSARFLAERFPVHTDDVDYLAKRFNDTVGYAWERVVEFAKLHYCLSDRTDSSFWLDNQASETIPEGLKQRLELWKSYGPIAEDFPSKFEVFNLDNYLYVLYGMKYQTNLRGGSSTTQASLNMYMNKMSKVKQQMRDGLPEHRELLDKICTYGLQSI

SEQ ID NO: 88809 - protein, 492 aa, Maliponia aquimaris
  misc_feature (1)..(492): tr|A0A238KIL3|A0A238KIL3_9RHOB Flavin-dependent tryptop han halogenase RebH OS=Maliponia aquimaris OX=1673631 G N=rebH PE=4 SV=1
MGVGEETVPQMPVTLREMGLDDQDFMRRCNASLKMGVMFNDWNVDRKGRPIRYMNPFATAPRIDGIEAGHYFQAYGAGRRDYVTSFSPMPELFEAYKCPFSFGGPADDPMPRAGYAYHLDAVQFADLLCETGTARGVEHILDDVDDVELDDRGLVAALHLRAKGRHPVQLVIDCTGFRGRIIQQALGEPFDSYSDHLGNDRALALQTPHPDPSKIRAATQSTALGAGWSWAVPLFNRIGTGYVFSSAHRTDEEAAREFLAHLGDAAPPGSEPRVIPMRIGRSRRAWVGNCIALGLSGGFIEPLESTAIHMIDLGLRWLLDCFPSQDYEDATRAAYNKLSDDLFNEVRDFICLHYRLNNRSDSPYWIDARGELKISDRLEHLLDLWQYQLPTQRDVPHAHLFSHQVFTAVLLGKRVYDTGYGAGRLNRAHALPETAWKAFLKQSAVRNRAVVAYKADHRRTLLALRGELRGAPPASAQLGTVEAMASAESALF

SEQ ID NO: 88810 - protein, 449 aa, Rheinheimera sp.
  misc_feature (1)..(449): tr|A0A2D5S2H9|A0A2D5S2H9_9GAMM Tryptophan halogenase (F ragment) OS=Rheinheimera sp. OX=1869214 GN=CML20_23175 PE=4 SV=1
ASIPPILHLNAALGIPESEFIKATQATIKLGIEFENWRAPQHSYMHAFGEIGKDLPFCEFYHYWLRAKQQGTNADFWDFSLNYQAAKQHKFAHLKHIPNTQLSGLNYAYHFDATLYGEFLKGLTISRGVKRIEGQIADVKQCPESGFVKALELLDGQIISGDLFIDCTGLSALLIEKTLNTGFDDWSHWLPCDSAIAVQTKTTAEPAPYTRSIAHDAGWQWQIPLQHRVGNGLVYSSRHITDEQAKQQLLDNIPGEPITEPRVIRFKTGRRRKQWHKNVVAIGLSSGFLEPLESTSIHLIQTAAIRLIKLFPHQGIKPVLIDTFNKQSKTEVERIRDFIILHYKLTERDDSGFWRQCKQMDIPISLQNKIDLFKQTGKLIREDDELFAEVAWQQVMIGQGLEAHDYHPLADALSDEQLAELFTNLKTLINGTVKQLPTHSEFLARMKNN

SEQ ID NO: 88811 - protein, 519 aa, Aliiglaciecola sp.
  misc_feature (1)..(519): tr|A0A553L4D8|A0A553L4D8_9ALTE Tryptophan 7-halogenase OS=Aliiglaciecola sp. M165 OX=2593649 GN=FM019_07735 PE =4 SV=1
MVDHQIRKIVIVGGGTAGWLTAGVIAAEHLANSEQGISVTLIESPDVSPIGVGEGTWPTMRGTLRKMGISETDFIRECDASFKQGAKFAKWVTGAEDDAYYHPLVLPQGYEQINLAPFWQEQADKVSFADAVSFQGHLCDQHLAPKQNTTPEYAHVANYAYHLDAGKFSTFLTKHCTEKLGVTHILDHVTDINSHDNGDIRSINTKMSGELEADLFVDCTGFNALLIGKHYQIPFINKRHILFNDTALAVHVPYETEQSPIASHTISTGQSAGWIWDIGLPSRRGVGHVFSSDHTTVEHAETELRDYIKQSIGDKADELKVRKIPIVPGHRQVFWHKNCVAVGLSAGFLEPLEASALVLVELSAAMISEQMPATRSVMDIVAKRFNDKFLYRWDRIIDFLKLHYILTKRTDTDYWVDNCDKKTIPEDLRQLMELWRYHSPWHSDFTQIDEVFPSASYQYVLYGMGFKTESAGTQRRSLDKQLAMENFRKNQQLTQKLIKGLPTNRALINKIRQFGLQRI

SEQ ID NO: 88812 - protein, 508 aa, Caulobacterales bacterium
  misc_feature (1)..(508): tr|A0A1F8IVD1|A0A1F8IVD1_9PROT Tryptophan halogenase OS =Caulobacterales bacterium RIFCSPHIGHO2_01_FULL_67_30 O X=1797584 GN=A2795_01145 PE=4 SV=1
MTLLASAPLHPDAIREVLIVGGGTAGWMTAAAMTRLPAGIRVRLIESEEIGSVGVGEATIPPLVTFNAMLGIDEASFIKATQGTFKLGIEFVDWGRKGDRYMHPFGEVGMDMEGVKFHQHWLRQAQGGDPTPIEDYCLSAVAARLGRFTPASSDPRTVLASLRHAYHFDAALYAGFLRRFSEARGVERVEGKVVGVSLRDSDGFIESVRLADGRRLDADLFIDCSGFRGLLIEEALATGYEDWSHWLPCDRALAVPSANTGPLTPFTRATADRAGWRWRIPLQQRTGNGHVYASAFTTDEDARASLLAGLEGEPLAEPRPLRFTTGRRRRQWVRNCVSLGLSSGFLEPLESTSIHLIQSGISRLMALFPTRRFDPVLIDQFNRLSQTQFEQVRDFIILHYKATQRDDTDFWRHVAAMDAPESLERRIALFRAGGRFMRDGDELFSEASWVAVFTGQHILPQDHDPLADGVPYAAMARKLAGLRGIIRKTAEAMPTHEAFIARCCQPSA

SEQ ID NO: 88813 - protein, 499 aa, Rheinheimera sp.
  misc_feature (1)..(499): tr|A0A5C7TJ78|A0A5C7TJ78_9GAMM Tryptophan 7-halogenase OS=Rheinheimera sp. OX=1869214 GN=E6Q75_11385 PE=4 SV=1
MQANKPVREVVILGGGTAGWISASLLVKLLGKSIRITLVESDEIGIIGVGEATIPPIMTFNAALGIDEKAFVRATKGTIKLGIEFENWRQIGDRYMHAFGSIGKEFPSCNFHHFWVRSQKLGMPYDFWDFSLAYQAAVQHKFGHLAKIDGVNLPGLSYAYHFDAGLYAQFLRQFSENLGVRRIEGKVSQVLRHADNGDVATLVLQNGEQVNGDLFIDCSGLHALLIEKTLNTGYEDWSHWLPADSALAVPCASVEPITPYTKSIAHAKGWQWRIPLQHRIGNGFVYSSKYCSDEEAKATLLANLDGAPLAEPRKISFKTGRRRKQWSHNVVSIGLSSGFLEPLESTSIHLIQSGVLRLLKFFPNNGISPAMRDEFNRLSQIEFEQIRDFIILHYKLNERTGSQYWLDCARMDVPETLRRKMAMFRETGMVQREQDELFSEIAWQQVMIGQGVIPADYHSMANAIDEAALKELLDNLKAVMQVTVNRLPPHQDFINFCLS

SEQ ID NO: 88814 - protein, 517 aa, Colwellia sp.
  misc_feature (1)..(517): tr|A0A5C6Q5A2|A0A5C6Q5A2_9GAMM Tryptophan 7-halogenase OS=Colwellia sp. C1TZA3 OX=2508879 GN=ESZ39_16440 PE=4 SV=1
MNKLTKKVVVVGGGIAGWLTAGRLAAKHKSNTEQGLTVVLVESPNISAIGVGEGTWPTMRSTLIALGISETDFIRECDASFKQGAKFAKWVDGSEDDFYYHPLVLPQGFSQGDLAAHWLARQGQTGAKSFSEDVCFQESVCENGLAPKTIRTPEFAAVANYAYHLDSVKFSVFLQKHCTEKLGVTHIIDNVTGVNSAPNGDISSVSTENNADVTGDLFVDCTGFSSLLLGKHYQVPFKSCSDILFIDTALAVQVPYDEVDSPIASHTVSTGQEAGWIWDIGLQHRRGVGYVYSSKYSSEAQAREVLAKYVGDKFSSLTVRKIPIVSGHREKMWQNNCVAVGLSAGFLEPLEASALMMVELSAQMISEQLPQSRDIMDIAAKRFNETFLYRWEKIIDFLKLHYILSKRTDNAFWIDNRDAQSIPESLKEAMALWQYRAPADHDFTSNNEVFPAASYQYILYGMGFKSDYSQNTYALDNIDFAQHQFAQNKKLTDKAVSTLPKNRELINKIIEFGFNQI

SEQ ID NO: 88815 - protein, 498 aa, Aliiglaciecola sp.
  misc_feature (1)..(498): tr|A0A553L684|A0A553L684_9ALTE Tryptophan 7-halogenase OS=Aliiglaciecola sp. M165 OX=2593649 GN=FM019_06415 PE =4 SV=1
MKQFKRIVILGGGTAGWMAANLFANKWADKNVHVTLVESPEIGIVGVGEGSTPTLKRFFEMLNISESQWMPQCNATYKVNIRFAGWSPKSGIEDYSHPFICQTDTFTQKSFFVNCRTRRLGLDTNVNPEEFLLNGVLAKQVKGPLAPEHFPMIMEYGYHFDSYLLGQFLAQHAETLDVEHIQAKVSSVKQHANGDIAALITENGDEIDADFFVDCSGFASVLMQKTLNVKFNSFKQNLFNDSAVVMPTPMQDVIPVETRATALSNGWAWKIPLTNRFGNGYVYSSDFINQDQAETELRRHIGTENDPESCRHLKMRVGQLEKHWANNCLGLGLSQGFIEPLEATALHLVQVCIEMFMGDFEKGQFSHRHQAEFNQKIAERFERVRDYIVAHYKVNTRDDSDYWRANRDNTHLSESLIQILNVWYKREDLGAEIDRQKLNTHFDTISWHCLLAGYGAFPPIANNQPGTGDHFIENGIEEFNRRCSLNFSSHQHNLDSLK

SEQ ID NO: 88816 - protein, 482 aa, Caulobacterales bacterium
  misc_feature (1)..(482): tr|A0A1F8IT34|A0A1F8IT34_9PROT Tryptophan halogenase OS =Caulobacterales bacterium RIFCSPHIGHO2_01_FULL_67_30 O X=1797584 GN=A2795_09460 PE=4 SV=1
MAAALFSKLFKGLYDITLIESEAIGTIGVGEATIPAIKTFNELIGLDENDFMRRTQASFKLGIQFVDWDRVGSSYIHGFGVIGRDLKWLRCHQYWLKMRAEGKVSDLAAYSINTAAALQNRFMRADPKRPGSPLGHIAHAFHFDAGLYAKYLRGMSEAAGVRRREGKVVSVQLRPEDGFVDSVTLEDGAVVSADLFIDCSGFRGLIIEQAMKTGYEDWSHWLPCDRAMAVPCARTEPFTPYTRSTARPAGWQWRIPLQHRTGNGHVYSSRHMDDGEAEQILLSNLDGAQMAEPNRIRFVAGKRRQIWNRNCVAAGLASGFLEPLESTSLHLIQSVLIRLVRLMPDAGFDPATIAEFNRQTDFEYERIRDFIILHYKATERDDTPFWRYCRDMDVPVTLERKIDLFRANGRIFREDDELFAEESWIQVLLGQGIIPVGYDPLVDVTPEPDIERYLADVETVIGKCVALMPSHADYVAKACPAA

SEQ ID NO: 88817 - protein, 517 aa, Caulobacter sp.
  misc_feature (1)..(517): tr|A0A2G5QXL8|A0A2G5QXL8_9CAUL Tryptophan halogenase OS =Caulobacter sp. X OX=2048901 GN=CSW60_22000 PE=4 SV=1
MDRAIQRVLVVGGGTAGWLTAGTLAAMSRGKDARPLEVALVESPNVPIIGVGEGTWPTMRRTLKRMGIKEADFIRECDASFKQGAKFARWVTGEPDDFYYHPLVLPKGYFETNLVPHWLQSNADLSFSRAVCPQEALCENGLAPKKITSAEFEATANYAYHLDAGKFADFLRRHCVDQLGVRHVLADVTQVIPAENGDIAAIETQQAGRIDADLFVDCTGMRSVLLGGHFQVPFKSCKDTLFIDRALAMQAPYAEPQSPIASHTISTAQPAGWIWDIGLQSRRGTGMVYSSAHCSDEQAEERLHAYVQGLGADPRQLSSRTIRIEPGHREQFWVRNCVGVGLAAGFLEPLEASAILLIEIAAQFIGEQMPTTRSAMEVVARRFNNTFRYRWERIIDFLKLHYILSRREDDAFWIDNRATDTIPESLSEALRLYRHQPPWHDDFDRAVEVFPAASYQYILYGMGFQTEPSPRGLSADETLRAQKLMDKVRDETEALVGALDANRDLLAKISRYGLAAI

SEQ ID NO: 88818 - protein, 542 aa, Rheinheimera sp.
  misc_feature (1)..(542): tr|A0A2D5RY32|A0A2D5RY32_9GAMM Tryptophan halogenase OS =Rheinheimera sp. OX=1869214 GN=CML20_15130 PE=4 SV=1
MQQRKVLIVGGGSAGWMTAAYLNGALNKQGTEQNVLIELLESPDIPRISVGEATIPSMRHLLAVVGVDELEFMKATDATFKQSIKYCNWVHNDNSFYHHPFTSMRVQPIDRAGSDWLKSDRSIPFMETCSAQPIICEMGLAPLMLGKWDMGSRLNYAYHMNAQKFADYLRDFSTARGVVHTLANLAGVEMQGPDKIVAVTTDQQQRLTADLFVDCTGFKAKLIEEQLGVGFEDCSQWLLCDRAITMHLPYDKFYPGMVRPYTTATALSAGWIWDIPMQNQRSVGYVHSSKFISAEQAEREMRAYQGPGTEQLKARVVDFKVGRRQGNWRGNCVAIGLSGGFIEPLESTGLYLSDLGAVLLAEHFPHDEQDMAVLAGRYNRLMANRFYEILDFINMHYCMTKRTDTEFWREVQKPERITERLKAKLAYWRIKPPSAHDFQDQWYPGMATTINSGAATADNRAAIDTGGLWNHESYECILYGMGFLEDECRQRYGPDLPATGVHPAIIQRLQMARQKLPPHAIWLNRVLAMPEYPTVCRPKGWV

SEQ ID NO: 88819 - protein, 505 aa, Sphingomonas sp.
  misc_feature (1)..(505): tr|A0A0Q4HS31|A0A0Q4HS31_9SPHN Tryptophan halogenase OS =Sphingomonas sp. Leaf226 OX=1735691 GN=ASE77_09855 PE= 4 SV=1
MTIGAPVRRIVIVGGGTAGWMAAAALARLIPTGASITLVESDAIGTVGVGEATIPPIRGFNAMLGIDEAEFLAATAGSFKLGIEFVDWGALGERYLHPFGGFGFDIEGVRFHQYWRRRRAAGIVEDIEAYSLCAVAARAGRFMPPSPDPASVLSQMAHAYHFDAGLYARFLRRRAERDGVVRVEGDVVDVTLDGETGHVRHVTLAGDRVIEGDLFLDCSGFRGLLIEQTLGAGYEDWTPWLPCDRAVAMPTANAGPAITPYTRSTARAAGWQWRIPLQHRTGNGYVYSSAHCSDDEAAATLRAGVDGTPLAEPRLLRFTAGRRRKQWIGNVVALGLASGFTEPLESTSIHMVQTGISKLLALFPDQGFSPVEIDTYNRLAATQFDQVRDFLILHYHATRRDDSPFWRETRARAIPDSLSEKLALWRRRGRLFRWEDDLFAEASWVAVLLGQGIVPDGWDRLADAVDAREVDARFDRLRAMFADAASRMPRHEDYLARICPTRVRA

SEQ ID NO: 88820 - protein, 501 aa, Sphingomonas sp.
  misc_feature (1)..(501): tr|A0A1Y2QP68|A0A1Y2QP68_9SPHN Tryptophan halogenase OS =Sphingomonas sp. IBVSS2 OX=1985172 GN=CAP40_00290 PE=4 SV=1
MTENRNIRSILIVGGGTAGWMTAATFARILGPDYAKITLVESDEIGIIGVGEATIPQMATFNRMLGLDEDQFVRETKGSFKLGIQFVNWGRLGHRYFHPFGRYGLDMKGVSFHAYYLRLRQLGEAPDVDAWSLQAMAARDDKFMRGIDAGNSPLSDIAYAYHFDAGLYARFLRRYAEERGVVRREGRIVDVKLRGEDGFVRSVTMQDGSEIEADLFVDCSGFRGLIIEQALKVGYTDWSHYLPCDRAVAVPCASVDAWTPYTRSTAHAAGWQWRIPLQHRIGNGHVFSSSHMSDDEATAILMANLDGEPLADPRTIPFTTGHRNRMWVKNCVALGLAGGFLEPLESTSIWLIQSGLSRFLTMFPDRDFNQADIDRYNRIMTTDYEEIRDFLVLHYHATERTDSPFWDTCRTMAIPERLAEKMRVFRSHGRAFRENEELFNDTSWFAVMLGQLIEPASHDPVADVMPLDETRARLAHIREAVANSAAYMPKHRAFIREHCAV

SEQ ID NO: 88821 - protein, 500 aa, Sphingomonadales bacterium
  misc_feature (1)..(500): tr|A0A1B6Z9E2|A0A1B6Z9E2_9SPHN Tryptophan halogenase OS =Sphingomonadales bacterium EhC05 OX=1849171 GN=A8B75_1 2450 PE=4 SV=1
MNGAKSDKPRRRIVVAGGGTAGWMAAAALARTMGEAIELTLVESDAIGTVGVGESTIPPLATYNRLLGIKEEDFMRATQATFKLGIEFENWKIDGEKYFHSFGTTGRDHWSAGFQHFWMHGLTKGHKESYDDYCLELTAAFAGKFAHLPDNRMNYAYQLDSTLYAKFLRKLAEADGTKRVEGKITKVDLDAGNGNIAALVLESGERIEGDLFLDCTGFRALLMEGALHVGFDDWTHYLPCDAAIAIQTKSVRQPIPYTRAIAHDAGWQWRIPLQHRQGNGIVYCSRYLEREDALDRIVSSIEGKPLTEPNFIRFATGARRKQWHRNCIAVGLSGGFMEPLESTSIHLIQRAILRLIRMLPMANVSERDVAEFNDQQMTDMLQIRDFLILHYNATDRRDSPFWRQCADMDIPDSLKQKIELFRETGRVFRKNEELFAENSWVQVMLGQGITPSSYHPIATKLSDEELAHLLGGLKESVSKTVADLPEHHVYVGRYCGAKIS

SEQ ID NO: 88822 - protein, 507 aa, Brevundimonas sp.
  misc_feature (1)..(507): tr|A0A0N1BMX8|A0A0N1BMX8_9CAUL Tryptophan halogenase OS =Brevundimonas sp. AAP58 OX=1523422 GN=IP78_11720 PE=4 SV=1
MAEPIQSILIVGGGTAGWMAAAAIKRSVGPNAEVRLVESADIGIVGVGEATVPPIRDFNAMIDLDEAEFMRETKATIKLGIEFNGWGRADSAYFHPFGTFGRGPTLGEFPGSYFALKARGKAASLEAYSVTSHAARRGKVGERSNDPRSALAGFHTAYHFDAVLYGQYLRKVCAGRGIERIEGEIVEVLQRPEDGFVDHVVLKDGRTLKADLFIDCTGFRGLLIEQTLKAGYEDWSHWLPMNRALAVPCAKVRAVDPFTSSTAREAGWQWRIALQHRTGNGYVYCSDYIDDDRARETLLANLDGEALAEPRPLRFVTGRRKKLWDRNVVALGLSSGFIEPLESTSIHLVQVGIIRLLQHWPDMAFSQPNIDGYNRRLTREIELIRDFVILHYHATQRDDTPFWRHVSQMPVPDSLSERVEMFRDRGLLFQVGADEYFSQGSWMAVMMGQGITPRAYNPLYDYQNLDQVAAGFEQTRQAWAATANALPAHEDYLKAKGMWAEEKAAAA

SEQ ID NO: 88823 - protein, 516 aa, Sphingomonas sp.
  misc_feature (1)..(516): tr|A0A0Q4I2I5|A0A0Q4I2I5_9SPHN Tryptophan halogenase OS =Sphingomonas sp. Leaf226 OX=1735691 GN=ASE77_04105 PE= 4 SV=1
MRKRILIVGGGTAGWLTAGYLAKRLGADLAGGVSITLVESQDIGILGVGEGTFPTIRRTLATIGIDEAELIRRCGATFKQGAKFVHWRHAPGQGRPDHYSHPFQVADASDGLDLLPYWLLGHGGAENWDEVSNPQKKAADAMRAPKLATNPDYVGPLNYAFHFDAVALAGLLREHAVRNGVRHLTDTVSEVVLAEDGAIGGVRTKRNGMLDADLYIDCTGFRAELIGKAMKVPFRSCRDVLFCNRAIAAQLPYAKPGDPIASYTISTAQESGWIWDIGLDRRRGIGHVYSSDHSDDETAERVLRGYLGAGGDEAEVRHFKFDAGYREVNWVKNCVAVGLSSGFFEPLEATGIAFAEVSAGMIANLFPWGGDYETSARQFNANMLRRYERALDFIKLHYCISERRDTAFWRDNVADASVPDSLLELLDRWRFRPPNELDIDGQVDIFTDASWQYVLYGMGWKTDLSAKAGALRYAEDARRAFAEVRRQADYAVRNLPSNRDLVAYAQHHHFGARAAA

SEQ ID NO: 88824 - protein, 540 aa, Gammaproteobacteria bacterium
  misc_feature (1)..(540): tr|A0A1G0IM33|A0A1G0IM33_9GAMM Uncharacterized protein OS=Gammaproteobacteria bacterium RIFCSPLOWO2_02_FULL_42 _14 OX=1798294 GN=A3I77_06195 PE=4 SV=1
MNDDSIRRIVIIGAGTAGWMSATYLAQSLNFNAKITVIESAQHAPIGVGEATIPTIKTEFFDRLGISEDAWMPELGGTFKLGIKYANWKTPLESGGDYYYHVFGEIPMIDEIPLSSVWTKQFLEGKTKRNFADSCFASSVAFDFHKSPKLLDGTKVQHYAYHFDAILISRYLKDWGVARGITHVIDKLVNAKQDEQGNVTCVIGESGREYHADLFIDCSGFAGFLIDKLFKEPVISFADCLLTDRAIAINLPNDPKEKTIRSYTTATAMKAGWMWEIPLYERSGNGYVYSSQFISDEEAEKELRQFFGKRADNATLRPIKFQSRRHRNSWVKNCVSIGLSGSFLEPLESSTIYFIYAALYQLVKCFPKKNIDPVLREKFNRKINFMVDDNRDFICMHFKTAQREDTAFWKTNKYETKAPDSLELILRQHKSGLPIRRPTVDNNNIYPTFKSLFQNFWTETNYQCILCGVGYLPNNSYPLLDYRQDVLDAGKMLFQQISKRAKELKKILPDQRVYLKSLHDKRDQAMNTSIKKKRIAKKVC

SEQ ID NO: 88825 - protein, 509 aa, Idiomarina baltica; identical to SEQ ID NO: 83454
  misc_feature (1)..(509): tr|A0A348WL32|A0A348WL32_9GAMM Tryptophan halogenase OS =Idiomarina baltica OX=190892 GN=DCR58_00515 PE=4 SV=1

SEQ ID NO: 88826 - protein, 538 aa, Burkholderia ambifaria
  misc_feature (1)..(538): tr|A0A2S9NZ98|A0A2S9NZ98_9BURK Tryptophan halogenase OS =Burkholderia ambifaria OX=152480 GN=C6Q14_03725 PE=4 S V=1
MSNPIKNIVIVGGGTAGWMTASYLVRALQQQANITLIESAAIPRIGVGEATIPSLQKVFFDFLGIPEREWMPQVNGAFKAAIKFVNWRKSPDPSRDDHFYHLFGNVPNCDGVPLTHYWLRKREQGFQQPMEYACYPQPGALDGKLAPCLADGSRQMSHAWHFDAHLVADFLKRWAVERGVKRVVDEVVDVHLDERGYISSLSTKEGRTLEADLFIDCSGMRGLLINQALKEPFIDMSDHLLCDSAVASAVPNDDVRDGIEPYTSAIAMNSGWTWKIPMLGRFGSGYVFSSKFTSRDQATADFLKLWGLSDNQPLNQIKFRVGRNRRAWVNNCVSIGLSSCFLEPLESTGIYFIYAALYQLVKHFPDTSFDPRLSDAFNAEIVYMFDDCRDFVQAHYFTTSRDDTPFWLANRHDLRLSDAIKEKVQRYKAGLPLTTTSFDDSMYYETFDYEFKNFWLNGNYYCIFAGLGLLPDRSLPLLQHRPESIEKAEAMFASIRREAERLRTSLPTNYDYLRSLRDGDAGLSRSQRGSTLATQEIL

SEQ ID NO: 88827 - protein, 511 aa, Pseudoalteromonas peptidolytica
  misc_feature (1)..(511): tr|A0A510U3U0|A0A510U3U0_9GAMM Tryptophan halogenase OS =Pseudoalteromonas peptidolytica OX=61150 GN=PPE03_0619 0 PE=4 SV=1
MKLQKVIILGGGTAGWLAANHLAKRLNAELSLDIHIELIESESIPAVGVGEGTVPFMKETLKHFGIDEELIFKNAEGSFKHGIKFSDWLYNPESNNGHYYYHPFQPYPSGHEQLIRAWLSNPNRCKFEHFMSTQATVAELGLSPKAITQREYDGVFDYAYHFDAALFTKLLKDNAVNELGVHVSYKTIDDVEISQDGSIKGLIANGERFDADFFVDCSGFESLLLGRAMNVGFKSLSNTLLADTALAVQSPYQDNSTPINPYTTATAKEHGWIWDIQLQSRKGVGYVYSSNHTSDDDAQRCLALYLDVEPQELNVRKIDMRCGYREQFWVKNVVALGLAQGFVEPLEATGLLVFDLTASMLAHALSSGELSFALESQKFNRDVERMWLNISDFIKLHYCLSKRTDSSFWLDNCSTDTIPDSLQQKLEMWKVRAPHKFDFTDKLGVFDISNYLYVLYGMEFLPTQVVTSEASMQIYKGYQEYQTSVLKEVNSNLRPHKELLEKLKLYGIQRN

SEQ ID NO: 88828 - protein, 501 aa, Sphingopyxis sp.
  misc_feature (1)..(501): tr|A0A095B8Y4|A0A095B8Y4_9SPHN Tryptophan halogenase OS =Sphingopyxis sp. LC363 OX=1120705 GN=FG95_01171 PE=4 S V=1
MGDRFELVIVGGGTAGWMCAAACAAKLDPARFRVRLVESEEIGTVGVGEATLPQMKDFNDFLGLDEVEFMQATQATFKLGIEFVNWGREGVRYVHPFGTFGRPIGEADFFSYWIRAHVAGTAAPLSDYCFPIVAALQNRFMLPSGDANDVRNAFAYAYHLDAFLYARYLRGWAEARGIERVEGRIVEVEQHGESGDIAAVKLASGTRVAGDLFVDCSGFRSLLLGQTLGVGLEDWAHWLPCDSAQAVPSARSVDFTPYTRSTRRTAGWQWRIPLQHRTGNGYVYSSADISDDEAAATLLANLDGDALADPRVLRFRAGKREQAWAHNCIGMGLAGGFLEPLESTSIYLVQMAIMHMLTLMPAERAIDPALPTEFNRVMDVEYDRIRDFLILHYIANEADAPLWERVTVIDLPDTLADKIDRFRHRGHVQAYRDGLFGPPSWQAVFVGQGIEPRAADRLADALPAATVEERLATLAATIADAAATLPSHADFIARYCPAPAP

SEQ ID NO: 88829 - protein, 501 aa, Pseudoalteromonas peptidolytica
  misc_feature (1)..(501): tr|A0A510U2A2|A0A510U2A2_9GAMM Tryptophan halogenase OS =Pseudoalteromonas peptidolytica OX=61150 GN=PPE03_0917 0 PE=4 SV=1
MKTHLPTKTIQSLTILGGGTAGWMCAAYLAKHQPTLSVTVIESPHIASIGIGEGSTPHLQHFMQSLGVKECDWMPACQASYKTGIYFDNWNGDNSGYFHPFFSEMDAKTAEVYFVNANARRRGSEYIDKPEHYFLAAVLADKQQAPIPQQPLPRALEFGYHFDAQKLAQWLSAFSLARGVKHRQSTVTSVQHDSQTVIALTLESGEQIKSDFYVDASGFNGLLIEKTLEVPFISFSDQLLNDSAIAIAGDKITPLPSSTAAIAMPCGWRWQIPLQSRTGHGYVYSSAHISAQQAEAQLRQAAQLDTGPAKHLTMKVGMMARCVEGNVFAIGLAQSFIEPLEATALMVTGYSIELLHRLLSQQLEAQAINQQLSDLVLGIKEYVLAHYATSKRTDTQYWQDAKVAALNVRELDALLTHWRDGGDFDAWLHQHRSQSPYIRPSWYCLLGGMDHRDSCCQMPFEQAPTHIELAAKAYLTQLSDKHFIAHTKALQQLLLSDQRSA

SEQ ID NO: 88830 - protein, 494 aa, Sphingopyxis sp.
  misc_feature (1)..(494): tr|A0A095C472|A0A095C472_9SPHN FAD dependent oxidoreduc tase family protein OS=Sphingopyxis sp. LC363 OX=112070 5 GN=FG95_01173 PE=4 SV=1
MSARARPVRRIVIVGGGSAGWMTAAAFGRALAGQPHSIALVESEAIGTVGVGEATVPPIHEFNRYLKIDQAEFLRATHGTIKLGIAFEGWGGSDHRYFHPFGYLGVEMSGIHFHHFWLRHLAAGGDPDHGPYNLETMAAREGRFAPATRHGPVHHAVQFDAAAYARLLRSYAEDKGVVRIEGKVADVRLDPEDGFITALALDDGRTIDGDLFIDCSGFRGLLIEGALQTGYTEWSHWLPCDSAIAMPCEGTGDPAPFTRSTVREAGWQWRIPLQHRDGNGYVYSSAHLGHDEAEALLRSRLPGAPLADANRLRFVAGHRKAIWNRNCVAIGLAGGFLEPLESTSIHLIQTTIIRLLSLLPRDAIDPNVIRRFNRDALHEYAVIRDFVIAHYALANRDDTPFWRDVAAAGLPDSLAERIEAFRATGNILFEPGDLFGPTNWYAVLTGQGMRPQSWHPIADGLSDEELATRLATLRGRVAEQLAELPPHVEFLRRL

SEQ ID NO: 88831 - protein, 609 aa, Fischerella thermalis
  misc_feature (1)..(609): tr|A0A2N6MUD2|A0A2N6MUD2_9CYAN Tryptophan halogenase OS =Fischerella thermalis CCMEE 5201 OX=2019672 GN=CEN39_1 8765 PE=4 SV=1
MTTNNTQSQVYDVVIMGAGIGGVCQARHLLLNIPNIKIALVDPRPEERTDRDMKVGESTVEISTLMICKELGLYDYMIENHPPKFGLNFHWAKEAGKTENTEDYYHIWTVKQPPLASVLINRPKFERDLLRMNQQMGAEFYNGRVVDVDLTPGDELNTVHVKQGDRYLELKTKHVIDSAGRKFLIGRKTDNLITGPENLYGINNGSVWMRVRNVDRTIFHSGYDPEVCTCSHYYAANHWMGHGHWVWMLPTDTQNMELSIGLLYHHDIISPHSVNTKEKFYAFLEANHNVVYRLLKSGEEVDFHHWPRIAHKSKQMYSQDNWYIIGDAAAIFDPFYSQGLTMMSFQIESVTEIIRAKLAGEANAKEKCALYNKFALNMIDRTNVLVSRHEKQIGDASIMTWRMYLENIWWFKMLIPMFVGKWHLDLDFLKNVVAKPGRLYVVQIMNAVYEHLDELVERKANIGFLHTHIADQLPFGFTMSNDFDNFLHLTKYEPQRANIYVSIQWSHFFVALWYLKFLWKAYGLKGVLSPHNLKHVFALFKAFVEAAWDHLIFRIKTKNIPGNSIIANIRQEFKNYRSPAKLEPWLEEVTEASNGNVTTQSRELVKAEV

SEQ ID NO: 88832 - protein, 234 aa, Acidobacteriia bacterium
  misc_feature (1)..(234): tr|A0A321LDS2|A0A321LDS2_9BACT Tryptophan halogenase (F ragment) OS=Acidobacteriia bacterium AA117 OX=2169412 G N=DMG65_21185 PE=4 SV=1
MRESESSHNSYDVVILGAGPAGAATALALKRLDSTLRIALVERSDYSAIRIGETLPPPARTLLTELGVWQAFLATSPRACYGTRAAWGSPQFHENEFIFSPYGYGWHLDRRAFDAMLTAEAARRGVEVIQPATISTASRCENDWILINAEEHGRKIRTRFVVDATGRRSWLASHLGIRRLVYDQLVGIFNFYQFHSGSAPADSYTSIEACEQGWWYAAMLPDEGLAVAFMTDAD

SEQ ID NO: 88833 - protein, 503 aa, Brevundimonas sp.
  misc_feature (1)..(503): tr|A0A0S9NE93|A0A0S9NE93_9CAUL Tryptophan halogenase OS =Brevundimonas sp. Leaf280 OX=1736320 GN=ASF31_14005 PE =4 SV=1
MTPAPLKRILIVGGGTAGWMAAAALAHVTRGTVKIELVESEVIGTVGVGEATIPPILLFNQLLGIDENEFVRATQATYKLGIQFNDWFQKGRSYFHPFGTYGTRIDAASFHQYWLRLNKAGLDDDLDAYSVTTMAARMGRFTRPDTDPRGAGSQMTYAFHFDAGLYARFLRRRAESQGVVRHEGKVADVRLRDGDGFIQSVRLDDGRELEADFFIDCSGFRGLLIEGALKTGYEDWTHWLPADRAVAMPCTRIGDPTPYTQSTALEAGWRWRIPLQHRTGNGYVYCSPFISDDEAQAKLRASLDGEAMAEPNFLRFTTGRRKKTWNKNCLALGLASGFLEPLESTSIHLVQSGISKLLLHFPDTGFAQADIDNYNRMMRLETERIRDFIILHYHATARDDSPLWRHVRAMPIPETLKQKMDQFRSRGRIFRYEDELFQETSWIAVLLGQGVIPERHDPITETIPLEQVQQWLHKMKAMIQQGVARMPTHEAFIAANCKAPPIN

SEQ ID NO: 88834 - protein, 519 aa, Sphingopyxis sp.
  misc_feature (1)..(519): tr|A0A095AME1|A0A095AME1_9SPHN Tryptophan halogenase OS =Sphingopyxis sp. LC363 OX=1120705 GN=FG95_03749 PE=4 S V=1
MNSASAIERIVIVGGGTAGWLAAARLASSPRAMAGRLSVTLIEAPDIPTIGVGEGTWPTMRATLGAIGIGEGEFLAACDGSFKQGSRFDGWVTGAADDRYLHPFTAPPAAPTTELLAAWRSGAADLSFAAAMTPQAHVCDLNLAPRQRAMPDYQGAANYAYHLDAGKFAALLARHAVQRLGVRHVADHVTGIDADGAGGIASVSTHQNGEIAGDLFIDCTGHASLLIGGHLGVDWIDRGDTLFNDRALAAQVPVTPGSPVASQTVSTAHEAGWIWDIGLPGRRGIGCVYASRFMDDDAAEAVLRAYIARALPDAPEVPARRLSFPTGHRARFWEGNCIAVGLSAGFIEPLEASAIVMIELSLNALIDNFPASRAALPIHAARFNELFRYRWDRIVEFLKLHYALSRREEPYWLAQRDAAHIPPRLAEMLALWRDQPPSVWDFPRVDEIFSAESHQYILYGMGFPVPADLPATGGRAAGLLADNRQRARSLAAALPANRDYLDALRPGAHAAAARQEGIG

SEQ ID NO: 88835 - protein, 509 aa, Sphingomonas sp.
  misc_feature (1)..(509): tr|A0A2T7VKD9|A0A2T7VKD9_9SPHN Tryptophan halogenase OS =Sphingomonas sp. TPD3009 OX=2171625 GN=DC425_08570 PE= 4 SV=1
MTDAHPNPPLKTITIVGGGTAGWMTAALLSRLLLGAYTIRLIESEEIGTIGVGEATIPAIRTFNGLAGIDEFEMVRATQATFKLGIEFRNWGAPGDSYIHGFGKIGQDLYWLHCHQFWLKERAGGRAKHLDHYALNTLAARMNRFAMPDPSNPQSPIADIDYAYHFDASLFARFLRTRAEGAGVERIEGRIVAANRRGSDGFLDHVVLADGRTVDGDLFIDCSGMRGLLIGDAMGVGYEDWSEWLLCDRALAVPSARGAGPLTPYTRATAHGAGWQWRIPLQHRTGNGHVYASRFVSDEAAAATLLGHLDTPALGDPRPVRFRPGKRHRAWEKNVVALGLAGGFLEPLESTSIHLIQTGILRLIALFPGRGFNAADTDEYNRQTDFEYRDVRDFIIAHYKVTSREDTEFWRYLKHMAVPDSLTERLELFRSSGRFFMHAKAELFREESWVQVLLGQGVQAHHDPMVDMIPAEQTTAFLKDVEEVVADVAAGLPTHEAFIARHCQAPKLS

SEQ ID NO: 88836 - protein, 538 aa, Kangiella koreensis
  misc_feature (1)..(538): tr|C7RB81|C7RB81_KANKD Tryptophan halogenase OS=Kangiel la koreensis (strain DSM 16069 / KCTC 12182 / SW-125) O X=523791 GN=Kkor_1104 PE=4 SV=1
MIKKVLIVGGGSSGWMTAAYLDAAINKKGTQKKISIELVESPDIPRISVGEATVPSIRHLLATIGVTEVDFMKSTDATFKQAIKYVNWVDNDNSFYYHPFNRFSPKPLDTLAHHWILSDKSIPFGDICSAQPQICELALSPKTLSESGWGSPFSHAYHMNAQKFADYLRDISVSRGVNHVLANVTDVEMKSDKQIKAVNTDNAGRLEADLFIDCTGFRAKLIEEKLGVGFEDCSQWLLCDRAVAMHVPYDKYYPGMVRPYTTATALSNGWVWDIPMQSQRSLGYVHSSAFISKEAAERELRAYQGGSCDELPARFVDFKVGRRHKAWEGNCIAIGLSGGFIEPLESTGLYLSDTGVVMLAEHFPFDESTIDDMSFRYNRILSNRFYEILDFINMHYCLTRRVDTEFWRTVQKPEHITDRLKAKLEFWKIKPPSPLDFEDQSFMGYDSKHLLQGGDNRSPIDNAGLWSHLSYQNILFGMKFEEQMHQANSHSSIPSVIHPMVRRRLEVAKSMLPTHEHWLRHSLDMPEYSVSSFPDGWV

SEQ ID NO: 88837 - protein, 495 aa, Rheinheimera sp.
  misc_feature (1)..(495): tr|A0A0X3YB79|A0A0X3YB79_9GAMM Tryptophan halogenase OS =Rheinheimera sp. EpRS3 OX=1712383 GN=AR688_12170 PE=4 SV=1
MQSNTVKKVVIAGGGTAGWVAAAALSKRLKGLIDVVLIESEEIGTVGVGESTVPPVQLFHNLLGINEQEFMQATDATFKLAISFENWGQQGDHYFHPFGVTGKGSFLTDFQHYYLHGLNQGIAAPFGDYCYELQAAKQHKFAKTEQSTINYAYHLDAGRYARFLRRFSEDLGAVRIEGKIAQVQQHVNGDIRALVLESGQEIIGDLFIDCTGFRALLIEQTLKTGYERWDHWLPCNKAVVVQTEPGPTVPPYTRAIAHDSGWQWKIPLQHRVGNGLVYASDYLSDDKARQRLLDGLEAPAIMEPRVLSYQTGRRKKLWHKNCVAIGLSSGFIEPLESTSIFLFMSGIIRLLRLFPFNGVTPALTDEYNQQSITEVEKIRDFIILHYHQTERTDSPFWDYCRTMTIPDSLAHRIALFRESAHAFQTGDEMFRLESWSHVMLGQRLQPQSYHQLVAGLGSGELSRHLQQIRETINSAVHRLPSHRDFLRQYCPSNLT

SEQ ID NO: 88838 - protein, 421 aa, Amycolatopsis keratiniphila
  misc_feature (1)..(421): tr|R4T2Y4|R4T2Y4_9PSEU Tryptophan halogenase OS=Amycola topsis keratiniphila OX=129921 GN=AORI_6627 PE=4 SV=1
MSATLHGMPERFDVIVIGGGPAGATCAGLLAKEGRTVLVLERERFPRYHIGESLIPVGMRPLQELDLLDRMEARGFERKYGGSLVWGNRDVPWNFSFMKAAEGTYAYHTRRADLDTLILDRARELGAYVVEETTVKDVIQSDTGRVTGVRFTLRGSAGDYEASASLVVDASGQSRVIGRKFSDITWHNELRNVAVWTYYDNCDRLPGDEWTNILIEGTADGWFWGIPIDKGTMSVGYVTKSDLANADDQSLEQLFLRERDKTTRLKGLLANARQHAGYRTARDWSYTNETFYGDGWVLVGDAAAFVDPLFSTGVALATLAGSSLSKVVNRILEHPAIEEKALDRYAGNYRAFFDEIRNFVERFYDRTKYKEYYYDLAQEIVDPEQLHAPSTDFVTLISGLSGKHPLLKINLDDLVANVTEP

SEQ ID NO: 88839 - protein, 535 aa, Saccharopolyspora antimicrobica
  misc_feature (1)..(535): tr|A0A1I5C4W9|A0A1I5C4W9_9PSEU Tryptophan halogenase OS =Saccharopolyspora antimicrobica OX=455193 GN=SAMN05421 805_10766 PE=4 SV=1
MTQTDAAAKNLGDPGKTRRVVVVGGGTAGWMTASYLTAAFGDKIDVTVVESAQIGTIGVGEATFSDIRHFFEFLRLAESDWMPACNATYKLAVRFENWREPGHHFYHPFEQMGSIDGFPLSDWWLRYPRTDRFDKDCFVMASLCDAQRSPRYLDGTPVDQGVFETGHGEETARATMAEYQGAQFPYAYHFEAHLLAKFLTKYATDRGARHVVDNVVDVALDEHGFISHVKTAEHGELAGDLFVDCTGFRGLLMNKALGEPFISYQDTLPNDSAVALQVPLDMDREPLRPCTTATAQEAGWIWTIPLISRIGTGYVYASDYCEPEEAERVLREFVGPEAADVEANHIRMRIGRSRRSWVNNCVAVGLSSGFVEPLESTGIFFIHHAIEQMVKYFPSGRDNDRLRNMYNRSTANVMDGVREFLCLHYRAAKRADTQYWKDTKTRPVPEALEERLENWKYKVPDAETVYPYYHGLPPYSYNCILLGAGGFDIRHSPALDMADETAALAEFERIRLKAEKLVQELPTQNEYFAKMRENA

SEQ ID NO: 88840 - protein, 497 aa, Pseudoalteromonas sp.; identical to SEQ ID NO: 88439
  misc_feature (1)..(497): tr|A0A1Z9WXS0|A0A1Z9WXS0_9GAMM Tryptophan halogenase OS =Pseudoalteromonas sp. TMED43 OX=1986613 GN=CBC03_16955 PE=4 SV=1

SEQ ID NO: 88841 - protein, 500 aa, Rheinheimera sp.
  misc_feature (1)..(500): tr|A0A101M6D7|A0A101M6D7_9GAMM Uncharacterized protein OS=Rheinheimera sp. EpRS3 OX=1712383 GN=AR688_01170 PE= 4 SV=1
MVSALKKMNKVVIVGGGSAGWITACLLRKQLAADITIELVGAPEIATIGVGEGSTPQLRGLFNTLGIPEAEWMSACNATYKLGIEFTGWTDTAGYSRYFHPFVAQTDLHTQDVFIHSCYYRRLGLDVDANPDHYFLNAALAQQGRQPLADASFPFSVEYGYHFDSTLLGQFLATYAKSQGVTYREFSVSDVVIAEDGSINALVSAQHGVLEADFFVDCTGFSARLISQALGVKFISYSANLFNDAAVVMQTPCLPDEKLMTQSTALRNGWAWRIPLTSRVGNGYVYSSKYCSAEQAEQELRAHLGVDDSVAARHLKMKVGRLEQHWYKNCLAVGLSQGFIEPLEATALHLVQTTVEMFADCLVKGNYSDALQPEFNQRINSRFEGIRDYIVGHYRLNNRTDSQYWRDNAANEDLPLHLKGLTRAWLSREDIGPYLTANKLDSYYSINSWHCLFSGYGIYPSQLVPADSTKPEVQSFLRRIDDVGHFNRMCSQHYPLNKQR

SEQ ID NO: 88842 - protein, 500 aa, Rheinheimera sp.
  misc_feature (1)..(500): tr|A0A101M6U9|A0A101M6U9_9GAMM Tryptophan halogenase OS =Rheinheimera sp. EpRS3 OX=1712383 GN=AR688_01175 PE=4 SV=1
MHQNGIRHIVIAGGGSAGWMAASALAKVFKDKIRLTLVESTDIGTVGVGEATIPPIQSFNQLLGIDERYFIQQTDATIKLGIEFAGWGQASSQYMHAFGDVGSNVGLTHFINYWLRQSPKNASDYWRYSLNFLAAKANKFSPAKTLPGTTIPGLSYAYHFDASAYARVLRDYAVKLGVHRIDAKISRVNICPASGNIRDLILDDNQVVAADFFIDCSGFRGLLIEEALNTGYESWQHWLPADSAIAIQTRQGNTTQPYTRSIAHAAGWQWHIPLQSRTGNGMVYSSTFMQQEQALDTLLQHLPEGERSDPKFLRFTTGRRKKQWHKNCLALGLSSGFLEPLESTSLHLIQSGIGRFLKLFPQNPADTCLADEFNRQADAEMEAIRDFIILHYHLNQRSEPFWKRCREMAVPDTLTERIALFADSGRVFRRSDELFSEMGWYQVLLGQGIMPHSYSPLANTLPEAECSDFMSNISAVFSGYVSQLPTQESYLHGISAKKNE

SEQ ID NO: 88843 - protein, 509 aa, Shewanella sp.
  misc_feature (1)..(509): tr|A0A2N7CLR6|A0A2N7CLR6_9GAMM Tryptophan halogenase OS =Shewanella sp. 10N.286.51.B7 OX=1880836 GN=BCU84_20390 PE=4 SV=1
MEVQHIVIIGGGTAGWLAANHIGKAAQLLPNVKVTLIESPDIPTIGVGEGTVPAIKQSLQSFGIRETDFIRDCDVSFKQSIKFCNWLDKHKHGVGNSYHHLFDVPSPLGTDLTDYWLNQASEQAFSQAVSPQHYICESLKAPKLITTPEYSGKVSYAYHLNAAKFAKLLAGNAITKFGVKHLHANVLDADIDQQGNLTQLKTDKFGDLKFDFYIDCSGFESILLAKKLKVPFVDKSKQLFVNKAIVAQVPITTKDAIPPYTIATAHQAGWIWDIALPERRGTGFVYSDNHMSSAEAEKKFDRYLGGKLANLESREIPMKVGYREQFWFKNCVALGLAQGFLEPIEATSILLTDFAAGYLAKRLPQTMGQMLSLSARFNDTMTYAWERVVEFAKLHYCISDRTDSDFWIDNRHPDSIPEALKQKMMLWQDYSPITDDLFSRFEVFNIDNYLYVLYGMKYQTQSSQLDRLYCNTAKQQVARIQQIGQSLAAELPEHRALLNKINQFGLKTI

SEQ ID NO: 88844 - protein, 498 aa, Microbulbifer sp.
  misc_feature (1)..(498): tr|A0A510IUN0|A0A510IUN0_9GAMM Tryptophan halogenase OS =Microbulbifer sp. GL-2 OX=2591606 GN=GL2_26880 PE=4 SV =1
MTCIKRVVIAGGGTSGWLTAAAIAKLYGKQVKVTLVDCAEIGKIGVGEATIPPLRNFHRLLGIEESEFMAATQATFKLGIEFNNWARQGDKYIHSFGVTGKDCWACDFHHFWLAGYNKDLADSFGEYNVERQAAIQNRLLPGDSGKLNYAYHLDSGLYAEFLRSHALKHGVRHINGKIEHVDMSVSDGSIQALILNDGSKIDGDLFIDCSGFRAILIGEALNISYEPYGHFLPCDSAIAIQTESASELPPYTESIAHEFGWQWRIPLQHRFGNGLVYCSRHVSDGLAEERLLQSLQTDPVSEPRRFQYQTGRRIQAWHKNCVAIGLSSGFLEPLESTSIHLAMSAILRLLKFFPRESIVEEAVLSFNRQTQDEMEMIRDFIILHYKATERNDSDFWRYCARMEIPETLEHRIKLFNSNGGLLIANKELFQVDSWAQVMLGQRILPKDHHPIVDLMGDDELDRFLKSYKNFVSDRVGAFPLHKKAIENYCRSCVTEESS

SEQ ID NO: 88845 - protein, 506 aa, Shewanella sp.
  misc_feature (1)..(506): tr|A0A2N7CX26|A0A2N7CX26_9GAMM Tryptophan halogenase OS =Shewanella sp. 10N.286.51.B7 OX=1880836 GN=BCU84_03880 PE=4 SV=1
MQKQASEKANASNKPIRKVVIAGGGTAGWMAAAALTKLLGKNLEVVLVESDQIGTVGVGEATIPTLHIFHRLLGIKEQDVMAATNATFKLGISFENWHDVGKDYIHSFGFLGKDCWACGFQHFWLKGQQRGIVSEIGDYCTEHLAAREGRFAVLPNQDYNHAYHMDATLYAKFLRAIAEQHGITRIEGKINDVLQYEDSGNIKALQLDSGEIVEGDLFLDCTGFRAMLIEGTLNTGFDDWSHWLPCDSAIAVQTKTTEKPIPYTRSIARDSGWQWRIPLQSRTGNGIVFCSKYMSDEDAKTTLMNNIEGEPLTDPRVIKFRTGSRRKTWHKNCIAIGLSSGFLEPLESTSIHLIQRGIVRLLQMFPSQGIVEEDINEFNEQTRTETENIRDFIVLHYKVTDRTDTRFWRYCKNMSVPSSLQHRIDMFDASGKVYKHGNELFGESSWIQVMMGQGLAPKQYHPIVDMMEDEELEHFLGSIKAKAKQKVSNLPDHYDFVQHYCKSKML

SEQ ID NO: 88846 - protein, 589 aa, Fischerella thermalis
  misc_feature (1)..(589): tr|A0A2N6MUD6|A0A2N6MUD6_9CYAN Tryptophan halogenase OS =Fischerella thermalis CCMEE 5201 OX=2019672 GN=CEN39_1 8795 PE=4 SV=1
MNTIAQQLEYDVVVMGAGYAGVCQARHLLLKIPNIRLAIIDPRSQDPSEVNHRPGESTLEAASMFLFSELGLHDYLLEEHTHKAGLNWHWPKDVDKTESLDDYYNIWVNRQLTIPSFHLNRLKFDLDVLEMNKQMGAHFYNGRVVDVDLTPGDEHNTVKVKLHNDYIHLKAKHLIDAAGRKFIIGRKTDNLLLNPKELPVNIKPSSGWVLVRNVDRTIFDNSVYSTESLESRYYATNHWMGKGHWLWMIPVDSQSKELSVGLLHHPDVIPCELVNTKEKFYAFIKANHNLVYKVLQSGEHVEFNYWPRIAHTSKKMFSRDNWYVIGDAASNFDALYSTGTTMSCIAIESVTEIIRAKLANEKDAEKKREAYHHFNLALARFMNVAVSSQEKQVGNASIMSWRLYGNYMAWFNTLLPIYVGKWHLDLLFSRLALIFFKLNGSFWVDTYKQLSYLAERGTNIGFMDQLRADQLIGGYHPDKFFDNFLENAKLEPSKLNVFAGLRAYCFYIVIWFVMWQWKGFGPIGLLRPRNIFQIVRLLLTGVVMAIAELTHKLKLLGQPTNSIVAKTREEFKSYHYQSRLQNWVGSSEV

SEQ ID NO: 88847 - protein, 606 aa, Fischerella thermalis
  misc_feature (1)..(606): tr|A0A2N6MU96|A0A2N6MU96_9CYAN Tryptophan halogenase OS =Fischerella thermalis CCMEE 5201 OX=2019672 GN=CEN39_1 8760 PE=4 SV=1
MLMNNTQSQVYDVVIMGAGMAGICQARHLLLNIPNIKIALVDPRPEERADKDMKVGESTVEISTLMICKELGLYDYMIENHPPKFGLNFHWPKDPAKTENTDDYFHLWATRQPPLASVLINRPKFERDVLKMNKEMGVGFYNGRVVDVDLTSGDELNSVQVKVGDQQLELKTKHVIDAAGRKFIIGRKTDNLVFGPENLYGVNNGSAWMRVRNVDRTIFHSGYDPANATCSHYYATNHWMGHGHWVWMIPTDTESMELSIGLVHHHEVIPAQSVNTKEKFSAFLEANHNVVYQLLKSGEEVDFHYLPRLAHKSKQMYSRDNWYVIGDAAAMFDPFYSMGMTMMSFQIENVTEIIRAKFAGEADVERKRVVYNNFAVNMIARNNHLVSHHEKQLGNASIMSWRIFLENMWWFGVLIPMYIGKWHLDLPFLHKFGKQGRGAVVAETLEEAYKLFDKLLEKKQNLGFMYTHRTDELPFGYSITKDVSKYIGLSKYEPKHCNIYAEMRNTYFFVALWYLKLLWKGFGLPGLLAPKNLKRVFTLLKISAQSYVDELIFDYQTRNIPTNSAVAKQREEFKTYQPRTELQSWQNLATVDANDIKLPELAEVGS

SEQ ID NO: 88848 - protein, 507 aa, Microbulbifer sp.
  misc_feature (1)..(507): tr|A0A510IWF8|A0A510IWF8_9GAMM Tryptophan halogenase OS =Microbulbifer sp. GL-2 OX=2591606 GN=GL2_18110 PE=4 SV =1
MSNHNKKIIILGGGTAGWITANLMAAHWQDKGFDITLVESPDIGIVGVGEGSTPPLKGFMDTIGVSEAEWMPECNATYKVGITFKGWSTKPGFSEYVHPFVGQPDQFTVPAFFHNSFLRRKGVDLEGHPDHFFLATEMIRQKLSPVAPENFPFEIAYGYHFDSGLLGKYLRRVAERKGVKYKVATVTGAMLDNLGNIDYLKTTDGEVLKADLYVDSSGFRGNLIQQTLKVPFISCAESLFNDSAVVFATEQEEDYAPHTISTALKYGWAWKIPLTNRNGNGYVYSSNFVDDDKAETEFRAHLGLLDSDAEARRLKFKVGRVAQHWAKNCLAVGLSQGFIEPLEATALDMVQETVVRFIEAYNNGDYTDKFRDEFNNRINARFDAVRDYIVCHYRISSRTDTDYWIANGTNEKISPSLRSIIMSWMAGKNLTDELMNQKLDVYFPNVSWNCLLTGKGIYPIQEQLRPGNELAHKYKIEEIRGFNRRCALNFKPHSQQLNLLSLGVIGD

SEQ ID NO: 88849 - protein, 517 aa, Catenovulum sp.
  misc_feature (1)..(517): tr|A0A2S0VNR4|A0A2S0VNR4_9ALTE Tryptophan halogenase OS =Catenovulum sp. CCB-QB4 OX=2172099 GN=C2869_05055 PE=4 SV=1
MTTPVRNIVILGGGTAGWLTAGTIAAKLKKEFEQGYSITLVESPNVPPIGVGEGTWPTMRRTLKNMGVRETDFIRECQVSFKQGAKFAQWVTGKPDDFYYHPLVLPQDFEQTNLVPHWQSIAQAPSFAQAVSPQETVCEMGLAPKKITTPEYQADINYAYHLDAGRFSTFLKNHCTSQLGVRHVLADVTQVVSATNGDIQSLKTQQGKEVSGDLFVDCSGFQSLLLGQHYQVPFVSCADVLFVDNAIAVQVPYQAPDTPIASHTISTGQSAGWIWDIGLTQRRGVGHVYSSRHISQDQAHHELLSYIKPFCQDPTQLNFKQIPITSGHRKVFWQNNCVAVGLSAGFLEPLEASALLLVEISANFIAERLPTGRQAMDWVAKRFNQTADYRWQCIVDFLKLHYMLSQRQDTAFWRDNRDEATIPERLLERLALWKYQTPWQDDFDQTTEVFPAASYQYVLYGMGFETLASPFGLSAASKKIAMTSFNKNIALTQSLLSSLPSNRELINQIKQYGLQPL

SEQ ID NO: 88850 - protein, 519 aa, Microbulbifer sp.
  misc_feature (1)..(519): tr|A0A510IWV9|A0A510IWV9_9GAMM Tryptophan halogenase OS =Microbulbifer sp. GL-2 OX=2591606 GN=GL2_26890 PE=4 SV =1
MGRVTKRVVVLGGGTAGWLTAGVIAAEHCAADKSGLDVVLVESPDIPIIGVGEGTWPTMRNTLRKIGLSETQLFRECDASFKQGAKFCGWVNGGEDDFYYHPLSVPEGYGEIDFAAMWCQENTAETFSDRINYQSHLCERGLAPKLITTPEYTAIANYAYHIDAVKLGKILASHCVEVLGVGHHRVKIIGVRSHENGDISSLLKEGGGEICGDLFIDCSGMSSRLLGQHYNIPVIPCGDQLFNDRAIATQVPYIYESEPITSHTISTAQTAGWIWDIGLSSRKGIGHVYSSAHISDSSALGELHTYLARNLNECEINRLNFRKLKFSPGYRAKFWHRNCVAVGMAAGFVEPLEASALVLVEQAAEMISADFPAHRAIMDIIAERFNSRFKYRWSSIIDFLKLHYAITHREDTQYWRDHACVDTASTRLSEWLKLWAVQPPCKYDFPHIDEVFASASWQYILYGMGFETEHRSIKSRSYDSIAYQNYVSSNKEFVEQCISSLPSNRELIDKIKYYGFQQV

SEQ ID NO: 88851 - protein, 535 aa, Acidobacteriia bacterium
  misc_feature (1)..(535): tr|A0A321LZQ9|A0A321LZQ9_9BACT Tryptophan halogenase OS =Acidobacteriia bacterium AA117 OX=2169412 GN=DMG65_047 05 PE=4 SV=1
MAKNFKVVIVGGGTAGWMTAAYLSKALEQGVEICLVESSNINTIGVGEATFSTIHLFFDFLGLTEDDWMHECNGSYKVAIKFVNWNAEHRDFYHPFQRFDTVQGRSLAEWWLKCSDGRVPFDRACFVVPSICEAKRSPRYLNGQVFDNKADSYLTSPDPNRALLLDDLQIQYPYAYHFNASLLAKFMSRYAQNRGVDRIDDEVQEVHLSENGHIHSIDTKEHGRIEADLFIDCTGFRGLLINKALKEEFISFSDSLLCDSAVAMQVPRDGEAHGIQPYTTATTLSAGWVWNIPLYDRTGAGYVYSSAFLSSDEAEKEFRNHLGKDSDECKALHIKMRIGRQRNSWVKNCVAIGLSSGFVEPLESTGIFFIQHGIEQLVNHFPSKEFDEDNIKSYNQAVAGCIDGVREFLTIHYVASTREDTAFWRASKREIKIPRELAERLNLWKHCLPTDRTINQNYHGFESYSYSVMLLGLGHRPEYSLPLLNHMHDSKALAAFDMIGEQSLHLTSTLPSLYEYLSARYKLLRPRAESVLLAV

SEQ ID NO: 88852 - protein, 499 aa, Alishewanella jeotgali
  misc_feature (1)..(499): tr|H3ZDZ6|H3ZDZ6_9ALTE Tryptophan halogenase OS=Alishew anella jeotgali KCTC 22429 OX=1129374 GN=AJE_07890 PE=4 SV=1
MNNTHLNAVRRVLIVGGGTAGWMTAAMLARILGEQIELRLVESDAIGTVGVGEATIPAIQHFNAALGINEAEFLRETKGSIKLGIQFENWGGLGESYMHAFGPVGRQLGMASFHHFWLAARAKGEQSSFWDYSLNYQAAKAGKFSPQSQLPGSPLPGLQYAYHFDAGLYAAFLRRYSEQRGVTRVEGLIAHVEQQPSGDIATVVLTDGRVLAADLFIDCSGLRALLIEQTLAAGYDNWQHWLPCDSALAVPSEARYPIVPYTRSIAHGGGWQWRIPLQHRTGNGLVYSSRFLADEQAKQILLGNLDAPALAEPRKISFVTGRRKQQWRRNCVAIGLSSGFLEPLESTSIHLIQSAVVRLVQCFPATRDMAALSAEFNRQSQHEFEAIRDFIILHYHLNQRTDHPLWQYCREMTLPAGLAQRLELFQQSGQVFRQQDELFTEVAWQQVMLGQNLLPVSYHPLANSLSYEQLQGFFTDLRQVITKTVTAMPTHQNLLQQLG

SEQ ID NO: 88853 - protein, 518 aa, Pseudoalteromonas sp.
  misc_feature (1)..(518): tr|A0A1Z9XQ00|A0A1Z9XQ00_9GAMM Tryptophan halogenase OS =Pseudoalteromonas sp. TMED43 OX=1986613 GN=CBC03_02640 PE=4 SV=1
MNQQNKKIKTVVVVGGGIAGWLTAGRLAAHHKSNPPDGLNVVLVESPNVPIIGVGEGTWPTMRSTLIALGISETDFIRECEASFKQGAKFAKWVDGSNDDFYYHPLVLPQGFSKTDMAGHWLNNTAESTSFSNAVCYQEAICEQGLAPKTIRTPEYAALANYAYHLDSAKFAVFLQKHCTQELGVKHFLADVTQVNSAKNGDIASVTTKQQGEISGDLFVDCTGFSSLLLGEHYKVPFMPCDDVLFIDTALAVQVPYENEDESIASHTISTAQEAGWIWDIGLQHRRGIGYVYSSKYSSEAQAREKLKEYVGDKIESLTIRKIPIKSGHRSHFWQNNCVAVGLSAGFLEPLEASALVLVEMSAQMISEQLPHTRDIMDITAKRFNETFSYRWEKIIDFLKLHYILSTRDDNAFWRDNRDPKTIPQSLQDLMKLWQYRAPADHDFTSNNEVFPAASYQYVLYGMGFKSDYSTTSYMLKDTDFAKSQFDKNKSMINQAVTNLPSNRELLNKIKSHGFSTI

SEQ ID NO: 88854 - protein, 504 aa, Altererythrobacter aquimixticola
  misc_feature (1)..(504): tr|A0A4V4U8X8|A0A4V4U8X8_9SPHN Tryptophan 7-halogenase OS=Altererythrobacter aquimixticola OX=2489173 GN=E5222 _04560 PE=4 SV=1
MTDTAVNDFVIAGGGTAGWMTAAALSRFAPPGTSVTLVESEAIGTVGVGEATIPQIHLFNSALGLDEAEFLRETRGSFKLGIEFDGWRREGESYMHAFGDVGRPLGLLPFQHYWLRAQHAGFAKPLQRYSLNELAARTMRMYRGKTAAGREMPYAYHFDAGLYAAYLRRFAEARGVTRVEGRIAKVARHGESGDIAALELEGGERVEGSFFIDCTGFRALLIEGALGAGFDDWSNFLPCDRAMAVPCEGGGDFTPYTRAIARKAGWQWRIPLQHRIGNGLVYCSDFLSDDEAAETLLANLDGAPQAEPRPIRFTTGKRCVHWKNNCLAIGLAAGFMEPMESTSIHMIQSAISRFLAVLPRGRGEPATVDWFNAQSSFEWECIRDFLVLHYTANEREGRPFWDHVRSMELPATLTARMEQWRAGGFIHREHEELFTEIAWFQVFAGQGVEARGYNPMADTLPEAELRALLDETEASLVEQVKPMPRHLDFLQGFVTGKTNEKVTA

SEQ ID NO: 88855 - protein, 508 aa, Brevundimonas sp.
  misc_feature (1)..(508): tr|A0A0S9NSC1|A0A0S9NSC1_9CAUL Tryptophan halogenase OS =Brevundimonas sp. Leaf280 OX=1736320 GN=ASF31_02355 PE =4 SV=1
MMIQNDAGPIRKIVILGGGTAGWMTAAALSHRLAGGAVSIELVESDEIGIVGVGEATLPHIRAFNTAMGIDEQTLIDQTQATFKLGIQFVDWGRPGDSYIHPFGAYGEPIEGIDFHHVWAARRAMGDAADISDYSYPVRAAEANRFQRPVSDPGSMLSTFSYAFQFDASLYAAFLRQVSCGRGVVRTEGRVVDHVLNGATGDVDAVVLSDGRRVSGDLFVDCSGFRGRLINQALETTFEDWSHWLPCDSAFAVPCRTTAPVGPYTRATARAAGWQWRIPLQHRTGNGHVFSSAHISDEDAVATLMSTLEGPALAEPRRLSFKTGRRHKLWSRNVVAIGLSGGFLEPLESTSIYLIQLGITTLLDLFPDRVGMAADAQEYNRIMALEFDRIRDFLVLHYVANQRDEPFWREMRTMAWPDSLSAKVEAFKSRGLLPDYDIGVFLPPSWLAVLVGQNIVPNGWDPRVDRLEPHVLFDKLAALRDDVRSTVDRTPDHMTFIRQAAQRAGGVR

SEQ ID NO: 88856 - protein, 543 aa, Kangiella koreensis
  misc_feature (1)..(543): tr|C7RB80|C7RB80_KANKD Tryptophan halogenase OS=Kangiel la koreensis (strain DSM 16069 / KCTC 12182 / SW-125) O X=523791 GN=Kkor_1103 PE=4 SV=1
MNKRRRLLIVGGGSSGWIVAAYLNSALKALKAPIDVEITLVESPDIPRISVGEATIPSIRHLLATIGINETDFMVATDATFKQSIRYVNWEKLNSFYHHPFTRVRKQPLDDLAENWLKSDRSIPFMETCSEQPIICEMGLAPVMYSPWDMGTPLSYAYHMNAQKFADYLRDISVSRGVNHVLANVTDIEMKSDKQIKAVNTDNAGRLEADLFIDCTGFRAKLIEEKLGVGFEDCSQWLLCDRAVAMHVPYDKYYPGMVRPYTTATALSNGWVWDIPMQSQRSLGYVHSSAFISKEAAERELRAYQGGSCDELPARFVDFKVGRRHKAWEGNCIAIGLSGGFIEPLESTGLYLSDLGAVALAEYFPYRDEDIEALSFRYNRILSNRFYEILDFINMHYCLTRRADTEFWRTVQKPEHITDRLKTKLEFWERKIPSMSDFDDQFFLNQNTGSLGNLGANFDSRAPVDTAGLWNHESYQCILYGMHFKSKIPSIDISTASQLNVHPYILNRLQQAKNKLPKHADWLQRTLGMRQYRYSSKPAGWVV

SEQ ID NO: 88857 - protein, 508 aa, Pseudoalteromonas sp.
  misc_feature (1)..(508): tr|A0A1Z9XI44|A0A1Z9XI44_9GAMM Tryptophan halogenase OS =Pseudoalteromonas sp. TMED43 OX=1986613 GN=CBC03_07160 PE=4 SV=1
  misc_feature (33)..(33): Xaa can be any naturally occurring amino acid
MNKAIKTIAVIGGGTAGWLSAAIIASYHQGNKXDGLKVMLVESSDIPTIGVGEGTWPTMKNTLQQIGLREVDVFKACNATFKQGGKFVNWTHGNNDFYYHPFTVPLGYGRIDLAPYLDNVENFAQQTNFQHDICEANLAPRGIAQGEYQANCNYAYHLDAGAFAELLKQHCKSKLGIEHIIGTVDQVKLDESGAIDTLTLTDQTRTINADLYIDCTGFSSLLLGQALNVPFKKMDHVLFNDSALAMQVPYDEGDESLASHTIATAQNAGWIWDIGLTHRRGVGHVYSSKFLSDEEAEQNLRNYLGDAAKGLTARKISFESGYREKFWHKNCVAVGMSAGFVEPLEATAIMLVEISSRFVAEHMPADTQVMPIVAKRFNEQMDYRWQRIIDFLKLHYMLTKRPEPYWQAHVQPQSIPQSLQEDLLLWGTRGPLIQDFHGALELFPAASYQYVLYGMGFKPDFTKQAYLYSNDAQANQIIERNSQLTQQMLQTLPPHRAYIEQWLAANPV

SEQ ID NO: 88858 - protein, 522 aa, Streptomyces sp.
  misc_feature (1)..(522): tr|A0A1A9CX06|A0A1A9CX06_9ACTN Tryptophan halogenase OS =Streptomyces sp. OspMP-M45 OX=1115570 GN=YUMDRAFT_0146 8 PE=4 SV=1
MARSVVIVGGGTAGWMTASYLKATFGDKLAVTLVESKNVPTIGVGEASFSTIRHFFSYLGLAETDWMPECHATYKLGIRYDNWRAEGHHFYHPFERPRIVEGVSLADWWLHKRPSADYDRDCSVIAALCDAKRSPRRLEGSLLELDAVEHEAEHASRSTMAEQNTQFPYAYQFDATLLAKLLTRYGTDRGVRHVLDDVVHAEVDERGDVTHVRTKESGDLAGDLFIDCTGFRGMLLNKRLEVPFLSYQDSLPNDSAVALRVPMEMSDQGMGPYTRSTAQDAGWIWTIPLSDRIGTGYVYASDYCTPDEAERTLRSFVGPGSEDLTANHIKMRIGRSENSWVNNVVAIGLSSGFVEPLESTGIFFIQNGIEQLVKHFPGGRDDHQLRRSYNRQVANVMDGVREFLVLHYIAAKRDNNAYWQDAKTRTVPDALAERIEQWKVKLPDADTVFPYYHGFEPYSYTAMILGLGGLDVRARPGLALMDDTAASKELRQVRDQAASLVERLPSHWDYLAHVARLKKARS

SEQ ID NO: 88859 - protein, 516 aa, Novosphingobium sp.
  misc_feature (1)..(516): tr|A0A4R1VYX2|A0A4R1VYX2_9SPHN Tryptophan halogenase OS =Novosphingobium sp. ST904 OX=1684385 GN=EDF59_11522 PE =4 SV=1
MAKNAIRSILIVGGGTAGWMTANLLATRLRRLPIEITLVESPDIRTVGVGEATVPAIRDYFKAIGVTEFEVMRATQGTVKLGIEFQDWARPGERFFHPFGRYGVDAFAVPFHQFWLKRRMAGDETPLSAYCLATEAASRGLVLLPPDQPANDLGVFDWAIHFDAGLFARFLSRRARDDLGVRHVEGTIAGVNRDGETGRIASVTLEGGAELAADLFVDCSGFRSLLLGQALDVPYEDWTHLLPCDRAVAVPCTHGEELAPFTRSTALSAGWQWRIPLQHRVGNGYVYSSRHISDDEATATLLSRLEGETLAEPNMLRFRTGHRQRLWEKNCVAVGLAAGFLEPLESTSITLIQSAVERLLDHFPDRDFDPSLADEFNRITRLEYARIRDFLLLHYWANRREGEAMWDECRALELPETLAARIRAFTGGGKLPRFEWDSFQSPSWLSMYAGFDIWPPRHDPLADQLTVEELGASFAKMREAIGRAAALAVPHARFIAENCAAPAAPHDHGRVPAHSA

SEQ ID NO: 88860 - protein, 510 aa, Shewanella violacea
  misc_feature (1)..(510): tr|D4ZH41|D4ZH41_SHEVD Tryptophan halogenase, putative OS=Shewanella violacea (strain JCM 10179 / CIP 106290 / LMG 19151 / DSS12) OX=637905 GN=SVI_1019 PE=4 SV=1
MNINKIAIIGGGTAGWLAANHLGKVLCKQAGVSITLIESPDIPPIGVGEGTVPDIKKTLASFGISETDFIRQCDVTFKQSIKFVNWMDKETHGKGNFYHHLFDVPSREDSEVLTAHWLAENSDAPFAQQVSAQHQVCEQGKAPKGITTPEYQGELAYAYHLNAAKFAHLLADNAQTKYGVKHHLTHVSRVNLADDGSIRSLVTSEDDDLEFDFYIDCSGFESLLISKAMNVPFIDLSDKLLVNRALVVQVPTYEGADIPPYTLATAHKAGWIWDIALPTRRGVGFVYSSNHMTDEEAETKLDYYLGGKDPKLVYKKLPMKIGYREKFWHKNCVALGLAQGFLEPLEATSILLTDFSASFLANRFPVKKSELAVLEKRFNYAMGYAWERVIDFVKLHYCLSDRHDSHFWNENRDLSTIPNSLQEKLKLWESSVPITDDFFSQFEVFYLENFLFVLYGMKFKTKPLALLPEVRESALVGLRKREEVNNYLQSKLPKHRELLDKINRYGLQSV

SEQ ID NO: 88861 - protein, 513 aa, Saccharomonospora cyanea
  misc_feature (1)..(513): tr|H5XI16|H5XI16_9PSEU Tryptophan halogenase OS=Sacchar omonospora cyanea NA-134 OX=882082 GN=SaccyDRAFT_1748 P E=4 SV=1
MIRSVVIVGGGTAGWMTASYLKAAFADRVDVTLIESARVGRIGVGEATFSTVRHFFDYLGLDEREWLPKCAGSYKLGIRFENWRKPGEHFYHPFERLRTVDGFNLAEWWLAVGDRSQPFDRQCFITTALCDAQRAPRMLDGSLFASGLDDSFGKSTMEQQRAQFPYAYHFDADGVAAFLAEYGIARGVRHVVDNVSGVGQDERGWITRVHTEEHGSVEGDLFVDCTGFRGLLINQTLGERFESFEDVLPNNRAVALRVPRDDATDMNPYTTATAMTAGWMWTIPLFRRNGNGYVYSDAFQTPEEAERELRAAVAPGRDDLEANHIRIRVGRNERSWVRNCVAIGLSSAFVEPLESTGIFFIQHGIEQLVKHFPDRDFDERLIDDYNRRVAHAVDGVKEFLVLHYRAAERADTPYWKDVKSRPLPEGLRYRLELSESHLLDEETVYPYYHGFESYSWITMNLGLGRIPPTARPAVRQLDPTNALAEFARSRTEADKMVAALPSCYEYLAALNER

SEQ ID NO: 88862 - protein, 604 aa, Legionella clemsonensis
  misc_feature (1)..(604): tr|A0A222P684|A0A222P684_9GAMM Tryptophan halogenase OS =Legionella clemsonensis OX=1867846 GN=clem_13955 PE=4 SV=1
MLRPKKHHIAIVGSGPIGLYAAILLKKRYGENIHVTVLDSRANSYERPGIIAKQAVQIINSSFQSKGIPEISVPDSRGEPANSVFIADLQRALLESAINHGVTLIQSSFAELEKNQIKTKEGETLSCDLLIDCSGESRAVARFTTQKFGEDSTFSIQTIAENPLKNHFIAYVHMDEENSKRCKILDLNSQDPLVYAKAMEDLREKHGWKEFAEPEMVVSKWTKEGEDARYCFYFEIPEKIAREDIKVQEAYLKDLLLLKTGQSIVFKREEGRLKFLPFDVDPKYVPNPVNTKNYAIPVVVCGDALMSPEYRFGTGVANGVRCAIELVDAIRVTPLELSIHAGQYNTAISQVIQSHLKEVTSSYQFKRNELANRDLLEAFSMYKKGFIKAKETGGEQLEDLEKIERGLISLADRLKKSADEKFRSAIEKKNKQQHFKSDMKEAELLYKSALEIYENYTPSHQSSSLLHAEKSKIYSNQAKVFFHTDRIEDAIEHAELALKIAVQYEVPTIIKNASLALENAYNKMLSDHKQNFPNDKWLEKIELNEKIANIATKYLEKDAKPYLEEIEKLRQKLKEAQEAIKKEVSTLKKETEMNDSPLDLGNLL

SEQ ID NO: 88863 - protein, 507 aa, Sphingomonas sp.
  misc_feature (1)..(507): tr|A0A2U0VGX2|A0A2U0VGX2_9SPHN Tryptophan halogenase OS =Sphingomonas sp. CF311 OX=2135485 GN=C7501_0411 PE=4 S V=1
MGKRRILIVGGGTAGWLTAAYLARFLDLADQAQIEITLLEAPELGIIGVGEGTFPTIRSTLKFLGIDETRFIRATSATFKQGIRFNDWLHAPQADGTRHHYLHPFEAPFYTEGTSLVPYWLLQDAGTRPAFAEAVTIQNRVAESRRAPKKQGEGEFSGPLNYAYHFDAARLAKVLEARAIELGVRHVTGLLTGVELGEDGAIARVHTRELGALEADLYVDCSGFRAELIGKALGAEFRSARHVLFTDRALACKIPYADPDAPIESFTIAAAHAAGWTWDIGLERARGIGTVYSSAHMSDDEAATVLRGYIGHDDYKARIIPFEPGYREAQWVKNCVAVGLSGGFLEPLESTGVVLIEAAVGMLAELFPHNGPVDAPATRFNELIVGRYERIINFLKLHYCLSRREEPFWRDNADPASIPEALQELLRQWRHRPPNRFDFLLDLESFAFFNYQYILYGMDYRTDLSGGRGDFPNVAAAEKLFARIRGFSERATEDLPTHRALIAAINR

SEQ ID NO: 88864 - protein, 589 aa, Microcystis aeruginosa
  misc_feature (1)..(589): tr|A0A552G2E0|A0A552G2E0_MICAE Tryptophan halogenase OS =Microcystis aeruginosa Ma_QC_Ca_00000000_S207 OX=24862 51 GN=EWV91_02360 PE=4 SV=1
MNTTQALHYDVVIMGAGFAGLCQARHLKLKIPNIKVALVDPRPEQRTDKDLKIGESTIEIAALFLAKELGLHDYLIENHAPKQGLNFHWPKNPAKTETIDDYYHAGSNRQVPIPSFQINRAKFEQDLLKMDKAMGITFYNGQVVDVDLTPGDAIKTVKIKVGDERIDLQAKHVIDAAGQKFIIGRKTDNLLFGPENLMGLNTGSAWVRVKNVDRTIFHSGYDPLNASTSHYYSTNHYFGEGHWLWMIPIDTQTMELSIGVIHHHDVINSTQVNSQEKFHDFLRNNHQILANIIDSGEVVDFHYCPQISDKSKTLFSPDNWYVLGDTDYIFDAFYSYGTTTIALAIEGITEIVRAKLAGEESAEQQRIAYNEFNLAYSRSVNRLYWGHAKQLGHASVMSWRIYFEYMWWFGVQVPMYVGKWHLDLTYIPIFLKTLNSNIDGLFADLNQQFTQLAEADVNIGLMDCYRGDQLFNGYHTLKHFDDFLENTKLEPRRCNVFAGLKATCFYAALWYALFQWKAFGLRGCLNPRHIYHFFRLLGLSGQATIGELIYKFKTKGLPANSEIEAMRQEFKTYQYQPTLQPWLTEASHS

SEQ ID NO: 88865 - protein, 505 aa, Sphingomonas sp.
  misc_feature (1)..(505): tr|A0A0Q4HPN2|A0A0Q4HPN2_9SPHN Tryptophan halogenase OS =Sphingomonas sp. Leaf226 OX=1735691 GN=ASE77_16025 PE= 4 SV=1
MNEHSIREVVIVGGGTAGWMAAAALSKFLGGRQGQGQPRIRLIESEEIGTVGVGEATIPTIATFNQMLGIDENDFIAKTQGTFKLGIEFVDWRRIGERYFHPFGQFGHDIEGLNFHQFFLKLAKQGQCADIWHYAPCAVAAAAGRFARQSPDPRSPFGTLPYAFHFDAGLYARYLRSYAEARGVERIEGRIVDVGLRSEDGFVESLTLDDGRRIEGELFVDCSGFRGLLIEGALKTGYEDWRHWLPCDRAVAVPTANIGDPVPFTRSTARSAGWQWRIPLQHRTGNGYVYSSAHISDEDAEATLLATVEGPPIADPRRLAFVTGRRKRFWNRNVVALGLAGGFLEPLESTSIHLIQTGIAKLLALFPDRRFLQVEASEYDRLMSSAYDGVRDFIILHYHATTRDDSPFWNHVRTMTVPDSLRRKTELFRAKGRFFRYDDELFSLASWVAVMLGQGITPEGYDPIVDGLDEQKLVEAVERMRLGIRQTIAQMPSQADYIRANCAAI

SEQ ID NO: 88866 - protein, 496 aa, Colwellia sp.
  misc_feature (1)..(496): tr|A0A3Q9GC31|A0A3Q9GC31_9GAMM Tryptophan 7-halogenase OS=Colwellia sp. Arc7-635 OX=2497879 GN=EKO29_08280 PE= 4 SV=1
MAGKIKKVVVLGGGTAGWMSASLIKKLMAKSVEVELVESDDIASVGVGEATIPPIQLFNSVLGINEADFLRETKATIKLGIKFEHWKNTEESYFHTFGAAGKSSPFCQFHHYLKRAQDAGLKNNLWDYDLNYLCATQGKFAQIKSKDPIIDIPYAFHFDAGLYAQFLRKFSEKIGVKRTEGTVESVKQCQQSGNVSALVLKDGTEITGDLFIDCSGFRGLLIQQTLNTGYEDWGHWLPCDRAVAVPSKRFDETLPYTRSIAHAGGWQWRIPLQHRNGNGLVYSSKYYTDEQAKALLLANIESEPLAEPRVIKFTTGRRRKQWHKNVIAIGLSSGFLEPLESTSIHLIQSAVVRLIHMFPQNGISEAQVDEYNRQSKVEYEQIRDFIILHYHVNQRDDSLFWRDLRAMDIPETLARKIKLFKESGKIFREQNDLFNEGSWLQVMLGQGIKPEDYHPLANDIELEQLNLMLEKIKNIKHEPLSKLPSHDDYLKNFCRL

SEQ ID NO: 88867 - protein, 484 aa, Sphingomonas sp.
  misc_feature (1)..(484): tr|A0A1Y2QKL3|A0A1Y2QKL3_9SPHN Tryptophan halogenase OS =Sphingomonas sp. IBVSS2 OX=1985172 GN=CAP40_07450 PE=4 SV=1
MSRPFTVIVAGRDAPLWLAAAALSRGLGASGVQVEAVELPSALASVDAHATFPALEALHNQLRIDEAMLLGATGGSLTLGRNFTDLAGARPAFLHAYGSAGTQIGGRDFFAHWVKARAHGLGVPLDDFSLTAAAARQGRLMLPDEESEIYGRCDYGYHLPAIPYAAMLRDVAARHGVRIHPAASVTVVPGEGAVAALDLGEGRRLRADLFVDAGGALPLGDNFLSWRDYFPVDRLLAAAAPPFANLPVYAECRAGPTGWTALHPGRPATFVTHGWSSAHGDDAEALTAAGAASGLPLAGAVVRAVVPGRPIQPWRGNLVTLGASFDPVHGVELLGFQIGLVQLLASFPAGSDFAAERDEYNRAATAALDRIRDFQSAHYALARYAGPFWDAARAGLVSSDLAHAVALFRARAELAPFEEENLPPDSWRALFLGHGVEPERWPPAIDRVPPEEVKAQFRRMLGFVREQVLRQPTQEAYLAGLAHG

SEQ ID NO: 88868 - protein, 511 aa, Sphingomonas sp.
  misc_feature (1)..(511): tr|A0A0Q4IFR7|A0A0Q4IFR7_9SPHN Tryptophan halogenase OS =Sphingomonas sp. Leaf226 OX=1735691 GN=ASE77_04110 PE= 4 SV=1
MTDPGPARITKIVIVGGGTAGWMTAAAMARLVESGVAVTLVESEEIGTVGVGEATIPSLLDYNRMLGIDEDDFVRATGATFKLGIEFRDWGRLGDAYFHPFGTHGRDVEGVAFHQLWLRQAGLAQPGMPEAIGDYCLSTVAARNGRFTRPSANPQSVLSTLSYAFHFDAALYARYLRDLAEVAGVVRIEGRVVAIDRHGGTGFVEAVRLADGRAIDGDLFIDCSGFRSLLLGDAMDVGFTSWQHWLPCDRAWAVPSAPRDAPAPHTRATAEAAGWRWRIPLQHRVGNGHVYASDHVDDETALRVLLDGLDGPPLADPRQLRFVAGRRDRLWERNCVAIGLAGGFLEPLESTSIHLIQSGIARLMSLFPDTGFSAVEIAEYNRQMLREYDQVRDFIILHYHATTRTDSAFWRHCQSMTLPPSLQAKLDLWAGRARIFREQGELFTPDSWIAVLLGQGIWPASVDPLTAGLPVAESALFLDHVREMVAKTAEAMPRHADFIAGHCAAPLRTAA

SEQ ID NO: 88869 - protein, 447 aa, Streptomyces sp.
  misc_feature (1)..(447): tr|A0A0H4CAI3|A0A0H4CAI3_9ACTN Tryptophan halogenase OS =Streptomyces sp. PBH53 OX=1577075 GN=QR97_34400 PE=4 S V=1
MSNNSADVVVIGGGPAGAVSAYVLAKEGHSVVLLEREENPRFHIGESLLPYMMGLFDRIGIREAVETKGYVPKFGGEFIDPTETKFFSGVFRADFGKQGEGRYDRAFQVERAKFDRMLVEEAGRAGAEIHFGAAVGELLMEGDRMVGVRYTKDGEEHEVRSTYVVDASGRSGRIANKFGLRKTLDKLRMVAVFRHYDGLDEKHNLGVEGDIQVGAHADGWVWAIPLSKDVISVGTVMPRDVFRASTPEKVFEEHLARVPRITTRLTGTRPIMDLKIETDYCYHTDTVTGPGWLMVGDAGCFGDPMFSGGVLVASATAVRAAENLSRALKNPQDADRLIAEYENFFKTGYDTYIRLIHAFYDGELVAVAADAGRTTDRDTLERYLIRLIGGDFWSEHNAVAQEMRRRTEWDTFAPFERVYGCPSYPHLDEQDRKERAESRIRRVTAGQ

SEQ ID NO: 88870 - protein, 519 aa, Sphingomonas sp.
  misc_feature (1)..(519): tr|A0A1Y2QHK4|A0A1Y2QHK4_9SPHN Tryptophan halogenase OS =Sphingomonas sp. IBVSS2 OX=1985172 GN=CAP40_13545 PE=4 SV=1
MSTDNRIRNIVVVGGGSAGWMAAAVLATYLGRGASVRLIESEEVGIVGVGEASVPHMKTFNTEMLGIKEVDFVVETQASFKLGIQFNDWGRIGDSYVHGFGKIGQGIGPLPFHQFWLKQYLAGRAAEIGAYSLQTVAAPLNKFMPSPANAPEGSPLADIAYAYHFDASLYARFLRNLSEHRGVQRTEGKIVEVIQRAGDGFVEAVVMESGERIEGELFVDCSGFRGLLIEQALDTGYVDWTHWLPCDRAMAVPCENVGPLTPYTRATARGAGWQWRIPLQHRCGNGYVYSSQHVSEDEAAATLLANLDGKALADPRPLRFTTGMRRKSWHKNVVAAGLAAGFLEPLESTSIYLAQSAIQRLIGLFPNKDFDPLLAERFNRESAFEWERVRDFIILHYHATERADTPFWDHCRTMSVPAPLEETMALFRSDGRYFRNGEDFFALPSWVQVMLGQRIVPHGYHPIVDEMPEDQLAEYIERTRATLANCAGAMPLHQTFIDEHCKAPPDLAGADAVPHRVKA

SEQ ID NO: 88871 - protein, 507 aa, Colwellia demingiae
  misc_feature (1)..(507): tr|A0A5C6QDA5|A0A5C6QDA5_9GAMM Tryptophan 7-halogenase OS=Colwellia demingiae OX=89401 GN=ESZ36_14890 PE=4 SV= 1
MTIKKIAIVGGGTAGWLAANHLGKALCKNSELSITLIESPDIAPIGVGEGTVPDIKKTLASFGISETDFIRECDVTFKQSIKFVNWLDQDKHGKDNFFHHLFDVPSREDSENLTAHWLTQNDGVPFAERVSSQFKACEQGKAPKKITTPEYQGDLAYAYHLNAAKFAGLLADNAKVKYGVKHLLTHIRDVNLADDDSIRSLVTKEGDDLAFDFYIDCSGFESLLISKAMKVPFIDVSDQLLVNTALVVQVPTDKDSAIPPYTIATAHQAGWIWDIALPNRRGVGFVYSNNHMSDEEAQVKLDYYLGGNNPELKYKKLPMKIGYREKFWHKNCVALGLAQGFLEPLEATSILLTDFAANFLAERFPSEKDELLILEKRFNHAMGHAWKRVVDFIKLHYCLSDRQDSSFWLENRDPNTMSEELKNKLAMWEKFIPISDDFFSQFEVFYLENFLFVLYGMKYKTLLNNIEVTGSEERILALKEITDNLMDNLPEHRALLEKINKFGLQQF

SEQ ID NO: 88872 - protein, 505 aa, Sphingomonas sp.
  misc_feature (1)..(505): tr|A0A0Q4I1V2|A0A0Q4I1V2_9SPHN Tryptophan halogenase OS =Sphingomonas sp. Leaf226 OX=1735691 GN=ASE77_11325 PE= 4 SV=1
MTTPPIHRVVIAGGGTAGWMAAAAIARTMGRTVAVTLVESEAIGTVGVGESTIPPIVTFNRLLGINEAEFMRETQATFKLGILFDNWKDRGDTYFHSFGTTGKDHWSAGFQHFWLHGLTRGHHQPFDDYCLELRAALQGKFAHLPDGRMNYAYQLDSGLYARFLRKMAEADGTTRVEGRIAHVELNGESGDIAALTLDSGARIEGDLFLDCTGFRALLIEQALHAGFDDWTHFLPCDSAIAVQTESVRPALPYTRAIAHDAGWQWRIPLQHRTGNGIVYCSRYLDHDAALERLLGTVEGPTLTEPNKIRFVTGARRQQWHRNCVAIGLSGGFMEPLESTSIHLIQRAILRLLRMFPSAGISPRDVAEFNEQQHTDMLQIRDFLILHYKATDRRDSAFWRQCASMPVPDSLAHKIALFRETGRVFRKNDELFAENSWVQVMLGQGIVPESYHPIATKMRDDELARLLGGLRDTTNATVDALPDHAAYVAHYCSTAPSASAGSPHLG

SEQ ID NO: 88873 - protein, 489 aa, Sphingomonas sp.
  misc_feature (1)..(489): tr|A0A0Q4HUN6|A0A0Q4HUN6_9SPHN Tryptophan halogenase OS =Sphingomonas sp. Leaf226 OX=1735691 GN=ASE77_16745 PE= 4 SV=1
MAAAALAAKLAGLPIAITLVESDEIGTVGVGEATLPHIRAFNLALGIDEAEMMRATEATYKLGIEFCDWGRRGDRYIHPFGDFGPTTNDVPFYQYWLKLRQSGDRSRIDEYSYPVIAAEQGRFRRPSGDLDAVESTFGYAYQFDAGLYARFLRGFAEKRGVSRTEGRVVRVVQDGETGFVRDVVLTNGTTISADLFIDCSGFRGLLIETALQSGYDDWSAWLPCNRAIAVPTQSNGALRPFTRATARTAGWQWRIPLQHRVGNGHVYCSSFISDDEAHDQLVAGLDAPMQAEPRRLSFTTGRRREFWKKNVVAIGLAGGFLEPLESTSINLIQDGITELLAVFPDKGFAARDIAEYNRRIGLHYERIRDFLLLHYVATQRDDSEMWRHFRNLRLPDSLSERIDAWRSRGHLIQYEFGLFLSPSWVAVFLGQNLVPDRHDPRVENMSVDALTAKASDVRAKVDAAVQRTPDHTVFIRESGGAARLAVAGT

SEQ ID NO: 88874 - protein, 335 aa, Xanthomonadales bacterium
  misc_feature (1)..(335): tr|A0A1G4A5R6|A0A1G4A5R6_9GAMM Tryptophan halogenase (F ragment) OS=Xanthomonadales bacterium RIFOXYA1_FULL_68_ 6 OX=1802655 GN=A2213_09010 PE=4 SV=1
TQGTFKLGIEFRDWARIGDRYMHGFGMVGHDPGPAAFHHYWLRLLLAGKDVGDIGSYQLQTAASRQDRFLPGAKDVPSTSPLASVAYAYHFDATLYARYLRGFAEGQGVERIEGKVVDVELRPEDGFVSAVVMADGRRVEGDLFIDCSGFRGLLIERALKTGYEDWSHWLPCDRAVAVPCERVGDPTPYTRSTARTAGWQWRIPLQHRTGNGLVYCSRFLSDDEAASTLLTNLDGEAQAEPRPLRFVTGKRKQFWNRNVVAVGLASGFMEPLESTSLLLIQTAILRLLDMFPRQGIDPGLVARYNQRTHFEYDHIRDFLILHYKAVERDEPFWRE

SEQ ID NO: 88875 - protein, 507 aa, Sphingomonas sp.
  misc_feature (1)..(507): tr|A0A1Y2Q5P0|A0A1Y2Q5P0_9SPHN Tryptophan halogenase OS =Sphingomonas sp. IBVSS2 OX=1985172 GN=CAP40_18050 PE=4 SV=1
MGKRRILIVGGGTAGWLAAAYLARFLDLADQAQIEITLLESPELGIIGVGEGTFPTIRSTLKFLGIDETRFIRATSATFKQGIRFNDWLHAPLPDGTRHHYLHPFEAPFYTEGTSLVPYWLLQDAATRPPFAEAVTIQNRVAESRRAPKRQGEGEFSGPLNYAYHFDAARLARILRERAEELGVRHVAGLLTDVQLGEDGAIARIVTREQGALEADLYVDCSGFRAELIGKALGARFKSVRDILFTDRALACKIPYAEPDAPIESFTIAAAHQAGWTWDIGLEGARGIGTVYSSTHMSDDEAAQVLRAYVGHGDYKARIIPFEPGYREAQWVKNCVAVGLSGGFLEPLESTGVVLIEAAVGMIAELFPHNGPVDAPARRFNELIVGRYERIIAFLKLHYCLSRRDEPFWRDNADPASIPEGLQELLRQWRHRPPGRFDFLLDLESFAFFNYQYILYGMDYRTDLSGGRGDFPNVEAAERLFARIRNFSERATEDLPTHRALIRAING

SEQ ID NO: 88876 - protein, 520 aa, Duganella sp.
  misc_feature (1)..(520): tr|A0A0Q7WEQ6|A0A0Q7WEQ6_9BURK Tryptophan halogenase OS =Duganella sp. Root1480D1 OX=1736471 GN=ASD58_10340 PE= 4 SV=1
MVPIPTQRILIVGGGSAGWLCAAYLAKMFGDSKEITLVEAPEIGAIGVGEGSFPSLRATLAALGIPEAEFVRESSATFKQGITFQNWLYGGDHYFHPFSMPSQRPGAPELLPYWLQGLAGDTPFAEAVTMQKRVVDAQRAPKRPGDSDYNGPMNYAYHFDAIRFAGLLARHARKLGVRHVQDHVEGVQRDLDGAIASVETREHGALTADLYIDCSGFRALLIGGALGSPFRSVSDVLLCDTALAVQVPHPALDTPIASATISTAHEAGWTWDIGLQERRGIGYVYSSRHTSDERAEQVLRAYAGPAADGLNVRKIPMRVGYREQHWIKNCVAIGLAGGFLEPLEASGIGLVESAVHMLGALFPHNGEMAPVARHFNQFMSERYARIVDFIKLHYCLSKRREQFWIDNCDPATWTDSLRDKLAMWRCRPPQRMDFLTDFEMYPPTSWQYVLYGMGFPKTMPPLAGLQGLADVARQEFANIAAVSARAVADLPDHRAFVTQLCQHENAFRNDFHAIRATLSH

SEQ ID NO: 88877 - protein, 502 aa, Colwellia sp.
  misc_feature (1)..(502): tr|A0A5C6QU29|A0A5C6QU29_9GAMM Tryptophan 7-halogenase OS=Colwellia sp. C1TZA3 OX=2508879 GN=ESZ39_09000 PE=4 SV=1
MPKSKIKNVVIVGGGTAGWMTASLLAKVLGKTLNITLVESDDIGIVGVGEATIPPIVNFNRAIGIDEKEFINVTKGTIKLGIEFNHWHKDGERYMHAFGSIGKKFPFCDFHHFWQKHQQLQNGSDHIDGSSFWDYSLNYQAAKQGKFVPISHIPKTNLPGLAYAYHFDAGLYAKFLRKHAESLGVKRIEGTITDIAQDHQSGDIKNLTLEDGTTITGDLFIDCTGLAAILIEKTLSTGYDDYSHWLPCNRAIAVPCEKTDTIEPYTRSTAHKVGWQWRIPLQHRTGNGLVYSSKHMSDEEAKTLLLKNIDGKPLADPKIISFQTGRRRKQWNKNVIAIGLSSGFFEPLEATNIHLIQTAATRLVKFFPHHGINLEEVNEFNRQSKTESEGIRDFIILHYKLNNRGDSEFWRACQRMDVPKSLINKIQLFKKTGKVFCHPNDLFTEIAWQQVMIGQGNVPEDHHPLVDTLSKAQLDDLMKDLKTLINRTVEKMPSHNEFLHSL

SEQ ID NO: 88878 - protein, 431 aa, Thioalkalivibrio paradoxus
  misc_feature (1)..(431): tr|W0DGU7|W0DGU7_9GAMM Tryptophan halogenase OS=Thioalk alivibrio paradoxus ARh 1 OX=713585 GN=THITH_04260 PE=4 SV=1
MPVRADVVVIGGGPSGSTAATMLASKGYEVALLDRQTHPRATVGESLLPQAWRFFDLLGVTDTITDAGFVVKSGGTVIWNDEINQIAFRDFGYTRPGLHVERDRFDWLLLDHARRQNVQVFEQVAVRNVDLDAPTGPRVRYSGADTGTGEIRCRFVVDASGQAAVLSRQMGTRVIDEDFRFVAMWGYFDDSRYVAGDGCAYPFERLREIPPTTLVTSLGDWGWSWHIPQRDTTSVGLILPLEQFKAAKVAGDRLEQYFLDTCTRTPYLGRLLEQARYRQGSLGVIRDYSYVPTRLTGPGYFIVGDAAAFVDPIFSLGVVLGMYSGHAAAWAIDRSLRQPENTEHNQGIYAQQFRGRYEVARAMALPGRDAGDTSLQRARRFMGFQPSREQELTYTAALLTTRARNFQAVADLDDAAVARWNKSRKLDAIRF

SEQ ID NO: 88879 - protein, 496 aa, Rheinheimera sp.
  misc_feature (1)..(496): tr|A0A2D5RPU3|A0A2D5RPU3_9GAMM Tryptophan halogenase OS =Rheinheimera sp. OX=1869214 GN=CML20_00080 PE=4 SV=1
MNNAVKKVVVLGGGTAGWMTAALLKKVLAGAIDIELVESEDIGTVGVGEATIPPIRLFNNVMGINEAEFLRETIATIKLAIKFDNWRVPGEGYFHTFGAPGKSLAFCHFHHLWLRARQQGDKTDLWQYDLNYLCAMAGKFAPINAKDSILELPYAYHFDAGLYARFLRKLSEQMGVVRHEGKVQQVFQHTNGDIKCLVLEDGRELSGDLFIDCSGFRGLLIQDKLNAGYDDWSHFLPCDRAVAVPSERFEKTVPYTRAIAHSAGWQCRIPLQHRNGNGLVYSSAHYTDEQASDLLMANLDRKALAEPKFLRFKTGRRRQQWQRNVVAVGLSSGFLEPLESTSIHLIQSAVVRLIQLFPHNGICQSAIDEYNRQSELEYTQIRDFLILHYHVNERSDSQFWRDMQQLAIPDSLRQKMAIFADNGQLFRDQNDLFLESSWLQVMLGQGIEPKDYHPIANNFSAEKLREMLVSIQAIKQEPLGKLPDHDTYIETMISRS

SEQ ID NO: 88880 - protein, 505 aa, Aliiglaciecola sp.
  misc_feature (1)..(505): tr|A0A553L556|A0A553L556_9ALTE Tryptophan 7-halogenase OS=Aliiglaciecola sp. M165 OX=2593649 GN=FM019_07935 PE =4 SV=1
MADEQVRDVLIVGGGTAGWMAAAALSKSFYKKGRRIRLVESDEIGTVGVGEATIPAIRTFNEVLGIDENEFIRETKGTFKLGIEFVNWGNLGERYIHPFGVYGSPMADNIPFHHYWLKLRDAGYDTDLSDFSLSIAAAKRERFSRPKNIPNSPLAQMAYAFQFDAGLYAKYLRKFAEKRDVQRIEGKVSSVSLRQDDGFVESITLENGEVLTADLFIDCTGFRGLLIEGALKTGYEDWTHWLPCDRAVAAPCESNGPPIPYTRSTARKAGWQWRIPLQHRIGNGHVYSSQYMSDDEATSILLDNLEGKLLAEPKLLRFTTGRRNKFWNKNCIAIGLSGGFMEPLESTSIHLIQTGVTKLMSLFPDKRFSQSLIDRYNELTVFEYERVRDFLILHYKVNQRTDSTFWEYCRNMPIPDYLSNKLELYKTGGHIFRDNEELFGIPSWLAVMEGQNFRAQGHHPLSDAREASRLNEHLSKMKQVIAHCAESLPTHAEFIAQHCAHTDQD

SEQ ID NO: 88881 - protein, 506 aa, Rheinheimera sp.
  misc_feature (1)..(506): tr|A0A5C7TFW1|A0A5C7TFW1_9GAMM Tryptophan 7-halogenase OS=Rheinheimera sp. OX=1869214 GN=E6Q75_13570 PE=4 SV=1
MMKKQRVVIAGGGTAGWMTAAALGKLMGKQLDVTLVESDEIGTVGVGEATIPTLHLYHRLLNINEADMMAATNATFKLGIMFENWRDVGKNYLHSFGFLGKDCWACGFQHFWLKGREMGLASEIGDYCAEHLAAREGRFAALAGQDQNHAYHFDASLYAKFLRGIAETHGVKRIEGKIAEVQQHVYEQQHVNGLQHPQNGFIKALLLESGQLLEGDLFIDCTGFRGLLIEQTLMTGYDDWTHWLPCDSAVAVQTVSTGTPVPYTRSISHPAGWQWRIPLQSRVGNGLVYCSKYLSDMDAKTLLKANVQGEMLTEPRLIKFRTGTRRKHWNKNCIAIGLSSGFLEPLESTSIHLIQRSIIRLLQMMPAGDVVQADVDEFNQQTKVEMENIRDFIILHYKVTERSDSAFWRHCAAMEIPPSLAHRIEMFGEAGKVYKFAQELFGESSWIQVMLGQGLTPKQHHPIVDLMPQSELAQFLSNIKTNVARQVQAWPPHYDFVQHYCKSRMM

SEQ ID NO: 88882 - protein, 514 aa, Caulobacter sp.
  misc_feature (1)..(514): tr|A0A2G5QXN6|A0A2G5QXN6_9CAUL Tryptophan halogenase OS =Caulobacter sp. X OX=2048901 GN=CSW60_22155 PE=4 SV=1
MMGPRAKRIIILGGGTAGWVCGSILARNARSLGLDVVVVDTAEIPTIGVGEASIPTIYDLLRHVGIDDRELVSRAGATFKYGIEFEGWSVPGDRYMHGFGSMGAPLGELEFFNAWAAAANYFTSRDLGPFVPAVAAARKGRFGRVRSRPADALDHQYFPLCELSYALHFDASLLARLLREKAMADGARHLSLQVAGVETDETGIVALTTSDSGRLDADLFVDCSGLYGFLSRKALGGRFDDWRAYLPCDRAIAVQSRRHTEPRPYTRSVAHRAGWRWEIQLQDRTGNGNVYCSDFMNDDQAETLLRDQVEGELIGQPRKIEFATGRLSAPWHANCIAIGLSAGFLEPLESTSIHLIYKYALRLEEALRGGELSPVVRERFNAAWRAETEEIRDFLMAHYVVNQRSEDGFWSSMRAARRPTTLEDKLESFARTGWIALPDEALFGHDSWFQVLIGQKFQVDYKGLATSPQRASSLLQFLENVGRAVDIETSSLPHSHGQYLQQLRLQTDPSPVAG

SEQ ID NO: 88883 - protein, 494 aa, Rheinheimera sp.
  misc_feature (1)..(494): tr|A0A3D5BJI8|A0A3D5BJI8_9GAMM Tryptophan halogenase OS =Rheinheimera sp. OX=1869214 GN=DF774_07785 PE=4 SV=1
MQQVVIAGGGSAGWMAAAMLAKVLGHSVKITLVESDEIGIVGVGEATIPPILFFNKALGIDEAEFIQATQGSFKLGIQFENWARQGDSYMHAFGEIGSPIGLSAFHHLWLRAKAAGHPSDFWDFSPTFQAAKAGKFAPSVQLTGTPFSQFSYAYHFDASLYAKLLRQKAEQNGVRRLEGKISQVEQAVNGDIAALVMENGERIAGDLFIDCTGFRALLIEQTLKAGYENWSHWLPCDRAMAVPSANISAPVPYTRAIAHQAGWQWRIPLQHRTGNGLVYCSAFLQDDAAKSQLLANLEGEALAEPRPIRFTTGRRKQQWSHNCVSLGLASGFLEPLESTSLHLIQSGIIRLAKLFPSGSDMALLRNEYNRQSQLEFEQIRDFIILHYHQTERSDSEFWNYCRTMTVPDSLSRKIELFRHSAVLQREQDDLFTELAWQQVLLGQRVLPQHYQPLADKLNPAQLSELLENLRLIVQGIVKPMPTHAETLARMTQRS

SEQ ID NO: 88884 - protein, 493 aa, Sphingomonas sp.
  misc_feature (1)..(493): tr|A0A1Y2Q5N7|A0A1Y2Q5N7_9SPHN Tryptophan halogenase OS =Sphingomonas sp. IBVSS2 OX=1985172 GN=CAP40_18000 PE=4 SV=1
MDQAPIRRVVIAGGGTAGWIAAAALAKLLGPLLDIALVESDEIGTIGVGESTIPTARTFHQLLGIDERAFLRDTRSTFKLGIAFEDWAREGDRYIHSFGQIGKSTWMGDFHHFWLEARAEGWGGDLGDYCFELQAARAGRFAIPEQGHINYAYHLDAGLYARFLRDFAEPLGVRRIEGRIDAVEQHPETGFVTALRLASGARIEGDLFLDCTGFRGLLIEQALRAGYEEWGHWLPTDSAIAVQTASTGPALPYTRAAAHRAGWQWRIPLQHRVGNGLVYASDFLDDDGARALLDARIEGERLIEPRIIRFKAGRRRKLWDRNVIALGLASGFVEPLESTSIHLIMIAVTRLVQLFPFGGIGEGVAARFNALGRVEIERIRDFIILHYHLNQRADGGFWDRCRTMAIPDSLAERIAAFRDGAIAWQASDDLFRVDSWVQVMLGQRLAPGSHHHMGRMIVEGELRSALGALRSGIADAVARMPAHQQFLEGYIAA

SEQ ID NO: 88885 - protein, 505 aa, Sphingomonas sp.
  misc_feature (1)..(505): tr|A0A4P7QW90|A0A4P7QW90_9SPHN Tryptophan 7-halogenase OS=Sphingomonas sp. PAMC26645 OX=2565555 GN=E5673_04055 PE=4 SV=1
MSEHTIREVVIVGGGTAGWMAAAALSKFLGGGQGQGQPCIRLIESEEIGTVGVGEATIPTIATFNQMLGIDEDDFVAKTQGTFKLGIEFVDWRRIGERYFHPFGQFGHDIEGLNFHQFFLKLAQQGQCADIWHYAPCAVAAAAGRFARQSPDPRSPFGTLPYAFHFDAGLYARYLRSYAEARGVERIEGRIVDVGLRGEDGFVEALTLEGGRRIEGELFVDCSGFRGLLIEGALKTGYEDWRHWLPCDRAVAVPTANIGDPVPFTRATARSAGWQWRIPLQHRTGNGYVYSSAHISDEDAQATLLATVEGSPIADPRRLAFVTGRRKRFWNRNVVALGLSGGFLEPLESTSIHLIQTGIAKLLALFPDRRFLQVEAGEYDRLMGSAYDGVRDFIILHYHATTRDDSPFWNHVRTMTVPDSLRRKTELFQAKGRFFRYDDELFSLASWVAVMLGQGVTPEGYDPIVDGLDERKLVEAVERMRLGIRQTIAQMPSQSDYIRAHCAAI

SEQ ID NO: 88886 - protein, 508 aa, Thalassotalea sp.
  misc_feature (1)..(508): tr|A0A1Q6CI23|A0A1Q6CI23_9GAMM Tryptophan halogenase OS =Thalassotalea sp. PP2-459 OX=1742724 GN=BI291_14320 PE =4 SV=1
MEAHKEKVNSIVIVGGGTAGWMTAAALSHHFTNKNVSITLVESSQIGTIGVGEATIPTLRRFYRRLGLSDLDVLKATAATCKLGIEFQDWHKLDGSFIHPFGLYGQGTKEVDFHHYWMRQKQTDNASPLADFSLGVQLAKENKFTLPNTKPESQLEIFDWALHFDAALFAKLMREYSENNGTTLVDGKIVDVITCEESGVIKQVVLENNTTVEGDLFIDCSGFKGLLIDKALKVGYQDWSEWLFCDRAVAVQSESTSAPSARTVSKAHQAGWQWKIPLQHRQGNGHVYASNYIDDQSALDTLLANIDGKLLHDPRSFTFTPGRREKAWHKNCVAIGLSSGFLEPLESTSIALVETAIEKLIPSLDALNYDSDTVEQFNQKTVLEYERVRDFLILHYQSTQRTDSPFWRDCQQMKLPETLQEKVDIYKQTGEIKPYPFEIFGKDSWLAIFDGFEIYPQSYNKKADNMPIEYLNKNLAYMQQRVRQSADNALSHGVFLKKYCHFEAKISS

SEQ ID NO: 88887 - protein, 525 aa, Citromicrobium sp.
  misc_feature (1)..(525): tr|A0A2D9IBE7|A0A2D9IBE7_9SPHN Tryptophan halogenase OS =Citromicrobium sp. OX=2024827 GN=CL805_07465 PE=4 SV=1
MAEPRDIVTSNRIEKVVVVGGGTAGWMAAAAISRFFADGKRTITLIESSEIGTVGVGEATIPPIRNFNGMLDIPENEFLRETRATFKLGIEFVDWGRVGDRYIHPFGNLGRDFHGISFHQLFLREVFRGAADPSSFADYSMSAVAAGLKRFGRPSADARSPVSEINYAFHFDATLYADYLRRLAERQGTVRREGKIVQVHRHGETGDVASVALEDGVVIEGDLFIDCSGFRGLLIEQELETGYEDWSHWLPMDRAIAVPTQNVASPDPFTRATAHSAGWQWRIPLQHRTGNGHVFSSRYMEEDEARSILLDNLEGKPLADPRTLRFTTGMRKKAWSHNVVSLGLSSGFIEPLESTSIHLVQNGIARLFALFPDKPISPAERDEYNRGMRDVYEDVRDFVILHYKATQRDDSAFWRDVRAMDVPESLARKMELWRLHGRVFRENAELFALPSWVAVMLGQNMRPEAYDAIADTLDEAKVRTAMEQMREGYRATAERLPTQDDFLRRAGAWFQDQPDTPSVRFGSFS

SEQ ID NO: 88888 - protein, 495 aa, Marinicella litoralis
  misc_feature (1)..(495): tr|A0A4R6Y049|A0A4R6Y049_9GAMM Tryptophan halogenase OS =Marinicella litoralis OX=644220 GN=C8D91_0334 PE=4 SV= 1
MKNQEINSIVIVGRGITAVTVASAIAKSMPQIKITLIGADDEQSAALSMLPQIHEFHRLLGIDEKALMQATQATFKLATIYQDWNKPGHSYTQPLGPHGAATEFVGFHHFATKMHQSGDNTAYSEYALSAVAAENNRFMHPQSDPNSIFSTMAYSLHIDATAYKQYLLNHVLQDKAHFKTENIVDVSLDENNGFINSVTLEKGENLKADLFIDCSGNAASLIEKVMGVGREDWSCWLPANRVLSTTIKSKGEVMPYTQVAGKTKGWFRHVPLLNTIVREFVYNSDEVSLAEAKNIITTGLSPNTFSEPSLRELHSGQRQQHWSKNCIAFGSAAADFEALEMSNLQWVQVAVQRFINLFPDQSCHPALVNEYNRLTQLELDNIRDYNLLHYLSVTKQESMMWNQWRQQPLPDSLKHKTALFSIHGQSASYELETFLEGSRASTFLGLGMWPDKYDPFLDSFDIEDLKQRFDYMRAAIRDTVIKMPSHRLYLEKYCE

SEQ ID NO: 88889 - protein, 509 aa, Sphingomonas sp.
  misc_feature (1)..(509): tr|A0A4Q7T7I4|A0A4Q7T7I4_9SPHN Tryptophan halogenase OS =Sphingomonas sp. BK036 OX=2512122 GN=EV283_0307 PE=4 S V=1
MIDGLGQHIVILGGGTAGWMTACLIAHRWRARGMRVTLVESPEIGIVGVGEGSTPQLKHFFDTLGIAEDVWMPACDATYKLGIGFEGWSDRAGYERYFHPFPTALDGHTASQFFYNTRALRTGRDVEAHPDRFLLPARLAAAHCAPQPAESFPFEVSYGYHFDAYKVGAFLAAHATGTLGVDHLQRRIASVERIPTGRIAALIDTDGLRIEGDFFVDASGFRSTVFAALDVPFVSYADALLNDRAVVMPTAHAPGAPIPSQTRATALSAGWAWHIPLTSRNGNGYVYSSRHLTEAQAEAELRAHVGTEAGEARHLKMRVGRVRDSWSHNALAVGLAQGFLEPLEATALHLVIATVEAFLDGVDAGGATDAVRSAFNTRIAARYDGVRDYIVAHYRLNQRHDDPTGYWAQARGIEALSDDLKTLMSAWFTGADMVAAIDRAGLARYYSAISWHCLFAGYGTFPEPARLIPPGADIDPVDMTRIDDFLTRCAMNFGSHASRLRLADLKDIA

SEQ ID NO: 88890 - protein, 532 aa, Sphingomonas sp.
  misc_feature (1)..(532): tr|A0A4Q7T5Q6|A0A4Q7T5Q6_9SPHN Tryptophan halogenase OS =Sphingomonas sp. BK036 OX=2512122 GN=EV283_1436 PE=4 S V=1
MVEKNGAGNAACADQPITTIVVVGGGTAGWLAACLIAARADRGAEQPLSVTLIESPDVATIGVGEGTWPTMRRTLERIGITETDFLLACEGAFKQGSRFDGWRTGAADDSYLHPFTAPVDGDPRDIVAAWAEHGGRFADTVGAQGAICHRDLAPRQRAMPDYAGTLNYAYHLDAGKLATMLMRHATERFGVRHIRDHVVGIDGKADGDIAAVRTRASGAIAGDLFLDCTGHAALLIEGHYGIGTVDRGGTLFNDRALAVQVPVAADSPIASQTNATAHGSGWIWDIGLPTRRGVGCVYSSAHLSDDAAADTLTRYLRATAPDAAPPSFRQLTFQSRHRETFWHRNCLAVGLSAGFLEPLEASAIVLIELSLDALLDNFPSHRGAMDIYAMRFNALFRYRWDRIVEFLKLHYVLSERDEPYWRDHRDAASIPPRLTELLQLWRHQPPSRADFPMVDEIFPAASYQYVLYGMEFPAPTRGPILTPDRSRAQSLLAQVEQRRRMLAAGLPTNRAYLDALRHANAPAPAPVMEPIA

SEQ ID NO: 88891 - protein, 497 aa, Sphingomonas sp.
  misc_feature (1)..(497): tr|A0A4Q7TCL7|A0A4Q7TCL7_9SPHN Tryptophan halogenase OS =Sphingomonas sp. BK036 OX=2512122 GN=EV283_1005 PE=4 S V=1
MTEQRVKKVVIAGGGTAGWLAAAALSRQLGQLLDITLVESEEIGTIGVGEATIPTMRSFHAILGLDEREFMRATQATFKLGISFENWARDGDRYIHSFGDLGKSTWMGDFHHFWLAAKAAGDPSEIGDYCLELQAAKAERFALPSEGEIHYAYHLDAGLYARFLRARSEANGLKRIEGRIASVDRDGETGFIRALVLDSGERVEGDLFIDCTGFRGLLIEGTYAAGYEDWSHWLPTNSALAVQSAATGPAHPYTRAIAHDAGWRWRIPLQHRVGNGLVYASEHLSDDEAHARLLGAIDGAPLTEPRLIRFRTGRRRQVWMGNCVALSLASGFVEPLESTSIHLVMTGVTRLMQAFPFGGIAPAAVTRFNEQAQAELERVRDFIILHYHLNERPEPFWAARRDMPIPDTLVERIALFAEAAQAYQGGEDLFRVASWVQVMLGQRLMPRDHHRLGTIMGGPQLTGVLAKMRSDITDVVAAMPTHQQFLDRHLLRPPRAA

SEQ ID NO: 88892 - protein, 498 aa, Marinicella litoralis
  misc_feature (1)..(498): tr|A0A4R6XJH1|A0A4R6XJH1_9GAMM Tryptophan halogenase OS =Marinicella litoralis OX=644220 GN=C8D91_2636 PE=4 SV= 1
MENQLIKKIVIVGGGSAGWMTAAALSRYLGTHCEISLVESDQIGIVGVGEATIPGIREFNQKLGIDENDFMRATHATYKLGIEFNDWTQLGDSYMHPFSYFGHDMNGVSFHDYWLKLNQLGDETPISAYSPGYVAAKQNKFIHPNQDPKSVLSRYFYAFHFDATLYGQYLRQVAEKAGVRRIEGKVVAVSLNNAGGIKDVALESGQVIEGELFIDCSGFRGVLIEQALKTGYQDYSRWLPCDSAVAVQTESVAAPTPYTQSNAQAAGWQWRIPLQNRVGNGYVFCQQYLSDDEAIDTLLKHVEGEVLTEPRVLRFNTGRRNQFWNKNCVTVGLSSGFLEPLESTSIHLIQTSIMKLINLFPDQGFNQADIDEYNRQMIEQFEQVKNFLILHYKTTQRSDTPFWAYCKNMEIPEALSYRIELFKKTGQIARCDDEIFVHENWLAVLLGQKLMPEQYHPKVDMIDTAQLKMIMQQMKGVVNQAVAGMPNHQETINRWCKS

SEQ ID NO: 88893 - protein, 442 aa, Caballeronia fortuita
  misc_feature (1)..(442): tr|A0A157ZQF7|A0A157ZQF7_9BURK Tryptophan halogenase OS =Caballeronia fortuita OX=1777138 GN=AWB77_00965 PE=4 S V=1
MSETTQTWDVVVIGGGPAGSTAATLLAKRGYRVRVLEKARHPRFHIGESLLPANLRLFDKLGVADEVRAIGMVKLAAEFVSPQHGNRTQRFMFADAWDKSMPSAYQVRRSELDDILLRNAAKQGAHVSEGCRARDVAFAADGSFATIDAEHDDGRIENVRTRFVVDASGRDTLLANRFKTKRRNERHNSSALYGHFSGARRNEGENEGNITVFWFEHGWFWFIPLADGATSVGAVVWPAYLKRRPKGTTVEAFFRETIALCGPLAERLKDAELISEVHATGNYSYTGDMTHGRNFLLLGDAFAFIDPVFSSGVMLAMQSAFAGAEAIDAALTNPANAPAALAKFDRDVRHGPREFSWFIYRMTSPTMRNLFMGPKNPLRMKEALLSLLAGDIFGNTPIWHSLRAFKGVYYVAAALDWRNSLRAYRQRRRNLSDAQRAEPSVN

SEQ ID NO: 88894 - protein, 505 aa, Marisediminitalea aggregata
  misc_feature (1)..(505): tr|A0A1M5EMB6|A0A1M5EMB6_9ALTE Tryptophan halogenase OS =Marisediminitalea aggregata OX=634436 GN=SAMN05216361_ 0450 PE=4 SV=1
MSEHRIKKIVIVGGGTAGWMAAAAMSKLLHDDSITIELIESEQIGTVGVGEATIPHILYFNRLLGINENDFVKFTNGTFKLGIEFVDWGQTGESYIHPFGPYGMDMEGIHFHHMWLRQQKMGQAKPIDEFNLQILAAQANKFQRAQVELQGSPLSTIAYAFQFDAMLYARHLRGIAEANGVVRTEGKITRVNQHPENGHIASVDTDNGHHIEGDLFIDCSGFKGLLIEQTLNSGYEDWSHYLPCDRAIAVASNKLDELTPFTRATAKSAGWQWRIPLQSRTGNGHVYCSKFMDDDTALQSLYADLNSEPISEPNYLRFKAGIRKKPWNKNVVSLGLASGFLEPLESTSIHLIQTAIARLMTNFPDKLFNQHDIDYYNERTRLEYEQVRDFLILHYKATRRNDSPFWHYCRTMDIPDSLHKRIEIYKQNARLYRHDNELFNHVSWFAVMHGQGIHPERYHPIADMLPDDELHRRMEEIHTVTGKCLQVMPGHEDFIAQHCKASSSG

SEQ ID NO: 88895 - protein, 518 aa, Marisediminitalea aggregata
  misc_feature (1)..(518): tr|A0A1M5HKJ3|A0A1M5HKJ3_9ALTE Tryptophan halogenase OS =Marisediminitalea aggregata OX=634436 GN=SAMN05216361_ 1511 PE=4 SV=1
MTSASQPVRKVVIVGGGTAGWLTAGRIAAEHATKAHHPVEVVLVESPNIPTIGVGEGTWPTMRNTLIKLGIRETDFIRECDASFKQGAKFAGWVTGDANDFYYHPLMLPQGFSQGNLGPYWQQHQDTIEQSFSNAVCFQEALCEHNRAPKSIRHAEFGAVANYAYHLDAGKFTAFLTRHCTEKLNVRHVLADVTGVIAHDNGDIRAIQTQQAGEIDGDLFVDCTGFQSLLLGKHYKVPFVPCDDVLFIDRALAVHVPYDSPDAPVATHTISTAQQAGWIWDIGLQSRRGVGHVYASRYQSEQQALDQLAQYVGPQFNDFSVKQIQIQSGHREHFWHNNCVAVGLSAGFLEPLEASALVLVELSATMLAEQLPVNRATMPIIAKRFNQTFQYRWQRIIDFLKLHYMLTKRTDTAFWRDNCDPATIPDSLQELLDLWRYHPPYDHDFTSNNEVFPAASYQYVMYGMGFESDLSFGQQQVAKAFAQQQLQMNQQARQKVLSALPTHRDLLNKINQYGLQPV

SEQ ID NO: 88896 - protein, 500 aa, Sphingomonas sp.
  misc_feature (1)..(500): tr|A0A1H7UN98|A0A1H7UN98_9SPHN Tryptophan halogenase OS =Sphingomonas sp. JS21-1 OX=1855283 GN=SAMN05216382_304 3 PE=4 SV=1
MRDAPPLSPRVVVLGGGTAGWMAACLFAARWPRARVTVVEAPEIGIVGVGEGSTPQLRALFARLGIAEDAWMPAADATYKTGIRFDGWSARAGYSSYFHPFASAIDLHTAGAFHACALARRTGRAVDAHPDRFFLNTRLAEAHRAPIAPEHFPFEVGYGYHFDAHKVGAVLRDHALAQGVVHVAARVDTVELGDGGDIAALILAGGERLTGDIFVDASGFRSVIAQGALGVRFVPFARNLFCDRAVTLPTPRKAGAPIDAHTTATALSSGWAWAIPLTSRTGNGYVYASDHLSADAAETELRRHLGLLDADVAARHLTMKVGRVEEAWHANCLAIGLAQGFIEPLEATALHLTQTTVERFIDAYEEGQGTPARRDTFNAEIARRFEGVRDYIVAHYRLNQRHDTDFWHANAANNHLSDDLKAIMTAWFTGRDVAAEVTRRDLAGFYSALSWEVLFAGYSTFPDDARLRPALAPTNTAAIDRLLDGCLLNFGDHAAALARR

SEQ ID NO: 88897 - protein, 515 aa, Marisediminitalea aggregata
  misc_feature (1)..(515): tr|A0A1M5Q727|A0A1M5Q727_9ALTE Tryptophan halogenase OS =Marisediminitalea aggregata OX=634436 GN=SAMN05216361_ 3765 PE=4 SV=1
MNTASKKTRVVIVGGGTAGWLTAGIIAARHPLLGENSNTELVLLESPDVKNLGVGEGTWPTMRDTLKQIGLSERAFLSCCDASFKQASKFAGWRQDPAQHYYHPFTAPAGYGLLSLADAWIEAGYPQDFESWVSAQGHACERQLSPKLPQLPEYAFTYNYGYHLNAGKFVALLQAHCTEKLGVTYRQGHVAHIVSHDSGAIKALQLEDGNTVEGDLFIDCSGFAAVLMGKHYQIPFVSQRGVLFNDTAIAAQVNHAEPQTPIASATVATAQTSGWIWDIALQHRRGIGHVFASEFCAVEDAEQTLRNYIANDPNLQQDDLTTRIIKFDPGHRKYFWHHNCVAIGVSAGFVEPLEATALVLIEKSAEWVAEQLPRSPSAMPVLAKRFNQLTNERWQEIIDFIKLHYVLSDRSDSAYWRAHQQHESWTDSLSEALQLWQSQPPGLYESSNRQELFSSASKQYVLFGMGFRAEQWQSCGRLALQQPLIERFRREVQQQVNRVNAQLLTNREYLQKLRK

SEQ ID NO: 88898 - protein, 390 aa, Corallococcus sp.
  misc_feature (1)..(390): tr|A0A3A8T045|A0A3A8T045_9DELT Tryptophan halogenase OS =Corallococcus sp. AB038B OX=2316718 GN=D7Y04_28600 PE= 4 SV=1
MSEDSCDVAVIGGGPAGAAMAVALRRKAPSLSVTLVERTTYDAPRLGETLPPDVRLSLSRLGVWEGFLLDGHLASRGTASCWGRAEPGFNDTMMSPWGSAWHLDRTRFDERLSVEAAGQGARVLRATTLVDSESLGRSGYRLRLSHGAADPSTLRARFVVDATGGKATFAAARGARRLVSDRCFAVYGAFQLQGGAAFPTHALVESCPEGWWYSALLPRGRVVVALVGDGDSLRGLRWATPEPWMNLLKQAPVTWARLDACDFVGEALIAVPVLVGQLDRPRGEQWLAVGDAACTYDPLSSQGITKALDSALLAADALERCLSGDADALQDYESMLNARFQDHQRTRGVYYRQEQRWPQAPFWMNRWEALPAPAASPAQSRRSHSTEVNP

SEQ ID NO: 88899 - protein, 483 aa, Paraglaciecola sp.
  misc_feature (1)..(483): tr|A0A2N1DDV0|A0A2N1DDV0_9ALTE Tryptophan halogenase OS =Paraglaciecola sp. MB-3u-78 OX=2058332 GN=CXF95_08680 PE=4 SV=1
MAANLLHHYLAQYGFTISLIESPDIPTVGVGEGSTPQLRQFFKTLGIAEQDWMPACNATYKNGISFVNWSEKPGFDEYFHAFPSAPDRQTAAGFLQNCMSRRRGFNVDAHPNRYFLSATLAQQALSPKPKGQATVAINYAYHFDSVLLGKYLAKIAINSGVNYIQARCDKCHNHANGEIKSVELHTGEQIEGQLFIDCSGFRSVLLQQHLAVKFNSYQDSLFNDSAIAMPSNSEHVIQSQTLSTALSNGWAWKIPLTNRIGNGYVYSSQFISADEAEQELRTKLGLLDHADSAKHLSMKIGRVQQHWAKNCLAVGLSQGFIEPLEATALHLVQETIESFVSAFSAGRFTQQHQQQFNQRLNARFDGIRDYIVCHYKINSRDGNEYWRANRHNSNISDSLQNILQCWDQGGDITTEINRQQIAGYYPAVSWHCLLAGYGRFPEMHTAQRQTTTTDDNLQLIDGFIQECANNFQPHASALKFGSN

SEQ ID NO: 88900 - protein, 521 aa, Paraglaciecola sp.
  misc_feature (1)..(521): tr|A0A2N1DCH8|A0A2N1DCH8_9ALTE Tryptophan halogenase OS =Paraglaciecola sp. MB-3u-78 OX=2058332 GN=CXF95_08380 PE=4 SV=1
MHKPLKKIVIVGGGSAGWLSAGIIAAEHAIDHATDSATGLEVTLIESPDIAPIGVGEGTWPSMRSTLKKMGISETDFLLECDASFKQGSKFSNWHTNTNEHYYHPYTLPHGFNDTNLAPFWQPFRDKISFADAVCTQSQLGEHGLAPKQISTAEYDFNANYGYHLDASKFAIFLQKHCTKNLGVKHIIDHVTQVNPSETGDIASITSKNHGEISGDLFIDCTGTSSLLLGKHYGIPFVSKKHILFNDSALAVHVPHQRPDSPIASFTCSTAQTAGWIWDIALPSRRGVGYTYSSSHITDDKAEKELRDYITPIMGASAAESINIRKISFSPGHREKFWHKNCIAVGLSAGFIEPLEATALALIELSAKMISEQLPANRQTMDIVAKRFNTKFLHRWQNIVDFLKLHYVLSQRTDSDYWREISDHKQCPDTLQEQLLLWKTQPPYHYDATHTEEMFPSASYQYILYGMGFVTDPPLEKRLDSSKKADNLFSENLKHTKHLLSTLPKNRELINKIKQYGLPKI

SEQ ID NO: 88901 - protein, 491 aa, Marisediminitalea aggregata
  misc_feature (1)..(491): tr|A0A1M5EZV3|A0A1M5EZV3_9ALTE Tryptophan halogenase OS =Marisediminitalea aggregata OX=634436 GN=SAMN05216361_ 0616 PE=4 SV=1
MNQPDQQRVVIAGGGTAGWMAAAAISRLLHGRVEVTLVESSDIGTVGVGEATIPTLLFFHKLLKIDEQAFMAATNATFKLGINFENWRSLNHAYLHAFGATGKDCWAAGFQHFWRRGLDLGLSEDFGQYCLERVAAEAEKFAHLPGNGLNYAFHIDATRYAGFLRELAGQAGVTRIDATIERVNVREQDGFIESLTLDNGQTLSGDLFIDCTGFRGLLIEKALHTGYEDWSQWLLCDSAVAMQTESVEAPLPYTRCIAREAGWQWRIPLQSRVGNGLVYCSNYLSDERATEILQQNINGNPLNSPRVIKFRPGRRLKQWNRNCVAIGLSSGFIEPLESTSIHLIQQGIVRLLRMFPHEGIEQAVVDEYNKQTVFEMERIRDFIILHYKVTERTDSPFWQHCKQMDVPDSLAQRLALFEKTGQIHRENNELFDDSWQQVMIGQGMVPKGYHPIADTMTERELADFLGHIKHNIHQTVARLPLHQQYLNSYCR

SEQ ID NO: 88902 - protein, 490 aa, Caulobacter sp.
  misc_feature (1)..(490): tr|A0A0Q7U5E7|A0A0Q7U5E7_9CAUL Tryptophan halogenase OS =Caulobacter sp. Root1455 OX=1736465 GN=ASD21_19330 PE= 4 SV=1
MAAAFFSKLFAPHQMRITLVESAEIGTIGVGEATIPPITFFNELAGVDEAEMLSATQGSFKLGIEFVGWRDPDHRYLHPFGSYGGPINGVSFHAYWLRARKLGYRPDLSEFSLSALAAKGGRFDWRVDDPRDPRTTMAHAYHFDASLYAKLLRRIAEGRGVRRLERTIRAVNLDPLDGTIASLLLDDGQALEGDFFIDCSGFRALLIEGALGVGHDDWSALLPADRAVAAPSTRYEDPVPYTRATALTAGWQWRIPLRHRTGNGYVYCSDHIGDDEAADVLLANLAREHPDNRPEAEPRFLRFKTGRRKQSRVKNCAAIGLASGFLEPLESTSIHLIQHGLIKLAASFPQARNDPAAADLYNRIMGQEMEQIRDFLVYHYHANGRVGEPFWDRLRHMPIPDSLREKIELFRTRGLTIFPDQTIFQEPNWLAIMMGQGQEPEGYDPLADLMDERALYATLEHMRAVCRRVVDQMPRHGRVLERYADKPVTA

SEQ ID NO: 88903 - protein, 507 aa, Caulobacter sp.
  misc_feature (1)..(507): tr|A0A0Q7T960|A0A0Q7T960_9CAUL Tryptophan halogenase OS =Caulobacter sp. Root1455 OX=1736465 GN=ASD21_11895 PE= 4 SV=1
MSDGTWIQNIVIVGGGSAGWMTAAALARGLDRRYRIQVVESQDIGVVGVGEATIPPIRLFNAMLGLDEAEFMRETRATYKLGIEFRDWGGLGQSYFHPFGVYGLNAEMGHFFQYWLKLNHEGGSLALADYSLCAQAAKAGRFDRQSDDPRDPMSTFGFAYHFDTILYGQYLRRFAQGLGVARIEGEVVQVDQDSETGFVTALRLKSGASVEGDLFIDCSGFKGLLIEQTLKAGYEDWSAYLPMDRAAAVPCALRGPLSPYTTSTAREAGWQWRIPLQHRVGNGYVYSSRFISDEDAVSTLMGNLETEPLADARLLRFATGRRRKMWDKNVVAIGLSSGFMEPLESTSIHLIQASINKLLQHFPDRRFSPANREAYNRRIAVDMETIRDFLILHYKSTTRDDAALWSYVRQMPIPDSLADRIELFHERGQLVIHPDEMFTPTSWLAVLLGQGVQPQGYSPLVADQDSRAIADGFRNMKALIARRVDAMPGHADYMKRHGMWAAEAMVA

SEQ ID NO: 88904 - protein, 499 aa, Caulobacter sp.
  misc_feature (1)..(499): tr|A0A0Q7UBB5|A0A0Q7UBB5_9CAUL Tryptophan halogenase OS =Caulobacter sp. Root1455 OX=1736465 GN=ASD21_19205 PE= 4 SV=1
MTDNRIGSVVVVGGGTAGWMSAALLARALGDTVRIRLVESEEIGAVGVGEATIPQIRHFNAFLGLDENTFLAATQGTIKLGIEFVDWRSPGQSYLHAFGDIGRPLGAVPFHHYWLAGRPKGDDHSLWDYSLNARAAFAGRFDRTVRKAGGAAEPLTHAFQFDAALYARFLRAHAERLGVVRTEGKILSTALREPDGFVRSVTLESGEVVEGDFFIDCSGFRGVLIEQALKTGYEDWSDLLPCDRAIAVPTANVEPPRPYTQAIARPAGWQWRIPLQHRTGNGHVFCSRFISEDEAVAQLTANLEGEMLAEPRTLKFVTGRRNKFWNKNVLALGLASGFMEPLESTSIHLIQSGLSRLLNLFPDKGFAQRDIDEYNRQAGLEYERIRDFLVLHYWANQRQEPFWKACRETAVPADLIRKVELFRAHGRLFKEPDDLFLEASWLQVLVGQGIMPDGCHPMTGQLTDDQLLGFLADLRKITADGAAALPAHGDFIRQQCAAR

SEQ ID NO: 88905 - protein, 488 aa, Streptomyces rimosus
  misc_feature (1)..(488): tr|L8EWC6|L8EWC6_STRR1 Tryptophan halogenase OS=Strepto myces rimosus subsp. rimosus (strain ATCC 10970 / DSM 4 0260 / JCM 4667 / NRRL 2234) OX=1265868 GN=SRIM_10371 P E=4 SV=1
MVIVGGGPAGSTLGALVARQGHRVLILEKEFFPRYQIGESLLPSTVHGVCRLTGVADDLAAAGFTRKRGGTFRWGATPEPWTFSFSVSEHMAGPTSYAYQVERSKFDEILLRHAGRCGAEVREGCAAADVIADEERVRGVRYTDADGAEREAYGTFVIDASGNKSRLFQRVGGQRTYSEFFRSLALFGYFEGGKRLPEPNSGNILSVAFDSGWFWYIPLSPTLTSVGAVVRREMAEKIQGDQEEALRALIAECPLISEYLADARRVTTGQYGQLRVRKDYSYHQTTFSRPGMLLVGDAACFVDPVFSSGVHLATYSGLLAARSINSVLAGLVDEAVALREFEARYRREYSVFYEFLLSFYEMHHSEQSYFWQAKKVTHHKRSEMEAFVDLVGGVSSSETALTDADAMAERLRADSAEFAGAVDQLAHSEDGSMLPLFKSSVVSQVTREGSQVQMRALLGADAEPETPLLPGGLVSSPDGMFWLPASSG

SEQ ID NO: 88906 - protein, 501 aa, Sphingomonas sp.
  misc_feature (1)..(501): tr|A0A4P7R236|A0A4P7R236_9SPHN Tryptophan 7-halogenase OS=Sphingomonas sp. PAMC26645 OX=2565555 GN=E5673_11520 PE=4 SV=1
MAEQRIRKVVIAGGGTAGWLAAAALSRQLGQLLDITLVESEEIGTIGVGEATIPTMRAFHSILGLDEREFMRATQATFKLGISFENWARDGDRYIHSFGDIGKSTWLGDFHHFWLAAKADGDSSEIGDYCLELQAAKAERFALPSEGQINYAYHLDAGLYARFLRARSEANGLKRIEGRIASVDRDGETGFIRALVLESGERVEGDLFIDCTGFRGLLIEGTYAAGYEDWSHWLPTNSALAVQTAAAGPAHPYTRAIAHDAGWRWRIPLQHRVGNGLVYASDHLSDDEAHARLLATIDGAPLTEPRLIRFRTGRRRQVWMGNCVALSLASGFVEPLESTSIHLIMTGITRLMQTFPFGGIAPALVKRYNDQAQAELERVRDFIILHYHLNERPEPFWATRRDMPIPDTLVERIALFTEGAQAYQGGDDLFRVASWVQVMLGQRLTPRDHHRLGSIMGGPQLAGVLGNIRSTIANAVAGMPTHQHFLDRYLAAPITASHGMC

SEQ ID NO: 88907 - protein, 491 aa, Marisediminitalea aggregata
  misc_feature (1)..(491): tr|A0A1M5H3B5|A0A1M5H3B5_9ALTE 2-polyprenyl-6-methoxyph enol hydroxylase OS=Marisediminitalea aggregata OX=6344 36 GN=SAMN05216361_1290 PE=4 SV=1
MNASPLNIVIVGGGTAGWMAANLLAKRWQHKAVSITLVESPDIGIIGVGEGSTPTLKRFFEDMNIAESDWMAACNATYKVSIQFDGWSPESGVGSYAHPFISQLDTFSERPFYVNCLTRRMGLDVNVTPGDFLFNGWLAKHKRSPQTPANFPFRIEYGYHFDSGLLGAFLQRHAHTLGVNHKSRNIERVQCHPNGDIASLHTREGEIIEGDLFIDCSGFRSLLLQQTLKVPFKSFKDNLFNDAAVVCATDALEDRPVETRSTALSTGWAWQIPLTNRTGNGYVYSSAFISPEDAEKELRAHLGVNDDDAQTRHLTMKVGQVSEHWSRNCLALGLSQGFIEPLEATALHLVQTSVEIFMDHYEKGGFNDQYRAAYNKVIGERFERVRDYIVAHYKLNTRNDSEYWRANRNNDVLSESLLQLLDVWFRRGDLQQEIQRQKLDSHFGATSWHCLLAGYGAFPRLAAQQPNQGDLYKDNNLAQFFSGCLLNFSAQ

SEQ ID NO: 88908 - protein, 509 aa, Paraglaciecola sp.
  misc_feature (1)..(509): tr|A0A2N1CVV3|A0A2N1CVV3_9ALTE Tryptophan halogenase OS =Paraglaciecola sp. MB-3u-78 OX=2058332 GN=CXF95_27535 PE=4 SV=1
MSSEIKRIIVLGGGTAGWITAGLLAKKHAGGVKVTLIESPDISTIGVGEGTWPTMRQTLAKLGVPEAKFLQKCHATFKQASKFVNWINPENDTYYHPFTEPQGFNKVDLSPYWREATQSECSFSQAATFQHYLCENGLAPKTIANKQYEAVANYGYHLDAGQFIELLREHCTAELKVELISDTVSHVLMAENGDIKSLVTKENGELSAELYVDCSGMRSKLLGESLKVPFLPCDDIFFSDTALATQIPYTDTHSPIPSCTISTAQDAGWIWDIGLQHRRGVGYVYSSQFSTQEQAYDTLVQYLGDKCKIDKIKKIEFTPGHREIFWKNNCVAVGLSAGFLEPLEASALMLVETSANFIAEQLPANTQQMPMVAKRFNASMLMKWRGVIDFLKLHYVLSKRDTPFWVKNREPSSVPDTLKELLELWRFRSPSEYDFTDNMEAFSAASYQYILYGAGFQTDFSSKAYLYEKSALATKQIMLNRQRLEQLKYSLPRHRELLDKVNQVGFSTI

SEQ ID NO: 88909 - protein, 503 aa, Massilia sp.
  misc_feature (1)..(503): tr|A0A0Q6SLV2|A0A0Q6SLV2_9BURK Tryptophan halogenase OS =Massilia sp. Root335 OX=1736517 GN=ASC93_20935 PE=4 SV =1
MQVPHLNTIVIVGGGTAGWMTATALATALRGRYRIRLVESDEIGIVGVGEATIPMIQRFNTVAGIDEAEFLKATNGTFKLGVEFVNWGRLGDRYMHGFGRLGQDLWMVGFEQYWHKMHALGRARDLADYSITRAAARANKFMLPRTDLGNSPLAEITYAYHFDAGLYARHLRKLSESRGVERIEGKIVRATQRAGDGHVDAVVMENGDRIEGDLFIDCSGFRGLLIEQTLQAGYEDWTHWLPCDRALAVPCESVSEITPYTRATAHQSGWQWRIPLQNRIGNGHVYCSRFISDDEAAAVLLANLDGKPLADPRPIRFTTGMRKKAWDKNVVAIGLSSGFLEPIESTSIHMIQDAIQRLLDYFPDQGFSQPDVDAFNRLSRFHYERTRDFIILHYYANQRDDAAFWRACAHMEIPATLREKIDLYRTHGRLRRVDNELFTEVGWRQVLIGQNIHPQAYHPLVDVQSEQGIQEYMDSVADVIGKCVDFMPGHAEFIAGYCKAPGM

SEQ ID NO: 88910 - protein, 504 aa, Massilia sp.
  misc_feature (1)..(504): tr|A0A0Q6TH18|A0A0Q6TH18_9BURK Tryptophan halogenase OS =Massilia sp. Root335 OX=1736517 GN=ASC93_05655 PE=4 SV =1
MTVNDRRLRGIVIVGGGSAGWMAAAALSAVVNDGCTVTLIESEEIGTVGVGEATIPPIKVFNQTLGLDEAEFLRRTQGTFKLGIEFVDWARVGRRYFHPFGPHGMQFDAVPLHQYWLRGRTAPGAPALDEYAMAWAAASRGRFDKPSRDPRHIASTFDYAYHFDAGLYAAYLREVAQGRGVRRLEGRIVGVDLRGADGFVEAVRLADGRAVAGDLFIDCSGFRGLLIEGALHTGYEDWSDFLPCDRAMAVPSAPDGDPAPYTRSTARAAGWQWKIPLQHRVGNGYVYAGKYLSDDEAAATLLANLDGPALAEPRALRFVTGRRKRFWNRNVVALGLASGFMEPLESTSLHLVQSGISRLLALFPDRDFDPFVIDEYNRIGVNEYERIRDFLILHYKLTERADTPLWRACAAMDIPDTLARKIEHFRRYGRLVSEGPELFGNASWLAVHVGQLNWPQRHDPLADLRGVDGAAMLARQREAMVRAADAMPTHADFIARYCAAPRRP

SEQ ID NO: 88911 - protein, 519 aa, Marisediminitalea aggregata
  misc_feature (1)..(519): tr|A0A1M5ELN8|A0A1M5ELN8_9ALTE Tryptophan halogenase OS =Marisediminitalea aggregata OX=634436 GN=SAMN05216361_ 0447 PE=4 SV=1
MNRNDIKRVVIVGGGTAGWMTAAALANKLQGLAIDIELIESDSIGTVGVGEATLPHIRFFNSALGIDEAAFMRETEATIKLGIEFCDWGNVGESYIHPFGDFGLPINNVDFYQHWLKHFQSGAITTPLHEYAAGVMSAKHNKFRIPEPSSSNIEQHYGYAYQFDSSLYAKFLRRYAQAKGVIRTEGKIVEVKQHNDTGEVVSLALDNQAIIEGDFFVDCSGFRGLLIEQTLHAGYDDWSEWLPCNRAVAIPCESTNPLMPYTRATAKAAGWQWRIPLQHRTGNGFVYWSEHISDDEACSQLLSALDGKPLAEPNQLYFKAGRRNVCWEKNVVAIGLSSGFLEPLESTSIHLIQEGITTLIELFPQQRVQQQDADEYNRRMALNFERVRDFLLLHYVATKRDDSDMWRYFRNLTLPDSLQTKIELWLSRGYIQRYEFGVFLPPSWIAVLLGQNLMPTGFDPRVNNTSDAEFIQTSERMRKAILNSVNNTPLHREFLTGYGAASNSKPLKSAMASTTSGGN

SEQ ID NO: 88912 - protein, 531 aa, Streptomyces sp.
  misc_feature (1)..(531): tr|A0A0X3X4W8|A0A0X3X4W8_9ACTN Tryptophan halogenase OS =Streptomyces sp. NRRL S-1521 OX=1609100 GN=ADL30_01325 PE=4 SV=1
MDQRVKEIVILGGGTAGWMSAAYLAKKLGETVRVTVLEAPSIPRIGVGEATVPNLQRVFFDQLGLSEEEWMPECNAAYKVAVKFINWCTPGKGEARAREIDGRPDHFHHPFGLLPEHEGLPLSHYWVYNRKHGVTGKPFDYACFPGVAIMDALKAPRDHAGEPVTRYAWHFDAHLVADFLRRHATEKQNVTHVQDEMVEARRDGRGFVTALRTKSGAVIEGDLFIDCSGFRGLLINQAMEEPFVDMSDHLLCDRAVAYALPNDDEANGVEPYTSAIAMESGWTWKIPMLGRFGTGYVYSDAFADQDRATTDFCRMWGLDPDEVGDRLNHVRFRVGRNRRAWVKNVVSVGLASCFLEPLESTGIYFITAALHHLAKHFPDQRFDAVLADRFNAEIEAMFDDTRDFIQAHFALSPRTDTPFWKANKDLHLPEGIKEKVAMYRAGLPINQPASTEGAYYDNFDVEFRNFWTNGSYYCVFAGLGLEPDHPLPALMHHPDAAEGAQHLFDRVAEEQRKLADTLPSNHEYLRRLHGA

SEQ ID NO: 88913 - protein, 521 aa, Marisediminitalea aggregata
  misc_feature (1)..(521): tr|A0A1M5EZY0|A0A1M5EZY0_9ALTE Tryptophan halogenase OS =Marisediminitalea aggregata OX=634436 GN=SAMN05216361_ 0617 PE=4 SV=1
MQQSNAITQVIVVGGGAAGWLTAGILAATAAQPCAVTLVESPDVGILGVGEGTWPTMRGTLQTLGIDEAAFLAQCDGAFKQGTLFKQWQHNQASDQYYHPFSLPVGYGDGDLYAWLRSLGEGPSFAHEVSTQPWLCDNHLAPKQIQTPAFAGVTNYGYHLDAYKFAALLKQHATTRLGVKHIVDHVESVDGAPGEAIRAIVGKQYGAIHGDLFVDCSGFSARLIGQHYNQPLISCGEQLVNNRAVAIQARYKSPDTPIASVTRSTAQKNGWIWDIALPERKGTGYVFCSDYCDDDTALDTLLKYLNDDPIIADVDKASARFFSFKPGYRESPWQANCVAIGTSMGFLEPLEASALVMVELAASHLARHMPFTTEQLGPAARQFNRIFSQRWSRVVDFLKLHYVLSKRDDSAYWRYMRNPDSGSEQLQDWLSMWRNRSPDPLDFNLREEIFPTASYLYVLQGMGFTPALSGGEKNAAADLSKVRQRLQQHQQNVHMQLNGLPTNRALLNHLTGAHNINKEYS

SEQ ID NO: 88914 - protein, 491 aa, Massilia sp.
  misc_feature (1)..(491): tr|A0A0Q6RQA4|A0A0Q6RQA4_9BURK Uncharacterized protein OS=Massilia sp. Root335 OX=1736517 GN=ASC93_29165 PE=4 SV=1
MTYERIVVLGGGTAGWMTAAALATGLKGTTVELVESEDIGIVGVGEATFPSIRAYHQILGIPEADFLRATNGTYKLGIKFRDWRVRGEDYYHTFGDFGQLDGPNALWGQYRRHVNAGLPAFGEQCLPTVMALNDRFCAPGKDAAHFNYAYHFDANLYARFLRDIAIGRGVRRTEGKVVDVARRQDGGVASLKLDDGRVVGADLFIDCSGFTSLLLGRTLGEPFVDFSRWLPVDRAWACPSARVGTGLTPYTRATALDAGWAWRIPLQDRTGNGHVFSTRFIDEDKAREQLLQQLDGEALAEPRLLRFTTGHRARFWSHNVVGIGLATGFLEPLESTSIYLVQVGIGRLMTLLQRGGAVPAAAIDAYNTGLVRQFERIRDFILMHYCLTARRDTPFWTAMAATELPETLAYKLHAWRQTGALHQYEEEGFDGHSWLAIHAGMHHWPERSDPTFNQLPAEKSLEWVRERARQLAEAVAPVSTHEAYLAQVLGR

SEQ ID NO: 88915 - protein, 537 aa, Burkholderia contaminans
  misc_feature (1)..(537): tr|A0A3N8RBM8|A0A3N8RBM8_9BURK Tryptophan 7-halogenase OS=Burkholderia contaminans OX=488447 GN=DF051_16425 PE =4 SV=1
MSNPIKHIVIVGGGTAGWMSASYLVRALQQQASITLIESEAIPRIGVGEATIPNLQKVFFDFLGIPEREWMPQVNGAFKSAIKFVNWRKSPDRSRDDHFYHLFGSVPNCDGVPLTHYWLRKREQGFQQPMAYACYAQPEALDAKLAPCLLDGTRQMPHAWHFDAHLVADFLKRWAIGRGVKRVVDEVVEVHLNERGDIASLSTKEGRTLEADLFIDCSGMRGLLINQALKEPFIDMSDYLLCDSAVASAVPNDDARVGIEPYTSAIAMNSGWTWKIPMLGRFGSGYVFSSKFTSRDQATADFLKLWGLSDQQPLNQIKFRVGRNGRAWVNNCVAIGLSSCFLEPLESTGIYFIYAALYQLVKHFPDTSFDPRLRDAFNAEIIYMFDDCRDFVQAHYFTASRDDTPFWLANRHDLRLSDAIKDKVERYKAGLPLTTTSFDDATYYETFDYEFKNFWLNGNYYCIFAGLGLLPDRSLPLLQHRPASVDKADAMFARIRREAERLRASLPTNYDYLRSLRDGDAGRARSRPGPVAAPETL

SEQ ID NO: 88916 - protein, 511 aa, Pseudoalteromonas tetraodonis
  misc_feature (1)..(511): tr|A0A290TH48|A0A290TH48_9GAMM FADH2 O2-dependent halog enase I OS=Pseudoalteromonas tetraodonis OX=43659 GN=pr nA PE=4 SV=1
MDIKKVAIVGGGTAGWLAANHIGKEMLNRKGISVTLIESPDIPPIGVGEGTVPDIRNTLKSFGIREDEFIRQCDATFKQSIKFINWMDKKKHGEGNFFHHLFDVPSSYDAKHLTSYWLNNKEKSQSYAQGLSSQHVICEAGLAPKNITNAQYEGELAYAYHFNAGKFAQLLACNAKEKFSVEHIHTHVTQVKLGDDGAIAALITDNNEELEFDFYIDCSGFESLLMSKALKIPFVDVSESLLINSALVVQVPTKADDAIPPYTLATAHQAGWIWDIALTNRRGVGFVYSDNHMTDEQAHEKLDRYLGDSKQDLTYRKIPMRVGYRKKFWHKNCVALGLAQGFLEPLEATSILLTDFSAKFLTLRFPSSTTQLEQLEERFNHAMGYAWERVIDFIKLHYCISDRTDSAFWIANKNQDTISTSLKEKLNLWKEFTPVRDDFFSQFEVFYLENFLFVLYGMNYNTKASNSPDKEQAHCLARLKQRAEIDHYLINKLPDHRALLNKIKQYGLQSI

SEQ ID NO: 88917 - protein, 515 aa, Sphingomonas aquatilis
  misc_feature (1)..(515): tr|A0A511Q0J1|A0A511Q0J1_9SPHN Tryptophan halogenase OS =Sphingomonas aquatilis NBRC 16722 OX=1219039 GN=SAQ01S _06060 PE=4 SV=1
MLSEPSMTDAHPNPPLKTITIVGGGTAGWMAAALLSRLTLGAYTIRLIESEEIGTIGVGEATIPAIRTFNGLAGIDEFEMVRATQATFKLGIEFRNWGAPGDSYIHGFGKIGQDLYWLHCHQFWLKERAAGRAKHLDHYALNTLAARMNRFAMPDPSNPQSPIADIDYAYHFDASLFARFLRGRAEAAGVERIEGRIVAANRRGSDGFLDHVVLADGRTVDGDLFVDCSGMRGLLIGDAMGVGYEDWSEWLLCDRALAVPSARGTGPLTPYTRATAHGAGWQWRIPLQHRTGNGHVYASRFVSDEAAATTLLEHLDTPALGDPRPVRFRPGKRHRAWEKNVVALGLAGGFLEPLESTSIHLIQTGILRLIALFPGRGFNAADTDEYNRQTDFEYRDVRDFIIAHYKVTAREDTEFWRYLKHMAVPDSLTERLELFRSSGRFFMHAKAELFREESWVQVLLGQGLPAHHDPMVDMIPAEQTTAFLKDVEDVVADVAAGLPTHEAFIARHCQAPKVG

SEQ ID NO: 88918 - protein, 527 aa, Streptomyces sp.; identical to SEQ ID NO: 88148
  misc_feature (1)..(527): tr|A0A495T213|A0A495T213_9ACTN Tryptophan halogenase OS =Streptomyces sp. 1114.5 OX=1938830 GN=BX285_6141 PE=4 SV=1

SEQ ID NO: 88919 - protein, 324 aa, Bradyrhizobium betae
  misc_feature (1)..(324): tr|A0A4Q1UJ55|A0A4Q1UJ55_9BRAD Tryptophan halogenase OS =Bradyrhizobium betae OX=244734 GN=B5V03_37950 PE=4 SV= 1
MSPLVQPVLRQLSLWPAFLAQDFAPSHRTLTSWDEEGLTSSELLLEARGPSWRVDRAAFDGWIATEACRGAERVDAKVLRLERAADGWSVACEDGTSHSARLIIDATGRARALADRQGFRAKARDRLIAAYAEATTSGPAAPELLVEAFENGWWYTLALGEGRRAFACMTDSDLARGLRLNTTDGWRAALAKTQFVSAVASRVIQFEPPRLIPAGGRTAATATGFRFLCAGDCASAFDPISGHGVVKAMRSGVFAAYAASDCLARGDAAALGRYDSWVTREAAVYTTTLGEHYDSVSRWADRPFWQRRRAGMSSSNSLSSLSEQ

SEQ ID NO: 88920 - protein, 501 aa, Inhella sp.
  misc_feature (1)..(501): tr|A0A3S2UHK8|A0A3S2UHK8_9BURK Tryptophan 7-halogenase OS=Inhella sp. CCP-18 OX=2499851 GN=EOD73_04470 PE=4 SV =1
MQPQEPLQSLVICGGGTAGWMAAAALAKTLRGKVQIRLVESEEIGTVGVGEATIPMIRRFNQVLEIDEDEFLRATHGTIKLGIEFVNWGRVGDRYMHGFGRLGPDLWAVPFDQYWQKQYQAGKAKDLGDYALSRLAAYDNKFMRPRPDLEGSPLADIHYAFHFDASLYAQYLRQKAEAWGVQRVEGKIVEVEQADGLVHALRLQSGERVAADLFVDCSGFRGLLIEEALKTGYDDWTHLLPCDRALAVPCSNAPRLLPYTRSTAHRAGWQWRIPLQHRIGNGHVYCSQYMSDDEATAILLKNLDGEPLADPRPIKFKTGMRKKAWNGNVVALGLACGFMEPLESTSIHLIQTGIQRLLDFFPNKAMSAPDVDEFNRQARWEWERIRDFIVLHYHVNQRTDSPFWQHCQTMEVPATLKARMALYEAHGRIVRDGNELFAEVGWLQVMHGQNLRARGYQPLVDVVPEPDIQAYLDNVAQVMRKCADFMPTHEAFIAEHCASAR

SEQ ID NO: 88921 - protein, 512 aa, Sphingomonas sp.
  misc_feature (1)..(512): tr|A0A0Q4QF24|A0A0Q4QF24_9SPHN Tryptophan halogenase OS =Sphingomonas sp. Leaf67 OX=1736230 GN=ASE90_17245 PE=4 SV=1
MPDRGVSVRADGPLRRIAIVGGGTAGWMAAAALSRLLGPHGPTITLIESEEIGTIGVGEATIPPIQAFNAMLGIDEDDFVRATQGTFKLGIDFHDWGRVGHRYFHPFGVYGIDAGAVPFESTWRRLRAAGQAGPLADYSICAAAAHAGRFQRPQPGNTPLAQIGYAFHFDAGLYARFLRTRAEAAGVVRIEGRIVDVARDDASGFIDAVVLADGRRIDADFFIDCSGFRALLIEGAMNAGFENWSHWLPNDRAVAVPSANAGPPCPFTRSTARAAGWQWRIPLQHRTGNGYVYSSQHVSDDEAAATLLANLDGPALADPRPLRFRTGRRDRFWVGNCVALGLSGGFLEPLESTSIHLVQAGIARLLEMLPTRACDPADTARYNRLMAAEFDQVRDFVILHFHASDRRDTGYWRDQAERPIPETLAERLAIYARTGRVYREGDELFTKTSWLAVMDGQGLGAWTHDPLADAMPLDAAAARLQRIGAVVAAAAAQMPAHDAFIARHCAAGGRRG

SEQ ID NO: 88922 - protein, 517 aa, Burkholderiales bacterium
  misc_feature (1)..(517): tr|A0A257H8C5|A0A257H8C5_9BURK Tryptophan halogenase OS =Burkholderiales bacterium PBB4 OX=2015566 GN=CFE44_001 30 PE=4 SV=1
MHEAVKHIVIVGGGSAGWLVAGVIAAEHRSASPDGLQVTLLESPDVPPIGVGEGTWPTMRDTLRRIGVSEADFFRECDASFKQGSRFNGWVNGAVEDHYFHPFVLPQGYGETDLVSGWLQRCPELPFADVVSYQPHLCVHGKAPKQKATPEYAAVANYGYHLDAGKFGQFLRKHCTAKLGVHHVLDHMTGVRSHENGDIAAVHTQAHGALEGDLFIDCTGLHSLLLGQHYQVPFLSQKQVLFNDTALALQVPYADAHAPIASQTLSTAQHSGWIWDIGLPTRRGTGYVYSSAHTSDEEAQEALQRYIAQTGGPAPTGSARKLSFEPGYRGKFWHRNCVAIGLSAGFIEPLEASALALVELSAQMLCDDMPATRAVMDIASRRFNDAFTYRWERVIDFLKLHYVLTQRTGSDYWRDNCRTESIPMRLQELLMLWKHQSPSRYDLTRIDEVFPAASYQYIMYGMGFKPQMRLTERKVDEPTIAMAYFQDAAMLTRKMLSALPDNRTLITHIQQHGMPKI

SEQ ID NO: 88923 - protein, 503 aa, Brevundimonas sp.
  misc_feature (1)..(503): tr|A0A0Q7EGB1|A0A0Q7EGB1_9CAUL Tryptophan halogenase OS =Brevundimonas sp. Root1279 OX=1736443 GN=ASC65_06570 P E=4 SV=1
MAEPIRSVLIVGGGTAGWMAAAALQRTLGPHAKVTLVESEEIGIVGVGEATVPPIRDFNVMIGLDEAEFMRETKATLKLAIALENWGALGHRYLHPFGTFGPGPTLADFQQTYFALKAQGLADDLERYSICWCAAEAGKVGVRSPDPRNPLNGLFTAYHFDATLYARYLRRVCETRGVTRVEGKVVDVVQRAGDGFVESITLEDGRSLAADLFIDCTGFRGLLIEGALKAGYEDWSHWLPCNRAMAVPCAKVGPVSPYTLSTAREAGWQWRIQLQHRTGNGYVYCSDHITDDQARETLLANLDGEPLAEPRGLKFVTGRRKKYWDRNVVTLGLSSGFIEPLESTSIHLVQAGITRLLQHFPDKDFSPVNIAAYNRRLGREVELIRDFVILHYHATQRDDTPFWRQVAAMPIPDSLAERVDAFRDRALLYQVGADEYFSQGSWLAVMYGQGVVPRGPNPLYQYQDAQRSAAGLRNIAEVIDRTVAALPDHEAFLKANNMWSGDA

SEQ ID NO: 88924 - protein, 505 aa, Xanthomonas citri
  misc_feature (1)..(505): tr|A0A2K2R8T2|A0A2K2R8T2_XANCI Tryptophan 7-halogenase OS=Xanthomonas citri OX=346 GN=xavtCFBP7764_05310 PE=4 SV=1
MTQAQIRKVVIAGGGTAGWIAACALSHQFRNLLDITLIESEQIGTVGVGESTVPPIRTFHRFLQIDEQEFLRAVAGTFKLSISFEHWRRHGERYIHPFGITGQSTLVCAFHHLWLESQRRGMPGSFGDYCLETVASRVDRFALHGEPAVNYAYHLDAALYAKFLRARSEACGVKRVEGRIQQVTVQPHSGDVASLVLEDGQTIEGDLFIDCSGFRGLLIEQTLHTGYEDWSHWLPCDRAVAVQTEALGPPVPYTRAIAHEAGWRWHIPLQHRVGNGLVFSSKHLSDDQAHAKLLRDVAAPAVKEPWMVPFRTGRRLKAWNKNVVSLGLASGFIEPLESTSIHLTISAVVRLLALFPAEGIAPSQVQLFNDVSRAEMEHVRDFVTLHYHATQRDEPLWQQCRQMELPESLALRLRAWRERAHAWQGADELFRVDSWTHVLMGQGIAPEQHHPLTRAFSDHDLRRLLDGIAQPIQHAVQQMPSQQDFIERYCKAGEQVWGMRNPVPA

SEQ ID NO: 88925 - protein, 496 aa, Sphingomonas sp.
  misc_feature (1)..(496): tr|A0A0Q4Q4I8|A0A0Q4Q4I8_9SPHN Tryptophan halogenase OS =Sphingomonas sp. Leaf67 OX=1736230 GN=ASE90_08845 PE=4 SV=1
MTDPIRTVVIIGGGTAGWMTAAAAGRYLDDGQRRITLVESDAIGTVGVGEATIPSILNFNKLLGIDEVEFLRETRGSFKLGIEFTGWHTADSRYFHPFGNFGRDIEGVNFHQLWAKLKGQDGIGPIGDYSPATVAARANAFGPPHPDPRSPLSGIAHAYHIDATLYARFLRRRAEADGVARIEGRIVAVEHHDDGHVAAVRLDDGRRVEGDLFIDCSGFRSLLLGEAMGVGFEDWSHWLPCDRAIAVPTERTEPVLPYTRATAHTAGWQWRIPLQHRTGNGVVYASRYMDDDAAEALLLSRLDAAPTATPRRLSFTAGRRDAMWAGNVVAIGLSGGFLEPLESTSIHLIQQGISKLFALFPDRGFSAVERDEYNRQMADNYRTIRDFIILHYHATARDDSPFWNHVRTMDVPDSLTRKIELFRQKGRIFRYEDELFATPSWVAVLLGQGIEPVGYDPVADALDEERLLPAIRQMRSATAAAVATLPQHGAVLTRLK

SEQ ID NO: 88926 - protein, 515 aa, Pelomonas sp.
  misc_feature (1)..(515): tr|A0A2R7S6F0|A0A2R7S6F0_9BURK Tryptophan halogenase OS =Pelomonas sp. HMWF004 OX=2056841 GN=DBR42_23380 PE=4 S V=1
MNSALIQDIVIVGGGTAGWMTAAALSAVLRGRYRLRVVESDEIGTVGVGEATIPMIQRFNRVVGIDENEFVRETNGSFKLGIEFVNWGRVGDRYMHGFGRLGQDLWTVQFEQYWHRMRKAGRAQPLEQYSISRMAALANKFMPPRSDLGNSPLAEIAYAYHFDAGLYARYLRKLSEQRGVLRTEGKITHATRRGEGAHAGHVDAVVLESGERIAGDLFVDCSGFRGLLIEQTLQAGFEDWTHWLPCDRALAVPCESVSPLTPYTRATAHRAGWQWRIPLQHRTGNGHVYCSQHISDDEAAATLLANLDGKPLADPRPIRFKTGMRKLAWKENVVAIGLSGGFLEPLESTSIHLIQTAIQQLIDFFPDRGFSANDIAEFNRHSRFHYERIRDFVILHYHLNQRDDSKFWQDCAHMSVPESLQEKLDLYRSHGRVVRRDNELFAEVGWIQVMEGQNLTPQRHHPLADLQSEQDTHDYLEGVREVIAKCVEVMPGHADYIARHCMAAGGGFQRPPSAL

SEQ ID NO: 88927 - protein, 512 aa, Cellvibrionaceae bacterium
  misc_feature (1)..(512): tr|A0A545TLT0|A0A545TLT0_9GAMM Tryptophan 7-halogenase OS=Cellvibrionaceae bacterium R142 OX=2591008 GN=FKG94_ 14000 PE=4 SV=1
MNTAKPVSSILIVGGGTAGWLTAAILAGKHPYSEGGGLQITLIEAPDIPIIGVGEGTWPGMRATLHTAGIKEVDFLKACDASFKQGSKFVGWKTGEAQDYYYHPFELPQGFFEGNLAQHWVDTQPSVSLSKLVCVQEYLCERDLSPKLRSSGNYSGVANYGYHLNAGKFSDFLKNHCTENLGVRLVYDKVTGVVSQSDGDIAGVCTEKSGELQADLFVDCTGFRSLLLGQHYGVRFIDKCAQFPINSALAVQVPYADHEPVKSTTIATAREAGWIWDIGLSSRRGVGYVYSNSHLPPEQAAAQLQAYLGIDNQAFEQLEPRRIPINPGHREKFWHHNCVAVGLAAGFLEPLEASAIMLIEASATMLADQMPTTRAAMDIVSKRFNKRFLYRWERVIDFLKLHYVLSDRQQPFWREAASRSTLSARLQEDLSLWRYQAPWKTDFDSLEEAFPAASYQYVLYGMQFETQSNPRRNSPSVSEFSRKAIDTVSRNAGLLASKVESNRALLDLIRAQ

SEQ ID NO: 88928 - protein, 485 aa, Sphingomonas sp.
  misc_feature (1)..(485): tr|A0A0Q4Q3Y7|A0A0Q4Q3Y7_9SPHN Tryptophan halogenase OS =Sphingomonas sp. Leaf67 OX=1736230 GN=ASE90_07930 PE=4 SV=1
MSPSFVILGGGTAGWITAHLLERAWPDATITVVESPEIGTIGVGEGSTPSLKRFFEIIGAAEADWMPRCGATYKAGIRFVDWSPAAPWRDYRHPFTTQIDVHTEDAFILNCRNRRLGHDVPVRPDDFLLNGVLSAKGLAPVAPPNFPFRIEYGYHFDAGLLGQYLRELAVTRGVVHRPATVTTVRRAENGDIAALVTDREETIAGDIFVDCSGFNGLLIERTLGVPFHSFKDNLFNDAAVVVPTEMTGRPPVETVATALSNGWCWSIPLRHRVGNGYVYARDCQSPDAAETELRRTLGVSDAVPARHLTFRVGQVARHWERNCVAVGLSQGFIEPLEATALHLVLGTVEQFIRHYRDGGCTDRHRAAFNTVAAERMDGVRDYIVAHYKLNTRTDTDYWRANAANEALSDPLLHILDRWFRRGDIAEELARQGQRSHFGTLSWHCLLAGYGAFPPVSEARRDDMDFYAARRVGAFLEGCSRNFAPA

SEQ ID NO: 88929 - protein, 498 aa, Sphingomonas sp.
  misc_feature (1)..(498): tr|A0A0Q4QAI0|A0A0Q4QAI0_9SPHN Tryptophan halogenase OS =Sphingomonas sp. Leaf67 OX=1736230 GN=ASE90_07925 PE=4 SV=1
MAAAIKRVVIVGGGTAGWMTAALIAKVIGPQVRITLIESDEIGIIGVGEATIPPIQHVNAVLGIDEAEFLRETRATIKLAIRFDDWGAIGQSYYHSFGAAGRNTAFCSFHHYWNRAKRAGIAADYWDYDLNYLCAREGKFAKIQVDDPLWHLPYAYHFDSALYGQYLRRYSEARGVERVEGLVEQVARDGETGHVTALTLRDGRVVNGDLFIDCSGGRGLLIQRQLNVGYEDWGHWLPCDRAMAVPTARHDDTPPYTRSTARSAGWQWRIPLQHRVGNGLVYSSRHLTDDQAADLLLGNLDGDVLADPRIIPFRTGRARRQWHHNVVAIGLSSGFLEPLESTSIYLIQSAIVRLLHLFPHAGFDDRQIAEYNRQSRTEFETVRDFIILHYHATQRDDSDFWRHVRTMPLPDRLADKIALFRATGTLTQDPLDIFMEASWVQVLMGQGIEPADYHPLADGPTDAELAEQLRQLAAMKREPVPNMPAHDRWLRGFGGTAG

SEQ ID NO: 88930 - protein, 504 aa, Sphingomonas sp.
  misc_feature (1)..(504): tr|A0A0Q4PU03|A0A0Q4PU03_9SPHN Tryptophan halogenase OS =Sphingomonas sp. Leaf67 OX=1736230 GN=ASE90_15340 PE=4 SV=1
MAIDQVPVRSVAIVGGGSAGWMTAAALARFLPADTRVTLIESDAIGTVGVGEATIPQLRLFNQHLGIDEDDFVARTGGSFKLGIEFAGWNGTDSRYLHAFGTIGRSLGLVPFHHYWLAAGGGDAPESLWSHSACAAAASANRFDRDPGNPQAPSGIAWAYHFDAARYAAYLRERAEAGGVERAEGRVVAVGLNDVGIDTVTLDDGRTIAADFFVDCSGFAALLIGRLAGDRWDDWSALLPCDRALAVPCAATQPVTPYTRATARSAGWQWRIPLQARTGNGLVYSSAHLSDDEAAATLLGNLDGAALADPRPLRFTTGRRHAPWIGNCVALGLAAGFLEPLESTSIHLVQSGIARLLSLWPASRPRPADIAAFNRQSEREWLGVRDFLIAHYALNGRDEPFWQERRATPLPDSLAERIALFRESGRIVRDEHELFAEVAWVQLLVGQGVRAGGYHPLADALPAERRSQFLDMSSKHVAATVARMPTHDQFLRAHCPAPDVKVAA

SEQ ID NO: 88931 - protein, 595 aa, Hapalosiphon sp.
  misc_feature (1)..(595): tr|A0A0M0SFF4|A0A0M0SFF4_9CYAN Tryptophan halogenase OS =Hapalosiphon sp. MRB220 OX=1704290 GN=AMR41_28330 PE=4 SV=1
MNTIEQQLEYDVVIMGAGYAGVCQARHLLLKVPNIRLAIVDPRSQDPSEVNHRPGESTLEAASMFLFSELGLHDYLLEHHTHKAGLNWHWPKDVDKTESLDDYYNIWVNRQLTIPSFHLNRLRFDQDLLEMNKQMGAHFYNGRVVDLELTPGDELNTVKVKLHDDYIQLKAKHLIDAAGRKFIIGRKTDNLLLHPKELPVNIKPSSGWVLVKNVDRTIFDNSVYSTESLESRYYATNHWMGKGHWLWMIPLNTETKELSVGMIHHPDVIPSELVNTKEKFYAFLKANHNLVYKLLQSGEHIEFNYWPKIAHTSKKMFSADNWYVIGDAASNFDALYSTGTTMSCIAIESVTEIIRAKLVNEKDAEARRDAYNNFNLAVARFMNLAVSNQGQQVGNASIMSWRLYGNYMVWFNTLLPIYVGKWHLDLLFSRLALIFFKINTSFWLDTLQQLNYLAERGTNIGFMDQLRADQLIGGYHPDKFFDNFLENAKLEPGKLNVFAGLRAYCFYIVIWFTMLQWKGFGPIGLLRPRNIFHIVRLLLTGLVMLIAELMHKLKLSNQPSNSLVAKTREEFKSYRYQSRLRDWVGTNEISTARNN

SEQ ID NO: 88932 - protein, 421 aa, Caballeronia arationis
  misc_feature (1)..(421): tr|A0A158E3F6|A0A158E3F6_9BURK Tryptophan halogenase OS =Caballeronia arationis OX=1777142 GN=AWB81_06037 PE=4 SV=1
MRTTFDALIIGAGPAGSTAAILLALAGWSVALVEKQRFPRRKVCGECIAPSALPLFAALGIEQDLTLRAGPHLRRLALMRGSDRVVSDFPVAPDSDYYWGRAVGRETLDTLLADQAHKVGVQLLQPCAVLGLLGGPGAWRCDIRDLNTSATQTLRARVAIAAHGSWEALPSVPPQPRRPRRPSDLLAFKANFTGASLEEGLLPVLLFDGGYGGMVVAEGGVTTMAGCLRRDKLDVLRRENPGASAGECLEAMLRGQCSGVGETLNTASRQGAWIGAGPINPGIRLSSGDGLLRVGNAAGEAHPIIGEGISMAVQSAWLLCVQLLSVDTSPDRETVGEAWQRLVARRYAREWRLHFVPRIRLASAFAHASMHARSSALLLALAKRWPAFLPLGSRWAGKIRCAIDPAEVARLAQQRSDYEAL

SEQ ID NO: 88933 - protein, 506 aa, Xanthomonas perforans; identical to SEQ ID NO: 86133
  misc_feature (1)..(506): tr|A0A0G8XDB5|A0A0G8XDB5_9XANT Tryptophan halogenase OS =Xanthomonas perforans OX=442694 GN=BJD13_17590 PE=4 SV =1

SEQ ID NO: 88934 - protein, 517 aa, Paucibacter toxinivorans
  misc_feature (1)..(517): tr|A0A4R6QNY9|A0A4R6QNY9_9BURK Tryptophan halogenase OS =Paucibacter toxinivorans OX=270368 GN=DES47_102461 PE= 4 SV=1
MKPIQEVLIVGGGTAGWLTAAFLAKTLGTAAGGVKITLIESSEIGIIGVGEGTFPSIKGTLAAIGIDEACFIRACNATFKQGIRFDHWVRPPGTAGHDHYFHPFSAPSQRPGGPELLPYWLLGAARGNTAFAEAATLQKRVADASHGPKRFTDADFIGPLNYAYHFDAGRFAALLCEHGQSLGVQQLIGTVERVELAEDGAIGSVVTREHGSLTADLYIDCTGFRAALIGTALGSPFRNINDQLFVDRAVAVQVPYEGPDSQNHPIASYTISTAHEAGWTWDIGLQQRRGVGYVYSSRHTDDGRAEDVLRGYIGPAAETLSPRLLKLNVGYREVQWVKNCVAVGLSGGFLEPLESSGIGLIETAAYLVGFLFPADGNIAPAARQFNDQMKARYERIVDFVKMHYCLTQRSDTDFWRDNADPRSVPDSLREKLAMWRCRPPHRLDFVTDLEMYPPSSWQYVLHGMEFGCDISASRAAYPRIDDARKEFQMIRQLSEHALGDLPTHRALVERMCARAAV

SEQ ID NO: 88935 - protein, 507 aa, Cellvibrionaceae bacterium
  misc_feature (1)..(507): tr|A0A545SY65|A0A545SY65_9GAMM Tryptophan 7-halogenase OS=Cellvibrionaceae bacterium R142 OX=2591008 GN=FKG94_ 22380 PE=4 SV=1
MPDPVEKIVIVGGGTAGWLTAAIVAAHHQSKQPGGLQVTLVESSDIPTIGVGEGTWPTLKNTMQQIGIKESEFFNSCHAAFKQGGKFVDWVHGNGDFYYHPFTVPLGYGRLDLAPYIEDIANYAPDANFQHHVCEAGLAPRTMAESEFKGPCNYAYHLDAGAFADLLKRHCKANLGVEHIVDTVQEVKLAADGGIGSVVLAGRGALTADLYVDCTGFASLLLGDKLAVPFVNTDDVLFNDTALAMQVPYATDDSPLACNTIATGQRAGWIWDIGLTHRRGVGYVYSSDYISDDEAESDLRRYLGAAAEGLNARKIRFSSGHRAQYWKKNCVAVGLAAGFVEPLEATAIMLVEISARYIAENLPPDNGVMPITAKRFNAQMEYRWRRIIDFLKLHYMLSQRPEPYWRAHRREETIPESLREDLALWAHRGPTREDFDSAVELFPAASYQYVIYGMGFKPDFTRQTYLYRRQQEAEKIIQRNRQLTEQMLQTLPPHREYIEQWLATANK

SEQ ID NO: 88936 - protein, 506 aa, Xanthomonas alfalfae
  misc_feature (1)..(506): tr|A0A1S1XHP2|A0A1S1XHP2_9XANT Tryptophan halogenase OS =Xanthomonas alfalfae OX=366650 GN=BHL63_05585 PE=4 SV= 1
MIPAPLRNIVIVGGGTAGWMAAAAFARVLGPTFKVQLIESEQLGTVGVGEATVPHIKAFNNLLGIDEAEFVRQTQGSFKLGIEFVDWQRPGTAYMHGFGTQIGHPLGLLPFHQYWIKQHARGRAQPLGAYTLNTVAAARGKFMTSAGDVPANSPLANIAYAYHFDATQYAHFLRRYSQQRGVTRIEGLVEQVQLHPESGHVQSLQLASGQTVHGDLFIDCSGFRGLLIEEALHTGYHDFTHWLPCDRALAVPCEKVGPPTPYTRSTARAAGWQWRIPLQHRTGNGYVYCSAHISDDEAAATLLANLDGKPLADPRPLRFTTGRRKQCWNRNVVALGLASGFLEPLESTSIHLIQSGISKLLELFPREGISPVLVQRYNDRLAFEFDRIRDFLLLHYHATERDDSAFWRHCRHMPITPELQTTLDLFRDSGRFYRNAEEMFAEISWVQVLVGQGILPQGYHPLVDQVPDTDAEGFLASVAQTISHCVDVMPSHQQFIDRYCKAAALP

SEQ ID NO: 88937 - protein, 518 aa, Dokdonella immobilis
  misc_feature (1)..(518): tr|A0A1I4ZRH7|A0A1I4ZRH7_9GAMM Tryptophan halogenase OS =Dokdonella immobilis OX=578942 GN=SAMN05216289_12810 P E=4 SV=1
MLRSILIAGGGTAGWLCACYLAKTLNSGAQGAVRISLVESPDIGILGVGEGTFPSIRAALSQIGISESRFIRETQATFKQGIRFVDWVRPAGSPGRNHYFHPFNLPSSRVDGLDLLPYWLLGEAGEGASFADAVTLQTAVADAGRAPKRRGDADYDGPMNYAYHFDAMQVARLLAEQGRALGVSHHLGTIVDVPLDAQGAIAGVTTKELGTLHADLYVDCTGMRAALIGKALGQRFKPVGDVLFVDRAVAIQVPYAQPDAPIPSYTISTAHEAGWTWDIGLQERRGVGYVYSSRHTSDDRAEEVLRQYIGPAADGLNARRLPFETGYRPVQWKHNCVAIGLSAGFLEPLESTGIGLIEMGTYLLAHLLPMDGQFERASTHFNTMMRERYTRIVDFLKLHYCLTQRRDSAFWTDNADPASIPETLRDRLAEWRHRAPHRLDFITDLEMFMPASWQFILYGMEFQTDLSAQRAIYPRTAEARREFEMLRAVSPHAIRDLPGHRALVDDLCATTAPRLAVV

SEQ ID NO: 88938 - protein, 501 aa, Brevundimonas sp.
  misc_feature (1)..(501): tr|A0A0Q7DNF5|A0A0Q7DNF5_9CAUL Tryptophan halogenase OS =Brevundimonas sp. Root1279 OX=1736443 GN=ASC65_15700 P E=4 SV=1
MTEALVRDIVIVGGGTAGWMTAAALAKVVGTETYSITLIESEEIGTVGVGEATIPPILLFNKLLGIDEDEFIRETQATFKLGIEFVDWARLGHTYMHPFGLFGAEMNGIGFAHYWLRALKGGGDPGNHRFVAEAEAIRLGRFMRTPRPTPEMPSIHYAFQFDASLYAGFLRRYAEKRGVVRREGRIVTVEQDGQDGSIRSVTLADGKAVRGDFFIDCSGFRGLLIEDKLKAGYEDWSRWLPCNRAVAVPCERIGDPEPVTRSTAREAGWQWRIPLQHRTGNGYVFCDSYVSEAEATDALMSRLDGAAQAEPRVLRFLSGRRKKGWVANCVALGLASGFLEPLESTSIHLTQAGISKLLGMFPRRRLDPAMADRFNAEMDLQYESVRDFIIAHYKVSQRDDTPFWRYCRDMEIPDSLAAKLETFRARGEVMVENHELFRETNWFAILYGQGLVPDDYHPIADALADDDLRVRLARIRAAIQARVDGMPSHAAFLGRCVNGAA

SEQ ID NO: 88939 - protein, 494 aa, Cellvibrionaceae bacterium
  misc_feature (1)..(494): tr|A0A545TLX0|A0A545TLX0_9GAMM Tryptophan 7-halogenase OS=Cellvibrionaceae bacterium R142 OX=2591008 GN=FKG94_ 13995 PE=4 SV=1
MVQTVRKVVIAGGGTAGWIAAATLSSQLSRLLDITLIESDAIGTVGVGEATIPTQKAFHRLIGIDEQAFMRATRASFKLGIAFENWGQLGDRYIHSFGKIGRSTWMGDFQHMWHYAKSQGWAGDMDDYCFELQAAEAGKFATSPDSQISYAYHLDASLYAKFLRTFSEERGAKRLEGKIKQVHTHPDTGFIESLDLEDGQSVAGDLFIDCTGFRALLINGALGVDYEDWSHWLPMNSALAVQTKLSGDILPYTRSIARKAGWQWRIPLQHRVGNGHVYCSDHLSDDEAHAILMDNLDGELVSQPRPIRFLTGKRKEAWAKNCIALGLSSGFLEPLESTSIHLIQIGATRLVQMFPFNGVSEALRNHYNSYSTAELESIRDFLILHYKLNRRQDSAFWQERAALEVPDTLKHRMELYADAAIAYQDDSDLFRVDSWNQVMRGQGLDSHGYHPMGRLVANGQLQAALADLKAGIDRSVKNMPTHADFLRQYCAVEV

SEQ ID NO: 88940 - protein, 500 aa, Sphingomonas sp.
  misc_feature (1)..(500): tr|A0A0Q4QDR1|A0A0Q4QDR1_9SPHN Tryptophan halogenase OS =Sphingomonas sp. Leaf67 OX=1736230 GN=ASE90_17305 PE=4 SV=1
MPNEPVRSIVIAGGGTAGWMAATYLARRLTHLNLSITVVDSAAIGTVGVGEATVPAIRDFLSAIELGEPDVLRETGGTIKYGIRFDGWGGEGHRFFHPFGLYGVGAQGVAFHQYWLKLNAVGRAGPLADYCLATQLARNGLFLPPADQPANDLGVFNFALHFDAAAFAAMLRRLALANRVAHIDGRIGAVATDPARGHVTGVTLDDGRTIEGDLWIDASGFRSLLLGDALGVPYVDWRHWLPCDRAVAIPCTAAPGDPTPYTVATARKAGWQWRIPLRHRIGNGSVYCSAFQSDGDAEDALLATLEGAPLADPNRLRFTTGHRARFWSGNVVGLGLASGFLEPLESTSISLIQSGLERLIALFPDRDCDPRLAATYNRQSVLEFERLRDFLFLHYLANGRTEPFWQAIRAVEPPEPLQIKLDAWRSGGEFVRNEWDTFQDPSWLSLYAGFGDLPARHSPLADAIGDDALADSFARMRDAIGKTLAHAEPHGCFLARVTGA

SEQ ID NO: 88941 - protein, 496 aa, Salinimonas sediminis
  misc_feature (1)..(496): tr|A0A346NPY3|A0A346NPY3_9ALTE Tryptophan 7-halogenase OS=Salinimonas sediminis OX=2303538 GN=D0Y50_15220 PE=4 SV=1
MPNPIRKVVVAGGGTAGWMSAALLKKVLPQLEIELVESPDIGTIGVGEATIPPIQTFNQFLGLDEKAFLRETHGTIKLAIAFENWRVPDETYYHTFGAPGATLGFCGFQHFWLRAKQAGLSQSLWDFDLNYLSCKAGKFNKIQTDNPVYQMGYAYHFDSSLYGQFLRRLAEQAGVKRVEGTIAHVAQNAQTGFIEALQLQDGTQLKGDLFIDCTGMRGLLLQQALGVPYEDWSHWLCADSALAVPSQRHATSAPYTRSIAHKVGWQWRIPLTHRNGNGIVYSSSYMDESTAHDTLMGNLDTEALDTPRTIRFKTGRTTRQWAKNVVGIGLSSGFLEPLESTSIHLIQSGIVRLLKMFPNQGINPSAQTLYNQDSQQEYETIRDFIILHYHLNERTDSDFWQDMQRLTLPDRLAQKIAAFKDTATVFNEHNDMFRDASWVQVMMGQGITPTGYHPSADEHSDTAILDIMGKIYHAKQQPLSQMLSHDDFLARFTTVK

SEQ ID NO: 88942 - protein, 494 aa, Nonomuraea sp.
  misc_feature (1)..(494): tr|A0A1V0AG93|A0A1V0AG93_9ACTN Tryptophan halogenase OS =Nonomuraea sp. ATCC 55076 OX=1909395 GN=BKM31_54195 PE =4 SV=1
MAIEDFDVVVAGGGPAGSTLAALTAMRGHKVLVLEKERFPRYQIGESLLPSTVHGVCRLLGLTEELAEAGFTVKRGGTFRWGATPEPWTFSFSVSPHISGPTSFAYQVERSRFDELLLNNARRKGAEVREECAVTEVIEGEEGRAAGVRYTTADGAEHEVRAQFVVDASGNRSRLHSKVGGERKYSDFFRSLALFGYFEGGKRLAAPNSGNILSVAFDSGWFWYIPLSPTLTSVGAVVRRELAEKIQGDREKAMTALIAECPLISEYLADATRVTSGPYGELRIRKDYSYHQTSFWRPGMILIGDAACFVDPVFSSGVHLATYSGLLAARSINSVLSGDLDEKAALTEFEARYRREYGVFYEFLVSFYEMHRDEESYFWQAKKVTRNNHTELESFVDLVGGVSSGEQALTSSTSGRLRSRSAEFAAAVEEVAASDDGNMVPMFKSTVVKQVMAEGGQVQMRAMLGQDAEPEVPLFPGGLVASPDGMSWQPYRPA

SEQ ID NO: 88943 - protein, 497 aa, Streptomyces rapamycinicus
  misc_feature (1)..(497): tr|A0A0A0N9F2|A0A0A0N9F2_STRRN Tryptophan halogenase OS =Streptomyces rapamycinicus (strain ATCC 29253 / DSM 41 530 / NRRL 5491 / AYB-994) OX=1343740 GN=D3C57_134430 P E=4 SV=1
MSNEDREQYDVVVVGGGPGGSTLAALVAMRGHRVLILEKETFPRYQIGESLLPSTIHGVCRMTGVADKLAAAGFTPKKGGTFRWGANAEPWTFSFSVSPKIAGATSHAYQVERSKFDNILLEHAVEKGAEVRFRVSVTDVIEDAERVTGVRYTDADGTEHEVRAAYVVDASGNGSRLHKRVGGTREYSQFFRSLALFGYFEGGKRLPAPNSGNILSAAFESGWFWYIPLTPDLTSVGAVVRRENADKIQGDPERALLALIDECPLIKEYLSDATRVTDGQYGQLRVRKDYSYHQTKFWRPGLVLIGDAACFVDPVFSSGVHLATYSALLAARSISSSLAGIVSEEAAFTEFEARYRREYGVFYEFLMSFYDMHVDEDSYFWSAKKVTRNQHTELESFVELVAGVSSSEFDLDGAESAALRMKSKSAEFVSAIDEMSADAEGNMTPLFRSSAVRQAMQEGAQVQSRAFLGEDLGPDVPMFPGGLITSDDGMLWQPGPA

SEQ ID NO: 88944 - protein, 496 aa, Sphingomonas sp.
  misc_feature (1)..(496): tr|A0A0Q4Q0T7|A0A0Q4Q0T7_9SPHN Tryptophan halogenase OS =Sphingomonas sp. Leaf67 OX=1736230 GN=ASE90_08855 PE=4 SV=1
MKNGERRKVRVVVVGGGTAGWMTAAGLVGLLPAACDVTLIESEAIGIVGVGEATLPHLRLYLERLGIDERAFMAATDATYKLGIEFRDFGRIGDRYIHPFGTYGRPLAGVAFHHYWLRRDRAGAVPPIGAFSAGVVAAERRRFERPGSDPGDPTTSFGYAYQFDATRFAPFLRDWAEARGVTRIEGRIVRADRHGDSVAAVEMDDGRRIGGDLFVDCSGFRSLLLGETLAEPWEDWSHWLPCDRAVAVPCASPPGTIEPYTRATAMPAGWRWRIPLRHRVGNGYVYTSAYCSDDEATAALLAGLDGEPLADPRPLRFGAGRRRRSWAGNVVAVGLASGFLEPLESTSIYLVQAAITSLIEHFPDTRVAQADRDGFNTAIDAEYDRIRDFLILHYHATDRADSPFWNHVRTMTIPDTLADKLALWRGSAQVARYGHGLFLEPSWVAVYLGQRVVPTGWDPRADQPDAAGLDRALGSLAQAIADRVRAMPGHDAALGL

SEQ ID NO: 88945 - protein, 506 aa, Actinomadura syzygii
  misc_feature (1)..(506): tr|A0A5D0U0P3|A0A5D0U0P3_9ACTN Tryptophan 7-halogenase OS=Actinomadura syzygii OX=1427538 GN=FXF65_30285 PE=4 SV=1
MKTEEYDVVVVGGGPGGSTAATLVARHGHRVLLLEKETFPRYQIGESLLPATVHGICRLLGVEQEVERAGFTVKRGGSFRWGTNPLPWNFLFALSPEMSGPTSFAYQVERMKFDDILLRNAAARGVEVRENASVGEVLSDQERVRGVRYTGASGQVREVRARHVIDASGNRTRISGAAGGERVYSEHFRNLALFGYFEGGGRLPAPDSGNILCAAFDEGWLWYIPLSDTLTSIGAVISHTAAQEVQGDQDAREKALLGFIDRCEIVRDLLGDATRVTTGTYGELRVRKDYSYANTRFWRPGMALVGDAACFIDPVFSTGVHLATYGGLLAARSINSVLDGSVPEDRAFTEFEGRYRREYGVFYEFLSAFYDMQASEDTYFWKAKKVTLFDASAMEAFVALVGGVASGEAALTDAPALTARFAGSSRALGAAVEATGSMQTESGERMNHLFGVPAVASVMQEMNDIQRRGVLGRATAESPLLRGGLVPSADGLSWTDPETDPRTDPA

SEQ ID NO: 88946 - protein, 500 aa, Salinimonas sediminis
  misc_feature (1)..(500): tr|A0A346NRA9|A0A346NRA9_9ALTE Tryptophan 7-halogenase OS=Salinimonas sediminis OX=2303538 GN=D0Y50_17935 PE=4 SV=1
MNKPLSKIVIVGGGTAGWMCAAALAKVLKHPCQVQLIESDEIGTVGVGEATIPQLQIFNDLLGIDENEFMRATGATFKLGIQFVDWYKQGQDYFHAFGEVGKNFEGIQFYHYWLRLQQAGLASSIEDYTLASKACRLNKFSRPSKAGNSPLSSIAYAFHLDAGLYAKFLQNLAKTNGVTRTEGKIEQVLQHPNGNIKAVQLTNGDCHEGDFFIDCSGFSALLIGKTLGSPYENWQHWLPCDSAVTVPSTALSKLPPYTRATAHHAGWQWRIPLQHRTGNGHVYSSQFISDEQAQNTLLQHIDTPATDSPRTLRFTTGYRPQPWRKNCLAIGLSGGFLEPLESTGLYLIQTAIAKFFTFFPHTGENPYDQQAFNRQMQDEYVSIRDFLVCHYVLNTRNDSPFWQHCRHLPQPDSLKEKLGLFQENGRIFRDNNALFSDISWFEVMLGQGLVPRGYHAFTETFSTPALLERMASVRSVIQRCSEVLPDHAEYIRQHCAMKNR

SEQ ID NO: 88947 - protein, 496 aa, Salinimonas sediminis
  misc_feature (1)..(496): tr|A0A346NPY4|A0A346NPY4_9ALTE Tryptophan 7-halogenase OS=Salinimonas sediminis OX=2303538 GN=D0Y50_15225 PE=4 SV=1
MTQPHHIIIAGGGTAGWMAANLLAHQLAAHPVRITLLESSDIATVGVGEGSTPTLKQFFRELGITDEQWMPACQATYKVGIEFRGWSPQSGIDSYRHPFISQLDSYSERPFQVNCHTRRLGLDVTTRPDKFLFNSYLGQAGFSPSTPPNFPFRIEYGYHFDAALLGAFLKQHALHQGVEHINCTIEAAQTHPDGSLKTLIDTKGQRHSADMFIDCTGFRGLLLQQTLKVPFEPFAANLFNNKAVVIATAAPARPQVETRSTALSSGWAWQIPLQHRTGNGYVYSDDYLSADAAETELRQHLRVVDGQAEARHLSMKVGQVKQHWFKNCLALGLAQGFIEPLEATALHLVQLSINAFCKHYIKGNFTHQEADAFNQYIRGQFANVRDYIVAHYKLNTRHDSAYWVDNRNNMQLSEPLLQLLDTWYRGKDLAAHLQQRHQHSHFNSTSWHCLLAGYGTFPPLAAQQPGGADMFSEHQLATFFDGCLLNFGPPLTASVG

SEQ ID NO: 88948 - protein, 506 aa, Salinimonas sediminis
  misc_feature (1)..(506): tr|A0A346NN86|A0A346NN86_9ALTE Tryptophan 7-halogenase OS=Salinimonas sediminis OX=2303538 GN=D0Y50_11920 PE=4 SV=1
MAQTPSKQRIVIVGGGSAGWLTAAIVAAKHNIAKGQCGVDIVLIEASDIPTVGVGEGTWPTMRNTLSEIGLSEKEVFRRCHAAFKQGGKFVNWVTGNDAYYHPFTVPLGYGRIELAPYLEDITEFANASNFQQHVCEHNLAPRALSENEYSSAQSNYAYHLDAGEFATLLKEHCLENLAVVHQVATVEEVNVEASGHIAQLILNDGSVVEADLFVDCSGFRARLLGEALGSPLTRTDNVLFNNAALALHVPYECDYEIKPYTQATAQEAGWIWDIGLSSRRGVGHVYSTDFTDDDAAETLLRNYVGDTQGNLCARVIKFDSGYRKTVWKGNCVGVGLAAGFVEPLEATALMLIEISARYIAEQIPAPSSAMPIISERFNQQMQYRWQRIIDFLKLHYIFNQRSEPYWQANREAASIPESLRQDLAIWQYRGPQISDFSAAIELFPAASYQYVLYGMGFSPDFSLHGHRHTQSAMAQSVIKQNQLITEQKLTNLPNHRDYIAQWLAS

SEQ ID NO: 88949 - protein, 506 aa, Porphyrobacter sp.
  misc_feature (1)..(506): tr|A0A1D7NPD1|A0A1D7NPD1_9SPHN Tryptophan halogenase OS =Porphyrobacter sp. LM 6 OX=1896196 GN=BG023_112711 PE= 4 SV=1
MTEGSVRKLVIVGGGTAGWITAAAFARLLGQRLEIELVESEAIGTVGVGEATIPQIIRLNTILGIDEHDFLRRTSGTFKLGIEFVDWGSLGSRYLHTFGDTGLNLAGVAFHHYWRRSMASGAQSSLWDFSLHQAAADQARFGKLDRVGNTAMTGLAYAYHFDASRYALYLRDYSEQRGVTRTEGIVESVERDGTSGDITAISLKGGKRVAGDFFIDCTGFRALLLGQELGVGYDDWSRWLPCDRALAVPSERLPTIVPYTRATAKKAGWQWRIPLQHRTGNGHVYSSGFISDEAAADTLLAGLDTKALDDPRPIRFTTGRRQAFWSHNCVALGLASGFLEPLESTSIHLIQSHVSRLIQLFPRSAHAEVERAEYNRRCTAEFEQIRDFLILHYHQTAREDSEFWRYCKNMDVPDSLTHKLALFAASGRVGRDVDDLFRDASWVQVMLGQGIVPADYDPMADQIEPAQLSEFLANLKTLIARSVAGLPSHEDYLRQHCAADPASLAA

SEQ ID NO: 88950 - protein, 507 aa, Sphingomonas sp.
  misc_feature (1)..(507): tr|A0A2T5GZC4|A0A2T5GZC4_9SPHN Tryptophan halogenase OS =Sphingomonas sp. PP-CE-3G-477 OX=2135660 GN=C8J45_1022 9 PE=4 SV=1
MTEIERTRVVIVGGGTAGWMTAAALVRLLPSACTVHLIESAEIGIVGVGEATLPHIRAFVERLGLDEADFMRATHATFKLGIDFRDFGAIGDSYIHPFGTFGRPLGDVGFHHYWLRLTAAGRTGPIGDYSVAVAAATADRFAIPDGPTDDLAASFGYAYQFDATLFGPYLRRFAEAQGARRTEGRIVAVDQHAETGNVRAVRLDSGETIEGDLFVDCSGFRSLLLGDAMAEPWEDWSNWLPCDRAVAMPCASPQGPIEPYTRATAKSAGWQWRIPLQHRVGNGYVYSSAHLDDQAAADSLVASVEGKPLADPRFLKFRAGRRRNSWVGNVVGIGLASGFLEPLESTSIYLAQMAITQLIELFPQRAGSEGISPTDRTEFNRMVDMEYDRIRDFLILHYHATIRDDSDFWNHVRTMDVPDTLAEKMDLFRRAGRVAQYSEGLFLEPSWLAVYLGQGIVPRGWDQRANGPALDGLDRAVANLRAQVAATAGAMPDHAAFLAQRNATIPA

SEQ ID NO: 88951 - protein, 390 aa, Corallococcus coralloides
  misc_feature (1)..(390): tr|H8MVI2|H8MVI2_CORCM Tryptophan halogenase OS=Corallo coccus coralloides (strain ATCC 25202 / DSM 2259 / NBRC 100086 / M2) OX=1144275 GN=COCOR_02747 PE=4 SV=1
MSEDSCDVAIIGGGPAGAAMAVALRRKAPSLSVTLVERTTYDAPRLGETLPPDVRLPLSRLGVWEGFLRDGHLASRGTASCWGRAEPGFHDTMMSPWGSAWHLDRTRFDERLSVEAAQQGARVLRATTLLDSESLGRDGYRLRLAHEAADPSTLRARFVVDATGSKATFASARGARRLVSDRCFAVYGAFQLQGGAAFPTHALVDACPEGWWYSALLPRGRVVVALVGDGDSLRGLRWATPASWMNLLRQAPATWARLDVCDFAGEALVAVPVLVGQLDRPWGEQWLAVGDAACTYDPLSSQGITKALDSALLAADALERCLRGDAEALQAYASTLNARFQDHQRTRAAYYRQEQRWPQAPFWKNRWESLPAPAAPPAQLRRPHSTEVNP

SEQ ID NO: 88952 - protein, 521 aa, Xanthomonas alfalfae
  misc_feature (1)..(521): tr|A0A1S1XJE9|A0A1S1XJE9_9XANT Tryptophan halogenase OS =Xanthomonas alfalfae OX=366650 GN=BHL63_03770 PE=4 SV= 1
MPDTTPSDPQQRPVRRVVIAGGGTAGWMAAAALSKLLGRHLQITLVESDEIGTVGVGEATIPSLVTFHRLLEIDEAAFMAATQATIKLGIAFEHWRDVDQHYIHSFGHAGTDHWSAGFQHFWLKGCQRGVARDFGDYCLELRAAQEGRFAHLPNGGMNYAYHLDAGLYARFLRRFSEGFGVTRIEGRIGQVETDAQSGFLTALTLQDGTRVEGDLFLDCTGFAGLLIGKTLGVGSDDWSRWLFADSALAVQTESVGPPVTYTRSRADQAGWMWRIPLQHRVGNGIVYSSRYMDQDGARAVLERNLTGRALTEPRPLRFTPNQRHRVWEKNCVALGLASGFLEPLESTNIHLIQRGIIRLLQTFPQVINAVDIAEYNRQAAQEITHIRDFVILHYHATDRRDTPFWRDCAAMDIPDSLRHRVELFRQSGRVFHQANELFAENSWVQVMLGQGVVPQQHHPVADLMGDAELGRFLETIRARVEAALVRLPAHADFLQRYCPAPPLPEPAARVPAPPVMATPAG

SEQ ID NO: 88953 - protein, 502 aa, Salinimonas sediminis
  misc_feature (1)..(502): tr|A0A346NJ49|A0A346NJ49_9ALTE Tryptophan 7-halogenase OS=Salinimonas sediminis OX=2303538 GN=D0Y50_03705 PE=4 SV=1
MTPHPNEQKCAVVIAGGGTAGWLTAFSLVSRLGPLLDITLIESDAIGTVGVGEATIPTMRTFHRLLGIDEKEFMAQTQATFKLGIQFDNWANQGDRYIHSFGEIGQRSWMAEFHEFWLEAKAQGFGGELSDYCLELQAAQAQKFCLEVDKRPVNYAYHLNATAYAAYLRKKAEGAGVKRIEGKIAHTALDAVSGNIEAVQLEGGRLVEGDFFIDCTGFHGLLIGKALGVGYEDWSHWLAADRAVAVQTELTSAPVPYTKSIAHPAGWQWQIPLQHRMGNGLVYSSRFMDAQQAQDVLLDNLPGAPVADVRHLAFKTGRRHKAWHKNCVAIGLSSGFLEPLESTSIHLITTAILRLMKLFPFGNEYTQQAARFNAETSFEVEAVRDFIILHYHATQRTDSDFWNFYRMLDIPDSLRHRMQLFSENAYVWPDEVGLFRTDSWVQVMLGQGLYPKQHHGAGRLLDQHGLEQQLANIRQAIQKMVTKMPQHHDFITQYCATDGWER

SEQ ID NO: 88954 - protein, 502 aa, Photorhabdus heterorhabditis
  misc_feature (1)..(502): tr|A0A0M9CW67|A0A0M9CW67_9GAMM Tryptophan halogenase OS =Photorhabdus heterorhabditis OX=880156 GN=AM629_18120 PE=4 SV=1
MTAAYLAKAFAQNVNITVIESKKVKKIGVGEATFSTVRHYFDYLGLDESEWLAECAGSYKLGIRFENWDGKGNHFYHPFERWEVVKGFPISEWWLKKGITDQSFDYATFLTPHLCEAKRSPRRLDGSLFVQNSDMRLGQSTLAEQRAQFPYAYHFDADGVASFLKRYAMNRGVSHIEDDVTYIEIDENGNIGFLETKIHGKLKADLYIDCTGFKGLLINKTLNEPFVSFSDVLKNNRAVALRVPREDTRDIEPYTTARTMSNGWRWTIPLYKRNGYGYVYCDKYQSPEEAEAELRKSIPYENADCAANHIRMRIGRSNRSWVKNCVAIGLSSAFVEPLESTGIFFIQHGIEQLVRFFPRSSDSELLIEEYNTRVNRVVDGVKEFLLLHFSLARRNDTVYWKEWKNVKLPKELLKKIMLAEDHLLDKETIYPFYHGFEEYSWNTMILGLSSSSLSGKPALSLMASDEADEILLQHHIKAKNMVSGLPTCHEYLQYLHDSQNKN

SEQ ID NO: 88955 - protein, 538 aa, Pseudomonas sp.; identical to SEQ ID NO: 85204
  misc_feature (1)..(538): tr|A0A1H7KWQ0|A0A1H7KWQ0_9PSED Tryptophan halogenase OS =Pseudomonas sp. NFACC41-3 OX=1566194 GN=SAMN03159414_1 635 PE=4 SV=1

SEQ ID NO: 88956 - protein, 496 aa, Sphingomonas sp.
  misc_feature (1)..(496): tr|A0A2T5GX07|A0A2T5GX07_9SPHN Tryptophan halogenase OS =Sphingomonas sp. PP-CE-3G-477 OX=2135660 GN=C8J45_1043 3 PE=4 SV=1
MTDTQRSRVVIAGGGTTGWLAAAAIAQQLGALVDVTLVESEEIGTIGVGESTIPTARAFHRLIGIDEQRFMAETGATFKLGISFENWARIGDRYIHAFGETGQSTWMGAFHHFWLQAREDGFGGDLGDYCLELQAAQAERFAIGGNAPELSYAYHLDAGRYARHLRTLAEGAGARRIEGFIDRVEQDGESGDIAALVLRSGERIEGDLFIDCTGFRAMLIGQTLGSPFENWRHWLPTDSAVVTQTRSVGPAVPYTRAIAHGAGWRWQIPLQHRVGNGLVYDSRHLSADEAHAQLLAEVEGEVLFDPRLIRFQPGRRQDVWRGNCVALGLAGGFVEPLESTAIHLAMIGITRLLQVFPFGGNHAATAKRFNEQAAADIERIRDFIVLHYVLTERDDTAFWNACRTMEIPETLSDRIALFRESGMAYQDGEEIFRVASWAQVMTGQRLSPRQHHRMGRIMGEPRLRQVLGDMKTTIAKQVAVLPTHQQFLRTYCPADV

SEQ ID NO: 88957 - protein, 504 aa, Niveispirillum lacus
  misc_feature (1)..(504): tr|A0A255Z5J3|A0A255Z5J3_9PROT Tryptophan halogenase OS =Niveispirillum lacus OX=1981099 GN=CHU95_05175 PE=4 SV =1
MTRSPDPIRQIVIVGGGTAGWMAAAALSRLSANGTTRITLVESDEIGTVGVGEATIPPIQQFNALLGLDENDFVSQTQGSMKLGIAFEGWTMARPRYLHPFGSFGFDMEAIKFHQFWLKLHAQGLASGIDDYNLCATMANREKFARPVPDPSSVLSQITYAYHFDAGLYAAYLRRYAEARGVTRIEGKVASVPLRATDGFIEAVVLTDGRRLEGDLFIDCSGFRGLLIEEALNSGYEDWTHWLPCDRALAVPSANVGPPKPYTRAIARDGGWQWRIPLQHRTGNGYVYCSQFVSDEQAANTLLSNLEGPALADPRPLRFTTGRRRKMWNRNCVALGLASGFLEPLESTSIHLIQAGISKLLALFPDRSFNPTNEDAYNRLSAMQFEQVRDFIILHYVANDRPEPFWLRAAAMDIPDSLRQKIDLFRACGRLFRFEDELFSENSWIAVLLGQGVLPARWDPLVDTIDPGLVRHNLDRLRAVFARAADAMPGHGDFLARTAPVRKS

SEQ ID NO: 88958 - protein, 376 aa, Corallococcus sp.
  misc_feature (1)..(376): tr|A0A3A8IA87|A0A3A8IA87_9DELT Tryptophan halogenase OS =Corallococcus sp. CA054A OX=2316733 GN=D7V88_34720 PE= 4 SV=1
MSDAHCDVAVLGGGPAGAGVALALRAQTQGSVTLVERASHDAPRIGETLPPDARRPLAKLGVWGGFLRDGHLASRGTASSWGSATLGHHDTLMSPGGSAWHLDRARFDASLRAQVAERGGTVRVGTTLTGCESLGAEGFRLHLSHPSEGLSTLCARFVVDATGWKADFATSQGARRQVVDRCFALYGDFRLREGAAFSTQALVEARPEGWWYSALLPGGRVVVALMGDGESLRGVRPSTPEAWLSLLERTTATRERLDVCDFTGEPLRAVPANVGLLDRPHAGHWLAVGDAACTFDSLSSQGISKALDSALLAAEALDQHLRGRAEALGAYAARVRQGFVEHLRTRDHYYREERRWPDAPFWRNRREALASDALAA

SEQ ID NO: 88959 - protein, 491 aa, Amycolatopsis sp.
  misc_feature (1)..(491): tr|A0A429CZA5|A0A429CZA5_9PSEU Tryptophan halogenase OS =Amycolatopsis sp. WAC 04169 OX=2203197 GN=DMC61_18005 PE=4 SV=1
MSVEDFDVVVAGGGPGGSTVATLVAMQGHRVLLLEKEVFPRYQIGESLLPATVHGVCRMLGVADELANSGFPIKRGGTFRWGARPEPWTFHFGISAKMAGSTSHAYQVERAKFDDILLKNAKSKGVVVREGCSVNDVVEDGERVTGARYTDADGNAHEVSARFVIDASGNKSRLYTKVGGSRNYSEFFRSLALFGYFEGGKRLPEPVSGNILSVAFDSGWFWYIPLSDTLTSVGAVVRREDADKIQGDREKALNTLIAECPLISEYLSNATRVTTGRYGELRVRKDYSYQQDSYWRPGMVLVGDAACFVDPVFSSGVHLATYSALLAARSINSVLAGDLDEKTALNEFEARYRREYGVFYEFLVSFYQMNVNEESYFWQAKKVTQNQSTDIESFVELIGGVSSGETALTAADRIAANSAEFAAAVDKMATGDGDDMVPMFKSTVVKQAMQEAGQVQMKALLGEDAEPELPLFPGGLVTSPDGMKWLPHHPA

SEQ ID NO: 88960 - protein, 531 aa, Actinoplanes italicus
  misc_feature (1)..(531): tr|A0A2T0JLZ0|A0A2T0JLZ0_9ACTN Tryptophan halogenase OS =Actinoplanes italicus OX=113567 GN=CLV67_1392 PE=4 SV= 1
MDQRIKRVVILGGGTSGWMAGAYLGKALQGTAEVTVLEAPAIPRIGVGEATVPNLQRVVFDFLGIPEEEWMRECNASFKTAVKFINWRTPGTGDPAAREWQGRPDHFYHPFGLLPTEDQIPLSHYWARKRLNGETDAPFDYSCFREPAMMDALKAPRTLDGERVTYYAWHFDAQLVADYLCRFATENLGVRHVRDAMERVELDDRGFITALHTKEGKRLEGDLFIDCSGFRGLLINQAMGEPFLDMSDHLLCDSAIATSLPYDDEAEGVEPYTSAIAMSSGWTWRIPLLRRFGTGYVYSSRFISQDDAIREFCDMWQIDPETTPPNKIRFRVGRNRRSWVKNVVSVGLASCFLEPLESTGIYFAYAAIYQLVKNFPDLRFDPALSDNFNRQIQSFFDDTRDFIQAHFYFSPRTDTPFWAANKELHLSESIQEKVAMYKAGLPVNAPITDESGYYGNLDAEFANFWTNGSYYCIFTGMGLLPDNPLPALAHKPDAVKNADLLFEEVQRRQDELVATLPSTREYLSMLHAKRP

SEQ ID NO: 88961 - protein, 506 aa, Porphyrobacter sp.
  misc_feature (1)..(506): tr|A0A1D7NPD7|A0A1D7NPD7_9SPHN Tryptophan halogenase OS =Porphyrobacter sp. LM 6 OX=1896196 GN=BG023_112708 PE= 4 SV=1
MSDAPAPLKSIVIVGGGSAGWMTAAALAEAVGPDCAITLIESEAIGTVGVGEATIPPIRHFNQRLGIDEATFVRETQGSFKLGIQFVDWGKRGHSYFHPFGQYGAEFDTVPFYHHWMRESLAGRIDGPIDDFSMCWAMAKAGKFAHPSPDRRMIQSTFDYAYHFDAGLYAAFLRRFSEARGVTRIEGRVVDVALRGEDGFIESVTLDNGTRIAGEFFIDCSGFRGLLIEEALHAGYDNWQHWLPCDRAVAVPCERGEFTPYTRSTAREAGWQWRIPLQHRTGNGYVHCSQFISEDEAAEVLLANLDGKALADPRPLRFVTGKRKRFWEKNCVAIGLSAGFMEPLESTSLHLIQYGILRLIALLPDSTISPLLSNEYNAQTAREYELIRDFLILHYKASERDDSELWRYCAAMPIPDSLQYKIDHFRSHGMLVADGQELFANPSWIAVYLGQGIVPDRAPALATMRSQVPVAERMGQIARAMDEAVAAMPSHGEFIARHCAAPPLAA

SEQ ID NO: 88962 - protein, 501 aa, Alteromonas lipolytica
  misc_feature (1)..(501): tr|A0A1E8FDI6|A0A1E8FDI6_9ALTE Tryptophan halogenase OS =Alteromonas lipolytica OX=1856405 GN=BFC17_20720 PE=4 SV=1
MNSNPSQSIQKIVIVGGGSAGWMTAASLSNVLKGKCDITLIESDEIGIVGVGEATIPPIRVFNQTLGISEAEFLQRTNGTFKLGIEFVNWGSNGSRYFHPFGTYGRQFDTVSMHHYWLSAHQQGQAKPLDEYAMAWHLARKGKFIHPSGDPKNVLSTFEYAYHFDAGLYVKFLRDYAEQRGVKRIEGKISHASKNKDTGFISSVSLENGQVIDGEFFIDCSGFRGLLIEQALHTGYETWSEWLPCDRAWAVPTASNADPIPYTRSTAHTAGWQWRIPLQNRVGNGHVFSSAFISEEHARQQLLDNLDSDTLAEPRLIKFVTGRRKRFWNKNVVAIGLASGFIEPLESTSIHLIQAGIAKLLALFPDKSFNQRSIDEYNRIAIAEVERIRDFIILHYKLMERRDTEMWRYCADMDVPDELAEKIAHFREFGRITKGEMDLFGNTSWLAVHIGQGNTPQRTDPLVHYSDADYTGWLNKLNQVMTQYAQQAPGHMAYINNMTKS

SEQ ID NO: 88963 - protein, 523 aa, Actinoplanes italicus
  misc_feature (1)..(523): tr|A0A2T0JLZ3|A0A2T0JLZ3_9ACTN Tryptophan halogenase OS =Actinoplanes italicus OX=113567 GN=CLV67_13912 PE=4 SV =1
MVKNVVIVGGGTAGWMSATYLRAAFGDRVGITLVESARIPTIGVGEATFSTIRHFFGYLGLAESEWMPECNATYKLAIRFENWRRPGHHFYHPFERLQRANGFSLADWWLQIGGARRLDEECFITTALCEAQRSPRHLDGTLYGIGAGGGDLGAGTDPGRSTLTEQDTQFPYAYHFDAAMLARYLTRIGVEQGVRHVTDDVVGVGRDDRGWITHVTTREHGEVAGDLFIDCSGFRALLINKTLGEEFDSFADVLPNDRAVALRVPSDIDTVGIRPYTTATAMDAGWIWRIPLYGRDGLGYVYAGEYCSEEEAERTLRDFVGPAAAGLAANHVRIRVGRNRRSWVANCVAIGLSSGFVEPLESTGIFFIQNGIEQLVKHFPRYGPADRNDGDDGLRAAYNGQVGRCMDGVREFLTLHYRGASRADTPYWKAAKERGDAELAERMRVWAEMLPGEENIWPHYHGFEPYSWIAMLIGLGRVQPPPRPALALLDATEAGQKFAALQTQAKRLVGELPGHREYLARLH

SEQ ID NO: 88964 - protein, 144 aa, Burkholderiales bacterium
  misc_feature (1)..(144): tr|A0A257GXX5|A0A257GXX5_9BURK Tryptophan halogenase (F ragment) OS=Burkholderiales bacterium PBB4 OX=2015566 G N=CFE44_23980 PE=4 SV=1
MDHALLKTIVIVGGGTSGWMTAAALCKVLQGKYKIVLVESEDIGTVGVGEATIPMIRRFNQVLEIDENEFMRETQGTFKLGIEFVNWGQLGDRYMHGFGVFGQDLWTVGFDQYWQRMYQQGKALDLEAYSINRMAALANKFMPA

SEQ ID NO: 88965 - protein, 202 aa, Burkholderiales bacterium
  misc_feature (1)..(202): tr|A0A257H894|A0A257H894_9BURK Tryptophan halogenase (F ragment) OS=Burkholderiales bacterium PBB4 OX=2015566 G N=CFE44_00145 PE=4 SV=1
MGADNTPVRRVVIAGGGTAGWMTAALISKTLGKSLQITLVESDEIGTVGVGEATIPALLAFHALLEINEQEFMAATQATFKLGISVENWRNVKEDYIHSFGMTGTDHWTAGFQHFWHKGRERNLAGDYGDYCLELKAAQQSRFAHLPRNGLNYAYHLDATLYAKYLRRFSENFGVQRREGKIVAVNPAARNGHIQSLALASG

SEQ ID NO: 88966 - protein, 521 aa, Xanthomonas citri
  misc_feature (1)..(521): tr|A0A2K2R2D7|A0A2K2R2D7_XANCI Tryptophan 7-halogenase OS=Xanthomonas citri OX=346 GN=xavtCFBP7764_17385 PE=4 SV=1
MPDTTPSDPQQRPVRRVVIAGGGTAGWMAAAALSKLLGRHLQITLVESDEIGTVGVGEATIPSLVTFHRLLEIDEAAFMAATQATIKLGIAFEHWRDVDQHYIHSFGHAGTDHWSAGFQHFWLKGRQRGVARDFGDYCLELRAAQEGRFAHLPNGGMNYAYHLDAGLYARFLRRFSEGFGVSRVEGRIGQVETDAQSGFLTALTLQDGTRLEGDLFLDCTGFAGLLIGKTLGVGSDDWSRWLFADSALAVQTESVGPPVTYTRSRADQAGWMWRIPLQHRVGNGIVYSSRYMDQDGARAVLERNLTGRALTEPRPLRFTPNQRHRVWEKNCVALGLASGFLEPLESTNIHLIQRGIIRLLQTFPQVINAVDIAEYNRQAAQEITHIRDFVILHYHATDRRDTPFWRDCAAMDIPDSLRHRVELFRQSGRVFHQANELFAENSWVQVMLGQGVVPQQHHPVADLMGDAELSRFLETIRTRVEAALVRLPAHADFLQRYCPAPPLPEAAARVPAPPVMATPAG

SEQ ID NO: 88967 - protein, 246 aa, Pelomonas sp.
  misc_feature (1)..(246): tr|A0A2R7SNZ6|A0A2R7SNZ6_9BURK Tryptophan halogenase (F ragment) OS=Pelomonas sp. HMWF004 OX=2056841 GN=DBR42_1 4680 PE=4 SV=1
MNTAPTFRRVVIAGGGTAGWMMAALMSKLLGKQLDITLVESEEIGTVGVGEATIPALHTFHNLLGIEEPAFMAATNATFKLGINFEGWHDIGKDYFHSFGTTGTDHWSAGFQHFWLKGRATGIAKAYTDYNPETVAAFANRFAHLPRNGLNYAYHLDASRYAQYLRTMSEAHGVRRVEGKIATVLQEGPGEGRDRDITALQMQDGSRIGGDLFIDCTGFRSLLLGETLGVGYEDWSHWLPCDRAVA

SEQ ID NO: 88968 - protein, 521 aa, Xanthomonas pisi
  misc_feature (1)..(521): tr|A0A2S7CUK0|A0A2S7CUK0_9XANT Tryptophan 7-halogenase OS=Xanthomonas pisi OX=56457 GN=XpiCFBP4643_20820 PE=4 SV=1
MSHAAPLPPQQRPVRRVVIAGGGTAGWMAAAALSKLLGRQLQITLVESDEIGTVGVGEATIPSLVTFHRLLEIDEATFMAATQATFKLGIGFEHWRDVDRHYIHSFGHTGTDHWSAGFHHFWLKGRQRGVACDFGDYCLELRAAQEGRFAHLPNGGMNYAYHLDAGLYARFLRRFSEGFGVKRLEGRIGQVQTDPDSGYLTALTLQDGTNVEGDLFIDCTGFAGLLIGKTLGVGSEDWSRWLFADSALAVQTESVGPPVTYTRARADQSGWMWRIPLQHRVGNGIVYSSRYTDQDSARAVLERNLQGRALTEPRALRFTPNQRHRVWEKNCVALGLASGFLEPIESTNIHLIQRGIVRLLQTFPQVINAADIAEYNRQAADEIAHIRDFVILHYHATDRRDTPFWRDCAAMEIPDSLRHRMELFRQSGRVFHQGNELFAENSWVQVMLGQGITPQQHHPVADLMGDAELSHFLQGIRQRVDATVATLPPHADFLRRHCPAPPLPDPAPHMRSDAALAAPAG

SEQ ID NO: 88969 - protein, 521 aa, Xanthomonas vasicola; identical to SEQ ID NO: 86430
  misc_feature (1)..(521): tr|A0A5K1N125|A0A5K1N125_XANVA Tryptophan halogenase OS =Xanthomonas vasicola pv. vasculorum NCPPB 206 OX=10941 81 GN=KWI_0108195 PE=4 SV=1

SEQ ID NO: 88970 - protein, 532 aa, Parvularculaceae bacterium
  misc_feature (1)..(532): tr|A0A520R6N6|A0A520R6N6_9PROT Tryptophan 7-halogenase OS=Parvularculaceae bacterium OX=2510335 GN=EVA70_07070 PE=4 SV=1
MREETDILIVGGGTAGWLTAAYLAQTLASNKKGGVRVTLIESSDIGIIGVGEGTIPTIRATMNTIGVDEAVFMREAHASFKQGIKFVNWTHAPEDNPTDWYYHSFSQPRIMENGQSLTPYWLMGLSGGAHFSDAVCLQDRLCEGFRAPKTLQHGPYLGPLSYAYHFDAGRLATLLKNLGVERGVKHLIGNVEEVVLDESGAIERIKTKEHGDLRANLYVDSTGFSGLLIEKALGEKFHSLNNQLFVDSAVAIQVPYEDPNAPMNVATVSTAHEAGWTWDIPLADRRGVGYVYSSKYTDDDRAEQVIRNYIGPAARDLSARKLKLRVGTRKRNWVKNCVAVGLSAGFLEPLESTGIMMSEVAAHLISLLYPRNGDMEAAAKHFNRSMSERFHAVTDFIKLHYCLTKRTDNPFWIDNTHPDTIPDSLKQRLELWRQRPPDVFDFPSLHECFEAFNYEYVLYGMEFKTDLSGLDSIYPHKEMAQREFARVAAAAKQALNRLPDHRKMLQDVYQKGLVPTRNAATAERQISALRGS

SEQ ID NO: 88971 - protein, 390 aa, Myxococcus xanthus
  misc_feature (1)..(390): tr|Q1DDL6|Q1DDL6_MYXXD Tryptophan halogenase OS=Myxococ cus xanthus (strain DK 1622) OX=246197 GN=MXAN_0996 PE= 4 SV=1
MSEASYDVAIIGGGPAGAAMAVALRDLAPFLSVVMLERTDYDTHRPGETLSPDLRIPLSRLGVWSSFLRDGHLASRGTSSCWSRAEPRIQDTQMSPWGSAWHLDRARFDERLSLEAARQGVRVLRLTTLLDVESIAKEGYRLHLSQRKTGALTLRARFVVDATGWKATFAMTQGARRRIRDRCFTVHGAFQLRPGESFPTDALVESCPEGWWHSARLPSDCVAVTLVGDGDSLHGLRWATPEPWAALLEQAPVTQARLAACDFAGEPLVAAPVLVGELDQMHGERWLAVGDAACTHDPLSAQGIFSALDSALLAAEALEQYLRGEEDALCAYEQTLHLRFNEHLHRRSRTYLEEQRWPDAPFWKNRHTAFPALTPAAGQRSAPAPTGLAP

SEQ ID NO: 88972 - protein, 533 aa, Streptomyces sp.
  misc_feature (1)..(533): tr|D9UK02|D9UK02_STRS3 Tryptophan 6-halogenase OS=Strep tomyces sp. (strain SPB78) OX=591157 GN=SSLG_01635 PE=4 SV=1
MPETDNRIRKVVILGGGTAGWMTASYLGKALQGTVDIQVLEAPAIPRIGVGEATVPNLHRVLFDYLGIPEEEWMRECNASFKMAVKFVNWRTPGRGEPDSRTRPDGKPDHFYHPFGILPDHDNTPLSHYWFKNKYEGVTDKAFDYSCFREPPVMDAKKSPKWMNGESSTRYAWHFDAALVADFLRRFATDKQGVEHIQDEMVRAEQDERGYVTALHTKSGRVLDADLFVDCSGFRGLLINKALGEPFIDMSDHLMCDRAVATAVPHDDDANGIEPYTSAIAMSSGWAWKIPMLGRFGSGYVYSSRFTTQEEATREFCELWNLDPETTKFNHVRFHVGRNRRAWVNNVVSIGLASCFLEPLESTGIYFITAAIHQLAKHFPDRTFPQALVDSFNEEIEVMFDDTRDFIQAHFYYAPRDDSEFWRAQKTLKLPENIQRKIAAYKAGLPINSPITDESTYYGNFEAEFRNFWTNGSYYCVFAGLGLEPDAPLPALAHKPESVAGAQPLFTKVAQEQRHLLDTLPSAHDYLRRLHAK

SEQ ID NO: 88973 - protein, 531 aa, Xanthomonas vasicola
  misc_feature (1)..(531): tr|A0A5K1N5L9|A0A5K1N5L9_XANVA Tryptophan halogenase OS =Xanthomonas vasicola pv. vasculorum NCPPB 206 OX=10941 81 GN=KWI_0100365 PE=4 SV=1
MWSFERGQLAPFVCPSAVFAQECIDMIPAPLRNIVVVGGGTAGWMAAAAFARVLGPTFNVQLIESEQLGTVGVGEATVPHIKAFNNLLGIDEAEFVRQTQGSFKLGIEFVDWQRRGSAYMHGFGTQIGHPLGLLPFHQYWIKQHARGKAQPLGAYTLNTVAAARGKFMTSAGDVPANSPLANIAYAYHFDATQYAHFLRRYSEQRGVTRIEGLVEQVQLHPESGHVQSLQLASGQTVHGDLFIDCSGFRGLLIEEALHTGYHDFTHWLPCDRAFAVACEKVGPPTPYTRSTARAAGWQWRIPLQHRTGNGYVYCSAHISDDEAAATLLANLDGKPLADPRPLRFTTGRRKQFWNRNVVALGLASGFLEPLESTSIHLIQSGISKLLELFPREGISPVLVQRYNDRSAFEFDRIRDFLLLHYHATERDDSAFWRHCRSMPITPELQTTLDLFRDSGRFYRNAEEMFAEISWVQVMVGQGILPQGYHPLVDQVPDRDAEGFLASVAQTIAHCVDVMPTHQQFIERYCKAAVPA

SEQ ID NO: 88974 - protein, 486 aa, Sphingomonas sp.
  misc_feature (1)..(486): tr|A0A0Q4QKW7|A0A0Q4QKW7_9SPHN Tryptophan halogenase OS =Sphingomonas sp. Leaf67 OX=1736230 GN=ASE90_02525 PE=4 SV=1
MTAAALANRLQGLGVRVQLIESDEIGTVGVGEATLPHIRAFNTTLGIAEADLMRATEATYKLGIEFCDWGRIGDRYIHPFGNYGPTDDSIPFYHQWLRLRELGDATRLDEYSFPVIAAEHNRFRHPGSDVRQVESSFGYAYQFDASLYARFLRRYAETRGVERIEGKVVDVALHGESGHVRNVTLADGRVLEADLFVDCSGFRGLLIEGALQSGYDDWSNWLPCNRAVAVPTDSCSPLGPYTRATARTAGWQWRIPLQHRVGNGHVYCSSFISEDDAQDQLIANLDAPMQAEPRRLRFTTGRRRDFWKRNVVAIGLASGFLEPLESTSIHLIQDGITELLALFPTRRFDAGDIAEYNRRMALHFERVRDFLLLHYVATEREDSEMWRHFRALTLPDSLQAKIDAWLTRGYVVPYQFGLFLPPSWVAVMLGQRLMPKGYDPRVLAQGDATIAARAAALRRAVAQAVQATPDHADYIRRSPAAAGLAA

SEQ ID NO: 88975 - protein, 514 aa, Variovorax sp.
  misc_feature (1)..(514): tr|A0A430H7K8|A0A430H7K8_9BURK Tryptophan 7-halogenase OS=Variovorax sp. 679 OX=2496119 GN=EJO71_10495 PE=4 SV =1
MLNLRNLSRAVVVGGGAAGWFAALTLRRMFAPHVEVRVIESPADGATDTVGADEGGLLNLVEALRGNGIRLDEFVRETGATLNLGISYEGWRTGAEDDCYYHLFGRPGLQEIDWTERGFHPLLSGMVHEGIELHRYIPGFASIASNASQQQTKAMLQLGESSGLSTSFHFDTHKLAEYLCRVAVSRGVVHQQARVEELVCDAGGMACAVKLEGVEEALELELLIDASGLARLGIGNKLGVRWHSFSEYLLPDRAVPFHMPNPQPNPSLVTRAIAMPAGWMWQIPLAERVGAGYVFSSAHTDETKVIDEIRCRIGPGIEPMRALKFESGHFAQAWVGNIMAVGLASGFVEPLEATSIGQLLEQLRNFERIVTACDGVVPGHLIDGFNEANARCWAGIRDFLRMHYDCPRRDTDFWRDAAGLPLPPSYAELRECFQQRTPRLIDVQNYVAHGWRGIFHPVNWLFVAAPLGVVSREAAATELASLPVASRKRVAVYIHRMRELGAAGNFSCKEEPSR

SEQ ID NO: 88976 - protein, 521 aa, Xanthomonas citri; identical to SEQ ID NO: 86377
  misc_feature (1)..(521): tr|A0A2D2SI69|A0A2D2SI69_XANCI Tryptophan halogenase OS =Xanthomonas citri pv. phaseoli var. fuscans OX=473423 GN=XcfCFBP6989P_20080 PE=4 SV=1

SEQ ID NO: 88977 - protein, 491 aa, Sphingomonas sp.
  misc_feature (1)..(491): tr|A0A0Q4Q5B9|A0A0Q4Q5B9_9SPHN Tryptophan halogenase OS =Sphingomonas sp. Leaf67 OX=1736230 GN=ASE90_02265 PE=4 SV=1
MTRMRIVIAGGGTAGWLAAALLTRQLSSLVEVTLVESEAIGTVGVGEATIPTIRSFHALLGLDEAEFMGATGASFKLGIAFENWARAGDCYIHSFGEVGRSTWMGDFQHFWLEARAQGAAGPIGAYCLEHEAAEAGRFATGPDAPLNYAYHFDAGRYAAYLRTRSEAQGLTRVEGKIARVERAGESGDIAALVLADGRRVAGDLFLDCTGFHALLIEQTLGVGFEDWGHWLPTDRALAVQTVATGPAPPYTRAIAHDAGWRWQIPLQHRVGNGLVYSSRHLSDDAARDRLLASVEGQTLIEPRLIRFRTGRRLTTWERNCVAISLSSGFVEPLESTSIHMVMIALTRLVQLLPFGHPGEAARARFNEQSRREIEAVRDFVLLHYHLNQRPEPFWRERREIAPPDTLAERIALFAQGAHAYQSADDLFRVGSWLQVMLGQRLEPAAHHPLAKMMPPGQLAAVLRDLNDGIAARVAALPTHQQFLDLYCRSGA

SEQ ID NO: 88978 - protein, 538 aa, Burkholderia cenocepacia
  misc_feature (1)..(538): tr|A0A071M663|A0A071M663_9BURK Tryptophan halogenase OS =Burkholderia cenocepacia OX=95486 GN=DT99_30260 PE=4 S V=1
MSNPIRNIVIVGGGTAGWMSASYLVRALQQQANITLVESAAIPRIGVGEATIPSLQKVFFDFLGIPEREWMPQVNGAFKSAIRFVNWRKSPDRAPGDHFYHLFGNVPNCDGVPLTHYWLRKREQGFQQPMAYACYPQTEALDAKLAPCLADGTRQMSHAWHFDAHLVADFLKRWAVERGVKRVVDEVEQVHLDDRGYISSLSTKEGRTLEADLFIDCSGMRGLLINQALKEPFIDMSDYLLCDSAVASAVPADDARVGIEPYTSAIAMNSGWTWKIPMLGRFGSGYVFSSKFTSRDQATADFLDLWGLSDEQPLNQIKFRVGRNRRAWVNNCVSIGLSSCFLEPLESTGIYFIYAALYQLVKHFPDTSFDPRLTDAFNAEIVYMFDDCRDFVQAHYFTTSRDDTPFWRANRHDLRLSDAIQEKVERYKAGLPLTTASFDDSTYYDTFDYEFKNFWLNGNYYCIFAGLGLLPDRSLPLLRHRPESIDKAEAMFARIRREAEHLRKSLPTNHDYLRSLREGHAGLSRSQPGPTLAAPEIL

SEQ ID NO: 88979 - protein, 281 aa, Pelomonas sp.
  misc_feature (1)..(281): tr|A0A2R7RXY6|A0A2R7RXY6_9BURK Tryptophan halogenase (F ragment) OS=Pelomonas sp. HMWF004 OX=2056841 GN=DBR42_2 8245 PE=4 SV=1
GETLGVGYEDWSHWLPCDRAVAVQTASVREPWPYTRSIAHPFGWQWRIPLQHRVGNGLVYSSKELSDADAPEMLKRNVEGELMTAPRLIRFTPGQRDKTWHRNCVAVGLASGFVEPLESTSIHLIQRAAIRLMQLFPAGGVQQADVDEFNLQSKRELEHIRDFIVLHYHVTQRRDSALWNHVRTMDVPASLRHRIELFGETARVFRTSDELFAENSWVQVMMGQGLTPQRYHPVADLMGPDELSRFLGDIHLKVSRTVAGLPQHKAYVEQLCAPYRSEAVR

SEQ ID NO: 88980 - protein, 409 aa, Corallococcus coralloides
  misc_feature (1)..(409): tr|H8MI74|H8MI74_CORCM Tryptophan halogenase OS=Corallo coccus coralloides (strain ATCC 25202 / DSM 2259 / NBRC 100086 / M2) OX=1144275 GN=cmdE PE=4 SV=1
MKTESADILIIGAGPAGSVAAGLLRKQGRDVLVLEREQFPRFSIGESLLPQSMEYIQEAGFLQDVVEAGFQFKNGAAFERAGRYTDFDFRDKFSPGWGTTYQVQRARFDQILAQAAEKKGATVRFRHEVLSVDFTSGQPVVTARSPEGETYQVKARFLLDASGFGRVLPRLLNLETPSNFPVRGAIFTHVVDNIPLGTFDRNKIRVTTHPEHVHVWYWTIPFSDGRCSLGVVAKKEFLDQFTGTDTERLQAIVKEAPSLQNLLKDAVWDTPARKLTGYAANVKSLWGPGFALLGNAGEFLDPVFSSGVTIAFKSASLASACIAREFAGEKVDWEKDYAKPLKAGVDTFRTFVESWYEGGFQKVIFHPNPSDDVRRMISAILAGYAWDKNNPYVADSKRRLTVLEGLCAA

SEQ ID NO: 88981 - protein, 507 aa, Brevundimonas sp.
  misc_feature (1)..(507): tr|A0A0Q7DYM5|A0A0Q7DYM5_9CAUL Tryptophan halogenase OS =Brevundimonas sp. Root1279 OX=1736443 GN=ASC65_09155 P E=4 SV=1
MDQGQARRIRSVVIVGGGTAGWMTAAALVQHFRGAPVSITVVESSEIGTIGVGEATIPTIRRFYAQLGLRDAEVMQATQATCKLGIRFQGWSGAGPDFIHPFGLFGQDLKGVGFHHYWLKQRAASDPGPMGDYSLGASLAAAGKFTLPSPNPPSSLSVFDWALHFDAALFAQYLRRYAEAGGCQRIDARIGSGALRPEDGFVRALVLDDGREVEGDLFVDCSGFRGLLIGEALGVPYEDWGRWLRCDAAWAVQSENASSANPDPFTRVTARTAGWQWGIPLQHRAGNGVVFSSAHTSDEDALAELSANLMGRPLMEPRRIGFRPGRRARAWEKNCVAIGLSAGFLEPLESTSIALIENGIERLKSLFPDRDFAGPVLDEFNDQSAREMERVRDFIVLHYKLNRRDEPFWRDCREGEIPETLERKLALWKARGQFVRYRWEMFHPASWLAIYAGFDVFPGDYDPAVDALDPAYLERSLKEMRENLSRLVAETPDHARFLAALDPARAA

SEQ ID NO: 88982 - protein, 457 aa, Pelomonas sp.
  misc_feature (1)..(457): tr|A0A2R7SLA0|A0A2R7SLA0_9BURK Tryptophan halogenase (F ragment) OS=Pelomonas sp. HMWF004 OX=2056841 GN=DBR42_1 5415 PE=4 SV=1
MRDVVVLGGGSAGWLVAGLLAAEHGELRITLIESSDVPTIGVGEGTWPSMRDTLRRIGLDEAEFIRRCQVSFKQGSRFDGWVRGAAGSEGDRYYHPFMLPVGYGDVDLVQAWLATQAERPFADVVSPSVQVCDAGCAPKQVQTPGFAAVANYAYHFDAGLFAQMLREHAVSRLGVRHLVDHVDAVLTAEDGDITALQTREHGLLPGQLFIDCSGLTARLIGQHFGVGLKSERDVLFNDAALPVQVPHARPDAPLATCTIATAWAKGWIWDIGLPSRRGVGCVYSRAHASEDEAQAALQAYLDATGAPHERPAPRSIRYDPGYRERFWVRNCVAIGLSSGFIEPLEASALAMVELSAQRLCEELPMTRATMEAVARRFNDDFSYRWARVIDFLKLHYALSQRDDSTYWRAHRDPATWPARLRELLPMWRLRAPARHDFGRNDEVFPSASYQYVLYGMG

SEQ ID NO: 88983 - protein, 511 aa, Salinimonas sediminis
  misc_feature (1)..(511): tr|A0A346NRG0|A0A346NRG0_9ALTE Tryptophan 7-halogenase OS=Salinimonas sediminis OX=2303538 GN=D0Y50_18235 PE=4 SV=1
MQQTNTPLHSVVIMGGGAAGWLTAGIMAAASTARRPLHITVVESPDVGILGVGEGTWPTMRDTLRKMGIDEATLLRECDASFKQGTCFRQWYNGQSDDVYFHPFDLPAGMFETDILGWWANGQQHVPYAQLFSATPQLCKANKAPKQAQTPPYAAVANYGYHLDANKFAALLKRHCMHHLGVKHVELHVSKVEADDHGYLTALGDGQVQVTGDFFVDCSGFAASLIGQHFGVKLQDQSAILHNNSALAVQATYRQDTPPIACTTHSTAHPNGWIWDIALPHRKGVGCVYSSAFCDEDYARKTLLDYLNRDTAIEPVSEHQVRKLSFTPGYRETPWVKNCVAIGAAAGFLEPLEASALVMTELAANHVAAQLPYTREHCAPAARQFNTAMQNKWSRIIDFLKLHYVLSTRDDSLYWRSMKNPSGASVQLNDWLAMWHHRSPNIHDFQFQDELFPLASYLYILSGMGYAPVGASPHQIGTKAEQFVRQNYQRSRQLLAALPDNRILIEQIRQG

SEQ ID NO: 88984 - protein, 538 aa, Burkholderia cenocepacia
  misc_feature (1)..(538): tr|A0A3Q9FB44|A0A3Q9FB44_9BURK Tryptophan 7-halogenase OS=Burkholderia cenocepacia OX=95486 GN=D5R55_19525 PE= 4 SV=1
MSNPIKNIVIVGGGTAGWMSASYLVRALQQHANITLVESAAIPRIGVGEATIPSLQKVFFDFLGIPEREWMPQVNGAFKSAIRFVNWRKSPDGSRGDHFYHLFGNVPNCDGVPLTHYWLRKREQGFQQPMAYACYPQTEALDAKLAPCLPDGTRQMSHAWHFDAHLVADFLKRWATERGVKRVVDEVERVHLNDRGYISSLSTKEGRTLEADLFIDCSGMRGLLINQALKEPFIDMSDYLLCDSAVASAVPADDARDGIEPYTSAIAMNSGWTWKIPMLGRFGSGYVFSSKFTSRDQATADFLDLWGLSDKQPLNQIKFRVGRNQRAWVNNCVAIGLSSCFLEPLESTGIYFIYAALYQLVKHFPDMSFDPRLSDAFNAEIVYMFDDCRDFVQAHYFTTSRDDTPFWRANRHDLRLSDAIREKVERYKAGLPLTTTSFDDSTYYDTFDYEFKNFWLNGNYYCIFAGLGLLPDRSLPLLRHRPESIDKAEAMFARIRREAERLRATLPTNHDYLRSLRDGEAGLSRSQPGPTLATPEIL

SEQ ID NO: 88985 - protein, 527 aa, Cellvibrionaceae bacterium
  misc_feature (1)..(527): tr|A0A545SLW0|A0A545SLW0_9GAMM Tryptophan 7-halogenase OS=Cellvibrionaceae bacterium R142 OX=2591008 GN=FKG94_ 27845 PE=4 SV=1
MDNQVKTVVIVGGGTAGWLTAGVIAAEYGGEPDGIAVTLIESPQVATVGVGEGTWPTMRDTLRRIGASELDFIRQCDASFKQGSKFIRWTTGQDSDSYYHPFSMPNGFLELNRVYFWQSLQAEQKFADAMCAQPQVCEHGLAPKQLSTPEFAAVLNYGYHLDAGKFGEFLKRHCIDRLGVRHVLDHVTGVNSSDNGDIASLSTAQSGQLSGDLFVDCSGSAALLLGNHFQVPFVSKQGVLFNDCALAAQVPYGDPDAPVASTTHSTAQRAGWIWDIGLQSRRGVGHVYASAYTSDEQAEQDLRAYLEPSLGAAGADSVAVRKIHFNPGYRAEFWHKNCVAIGMAAGFIEPLEASALALVELAAAMIRDDFPANRALMDITAKRFNARFRYRADRVINFLKLHYVLSQRRDGAYWKDNIDMSTVPDSLQELLSLWRYQVPSRLDFIQAEEVFPAASYQYILYGMGFNSHLRQLHRYTEEQPHALRVMRANAISVQKYLHALPSNRALLQHICGDVQAQSASGLQARRS

SEQ ID NO: 88986 - protein, 514 aa, Brevundimonas sp.
  misc_feature (1)..(514): tr|A0A0Q7DYM7|A0A0Q7DYM7_9CAUL Tryptophan halogenase OS =Brevundimonas sp. Root1279 OX=1736443 GN=ASC65_09150 P E=4 SV=1
MDQPRRPLKKICVVGGGTAGWIAAALMAEHFKGRLCEIELVESDDIGTIGVGESTVPPFLQLLARLGVDEPEFIRETQASFKLGIEFSDWKQKGERYFHPFGAIGAQVDVSDFYQVWLKAHLNGYPRPLQDFAPANVMAQADRFMLPFKAPRTPLAGASYALHVDAKRVARFLRTYAEARGVKRTEGIVEDVATRPDGFVQSLRLKSGQVVEADFFIDCSGFRALLIGKALQVAYTDWSHWLLCDRAIAVQTENVSPPHPYTQAHAEDFGWRWQIPLQHRTGNGYVFSSAHLSDDEATAVLMSKVEGRPVVKPMAVPFKTGVRDRIWSKNVLSLGLASGFIEPLESTAIHLIYRGMDFFFRYLPDLDCAPALADEYNRRMTADYEEIRDFVVLHYCLTQRDDTAFWRACRDMVPPESLQAKIDLFRANGSLAEGLDALFRNASWQSVMDGMGVVPRTWHPLVERIPFEGVPAELDKAADLVRRAAEDQPMLQAFLDAHCAAPPVELPIAELAAV

SEQ ID NO: 88987 - protein, 538 aa, Burkholderia cenocepacia; identical to SEQ ID NO: 85167
  misc_feature (1)..(538): tr|A0A3N9EJW0|A0A3N9EJW0_9BURK Tryptophan 7-halogenase OS=Burkholderia cenocepacia OX=95486 GN=DF042_31855 PE= 4 SV=1

SEQ ID NO: 88988 - protein, 503 aa, Paucibacter toxinivorans
  misc_feature (1)..(503): tr|A0A4R6QIQ3|A0A4R6QIQ3_9BURK Tryptophan halogenase OS =Paucibacter toxinivorans OX=270368 GN=DES47_106113 PE= 4 SV=1
MSPKPLRNIVIVGGGTAGWMTAAAFSKALGQAYSIRLIESDEIGIIGVGEASIPNLTEFNRALGIDEDEFLRATRGSFKMGIEFVNWGALGDRYTHGFGKVGQMADTVPFHHFWLRMAQQGKAGPLGDYSINTVAPRQARFMRARADMAGSPLGEIAHAYHFDAGLYAKFLRGYAEQRGVRRLEGKVQQVLQGAEDGFIEAVVMESGERVEGDFFIDCSGMRALLIEQTLKAGYEDWTHWLPCDRAIAVPCESVSPLLPLTRSTAHAAGWQWRIPLQHRIGNGHVYSSAFMDKDEAEAILMNKLDGKALAPPRHLSFRTGRARTFWDRNCVAVGLSSGFLEPLESTSIHLIHMAVARILSFFPHAGFDAADIAEYNALTRLEFERVRDFLILHYKLTTRDDSAFWNHCRTMAIPETLQRKIDLFASNGRIYRYDDELFAETSWLQVMIGQRLMPRGHHPFADLLPEAEVQAYVRNVEQVVAKCVGVMPTHAEFIAKHCAADLG

SEQ ID NO: 88989 - protein, 488 aa, Alphaproteobacteria bacterium
  misc_feature (1)..(488): tr|A0A1Q7WLW6|A0A1Q7WLW6_9PROT Tryptophan halogenase OS =Alphaproteobacteria bacterium 13_1_20CM_3_64_12 OX=180 3502 GN=AUG47_08455 PE=4 SV=1
MAAAAIAKVMGPRLTITLVESDEIGIIGVGEATIPSIALYNDLLRIDENDFLRQTQGTFKLGIEFVNWYEPGHRYMHAFGGIGKDLAYIPFHHYWLQEVLQGRGESLWHYSLNWMAAHQDRFARLERIADTPLPGVIYAFHFDASLYAAYLRRLALQMGVRRVEGMIAEVLQNPASGDVSALRLKDGRQISGELFIDCTGFRALLIERTLNVGYDDWTRWLPVDRALAIPTERVGPLTPYTRSTALEAGWQWRIPLQHRTGNGHVYSSAFVDDARAAELLMANLDSRPLADPRPIRFVTGRRRQLWSHNVVCLGLASGFLEPLESTAIHLIQANIQRLILLFPHHGDCDHRRAQFNQAAAAEYEYVRDFIILHYYLNNRVGERFWDACRQMSVPDSLTHKIELFRETGGIFPTMYDLFHLTSWLQVMWGQGVRPRGAHPFVQTVAPHDRVEYLKNIRDLIAQAASELPRHDEFIARHCRAPAPAAAVT

SEQ ID NO: 88990 - protein, 521 aa, Xanthomonas perforans
  misc_feature (1)..(521): tr|A0A0G8VQF9|A0A0G8VQF9_9XANT Tryptophan halogenase OS =Xanthomonas perforans OX=442694 GN=BJD13_18805 PE=4 SV =1
MPDTTPSDPQQRPVRRVVIAGGGTAGWMAAAALSKLLGRHLQITLVESDEIGTVGVGEATIPSLVTFHRLLEIDEAAFMAATQATIKLGIAFEHWRDVDQHYIHSFGHAGTDHWSAGFQHFWLKGCQRGVARDFGDYCLELRAAQEGRFAHLPNGGMNYAYHLDAGLYARFLRRFSEGFGVTRIEGRIGQVETDAQSGFLTALTLQDGTRVEGDLFLDCTGFAGLLIGKTLGVGSDDWSRWLFADSALAVQTESVGPPVTYTRSRADQAGWMWRIPLQHRVGNGLVYSSRYMDQDGARAVLERNLTGRALTEPRPLRFTPNQRHRVWEKNCVALGLASGFLEPLESTNIHLIQRGIIRLLQTFPQIINAADIAEYNRQAAQEITHIRDFVILHYHATDRRDTPFWRDCAAMDIPDSLRHRVELFRQSGRVFHQANELFAENSWVQVMLGQGVVPQQHHPVADLMGDAELGRFLETIRARVEAALVRLPAHADFLQRYCPAPPLPEPAARVPAPPVMATPAG

SEQ ID NO: 88991 - protein, 528 aa, Pseudoxanthomonas wuyuanensis
  misc_feature (1)..(528): tr|A0A286DC70|A0A286DC70_9GAMM Tryptophan halogenase OS =Pseudoxanthomonas wuyuanensis OX=1073196 GN=SAMN062964 16_10943 PE=4 SV=1
MSEKRIRKVVIAGGGTAGWVAACALTHQFRDLLDITLVESEQIGTVGVGESTIPTIRTFHRLLQIDEREFLSSVAGSFKLAISFENWKHPGDHYFHPFGTTGMNTWSCDFHQFWLESLRRGGKSELGDYCLETVAARAKRFALFDQAGASAQQWSMRWVQSPTSLERADVSYAYHFDAALYAAFLRRKCEGRGLTRVEGKIREVRQDPESGYIQALVLEDGQVVEGDLFIDCTGFRGLLIEQTLKTGYEDWNNWLPCNRAVAMQIESVEPPVPYTRAIAHEAGWRWHIALQHRVGCGWVFSSAHMSDDEAAAKLKAANDNAPMVREPWLVSFRTGRRLKAWNKNVVSLGLASSFIEPLESTSIHLTLSAVTRLVQMFPFAGIDDSIVDRYNDVSRDELEHVRDFIILHYHLNQRDEPLWRDCREMKLPDALAQRIAVFRDTAYAWQGEDELFRLDSWTHVMLGQGVVPREHHPLTRGLGDTDMARLFQGIRAPINRMVEAMPSHGEFLKHYCPADPAVWNLRRSMPVG

SEQ ID NO: 88992 - protein, 498 aa, Cellvibrionaceae bacterium
  misc_feature (1)..(498): tr|A0A545SQU9|A0A545SQU9_9GAMM Tryptophan 7-halogenase OS=Cellvibrionaceae bacterium R142 OX=2591008 GN=FKG94_ 25800 PE=4 SV=1
MHPKQRIVILGGGTAGWMAANLMATKWAHLDFDITLIEAPDIGIIGVGEGSTPPLKGFMDTIGAQESEWMADCNATYKVGISFKNWSTKPGFSRYFHPFLAQPDEFTAPAFFHNSFLRRKGIDLEGHPDHFFLASHLAEHKLAPVVPEHFPFEINYGYHFDSALLGKFLGRKAATKGVKYRQAKVVDVALDEQGNIAGLHTEQGETIRADLYVDCTGFRAQLIQQALKVPFRSYAENLFNDAAVVLQTEQRPEIACQTVSTALKYGWAWAIPLTSRIGNGYVYSSSFCDADHAETELRAHLGLLEADVQARHLKMKVGRVEQHWAKNCLAVGLSQGFVEPLEATALDMVQETVARFIEAFEKGGFTDTHRDDYNRRISSRFEAVRDYIVCHYRVNSRTDTDYWLENARNEKVSASLRSILHAWVSGQNITDELQRQKLDIYFPNVSWNCLLAGYGIYPTQAQLKPGNALANKYKTADIHEFIRRCALNFKPHREQLSA

SEQ ID NO: 88993 - protein, 509 aa, Brevundimonas sp.
  misc_feature (1)..(509): tr|A0A0Q7DZA5|A0A0Q7DZA5_9CAUL Tryptophan halogenase OS =Brevundimonas sp. Root1279 OX=1736443 GN=ASC65_15710 P E=4 SV=1
MTRPLQVVIVGGGTAGWMTASGLVGSLTQQQVQVRLVESDEIGIVGVGEATLPQMREFNDLIGIVESDMMRKTNATFKLGIEFRDWGFKGSNYVHPFGAHGHPMGGVAFHHQWTRARLNGQAEDIGDYSFAIVASRRNRFDFPADDKSAINSTFDYAYHFDAGLYARYLRGWAEARGLVRTEGKVVDVTLDPHSGDVASVTLESGEVIAGDLFIDCSGFRGLIIGQALNGPFEEWGKWLPCDRALAVPTERSADFTPYTRSTALEAGWQWRIPLQHRTGNGYVYSSAFISDDEAHARLMGNLDGKPLAEPRPIKFKSGRRTASWTKNCIAVGLASGFLEPLESTSIYLTQVAVTTLLKLLPRGNVDPALAAEFNRRIDNEYDRVRDFLILHYQVNARQDGDLWRQCREMEIPDSLREKMALFEHRGHIAQYKDGLFSPPSWLSVFVGQGMSPRGYHPMTDRMPLDQAAAEMADIRRRISDRVDAMPAHDVFVADYCGGEAPQRAAGAGA

SEQ ID NO: 88994 - protein, 444 aa, Variovorax paradoxus
  misc_feature (1)..(444): tr|T1XF39|T1XF39_VARPD Tryptophan halogenase domain-con taining protein OS=Variovorax paradoxus B4 OX=1246301 G N=VAPA_1c40960 PE=4 SV=1
MTPGPFTSTEPDVVVIGGGPAGSTVAALLADKGHDVVLFEKAHHPRFHIGESLLPMNMPLFDRLGVRTEVEAIGIAKHGAEFVSPWHDHTSHFFFGEAMDKSFPYAVHVRRSEFDELLFRHAARRGARTFEGQRVMGVDMDAGKGADNRALVKIKAEDGTETSWRPRFVIDASGRDTVLSNQFDAKQRNRKHASAALFGHFENAERRPGRYEGNISLFWFDHGWFWYIPLKDGTVSVGAVASPAYFKRRKGTLEEFLMETIALAPKLAARLKNATLMEGATTTGNYAYDSKFCRGDRFMMVGDAYAFVDPMFSSGVYLAMNSAFESAAAADFWLKGEMKEAEKAFRRFDKVMKHGPRMFSWFIYRITSPAIRRLFMNPRNIWRMQEALLSILAGDLFRNTPIGPRFWGFKVTYYASCIGILPQAIKTWAWRRRNLKESLETAKS

SEQ ID NO: 88995 - protein, 479 aa, Sphingomonas sp.
  misc_feature (1)..(479): tr|A0A0Q4PHF3|A0A0Q4PHF3_9SPHN Tryptophan halogenase OS =Sphingomonas sp. Leaf67 OX=1736230 GN=ASE90_14360 PE=4 SV=1
MSAAALSRALGTRCAITLVESDDIGTVGVGEATIPPIKLFNDTLGIDEAEFLRETKGSFKLGIEFVDWARHGHRYFHPFGTFGKPFDLVAVHQHWLAARAAGSPAPLDDLSMAWGVAKHGRFARPMGDPRSVASTFDYAYHFDAGLYAAFLRRYAEARGVVRVEGKVADAALDGQTGHVASVTLHDGRTLAADLFVDCSGFRGLLIEGALATGYDDWTHWLPCDRAVAVPCATGGDGLTPYTRSTARAAGWQWRIPLQHRTGNGYVYCSRHLSDDEAAATLMANLDGPALADPRFLRFTTGRRRRFWNRNVVAIGLASGFMEPLESTSIHLIQTGIAKLLAYFPTRDFDPLPIDEYNRVAGTEYERIRDFLILHYKLTTRDDAPLWRDCAGMDVPDTVALKIAHFRHGGRLVARDMDLFGPPSWLAVHIGQLNNPVSLDPLLDPTNSASFVDRLSAAIDAMAKSMPTHAAFLQQIGATR

SEQ ID NO: 88996 - protein, 562 aa, Maritimibacter sp.
  misc_feature (1)..(562): tr|A0A2D9YTB0|A0A2D9YTB0_9RHOB Tryptophan halogenase OS =Maritimibacter sp. OX=2003363 GN=CMH12_18660 PE=4 SV=1
MAKPIREITIVGGGTAGWMAAMLLQTGLQQGRKLKITLIESPDIATVGVGEATVPNMPRTLHQCGISERDFFRTCNASFKLGVDFTDWNRDRAGKPISYINPFARPPALGHQELGVYYSDLGAGPLDFVQTYTPTVDFIRACRAPRMSGAGEFDQKLKIGYAYHLDAGKFAGLMQKTCTEAGVRHLRDNVQDVELDDQGYVAALQLERSGRHPVELVIDCTGFRGLIINKALNEPFVSYSRYLANDRAMAVQIPHRDKQKLEPVTRSTALGAGWSWRVPLYNRIGTGYVFSSAHRTDDEARDEFLAHLGPDAKDAEPRVIPMRIGRNRRAWVKNCVALGLAGGFIEPLESTAIHMIDMSVRWLTTYFPDSDFAPPLRDHFNRLTDRMYDEVRDFIVLHYALGNRTDSQYWIDARETLEVPDRLAELLETWRYALPGPLDLPKAVLFDHSTYQAVLLGKRVYETGYGRGKLARGTRLDAAQWKSYLGQMRAQVKQKVEVACDHRSYLAEMRGEIRPGAAARQPAMGGFAMPQATVPLPGTPLSHLPKAPPAPDTLDDESASLL

SEQ ID NO: 88997 - protein, 504 aa, Sphingomonas sp.
  misc_feature (1)..(504): tr|A0A0Q4Q4B5|A0A0Q4Q4B5_9SPHN Tryptophan halogenase OS =Sphingomonas sp. Leaf67 OX=1736230 GN=ASE90_10550 PE=4 SV=1
MPKPATVSTTDALVRQVVIVGGGTAGWMAAAALSRALGPVGRHITLIESDAIGTVGVGEATIPPIRAFNAMLDIAEDRFLRETMGSYKLGIEFVDWGRIGQRYFHPFGAAGQDFHGVPFHQLWLRHRARGGDTGLTDYSMCTVTAREGRFGIPPAGDRTPLAHIAHAYHFDATLYAALLRRVAEEQGVVRHEGRVVQVDRDGGTGDVTAVRLDDGRTIAGDLFVDCSGFAGLLIEGTLATGYHDWRHWLPMDRALAMPTTRLDPLPPYTRATAHAAGWQWRIPLQHRTGNGHVYSSGFTTAEDAERLLRDHAPGEPCGDVRSLSFTTGMRRKAWSHNVVALGLAAGFVEPLESTSIHLIQHGIQRLIALFPGAAVHPAERDAYNADMARAFEAVRDFVVLHYKATTRNDSDFWRTMRAMTVPDSLSHRIELWRAQGRLIPQAGDIFAVPSWAAVLTGQELWPAAYEPGVDRLSADSVEAALRDMHAAYRRAARSLPMHAAALPR

SEQ ID NO: 88998 - protein, 506 aa, Cellvibrionaceae bacterium
  misc_feature (1)..(506): tr|A0A545SLV4|A0A545SLV4_9GAMM Tryptophan 7-halogenase OS=Cellvibrionaceae bacterium R142 OX=2591008 GN=FKG94_ 27825 PE=4 SV=1
MRDGPIKKVVIAGGGTAGWMTAAAMAKLMGKNLDITLVESDAIATIGVGEATIPTLVFFNRLLDIKEPEFLAATQGTYKLGIQFENWRDIGEDYMHAFGTTGKDCWACGFQHFWMKGRELGVSSGFGDYCLERRAAESLKFGHLPSNGLNYAFHIDASLYAGFLRKFSEKYGAKRLEGKIDKVVTDTETGFIESLTLTSGEVVEGDFFIDCTGMRALLIEQALHAGFESWSHWLPCDSAIAVQTNTVREPVPYTRSIARESGWQWRIPLQHRVGNGLVYCSRYLDDASARAMLLENVEGETLTEPLSIKFHAGRRRKQWFKNCLAVGLSSGFLEPLESTSIHLIQQNIVRFLRMFPAAGISQAEVDEFNRQADFDIERIRDFIILHYKVTDRADSAFWRHCRAMEIPETLKNKVDIFEKTGHVYREGNELFVDSWQQVMLGQGLEPQRYHPLVDTMTERELVDFLQHIKSNVDRTVAGLPEHNSYLASYIKPASQSVGAKTEVPSY

SEQ ID NO: 88999 - protein, 604 aa, Myxococcus xanthus
  misc_feature (1)..(604): tr|Q1DCT1|Q1DCT1_MYXXD Tryptophan halogenase OS=Myxococ cus xanthus (strain DK 1622) OX=246197 GN=MXAN_1285 PE= 4 SV=1
MFPVRPLQSNGCVRCMELLMSGAWEGKLYDVIVMGGGPAGATLAARLRKDPGLSVAIFESERFPREHIGESFVPSAVSSLQESGALGRVLSSDCWIKKGGGYYSWDAVRPWSTFFEHKAYERDGYRRWAFHANRAELDDILLRHAEENGAEVFEGTPVKQVYRRDGFTEVDLGEKGSARCKVFVNASGRYSVTSLGGPREFLSSYRNIAIWSYIRKGKPAQSLPGDWNIFRESGVSPIGSFAFEDGWFWYIPIPLEVDGRREVVHSLGLVTDPRGLKSKRDYMSPSVFMETARKVPFLCDLVADAELIYDEFRTTANYSRISHQMCSWENREIRVGDAAFFVDPLFSTGVHFALHHTAAAAVLVRAAFDEAMPEQHREDLWHDYDQMLRKQAQVFSLAIDQWYNEISLAHPGSVYWRERSERATFEVRNATFHYLVNGSLDEDLLHVISQGNDAVEALSETGAWRTSFAQLQRLRPADDALVQLMPNVKFRQSVTLEHPIADSAEDKLDARPQAFDHGPYWESPERHAHEVAPRFGRPSPCLRFYFEDGDHQDTVRILWNRPNSALLERLSQPHAYGPLLAGCSLSERGLLDQLLLKGMMRVIP

SEQ ID NO: 89000 - protein, 501 aa, Sphingomonas sp.
  misc_feature (1)..(501): tr|A0A0Q4PYF6|A0A0Q4PYF6_9SPHN Tryptophan halogenase OS =Sphingomonas sp. Leaf67 OX=1736230 GN=ASE90_14300 PE=4 SV=1
MEAGDRIRRIVILGGGTAGWMTAAALSRSFGSAVDVTLLESEAIGTVGVGEATIPTIHWFNELIGIDEPEFLRATKATFKLGIEFVDWTAPGHRYFHPFGQFGAALPGVAFHHRWLKAQADGMDVPLPALSLAAQLARQGRFAKPVGDARSILSTLGYAYHFDAGLYATYLRRLSEAAGVRRIEGKLQKVDRDGKTGFVTALTTERGERIDGDLFIDCSGFRALLIGDAMGEPFEDWSHWLPCDRAVAVPCTRLPATTPYTRSTARAAGWQWRIPLQHRTGNGYVFASRYVSEDEATATLMGNLDGEALAEPRLLRFTAGTRRRPWRDNVVAIGLSSGFLEPLESTSIHLIQSGITKLLTLFPDRNCDPALADRFNDVFARDMDGIKDFLILHYHATSGHSEPLWQHCRTMELPGTLVAREAQYRRSGRLILDGDELFRDASWLAVLNGQGIVAEGYNPLADAIDADGNRAQVRQIADVIARAAPSLPFHDVALAQAMGAT

SEQ ID NO: 89001 - protein, 506 aa, Brevundimonas sp.
  misc_feature (1)..(506): tr|A0A0Q7EDE5|A0A0Q7EDE5_9CAUL Tryptophan halogenase OS =Brevundimonas sp. Root1279 OX=1736443 GN=ASC65_12575 P E=4 SV=1
MTDNRLKRIVIVGGGTAGWMAAAVISKSLRPGYCAIELVESPEIGTVGVGEATIPPIQALNRQLGIDEDEFVRRTQATFKLGIQFQNWGSLGNEYVHPFSTYGADLEGLHFHHHWLRAKANGIEAGSLDDYSLVIQAMKAGKFARPSQDPRNVLSRMAHAFHFDASLYGAFLRDMAMGRGVRRHERKIVGVNLNSETGFVESLSLDNGETLAGDLFIDCSGFRGLLIEGALQTGYEDWSHWLPVDRAQAVPCEAVGAPTLYTKSTAHDAGWQWRIQLQHRTGNGHVYCSSFTTDEAARDTLMANLDGKPLAEPRMLRFLTGRRKKAWNKNVVCLGLASGFIEPLESTSIHLVQTGVTTLMSFFPDLRFDQTDIDKYNAIIQEEYEHARDFVILHYHATQRDDSEFWNHVRTMSIPDSLKTRVDLFRSRARVWGKQEDLFAFTSWVAVMLGQGIMPSGYDPMADQKPLAELATKLEGMRGVIQRGVASMPTHQQFIDRHCRAYDDAA

SEQ ID NO: 89002 - protein, 505 aa, Xanthomonas vasicola; identical to SEQ ID NO: 86395
  misc_feature (1)..(505): tr|A0A5K1MVD3|A0A5K1MVD3_XANVA Tryptophan halogenase OS =Xanthomonas vasicola pv. vasculorum NCPPB 206 OX=10941 81 GN=KWI_0120080 PE=4 SV=1

SEQ ID NO: 89003 - protein, 538 aa, Burkholderia cenocepacia
  misc_feature (1)..(538): tr|A0A109EGE9|A0A109EGE9_9BURK Tryptophan halogenase OS =Burkholderia cenocepacia OX=95486 GN=AS149_29825 PE=4 SV=1
MSNPIKNIVIVGGGTAGWMSASYLVRALQHHANITLVESAAIPRIGVGEATIPSLQKVFFDFLGIPEREWMPQVNGAFKSAIRFVNWRKSPDGSRGDHFYHLFGNVPNCDGVPLTHYWLRKREHGFQQPMEYACYPQTDALDAKLAPCLADGTRQMSHAWHFDAHLVADFLKRWATERGVKRVVDEVEQVHLNDRGYIASLSTKEGRTLEADLFIDCSGMRGLLINQALKEPFIDMSDHLLCDSAVASAVPADDARDGIEPYTSAIAMNSGWTWKIPMLGRFGSGYVFSSKFTSRDQATADFLDLWGLSDKQPLNQIKFRVGRNRRAWVNNCVAIGLSSCFLEPLESTGIYFIYAALYQLVKHFPDTSFDPRLADAFNAEIVYMFDDCRDFVQAHYFTTSRDDTAFWRANRHDLRLSDAIKEKVERYKAGLPLTTTSFDDSTYYDTFDYEFKNFWLNGNYYCIFAGLGLLPDQSLPLLRHRPESIDKAEAMFARIRREAERLRATLPTNYDYLRSLRAGDAGLSRSQPGPTLATPEIL

SEQ ID NO: 89004 - protein, 500 aa, Planctomycetes bacterium
  misc_feature (1)..(500): tr|A0A5C5XD42|A0A5C5XD42_9BACT Tryptophan halogenase OS =Planctomycetes bacterium Pan54 OX=2527969 GN=Pan54_125 30 PE=4 SV=1
MTDNLSVDVAVIGAGFGGSLTALLLNRIGLRVVLLESGSHPRFAIGESSTPIADLILGDLAQRYDLPSLLPLSHYGTWKQTYPELNCGLKRGFSYFKHRPEQPFHSLPDHSNELLVAASRDDEHSDTHWMRSDVDTFLVNQVKAAGIPYFDQMKLTHQQHWPTWQLRATSETASLAIRAEFLIDATGEAAFLPRALDLSSCLHQLRTSSRSLFAHFTDVTPWQDILTSQQSDTNIHPFCCDAAALHHVLEEGWMWQLRFDNGVTSVGITLDADRHPLNSVISADKEWEAILNRYPSLSRQFASAQIVAPERGLTRTGRLQRQWSQIVGDNWALLPHTAGFIDPFFSAGIAHTLCGVENLVHLLENYWGRESFSTELRVYEMMIKSEFELIDKLVQGSYLSLRNFDLFVPFTMLYFAAATTYEHRRLITGYSPGRAFLCADDGEYRRIVCQIRHNLEIALRQTDLQTTHRFFDDVAQAIAPYNIAGLCDLNVSNMYRYTAV

SEQ ID NO: 89005 - protein, 538 aa, Burkholderia cenocepacia
  misc_feature (1)..(538): tr|A0A3N9GUD6|A0A3N9GUD6_9BURK Tryptophan 7-halogenase OS=Burkholderia cenocepacia OX=95486 GN=DF039_31150 PE= 4 SV=1
MTHPIKNIVIVGGGTAGWMSASYLVRALQHHANITLVESAAIPRIGVGEATIPSLQKVFFDFLGIPEREWMPQVNGAFKSAIRFVNWRKSPDGSRGDHFYHLFGNVPNCDGVPLTHYWLRKREQGFQQPMEYACYPQTEALDAKLAPCLADGTRQMSHAWHFDAHLVADFLKRWATERGVKRVVDEVEQVHLNDRGYIASLSTKEGRTLEADLFIDCSGMRGLLINQALKEPFIDMSDYLLCDSAVASAVPADDARDGIEPYTSAIAMNSGWTWKIPMLGRFGSGYVFSSKFTSRDQATADFLDLWGLSDKQPLNQIKFRVGRNRRAWVNNCVAIGLSSCFLEPLESTGIYFIYAALYQLVKHFPDTSFDPRLADAFNAEIVYMFDDCRDFVQAHYFTTSRDDTAFWRANRHDLRLSDAIKEKVERYKAGLPLTTTSFDDSTYYDTFDYEFKNFWLNGNYYCIFAGLGLLPDQSLPLLRHRPESIDKADAMFARIRREAERLRATLPTNYDYLRSLRAGDAGLSRSQPGPTLATPEIL

SEQ ID NO: 89006 - protein, 530 aa, Saccharothrix espanaensis
  misc_feature (1)..(530): tr|K0K1W3|K0K1W3_SACES Tryptophan halogenase OS=Sacchar othrix espanaensis (strain ATCC 51144 / DSM 44229 / JCM 9112 / NBRC 15066 / NRRL 15764) OX=1179773 GN=prnA PE= 4 SV=1
MEDRRIKKVVVLGGGTAGWMAAAYLGKALGPGVNITVLEAPAIPKIGVGEATVPNLHKTFFDFLGIAEEDWMRECNASFKMGIKFTNWRTPGRGEATARPHGDSVDHYYHLFGLLPNHENQPLSHYWTHKKLSGQTDEPFDYACYREPPIMDQKLSPRFLDGTKWTNYAWHFDANLVADFLRRFATTKQGAVHIEDKMTEAVIDQRGHVSALRTEQGRTIDGDLFIDCSGFRGLLINQAMKEPFLDMSDHLLNDSAVATQIPHDDDAEGVEPYTGSIAMSSGWSWKIPMLGRFGTGYVFSSRFQTRDDATLEFCNMWGVDPETQPLNHIKFRVGRNRRTWVKNVVSIGLASCFLEPLESTGIYFVYAALYQLAKHFPDKNFDSILQDRFNAEIETMFDDSRDFVQGHFSFAPRNDTAFWQACKELKLADDFQEKVRMYKAGLAVNMPITDESTYYSSFDAEFRNFWNNSNYYCIFAGLDYLPDHTLPALAARPDVLDSADAVFAEIKQKQKELMATLPTTHEYLKQLHGK

SEQ ID NO: 89007 - protein, 506 aa, Xanthomonas citri
  misc_feature (1)..(506): tr|A0A2K2QZY8|A0A2K2QZY8_XANCI Tryptophan 7-halogenase OS=Xanthomonas citri OX=346 GN=xavtCFBP7764_21260 PE=4 SV=1
MIPAPLRNIVIVGGGTAGWMAAAAFARVLGPTFKVQLIESEQLGTVGVGEATVPHIKAFNNLLGIDEAEFVRQTQGSFKLGIEFVDWQRPGSTYMHGFGTQIGHPLGLLPFHQYWIKQHARGKAQPLGAYTLNTVAAARGKFMTSAGDVPANSPLANIAYAYHFDATQYAHFLRRYSQQRGVTRIEGLVEQVQLHPESGHVQSLQLASGQVVHGDLFIDCSGFGGLLIEQALHTGYHDFTHWLPCDRALAVPCEKVGPPAPYTRSTARAAGWQWRIPLQHRTGNGYVYCSAHISDDEAAATLLANLDGKPLADPRPLRFTTGRRKQCWNRNVVALGLASGFLEPLESTSIHLIQSGISKLLELFPREGISPVLVQRYNDRLAFEFDRIRDFLLLHYHATERDDSAFWRHCRHMPITPELQATLDLFRDSGRFYRNAEEMFAEISWVQVLVGQGILPQGYHPLVDQVPDRDAEGFLASVAQTISHCVDVMPSHQQFIDRYCKAATLP

SEQ ID NO: 89008 - protein, 520 aa, Saccharothrix espanaensis
  misc_feature (1)..(520): tr|K0JZZ6|K0JZZ6_SACES Tryptophan halogenase OS=Sacchar othrix espanaensis (strain ATCC 51144 / DSM 44229 / JCM 9112 / NBRC 15066 / NRRL 15764) OX=1179773 GN=BN6_3586 0 PE=4 SV=1
MNTRNPQNVVVVGGGTAGWMTASYLKAAFGDRISVTLVESGRIGTIGVGEATFSDIRHFFQFLDLKEEDWMPACNATYKLAVRFEDWREPGHHFYHPFEQMRSVGGFPLTDWWLQNGLTDRFDKDCFVIASLCDAGRSPRHLDGRLFEQDYVEGGEEPVGLTMSEHQGKTQFPYAYHFEAALLAKYLTKYSVDRGVRHIVDEVQDVRLDERGWIDHVVTKEHGELHGDLFVDCTGFRGLLINKALGVPFQSYQDTLPNDSAVALQVPLDMQARGLRPCTTATAQEAGWIWTIPLFGRIGTGYVYAKDYCSPEEAERTLREFVGPGAEDVEANHIRMRIGRSRESWANNCVAIGLSSGFVEPLESTGIFFIHHAIEQLVKFFPAADWHPKLRDMYNSAIANVMDGVREFLVLHYIGAKRDDTQYWKDTKTRAIPDGLAERLERWKVQLPDSENIFPYYHGLPPYSYMCILLGGGAIPLRPSPSLALSDDTAARKEFAAIRDKARHLVERLPAQYEYHARLH

SEQ ID NO: 89009 - protein, 538 aa, Burkholderia cenocepacia
  misc_feature (1)..(538): tr|A0A3N9FA75|A0A3N9FA75_9BURK Tryptophan 7-halogenase OS=Burkholderia cenocepacia OX=95486 GN=DF047_24675 PE= 4 SV=1
MTHPIKHIVIVGGGTAGWMSASYLVRALQQQANITLVESAAIPRIGVGEATIPSLQKVFFDFLGIPEREWMPQVNGAFKSAIRFVNWRKSADRPHGDHFYHLFGNVPNCDGVPLTHYWLRKREQGFQQPMEYACYPQTEALDGKLAPCSLDGTRQMAHAWHFDAHLVADFLKRWATERGVKRVVDEVEQVRLNDRGHISSLSTKEGRTLEADLFIDCSGMRGLLINQALKEPFIDMSDYLLCDSAVASAVPTDDAREGIEPYTSAIAMNSGWTWKIPMLGRFGSGYVFSSKFTSRDQATADFLDLWGLSDKQPLNQIKFRVGRNRRAWVNNCVSIGLSSCFLEPLESTGIYFIYAALYQLVKHFPDTAFDPRLADAFNAEIVYMFDDCRDFVQAHYFTTSRDDTPFWRANRHDLRLSDAIKEKVERYKAGLPLTTTSFDDSTYYETFDYEFRNFWLNGNYYCIFAGLGLLPDRSLPLLRHRPESIDKAEAMFARIRREAERLRSSLPTNHDYLRSLRERDAGRSRSQSGPTLATSETV

SEQ ID NO: 89010 - protein, 505 aa, Xanthomonas perforans
  misc_feature (1)..(505): tr|A0A0G8ZSJ0|A0A0G8ZSJ0_9XANT Tryptophan halogenase OS =Xanthomonas perforans OX=442694 GN=BJD13_01635 PE=4 SV =1
MTQAQIRKVVIAGGGTAGWIAACALSHQFRNLLDITLVESEQIGTVGVGESTVPPIRTFHRFLQIDEQEFLRAVAGTFKLSISFEHWRRQGERYIHPFGITGQSTLVCAFHHLWLESQRRGMPGSFGDYCLETVASRVDRFALHGEPAVNYAYHLDAALYAKFLRARSEGCGVKRVEGRIQQVTVQPHSGDVASLVLEDGHVIEGDLFIDCSGFRGLLIEQTLHTGYEDWSHWLPCDRAVAVQTEALGPPVPYTRAIAHEAGWRWHIPLQHRVGNGLVFSSKHLSDDEAHAKLLRDVAAPAVKEPWMVPFRTGRRLKAWNKNVVSLGLASGFIEPLESTSIHLTISAVVRLLALFPADGIAPSQVQLFNDVSRAEMEHVRDFVTLHYHATQRDEPLWQQCRQMELPESLALRLRAWRERAHAWQGADELFRVDSWTHVLMGQGIAPEQHHPLTRAFSDHDLRRLLDGIAQPIQHAVQQMPSQQDFIERYCKAGEQVWGMRSPVPA

SEQ ID NO: 89011 - protein, 518 aa, Cellvibrionaceae bacterium
  misc_feature (1)..(518): tr|A0A545TP22|A0A545TP22_9GAMM Tryptophan 7-halogenase OS=Cellvibrionaceae bacterium R142 OX=2591008 GN=FKG94_ 12970 PE=4 SV=1
MDSRDAIKHIIIVGGGAAGWLSACHLAKRLHADRSGAVKVTLVESSEIPTIGVGEGTVPAIRQSLRSLGISESEFVRECDATFKQSIKFVNWLRPEAEGGDCYHHVFDYPNITDIDLTPYWLLGAAEQTSYVDAVSVQGRICDRGLAPKNITQAEYEGITNYAYHLDAAKFSRFLTRHATERLGVRHVLASVQDVELNDSGEISAIVTDSAGTLSADFFVDCTGFASLLLGRKMAVGFTDKSDVLFVDHAVAMQVPYAAADTPIPSHTIATAQEAGWIWDIGLSARRGTGYVYSTRYTDHERAERVLRAYIGSAADKLDSRRIPMRVGYREKFWHKNCVAIGLSQGFVEPLEATGLLVYDATARMLAEQFPACKAAMPEIARRFNRHVQYGWDRVIDFIKLHYYLSKRDDSDFWRDNRRPDSAPASLLDNLALWRYQPPSDYDFPSRLDIFNLSNYLYVLYGMEFFTDMETLAHRFPETARARQAFAYTERVFQQVAGGLPGHRELIERVRQFGFQKV

SEQ ID NO: 89012 - protein, 506 aa, Xanthomonas pisi
  misc_feature (1)..(506): tr|A0A2S7D043|A0A2S7D043_9XANT Tryptophan 7-halogenase OS=Xanthomonas pisi OX=56457 GN=XpiCFBP4643_16390 PE=4 SV=1
MIPAPLRNIVIVGGGTAGWMAAAAFARVLGPTFNVQLIESEQLGTVGVGEATVPHIKAFNNLLGIDEAEFVRQTQGSFKLGIEFVDWQRPGTAYLHGFGTQIGHPLGLLPFHQYWIKQHARGKAQPLGAYTLNTVAAVRGKFMTSAGDVPANSPLANIAYAYHFDATQYARFLRTYAEQRGVTRIEGLVEQVQLHADSGHVQSLQLASGQVVSGDLFIDCSGFRGLLIEEALHTGYNDFTHWLPCDRALAVPSENVGPPTPYTRSTARAAGWQWRIPLQHRTGNGYVYSSAHISDDEAAATLLANLEGKPLADPRPLRFTTGRRKQFWNRNVVALGLASGFLEPLESTSIHLIQAGISRLLELFPREGISPVLVQRYNNRLAFEFDRIRDFLVLHYHATERDDSAFWRHCRTMPITPELQTTLDLFRDSGRFYRNAEEMFAEISWVQVMVGQGILPRGYHPLVDQVPDHDAERFLASVAQTIGHCVDVMPTHQQFIDRYCKAAAPR

SEQ ID NO: 89013 - protein, 506 aa, Xanthomonas citri; identical to SEQ ID NO: 86421
  misc_feature (1)..(506): tr|A0A2R2WQJ7|A0A2R2WQJ7_XANCI Tryptophan halogenase OS =Xanthomonas citri pv. aurantifolii OX=76802 GN=TP45_21 155 PE=4 SV=1

SEQ ID NO: 89014 - protein, 538 aa, Sphingomonas sp.
  misc_feature (1)..(538): tr|A0A430DHB5|A0A430DHB5_9SPHN Tryptophan 7-halogenase OS=Sphingomonas sp. ABOLG OX=1985880 GN=CA236_17830 PE= 4 SV=1
MDGRLLWVKRRVGAPTEVSVGVERQVANIVIVGGGTAGWLAAATIAACADPTAQPPVQVTLIESPDVPTIGVGEGTWPTIRRTLARIGISEAEFLLACDASFKQGSRFDGWRTRAPDDSYLHPFSAPVEADPRALVAAWQAGEEEGFAAAVTPQARACALDLAPRQRAMPDYAGALNYAYHLDAVKLAALIRRHATQRLGVRHVRDHVLSVDRRHDGDIAAVRCRDHGAMEGDLFIDCTGHAALLIGGAFGVPFIDRGHELFNDRALAVQVPVGAGSAIASTTNATAHEAGWIWDIGLPTRRGVGCVYSSAHLTDDAAEGILHAYLARTAPAADLDALAPRTLTFRSGHRTRFWERNCLAIGLSSGFLEPLEASAIVTIELALDALVANFPATRASMDAHADRFNALFRYRWDRIVDFLKLHYVLSDRDQPYWRDNRDRASIPPSLSGLLAIWREQPPSGHDLGMVDEVFPAASYQYVLYGMGMAPPPPGPMRIEGVPAASAALRQAAQRARALAASLPTNRAYLDALRADRQNEIIA

SEQ ID NO: 89015 - protein, 526 aa, Rhodanobacter glycinis
  misc_feature (1)..(526): tr|A0A5B9E0F5|A0A5B9E0F5_9GAMM Tryptophan 7-halogenase OS=Rhodanobacter glycinis OX=582702 GN=CS053_15710 PE=4 SV=1
MARLQKILVVGGGTAGWLTACYLAKSLNSVAPGSIKVELVESPRIGLLGVGEATFPSIRGTLSAIGLDERRFLAGSTGTFKQGIRYRHWVRPQGAPGASDFFHPFSMPSQRTGGPELLPYWLLGAAPAGVPFADAVSMQKRLVDGNRAPKRAKDADFHGPMNYAYHFDAARVAEVLAEHGQTELGVVRHLATVERAELDEQGAIARIVTREAGELSADLYVDCTGLRGYLIDGAMKSPFRSRRDVLFVDRAVAMQVPYPQPDSPIPCYTMATAQEAGWIWDIGLQQRRGCGYVYSSQHSDATRAEAVFRQYLGAAAEGVTAQHIRFETGYRPEHWRKNCVAVGLAGGFVEPLESTGIALVELGAYLLTHLLPGDVDDMERTARHYNEMVVARYDRIIDFIKMHYCLSQRRDTAFWLDNANPDSIPDTLKDRLALWKHRPPHRLDFVGDLEMFLVSSWQYVLYGMEFKTDLEPMRSVYTRVDDARREFAMIQQMAGHALGDLPGHRELVEQMVREYRQRNEVAEAVA

SEQ ID NO: 89016 - protein, 500 aa, Pseudoalteromonas porphyrae
  misc_feature (1)..(500): tr|A0A0N1EMU7|A0A0N1EMU7_9GAMM Tryptophan halogenase OS =Pseudoalteromonas porphyrae OX=187330 GN=ADS77_04560 P E=4 SV=1
MHNIKQVVIAGGGSAGWMTAAALSKLLGEHVNITLVESAQIGTVSVGEATIPQIRQFNQLIGIDENEFLSATSGTFKLGIEFIDWGQIGQQYMHPFGPYGVNLNGIAFHHYWLKSVKNTNPAPILDYCLEGHAAKLNRFDRIVGQTTKGHSTLNYAFHFDAVKYAEFLSTLAIKQGVKHIQGTISQVTIEPSNGHIKDLILDDGQVISGELFIDCTGFKGRLINQALHVGFESWQHWLPCDSAIAIASESLPELKPYTQATAHKAGWQWQIPLQHRVGNGRVFASGFTSAEQQIAQLAAQLPSKAVTEPRQLNWQNGRRLKAWQKNCVAIGLSAGFLEPLESTGLQFIQSAILRLISLFPSCAMAKVDADTYNRYTEQEITAVRDFIICHYKVTKRSDSEFWRYCQHMDVPNTVSERLALFAQNGRLFRENNELFNELSWFSVLHGQGIEPQGYHPLVNSLSDAACEQYMQQIKTMIGQTARSLPMHSEYVARHCRYSKS

SEQ ID NO: 89017 - protein, 515 aa, Sphingosinicella sp.
  misc_feature (1)..(515): tr|A0A2P7QSC9|A0A2P7QSC9_9SPHN Tryptophan halogenase OS =Sphingosinicella sp. GL-C-18 OX=2116704 GN=C7I55_11390 PE=4 SV=1
MTREVIVVGGGTAGWIAAAYLAKRLNAGSPGGINLTVIESPDIPVIGVGEGSFPSLRKTLNVIGVDEADLVREANATFKQGIRFSNWRAPDPSGSQHRYFHPFQVSDDHDGLDLLPYWLMGVAGDAPWAAVNTVQQAAADACLAPKLPAHPPFAGPLTYAYHFDAVLLGRLLRKRAVALGARHIADTVTRVELAEDGSIAALHCRDTGRVRADLYIDCTGFRAQLIGDALGIPFHSRRNELFVDRAVALQVPHAEPDGPIASQTFATAQDAGWIWDIGLHERRGAGYVYSSSHIDDETALRALRDYVGPAADALEPRILQFEAGYRQVQWHKNCVAIGLSSGFIEPLEATGIGFAEIAALMVVNLFPWAGDYEVSARQFNAIMVKRYDHVLDFIKLHYCLSDRTDSTFWIENRDPASWSPALRERLENWRHRAPDFMDVDLNHDIFLAANWQYVLYGMGFETDLSAQAGAFRFYDDARRTFADIRSQQANALQRLPSHRTLVQQVARPGFHFPVR

SEQ ID NO: 89018 - protein, 496 aa, Sphingomonas panacis
  misc_feature (1)..(496): tr|A0A1B3ZAS7|A0A1B3ZAS7_9SPHN Tryptophan halogenase OS =Sphingomonas panacis OX=1560345 GN=AWL63_11695 PE=4 SV =1
MNPAQTIRRVVIAGGGTAGWVAAAALSKHLGALLDIILVESDEIGTVGVGEATIPTIRTFHRFLEIDEREFMRATQATFKLGIAFENWARRGDRYVHSFGRVGQSIWMGDFQHMWLRGREAGVADDLGAYCLELAAAEAGKFATSDTAKINYAYHFDASLYAGFLRRFSEAKGVTRIEGRIGGVRQNAETGDIEALDLADGRVIEGDLFVDCTGFRGLLIEQTLKAGYEDWSHWLPTNRALAVQTKAVAPPLPYTRAIAHEAGWQWQIPLQHRVGNGLVYCSDFLSDDAARAKLLAQIDGEPITEPRLIRYVTGRRKRVWDRNCVALGLASGFVEPLESTSIHLIMIGVTRLIQAFPFGGVTPSLVKHYNDLAETELERVRDFIILHYHLTERRDDPFWERCRTMPIPDTLAQRIALFHEAALTPQTADDLFQADSWLQVMLGQRLEPTGYHRMGHMLSVEHLRRAFADVRDGIAGAVARMPTHQAFLEHYCGAGA

SEQ ID NO: 89019 - protein, 505 aa, Sphingosinicella sp.
  misc_feature (1)..(505): tr|A0A2P7QGH1|A0A2P7QGH1_9SPHN Tryptophan halogenase OS =Sphingosinicella sp. GL-C-18 OX=2116704 GN=C7I55_23670 PE=4 SV=1
MSNRAQNEGDGPDGPIRSIVIVGGGTAGWMSAAFLANKLRHLPITITVVDSAQIGTIGVGEATVPAIRDFLSAVALGEMDVLRETEGTVKLGIRFADWAEVGHDFFHPFGLYGVPARGVAFHHYWLKLRAAGDALPLADYCLCTQLAEQGLFLSPPDRPTSDLGIFNFALHFDASRFAAMLRRLSLANKVRHIDGLIERVEQHPERGDVTAVVLAGGARVEGDLWIDCSGFRGLLIAGAQDVPFVDWRHWLPCDRAVAIGCAEAQPHKPVTTATAREAGWQWHIPLRHRIGNGYVYSSDHLGDDDAEAALRDRLEGSPVTEANRLRFTAGHRAETWRRNVVAIGLSGGFLEPLESTSITLIQSGLERLVQLFPERGCDPRLAATYNRQSTLEFERIRDFLLLHYVGNRRYGEPFWDRMRALDLPESLQAKLDAWRAQGAFVRYEWETFQDPSWLSLYAGFGDLPGRYNLLADQFSTEELRDTFARMRQAIAGTVKLGVPHRSIVD

SEQ ID NO: 89020 - protein, 526 aa, Rhodanobacter glycinis
  misc_feature (1)..(526): tr|A0A1I3ZPU5|A0A1I3ZPU5_9GAMM Tryptophan halogenase OS =Rhodanobacter glycinis OX=582702 GN=SAMN05192579_10336 PE=4 SV=1
MARLQKILVVGGGTAGWLTACYLAKSLNSVAPGSIKVELVESPRIGLLGVGEATFPSIRGTLSAIGLDERRFLAGSTGTFKQGIRYRHWVRPQGAPGASDFFHPFSMPSQRTGGPELLPYWLLGAAPAGVPFADAVSMQKRLVDGNRAPKRAKDADFHGPMNYAYHFDAARVAEVLAEHGQTELGVVRHLATVERAELDAQGAIARIVTREAGELSADLYVDCTGLRGYLIDGAMKSPFRSRRDVLFVDRAVAMQVPYPQPDSPIPCYTMATAQEAGWIWDIGLQQRRGCGYVYSSQHSDATRAEAVFRQYLGAAAEGVTAQHIRFETGYRPEHWRKNCVAVGLAGGFVEPLESTGIALVELGAYLLTHLLPGDVDDMERTARHYNEMVVARYDRIIDFIKMHYCLSQRRDTAFWLDNANPDSIPDTLKDRLALWKHRPPHRLDFVGDLEMFLVSSWQYVLYGMEFKTDLEPMRSVYTRVDDARREFAMIQQMAGHALGDLPGHRELVEQMVREYRQRNEVAEAVA

SEQ ID NO: 89021 - protein, 485 aa, Pseudoalteromonas ruthenica
  misc_feature (1)..(485): tr|A0A0F4Q127|A0A0F4Q127_9GAMM Tryptophan halogenase OS =Pseudoalteromonas ruthenica OX=151081 GN=TW72_05985 PE =4 SV=1
MNNINTITIVGGGTAGWMCAAYLSKHHRDKTVRVIESAHIGRIGVGEGSTPHLQQFMADLGVTESSWMRACDATYKAGIRFSHWNGDDSEYFHPFFSELDEKTAEVFFVNANARRRGAAVPVHPDGYFLAAQLAAQNRAPKALSALARPLHYGYHFDAQKLADWLRAYACARGVEHISGTVSQVQGRQRIEHVTLADGRTLQGDFYIDASGFQSLLVEKTLQEPFIRFNDELLNDRAVAFATEALPNPPVYTHAQAMPSGWRWHIPLQSRCGNGYVYSSQYLSAEQAELQLRQALGEYHSSAKHLHMRVGMMRRALVSNVMAVGLAQSFIEPLEATALMVTGHSITLLSQFIEGQVSAQQLNDELHTLVLGVKDYILGHYATSRRIDTPYWLASAGIAAQSPRIAPLLQRWRSGGDIDQWLHQHRHQQAYNRASWYCLLAGMDYRDTHLIQPFECAPAHIDSAAKAYVKTLCETHFGVHEQVLRL

SEQ ID NO: 89022 - protein, 533 aa, Streptomyces sp.
  misc_feature (1)..(533): tr|A0A559U7C8|A0A559U7C8_9ACTN Tryptophan halogenase OS =Streptomyces sp. BK340 OX=2572903 GN=FB157_12468 PE=4 SV=1
MTDTDSRIRKVVILGGGTAGWMTAAYLGKALQGTVDIQVLEAPAIPRIGVGEATVPNLHRVLFDYLGIPEEEWMRECNASFKMAVRFVNWRTPGRGEPGARTLDDGRPDHFYHPFGILPDHDNTPLSHYWFKNRHEGRTDEPFDYSCFREPPVMDANLSPKWLDGTPSTRYAWHFDAALVADFLRRFATDKQGVEHVQDEMVRVEQDQRGYVTALHCKSGRVLDADLFVDCSGFRGLLINKALGEPFLDMSDHLMCDSAVATAVPHDDEANGVEPYTSAIAMSSGWAWKIPMLGRFGSGYVYSSKFTSQDEATREFCEMWNLDPAETKFNHVRFRVGRNRRAWVNNVVSIGLASCFLEPLESTGIYFITAAIYQLAKHFPDRTFNPALVDSFNNEIEVMFDDTRDFIQAHFYYAPRNDSPFWRAQKELTLPENIQKKIEAYKAGLPINSPIADESTYYGNFEAEFRNFWTNGSYYCIFAGLGLEPDTPLPALAHKPESVAGAEPLFEQVRQQQEHLLQTLPSTYDYLRQLHGK

SEQ ID NO: 89023 - protein, 511 aa, Pseudoalteromonas porphyrae
  misc_feature (1)..(511): tr|A0A0N1MU88|A0A0N1MU88_9GAMM Tryptophan halogenase OS =Pseudoalteromonas porphyrae OX=187330 GN=ADS77_09930 P E=4 SV=1
MDIKKVAIIGGGTAGWLAANHLGKALCNKDDISITLIESPDVPPIGVGEGTVPDIKKTLLSFGISETDFIRECDATFKQSIKFVNWMDKKEHGENNFFHHLFDVPLRNEANLLTSHWLSEKKDVCCYAEMLSSQHKICEEGLAPKSITTPEYQGDLAYAYHLNAAKFAKLLASNAKSKYFVKHLLANITGVNLSEDGSIFSLTTDSQGELEFDFYIDCSGFDSILINKALKVPFKDVSKTLLVNRALVVQVPTAADAEIPPYTVATAHQAGWIWDIALSSRRGVGLVYSSSHMSDEEAEEKLDNYLGESKQNLTYRTIPMKIGYREKFWHKNCVALGLAQGFLEPLEATSILLTDFSAEILAQRFPSSTAQLAQLEKRFNHSMVYAWDRVVDFIKLHYCISDRTDSEFWVDNKKSATIPMSLQEKLALWESYIPISDDFFSHFEVFFLENFLFVLYGMGFKTKLKNDRLPVCKTSLAMINQRKEITNHLQKMLPRHRDLLDKIKQFGLQSL

SEQ ID NO: 89024 - protein, 505 aa, Rhodanobacter glycinis
  misc_feature (1)..(505): tr|A0A5B9DUJ7|A0A5B9DUJ7_9GAMM Tryptophan 7-halogenase OS=Rhodanobacter glycinis OX=582702 GN=CS053_01015 PE=4 SV=1
MSDDPHDSRIRHVVIVGGGTAGWMTAALLAKALGRRVQIRLIESEQIGIVGVGEATIPQIRHINAFLGIDEDDMLRATHGTFKLGVQLNNFGRLGDSYLHAFSDIGLPLGLIGFHHYWLRKRVSDPANDLWSYSLNTQTANEHRFGRMDKVGSSPLGGIKYAYHFDAGLYGQYLRQRCDPQVVQRIEGKVVDVQLREGDCFIESVRLESGERIAGDLFIDCSGFRGLLIEGALHTGYESWQHWLPCDRAMAVASARTEPLWPYTRATARTAGWQWRVPLQHRTGNGLVYASQHLSDDEASAMLLANLDGEALGAPRPLRFTTGMRRKAWQRNCVALGLAAGFMEPLESTSIHLIQSGISRLLAMFPDRHCDPVLVDEYNRQTRFEYESIRDFLILHYKATERDDTPFWRQCAHMDIPPTLARKIELFRCHGQIFREHEELFTEVAWLQAMIGQHIEPQAYHPLADALDETRLDAFLGDIRTLVGRAAGSLPDHARFVADHCLTRT

SEQ ID NO: 89025 - protein, 500 aa, Sphingosinicella sp.
  misc_feature (1)..(500): tr|A0A2P7QMA3|A0A2P7QMA3_9SPHN Tryptophan halogenase OS =Sphingosinicella sp. GL-C-18 OX=2116704 GN=C7I55_17510 PE=4 SV=1
MDECALKRILIVGGGSAGWMTAALFAHLFQGVYEIRLIESEEIGTVGVGEATIPAIKKYNELLDLDEREFVRQTKGTFKLGIQFNDWLRPGSRYIHGFGVIGQDLGWLRCHQYWLKARAMGKASDFAAYSINTAAALHNRFIPAQAKMKDSPLGHIAHAYHFDAGLYARFLRDRAEREGVIRTEGKVVDVSLRSEDGFIEAVTLASGERIEADLFIDCSGFRGLLIEQALETGYEDWTHWLPCDRAIAVPCSRSDDFTPYTRATARAAGWQWRIPLQHRTGNGHVFASRYMDEAEAERILLANLDGEPLAEPNRLRFVTGKRRKTWNRNCVALGLAAGFMEPLESTSLYLIQSAAIRLARLFPDRSFDPENIAEFNRQTDFEYERTRDFIILHYKATERDDTSFWRHVRDMEVPETLRRKIHLFAANGRIFREDEELFSEESWIQVLIGQGVIPRRHDPLVDLRSDAELLKFLGDIETVIAKCVDVMPSHAEFVEKFVAS

SEQ ID NO: 89026 - protein, 503 aa, Idiomarina sediminum
  misc_feature (1)..(503): tr|A0A432ZBZ8|A0A432ZBZ8_9GAMM Tryptophan 7-halogenase OS=Idiomarina sediminum OX=431675 GN=CWI80_06005 PE=4 S V=1
MSEPYRIVILGGGSAGWMTAAALSKVLDPTRYHITLVESQAIGTVSVGEATIPGIREFNQLLGIDEDEFLRETQGSFKLGIAFENWHQQGDVYMHPFGPYGFAIHGVPFHHYFLRHERESAPEQRVPLHALNLEWTAALAGKFTRPIADKRSPLGHIKYAYHFDATAYARYLKGYATTRGVVAIDDRMLSAKQRYAKGPIDALVLEKHGEVTGDFFIDCSGFKALLIGEAMGVGYHDWRKWMPCDSAVALPGQHDASTIVPYTRSIAHHEGWRWRIPLQHRTGEGWVYSSRFTDSDKAEREFRAVLGNEVDTANHLRWINGRRDQAWQHNCCAIGLAAGFIEPLESTGLQLTQSGIIRLISLLPGQGDMSQRAQAYNRYSAEEITSIRDFVLCHYKLTERDDSAFWRYCRDMDIPDSLQQRLDLYRENGGIFRNSNNELFNEISWFSMFHGQKFTPQQEHPLAAQLPAEQLNQHILNLQRIFQQAVAPLPTHAGFIQQHCKAP

SEQ ID NO: 89027 - protein, 515 aa, Niveispirillum lacus
  misc_feature (1)..(515): tr|A0A255YZA6|A0A255YZA6_9PROT Tryptophan halogenase OS =Niveispirillum lacus OX=1981099 GN=CHU95_11045 PE=4 SV =1
MDKPVKTVVIAGGGSAGWITAGRIAARNAQGPDAVRVILIESSAIGTIGVGEGTWPTMRNTLRKIGIKETDFIRHCDAAFKQGAKFVRWTDGTDADGYYHPLNPPQAATHINLSGHWQRRSRTGGPDFATAVDFQASLCEAGLAPKSITSPEYAGIANYAYHLDAGKFADLLRDHAVGRLGVIHMVDDITQVHQDEDGDITGLTLRAAGLVQGDFFIDCTGFASLLLGRTYGVGFKDCTDILFCDRALALQVPYERDDAPVATHTISTAQDAGWIWDIGLPTRRGVGHVYSSRHTTDDQAEAALRRYAGPMASGLTARMIKIRAGHRETFWTHNCVAVGLSAGFLEPLEASALMLIETAVDFIADRLPANRSVMDVLSRQFNRAFLHHWERIIEFLKLHYILTKRTDTAFWRDNCDPASIPEGLRERLELWRHHPPGPGDFPHQPEVFSWPSYQYILHGMGFETAYDGLPPLAAEAAGAQRAFAMAERAREQALRDLPRHRQLLDAIREHGLQAV

SEQ ID NO: 89028 - protein, 507 aa, Rhodanobacter glycinis
  misc_feature (1)..(507): tr|A0A5B9DXH7|A0A5B9DXH7_9GAMM Tryptophan 7-halogenase OS=Rhodanobacter glycinis OX=582702 GN=CS053_01640 PE=4 SV=1
MNDQIRTVLIVGGGTAGWMAAAALSKVLGGDCTIRLVESEEIGTVGVGEATVPHLSRFNHFLGIDEAEFVRHVQGTFKLGIQFNDWGRPGDSYIHGFGSIGHDTAMQPFHQLWLRAHKLGLAGDIGDYSLNTLAAPRGRFMASPKDAPPASPLADIAYAYHFDAGRYARHLRGYAESRGVRRTEGKIAQVALCPDDGFVDAVQLESGERIEAELFIDCSGFRGLLIEQALHTGYEEWTQWLPCDRALAVACEKVGPPTPYTRCTARDAGWQWRIPLQHRTGNGYVYSSQHIGDDEAAASLLANLDGRALGDPRPLRFVTGRRKQAWNRNVVSLGLASGFMEPLESTSIYMIQSGIMRLLSLMPRRDFSSVLRDRYNAQVAVESERIRDFLILHYKATQRDGSAFWRHCRDMPIPAALQDTIDLFRDTGSFFREGFEEMFGLVSWVQVMIGQGILPERCHPLAERMPEQDLAAFMAGVRQVVEACAEAMPMHQAFIDKVCPAPVPEAA

SEQ ID NO: 89029 - protein, 511 aa, Sphingosinicella sp.
  misc_feature (1)..(511): tr|A0A2P7QFW1|A0A2P7QFW1_9SPHN Tryptophan halogenase OS =Sphingosinicella sp. GL-C-18 OX=2116704 GN=C7I55_24550 PE=4 SV=1
MSDTGRPNTPLRDIVIVGGGTAGWMTAALLSKLFTRGYHIRLIESDEIGTIGVGEATIPAIRTYLQLAGIDTVEMIKATQATFKLGIEFVDWRDLGTSYIHGFGKIGQDMLWLHPHQLWLKMAARGQVKHFDHYALNCLAARKNRYCPPDPRQPGSPLADLDYAFHFDASLFAAFLRRQSEARGVERIEGRILSAKQRSEDGFVDHVVLADGRAVVGDLFIDCSGIRGLLIGDVLGVGYEDWNHWLPCDRALAVPCESAAVLTPYTRSTARSNGWQWRIPLQHRIGNGRVYSSHHGSDEEAAESLLANLDGRPIGDPRPVRFRPGMRHRSWDKNVVAIGLSGGFLEPLESTSIHLIQTAILRLIALFPGRAFNPADIAEYNRQTAFEYRDVRDFIIAHYKVTDREDTSFWAYVKHMDIPDSLAERLDLFRASARFFLHGKAELFREESWVQVLIGQGLPMHYDPMVDMIPEAQVTGYLRDIEEVIADVAERMPLHSDFIARQCRAPAANLS

SEQ ID NO: 89030 - protein, 481 aa, Sphingomonas sp.
  misc_feature (1)..(481): tr|A0A430DHK6|A0A430DHK6_9SPHN Tryptophan 7-halogenase OS=Sphingomonas sp. ABOLG OX=1985880 GN=CA236_17845 PE= 4 SV=1
MAAAAIARTMGRAAQVTLVESEAIGTIGVGESTIPPIVGFNRLLGINEAEFMAATNATFKLGIVFDGWRNGTDRYVHAFGLTGKDHWAAGFQHFWLAGRAKGHQAPFGDYSVELQAALAGKFAHLPDDRLNYAYQLDSGLYAKFLRGMAERDGAVRIEGKIATVQLDGDSGDIAALVLEDGTAIAGDLFLDCTGFRALLIEGALHAGFDDWTHWLPCDSAIAVQTASVGPAVPYTRAMAHDAGWQWRIPLQHRVGNGIVWCSRYLSREDALERLLGNVEGEVLTQPNHLRFTTGVRRRQWHRNCVAVGLSGGFMEPLESTSIHLIQRAVLRLIRMMPAAGPISPRDIAEFNDQQHADMVQVRDFLILHYKATDRRDSAFWRQCAAMPIPDSLEQKIELFRDTARVFRRNEELFAEHSWLQVLLGQGIEPHAWHPITDKLTDEELARLLQTLRAQVTRTVNGLPAHADYVARYCAGARQTAA

SEQ ID NO: 89031 - protein, 505 aa, Nitrospirillum amazonense; identical to SEQ ID NO: 85550
  misc_feature (1)..(505): tr|G1Y070|G1Y070_9PROT Tryptophan halogenase OS=Nitrosp irillum amazonense Y2 OX=1003237 GN=AZA_18337 PE=4 SV=1

SEQ ID NO: 89032 - protein, 512 aa, Sphingomonas sp.
  misc_feature (1)..(512): tr|M4SKF6|M4SKF6_9SPHN Tryptophan halogenase OS=Sphingo monas sp. MM-1 OX=745310 GN=G432_16620 PE=4 SV=1
MAKRIIIVGGGTAGWLTAAYLIRSLGRSGWSITLVESPDIGIIGVGEGTFPTIRETLSAIGVDEREFLREADGSFKQGVRFSGWTGGPTPGNDTDDYFHPFNLPYGGDEGLLPYWIKAAGEARRPSYADAVTVQGHVIRAGCAPKRASDPGFDGPMNYAYHFDAARFADYLRKVATANGVERIEATINEVRQAEDGRIAAVVPGDGREAIEGDFFIDCSGFRALLIGKALGSPFRHVGDVLFNDRALAMQVPHGDADTPIRPYTLATAHEAGWTWDIGLGARRGIGYVYSSRHSDDEAAERVLRAYVGKAADGLSPRQLRFESGYRSVQWIGNCAAVGLSAGFFEPLESTGIMLIEVAARMISDFLGSPAIDEAAMAAAARQYNRLMLARFDAIVEFLKLHYCISGRRDTAYWRDNSDAASIPEGLRDKLAQWRHRPPSRFDFVVDHETFLPASWQFILYGMGFRTDPAAVSSSHRDDEQAGAAFVRVFQAARQAVAELPPHRALLEQLRAA

SEQ ID NO: 89033 - protein, 525 aa, Sphingosinicella sp.
  misc_feature (1)..(525): tr|A0A2P7QSY9|A0A2P7QSY9_9SPHN Tryptophan halogenase OS =Sphingosinicella sp. GL-C-18 OX=2116704 GN=C7I55_11780 PE=4 SV=1
MPPPREAAVTRVVVVGGGTAGWLAACLIAARTERAPAGPLHVTLIESPDVPTIGVGEGTWPTMRRTLQRIGISEAEFLLFCDAAFKQGSRFDGWVSGEADDQYFHPFTPPVEADPDAVVQAWQASDARSFAETVSPQARACGLNLAPRQRTMADFAGALNYAYHLDAGKLVDLLRRHATQRLGVRHVRDHVVSVEAAASGDIAGVGTRSTGTVEGDLFLDCSGHSALLLGEHYGVPFVDRRDVLFNDRALAVQVPVAPESPIASQTCATAHSAGWIWDIGLPTRRGIGCVYASAHASDDTAAAALEAYLRKTAPSIPVDPGAFRRLTFRSGHRQRFWERNCLAVGLSAGFLEPLEASAIVLIELSLDALLDNFPVTRGIMDIHARRFNALFLYRWDRIVEFLKLHYVLSRRSEPYWRAHRDPASIPARLSELLQIWRHQAPSRADLPMADEIFPAASYQYVLYGMGFPAPAQAPVQADAASTVEPLLRQAEQRGRALAASLPTNRSYLDALRAQATSSPPLVTTC

SEQ ID NO: 89034 - protein, 510 aa, Nitrospirillum amazonense; identical to SEQ ID NO: 85490
  misc_feature (1)..(510): tr|G1XVY3|G1XVY3_9PROT Tryptophan halogenase superfamil y OS=Nitrospirillum amazonense Y2 OX=1003237 GN=AZA_068 19 PE=4 SV=1

SEQ ID NO: 89035 - protein, 500 aa, Sphingosinicella sp.
  misc_feature (1)..(500): tr|A0A2P7QKJ0|A0A2P7QKJ0_9SPHN Tryptophan halogenase OS =Sphingosinicella sp. GL-C-18 OX=2116704 GN=C7I55_18715 PE=4 SV=1
MPVRVVVVGGGTAGWMTAAALAKLLPHRCTVHLVESETIGIVGVGEATLPHIRAFNERLGISEAEFMSSTRATFKLGIEFKNWGAIGDSYIHPFGTFGDGQSEIGFHHYWTRLRLAGRPVGSLDEYSMGVMAGRLNRFQLPEKDHESIASTFGYAYQFDATLFAPFLRRLAESMGARRTEGRVVGVDRNGESGDIESITMESGEVIEGDLFVDCSGFISLLLGKALGEPFRDWSRWLPADSAVAMPCRTETSLTPYTSAIAMPSGWRWRIPLQHRTGNGYVYSSAFTSDEAARDALVDAVEGEPIADPRVLRFVAGRRERSWAHNCVAVGLASGFLEPLESTSIYLIQQAITYLVELFPEKRISPVDRDEFNRLIDLEYDRIRDFLILHYHATTRSDTPFWDYVRTMDLPSTLSEKIDLFRRRGRIVKYREGVFLEASWVAVYIGQNIFPEGHDARAGVLPIGEVADRAEALRSRIRAAAEAMPDHAAYIRSYCAMAEAA

SEQ ID NO: 89036 - protein, 526 aa, Nostoc sp.
  misc_feature (1)..(526): tr|A0A235J5P1|A0A235J5P1_9NOSO Tryptophan halogenase OS =Nostoc sp. 'Peltigera membranacea cyanobiont' 232 OX=2 014531 GN=CDG79_05705 PE=4 SV=1
MSQDVQNVVIVGGGSAGWMTAAYLSKALDKNIQITLVESSNITKVGVGEATFSTIKVFFDFLGLQEDEWMPKCNATYKMAIKFVNWNAKGDHFYHPFQRYEVIDGFDLSEWWLKMKKDREAFDYACFLTPWLCDNQSSPRYLDGKVFDDKVQNEFSQGHIVKKSILDNLKIQYPYAYHFDANLLARFMKDYAMERGVKQIVDDVVDTKLTEDGSIGSLTTKEHGILSGDLFIDCTGFRGLLINKVLDEPFISYSESLLCDRAIAMQIPTDLKKDGINPYTTATALSSGWVWNIPLYGRNGTGYVYASAFISAEEAEQEFRQHLGSAADNCQASHIKMRIGRNRNSWVKNCVAIGLSSGFVEPLESTGIFFIQHGIEELVSHFPSKSFNEELIHSYNKVIADCIDGVREFLTLHYYASDRTDTEFWKATKTNIKVPEELGEKLKLWKNRLPSNKSINPKYHGFESYSYSVMLLGLNYMPESSLPILEHIKNHNAQAAFLEIKERANYLSSTLPSQYEYLTHVIKSQE

SEQ ID NO: 89037 - protein, 412 aa, Thalassospira xiamenensis
  misc_feature (1)..(412): tr|A0A0B4XXH5|A0A0B4XXH5_9PROT Tryptophan halogenase OS =Thalassospira xiamenensis M-5 = DSM 17429 OX=1123366 G N=TH3_13960 PE=4 SV=1
MRPDCDIAIIGAGPAGSVIAKFLHDAGMAVTVLEAETFPRFVIGESLLPNCMNVLERAGLLDAVTDAGFQFKNGAVFECGPQYMSIDFRQNFEPSACWGTTFQVKRARFDQILAAETARAGVDIRFGHRVTSAQLADGDCRLGFTDENGNPGELRAGFVVDASGYGRVLPRMLGLARPGKSIERRALFTHMRDHITDPGYDREKILITMHPTRHEIWYWLIPFSDGTSSVGAIYPDNDPAFVGMSDQEIFNQLINDTRLGSLLAKAEPIRDLNSIAGYSAQSENLFGDGYVLLGNSAGFLDPVFSSGVTIALHSAELAAKALIARHNRKSVDWNLDFADPLSKGVDTFRAYVDAWYDGRLQTIIFNQPDDDSQLKRMVVSILAGYAWNMENPLVAKTERYLEMLHDLCAPSS

SEQ ID NO: 89038 - protein, 500 aa, Sphingosinicella sp.
  misc_feature (1)..(500): tr|A0A2P7QSW1|A0A2P7QSW1_9SPHN Tryptophan halogenase OS =Sphingosinicella sp. GL-C-18 OX=2116704 GN=C7I55_11765 PE=4 SV=1
MPEDRRLRRIVVAGGGTAGWMAAAAIARTMGRAVDLTLVESDAIGTIGVGESTIPPLVNFNRLLGINEAEFMRATQATFKLGIAFDGWKEPGHSYFHSFGMTGKDHWSAGFQHFWLHGREKGYDDPYDAYCLELKAALEGKFAHLPDEAMNYAYQLDSTLYAKFLRAMAEGDGATRIEGKIARVELDGESGNVAALQLDSGLRIEGDLFLDCTGFRALLIEEALHAGHDDWTHYLPCDSAIAIQTESVGPAVPYTRAMAHDSGWQWRIPLQHRTGNGIVYCSRYLDKDAALTRLLGNIEGQTLTQPNFLRFGAGARRKQWHRNVVAIGLSGGFMEPLESTSIHLIQRAVLRFIRMMPLHEISARDIAEFNDQQHADMLQIRDFLILHYKATERRDSAFWRFCGTMEIPDTLAQKIELFRETGRVFRKNEELFAENSWVQVMMGQGIMPRAYHPIAEKLRDDELARLLTMLRETVTKTVAGLPQHSAYVEHYCGAVRAAAA

SEQ ID NO: 89039 - protein, 528 aa, Nostoc sp.
  misc_feature (1)..(528): tr|A0A235J873|A0A235J873_9NOSO Uncharacterized protein OS=Nostoc sp. 'Peltigera membranacea cyanobiont' 232 OX =2014531 GN=CDG79_03810 PE=4 SV=1
MIPKFHEACILEYRTILIDSFIHVEKTIHNVVVLGGGGGSAGFLSALALKVKMPWLNVVVVHSTNIPVIGVGEATTAWIPWFLHKYLELNREQFYEETQPIWKLGIKFIWGDSTQSHFNYPFVTHLADKLSVLSKSTAYYCLDSTTESSIYSLLMEQNKSPCFQRENGDFVVDERFGYHIENTSFVAYLERRAAELDIKIIDKAVVNIEVAENGYVRQLKFTDETTLAGDLFVDCSGFRSTLLGETLQEPFCSFSSSLFCDSAVTGRWMRDDAIQPFTTAQTMQSGWCWQIDLQDKVNRGYVYSSGFISDDDALQEMKCQNPLMGDEHNLIRFKSGRHQRFWVKNVVAVGNASGFVEPLESTGLHMIGETIKCVCDVLIDSDQQPSPGLINLANLANRAIAQKWDDIRDFLSIHFKFNRRVESKFWRHCWHKTDIGDAETVVDFFQNNGPSPIGQILLRKNSVFGYNGYLNLLMGQQVPTKYQSDNDTLDLDNWRQVKNHFIKNCANALPIQEAIQVVKERKCQWLTS

SEQ ID NO: 89040 - protein, 550 aa, Nitrospirillum amazonense; identical to SEQ ID NO: 84920
  misc_feature (1)..(550): tr|G1Y3K8|G1Y3K8_9PROT Tryptophan halogenase OS=Nitrosp irillum amazonense Y2 OX=1003237 GN=AZA_20160 PE=4 SV=1

SEQ ID NO: 89041 - protein, 500 aa, Alteromonas lipolytica
  misc_feature (1)..(500): tr|A0A1E8FJN4|A0A1E8FJN4_9ALTE Tryptophan halogenase OS =Alteromonas lipolytica OX=1856405 GN=BFC17_11140 PE=4 SV=1
MAQNKTRVVVAGGGTAGWLTAFSLVTRLGNVLDITLVESDQIGTVGVGEATIPTMCNFHRLMGIDEREFMAATNATFKLGIQFNNWANQGDSYIHSFGEIGQRSWMAEFHEFWMEAVANGQQDSLDEYCLELKAARQNKFATKVGNKALNFAYHLDATAYAGYLRAKSEAAGVKRCEGKIKTVDIDPQSGNLTGLGLDSDLYIKGDVFIDCTGFRGLLISEHLDVGYEDWSHWLAADRAIAVQTASVEPAKPYTIATAHKAGWQWRIPLQSRVGNGIVYSSQFLSDEEALATLKSNLQGEILTEPRYLKFKTGRRQKAWHKNCIAIGLASGFLEPLESTSIHLVTTALIRLMKLFPFTAEHELLAEQYNRETQKELETIRDFIVLHYHLTQRDDSDFWNHYRTMEIPEPLAHRMAIFAQNGYVWPDDVSLFRVDSWVQVMMGQGLRPAQHHGASRMLPTANLQQQLAAFKQSINSVLNQLPSHSEFIAQYCPANEQVKQG

SEQ ID NO: 89042 - protein, 497 aa, Pseudoalteromonas ruthenica
  misc_feature (1)..(497): tr|A0A0F4PX84|A0A0F4PX84_9GAMM Tryptophan halogenase OS =Pseudoalteromonas ruthenica OX=151081 GN=TW72_08465 PE =4 SV=1
MANINRVVILGGGTAGWLSAALLAKMLGKQLSITLVESTDIGTVGVGEATIPPIVAFNNALGIDEKTLIQRTGATIKLGIQFENWGRQGDSYMHAFGHLGKALPFCDFHHLFHHAKEQGLGHSLWDYSLNFQAAKAGHFAPLRHLPNTQLAGTEHAYHFDASLYAQLLRERAEHFGVQRIDAKVDKVEQSDNGDVQALVLQSGERVEGDLFIDCSGQRGLLIAQTLGVGFEDWSHWLPCDRAIAVQSHHGDDKDPLPYTRSIAHDSGWQWQIPLQHRVGNGLVYCSRYLDDDQAKAQLLANLPGEALHEPRVIPFRTGARRQQWHKNVVAIGLSSGFLEPLESTSIHLIQTAVIRLLKHFPHQGIAPASVRAFNRLFSTEMAQIRDFIILHYALNQRQDSRFWRYCADMELPPSLSERIAQFQQSGQVHRYQDELFAEVAWQQVLIGQNCWPQQHHPLAEQLSNEQLDELLQSLRTLINQAVQNMPSHQQFIQRNLS

SEQ ID NO: 89043 - protein, 417 aa, Capnocytophaga ochracea
  misc_feature (1)..(417): tr|C7M500|C7M500_CAPOD Tryptophan halogenase OS=Capnocy tophaga ochracea (strain ATCC 27872 / DSM 7271 / JCM 12 966 / NCTC 12371 / VPI 2845) OX=521097 GN=Coch_0135 PE= 4 SV=1
MKKEVTDVLVIGAGPSGCVSAAYLHNNGVKVRVVEKTKFPRLVVGESLIPRVMDHFEEAGFMPALEAQKYEVKWGARFIRGEQVCQFDFGKKYGKGWDWTWQVPRADFDNVLAQEVIRKGVNLTFETEVTDVQFFPDHQVTTVKDANGEVSEITSKFVIDASGYGRVLPRLLDLNSPSKLDDHSSIFTHIKEGKVRPAGEEGTLISFDVLEREVWLWVIPFSNGNTSVGIVGPTHYINALSASGDTEEALRKAIKRSDFYRPRFEHSDFLFKPNKIQSYSCSVKKLFGEGFVLTGNSTEFLDPVFSSGVAFATESGMLAAKLVKRELAGEKVDWQKEYAEYMQRGIEVFTSYVREWYTGNLQTLFFHQPGNEEVKKKICSVLAGYVWDTTNPFVTKHKHIIENMAYAIDNGLGMKEA

SEQ ID NO: 89044 - protein, 521 aa, Xanthomonas citri
  misc_feature (1)..(521): tr|A0A1D9EE00|A0A1D9EE00_XANCG Tryptophan 7-halogenase OS=Xanthomonas citri pv. glycines str. 8ra OX=1401257 G N=BHE84_03510 PE=4 SV=1
MPDTTPSDPQQRPVRRVVIAGGGTAGWMAAAALSKLLGRHLQITLVESDEIGTVGVGEATIPSLVTFHRLLEIDEAAFMAATQATIKLGIAFEHWRDVDQHYIHSFGHAGTDHWSAGFQHFWLKGRQRGVARDFGDYCLELRAAQEGRFAHLPNGGMNYAYHLDAGLYARFLRRFSEGFGVSRVEGRIGQVETDAQSGFLAALTLQDGTRLEGDLFLDCTGFAGLLIGKTLGVGSDDWSRWLFADSALAVQTESVGPPVTYTRSRADQAGWMWRIPLQHRVGNGIVYSSRYMDQDGARAVLERNLTGRALTEPRPLRFTPNQRHRVWEKNCVALGLASGFLEPLESTNIHLIQRGIIRLLQTFPQVINAVDIAEYNRQAAQEITHIRDFVILHYHATDRRDTPFWRDCAAIDIPDSLRHRVELFRQSGRVFHQANELFAENSWVQVMLGQGVVPQQHHPVADLMGDAELSRFLETIRTRVEAALVRLPAHADFLQRYCPAPPLPEAAARVPAPPVMATPAG

SEQ ID NO: 89045 - protein, 500 aa, Sphingomonas sp.
  misc_feature (1)..(500): tr|M4S6T0|M4S6T0_9SPHN Tryptophan halogenase OS=Sphingo monas sp. MM-1 OX=745310 GN=G432_14595 PE=4 SV=1
MSAHPIETVVIVGSDTTLWLAAAVLRNALRPAGLAVEAVELPATLRPADVHATLPPLEALHAQLRIDEKALLRSTGGAFSLGQNFTDTSGAAPAFLHAYGSCGAPIEDREFFAYWLKARRHGLAVPLDDFSLTASAARHGRLMIPDDETDRYGRADYGYHLPALAYARSLKMLAIRDGVRAHETSALGIALDPDRGTIKAVELEGGRRIEGQLFIDATADARLIGRALGVRVESWRDHFPVDRVLAATGPRFASIPIYAEVRASEGGWTALHPTQAATHVVHAYASASASDEEAAVAAARAAGMPIADIAIRSPEPGRRESAWAGNCVAIGAAACTFDPVHGVDLHAAQLGLVHLLSFFPAGTGHAAERAEYNRIMRSSLCRLRDFQSAHYALNRYGDAPFWTTAREAALPAELAQDIATFRARGLVAPREDESFSPDSWRALFVGHGIVPESYIPAVDTVAADMVKEHFRRMLGFVRDQVMRQPTHDQYLDGIGGASRG

SEQ ID NO: 89046 - protein, 510 aa, Sphingomonas sp.
  misc_feature (1)..(510): tr|M4S802|M4S802_9SPHN Tryptophan halogenase OS=Sphingo monas sp. MM-1 OX=745310 GN=G432_14600 PE=4 SV=1
MRIVIVGGGSAGWMCAAGLARLLPATDYDITLIESDEIGTVGVGEATLPHIKTFNDMLGIDEAEFLRETQGTFKLGIEFVGWDRPGDRYIHPFGAFGEPWAGVDFQHHWVRAAQAGFDPGPIQDYSFAVAAARADAFEFPDGDRNSIRSTYAYAYHFDVGLYAAFLRRWATARGVRRIDGQVIDVGHNAISGHVETLRLKSGATLAGDIFVDCSGFRSLLLGGVMGVAWQDWSEWLPCDRALAVPCRRTTALTPYTRATAQRAGWTWRIPLQHRVGNGYVFSSRYCDEDQARETLLAAIEGEPLAEPRLLRFAAGRRALAWERNCIGIGLASGFLEPLESTSIFLIQAAVIDLASLMPTPGFGNRMDPRLIAEFNRLFEIQYDRVRDFLVLHYAANRREGEPLWDHVRAMRLPDSLTHKIELFEASAAAPDYAYGLFSRDSWLSVLFGQGLRPRAYNRLADHLPLEELERRMRDLRSRIAANAGLMTAQEDFIAGYCPASPPAPPMESAA

SEQ ID NO: 89047 - protein, 518 aa, Pseudoalteromonas porphyrae
  misc_feature (1)..(518): tr|A0A0N1EIG1|A0A0N1EIG1_9GAMM Tryptophan halogenase OS =Pseudoalteromonas porphyrae OX=187330 GN=ADS77_14940 P E=4 SV=1
MKVEQIKQVIIVGGGTAGWLTANHLAKTLNCTNPLSVQITLIESKNIPTIGVGEGTVPVMCQTLAHFGISETDFIRQCDATFKHSIKFIDWLDNPTDNKKENYFHHLFNYPNIEELDLTPYWLLNKNNTSYANSVSTQGYMCDQGLGPKNMTHREFEGMASYAYHLDAAKFSALLTDNAVNKLGVKHILTDVLDAKLNVAGDIESLQTKCAGTVSGDIFIDCTGFAAKLLGDKLKVPFIDQSHILFADTALAIQVPYQNPDDPINPYTNATAKEAGWIWDIGLSSRRGIGHVYSSNHTSDDQAEQTLRDYIGPQADDLTARKIAMQVGYRKTPWKNNCIAIGLSQGFVEPLEATGLLVFDITARMLAQNFPATRKAIPAISERFNDNITGLWQKVIDFIKLHYCISRRDDSQFWLDNRASSSISDSLQSNLALWRDTVPNKYNFTSALEGFNLENYLYVLYGMEFPTNLQPIATRFEAHQQAAFTMEQIAQAANYCQQQLIPHRELIEKIKRYGLTKI

SEQ ID NO: 89048 - protein, 500 aa, Sphingosinicella sp.
  misc_feature (1)..(500): tr|A0A2P7QGP1|A0A2P7QGP1_9SPHN Tryptophan halogenase OS =Sphingosinicella sp. GL-C-18 OX=2116704 GN=C7I55_23225 PE=4 SV=1
MAAAALSKVLEHTNVDIALVESPDIGTIGVGEATIPPIIEMNRLLGLEENAFVRATRATFKLGIAFENWGAIGERYMHPFGRYGGDIGTLDFHHYWRRLRAIDPQAAGDIADYSLPIAAAGNNKFQRPDPSPRNVLSNIAYAFHFDAGLYAGLLRREAEARGVRRHERRIDDVRLREDGHVAALLLHGGGALKADFFIDCSGFRGLLIEGALKTGYEDWSHWLPCDRAMAVASQRAGPLPPYTRSTARSAGWQWRIPLQHRTGNGYVYHSGSISDDEAAATLLANLDGAPLGDPKPLRFTTGVRRKFWNRNVLALGLAAGFMEPLESTSIHLVQAGLSKLFNLFPDRSFAQADIDLYNRTFREDWERIRDFLILHYHATRRDDSPLWDHVRTMAVPDALQEKIALFESRGRIFRMSDELFAESSWLAVLEGQGVRARSHDPLAEAMPEDVLRTKLARLRAVIARGADAMPMHSRFIADHCAHDGPVPAAASGPIVSTRVR

SEQ ID NO: 89049 - protein, 499 aa, Pseudoalteromonas porphyrae
  misc_feature (1)..(499): tr|A0A0N1EEP5|A0A0N1EEP5_9GAMM Tryptophan halogenase OS =Pseudoalteromonas porphyrae OX=187330 GN=ADS77_20165 P E=4 SV=1
MQQQKIKQVIIAGGGSAGWITASLLNKVLGKVIEITLIESDQIGTVGVGEASIPPIQHLNGALGIRESEFIKATQATIKLGIEFENWREQNHKYMHAFGDIGKDFPFCEFYNFWLKAKQQGNATDFWDFSLNYQAAKQHKFTHLQHIPNTQLTGLNYAYHFDATLYGEFLKELAISRGVKRIEGKIAHVKQCTESGFVTALELSSGQIINGDLFIDCTGLSALLIEKTLNTGFEDWSHWLPCDSAIAVQTKSTADPVPYTRSIARDAGWQWQIPLQHRVGNGLVYSSRHLTDEQAKQQLLDNIAGEPITEPRVIRFKTGRRRKQWHKNVVAIGLSSGFLEPLESTSIHLIQTAVIRLIKLFAHNNIEQSLVDTFNQQSQTEIERIRDFIILHYKLTDRTDSAFWRQCKQMSIPKSLQTKIDLFKDTGKIIRQDDELFAEVAWQQVMIGQGLKAQDYNPLADALNDEQLAELFTNLKTLISTTVKQLPTHNEFLARIKSN

SEQ ID NO: 89050 - protein, 554 aa, Nitrospirillum amazonense
  misc_feature (1)..(554): tr|G1Y0E6|G1Y0E6_9PROT Tryptophan halogenase OS=Nitrosp irillum amazonense Y2 OX=1003237 GN=AZA_24523 PE=4 SV=1
MEAPTDGARAKGAPVKNVLIVGGGTAGWLAAAYLARTLSIGQPGGARITLVESADIGILGVGEGTFPNIQRTLRRIGIDESVFMRESEATFKQGIRFDHWQHAPGPSATGAGQRDHYFHPFQSAIGPQDLDLIPYWLLGAAGDGVPLDTALTMQKRVADAALAPKRSGDADYAAPLNYAYHFDAVKFARLLRVVATDLGVRHVIDTVDAVPLDETGAVAGVVTRENGTLTADLYIDCTGFRAQLIGQALKSPYQSCRKWLFCDRAVALQVPYDQPDAPIPSYTISTAHEAGWTWDIGLETRRGIGHVYSSDHTDDARAEQVLRDYIGPAAADKTARTFRFEAGYRPEPWVRNCVAIGLSSGFFEPLESTGIVLIEVASVLLTSLFPWAGDMATAARQFNRIMRQRYERALDFLKLHYCLTRRTDTAFWRDNADAATVPDTLHDLLDRWRHRPPEGLDFDLNLDTFSEASWQFVLYGMGYRTDLSAQAGAFRHMDEARQQFAAIRAGTEQALAALPRHRDLITQIYRHGLRPRTPLAGAPSGRATLSSGMAGLSR

SEQ ID NO: 89051 - protein, 499 aa, Caulobacter sp.
  misc_feature (1)..(499): tr|A0A2G5QSG9|A0A2G5QSG9_9CAUL Tryptophan halogenase OS =Caulobacter sp. FWC2 OX=69664 GN=CSW62_18665 PE=4 SV=1
MTQQMIRKVVIAGGGTAGWMAAAALARQLGPLLDITLVESEDIGTVGVGESTIPTARTFNALLGIDEAEFMRATQATFKLGISFENWGEIGDRYIHSFGQVGKSTWMGGFHHFWMQAREQGFGGDLGDYCLELKAAEQNRFYTGDESPLNYAYHLDAGLYGRFLRGMAEADGVRRVEGKIASVRQHAESGFVEALVMEGGEVVEGDLFIDCTGFRGLLIEQTLKAGFEDWDHWLPTNSALAVQTRSTEPAVPYTRAIAHEAGWRWKIPLQHRVGNGLVYCSDFMSDDEARAKLMGEIEGETLIEPRLIRYRTGRRRKTWDKNVVALGLASGFVEPLESTSIHLIMIGVTRLMQLFPFAGISQAAVDRYNRQADDELEKIRDFIILHYKATERTDSPFWDRVRAMDIPDSLAQRIELFRQSAQVYQAPGELFQVDSWLQVLLGQRIQPQAHHHMGRLMPPQQLKSALEDLKRNIDGMVARLPQHQAFLDHYCAPPVSKSA

SEQ ID NO: 89052 - protein, 534 aa, Rhodobacteraceae bacterium
  misc_feature (1)..(534): tr|A0A2E0BJ21|A0A2E0BJ21_9RHOB Tryptophan halogenase OS =Rhodobacteraceae bacterium OX=1904441 GN=CML44_03370 P E=4 SV=1
MMRSVVIVGGGSAGWMTAAYLNGALNNQGQDSNVKITLIESPDIPRISVGEATIPSIKHLLAVVGVDELEFMRATEATFKQSIKYVNWVNNDNTFYHHPFSRHKVTPIDHSARKWLESDRSIPFMETVSAQPLVCEMGRSPRLIGNGSSEVNLNYAFHMNAQKFADYLRDFSTQRGVKHILENLQAVELKENGNIASVKTDNDRTFEGDLFVDCTGFKAKLISEVMKVDVEDCSQWLLCDGAVTMHVPYEDYYPGMVRPYTTATALSNGWIWDIPMQSRRSIGYVHSSAFISSDAAEQEMRAYQGVNTTDLDSRHIKFSVHRRLKTWEKNCVAIGLSGGFIEPLESTGLYLSDLGAVALAEHFPWTDSHMEAMAFRYNRILSNRFYEILDFINMHYCLTKRTDTAFWREVQKPEHINDRLKAKLEYWKMKLPSALDFEDQCFDGGFVTGQNHPAVDTAALWNHDSYLCILLGMDYFQSEDQQMGKELPSSSLYKKVYERVQWAHKHLPLHSDWLQSTVGMRSFSASSKPKGWVT

SEQ ID NO: 89053 - protein, 513 aa, Sphingosinicella sp.
  misc_feature (1)..(513): tr|A0A2P7QKI1|A0A2P7QKI1_9SPHN Tryptophan halogenase OS =Sphingosinicella sp. GL-C-18 OX=2116704 GN=C7I55_18705 PE=4 SV=1
MNEHDIRDVVVVGGGTAGWMAAAAFSRFLHNGHTRITLIESEEIGTIGVGEATIPPLITFNRMLGINENDFVRATKATFKLGIEFVNWGGIGERYFHPFGYHGHELEGVHFHQLYLRERKRRAIQDISAWSMSGVAAAMGRFGRPGRGARPPLSHLLYAFHFDAGLYARFLRDYAERGGVQRVEGKVVDVSLRGEDGHVSSLTLSDGRTVAGDLFVDCSGFRGLLIEQALKTGYEDWTHWLPCDRAIAVPSSYTGPPDPFTRATAHPLGWQWRIPLQHRMGNGYVYSSAFSSDDEAEAKLLASLEGEPLAEPRRLSFTTGRRKQAWNRNVVSMGLSSGFVEPLESTSIHLVQSGIAKLVALFPDLRFNPVERDEYNRQMQEVFEDVRDFIILHYNATRRDDSAFWNRCRTMDIPDSLARKVALWRAKGRLFREGLELFATPSWVAVMLGQGIVPEDYEPAVDALDEDRVATALEEMRLGYLELAQKLPRHEEFIAQACRPPMAPTEDLPEFVL

SEQ ID NO: 89054 - protein, 494 aa, Unknown
  misc_feature (1)..(494): tr|A0Z0U8|A0Z0U8_9GAMM Tryptophan halogenase OS=marine gamma proteobacterium HTCC2080 OX=247639 GN=MGP2080_059 97 PE=4 SV=1
MEHQKIKHVVIAGGGTAGWMAAAAVAKLLGKTVKVSLVESEEIGTVGVGEATIPTLLTLHELLKIKEQDFISAVGGTFKLGISFENWHDVGKDYIHSFGYTGKDCWAAGFQHFWLKGKELGISKDFGEYCNEWAAAKQNRFAVLPNQNLNYAYHFDSSRYATFLRKIAEEHGAVRIEGKIEAVQQHEQTGFITGLRLESGQQVDGDFFVDCTGFRGLLIEQTLHAGYDDWQHWLPCDSALAVQTENVQPPIPYTRSIAHEAGWQWRIPLQHRTGNGLVYCSKFWSRDEAEAKLRGNLEGELVTDPRPIKFQTGTRRRHWVKNCVAVGLSSGFMEPLESTSIHLIQRSIVRFMQMFPSDGVRQPDIEEFNNQMKFEIENIRDFIILHYHVTNRTDTPFWRHCRTMEIPESLQHRIDLFKETGRVFKVPTELFGENSWTQVMLGQGLSPEQYHPIVNMMDEQELRDFLGGIHGSVERLVSQLPEHQRFIDHYCREA

SEQ ID NO: 89055 - protein, 498 aa, Pseudoalteromonas profundi
  misc_feature (1)..(498): tr|A0A3A3ERT1|A0A3A3ERT1_9GAMM Tryptophan 7-halogenase OS=Pseudoalteromonas profundi OX=1774956 GN=D4741_02760 PE=4 SV=1
MESKKITKVVIAGGGTAGWITAALLNKVLGKVIEITLVESAEIGTVGVGEASIPPILHLNGALGISEKEFIKATGATIKLGIEFENWRSQGHRYMHAFGEIGKDFPFCEFYHFWLKAHQANNAPDFWDFSLNYQAAKAHKFAHLKHIPNTQLAGLHYAYHFDATRYGEFLKGLAQSRGVKRIEGKIESVNQCHQSGNIRSLLLTNGEQIDGDLFIDCTGLRALLIEQTLNTGFEDWSHWLPCDSAIAVQSESAADAIPYTRSIARDSGWQWQIPLQHRVGNGIVYSSRFLSDEAAKQQLLDNLPAKPLTEPRVIKFKTGRRLKQWHKNVVSVGLSSGFLEPLESTSIHLIQSAAIRLIKFFPHQGIKQCLMDEFNQQSKTEFERIRDFIILHYKLTEREDSAFWRFCKGMDIPSSLKKKIELFKTSGKIVREDDELFAEVAWQQVMIGQGLIAEDHHPLTDALSDEQLNELFSNLKTLINSTVEQLPSHSQFLEKIQN

SEQ ID NO: 89056 - protein, 517 aa, Sphingosinicella sp.
  misc_feature (1)..(517): tr|A0A2P7QLB0|A0A2P7QLB0_9SPHN Tryptophan halogenase OS =Sphingosinicella sp. GL-C-18 OX=2116704 GN=C7I55_15610 PE=4 SV=1
MDSKRRILIVGGGTAGWLAAAYLARSLGLPDNKHVEITLLESAEIGIIGVGEGTFPTIRNTLKFLGIEEARFIRETSATFKQGIRFTDWARTPDGDDHHHFFHPFEAPFYAEGAELVPYWLLQDELTRPPFAEAMTIQNRVAEAKRAPKRPDESDFSGPLNYAYHFDAASLARVLAGRAAELGVRHIEDLLEGVETDGERGIARVLTREHGPLEADLYVDCTGFRAELIGRALGEPLKSIRSILFTNRALTCKIPYASTATPLESYTIATAHEAGWTWDIGLRGARGIGCVYSSDHLSDDRAAEILRAYVGAAADDLPFRRIAFDPGYRERQWVGNCVAVGLAGGFLEPLESTGVVLIEAAITMIAELFPHSGPIDAPARRFNQLIAARYDNIINFLKLHYCLSQRDEPFWRDNRDEASIPERLRELLEQWRYRPPGRFDFILDLESFAFFNYQYILYGMGFRTDLSPGRGDFPNVRAADRIFARIRSFGERATQDLPSHRALIDQINEEPERAFAL

SEQ ID NO: 89057 - protein, 523 aa, Unknown
  misc_feature (1)..(523): tr|A0Z0U5|A0Z0U5_9GAMM Putative tryptophan halogenase O S=marine gamma proteobacterium HTCC2080 OX=247639 GN=MG P2080_05982 PE=4 SV=1
MGTTEHVVIVGGGTAGWLTAARLGAMANRQFDITLVESPSVPTVGVGEGTWPSMKATLQAIGLSERVLISECDASLKQGTLFHGWRTGAADDSYLHPFSLPPEYASKNIAEYWRRDGLRYPFHEVVTPQALIATTHKAPKTADTPDYAFALNYGYHVDAVKFAALLRQHSVSRFGVRHIEGHVAGVSSDSAGFLTSLELEGGDRLSGDFFVDCSGQKALLIGDHFKVPFESARHVLPNNRAVVAQVPYNEPNDEIHSCTQSSAQDCGWIWDIGLQSRRGVGYVHNADFISEAEATQTLRNYAEQSVGAKVAQDLACRTLNFEPGYRGTPWTHNCVAVGLSAGFIEPLEASALAMIEQAASFLVESFPVNRDLMGPASRAFNRKMESNWASIQEFLKLHYVLSDRDDTPYWQQACDETSISEGLSDKLALWQIRAPWHPDTPRIDELFPAASYQYVWLGMNGHLNGVIGSAGQGGKDHASSSADLDPILFKVRERALQLSRAMPGNRQLLNALRMNNPSATVTA

SEQ ID NO: 89058 - protein, 513 aa, Shewanella baltica
  misc_feature (1)..(513): tr|A3D1I8|A3D1I8_SHEB5 Tryptophan halogenase OS=Shewane lla baltica (strain OS155 / ATCC BAA-1091) OX=325240 GN =Sbal_1078 PE=4 SV=1
MTSRKDIKSVVIVGGGTAGWISACHLAKKLNARTPQIQVMLVESPNIPTIGVGEGTVPMLRETLKYFGIREDDFIHRCDVTFKQSVKFIDWNEPNSGEYYHHLFDYPYFKDFTSTWLNKSLSDRGRYADLVSVQGHLIDAGFGPKAMTQPQYRGAMHYAYHLDAAKFTKLLTEFGVEQLGVKHLLAEVIDTKIDAQGNILELYTDNAGVLTADLYVDCTGFSAQLIGSACNVPFVDKSDILFVDSALVVQLPYEDKYTPIPCFTKSTAQEAGWIWDIGLSERRGVGYVYSSQYSSIEQAESVLREYLGKAAEEISFRHIPMKVGYREKSWQGNCVAIGLSSGFVEPLEATGLLMFDATARMLAECFPANTDVMPLVANRYNQRVSNAWNRVIDFIKLHYVTAKRMDTPFWVDNKNEISIPDSLKEHLELWRYHIPTAYDFTSTLEFFNLENYLYVLYGSDFESKLKMTLNDEEERLFSEMTDKLDKQVTLLKSQLLPHRELIERIKLYGIQLN

SEQ ID NO: 89059 - protein, 511 aa, Nitrospirillum amazonense; identical to SEQ ID NO: 84822
  misc_feature (1)..(511): tr|G1Y0A7|G1Y0A7_9PROT Tryptophan halogenase OS=Nitrosp irillum amazonense Y2 OX=1003237 GN=AZA_61030 PE=4 SV=1

SEQ ID NO: 89060 - protein, 515 aa, Pseudoalteromonas ruthenica
  misc_feature (1)..(515): tr|A0A0F4PIA9|A0A0F4PIA9_9GAMM Uncharacterized protein OS=Pseudoalteromonas ruthenica OX=151081 GN=TW72_17670 PE=4 SV=1
MKDLSRVIVVGGGTSGWLSAAYLASSFKRTGRDIKVSIIESDTIPTIGVGEGTFPTIVNTLYEIGLSEKEFIAECDASFKQGALFKNWLYNPSDKPHAYYHPFDPPAKPKGLDLSAYWVSRKHQGTMQQDFAHATSVQSFLCDENLAPKTPETGEYAWLAKYAYHLDAAKLGQLLKKHAMNKLQVEHIVADIEQVELDEQGFIAHLVDKQQRQHDADFFVDCTGFSSLLLAKALKVPFVDKSHYLTVDTAVVLPVEYADAETPITTHTVSTAQDAGWIWDIALQNRRGTGYVYNSHYCSKEQAEKTLCDYHGIAHDSEKRYRHISFKTGYREKSWAKNCCAIGFSSGFVEPLEATAIAMVEAGVRSLAARFPATREAMLEREKQYNRIFTSRWDNIIDFIKLHYCLTKRDDTPFWREQKNPETIPASLQEKLKAWQHYGITDGDLPYKYDLFTLASWQYILYGLEFLPDYVEKAPINEEIIDKAFASIAAQKRSAASKLLSNRALLEAFGASCKS

SEQ ID NO: 89061 - protein, 501 aa, Sphingomonas endophytica
  misc_feature (1)..(501): tr|A0A147I457|A0A147I457_9SPHN Tryptophan halogenase OS =Sphingomonas endophytica OX=869719 GN=NS334_07785 PE=4 SV=1
MTAAPIEHVVIIGGGTAGWMMAAAAGRYLDDGRRRITLVESEAIGTVGVGEATIPSIRNFNALIGVDEAEFLRATRGSFKLGIEFVDWERRGTRYVHPFGHYGRDIQGLNFHQLWLKLRGRDGIGAIGDYSPATVAMANGAFGWPQPDPRSPLSGLAYAYHFDAGSYAAFLRERAEADGVARVEGRIVAVERAEDGDVAAVRLEDGRRVAGDLFIDCSGFRSMLLGETLGGAFEDWSHWLPCDRAIAVPTGRTEPLLPYTRATAHAAGWQWRIPLQHRTGNGMVYASRFMDDDAAERLLLSSLDAAPTAAPRRLSFTAGFRPRPWERNVVALGLAGGFLEPLESTSIHLIQQGISKLFALFPDTALSAVERDEYNRQMGDNYRSIRDFIILHYHATTRDDSPFWDHVRTMAVPDTLQRKIALFRQKGRFFRYDDELFATPSWVAVMLGQGIVPEGYDPIVDALDEERTAAALRQMRQATAAAVAGLSPHHAVLERLVGDHG

SEQ ID NO: 89062 - protein, 532 aa, Streptomyces sp.
  misc_feature (1)..(532): tr|D9W1W2|D9W1W2_9ACTN Tryptophan 6-halogenase OS=Strep tomyces sp. C OX=253839 GN=SSNG_05407 PE=4 SV=1
MTGTDSRIQKVVILGGGTAGWMTAAYLGKALQGTVDITVLEAPAIPRIGVGEATVPNLHKVLFDYLGIAEEEWMRECNASFKMAVRFVNWRTGGQGQPDARELENGGPDHFYHPFGILPDSDNVPMSHYWAKRKLEGRTEEPFDYACFREPPVMDAKKSPKWLDGTPSTRYAWHFDAALVADFLRRFATEKQGVNHVQDEMTHAEKDERGFIKALHTKAGRVLDADLFVDCSGFRGLLINQALEEPFIDMSDHLLCDSAVATAVPHDDEANGIEPYTSAIAMSSGWTWKIPMLGRFGSGYVYSSKFTTKEEATREFSALWGLDPETTKFNHVKFRVGRNRRAWVNNVVSIGLSSAFLEPLESTGIYFITAAIYQLAKHFPDRTFNPELANSFNHEIEVMFDDTRDFIQAHFYYAPRNDTPFWRANKELTLPKNIQEKISAYKAGLAINSPIADESTYYGNFEAEFRNFWTNGSYYCVFAGLGLEPDAPLPILAHKPESVAGAEALFGKVKQEQNHLLDTLPSTYDYLRKLHG

SEQ ID NO: 89063 - protein, 497 aa, Alteromonas lipolytica
  misc_feature (1)..(497): tr|A0A1E8FDP0|A0A1E8FDP0_9ALTE Tryptophan halogenase OS =Alteromonas lipolytica OX=1856405 GN=BFC17_20980 PE=4 SV=1
MTSAPLRIVIAGGGTAGWMTANLLAKQGLNRPLQITLVESPDIGIIGVGEGSTPTLKRFFAEMDIAEEDWMPACNATYKVSIRFDGWSPAAQVNSYAHPFISQLDTFSERFFYVNCFHRRMGHAVNTTPGDFLFNAWLAKHNLSPKTPPNFPFRIEYGYHFDSGLVGEYVKRHAATLGVVHKALNITGVDCHPNGDIAGLKTAEGDVIEGDFFIDCTGFKSLLLQQTLKVPFHSFKSNLFNDSAVVCPTPALTELPVETRSTALSAGWAWQIPLTNRTGNGYVYSSDFISDDQAASELCHHLGLNENEADLRKLTMQVGQVAEHWAKNCLAVGLSQGFIEPLEATALHLVQTGVEIFIDHIRAGGFTETQRTAYNRIISERFERVRDYIVAHYRLNTRSDSEYWLANQHNEQLSDALFHLLNVWYRRGDLGQEIARQQLDSHFGNTSWHCLLAGYGAFPPLEQSSNVTEDLYQQNKLDAFFRGCLLNFSPPAPVIAK

SEQ ID NO: 89064 - protein, 517 aa, Sphingomonas bacterium
  misc_feature (1)..(517): tr|A0A3D0WAC8|A0A3D0WAC8_9SPHN Tryptophan halogenase OS =Sphingomonas bacterium OX=1895847 GN=DEP91_02015 PE=4 SV=1
MSGGEGAIRDVVIVGGGTAGWMIAAAAARYLDDGQRRITLIESDAIGTVGVGEATIPPILNFNALLGIDERDFVKATQASFKLGIEFVGWGRSGDRYIHPFGTYGRDIHGVAFHQLWRKFAGRPGVGPIDDYAMSIAAARAGRFAHPTADPRDPRSQLAYAYHFDAGLYAAFLRDYAEREGVSRVEGRIADVERDAASGDVRAVQLDDGRRIEGELWIDCSGFRSLLLGETMGVPFVDWSHWLPCDRAWAVPCARVDPLLPYTRSTARPAGWQWRIPLQHRTGNGHVFSSGFMTEETALDLLLANLDDAPAGDPRMLRFTAGRRAEPWRGNVVALGLAAGFLEPLESTSIHLVQHGIQLLFALFPDRRFTAVERAEYNRLMTAQFDAIRDFIILHYHATERRGEPFWDHVRTMPIPDTLAAKIALFREKGRVFRYDDELFAVPNWTAVMLGQGIVPRTHDPIADSLDDDRVLAMMVAHRRNCNAAAAVMPTHAAFIENLLHEGPVVRALGPHRNNDR

SEQ ID NO: 89065 - protein, 502 aa, Niveispirillum lacus
  misc_feature (1)..(502): tr|A0A255Z5M1|A0A255Z5M1_9PROT Tryptophan halogenase OS =Niveispirillum lacus OX=1981099 GN=CHU95_05180 PE=4 SV =1
MSSDRRIRRITIVGGGTAGWMSAATFARLLGPDYAEITLVESDEIGIVGVGEATIPQMATFNRMLGIDEDEFLRETKGSFKLGIQFVDWGRKGHTYFHPFGHIGLHMEGVSFHAFWLRLKQAGLVDRIEDWSLQATAGARGKFMRAINAGRSPLSEIAYAFHFDAGLYARYLRRYAEARGVVRREGKITTVHQHPETGFVQSVELADGTKVEGDLFIDCSGFRGLLIEGTLKAGYVDWSHHLPCNRAVAVPCEGTEAMTPYTRSTARAAGWQWRIPLQHRIGNGHVFCSNYMSDDEAVSVLLANLDGKPLADPRFVPFQTGHRRKMWDKNVVAIGLSSGFLEPLESTSIWLIQSGLSRLMAMFPDLDFDAATRDRYNRILTTEYAEIRDFLILHYKATDRDDSPFWDYCRTMPVPDRLQEKMDVFMAHGRCFRENEELFNDTSWFAVMLGQLMMPRSYDPVANVLSLEETKARLAHIKDAISNSAEYMPRHRDFINEHCRAG

SEQ ID NO: 89066 - protein, 506 aa, Pseudoalteromonas ruthenica
  misc_feature (1)..(506): tr|A0A0F4PJ77|A0A0F4PJ77_9GAMM Tryptophan halogenase OS =Pseudoalteromonas ruthenica OX=151081 GN=TW72_17675 PE =4 SV=1
MKKLRKVVIVGGGTSGWLAANHIGKRLLGSDIEVCLIESPTIPTIGVGEGTVPMMVSTLQSFGISEQTFITQCDATFKQSIKFINWLDKHHHGEHNYYHHLFEYPFPNNQDVTQTWLSDTTAASFAETVSFQHMLCEHGVGPKAITQAQYTGHASYAYHLNALKFAQLLKDNAISRFNVKLLKTNVTAVKCNDEGYISELQTDDSGQVSGDFFVDCSGFSSILHRQALGVKSVDVSDQLPIDKAITAQVPISADDALPPYTLATAHQAGWIWDIALTTRRGTGFVYASDYLTKEQAYTKFERYLGQPLSGLKVREIDMKAGFAERAWHKNCVALGLAQGFVEPLEATSILLTDFSAKLLAENLPVQHHALALAAKKYNEIVDYAWRRVVDFIQLHYYLSDRQDSAFWQAMKSTDSMSVVLKERLALWQYQVPKKSDFNSKYEVFELENYLYILYGMHFKPCAHLVAKPEHKELIAMLTSYGEQLLKQLPKHRALLNNIAQHGLQKI

SEQ ID NO: 89067 - protein, 515 aa, Sphingomonas endophytica
  misc_feature (1)..(515): tr|A0A147HWB6|A0A147HWB6_9SPHN Tryptophan halogenase OS =Sphingomonas endophytica OX=869719 GN=NS334_15240 PE=4 SV=1
MTGGEGSLGEAKTQMRDPIRSIVIVGGGTAGWMAATFLARRLAHLRLSITVVESSAIGTIGVGEATVPAIRDFFAAIDLGEADVLRETEATIKYGIRFADWKARGHDFFHPFGLYGVGAHGVAFHHYWLKLRAAGDTTPLGTYCLATQLAERGLFLPPVDRPANDLGVFNFAVHFDASKFAALLKRLALANKVAHIDARITDVARHGEDGRVTAVTLDSGARVEGDLWIDCSGFRSLLLGDALDVPFVDWRHWLPCDRAVAIPCTAAQVHRPFTTATATEAGWRWHIPLRHRVGNGHVYCSDFIDDADAEDGLLAALEGEALAEPNRIRFTAGHRARFWERNVIGLGLSSGFLEPLESTSITLIQSGLERLIPLFPDRACDPRLAATYNNQSVLEFERIRDFLMLHYSGNQRIGEPFWDHVRAIPPTDGLRAKLDAWRAAGEFVRREWDTFQDASWLSMYAGFDDLPARYSPLADHVADADLRDSLTRMRAAIDGTLAHAEPHAAFLARVHAGVA

SEQ ID NO: 89068 - protein, 508 aa, Pseudoalteromonas carrageenovora
  misc_feature (1)..(508): tr|A0A2K4XD73|A0A2K4XD73_PSEVC Flavin-dependent tryptop han halogenase OS=Pseudoalteromonas carrageenovora IAM 12662 OX=1314868 GN=rebH PE=4 SV=1
MNKAIKTVAVIGGGTAGWLSAAIIASYHQGKNGDGLKVMLVESSDIPTIGVGEGTWPTMKNTLQQIGLREVDVFKACNATFKQGGKFVNWTHGNNDFYYHPFTVPLGYGRIDLAPYLDNVEDYAQQTNFQHDICEASLAPRGIAQGEYQGNCNYAYHLDAGAFAELLKQHCKSKLGIEHVIGTVEQVKLDDNGAIDTLTLKEQTRTINADLYIDCTGFSSLLLGQALNVPFKKMDHVLFNDSALAMQVPYDENDNSLASHTIATAQYAGWIWDIGLTHRRGVGHVYSSKFLSDEEAEQNLRNYLGDAANGLTARKISFESGYREKFWHKNCVAVGMSAGFVEPLEATAIMLVEISSRFVAEHMPADTQVMPIVAKRFNEQMDYRWQRIIDFLKLHYMLTKRPEPYWQAHVQPETIPQSLQEDLLLWGTRGPLIQDFHGALELFPAASYQYVLYGMGFKPDFTKQAYLYSQDAQAKQIIERNSQLTQQMLQTLPPHRAYIEQWLAANPV

SEQ ID NO: 89069 - protein, 516 aa, Alteromonas lipolytica
  misc_feature (1)..(516): tr|A0A1E8FIR7|A0A1E8FIR7_9ALTE Tryptophan halogenase OS =Alteromonas lipolytica OX=1856405 GN=BFC17_11145 PE=4 SV=1
MQDKITRVVIVGGGTAGWLTAGIIAAKNPLKGEHSRTEIVLVESPEVKNLGVGEGTWPTMRDTLRLLGIAEKQFLTCCDASFKQASKFVGWQQGGSDYYYHPFTAPAGYGAVSLADAWHEQGCPGDFESWVCAQGSACERDLAPKMPQLPEYAYNFNYGYHLSADKFVALLHSHCTEQLGVIYKSAHVAGVSSHPNGDIAAIELTEGESLSGDLFIDCSGFSARLIGQHYQVPFVSKRHVLFNDTAVAAQVSHVDEQTPIASCTVATAKPHGWIWDIALQPRRGIGHVFASELTTETQAADALLAYISADKSLNQGGHTPRTIRFDPGHRQSFWINNCVAVGVSAGFVEPLEATALVLIEKSAEWIAEQLPRTPAAMQVLAKRYNTMTCERWTEIIDFIKLHYVLSSRRDTPYWQAHADPSTWPETLKDALLLWQSQPPGLLETNLRQELFSSASKQYVLYGMGFRSASWQGGGVTSLRQPIIERIRREFIHNGDKLLSQLPTNRHYLSRLTAASA

SEQ ID NO: 89070 - protein, 264 aa, Sphingomonas endophytica
  misc_feature (1)..(264): tr|A0A147I471|A0A147I471_9SPHN Tryptophan halogenase (F ragment) OS=Sphingomonas endophytica OX=869719 GN=NS334 _07775 PE=4 SV=1
LPCDRAVAVPSASPDAPTEPFTRATAMPAGWRWRIPLRHRVGNGYVHASAFCDEAAATDALLAGLDGTALAEPRVLRFRAGRRRRSFVGNVVAIGLASGFLEPLESTSIYLVQAAITALVEHFPDARVADADRDGFNAAIDAEYDRIRDFLILHYHATTRDDSPFWDHVRTMTVPDSLAEKMALWRASAQVAHYRHGLFLEPSWIAVYLGQGIVPGGWDPRADLPDGAGLDRALSGLSRAIAERVARMPHHDAALAAIAATARA

SEQ ID NO: 89071 - protein, 506 aa, Xanthomonas citri; identical to SEQ ID NO: 89007
  misc_feature (1)..(506): tr|A0A1D9EDJ1|A0A1D9EDJ1_XANCG Tryptophan 7-halogenase OS=Xanthomonas citri pv. glycines str. 8ra OX=1401257 G N=BHE84_02350 PE=4 SV=1

SEQ ID NO: 89072 - protein, 517 aa, Massilia albidiflava
  misc_feature (1)..(517): tr|A0A411X6F0|A0A411X6F0_9BURK Tryptophan 7-halogenase OS=Massilia albidiflava OX=321983 GN=EYF70_29085 PE=4 S V=1
MSQPPVSSLVNHVVIVGGGSAGWLTAGVIAADHPALTVTLVESPDVAPIGVGEGTWPSMRDTLHRLGVSESAFFRECDAAFKQGSRFNGWRSGGGAEDYYFHPFVLPQGFGEADLVESWQRDVPGVPFADLVSFQPHLCVHGRAPKQPATPEFAAVANYGYHLDAGKFGVFLRKHCLEKLGVRYVPDHVTAVNSHDNGDIASLQTREHGALAGDLFIDCTGMQSLLLGRHYGVPLLHRKDILFNDSALAVQVPYERDDSPIASQTTSTAQRAGWIWDIGLPTRRGIGHVYSSAHTSDEQAEADLRAYIGKDDIPAPRKLTFQPGYREQFWHRNVVAIGLSAGFIEPLEASALALVEMSAAMVSDDLPATREAMDIVARRFNDAFTYRWERVIEFLKLHYVLSGRTDPRSTSDYWHDNRRAETIPARLQELLALWRHRPPSRLDFNRIEEVFPSASWQYVLYGMGFQPDRERITRRGSTGSAGGYFREAAELTRKMLRALPSNRELIDHIRLHGLQKI

SEQ ID NO: 89073 - protein, 501 aa, Niveispirillum lacus
  misc_feature (1)..(501): tr|A0A255YSX7|A0A255YSX7_9PROT Tryptophan halogenase OS =Niveispirillum lacus OX=1981099 GN=CHU95_21680 PE=4 SV =1
MHKPIRSIVIVGGGTAGWMSAAALARVAGKTHRLHLVESEEIGTVGVGEATIPPIATFNRVLGIDEDEFLRATNGTIKLGIEFKDWYRQGHRYMHAFGALGRPLGMTQFHHVWRRANALGLDGDWEQYVYNTVAARALRYARPGPQRRSPLEPLTHAFHFDAGLYAAFLRRFATERGVVRREGKIRRTILNAFNGHVEAVELEDGSKIEGDLFIDCSGFRGLLIEQALGTGFEDWSHWLPCDRAWAVPCANGGEFTPYTRSTAHPAGWQWRIPLQHRIGNGHVFASRYMGEEQARDILMANLDGEPQAEPRLLRFTAGRRKKMWNRNVVAVGLSSGFLEPLESTSIHLVQSAITRILMALPNDGIDAVEVDDFNAKAQAEYERIRDFIILHYKATERDDSPFWRDCRAMDIPEELERRMRVFASHGRVSRVFDELFLDVSWIQVFLGQGIIPRSWHPLADQLSEAELKEFLAEIKAMIAHEMAVLPTHADFIARHAAARLS

SEQ ID NO: 89074 - protein, 502 aa, Henriciella sp.
  misc_feature (1)..(502): tr|A0A399RRX0|A0A399RRX0_9RHOB Tryptophan 7-halogenase OS=Henriciella sp. JN25 OX=2305466 GN=D1223_04325 PE=4 SV=1
MTSVQIETVVIVGGGTAGWITAAAMAKLLPSSITITLIESEAIGTVGVGEATIPQIRRLNGMLGLDEDEFVRETRASFKLGIEFSDWGRIGERYIHTFGDPGINLASLHFHHYWLRARAEGSASSLWDFSLHHRAAYANKFGRMERVGNTSMTGLAYAFHFDAGLYAAYLRRFAEAAGVNRVEGRISASHLNSETGFIESVQLANGEQVAGDLFIDCSGFRGLLIDGALGIDYIDWSKWLPCNRALAVPSQKTEPLLPYTKAMAREAGWQWRIPLQHRTGNGHVFCDSFIDEARAAEILVSNLDGAPLSDPKPLRFTTGRREQFWAKNCVSIGLSSGFLEPLESTSIHLIQSNVSRLIELFPTRRFEPANIAEYNRRVGHEYELVRDFLILHYHRTDRDDTEFWRYCANMDVPDSLKAKMDLFAGGGLLHTEPEDLFRESSWAQVMIGQGLMPEAYHAMANRLSSEQLSRFLSDTGSIVERATAQLPEHADFLRSHCKADLQ

SEQ ID NO: 89075 - protein, 167 aa, Sphingomonas bacterium
  misc_feature (1)..(167): tr|A0A3D0WDG0|A0A3D0WDG0_9SPHN Tryptophan halogenase (F ragment) OS=Sphingomonas bacterium OX=1895847 GN=DEP91_ 07760 PE=4 SV=1
LEPLESTGIVLIEAAAAMIAEFLPFGGAVSASAARFNALMGARYGSITNFLKLHYCLSRRPEPFWRDNADPASIPDTLGAMLAEWRHRPPSRFDFLVGTESFAPFNYQYVLYGMGFETDLGSDAGGSADAAHAERLFERIRSFGRQAVAELPEHRALIRQIGEGIAA

SEQ ID NO: 89076 - protein, 510 aa, Niveispirillum lacus
  misc_feature (1)..(510): tr|A0A255Z418|A0A255Z418_9PROT Tryptophan halogenase OS =Niveispirillum lacus OX=1981099 GN=CHU95_05165 PE=4 SV =1
MKNHHIKKQSNVRVLILGGGTAGWMAAAALSAKLAGTGVSIRLVESAEIGTVGVGEATVPHIRHFNASLGFDEADFMSRTEATFKLGIEFRDWGRKGDAYIHPFAAFGREIGGVPFHHHWTRARRAGRVPADGLDAVSLPIQAARMGRFGHPSPDPSSFFSTFSYAYQFDAGLYAGYLRAYAEARGVVRTEGKVQDVSLRADGHVEAVTLESGERLVADLFVDCSGFRGLLIEGALKTGYEDWTRYLPCDRAVAVPCANDGPPAPYTRATARDAGWMWRIPLQHRAGNGHVYCSGFMDDDAAEQALLAQLDHPPQAAPRRLRFTTGKRRRQWVGNVVAIGLSAGFLEPLESTSIHLIQLGIGRLLDLFPTSADMDPLDAAEFNRLMDLEYERVRDFIILHYVATQRDDTPFWNHCRTMAIPDSLATKMELFKQRGIVTLYRDGMFLEPSWIAVYLGQNILPTHVDPRAALVSDAEIDRLIAMEAEHCRRAASSMPAHGEILSRYKVQVTA

SEQ ID NO: 89077 - protein, 497 aa, Nitrospirillum amazonense
  misc_feature (1)..(497): tr|G1Y0A9|G1Y0A9_9PROT Tryptophan halogenase OS=Nitrosp irillum amazonense Y2 OX=1003237 GN=AZA_89019 PE=4 SV=1
MRRIVIVGGGTAGWMAAASLAKFLRNLKCDIVLVESEQIGTVGVGEATIPPIMNFIRVLGIDEDDLIRQTNATFKLGIRFQDWTRLGHSYFHPFGHTGFEMEGIGFPAYWMRQRLAGAAAPLEEYSLQAQAAAHNRFMRPVKAPGSPLEGITYALHFDAALFARYLRTYSEARGVTRVEGKVVKVDLRPEDGFIDALRLEDGRRVEGDFFIDCSGFRGLLIEEALQAGYENWQSYLPCDSAVAVPSERAGAPPSYTLATARDAGWQWRIPLQHREGNGVVYARDFLGDDAARETLLANLAGKPLADPRILRFVTGRRRETWKRNCLSLGLASGFLEPLESTSIHMVHRGLALFIQMLPDRRCEPADIARYNRMVAFEYERIRDFLVLHYATNERRDTDFWRHCAGIDWPDSLKAKIELFQSHGRIQREDTELFPEQSWLYVFTGQGLTPRRYDPLTDLLDPEKMRGALANIHDVIGRVVQTMPHHQAFIDRYCAAQS

SEQ ID NO: 89078 - protein, 505 aa, Rhodanobacter glycinis
  misc_feature (1)..(505): tr|A0A1I4FMC4|A0A1I4FMC4_9GAMM Tryptophan halogenase OS =Rhodanobacter glycinis OX=582702 GN=SAMN05192579_11839 PE=4 SV=1
MSDDPHDSRIRHVVIVGGGTAGWMTAALLAKALGRRVQIRLIESEQIGIVGVGEATIPQIRHINAFLGIDEDDMLRATHGTFKLGVQLNNFGRLGDSYLHAFSDIGLPLGLIGFHHYWLRKRASDPANDLWSYSLNTQTANEHRFGRMDKVGSSPLGGIKYAYHFDAGLYGQYLRQRCDPQVVQRIEGKVVDVQLREVDGFIESVRLESGERIAGDLFIDCSGFRGLLIEGALHTGYESWQHWLPCDRAMAVASARTEPLWPYTRATARSVGWQWRVPLQHRTGNGLVYASQHLSDDEASAMLLANLDGEALGTPRPLRFTTGMRRKAWQRNCVALGLAAGFMEPLESTSIHLIQSGISRLLAMFPDRHCDPVLVDEYNRQTRFEYESIRDFLILHYKATERDDTPFWRQCAHMDIPPTLARKIELFRSHGQIFREHEELFTEVAWLQAMIGQHIEPQAYHPLADALDETRLDAFLGDIRTLVGRAAGSLPDHARFVADHCLTRT

SEQ ID NO: 89079 - protein, 418 aa, Advenella sp.
  misc_feature (1)..(418): tr|A0A2M9U5J4|A0A2M9U5J4_9BURK Tryptophan halogenase OS =Advenella sp. S44 OX=1982755 GN=CAP48_01300 PE=4 SV=1
MESHHLPATTDIAIIGAGPSGSVAAALLRQQGWQVCVLERQHFPRFSIGESLLPYCMEILKEAGLLQVVNEAGFQIKNGAAFTWGERQAVIDFRDKFTAGPGTTFQVERAKFDQILIQEAANKGAQVYFGHTVTQMTSTQEHATLSVSTDQGQSYTLQARFVLDASGYGRVLPRLLNLEQPSPFPMREAWFTHIQDNISDPDFDREKIVIATHPHDRAIWMWLIPFSHGRCSIGVVGEPDRLAMNGREPLPFLQDMVNEIPRLRHLLADAKWDTPVNPLRGYSANVTTLYGQRFALLGNAAEFLDPVFSSGVTIAMHSAKLATTLVDKTLRGQAADWQRDFSDALRVGIDTFRTYVAGWYDCRFQDVIYSTQINQDIRRMIAAILAGYAWDTSNPYVEKSERRLRALAEICGEAQLDT

SEQ ID NO: 89080 - protein, 547 aa, Henriciella sp.
  misc_feature (1)..(547): tr|A0A399RMR6|A0A399RMR6_9RHOB Tryptophan 7-halogenase OS=Henriciella sp. JN25 OX=2305466 GN=D1223_04250 PE=4 SV=1
MRRVLIVGGGSAGWMTAAYLNGALNDRGNAPTVKISLIESPDIPRISVGEATVPSIQHVLSVAGLDETEFMKAADATFKQSIRYQNWLHNDQSFYHHPFSRYRIQPIDRTGRAWLNSDRSVPFMETVSAQPVICDMARAPKMLGRWDMGAPLAYAYHMNAQKFADYLRDFSTARGVSHYLENVTDVEMRENGLIKSVRTDRGNVHEADIFVDCTGFRARLIGETLGVGYEDYSRWLMCDQAVVGRIPYDQFYPGLIRPYTTATALSSGWAWDIPMQDQRSVGYVHSSHFISAEEAEREWRAYEGPHAKDIETRLIKFHVGQRQKAWQGNCLAIGLAGGFIEPLESTGLYLSDLGAVMLAEHFPYTDDMLEAMAFRVNRVISNRYFEILDFINMHYCLSRRTDTAFWQEVQKPERITDRLKAKFEYWKLKPPSASDFQDQSFPGGAGQIDRVVPGCDPRSPVDTAGLWNHESYEAIMYGMHFCGEPLAPPSTDAPKTRVMPAIIERLRAAQVKLPPHDMWLQRALGAPSFTSAGYEPPGWASGRARPY

SEQ ID NO: 89081 - protein, 511 aa, Sphingosinicella sp.
  misc_feature (1)..(511): tr|A0A2P7QKH6|A0A2P7QKH6_9SPHN Tryptophan halogenase OS =Sphingosinicella sp. GL-C-18 OX=2116704 GN=C7I55_18700 PE=4 SV=1
MREDRIKKVVVVGGGTAGWMAAAALAKTMGAMPDFSIEVIESDEIGTVGVGEATIPQILLFNEMLGLDEDDFVRATNATYKLGIEFVDWTRLGHRYVHPFGIYGLDMMGVEFHHHWLKGRALGDETPLDDYSLAVVAGLKGRFMRPRPDQPKSPVSKIAYAFQFDAGLYAQYLRRFSEARRVVRTEGRIVDVALNGETGFVDSVVLQSGARIGGDLFIDCSGFRGLLIEQALGAGFEDWSTWLPCDRAFAVPCETGADQQPLTRSTARGAGWQWRIPLQHRTGNGYVYSSAHISDDEAAATLLANLDGAPLADPKPLCFTAGHRKKAWVKNVVALGLAGGFLEPLESTSIHLVQSGIARLMSLFPTRRFDPLEIERFNARTEREYVDIRDFLILHYKATERNDTPFWDYCRTLPPPDGLAYKMEMFRRNGRVFREHEELFTETSWLSVMVGQGIEANGYHPTADLLPDDETLRRLAHVRRVVQQTADMMPTQFDFLEQQGSATHLSLRRAS

SEQ ID NO: 89082 - protein, 535 aa, Thalassospira sp.
  misc_feature (1)..(535): tr|A0A0D8CHV3|A0A0D8CHV3_9PROT Uncharacterized protein OS=Thalassospira sp. HJ OX=1616823 GN=UF64_06930 PE=4 S V=1
MRESAEYICRHQNNNDGPEGREILDIGVLGGGTSGLLTALALKKRRPYLNVSIIQSKKIPIIGVGESTVPMVVSFLHNYIGLGVGDLLKNVRPTIKQGVRYDWGKPGDYYFNAPFDWDVNDIGLIGSMRLTGSPNGATSQAILMEHHKLPLWLGPNGKVASQMDRYRFAYHLDNALLVTYLEQEALTAGIEMVDAVIVSADKHPQRDEIVALQTDDGRKLSYDLFVDCSGFRSTLLNKELEVPFIGFEKSLFSNRAIAFQRDHGGDIKPYTSAITMDAGWSWMVPTRHNDHCGYVHSSDFISVEEAKDEVVERFGEVEFLNTVSFRNGRHERCYVGNVIAIGNSYGFSEPLEASALLQIARQVILLVDELPRTKHDRSTEQLMNGQAADDWDKLKWFIAAHYQINNKKQTPFWDVMRSEADISGIKPLMDLFREGAPLSMRSPWALEAIRKVGIPYYGLAGFDTIMMGCAAPHRLLATGESDEIWRQRYRMASTFMMSALSHDEALAVFDEDPDLLMVAGDFNASENHRFTTLGQ

SEQ ID NO: 89083 - protein, 505 aa, Xanthomonas citri
  misc_feature (1)..(505): tr|A0A1D9EGM7|A0A1D9EGM7_XANCG Tryptophan 7-halogenase OS=Xanthomonas citri pv. glycines str. 8ra OX=1401257 G N=BHE84_08800 PE=4 SV=1
MTQAQIRKVVIAGGGTAGWIAACALSHQFRNLLDITLIESEQIGTVGVGESTVPPIRTFHRFLQIDEQEFLRAVAGTFKLSISFEHWRRHGERYIHPFGITGQSTLVCAFHHLWLESQRRGMPGSFGDYCLETVASRVDRFALHGEPAVNYAYHLDAALYAKFLRARSEACGVKRVEGRIQQVTVQPHSGDVASLVLEDGQTIEGDLFIDCSGFRGLLIEQTLHTGYEDWSHWLPCDRAVAMQTEALGPPVPYTRAIAHEAGWRWHIPLQHRVGNGLVFSSKHLSDDQAHAKLLRDVAAPAVREPWMVPFRTGRRLKAWNKNVVSLGLASGFIEPLESTSIHLTISAVVRLLALFPAEGIAPSQVQLFNDVSRAEMEHVRDFVTLHYHATQRDEPLWQQCRQMELPESLALRLRAWRERAHAWQGADELFRVDSWTHVLMGQGIAPEQHHPLTRAFSDHDLRRLLDGIAQPIQHAVQQMPSQQDFIERYCKAGEQVWGMRNPVPA

SEQ ID NO: 89084 - protein, 461 aa, Sphingomonas bacterium
  misc_feature (1)..(461): tr|A0A3D0W8A9|A0A3D0W8A9_9SPHN Tryptophan halogenase (F ragment) OS=Sphingomonas bacterium OX=1895847 GN=DEP91_ 02195 PE=4 SV=1
EGTWPTMRRTLSRIGISEAEFLTACDASFKQGSRFIGWRDGTDAYHHPFTPPVEGSAAALMAGWGGESAFADAVCAQPSVAERALAPRQPAMPDYAGALNYAYHLDAGKFAALLRAHATERLGVVHIADHVEHVVPGEDGTIAAVATRAHGEVAGDLFIDCTGHAALLIGGHFGVPFVDRLGVLFNDRALAVQVPVAPGSAITAVTDATAHEAGWIWDIGLPTRRGVGCVYASAHMSDDRAAGVLTDYLCRTAPDCDPAALSFRQLQFRSGHRERFWVGNCLAIGLSAGFLEPLEASAIVLIELSLDALVEDFPAHRTAMAGAAARFNARFRQRWDRIVAFLKLHYVLSGRQEPYWQAHRDPASIPPDLAAMLDRWRHRAPMPSDFDAVDELFPAASHQYVLYGMGAPAPAPPAMRVEDEAAVIDRMAKLRQRVRTLTASLPTNRTYLDNLAARPLLREAR

SEQ ID NO: 89085 - protein, 495 aa, Sphingomonas bacterium
  misc_feature (1)..(495): tr|A0A3D0W8G7|A0A3D0W8G7_9SPHN Tryptophan halogenase OS =Sphingomonas bacterium OX=1895847 GN=DEP91_02005 PE=4 SV=1
MRTIILGGGTAGWMTAAALARLLRTITHVTLIESAEIGIVGVGEATLPHIRAFNQRLGIDEESFMAATLGTFKLGIDFRDFGAVGESYIHPFGSFGAPIGDVGFHHYWLSAGAPPPLERFSLPCRMARAARFAHPDPREEADHAGYGYAYQFDATRFAPYLRARAEAGSVTRIEGRVVGVDRNGQTGDVTALILSDGRRIEGDLFVDCSGFAARLIEGAMAAPWEDWSRWLPCDRAVALPCAAPAGPIEPYTRATAMAAGWRWRIPLQHRVGNGYVYSSAHLGDDAAADAIAGALDGTPLAEPRLLRFRAGRRRESWVGNVVSVGLASGFLEPLESTSLYLAQMAITELVELFPDGASDPRDRAEFNARVDSEYDRIRDFLILHYTATRRTDSDFWGDMRALAVPDTLAERIELWQETGRVAQYSRGLFLEPSWVAVLVGQGILPRGIDPRAAAAEPDRLRRAMAALDADLTARVAAMPDHGATLGLGVCAADAA

SEQ ID NO: 89086 - protein, 494 aa, Sphingomonas endophytica
  misc_feature (1)..(494): tr|A0A147I6V5|A0A147I6V5_9SPHN Tryptophan halogenase OS =Sphingomonas endophytica OX=869719 GN=NS334_04490 PE=4 SV=1
MPAAIERVVIVGGGTAGWMAAALIARVLGDQVRTTLVESEEIGIIGVGEATIPPIQHVNATLGIDEAEFLRETRATIKLAIRFENWGAIGDSYYHTFGAAGRNIAFCPFHHFWHRAQDRDYWDYDLNALCARDGKFAKLRSDDPTFALPYAYHFDSSLYGRFLRRYSEARGVTRVEGMVSAVERHSERGDITALVLRDGRRVAGDLFIDCSGARGLLIQQQLNVGFEDWGHWLPCDRAMAVPSERFAQTAPYTRSIAHGAGWQWRIPLQHRNGNGLVYSSRHLSDEAAATLLLGNLDGRALDEPRIIPFRTGRARRQWDRNVVAVGLSSGFLEPLESTSIYLIQSAIVRLLHLFPQGGIAPALVREYNRQSQLEYETVRDFIILHYHATRRDDSAFWRDLRAMPVPDRLAAKLELFRASGVLNQDPLDIFMEPSWVQVLLGQGVVPAAHHPLADGVGADELAAQLRDLAAAKRAPVEQMPLHDDFLRACGGMAA

SEQ ID NO: 89087 - protein, 488 aa, Streptomyces sp.
  misc_feature (1)..(488): tr|A0A1Q4VSH1|A0A1Q4VSH1_9ACTN Tryptophan halogenase OS =Streptomyces sp. CB02923 OX=1718985 GN=A6A06_17620 PE= 4 SV=1
MVVVGGGPAGSTLATLVAKQGHRVLVLEKEFFPRYQIGESLLPSTVHGVCRLTGVADELAAAGFTRKRGGTFRWGATPEPWTFSFSVSERMAGPTSYAYQVERSRFDEILLRYAGRSGAVVREGCAVADVIADTERVRGVRYTDADGVEREAYGTFVVDASGNRSRLFQRVGGERKYSEFFRSLALFGYFEGGKRLPEPNSGNILSVAFDSGWFWYIPLSPTLTSVGAVVRREMADKIQGDREKALTALIAECPLISEYLSGATRVTDGQYGELRVRKDYSYHQTTFARPGMLLVGDAACFVDPVFSSGVHLATYSGLLAARSINSTLAGLVEETVAVREFEARYRREYSVFYEFLLSFYEMHRSEQSYFWQAKKVTHHDRSEMEAFVDLVGGVSSGETALSDAESVVERLRADSAEFAGAVDQLAHSEDGSMLPLFKSAVVSQVTREGSQVQMRALLGADAEPETPLVPGGLVSSPDGMFWLAAGSG

SEQ ID NO: 89088 - protein, 496 aa, Alteromonas lipolytica
  misc_feature (1)..(496): tr|A0A1E8FDM8|A0A1E8FDM8_9ALTE Tryptophan halogenase OS =Alteromonas lipolytica OX=1856405 GN=BFC17_20985 PE=4 SV=1
MPTPIKKVVIAGGGTAGWMTAALLKKVLGSSVSIELVESEQIGIVGVGEATIPPIQTFNRFLGIDEKAFLRETHGTIKLAIKFENWRIPGESYFHTFGAPGTTMGFCSFHHYWLKARAAGLAQSFWDFDLNYLACEQGRFNKINTQNPLYDMPYAYHFDSALYGQFLRRFAEQLGVTRTEGMIEHVQQDNQSGFITGLQFTDGRQINGDLFIDCTGLRGLLIRQALGVDYEDWSHWLPADSAQAVPSERFEQTLPYTRSIAHDCGWQWRIPLTHRNGNGIVYSSRFTADEHATQTLMGNLDSKALDTPRTIRFNTGRTEQQWCKNVVAIGLSSGFLEPLESTSIHLIQSGIIRLMKMFPNHGISPTMVDMYNAESKDEFETIRDFIILHYRVNERDDSDFWRAMREMAIPDRLAQKIEAFKETAAIFNEQNDIFRDASWVQVMMGQGLFPADHHAAVNAMDTSTLLSAMQQIHQAKQQPLSSLLDHDEFIQRYTSA

SEQ ID NO: 89089 - protein, 487 aa, Sphingomonas endophytica
  misc_feature (1)..(487): tr|A0A147I8F8|A0A147I8F8_9SPHN Tryptophan halogenase OS =Sphingomonas endophytica OX=869719 GN=NS334_02440 PE=4 SV=1
MTGVRRVVIAGGGTAGWLAAAILTKQIGAMVEVTLVESEEIGTVGVGESTIPTVRAFHALIGIDEREFVRATGASFKLGISFEGWTRPEERYIHSFGTLGNSTWMADFHHFWLEARAQGLPHGIGSYCVEHEAAREGRFAGRPQADLNHAYHFDAARYARYLRERCEADGLTRVEGRIARVERDAESGDIAALVMEDGARIAGDLFLDCTGFRALLIGEALGVGYEDWRDWLPTDRAIAVQTAATGPAVPYTRAIAHEAGWQWRIPLQHRVGNGIVYASDYLSDDAARARLLDSVTGETLIEPRVIRFRTGRREKAWERNCVALSLASGFVEPLESTSIHLIMIALTRLLQLFPFDGVSAAAAARFNDMARREIEGVRDFIILHYTLNQRDEPFWRRMRDMPLPDSLATRIALFRESAQAFQASDELFTVTSWVQVMLGQGITPVAHNRLARMMPPGRLEQTLAQLAGNVAGAVRGLPMHQAYLDRV

SEQ ID NO: 89090 - protein, 499 aa, Niveispirillum lacus
  misc_feature (1)..(499): tr|A0A255YTA6|A0A255YTA6_9PROT Tryptophan halogenase OS =Niveispirillum lacus OX=1981099 GN=CHU95_16795 PE=4 SV =1
MAGNLPGSILIVGGGTAGWMAAAALARAVGRHTRIQLVESSAIGTVGVGEATIPAIRGFNHMLGLDEADFLRFTQGTYKLGIEFRDWTRLNHSYFHPFGVHGASLDANYTHQYWLRLNAMGEGGRLEDYSLCTIMAEQGRYMAPVTDPRNIMSVVGSAYHFDASLYADYLRRYAERLGVVRLDRKVVDVALRGEDGFVEAVICEGGERLAADFFIDCTGFTGLLIEKALKAGYEDWTHWLPCDRAWAVPSSGDGRITPFTRSTAREAGWQWRIPLRHRVGNGHVFSSAHVSEERAREVLLANLDGQPLADPKLLRFVTGRRKQAWVKNCLSLGLASGFLEPLESTSIHLIQTGITKLLDFFPGRQIDGAEVREYNALAQGEFEAVRDFLILHYHVTERSDSSFWNHCRTMDIPDSLKSRIELFRRRGRVSTRARALFTDTSWIAVMIGQGIMPETYDPLVDLHPVAAVRERMGTMRARIRQAADAMPTHEAFLGKQAAA

SEQ ID NO: 89091 - protein, 512 aa, [Mycobacterium] stephanolepidis
  misc_feature (1)..(512): tr|A0A1Z4F0Q1|A0A1Z4F0Q1_9MYCO Tryptophan halogenase OS =[Mycobacterium] stephanolepidis OX=1520670 GN=MSTE_034 66 PE=4 SV=1
MLEEVVIVGGGTAGWMTASYLKVAFGDRITVTVVESERIGAIGVGEATFSTIRHFFEYLGLEEHEWMPSCCATYKLGIRFQDWRKPGHHFYHPFERQRVVDGFGLTDWWLDNPRSASFDRDCFLIGTLCDNDKSPRRLDGSLFTGTGGENPAYRTTLTEQETQFPYAYHFDASLLADFLRDFAVRRGARHVVDDVVDVLQDERGWISQVRTRTHGSIGGDLFIDCTGFSGLLLGRAMKEPFESYQGSLLNDRAVALRVPTDQDHGHLPPYTTATAQDAGWIWSIPLFERTGTGYVYAADYCSPEDAERTLRDFVGPAAEGLEANHIRMRIGRSRRSWVGNCVAIGLASGFVEPLESTGIFFIQHGIEQLVKHFPDESWEESLRDSYNRVVNRCMDGVREFLVLHYYLAARVDTRYWRDTKAIELPATLAERIEHWRSKLPDAGSVYPHYHGFEPYSYVCMFVGLGGIPARASTVVRYLDATRAQREFDLLAQQASRLRHSLPTHREYLAQMY

SEQ ID NO: 89092 - protein, 499 aa, Henriciella sp.
  misc_feature (1)..(499): tr|A0A399R712|A0A399R712_9RHOB Tryptophan 7-halogenase OS=Henriciella sp. JN25 OX=2305466 GN=D1223_15070 PE=4 SV=1
MKDGQAKQKVIIAGGGTAGWMTAAALGKVLEKVCDVTLVESDAIGTVGVGEATIPTLVTYNRLIGLDEAKWMSAVKGTFKLGIAFENWTDLNHRYIHSFGITGKDHWTAGFQHFWHRGRELGVAKEFGDYCLELIAAEKDRFAHLPDLGLNYAYHIDATAYAGFLREIAERHGVKRREGRIAEVRRAANGDIASLVLDDGAELDGDLFVDCTGFRALLIEGALGVGYDDWTHWLPCDRAIAVQTESVRAPRPYTRSIAHEAGWRWQIPLQHRTGNGTVYCSKYMSDDEAQAKLLNDIEGRPLTEPRVLRFRTGMRRQHWHRNCIAIGLSSGFIEPLESTSIHLIQRSVMRLMRMFPQHGVHQPDVDEFNAQTAYETDHIRDFIILHYHLTNRTDTPFWRHVRSMEIPESLAHRMRLFRETGRVFRANDELFAENSWTQVMLGQGLMPETHHPVADVMSEAEITKFLDYIIENVNRTANGLPAHEDYLKSYCPAAIAEPA

SEQ ID NO: 89093 - protein, 498 aa, Sphingomonas bacterium
  misc_feature (1)..(498): tr|A0A3D0WAF3|A0A3D0WAF3_9SPHN Tryptophan halogenase OS =Sphingomonas bacterium OX=1895847 GN=DEP91_02180 PE=4 SV=1
MTPKRIVVAGGGTAGWMAAAAIARTMGGAATVTLVESEAIGTVGVGESTIPPLVTYNRLLGIDEAAFMRATNATFKLGILFDGWRDGSDRYFHSFGVTGKDHWAAGFQHYWLSGLERGQDAAYDDYCLELVAALQGRFAHLPDNALNYAYQLDSNAYARFLRGMAEGDGTVRIDGRIGEVELDGETGDIAALVLDGGRRVEGDLFLDCTGFRALLIEKALHAGYDDWSHWLPCDSAIAVQTENVGPPVPYTRAMAHDAGWQWRIPLQHRTGNGIVWCSRYLTREAALERLLGNVEGRVLTEPNHLSFQTGARRRQWHRNCIAIGLSGGFMEPLESTSIHLIQRAILRLVRMLPLGPVNPSDVAEFNDQQLTDMVQIRDFLILHYKATDRRDSPFWRQAAAMDVPETLAQKIALFRETGRVFRRNEELFAENSWVQVMLGQGIVPQSWHPIAAKLSDDELARFLGSIREQVARTVATLPSHAAYVSRYCGATAPAEKAA

SEQ ID NO: 89094 - protein, 516 aa, Streptomyces sp.
  misc_feature (1)..(516): tr|A0A1Q4WDD5|A0A1Q4WDD5_9ACTN Tryptophan halogenase OS =Streptomyces sp. CB02923 OX=1718985 GN=A6A06_35040 PE= 4 SV=1
MIKSVVIVGGGTAGWMSASYLKAAFGDRLDVTLVESDRVATIGVGEATFSTVRHFFDYLGLDESEWLPECSGSYKLGIRFENWREPGHHFYHPFERLRTADGFPLADWWLREGDRSEPFDRSCFITPALCEAERSPRMLDGSLFAGDLDGSLGRSTLEEQRDQFPYAYHFDAALLAKFLTKFGTDRGVRHVVDDVLDVARDQRGWISHVTTREHGDLSGDLFIDCTGFRGLLINQTLEEPFESFEDVLPNNRAVALRVPQPNQAETGMRPYTTATAMDAGWIWTIPLFGRIGTGYVYSDAHCTPEEAERTLRAFAAPGQDDLEANHIRMRIGRNRRSWVNNCVAIGLSSAFVEPLESTGIFFIQHGIEQLVKNFPDAHWDQALIDDYNNRVANVLDGVKEFLALHYRAAQRDDTPYWKEAKVRALPDGLAERLALSSSHLLDEHTIYPAYHGFEQYSWITMLLGLGHEPARPRPALAHIDPAGARAEFAALKASTQRLVENLPSCYEYVASLNARR

SEQ ID NO: 89095 - protein, 533 aa, Gemmatirosa kalamazoonesis
  misc_feature (1)..(533): tr|W0RM71|W0RM71_9BACT Tryptophan halogenase OS=Gemmati rosa kalamazoonesis OX=861299 GN=J421_4025 PE=4 SV=1
MTRREIAVVGSGFAGSLAARVLAVLGHDVVLLERGTHPRFAIGESTTPLANLSLERLARRYGLADCWHLATHGRWLAHHAGVRRGLKRGFTFYRHHPGRPFENAGLDSERLLVAASPSDDIADTHWLRADVDHHFVREAVAAGVDYRDRVELTGAERAPGGWRLTGTRGGEPLGLRAEFVVDASGPGGFLARQLAIPSALDRVETQSALVYSHFDGVRTMPDVVPGLPDGPYPDDRAAVHHVIDEGWMYALRFDDDVTSAGFLLTPRGLASLGADAPDPAALWRAVVERYPTIGAAYDDATPRTPIGFVPRVQHRLARAAGDGWLLLPHAYAFVDPLFSTGIAWGLRAVERLALAFEHGVPNAAWLARYDAALAAEATQIDRLVAGAYEAMAHFELLAAHAMLYFATVSFAEVGQRLAPEDDATWSGFLGVGDAVTEPLPGEALRRLRTLSPADADARRAFAAWVADAIHPRNVAGLADPSRHNLYPVDLDTLIDRHALLGMTRAAVLAALPALRGMGPEPDLSQIAGIGSRR

SEQ ID NO: 89096 - protein, 516 aa, Pseudoalteromonas carrageenovora
  misc_feature (1)..(516): tr|A0A2K4X8F8|A0A2K4X8F8_PSEVC Tryptophan halogenase OS =Pseudoalteromonas carrageenovora IAM 12662 OX=1314868 GN=PCAR9_A21060 PE=4 SV=1
MTKPIKKIVILGGGTAGWLSAGLLAAEHPHLSVTLIESANVPILGVGEGTWPSMRNTLQRIGIKEIDFITQCDTSFKQGSKFINWRNLNEGENYYHPFMNPQGYEHTNLHASWQRIAPTQKFADVVNMQSFVCQAALAPKQLQTPEYAAVTNYGYHLDAGKFAEFLKNHSVKNLNVTHITDDVTEVINDEKDYIASLKTNNNGNITGDLFLDCSGSRARLIGEHFKSEFIAQDHILFNNSAVAAQIPNSHPTQNITSATLSTAQGNGWIWDIALPTRRGTGYVFSSKYQSDESATDTLKSYIAKSTSEQQAEQLNYRVLKFSPGYRQKFWIKNCVAVGMSAGFLEPLEASALAMVELSISMLSEQLPQNRTHMSQLEARFNDRFSTRWQRVVEFLKLHYVLSERDDTPYWQNIRDLTTAPERLKNLLKLWQFQPPSRFDFIENEEVFSSSSYQYVLYGMGFNTQTVSAQNAFNDPRAGDYYYQQNREKIAQYLKGLPSNRELLNYLLSNNRQPHND

SEQ ID NO: 89097 - protein, 481 aa, Sphingomonas bacterium
  misc_feature (1)..(481): tr|A0A3D0WBJ5|A0A3D0WBJ5_9SPHN Tryptophan halogenase (F ragment) OS=Sphingomonas bacterium OX=1895847 GN=DEP91_ 08025 PE=4 SV=1
MTAAALAQALQRGTTITLVESDEIGTVGVGEATIPPIRIFNDTLGIDERQFVAEAQGTFKLGIEFVDWARVGHRYFHPFGAHGRNFDIVPLHQHWLRAREEGEGALLDEHSMAWHLARAGRFAPPSPDQRSVLSTYDYAFHFDAGLYARFLRRYAEGKGVVRVEGKVGDVSLNGETGHVERVTLEDGRAIDADLFVDCSGFRGLLIEGALATGYEEWTHWLPCDRAVAVPSARAEPPIPYTRSTAREAGWQWRIPLQHRTGNGYVYCSAHLDDDAAAAALLDRLDAPALADPRHLRFVTGRRRLAWKRNVVAIGLSSGFLEPLESTSIHLIQAGISKLLALFPDRGFDPATIDEFNRVTSIETERIRDFLILHYKLTERTDAELWRYCAAMDVPDTLKLKLEHFRRHGRLVAREMDLFAPPSWLAVHIGQLNFPEGLDPLLDHRSVDARGWLAKLRAAMAAEAARVPTHAEFIERNCRAAA

SEQ ID NO: 89098 - protein, 495 aa, Pseudoalteromonas carrageenovora
  misc_feature (1)..(495): tr|A0A2K4X8J3|A0A2K4X8J3_PSEVC Tryptophan halogenase OS =Pseudoalteromonas carrageenovora IAM 12662 OX=1314868 GN=PCAR9_A21059 PE=4 SV=1
MTKTNAIKNVVIAGGGTAGWMAAAALAKLIGKNIHVTLVESDDIGTVGVGEATIPPIRTFHKLLGINEQAFMKATQASFKLGISFENWGDENTRYIHSFGVTGKECWAGEFHHFWLQGKTLGINNPFGDYCYELQAAKAGKFAFNQQNPINYAYHMDATRYAQFLREFSEPLGVKRVEGKIQKVVKNAKTGHIESLLLNSGEQINGDFFIDCTGFRGLLIEQALHTGYEDWSHLLPCNSAIAVQTKSTSDTVLPLTRSIAHKSGWQWRIPLQNRVGNGLVYCSQYMDDEQAKALLLNNIEGEALTEPRVIKFKTGRRLKGWNKNCLALGLASGFVEPLESTSIHLIMSGIIRFMRLFPFNGITNHAIDEYNKQLKSEIENIRDFIVLHYKVTNRDDSEFWLHCSAMEVPKTLKHEIDLFKQTGRVFLDDGDIFRVDSWVQVMLGQGIGPEQHHLIASMMNNEELTRFLHGIKQQIEQRVSQLPPHHEFLKQYCPA

SEQ ID NO: 89099 - protein, 503 aa, Sphingomonas endophytica
  misc_feature (1)..(503): tr|A0A147I4W4|A0A147I4W4_9SPHN Tryptophan halogenase OS =Sphingomonas endophytica OX=869719 GN=NS334_07405 PE=4 SV=1
MEQQRDDGPMRRIVIVGGGTAGWMAAAALSRVLGPAGPAITLIESEEIGTVGVGEATIPPLQAFNTLLGIDEDAFVRATNGTFKLGIEFVDWGRIGQRYFHPFGVYGIDNGAVPFEALWRRMRQAGGAGPLADYSICAAAAANGRFLRPQPGNTPLAQIGYAFHFDAALYAAFLRRHAEAAGVVRHEGRVVDVTRRAGDGFIASVTLVDGTRVEGDFFIDCSGFRSLLLGDTLGTGFVDWSHWLPNDRAVAVPSAMVGAPTPYTRSTAHGAGWQWRIPLQHRTGNGHVYASAHLSEDEATATLLAGLDAPALADPRVLRFRAGRRAAFWVGNCVALGLASGFLEPLESTSIHLVQAGVARLLEMLPTRACAPADTARYNRLMIAEVDSIRDFIILHFHASARDDTAYWRDLAAMPIPDTLAERIAIYRRTGRVYREGDELFTRTSWLAVMEGQGLTAEGYDPVAAGMPEAEARARLARIAAVTAEAARRMPAHADFIARHCAA

SEQ ID NO: 89100 - protein, 500 aa, Massilia albidiflava
  misc_feature (1)..(500): tr|A0A411X5X4|A0A411X5X4_9BURK Tryptophan 7-halogenase OS=Massilia albidiflava OX=321983 GN=EYF70_29100 PE=4 S V=1
MEQQRQKKPVRRVVIAGGGTAGWMVAAGLSKSLGKLLDIKLIESEEIGTVGVGEATIPTLLNFHHLMEINEQEFMAETMATFKLGISFENWRNVNEDYIHSFGTTGTDHWTAGFQHFWHKGRERGIAGDYGDYCLELKAGLKNRFAHLPNNGMNYAYHMDAGRYAKFLRRFSERYGVQRVEGKIVEVRKNLLSGDITALRLDSGAELEGDLFIDCTGFRGLLIGQTMGVEYEDWSHWLFNDSAVALQTKSVRDAVPYTRSIARDAGWQWQIPLQHRVGNGLVYSTRYTDDETALRTLQAAVDGEPLMTPRVIRFTPGQRKQTWKGNCIAIGLASGFLEPIESTSIHLIQRGIIRLMQMFPQDGISQADIDEFNQQADYEIQHIRDFIILHYNVTNRRDTPYWRDAATMKLPPSLQHRIDLFRDTGRVFRVPNELFAENSWIQVMLGQGILPASHHQTADLMGDEELARFLGNISGTIDRTVAQLPSHQKYVEQYCSGTGW

SEQ ID NO: 89101 - protein, 533 aa, Kribbella antibiotica
  misc_feature (1)..(533): tr|A0A4V2YPS0|A0A4V2YPS0_9ACTN Tryptophan 7-halogenase OS=Kribbella antibiotica OX=190195 GN=E1263_15910 PE=4 SV=1
METTDNRIKNVVILGGGTAGWMTAAYLGKALQGTTTITVLEAPAVPRIGVGEATIPNLQSAFFDFLGIPEEEWMRECNASFKESIKFVNWSTPGAGESTPRLRADGKPDYFYHAFGQLPNHDGIPLSHYWYNDHVNGRTDRDFAFACYPVTPAMDAHKSPRRLDGTRVASYAWHFDANLVAAFLCKFAVEKQGVVHISDQMTEAVQDERGFVTALKTKDGRTVEGDLFVDCSGFRGLLINKAMAEPFIDMSDHLLNDSAVATQIPHDDAANGVEPFTSAIAMSAGWTWKIPMLGRFGTGYVYSSKFASEDDATAEFSKMWGLDPKNTDFNKIRFRVGRNERAWVKNVVSVGLASCFVEPLESTGIYFITGALFQLAKNFPNLDFDPVLIKQFNAEIETMFDDTRDFIQAHFYYSPRTDTPFWQANKELYLAEGFQEKVAMYKSGMVVNMPIMEEGGYYKNFEAEFRNFWTNNNYYCVLAGLGVLPDRPMPALAYRPESVAGAEPLFAELRRKQEALVESLPSTYEYLTHFHGK

SEQ ID NO: 89102 - protein, 512 aa, Lysobacter gummosus
  misc_feature (1)..(512): tr|A0A0S2G9V9|A0A0S2G9V9_9GAMM Tryptophan halogenase fa mily protein OS=Lysobacter gummosus OX=262324 GN=LG3211 _3661 PE=4 SV=1
MHNDADTHAAAVRPVKRVVIAGGGTAGWMAAAAVSKILGGTLEISLIESEEIGTVGVGEATIPTLSTFHRLLDIDEREFMAATRGTIKLGISFENWRTQQHRYIHSFGTTGRDHWSAGFQHFWRRGRELGLAGGYDDYCVELQAALQGKFAHLKNYRMNYAYHLDASLYAKYLRAMSERNGCRRIEGKIVEVLTDADSGYITALRLERGEVIEGDLFIDCTGFRALLIDKTMGVGFEDWSHWLLNDSAIAVQTTSVCDPVPYTRAIAEPWGWQWRIALQHRVGNGIVYSSRHVGDEEARQRLMETVDGEVLKNPWPVRFRPGRRLQCWNRNCVALGLAGSFIEPLESTTIHLIQRGITHLMRSFPQVIGQAGIDEYNTQMADELQHVRDFVVLHYYATERRDTPYWEYLANMELPQTLRRRIELFRETGTVFHVPGELFAENSWIQVMMGQGITPKAHHPTADTMSETDLRRFLDDIRTHVETTVRMLPSHQAYLDQYCPSGPRAAVSTSVA

SEQ ID NO: 89103 - protein, 504 aa, Duganella sp.
  misc_feature (1)..(504): tr|A0A0Q4NNL6|A0A0Q4NNL6_9BURK Tryptophan halogenase OS =Duganella sp. Leaf61 OX=1736227 GN=ASF04_18695 PE=4 SV =1
MPQQNQQPQPSRPVRRVIVAGGGTAGWMAAAALSRTLGKVLDIKLVESDDIGTVGVGEATIPSLAQFHRLIDIDEREFMAATQATFKLGISFENWRARGENYIHAFGSTGIDHWTAGFHHFWQKGRERGIAADYGDYCLEHKAARALRFGHLPDDGLVYAYHLDASRYARYLRRYAEHFGIERIEGKIADVQRDPVDGNVAALVLDSGRRLEGDLFIDCTGFRSLLLGQTMGVEYEDWSQWLFNDSAIAVQTESVGPAVPLTRAIAHDWGWQWRIPLQHRTGNGIVFSSRFVDDDTARAALLANIEGKLLTEPRVIRFTPGQRRQVWAGNVVGLGLATGFLEPIESTSIHLIQRSIVRLLQLFPTEGIEPTDVAEFNTQSADDIRTIRDFIILHYKVTERDDSPYWRAARDMTVPPSLQHRLDLFGGSGRVFRSQNELFSENSWVQVMLGQGLNPRTQHHTADVMPERELAAFLDGIRTGIDRTVAQMPAHQAYVERYCPAEQP

SEQ ID NO: 89104 - protein, 502 aa, Niveispirillum lacus
  misc_feature (1)..(502): tr|A0A255Z165|A0A255Z165_9PROT Tryptophan halogenase OS =Niveispirillum lacus OX=1981099 GN=CHU95_11180 PE=4 SV =1
MSESRIRELVIVGGGTAGWMTAASLANHFQGSGLKITLIESSAIGAVGVGEATIPTIRRFYQSLGLRDLDVLRATHGTVKLGIRFDGWLNKDSSFIHPFGVYGQDLRDIPFHQYWLRLRAAGEKVDLGDYSLAVALARGGRFTTPSPNPPSTLSVFDWALHFDAGLFAQLMRQTAEKLGVQRIDAKIEKVELNPQNGHIAGVLLDSGSTVTGDLFIDCSGFQGLLIEGAMSAGYEDWGQWLLCDRALAAQGHAITPPPPFTRVTAHKAGWRWTIPLQHRTGHGYVYSSRHISDSDAEAELLAAVGGDLKMAPRRISFTPGRRKQAWKGNCVAIGLSSGFLEPLESTSIALIETGIDKLKQLFPQRDIDPVLVEEYNDWSQREMERVRDFIILHYWLNRRQDTAFWRDCRAIDLPDTLIRKVEMWKRRGHMVRYRWEMFQPASWLAIYAGFDFLPEGYDPALDGFDVPSLSRGLAGMRKAIADTVADCPTHQEFIDRYAKVVV

SEQ ID NO: 89105 - protein, 538 aa, Burkholderia pseudomallei; identical to SEQ ID NO: 84273
  misc_feature (1)..(538): tr|Q3JJI0|Q3JJI0_BURP1 Tryptophan halogenase OS=Burkhol deria pseudomallei (strain 1710b) OX=320372 GN=prnA PE= 4 SV=1

SEQ ID NO: 89106 - protein, 497 aa, Pseudoalteromonas carrageenovora
  misc_feature (1)..(497): tr|A0A2K4X8S4|A0A2K4X8S4_PSEVC Flavin-dependent tryptop han halogenase OS=Pseudoalteromonas carrageenovora IAM 12662 OX=1314868 GN=prnA PE=4 SV=1
MKPIKHVVIAGGGTAGWIAAALLNKVLGKVIDITLIESSTIGTIGVGEATIPPIIQLNNALGINEQDFINATNASIKLGIEFENWKTPSHSYMHAFGSFGKDFPFCDFYNFWVKGKITGSEDSLWDFSLNYQAAQQLKFAPLNTIPNTQLPGLSYAYHFNATRYAEYLKTLATSRGVKHIDAKIEQVNQCPHSGNITSLTLDNDTEINGDLFIDCTGQRALLIEQTLNTGFVDWSHYLPCDSAVAVQSQGTDSLKPYTRSIAHSAGWQWQIPLQNRVGNGLVYCSRYLSDESATQLLLNNLPAEPITEPRVIKFKTGRCLKQWHKNVVSVGLASGFLEPLESTSIHLIQSAVTRLIKLFPNNGISDALVAEFNKQSVTEIEHIRDFIILHYKLTEREDSAFWRQCKQMEIPDSLAHKLNLFKHTGKVVRENDELFAEVAWQQVFIGQGLIPDDYNSIVDSLSSEQLNDLFSTLKTLITSTVEQLPTHKDFLAKIKKA

SEQ ID NO: 89107 - protein, 501 aa, Dokdonella immobilis
  misc_feature (1)..(501): tr|A0A1I4WA99|A0A1I4WA99_9GAMM Tryptophan halogenase OS =Dokdonella immobilis OX=578942 GN=SAMN05216289_104103 PE=4 SV=1
MHDSRIRKIVIVGGGTAGWMTAATLAKLIGRSVAIRLVESDEIGIVGVGEATIPQIRLFNATLGIDEDEFVRETRGTFKLGIEFVDWTRPGSRYMHAFGVVGGRDLGLVQFYQYWLKLHQLGKVAELGSYTFNQVAARLGRFMRGTGQPNSPLTNVYHAFHFDAGLYARFLRGYAEKLGVVRTEGKIVDTILRGEDGFIEAVVLDSGERIEGELFIDCSGFRGLLIEQALHTGHEDWSHWLPCNRAMAVPCASVPDPTPYTRATARPAGWQWRIPLQHRTGNGHVYCSDFMGDDEAAAILLANLDGEALADPRPLRFTTGMRKRFWNRNCVAIGLSSGFMEPLESTSIHFIQSSIAKLVALFPDRGFAEQTIDEYNRQTRFEFERSRDFLILHYLANARDEPFWQRCREMAIPDTLRHKIDLFRSSARLFREHEELFTEVGWLQVMVGQGIVPERYHPMVDMLGEAEIVQMVEGTRAVLERAAAAMPSHAEFISRHCRASA

SEQ ID NO: 89108 - protein, 506 aa, Burkholderiales bacterium
  misc_feature (1)..(506): tr|A0A257H1I3|A0A257H1I3_9BURK Tryptophan halogenase OS =Burkholderiales bacterium PBB4 OX=2015566 GN=CFE44_147 35 PE=4 SV=1
MQQENKFDIVIVGGGTSGWMTAAALSKVLKGQYNIKLVESDEISTIGVGEATIPMINLFNRLLDLDEDQFIRETQASFKLGIEFVNWGRLGDRYIHGFGVIGQDNWTCDFHQYWLKQYLAGKAKDLDHYSINTAACHDNKFLRAQTDMPNSPLSQIAHAYHFDAGLYAKFLRKFSEARGVTRIEGKINDVIVRDGDGHIESVVLENGERIHGKLFIDCSGFRALLIEGALKTGFEDWSHWLPCDRAIAVPCASAKVLTPYTRSTARSAGWQWRIPLQHRIGNGHVFSSKFISEDEATAVLMSNLDGAPLADPRTVKFVTGKRKKAWNKNCVAIGLASGFVEPLESTSIHLVQMGIAHLLTFFPTAGFEASDTQAYNRIMNLEYDWVRDFIILHYKATERNDSPFWNYCREMEIPESLAERMDLYKSNGRVYREGNELFTKVSWVQVMHGQRLRPTSHHPLTDLISEEEIQNYLNEVEGVIKACVNVMPDHAEFIAKHCAATTPTMA

SEQ ID NO: 89109 - protein, 478 aa, Streptomyces rapamycinicus
  misc_feature (1)..(478): tr|A0A3L8RAP8|A0A3L8RAP8_STRRN Tryptophan halogenase OS =Streptomyces rapamycinicus (strain ATCC 29253 / DSM 41 530 / NRRL 5491 / AYB-994) OX=1343740 GN=D3C57_143340 P E=4 SV=1
MNSALQSDYDVVVVGGGPGGSTLSTLVALQGYRVLLLEKEEFPRHQIGESLLPSTVHGICRLLGVTDELANSGFIKKRGGTFRWGLNAEPWTFDFSVSDKFSGPTSYAYQVERMKFDKILLDNARSKGVDVRERSEVVGVLEEEGRICGVQYDDAEGVRRDVRASFVADASGNKSRIHKRIGGARKYSDVFQNIALFGYFTGGKRMPAPVAGNITCASFDLGWFWYIPLSDELTSVGAVLRREALERLQDGPRDKVLGGLIDECPLIADYLSEAERVTEGPYGQVRVRKDYSYIQEKFWRPGMVLVGDAACFIDPLFSSGVHLSTYSALLAARSINTTLRGTIDEADCFREYEARYRREYDVFHDFLVAFYDLQKDEHAYFHEAKSVIGSSASAAESFAELVGGGASEEEVLIGTAPSFSQERRADLLERSRKIHWQGSRVQVQAHFGESVGDDPLYEGGLVESPDGMHWARPEQPAS

SEQ ID NO: 89110 - protein, 536 aa, Sphingomonas paucimobilis; identical to SEQ ID NO: 85805
  misc_feature (1)..(536): tr|A0A411LED2|A0A411LED2_SPHPI Tryptophan 7-halogenase OS=Sphingomonas paucimobilis OX=13689 GN=DRN02_000480 P E=4 SV=1

SEQ ID NO: 89111 - protein, 504 aa, Maricaulis sp.
  misc_feature (1)..(504): tr|A0A1Q8FWC5|A0A1Q8FWC5_9RHOB Tryptophan halogenase OS =Maricaulis sp. W15 OX=1772333 GN=AWH62_15910 PE=4 SV=1
MTPNRIKSVLIVGGGTAGWMAAAALSRFLGETIKIQLVESEQIGTVGVGEATIPQIKHLNSVLCIDEREFVARTNGSFKLGIEFINWRRQGEAYLHNFGSIGLNLQQVPFHHYWLRARAGGASESLWDYCLNTAAARQMRFAPLEKVGNSPLSGIAYAYHFDASLYGKFLRDYAEQRDVIRVEGLIDDTIMDPESGHVTAVRLRDGRTLEADLFIDCSGFRGLLIEQALKTGYDDWTHWLPCDRAIPVPSSNAQAPIRPYTQAIAHKAGWQWRIPLQHRTGNGHVFSSAHMSEAAATETLLANLEGEALAEPRVIRFVTGRRKQFWNRNVVALGLASGFLEPLESTSIHLVQSGISRLIALFPDGDLAAADRDEYNRQMALEYERVRDFIILHYHLNERTDSDFWQDCAAMSVPDTLSAKLDLFRANGRLYHREEDLFTDSSWLQVMLGQGVNPKGYHPMADALAAGQLSDFLGNIQKIVGQAAATLPTHSDFLAKHCPAAMDR

SEQ ID NO: 89112 - protein, 505 aa, Litorimonas taeanensis
  misc_feature (1)..(505): tr|A0A420WJG8|A0A420WJG8_9RHOB Tryptophan halogenase OS =Litorimonas taeanensis OX=568099 GN=DES40_0474 PE=4 SV =1
MKAPSSALNHIIIAGGGTAGWMTAAALSRLIENKQTRITLIESDAIGTVGVGEATIPPIVGFNQLLGIPEEDFIKFTNATFKLGIEFKNWYNGKDSYIHPFGSYGQDIEAIKFYQIWLKLNALGKVPNIDEFCLSAVAAYSGKFAPPSPNPNSVMSSLAYAYHFDATQYALLLRSLAESRGVKRVEGKIVDTALNSENGHITSLKLQSGDTIEGDFYIDCTGFKSLLINGALGIEFEDWSHWLPCDRAVTIAGARDSAPAPYTRATALTAGWQWRIPLQHRTGNGHVYSSQYITDDDAEKALIENLEGNPIGSARKIHFRTGRRKKFFHKNCVAIGLSAGFMEPLESTSIHLIQAGISKLIALLPDPSFNTAEAETYNNLTHMQFEQTRDFLILHYKATQRTDSDFWTYVKNMDIPDSLQMKLELFKSKGRIFRFQDELFGEDNWAAVLLGQKVMPRSWDPLVDTLDTQQLSNHLAGMHQLIRRTAEQMPDHQSYIDQLVRKTTR

SEQ ID NO: 89113 - protein, 503 aa, Hyphomonadaceae bacterium
  misc_feature (1)..(503): tr|A0A3D3Z464|A0A3D3Z464_9RHOB Tryptophan halogenase OS =Hyphomonadaceae bacterium OX=2026748 GN=DIU09_06110 PE =4 SV=1
METNGLLPKSIVIVGGGTAGWMTAAALARFVGHKVKITLIESSDIGTVGVGEATIPPIRNFNAILGLDEAEFVRETKGTYKLGIEFCDWVKPGHRYFHPFGVYGPSLNQPNFFHQWLRARAGGQLPELSEFSLCSLAARAGRFAPQGRDPASIQATLTSAFHFDAGLYAAYLRKFAEARNVRRLDQKVQSVRQSPETGNVEAVLLESGEAIEGDFFVDCTGFRGLLIEQTLKTGYEDWRAYLPADRALAVPTAKVGPAVPFTRSTARSAGWQWRIPLQHRTGNGYVYSSQFVSDEAAHETLMGNLDAPASADAKPLRFVTGRRKKLWNKNVVAIGLASGFLEPLESTSIHLIQTGITKLLDFFPSRQNHAADAATYNRLGQEEYESIRDFLVLHYMANQRVGEPLWDYCRQMALPDSLQERLALFQHGGRVPPRAFDLFTETSWVAVFMGQGIEPQGYNPLVEVHEGAAGRQFLADAHRALAELSRQLPAHEDFLRQAGMMPS

SEQ ID NO: 89114 - protein, 386 aa, Acidovorax avenae
  misc_feature (1)..(386): tr|F0Q0Q3|F0Q0Q3_ACIAP Tryptophan halogenase OS=Acidovo rax avenae (strain ATCC 19860 / DSM 7227 / JCM 20985 / NCPPB 1011) OX=643561 GN=Acav_2542 PE=4 SV=1
MNAAGTVFDAAIAGAGPAGAACAAVLARAGWRVLLADAGGERDARIGENLPPAVCHLLAELGLREAVRADGHRPCLGSWSSWGDASGRASDTLRQLQGDGVQLDRARFDERLRAAALLDGVRFWPSTHLQIDRPAEDGLPHAVRARATSGGDTVQVGARWFIDATGRAAAPACRLGARRERHDALLAFHLRLESSGRNDRDGRTWIEAVEDGWWYSVLLPGGERVVSFLGDADLVDRRTLLSGDGLWSQLQSTEHLRALCAAHGYRPCAAVQGADACSSELDQPAGHRWLAVGDAAQAFDPLSSKGIGNALHTGLCAARAMLAAEGGDAGATGRYAAHLRDIHRVYRAQLAAVYAQERRWAGQPFWARRHARAVTAAHPPVAATLA

SEQ ID NO: 89115 - protein, 495 aa, Pseudoalteromonas elyakovii
  misc_feature (1)..(495): tr|A0A558HVI5|A0A558HVI5_9GAMM Tryptophan 7-halogenase OS=Pseudoalteromonas elyakovii OX=81037 GN=FQP81_14090 PE=4 SV=1
MTKTNAVKNVVIAGGGTAGWMAAAALAKLVGNNINITLVESDDIGTVGVGEATIPPIRTFHKLLGINEQAFMKATQASFKLGISFENWGDENTHYIHSFGATGKECWAGEFHHFWLQGKALGINNPFGDYCYELQAAKAGKFAFNQQNPINYAYHMDATRYAQFLREFSEPLGVKRIEGKIQKVVKNPKTGHIESLILNNGEHINGDFFIDCTGFRGLLIEQALHTGYEDWSHLLPCNSAIAVQTKSTSETVLPLTRSIAHKSGWQWRIPLQNRVGNGLVYCSQYMDDEQAKALLLSNIEGEALTEPRIIKFKTGRRLKGWNKNCLALGLASGFVEPLESTSIHLIMSGIIRFMRLFPFNGITNHAIDEYNKQLKSEIENIRDFIVLHYKVTNRDDSEFWQHCNAMEVPKTLQHKIDLFKQTGRVFLDDGDIFRVDSWVQVMLGQGIEPNQHHLIASMMSDEELTRFLHGIKQQIEQRVSQLPSHHEFLKQYCPA

SEQ ID NO: 89116 - protein, 499 aa, Hyphomonadaceae bacterium
  misc_feature (1)..(499): tr|A0A2E3ARS9|A0A2E3ARS9_9RHOB Tryptophan halogenase OS =Hyphomonadaceae bacterium OX=2026748 GN=CME95_03880 PE =4 SV=1
  misc_feature (196)..(196): Xaa can be any naturally occurring amino acid
  misc_feature (203)..(204): Xaa can be any naturally occurring amino acid
  misc_feature (214)..(214): Xaa can be any naturally occurring amino acid
  misc_feature (253)..(253): Xaa can be any naturally occurring amino acid
  misc_feature (264)..(264): Xaa can be any naturally occurring amino acid
  misc_feature (267)..(267): Xaa can be any naturally occurring amino acid
  misc_feature (270)..(270): Xaa can be any naturally occurring amino acid
  misc_feature (290)..(290): Xaa can be any naturally occurring amino acid
  misc_feature (298)..(298): Xaa can be any naturally occurring amino acid
  misc_feature (301)..(301): Xaa can be any naturally occurring amino acid
  misc_feature (330)..(330): Xaa can be any naturally occurring amino acid
  misc_feature (362)..(362): Xaa can be any naturally occurring amino acid
  misc_feature (364)..(364): Xaa can be any naturally occurring amino acid
  misc_feature (370)..(370): Xaa can be any naturally occurring amino acid
MDTQNIRRVVIAGGGTAGWIAAASLSRLLGPLLDITLVESDTIGTVGVGEATIPTHRTFHHLMGIDERDFMRATKATFKLGIAFENWGGQGDRYIHSFGQVGKSNWMGEFYNIWMYAQERGIGDELDAYCYELQAAEAGRFYTSEKANINYAYHLDASLYAKFLRNFSEAKGVKRIEGLIEEVEQDGESGFITALXLQSGERXXGDLFIDCTGXRGMLIEQTLKTGYEDWTHWLPTDSALAVQTRSVGPALPXTRAIAHHAGWXWRXPLXHRVGNGLVFCSENMQPDEAXDYLLSHVXGEXLTEPRLIRYKTGRRKKMWNKNCVALGLSXGFVEPLESTSIHLIQVGATRLVQQFPFAGISXAXATHYNXQAERELEKIRDFIVLHYKLTERDDSDFWRARRDMEIPDSLAQRIALFRENGLAYQATDDLFRVDSWLQVMMGQRLKPKGYHHMGHLMTDEQLKTALNGLQANISRAVSQMPSHQDFINQYCAAPEAEPV

SEQ ID NO: 89117 - protein, 505 aa, Maricaulis sp.
  misc_feature (1)..(505): tr|A0A1Q8FWB6|A0A1Q8FWB6_9RHOB Tryptophan halogenase OS =Maricaulis sp. W15 OX=1772333 GN=AWH62_15905 PE=4 SV=1
MPSQSFEQESGLPRIAIIGGGSAGWMAAAAIIKATKGAASVTLVESEQIGVVGVGEATIPPIKLFNQMLGIDENEFVRETQGSFKLGIEFVDWSRRGQRYFHPFGTHGRDFDSVPLYQYWLRERRRGDETPLDAYSMAWVVARENRFSPPARDPRLVQSTFDYAYHFDTILYGQFLRRYSEARGVDREEGRVVETRLSETGDVAAVVMEDGRAIEADFFIDCTGFFGLLIEQALKTGYEDWTHWLPCDRAMAVPSETAGDFTPYTRSTAREAGWQWRIPLQHRTGNGHVYASQFITDDEASDTLLANLDGKPLADPRPLRFTTGRRRKFWNRNVVALGLSAGFMEPLESTSLHLIQTGINRLLALFPGTGDNRLEAAEFNRLTGEEYERIRDFLILHYHATTRDDAPLWRYTANMDIPDSLAWRMEHFRATGRLVSPGTELFLNPSWMAVYAGQEIEPAGLDPLVVGSQVDGAERLAGLRRVMAEAVAPVPDHRAYIERFCKADA

SEQ ID NO: 89118 - protein, 522 aa, Alteromonas mediterranea
  misc_feature (1)..(522): tr|A0A1J0SVG9|A0A1J0SVG9_9ALTE Tryptophan halogenase OS =Alteromonas mediterranea OX=314275 GN=BM525_17630 PE=4 SV=1
MTTATPITHIVVVGGGSAGWLTAGRIAAQHQCATRKDIKVTLVESPNVPIIGVGEGTWPTMRSTLIALGISETTFIKECDATFKQGAKFAKWTTGEKSDFYYHPLMLPQGFSQTNLGPYWQTVAPELNESFSHAVCVQEAICEAGCAPKSIRHAEFAGTANYAYHLDAGKFTAFLTKHCTEKLGVHHVLADVNRVESFDNGDIKALHTEQGVTVEGDLYVDCTGFKSMLLGEHYKVPFIPCDDVLFIDRALAVHVPYDTPQSPIASHTISTAQDAGWIWDIGLQSRRGVGHVYSSRHQNKDDAYARLDTYVRQTSSLNGIDDINVKDITIQSGHRQRFWQNNCVAVGLAAGFLEPLEASALVLVELSASMIAEQLPANRAVMDIVAKRFNDTFSYRWQRIIDFLKLHYMLSKREDSAFWRDNRDSHTIPDSLKELLALWQYHPPSDKDFTSNNEVFPAASYQYVLYGMGFTSDLATHQQWVNADFAKQQLMQNRKARSMAVEKLPKHRELINKIHQFGLQAV

SEQ ID NO: 89119 - protein, 510 aa, Alteromonas mediterranea
  misc_feature (1)..(510): tr|A0A1J0SBM2|A0A1J0SBM2_9ALTE Tryptophan halogenase OS =Alteromonas mediterranea OX=314275 GN=BM525_01070 PE=4 SV=1
MNHSSNTSQKQRIVIVGGGTAGWLTAAIVAAKHKVTIGECGLDITLVESSDIPTVGVGEGTWPTMRNTLKDIGLSEKEVFKRCSAAFKQGGKFVNWVKGNGDFYYHPFTVPLGYGRVEMAPYVGDIANFANATNFQQHVCERNMAPRTLSEQEYSSAQSNYAYHLDAGAFADMLRDFSKTQLGIKHIVATVENVAASSNEHIENITLNNGEVLEADLFVDCSGFRSLLLGETLGESVISTDEVLFNNSALALHVPHEEDFEIKPYTQATAQEAGWIWDIGLSSRRGVGHVYSTDFTTDERAEEVLRQYVGDEHGDLKARTIRFNSGYKKRIWKGNCIAVGLSAGFVEPLEATALMLIEISARYIAEQMPLPVTAMPIVSQRFNKQMNYRWQRIIDFLKLHYIFNQRSEPYWVANREAASIPDSLKEDLEIWKYRGPQIADFSAAIELFPAASYQYVLYGMGFSPDFSLQSHFYNERDLADKVMQQNQLITQQKLSSLPNHRDYIEQWLAS

SEQ ID NO: 89120 - protein, 127 aa, Stenotrophomonas sp.
  misc_feature (1)..(127): tr|A0A3C0GUE9|A0A3C0GUE9_9GAMM Tryptophan halogenase (F ragment) OS=Stenotrophomonas sp. OX=69392 GN=DCM50_1369 5 PE=4 SV=1
MNVANTTQGRIRKVVIAGGGTAGWLAGCALAHQFRDQLDITLVESEQIGTVGVGESTVPPIRTFHRFLQIDEQEFLRAVAGTFKLSISFENWRRPGDRFIHPFGTIGQGTWATPFHHFWLDSLRRGM

SEQ ID NO: 89121 - protein, 501 aa, Alteromonas mediterranea
  misc_feature (1)..(501): tr|A0A1J0SKF5|A0A1J0SKF5_9ALTE Tryptophan halogenase OS =Alteromonas mediterranea OX=314275 GN=BM525_18445 PE=4 SV=1
MTALGLDSSNNQTPVKNVVIAGGGTAGWMAATALSRLLGKSVSVTLVESKDIGIVGVGEATIPPIRTFHKLLGIDEKAFMRATQATFKLGIEFENWREVNHSYIHSFGITGRECWAGEFHHFWLRAQDYGFGGDFGDYCPELIAAKQNKFATSDAMPLNFAYHFDAVAYGRFLKSLACDAGVTHREGDIEKVTVCPNTGNIQALHLTDGESIGGDFFIDCTGFKGLLIEQALHTGYDDWSHYLFCDRAVAMQTELTSPPVPYTKSVAHKAGWRWQIPLQERMGNGLVYCSRFMSDQEAIDTLKSQVSSTPINEPRVIRFTPGKRRRGWNKNCVALGLSSGFIEPLESTSIHLIMTGLIRLMRLFPFDGVTQSAVDEYNNKFDSEMSAILDFIVMHYKVTQREDSPFWQQCQRMDIPDSLKHKLALFAESGRVFLDDGDIFRVDSWTQVLMGQGMKPQQYHRVVDEMSEQSLKQFMAGLKLQVDNHVAKLPSHNAFLAQYLR

SEQ ID NO: 89122 - protein, 501 aa, Oleiagrimonas sp.
  misc_feature (1)..(501): tr|A0A328T287|A0A328T287_9GAMM Tryptophan halogenase OS =Oleiagrimonas sp. MCCC 1A03011 OX=1926883 GN=BTJ49_051 65 PE=4 SV=1
MNDRRIRRIVIVGGGTAGWMTAAALGQALQGNCRIDLVESDRIGTIGVGEATIPPIKLFNQRLGIDENAFITATQGTFKLGIEFVDWSRKGHRYFHPFGQFGAEFDKVPLHHYWLRERTRGDATPLEDYALAWMAARAGKFMTPSKDPRQVLSTFDYAYQFDAGLYATFLRRYAEQHNVRRTEGRVTCVQLREDGFIDRVTLESGEHLEGDLFIDCSGFRGLLIEGALHAGYEDWRHWLPCDRAVAVQCEHGEAFVPYTRSTAHAAGWQWRIPLQHRVGNGHVYCSHYISDDEATATLMDHLEAPALTEPRLLRFTTGRRRRFWHRNCVAIGLSAGFLEPLESTSIHLIQSAVTRLLALFPDRDFDPYTTAEFNRLTGQEYERVRDFLILHYCATQREEPMWRHVARMDIPQPLAYKLAHFRGHGRLVAENHELFQNPNWLAVLVGQEVWPERYDPLVDLRSEVDAPQILAGLRDVIGQAVDAMPTQREYIDRYCRAQPGK

SEQ ID NO: 89123 - protein, 494 aa, Sphingomonas paucimobilis; identical to SEQ ID NO: 87703
  misc_feature (1)..(494): tr|A0A411LEJ5|A0A411LEJ5_SPHPI Tryptophan 7-halogenase OS=Sphingomonas paucimobilis OX=13689 GN=DRN02_000915 P E=4 SV=1

SEQ ID NO: 89124 - protein, 504 aa, Caulobacter segnis
  misc_feature (1)..(504): tr|D5VGS5|D5VGS5_CAUST Tryptophan halogenase OS=Cauloba cter segnis (strain ATCC 21756 / DSM 7131 / JCM 7823 / NBRC 15250 / LMG 17158 / TK0059) OX=509190 GN=Cseg_2051 PE=4 SV=1
MTPAPIRKIVVVGGGAAGWMTAAALSAMLEGLDVRITLVESEEIGIVGVGEATVPHIRHYNARLGLDEADFMRKTQATYKLGIEFCDWGRKGEAYIHPFGAYGHAIGGIPFHQHWLRAHQRGEVGSIDAYSLPVMAARADKFAPPSTDPRSLGSTFNYAYQFDAALYARYLRAYAEARGVVRVEGKIAAADQRPEDGFVTSVRLEDGRVIDGELFIDCSGFRGLLIEQTLKAGYDEWTRWLPCDRAAAAPCEAVEPPKPFTRATADQSGWRWRIPLQHRVGNGYVYCSSYIDDDAAARVLLEKLDGKPSQDPRFLRFVTGRRKKQWCKNVVAIGLASGFLEPLESTSIHLIQLAISNLLELFPHQGFDPADADEYNRVMDLEFERIRDFLVLHYHVNQRTDSVFWNDRRNAPVPDSLAEKMALFRERGVVAAYKDGFFKEPSWVAVYLGQNFTPDGYDPLVEAVDPAQSARVMAEIEAAVARTVSAMPSHDSYLRAFADARLPA

SEQ ID NO: 89125 - protein, 516 aa, Caulobacter segnis
  misc_feature (1)..(516): tr|D5VG50|D5VG50_CAUST Tryptophan halogenase OS=Cauloba cter segnis (strain ATCC 21756 / DSM 7131 / JCM 7823 / NBRC 15250 / LMG 17158 / TK0059) OX=509190 GN=Cseg_1566 PE=4 SV=1
MKRGRSILIVGGGTAGWLTAAYLAKALRIGEQAHLSITVLESPEIGAIGVGEATFPTIRNTLQFLGIDEARFIRQTSATFKQGIRFVDWAHAPGEGRRHSFFHPFEAPFSTDGVSLAPYWLLQDEATRAPFAEAVTIQARVADAARAPKRPHESDFAGPLNYAYHFDAAKLAQVLAERAQELGVRHLEGHVGEAVLDETGAIARIVSPEHGELTADLYIDCSGFRAELIGKALNAPFKSARPVLFADRAVACRAPYDRPDAPIQSYTVATAHEAGWLWDIGLSGARGVGCVYSSDHIDDDRAEAILRAYVGGAEVETRRLTFEAGYRQKQWISNCVAVGLSAGFLEPLESTGVVLIEAAVAMIAELFPHTGPVSAPARRFNELMAARYENIIVFLKLHYALSRRPERFWRENTNPATIPERLQELLEQWRHRPPARFDFILDLETFAFFNYQYILYGMGFPTDLADGADEFPDAAGAAKLFAKIRGFADRATQDLPGHRDLIAQINRFGFEERALA

SEQ ID NO: 89126 - protein, 508 aa, Asticcacaulis sp.
  misc_feature (1)..(508): tr|V4N6D0|V4N6D0_9CAUL Uncharacterized protein OS=Astic cacaulis sp. AC402 OX=1282361 GN=ABAC402_01255 PE=4 SV= 1
MQSVVKKIVIVGGGTAGWMAAACFVKALDPNFYDITLVESEEIGTVGVGEATIPAIIQYNQFLGIDEYEFVRETNATFKLGIQFADWRKKGQSYFHPFGLFGIEIDGFTFPHYYFRHYLQRGAGEVDIGRYNAETEAALQGRFGRVKPENGKPNINYAFQFDAGLYARYLRRYSEQRGVVRQEGRIVQVNQNPETGYLTSVQMDDGRVIEGDLFVDCSGFRGLLIEETLKTGYTDWSRWLPMNRAAAVPCERVEVLTPYTRATARESGWQWRIPLQHRTGNGYVFCNDFISEDEAAQTLLARLDGKPLADPKILRFVTGRRNKAWNKNVVALGLASGFLEPLESTSIHLVQSGAFKFLALFPRHGFNPHIVDEYNRQVEHDYENIKDFIIAHYKVTERDDTPFWRQVQQMSVPDSLQARLDVFRSTCQTLSREPDLFKEVSWVAVLTGQGLVPQDYHPAADALEDDDLRLHLGRWRTLVTERVKTLPLHEDFINRHCASTSARLVAAG

SEQ ID NO: 89127 - protein, 495 aa, Acinetobacter colistiniresistens
  misc_feature (1)..(495): tr|N9QWR4|N9QWR4_9GAMM Uncharacterized protein OS=Acine tobacter colistiniresistens OX=280145 GN=F889_01758 PE= 4 SV=1
MLNLRGLNRVAVVGGGTAGWFAALQLRQVFGPSVEVMVISAPEIPIVGVGEGGVLNLLTVLRDLDIDLKDFIDKTGSTLKLGFRYERWRTGKEDDYYYHLFPLPTEDFAWNELGFNPYLSGLFNHGIDVSRYMASYQFSEDRKPFQEVLQILLEGKNNFGASLHFDTFRVGQYLKKIALSKGIVHIENKIEDFELDPATGYVSAIQCIDQKISCDFVIDASGFSKLLIGKKYQSYWCSFADILPMNRALPFHLPHKNKIELVTRATAMSSGWVWQIPLQERIGAGYVYHDQFITDQQAQQEVEQWLGHPINPVKPIAFEAGYFQEVWIKNVVGIGLASGFIEPLEATSIGQMLSQLALLISFIRENHGVISQQNIAFYNQQNAQYWQGIRDFIRMHYDTGRSDTPFWQYMLTVPQSESYQELKKCWLHRTPRDIDFVEHSMGGMSMFSAASWFAVGAGVGVIKPEATSAELYALSPEKKQKLAKYLQEIKQQLAL

SEQ ID NO: 89128 - protein, 498 aa, Hyphomonadaceae bacterium; identical to SEQ ID NO: 82779
  misc_feature (1)..(498): tr|A0A2E1LU32|A0A2E1LU32_9RHOB Tryptophan halogenase OS =Hyphomonadaceae bacterium OX=2026748 GN=CME93_08195 PE =4 SV=1

SEQ ID NO: 89129 - protein, 501 aa, Maricaulis sp.; identical to SEQ ID NO: 82777
  misc_feature (1)..(501): tr|A0A1Q8FR40|A0A1Q8FR40_9RHOB Tryptophan halogenase OS =Maricaulis sp. W15 OX=1772333 GN=AWH62_05435 PE=4 SV=1

SEQ ID NO: 89130 - protein, 509 aa, Stenotrophomonas sp.
  misc_feature (1)..(509): tr|A0A3D5JVH6|A0A3D5JVH6_9GAMM Tryptophan halogenase OS =Stenotrophomonas sp. OX=69392 GN=DGV23_09770 PE=4 SV=1
MNVANTTQGRIRKVVIAGGGTAGWLAGCALAHQFRDQLDITLVESEQIGTVGVGESTVPPIRTFHRFLQIDEQEFLRAVAGTFKLSISFENWRRPGDRFIHPFGTIGQGTWATPFHHFWLDSLRRGMPSELGDFCLESVASRSDRFSLETQPQVNYAYHFDAGLYARFLRRKAEAHGLRRVEGKIREVRQHPDDGAVASLVLEDGQVIEGDLFIDCTGFRGLLTEQTLHTGYEDWHEWLPSDRAVAVQTESVAPPVPYTRAIAHEAGWRWHIALQHRVGCGLVFSSRHMSDDEAHAKLLGDVDGPPLRDPWLVPFRSGRRLKAWNKNVVALGLASGFIEPLESTSIHLTISAVVRLIQLFPFDGISPALRTLYNEVSRQEMEHVRDFIILHYHANQRDEPMWKACREMPLPESLAIRLRAWRERAHAWQDPGELFRVDSWTSVMLGQGIQPGPPHPLAAALEDADLKMLLARIRQPVQQAVAAMPSQAAFIERYCRAAQDVWPRARAPA

SEQ ID NO: 89131 - protein, 506 aa, Hyphomonadaceae bacterium
  misc_feature (1)..(506): tr|A0A3D3Z5F0|A0A3D3Z5F0_9RHOB Tryptophan halogenase OS =Hyphomonadaceae bacterium OX=2026748 GN=DIU09_08350 PE =4 SV=1
MTPSSDRRIRSIVIVGGGSAGWMTAAALANTLKQDCEIKLVESELIGTVGVGEATIPPIRTFNEMLGIDEREFVAKTKGSFKLGIEFVNWGRQGNRYFHPFGPHGRAFDIVGLHHFWLKAREAGDTTSFDDFSMAWSLAQRGRFTRPSPDPRQVMSTFDYAYHFDAGLYARLLRDYAEARGVKRHEGKVVSVRQHGETGFVEGVTLESGLELTGDLFIDCSGFRGLLIGEALKVGYQDWTHWLPCDRAVAMPCAKVGDMLPYTRSTACEAGWQWRIPLQHRTGNGYVYCSKFISDEDAEASLRANLDGEALAGPNKLRFTTGRRDKFWDKNVVAIGLSSGFLEPLESTSIHLIQAGISKLLALFPQRDFDPLIVDEYNHIASTEFERIRDFLVLHYKLTTRDDSPLWRYCASMDIPDTLKLKIDHFRRYGRHIARDMDLFGQPSWLAVHIGQGNIPQDVDPVFDFRGIDGRDYLGKLKTAMVASAEQVSSHQAFVNTHCAAEGAIA

SEQ ID NO: 89132 - protein, 516 aa, Caulobacter segnis
  misc_feature (1)..(516): tr|D5VNT0|D5VNT0_CAUST Tryptophan halogenase OS=Cauloba cter segnis (strain ATCC 21756 / DSM 7131 / JCM 7823 / NBRC 15250 / LMG 17158 / TK0059) OX=509190 GN=Cseg_3732 PE=4 SV=1
MSHTHPNAIRKIVIVGGGSAGWITAAMLSHYFQAGGCRIELVESEEIGTIGVGESTIPPFLRLLASLGIDEREFIQATQASFKLGIRFEDWRRVGDRYMHPFGVIGGPFGPHEFYQCWLRAKAAGHPSGLHDFAPGAVMAEQGKFMLPFKAERTLIGGANYALHVDARLVARFLRDYAEARGVKRTEGIVSDVITHADGSVAKVRMKDGREIEGDFFIDCTGFRGLLIGKTLETPFDDWSDMLLCDRAVVVQTENVGAPHPYTLSKAEAGGWRWRIPLQHRAGNGYVFCSRFVSDDEARATLLGQLEGRALMEPMFIPFKTGVRQRLWEKNVVAVGLSGGFIEPLESTALHLIYRGVDFLLRFFPDRDFDPALREEYNRRMVADYEEIRDFIVLHYCKTQRDDTPFWRAVRAAPIPESLKERMALFEASGVLREGVDDMFRNPSWQSVMEGMGVRPQRYQPLVDTIPYDVISQTLDQSAPMLAAQVAGLPSHGEFLAKHCPAPPPAAPVAPFKTVA

SEQ ID NO: 89133 - protein, 498 aa, Sphingomonas paucimobilis; identical to SEQ ID NO: 87065
  misc_feature (1)..(498): tr|A0A411LED8|A0A411LED8_SPHPI Tryptophan 7-halogenase OS=Sphingomonas paucimobilis OX=13689 GN=DRN02_000485 P E=4 SV=1

SEQ ID NO: 89134 - protein, 521 aa, Caulobacter segnis
  misc_feature (1)..(521): tr|D5VGS7|D5VGS7_CAUST Tryptophan halogenase OS=Cauloba cter segnis (strain ATCC 21756 / DSM 7131 / JCM 7823 / NBRC 15250 / LMG 17158 / TK0059) OX=509190 GN=Cseg_2054 PE=4 SV=1
MTTDQRLRRIVIVGGGTAGWMTAAAMGRFLKDGYTRVTLVESEAIGTVGVGESTIPQINIFNRMLGLDENDFVRKTKATFKLGIDFVDWKHVGHSYHHPFGPYGVDMEGVSFHAYWLKLHALGLEDDLGAYSLQTVGARQGKFMRPNGQANSPLGQIAYAFQFDAGLYAKFLRAYSEARGVARQEGKIASVQQDGERGHVTSVTLESGEVIEGDLFIDCSGFRGLLIEQTLKTGYEDWSQWLLNDRAVAMPCALGGSMAPVTRATARPHGWQWRIPLQHRLGNGYAYCSQFVSDEEALADLLKNLDGAPLADPNLIRFTAGRRKKSWNGNVVAIGLSAGFMEPLESQSIHLIQVGISRLLAHFPDRHFRQADIDRYNRTMTFEYEKIRDFLILHFKATARNDTPYWDYLREMPIPDYLADKIELFKGSGRVFRENEELFNDTSWFAVMIGQGILPESYDPMVDCMDEGLFRARMAEIKAVIARSAEVMPDHFAFIRENCDAMAADVSLGSGAGTTHPESVT

SEQ ID NO: 89135 - protein, 551 aa, Boseongicola sp.
  misc_feature (1)..(551): tr|A0A4P7JCN3|A0A4P7JCN3_9RHOB Tryptophan 7-halogenase OS=Boseongicola sp. CCM32 OX=2552942 GN=E2K80_10285 PE= 4 SV=1
MGEPITEITIVGGGTAGWLTASLLQSILTRPGRADKDVRITLVESPNVPTVGVGEATVPGMPRTLKNIGIPEAEFFKTCNTSFKLGVLFRNWNVDNDGAPVDYVNPFNPVPRVEGIDAGYFMLRHGAGALDFVQTYSAAVDLARAHKGPRVLGAKENDPRVGFAYHLDAGKFAHMLRDTCIARGVTHILEDVVDVEQDDRGYIAALNLKESGRHPVQLVIDCTGFRGVIINQILKEPFVSYSRYLANDRALAVQIPHREPSKLPSVTQSTALGAGWVWRVPLFHRIGTGYVFSSAHRTDEQAMDEFMAHLGEEAEGAEPRVIPMRVGRTERAWVKNCIAVGLSGGFIEPLESTAIHMIDTAVRWLTTYFPDQDFADPLRDRYNKLSAALYDEVRDFICLHYALGNRSDDPYWIDARNLEVPDSLAENLELWKHTLPGPYDLEFASLFSPGVYQTVLLGKRVYETGYGSAEVTRNLPLRQEVWGRHLQAARTAIRKSVSEMADHRTLLTQLRGEDRAAPVFPMAQPTVAMPGAAPLKAPQIAPLEKEDASLL

SEQ ID NO: 89136 - protein, 504 aa, Sphingomonas paucimobilis; identical to SEQ ID NO: 87075
  misc_feature (1)..(504): tr|A0A411LH02|A0A411LH02_SPHPI Tryptophan 7-halogenase OS=Sphingomonas paucimobilis OX=13689 GN=DRN02_006165 P E=4 SV=1

SEQ ID NO: 89137 - protein, 491 aa, Streptomyces sviceus
  misc_feature (1)..(491): tr|B5I9C5|B5I9C5_9ACTN Tryptophan halogenase OS=Strepto myces sviceus ATCC 29083 OX=463191 GN=SSEG_08260 PE=4 S V=1
MNPEYDLIVVGGGPAGSTAAAAVALRGHRVLLLERETFPRYQIGESLLPATVHGLCGILGVADEVAAAGFTLKRGGTLRWGRDPKPWQFSFAMTPRLPEPTATAFQVERSRFDEILLRNAARVGAEVREGSPVRRIVADDERVRGVEYTDRDGNSRTAYGRHVIDASGNTSRVHSGVGGARVYSDFFRNLAVFGYFAGGRRLPEPNRGNIFCAAFDAGWLWYIPLRDDLTSVGAVISPEHHPAVQRDPRAAWQDMVRACPEVAELVDGVPAATEPPYDRVRVRKDWSYWKTSFWTPGMALVGDAACFVDPVLSSGVHLATYGALLAARAVNSALDGSVPEGRGFAEFETRYRHEYRVFYDFLIAFYDMERNDESYFWSAKKVTNVDSTEVAAFAELAGGLVSGDTAVLGPERFGDRWSAAAAELDGAVGRLATSDDRTNPLLSTRVVGETFRTGNDLQEQALYGGPLDETAPAAPGHLVASADGLGWERQR

SEQ ID NO: 89138 - protein, 498 aa, Glaciecola nitratireducens
  misc_feature (1)..(498): tr|G4QE43|G4QE43_GLANF Tryptophan halogenase OS=Glaciec ola nitratireducens (strain JCM 12485 / KCTC 12276 / FR 1064) OX=1085623 GN=GNIT_3223 PE=4 SV=1
MTQNKLINRVVIAGGGTAGWMAAATIAATIGKRLNITLVESDDIPTVGVGEATVPSLLTIHQLLKIREADFLKAVNGTYKLGIMFENWKRLDHKYFHSFGKSGTSCWAAGFHHFWLRAKEQKMAKSFSEYSLETLAAEKGRFAHTKNQSLNYAYHLDSAKYGQFLRGIAEKHSVTRIEGKIDKVDIDKQSGHIKSILLESGQIVEGDLFIDCTGFRSLLLGQALGVGYNDWSDTLPANAAYAVQTKSHRPAVPYTRSIALDAGWRWQIPLQHRVGNGVVFSTNFKSEESALDDLLRGIDGEPITDPRLIRFTTGQRKEFWHKNCVSIGLSSGFLEPLESTSIHLIQQAIVWLISLFPNEGIDQNLVNRFNQQMAVETETIRDFIVLHYHLQERDDHEFWRYLREIKVSDRLQQILDLFKNNGTIIEEQDDLFAENSWVQVMLGQGLTPKQYHPIVDMMSDRDLNMFMRQQEFNIQKQLTSLPPHTQFIQHFMSHAASK

SEQ ID NO: 89139 - protein, 510 aa, Brevundimonas sp.
  misc_feature (1)..(510): tr|A0A326L0T1|A0A326L0T1_9CAUL Tryptophan halogenase OS =Brevundimonas sp. OX=1871086 GN=DI552_01410 PE=4 SV=1
MDQSRRPLKKICIIGGGSAGWIAAALMSEHFKGKLAEIELVESDDIGIVGVGESTIPPFLQMLTRLGINEQDFLKEVQGSFKLGILFKDWKLKGDDYIHPFGRFGVPVEMDDLYQVWLRARAQGYDGPLQAFAAASVMIEQDRFTLPFKAPRTPVASAAYAVHIDARRMARYLRRFSEARGVTRTEGIVDQVVTRPDGFVEGVVLKDGRRIDADFFIDCTGFRALLIGKTMGVGYHDWSSWLPCNRAVALQVTNPTPPGPYTLAHAQDHGWCWRIPLQQRSGVGYVFCDRHVSDDEALANLLAQAEGEPIVDPWIIPFKTGMRERLWEKNVLSLGLAGGFIEPLESTALHLIYRGMDFFLRFLPDADCDPALIAEYNRRMTQDYEEIRDFVIMHYATTQRDDNDFWRQCRTMEMPESLKSKIELFQVNGTVREGVDLMFRSVSWQSVLEGMGVHPRAYHPLIDRIPFEGMPAYLDQAATAIRRAVEGLPRHADFLKDHCTAPSPDWAAPV

SEQ ID NO: 89140 - protein, 508 aa, Brevundimonas sp.
  misc_feature (1)..(508): tr|A0A354EPX7|A0A354EPX7_9CAUL Tryptophan halogenase OS =Brevundimonas sp. OX=1871086 GN=DDY79_04420 PE=4 SV=1
MDTIKDQGSIKRVVILGGGTAGWMTAAALSHRLAGRGVEIELIESDAIGIVGVGEATLPHIRAFNTAMGINEQTLIERTQATFKLGIQFVDWGRPGEAYIHPFGAYGEPIEGIDFHQVWAARRAGGDPTPLDDYSYPVRAAEACRFQRPTSDAGSPLSTFSYAFQFDASLYAAFLREVSCGRGVVRTEGKVVQHHLDAETGHVTALTLEGGRRIAGDLFVDCSGFRGRLIAEALNAGFEDWSHWLPCDSAFAVPCQTAAPVGPYTRATARHAGWQWRIPLQHRTGNGLVFSSAHLSDEVAQQTLMSNLEGPALAEPRRLSFRTGRRSRLWDRNVVAIGLSGGFLEPLESTSIYLIQLGVTTLLDLFPDQAGMADDAREYNAIMALEFDRIRDFLVLHYVANQRDEPFWRAMREMAWPDSLSAKVEAFVSRGLLPDYDVGVFHPPSWLAVLIGQNIVPQGWDPRVDRLDAARLSAKLTGMRDAVRSAVDRTPDHMGFIQAMGQPRRGAV

SEQ ID NO: 89141 - protein, 518 aa, Brevundimonas sp.
  misc_feature (1)..(518): tr|A0A521MF11|A0A521MF11_9CAUL Tryptophan 7-halogenase OS=Brevundimonas sp. OX=1871086 GN=EPO54_09810 PE=4 SV= 1
MRPDMDQPRRPLKKICIVGGGTAGWVAAALMAEHFKGRMAEIELVESDDIGTIGVGESTVPPFLEMLKRLGIDERDFIQKTQASFKLGIQFEDWTQKGESYFHPFGAVGVPVDISDFYPVWLKARMNGYDRPLMDFAAAARMASQGRFMLPFKAQRTPIGGASYAVHVDAKRVARYLRDFAEARGVKRTEGIVEDVMTRPDGFVSGLKLKSGQTVEADFFIDCTGFRALLIGKTLGVGYTDWSEWLMCDRAIAVQTENVGPPTPYTLAQAQDCGWRWRIPLQHRTGNGHVFCSRYMSDDEATARLLAQVEGRPVVNPMVVPFKTGVREKIWDKNVLSLGLASGFIEPLESTAIHLIYRGMDFLFRLMPDLDCDPNLAAEYNRRMTVDYEEIRDFIILHYALTRRDDTAFWRQCRDMVLPEGLQHKLEVFRANGSLVEALDPLFRNVSWYAVMDGMGVRPRSYPPLVDRIDSTGLTDEMDRAANILNAFVADLPTHQAFIDTHCPAPSVDLPAPLAVPA

SEQ ID NO: 89142 - protein, 499 aa, Cellvibrio japonicus
  misc_feature (1)..(499): tr|B3PB98|B3PB98_CELJU Tryptophan halogenase OS=Cellvib rio japonicus (strain Ueda107) OX=498211 GN=CJA_1070 PE =4 SV=1
MKKILILGGGTSGWMAAACFAKVLRPLGIDVVLVESTEIGTVGVGEATIPSILSFIQLLGIDEREFIQATQASFKLGIHFVDWRNLGEAYWHQFGTVGANIDGVEFYQHWLKSQRRGNAAAFTDYAPAVVMAQKNKFSRVGDDPRHTLHGAKYALHFDATLVAAYLRRYAEERGVVRIDAKVESVILRDGGNVKSIILNDGCEIDADFFIDCSGFKGVIIEKALQTGYEDWSAYLPCDSAVVAQTTNVGAPAPYTQSTALTSGWQWRIPLQHRTGNGYVFCSKYSDRDTAKELFCRNLQGSLITEPRFLSFITGKRKKLWNKNCVAVGLASGFLEPLESTSIHLAMKAVLKFIEMLPAGNSTQATQDEYNRVMDAEYLSIRDFIILHYCTTQRRDTDFWKYCAAMAIPDTLQNKLELFRAQGRLYRDEFDLFTRNSWYAVLEGMGVRPEAHDPLVDLSHVDEVANMMNRALRLMEQAADGLPDHQQFMMENCRAPDPSN

SEQ ID NO: 89143 - protein, 510 aa, Brevundimonas intermedia
  misc_feature (1)..(510): tr|A0A4Y9S5G4|A0A4Y9S5G4_9CAUL Tryptophan 7-halogenase OS=Brevundimonas intermedia OX=74315 GN=EGY25_01455 PE= 4 SV=1
MRQDQKIGRIVIVGGGTAGWMAAAVISKNLAPDYAQIDLIESAEIGTVGVGEATIPPILTLNRLLGIDENEFVRRTQATYKLGIQFRNWGLLGHEYVHPFGTYGADLEGLPFHQHWLRLRDQAGVGLIDAYSLPIMAMKAGRFVRTAEDPRHVHSRMAYAYHFDASLYGGFLRELATARGVNRIEAKIVDVALNAETGFVEAVVLDDGRRVKGDLFIDCSGFRGLLIEQALKTGYEDWSHWLPMDRALAVPCEAVGAPTLFTRSTAHDAGWQWRIQLQHRTGNGHVYASAFTTEEAARDTLLANLDGKPLGDPRPLRFVTGRRKKAWNKNVVSLGLASGFLEPLESTSIHLVQSGVTTLMSLFPDKRFDQADIDKYNALMREEYEHARDFIILHYHAGERDDSEFWRHVRATDIPDSLKERIDLFRSRGRVMGRNEDLFAHTSWVAVMLGQGIMPQGHDPMADQTPAPQMTARLAQIRNVIQSGVAAMPTHQQFIDKHCRADSLAAKEPA

SEQ ID NO: 89144 - protein, 492 aa, Cellvibrio japonicus
  misc_feature (1)..(492): tr|B3PGG3|B3PGG3_CELJU Tryptophan halogenase OS=Cellvib rio japonicus (strain Ueda107) OX=498211 GN=CJA_0218 PE =4 SV=1
MKNNQHIVIVGGGSAGWMAAAALSNAFGASKKITLIESDAIGTVGVGEATIPAVKSFNKLLGIDEAEFLRATQGTFKLGIQFENWGEQGETYMHPFGLVGKDSWMANFQHFWLKARRMGIAGDYFDYSLNIRAAKSNKFFIDPQSGLDYAYHFDAGLYAALLRQYSEARGVVRREGLIDSVHTNDMGFIASLRLASGEMISGDLFIDCSGFRALLIEQTLHTGFEDWSHWLPCDRAVAVQTESVGEPIPYTRSIAHSVGWQWRIPLQHRVGNGLVYCSRYISDEAAKALLLENLAGDVRTEPRLIKFRTGRAIQQWHKNCVAIGLSSGFLEPLESTSLHLIQTGIVRLIRLFPGDDGINQAQIDEYNRQSRYEYERIRDFIILHYHVTRRSDSDFWNYCRTMSIPDTLAHKIHLYKNTTSVFREQDELFLEGSWQQVMLGQGLTPGNYHPVVDKMSDDELTRLMTSIEREHNQRLAQFPGHQQFIDHYCKAI

SEQ ID NO: 89145 - protein, 501 aa, Sphingomonadales bacterium
  misc_feature (1)..(501): tr|A0A258Z8M2|A0A258Z8M2_9SPHN Tryptophan halogenase OS =Sphingomonadales bacterium 24-56-14 OX=1970588 GN=B7Y1 0_02375 PE=4 SV=1
MAIEHIIIVGGGTAGWMAAAALSRIRAGRPVAITLIESEEIGTVGVGEATIPPFLDFNRLLEIDERDMLSMVQGSFKLGIQFVNWGKIGDSYIHPFGNYGYQVDGISFHHVWHKYQQAGDKRPIQVFNVETMAAHFGRFARTEDYQRDDLPPVNYAYHIDAGRYARYLRNYAETRGVVRREGKISDVTLDNESGFVSSVTMENGDVLKGDLFIDCSGFRGLLIEQALKTGYDDWSNYLPCNRAVALPCLREDGSGPLPYTRATAHSAGWQWQVPLQHRNGNGHVYCNEYMSDDEAHSILVNNIAGKPGAEPNFLRFVTGRRKKFWNKNVVALGLASGFMEPLESTSLHLVNTGINKLIALLSLDGVTQAQEDAFNRLTGKEYARIRDFLILHYNSTTRDDSPFWNYCRNMPVPDSLTEKVELFRQNGQIFREDDELFTETSWAAVMMGQGIKMGGHNAMADAVSEPNTRREIDEMEKSIQFVVQHMPSHGEYLNRYCPAPA

SEQ ID NO: 89146 - protein, 504 aa, Aquabacterium sp.
  misc_feature (1)..(504): tr|A0A480AXY6|A0A480AXY6_9BURK Tryptophan halogenase OS =Aquabacterium sp. W35 OX=2315236 GN=AQPW35_53950 PE=4 SV=1
MDHNNRSLRRIVVVGGGSAGWMAAAALSRAVQRDCAIVLIESDEIGTVGVGEATIPPIQTFNAMLGIDEATFMRRTQGSFKLGIEFVHWGRQGHRYFHPFGPHGHQFDLSPQHQYWLRSRQQPGAAGLDDHSMAWAAASRGRFDKPSRDPRTVQSTFDYAYHFDAGLYARFLRELSESRGVQRLEGKIARVDLRPGDGFVQSVHLEDGRDVAGDLFIDCSGFRGLLIEEALHTGYEDWTHWLPCDRAMAVPCASVPGGLTPYTRSTAQEAGWQWRIPLQHRTGNGYVYCSQFISDDEAAARLLQRLDGPALAQPRPLRFTTGRRKQFWNRNVVALGLASGFMEPLESTSLHLVQSGISRLLALFPDRDFDPLVTAEFNRIAINEFERIRDFIILHYKLTTRDDSPLWRHCAAMSIPDTLQYKIDHFRRHGRLVSEGNDLFGPASWLAVHIGQHNLPQRHDPLIDLRNVDGDAILARMRQAMAQAAEAMPTHEAYIRAHCAATPA

SEQ ID NO: 89147 - protein, 514 aa, Pseudoalteromonas luteoviolacea
  misc_feature (1)..(514): tr|A0A162BNJ3|A0A162BNJ3_9GAMM Uncharacterized protein OS=Pseudoalteromonas luteoviolacea CPMOR-1 OX=1365248 G N=N473_13280 PE=4 SV=1
MNGEIKKVVVVGGGTAGWLAACHLAKQLEPLVNQDISVTLVDSPDIPTIGVGEGTVPVMRDTLKYFGISEIEFIKRCDVTFKQSIKFVDWEVPPQKDRSTYYHHLFDFPNIRPFNPTPYWLSNDEINKTHYADLVSVQSHVCELGLAPKLNRDGEFAGLFNYAYHLDAGKFTQMLSEHGTAELGISNIKANVQHIHLNDNGEITHLDTDSAGVISGDIFVDCTGFKAMLIEKSMGAKFIDKSDVLLTDTALAIQVPYRDENTPIPPFTISTAQKNGWIWDIGLTQRKGVGYVFSSNYQSEEQAVDTLANYLGQTAAQIEPRKISMKVGYQKEAWIKNCVAMGLSQGFVEPLEATGLLMFDVTARMFSEALPDFKEDIPLRARRFNEDIRQMWESTSDFIKLHYFLSKRDDSQFWIDNRDPLSISTELAEKLQMWQRKLPSQFDFRHTVDSFRVSNYLYVLYGMNFGTELNGRYTESQNIEEINKLRVEIEKGVKYCKSNLLSHREYLEKVSKLS

SEQ ID NO: 89148 - protein, 513 aa, Devosia chinhatensis
  misc_feature (1)..(513): tr|A0A0F5FM95|A0A0F5FM95_9RHIZ Uncharacterized protein OS=Devosia chinhatensis OX=429727 GN=VE26_08995 PE=4 SV =1
MEKPAHFVIVGGGTAGWIAAFILQDEARRRGLNIKLSVVESSRIPTVGVGEATTAAFRVLLKHFGIDEFEFFRKTDASFKLGIRHEDWRRKGYTYYGPIDDPHQVVQAPAGAPSDYLNVYAVAAGRPVQDMHLFQPLLEQKKAPYARKADGSLIPLGPFHHAFHFDQALVGKFFASKSRGVDKVDAQVAGVERDGESGDIAALVIDDNSRLEGDFFIDATGFRKQIIVKALEAPWVSYAHELPVNRALPFWVEVKPGEELANYTRAWAQNAGWMWQIPTRTRYGCGYVYSDEFSTSEQAKAEVERVLGHEIEVRGDIRFQIGRLEKAWIGNCVAVGLSSSFLEPLESTSIHGTIVQMMLFAQRYMDQPARMTQDKRDDYNARVGRQVDDFRTFVNTHYVTERDDTPFWREVRANRIHPETRERLAHWQREMPRHEHFPSYLGGLPHIETQLHYPVLNGLGLLDQTLARQEMERDPKLRRFAQETFEGLVREYRSAARQAMGHAEFLQAVQDMG

SEQ ID NO: 89149 - protein, 505 aa, Brevundimonas sp.
  misc_feature (1)..(505): tr|A0A326L0N7|A0A326L0N7_9CAUL Tryptophan halogenase OS =Brevundimonas sp. OX=1871086 GN=DI552_01405 PE=4 SV=1
MQDHRIRSVVIVGGGTAGWMTAAALVQHFRSTPVSITLIESSEIGAVGVGEATIPTIRRFYAQLGMTDDAVMRATQATCKLGIRFLDWSAPGSDFIHPFGHYGQDVRGTGFHHYWLKQRQAGDDTPLAAYSLGAALAAAGKFALPAPNPPTQLSVFDWALHFDAALFAQHMRAYAEAGGCTRIDARIRSVEQRPEDGFIRAVTLDDGREVEGDLFVDCSGFRSLLLGEALGVRFEDWGRWLPCDAAFAVQSRNRPGDAPAPFTRVTARSAGWQWGIPLRHRAGNGLVFSSAHLSDDQVLAELMPHLLGDPLTEPRRIPFRPGRRAQAWSRNCVAIGLSAGFLEPLESTSIALIETGVARLKQLFPDRRFAPAVIDEYNDQSAREMERVRDFIILHYKLNRRTDSAFWRDCREMTVPDTLQRKIDLWTARGEFVRYRWEMFHPASWLAIYDGFGVHPDDYDPAVDAMTPADLERGLRDMRDNIARLVASTPDHAQYLAALDRGQAA

SEQ ID NO: 89150 - protein, 569 aa, Alteromonas mediterranea
  misc_feature (1)..(569): tr|A0A1J0SKJ0|A0A1J0SKJ0_9ALTE Tryptophan halogenase OS =Alteromonas mediterranea OX=314275 GN=BM525_18450 PE=4 SV=1
MRDNESHNNINRVVVIGGGTAGWLAAGVLAAKLSAENSVTLIESPAIPTIGVGEGSWPSLKDTLLDIGISELEFLSVCHGSYKQGSSFANWRKGEHKYYHPFTEPAGYREIDIHACWQAIAPTEAYENAFSIQAAMCEAGKAPKQATTPDYAHVLNYGYHFDATALATLLKKHCINKLNVTHVVGHIASVNSHQNGYIKSVVGDNGHVTEGDLFIDCSGSNGLLIDKHFKVPWVSVEHIMLNNRAVALQVPYSDNDSAIESTTLATAHPCGWTWDIALQHRRGVGLVYSSQLASDEQAYKTLINYVSRRYPKALAEALTPRTLAFEPGHREHFWVKNCLSLGMSSGFVEPLEASAIAMVELGLRMLCEGFPQTQEHMTIVSKRYNQRFRYRWRRVIDFLKLHYVLSDRDEPYWRAQRDMATVPESLRELLTLWKYQSPSRLDLIENEEIFPSASYQYVLYGMGYRTLPNSLRLSEEDRQKASNIREKLQKTKPSYFQALPSNNALLKSLAERYATSDLVNSQCPSGQTDKASSANNASKDNGNINNNVESYRDGTPNKKDTQYDRIGFR

SEQ ID NO: 89151 - protein, 513 aa, Sphingomonas paucimobilis; identical to SEQ ID NO: 85813
  misc_feature (1)..(513): tr|A0A411LH37|A0A411LH37_SPHPI Tryptophan 7-halogenase OS=Sphingomonas paucimobilis OX=13689 GN=DRN02_005970 P E=4 SV=1

SEQ ID NO: 89152 - protein, 502 aa, Aquabacterium sp.
  misc_feature (1)..(502): tr|A0A480AVL4|A0A480AVL4_9BURK Tryptophan halogenase OS =Aquabacterium sp. W35 OX=2315236 GN=prnA PE=4 SV=1
MQDGRAVREVVIVGGGSAGWMVAAALAQVLEGRVRIQLVESDEIGTVGVGEATIPQMRLFNSALGIDEHDFVRATQGTYKLGIEFVDWGQRGERYLHSFGGVGQDLGLVPFHHYWLKMLRQGRAQPLGHYTLNTVAALAGRFAPQAQAPGLPTVGTAYAYHFDAGLYARYLRRYSEAKGVVRTEGRIADVQLRPGDGHVQAVVLADGRRVEGELFIDCSGFTGLLIERALHTGYEDWSHWLPCDRAVAVPCERTGPPEPYTRATARGAGWQWRIPLQHRIGNGHVFCSRHISEDEATAQLMAHLDGRPLAEPRPLRFVTGKRRKLWHRNVVAVGLASGFLEPLESTSLYLVQSSISRLLQFFPTLDFDPLNTAEHNRQADSEFERVRDFIILHYHLTRRDDTPFWTRVRTMELPATLTEKLQLFRATGRLFRAPSDIFSEVSWLQVLVGQGLVPQAHQPLADVLSDDEAAFFLANIERGVAQHAGAMPRHADYLAAHCAAGG

SEQ ID NO: 89153 - protein, 507 aa, Maricaulis sp.
  misc_feature (1)..(507): tr|A0A1Q8G0D9|A0A1Q8G0D9_9RHOB Tryptophan halogenase OS =Maricaulis sp. W15 OX=1772333 GN=AWH62_00010 PE=4 SV=1
MTDQRIRKIVIVGGGTAGWMTAAALAKVLGPDYADITLVESDAIGIVGVGEATIPQIKIFNAMLGLDEDRFMRDTKGSFKLGIQFRDWGRKGDSYFHPFGPFGVDMEGVSFHAFWLRMNQLGEPYPITDYSVQSVAGENGKFMRPIANAGTSPLGQIAYAFHFDAHLYAKFLRGFAEERGVKRVEGKIDQVHQRGEDGFIEAVELENGTRIEGELFIDCSGFRGLLIEQTLKAGYEDWTNWLPCDRALAVPCEGSEEITPYTRATAREAGWQWRIPLQHRVGNGYVYSSNHISDDEAAATLLANLDGKPLAEPRLLRFVTGRRKQAWVKNCVALGLSSGFLEPLESTSIHLIQSGIAKLLQMFPRTSFEQADIDRFNARTKEEFERVRDFIILHYNATTRDDTPFWDHCRTMQIPPGLAEKYRIFESYGRVFRENDELFNDTSWFAVMIGQGLKPRSFDPVAECLSEDETRRRLAQIRQAMQTSSDHMPAHADFIAKTCAAEMEPMT

SEQ ID NO: 89154 - protein, 280 aa, Rubellimicrobium thermophilum
  misc_feature (1)..(280): tr|S9SAH9|S9SAH9_9RHOB Tryptophan halogenase OS=Rubelli microbium thermophilum DSM 16684 OX=1123069 GN=ruthe_02 889 PE=4 SV=1
MPFWVDLKEGEEIAPCTLAWAQGSGWLWWIPTQGRYGAGYVYSDAHISPEAAKAEIEAALGYPIEPRNDIRIDAGRLREAWIGNCVALGLSSSFLEPLEATSIHGTIVQIMMLAEWLGLPDGRARYNAAVARQVDDFRDFIRLHYVSERRDTPFWRDVAESHPSIVKDRLALWQTKVPGPEDFDPFPPGLERLGLAHVQEQLYLPVLDGLGLLNREAARAEMAKDPRARARAREIHAGLVAEYRRAAAQALPHRAWLRSLAGRHADPSRPPVPTVMQEPS

SEQ ID NO: 89155 - protein, 499 aa, Brevundimonas sp.; identical to SEQ ID NO: 85169
  misc_feature (1)..(499): tr|A0A521MWD5|A0A521MWD5_9CAUL Tryptophan 7-halogenase OS=Brevundimonas sp. OX=1871086 GN=EPO54_04450 PE=4 SV= 1

SEQ ID NO: 89156 - protein, 500 aa, Acinetobacter colistiniresistens
  misc_feature (1)..(500): tr|A0A558F4C4|A0A558F4C4_9GAMM Tryptophan 7-halogenase OS=Acinetobacter colistiniresistens OX=280145 GN=FPV60_ 12480 PE=4 SV=1
MLNLRGMERICIIGGGTAGWFSALHLREIFSPSVEIILISSPEIPIVGVGEGGILNLMETLHKLKIPFAEFMQETDAIHKLGFVYEGWRDNKSNLTDCFYHMFPMQNEELLWKDSGYYPILSMMLNHNLPISYITESINLSEKNISQEYLTKLLLEKTKKNFASSFHFDTYKVGQYLKRIALQRGVKYKEGLFNDVIRDSQTGLITDLYIDNQVLPVNFVIDASGFSRQIMGKVLKSPWTSFEKYLPANTAIPFHLKHLKKNPDLVTRSTAMDAGWVWQIPLKDRVGAGYVFDRNFISPDEAVKEVEQWLGHEIDPIRTITFEAGCYEKIWIGNVLSVGLASGFVEPLEATSIGQMLYQLSLFAELVIESHGVVSKQIIDIFNEQNLQGWHGIRDFIRMHYDTPRKDTNFWRNMPNVPISNEYNELKHVWQHRTPREIDFINYEMGGKQQFGVYSWLAIGQALSIIKPEASAAELFYLSVENKHRLAKYFFDIKNKIKVN

SEQ ID NO: 89157 - protein, 116 aa, Brevundimonas sp.
  misc_feature (1)..(116): tr|A0A3B9RJW2|A0A3B9RJW2_9CAUL Tryptophan halogenase (F ragment) OS=Brevundimonas sp. OX=1871086 GN=DCG66_10340 PE=4 SV=1
DDTPFWRECRDMVLPEGLQHKLDVFRANGSLVEALDPLFRNVSWYAVMDGMGVTPRSYPPLVDRIDFAGLTAEMDRAADILNAFVKDLPSHQQFLQDNCPAPPVDLAPVAPAAVPA

SEQ ID NO: 89158 - protein, 515 aa, Litorimonas taeanensis
  misc_feature (1)..(515): tr|A0A420WLK8|A0A420WLK8_9RHOB Tryptophan halogenase OS =Litorimonas taeanensis OX=568099 GN=DES40_1266 PE=4 SV =1
MTDKPFKIIIVGGGTAGWLSAAFLSQQLPLSSGRDIQISLVEASDIPTVGVGEATVPSLRETLAACGISEIDFLTSCGATFKHGIKFVNWRQPPKENSGESYFHPFGAPLKVGAVDPLRAWSKLPQDKRGNIADIFSVQSEMAEMGRAPKHLKDRPYDGALSYAYHLDAGKFAEYLKQRFRAQGVKHIIGKVAEVDYNPSTEIISALTLDDGTKLTADFYIDCTGFAARLINSDKQNPFIDKTDVLFVDKAVTTRLPTKGTASINGFTTCTAQSAGWIWDIVLQNRRGIGHVYSSKYISDAQAKTELASYIGQSEDALETRTLNMRIGYQQHQWRGNCVAIGLASGFLEPLESTGIYLTEMANWALADMLPRYMSGHNPQAQYTDAMVHHYENIVDFLKLHYAISERRDTPFWRDNANPDTWPETLKANLKAWENDVPSVYDFGRSIQCFSATNYQFVLYGMGWRGHEEPNVLTGQTKNLLEQLAIRRARLKEFVLRDTLPNSEIFTAITPSNIE

SEQ ID NO: 89159 - protein, 509 aa, Stenotrophomonas sp.
  misc_feature (1)..(509): tr|A0A349Y5M2|A0A349Y5M2_9GAMM Tryptophan halogenase OS =Stenotrophomonas sp. OX=69392 GN=DCW96_07985 PE=4 SV=1
MNVANTTQGRIRKVVIAGGGTAGWLAGCALAHQFRDQLDITLVESEQIGTVGVGESTVPPIRTFHRFLQIDEQEFLQAVAGTFKLSISFENWRRPGERFIHPFGTIGQGTWATPFHHFWLDSLRRGMPSDLGDFCLESAASWHDRFTLETQPQVNYAYHFDAGLYAKFLRRKAEGHGLRRVEGKIREVRQDAHDGSIACLVLEDGQVIEGDLFIDCTGFRGLLTEQTLHTGYEDWHEWLPSDRAVAVQTASVAPPVPYTRAIAHEAGWRWHIALQHRVGCGLVFSSRHMSDDEAHAKLLRDVDGPPLRDPWLVPFRSGRRLKAWNKNVVALGLASGFIEPLESTSIHLTISAVVRLIQLFPSDGISPALVDLYNEVSRQEMEHVRDFIILHYHANQRDEPMWKACRDMDLPESLAVRLRAWRERAHAWQDPGELFRVDSWTSVLMGQGIQPGPPHPLAAAISDADLRTLLMRIRQPVEQAVATMPSQAAFIERYCRAARDVWPRVSALA

SEQ ID NO: 89160 - protein, 506 aa, Caulobacter segnis
  misc_feature (1)..(506): tr|D5VGS6|D5VGS6_CAUST Tryptophan halogenase OS=Cauloba cter segnis (strain ATCC 21756 / DSM 7131 / JCM 7823 / NBRC 15250 / LMG 17158 / TK0059) OX=509190 GN=Cseg_2053 PE=4 SV=1
MTAIRKVLIVGGGTAGWMTAAALAKALPREVAITLIESEQIGTVGVGEATIPPINTFNQMLGLDEAAFMRATQASFKLAIEFVDWMGPDHRYLHPFGGFGLDIEALKFHQIWLRALHEGWAPPIDAFNLSAQASHLGRFSLPSRDPGQVMSSLKYAFHFDAGLYAKHLRAYAEQRGVARFEGKVAGVAQHGETGFVESVTLEDGRTLEADLFVDCSGFRGLLIEQTLKAGYDDWSHWLPNDRAVAMPCETGGDGLTPYTRATADAAGWRWRIALQHRTGNGYVYSSADISDDEALARLRATLDGPALAEPNFLRFQAGRRRQAWIKNVVAIGLSSGFLEPLESTSIHLIQAGITKLLALFPDKGFYPVEIAEYNRLTAQQVELIRDFIILHFKANARTEPYWVRAREMAIPETLQRKIDLFAASGRLFQSDYDLFAEPSWVAVLLGQGVVPRRHDPLVDALDDEVVRGQLSRLSALIRRTAESLPTHDAFIARYCAASPTPARIPA

SEQ ID NO: 89161 - protein, 522 aa, Sphingomonas paucimobilis; identical to SEQ ID NO: 87071
  misc_feature (1)..(522): tr|A0A411LG07|A0A411LG07_SPHPI Tryptophan 7-halogenase OS=Sphingomonas paucimobilis OX=13689 GN=DRN02_003950 P E=4 SV=1

SEQ ID NO: 89162 - protein, 425 aa, Streptomyces roseochromogenus
  misc_feature (1)..(425): tr|V6KLD0|V6KLD0_STRRC Tryptophan halogenase OS=Strepto myces roseochromogenus subsp. oscitans DS 12.976 OX=135 2936 GN=M878_13815 PE=4 SV=1
MPSTLTGIPTEFDVIVIGGGPAGATTAGLLAKRGHKVLILDRERFPRYHVGESLIPVVMAPMEEMGLTERLEQRGFERKYGGTFVWGSEQAAWDFSFVDGGDYPFAYHTRRADLDSVILDRARELGAFVVEDATVKEPIEEDDRVTGVRFTVRGAKEAYEVKASMVVDASGQARVLTRKYSEIHWHDKLRNVAVWTYFDNCERLPGDQYTNILIEGIENGWFWGIPLDKGTVSVGFVTPSTVAGETDQNLEQLFRDEVEKTTKLKHMLRNARQSAGFRSARDWSYTNQTVYGKGWAAVGDSAAFVDPLISTGVALATTAGSILSRVIDKVLQYPEIEEVALKRYATAYLSFFNEVRSFVERFYDRSLKKEDYHKLAQTIIDPEQKNTPANDFVTLLAGLRGKHLALDITVDDLVPETEPSATAGN

SEQ ID NO: 89163 - protein, 532 aa, Luteibacter rhizovicinus
  misc_feature (1)..(532): tr|A0A4R3YYP6|A0A4R3YYP6_9GAMM Tryptophan halogenase OS =Luteibacter rhizovicinus OX=242606 GN=EC912_101763 PE= 4 SV=1
MARLRKVLIVGGGTAGWLAACYLAKAVNAVDPRSVQVHLVESPDIGLLGVGEATFPSIRGTLAAIGLDERRFLVGATATYKQGIHYRHWVRPPGTPGADHFFHPFNAPSQRPGGPELLPYWLLGAAPEGMAFADAVSMQSTLVDHSRAPRRARDADYQGPMNHAFHFDAACFARVLAEHGQQALGVVRHVATVERTELDEHGAIARVVTKEEGELTADLYVDCTGLRSMLIGNVMQSPFRSRADVLFADRAVAMQVPYETPDAPIPSYTISTAQEAGWIWDIGLQKRRGTGYVYSSRHTTDDRAEEVFRRYLGGAGEGLKAMHIKFETGYRPEHWRKNCIAVGLAGGFVEPLESTGIALIELATYLLTHLLPSDTDDMASAARHFNEMIVARYDRIIDFIKMHYCLSQRRDSPFWIDNCDVASIPQTLQEKLAKWKQRPPHRLDFVSDLEMFMTASWQYVLYGMEFRTDLEPMRSAYPHMEAARQEFTMIRQAAARALDDLPNHRALVEQLCREHTQRSRSDAGIAASVLDG

SEQ ID NO: 89164 - protein, 499 aa, Caulobacter segnis
  misc_feature (1)..(499): tr|D5VMI4|D5VMI4_CAUST Tryptophan halogenase OS=Cauloba cter segnis (strain ATCC 21756 / DSM 7131 / JCM 7823 / NBRC 15250 / LMG 17158 / TK0059) OX=509190 GN=Cseg_3271 PE=4 SV=1
MTQQTIRKVVIAGGGTAGWTAAAALARQLGPLLDITLVESEDIGTVGVGESTIPTARTFNALLGIDEAAFMRATQATFKLGISFENWGEIGDRYIHSFGQVGKSTWMGGFHHFWMQAQAQGFGGDLGDYCLELKAAEGDRFFTGENGPLNYAYHLDAGLYGQFLRRMAEADGAKRVEGKIASVRQSAADGAIEALVMESGQAVEGDLFIDCTGFRGLLIEQTLKAGYEDWDHWLPTNSALAVQTRSTEPAKPYTRAIAHHAGWRWKIPLQHRVGNGLVYCNEFMSDDEALALLQSEIEGETLIPPRLIRYRTGRRRKTWDKNVVALGLSSGFVEPLESTSIHLIMVGVTRLMQLFPFGGISQAAVDRYNRLADDELEKIRDFIILHYKATERTDSPFWDRVREMQIPDSLAQRIELFRESAQVYQAPGELFQVDSWLQVLLGQRVQPESFHAMGRLMPPQQLKQALDDLKRNIAATVSRLPQHQAFLDAYCAPPVSKSA

SEQ ID NO: 89165 - protein, 503 aa, Hyphomonadaceae bacterium
  misc_feature (1)..(503): tr|A0A3D3Z2G0|A0A3D3Z2G0_9RHOB Tryptophan halogenase OS =Hyphomonadaceae bacterium OX=2026748 GN=DIU09_06245 PE =4 SV=1
MQGQSQKLERLVIVGGGSAGWMAASAIANAAGRGCTITLIESDEIGTVGVGEATIPPIKVFNRSLGLDEKDFVVRTQGTFKLGIEFVNWGRQGHRYFHPFGTYGADFDMVPLHQYYLRARQTGRDPGSLDEFTMAWQVAKRGRFAPPTQDPRLIQSTFDYAYHFDAGLYARFLRSYSEARGVVRMEGKIADVGLDGEDGRITHVTLEDGRKVEGDFFIDCSGFRGLLIEGALKAGYEDWSHWLPCDRAMAVPCEHGGEFTPYTRSTAREAGWQWRIPLQHRIGNGYVYSSGFISDDEVERTLLANIDGKALADPRPLRFTTGKRKKIWHKNCVAIGLAAGFMEPLESTSLHLIQTGITRFLALFPDKTVDPVLETEFNRLSTYEWERIRDFLILHYCATERDDTELWRYCASMSLPDTLTYKIAHFRKYGRMVSDGPELFLNPSWLAVYLGQFVEPTGYDPLVDTRTHVEADRHLASLKTLMAQTAETFPTHRDFINQTCRAG

SEQ ID NO: 89166 - protein, 302 aa, Stenotrophomonas sp.
  misc_feature (1)..(302): tr|A0A3C0GTP5|A0A3C0GTP5_9GAMM Tryptophan halogenase (F ragment) OS=Stenotrophomonas sp. OX=69392 GN=DCM50_1223 5 PE=4 SV=1
IEGDLFIDCTGFRGLLTEQTLHTGYEDWHEWLPSDRAVAVQTESVAPPVPYTRAIAHEAGWRWHIALQHRVGCGLVFSSRHMSDDEAHAKLLGDVDGPPLRDPWLVPFRSGRRLKAWNKNVVALGLASGFIEPLESTSIHLTISAVVRLIQLFPFDGISPALRTLYNEVSRQEMEHVRDFIILHYHANQRDEPMWKACREMPLPESLAIRLRAWRERAHAWQDPGELFRVDSWTSVLLGQGIQPGPPHPLAAALEDADLKMLLARIRQPVQQAVAAMPSQAAFIERYCRAAQDVWPRARAPA

SEQ ID NO: 89167 - protein, 509 aa, Stenotrophomonas sp.
  misc_feature (1)..(509): tr|A0A357NQE0|A0A357NQE0_9GAMM Tryptophan halogenase OS =Stenotrophomonas sp. OX=69392 GN=DEB32_14745 PE=4 SV=1
MNVANTPHARVRKVVIAGGGTAGWLAGCALSHQFRDQLDITLVESEQIGTVGVGESTVPPIRAFHRFLQIDEQEFLRAVAGTFKLSISFENWRRPGDRFIHPFGTIGQGMWAAPFHHFWLDSLRRGMPSELGDFCLESVASRGDRFSLDTRPQLNYAYHFDASLYAKFLRRRAEAQGLRRVEGKIRNVQQHADDGSVAALVLEDGQIIEGDLFIDCTGFRGLLTEQTLHTGYEDWHDWLPSDRAVAVQTGSVSPPVPYTRAIAHEAGWRWHIALQHRVGCGLVFSSRHMSDDEAHAKLLRDVEGPPLRDPWLVPFRSGRRLKAWNRNVVALGLASGFIEPLESTSIHLTISAVVRLIQLFPFDGISPALMTLYNDVSRQEMEHVRDFIILHYHANQRDEPMWKACREMPLPESLAIRLRAWRERAHAWQDPGELFRVDSWTSVLMGQGIQPGPPHPLARAIDDADLRTLLARIRQPVQQAVATMPSQAAFIERYCRAGEDVWPRAPALT

SEQ ID NO: 89168 - protein, 502 aa, Hyphomonadaceae bacterium
  misc_feature (1)..(502): tr|A0A3D3Z2B2|A0A3D3Z2B2_9RHOB Tryptophan halogenase OS =Hyphomonadaceae bacterium OX=2026748 GN=DIU09_06255 PE =4 SV=1
MEPQAVEKIVIVGGGTAGWMTASALSKVLGPRVNIRLIESEEIGTVGVGEATIPQINIFNSILGIDENDFVAKTNGTFKLGIEFVNWHRQGERYMHAFGGIGRNLGFVPFHQYWMRQNLAGKETSLWDYSAATKAAYANKFDRLERLGASPLPGPTWAFQFDAGLYARYLRGYSEYHGVKRTEGKVHSVELDSLSGFIQSVTLESGEVVSGDLFIDCSGFRGLLIEGALQTGYEDWSNFLPCDRALAVPCESVQPLTPYTRATARHAGWQWRIPLQHRIGNGHVYCSAFTSDEEAERVLMSNLDGKPLADPRPLKFVTGRRKKLWNKNCIAVGLASGFMEPLESTSIHLIQSAVSRLINLFPTKACDTVLSDEYNQQTIEEYALIRDFLILHYHANERTDSPFWLHCQNMAIPDSLSHKIELFRKTGRIERRANDLFAEPSWLQVLIGQGIRPESYHALARDLSDEDLDGFLVNVSTIITKAVEHMPSHEDFIARDCRAPAA

SEQ ID NO: 89169 - protein, 499 aa, Pseudoalteromonas sp.; identical to SEQ ID NO: 87532
  misc_feature (1)..(499): tr|Z9K0H7|Z9K0H7_9GAMM Tryptophan halogenase OS=Pseudoa lteromonas sp. SCSIO_11900 OX=1461766 GN=BG00_02520 PE= 4 SV=1

SEQ ID NO: 89170 - protein, 498 aa, Sphingopyxis fribergensis
  misc_feature (1)..(498): tr|A0A0A7PGD9|A0A0A7PGD9_9SPHN Tryptophan halogenase OS =Sphingopyxis fribergensis OX=1515612 GN=SKP52_06780 PE =4 SV=1
MSDKKPVRVVIAGGGTAGWMMASAIARTMGHTVDLTLVESEAIGTIGVGESTIPPLVNFNRILGIPEPDFMRATQATFKLGILFDNWKHDGDSYFHSFGLSGKDHWSAGFQHFWLNARERGLEQPYEDYCLELVAGMQGKFAHLPEDRMNYAYHVDATLYGRYLRKLAEADGCTRVEGKISRVELDGESGDIAALHLDGERRIEGDMFVDCTGFRGLLIDGALHAGFEDWSHWLPNDSAIAVQSKHLGPPMPYTQAIAHDAGWQWRIPLQHRMGAGIVYTSGYLSRDEAYDRLMGSVGEPLIEPFDIKFKGGVRRKQWFRNCVAVGLAGGFVEPLEATTVHLIQRAVLRFIRLMPNGRVSERDAQEFNDQQRTDIEQIRDFVVLHYKATNRRDSPFWRHVAAMPIPDSLQQKIELFRETGRVFRKNEELFAENSWVQVMMGQGIEPQSYHPIAAKLRDDEVERLFQTLRDNIAETVATLPEHHAYVARYCGAEAPKAA

SEQ ID NO: 89171 - protein, 561 aa, Ruegeria meonggei
  misc_feature (1)..(561): tr|A0A1X6YWJ7|A0A1X6YWJ7_9RHOB Flavin-dependent tryptop han halogenase RebH OS=Ruegeria meonggei OX=1446476 GN= rebH PE=4 SV=1
MNNRLRKVTIVGGGTAGWMTALLLDMVLSRTSAPKDRPRICLIESPNIATVGVGEATVPRMPVTLRQAGISEREFFRETNASFKLGVKFCNWNKDAKGNRIDFVNPFAHGQMVEGLEAAEYFLRFGNGDRDFTQSISPHDHLGRLCKGARQLGQPEFEQRFGYAYHLDAVKFAGMLTKVCTNRGVEHIQDEVKAVELDEQGNVSHLMLERAGRHDIEMVVDCTGFRGLIINQALGEPFMDYSDYLPNDRALALQIEHPDPDKIESLTRSTALGAGWTWRVPLFNRVGTGYVFSSAHRTDDQAADEYLEWLGDSGKGATPRVIPMRIGRVRNAWVKNCVAIGLSGGFIEPLESTAIHMVDHAVRWFAEHLPTRDIEPSLRTRYNRQMNKLYDEVLEFICLHYRLGNRTDDQYWIDARTEMKLPDRLAENLELWQHRLPMDHDIEFATLFDHRVYQTVLLGKQAYDTGYGTGIRDRLRPLKKPVWFQGMKRAKADLAQIIKTMPDHKTLLRDIRGELEKPAFGKAAAVKPTVAMPGVTPAPVTIQNMPDFAEIQSGAKDLQLF

SEQ ID NO: 89172 - protein, 441 aa, Sphingomonadales bacterium
  misc_feature (1)..(441): tr|A0A4Q3AGI4|A0A4Q3AGI4_9SPHN Tryptophan 7-halogenase (Fragment) OS=Sphingomonadales bacterium OX=1978525 GN= EOP58_11395 PE=4 SV=1
MSSEAPRDDRPRTRVVIVGGGTAGWMAAAALIRRLPHACSVRLIESEDIGIVGVGEATLPHLRAFVSMLGIDEAEFMGVTQATYKLGIEFRDFGRIGDAYLHPFGNFGRPLNGVPFHHYWLRMRAQGRGDSLFDYSLCNQMAAQRRFAPPTSDAASLRSSYGYAYQFDATLFAPYLRDYAVARGVDRTEGRVVDVSLDPLSGDVSALTLASGERVEGDLFVDCSGFRALLIGGAIGSAWEDWSRWLPCDRAVAAPCASPEGPIEPYTRATAMSAGWRWRIPLRHRVGNGYVFSSAHLDEDAASTALVSALENPPLADPRILRFRAGRRARSWDRNVVSVGLASGFLEPLESTSIYLAQGAVEQLIALFPIDGRIADADRDEFNRMVDLEYDRIRDFLILHYHATTRDDSPFWNDMRTMRIPDSLAEKMELFRESGRVAHYT

SEQ ID NO: 89173 - protein, 514 aa, Sphingomonadales bacterium
  misc_feature (1)..(514): tr|A0A4Q5T7K0|A0A4Q5T7K0_9SPHN Tryptophan 7-halogenase OS=Sphingomonadales bacterium OX=1978525 GN=EOP59_07635 PE=4 SV=1
MDGLVSRIVVIGGGTAGWLAASLVAARADPAAAAPISVTLVESPSVPTIGVGEGTWPTMRHTLQRIGIDEAEFLTACDASFKQGSRFIGWASGAAGDTYYHPFSPPVDGDARALIAGWREAAGNQPFAAAVSPQPGVCDLHLAPRQRAMPGYGGALNYAYHLDAAKLAALLARHGVERLGVRHVRGHVTGIDATEAGDIAAVRIRDGAPIAGDLFIDCTGHASMLLGDHFGVPFIDRSDVLFNDRALAVQVPVDPASPIASQTDATAHAAGWIWDIGLPTRRGVGCVYASAFMDDDQAAATLAAYLGRDPAELGARKLSFRSGHRERFWERNCVAVGLSAGFLEPLEASAIVLIELSLNALIDNFPTTRSAMDIHARRFNALFRYRLDRIVEFLKLHYVPSTRTDPYWRAHRDPASIPDRLAELLELWRHQPPSIADFPMVDEIFPAVSYQFVLYGMGFPVPPLAVIASDPDAVTRAIAQAAQRGRTLAASLPTNRAYLDALRAAAPRTALETS

SEQ ID NO: 89174 - protein, 500 aa, Sphingomonadales bacterium
  misc_feature (1)..(500): tr|A0A4V1ZYB8|A0A4V1ZYB8_9SPHN Tryptophan 7-halogenase OS=Sphingomonadales bacterium OX=1978525 GN=EOP62_00810 PE=4 SV=1
MTDRKIRSIVIVGGGTGGWMTAATLSRILTTEYASITLIESDEIGIVGVGEATIPQMATFNRMLGIDEDQFMRETQGSFKLGIQFVNWGKQGHTYYHPFGKIGLDMQGVSFHAFYQRLHQMGEAPSFSDWSLQATASKDNKFMRSIDAGNSPLSEIAYAFHFDAGLYAKFLRRYAEAKGVVRREGKIVDVKLRGEDGFVQSVVMENGDEIEADLYIDCSGFRGLIIEQALKAGFNDWSQYLPCNRAVAVPCESVEELTPYTRSTAHTAGWQWRIPLQHRIGNGHVFSVDYMSEDEATGILLKNLDGKPLADPRIVRFTTGHRKKFWIKNCVSMGLAGGFIEPLESTAIWLIQAGLSRFLTMFPDRDFNQADTDRYNRIMTTDYEEIRDFIILHYHATERDDSPFWNYCRTMEIPERLAEKMRVYRSHGRCFRENEELFNDTSWFAVMHGQLMKANSYDPVADIMSLEETRARLAHIKEAIANSADYMPKHKDFIREHCAA

SEQ ID NO: 89175 - protein, 137 aa, Sphingomonadales bacterium
  misc_feature (1)..(137): tr|A0A4Q5SEJ6|A0A4Q5SEJ6_9SPHN Tryptophan halogenase (F ragment) OS=Sphingomonadales bacterium OX=1978525 GN=EO P59_17350 PE=4 SV=1
MSAAPVRSVAVVGRDAAAWILALGLHRALRSIDVQVSVVELPSALHPGQAYSALPSLANLHLLLGLQEPALFARCGALPAMGQQFMGWSSAHPAFVHGYDETRPAINDVDFVQFWALAQRQGLRVPFEEFSVAAAAA

SEQ ID NO: 89176 - protein, 496 aa, Colwellia sp.
  misc_feature (1)..(496): tr|A0A2S0V1T9|A0A2S0V1T9_9GAMM Tryptophan halogenase OS =Colwellia sp. Arc7-D OX=2161872 GN=DBO93_11560 PE=4 SV =1
MTNKINKVVVLGGGTAGWMSASLIKKLMGKSVDVELVESEDIASVGVGEATIPPIRLFNSVLGINEAEFLRETKATIKLGIKFENWKNTEESYFHTFGAAGKSLPFCHFHHYLKRAQDAGLKDNLWDYDLNYLCATQGKFAQIKSKDPIIDIPYAFHFDAGLYAQFLRKFSEKIGVKRTEGMVENVEQCQKTGNVKSLVLKDGEVIKGDLFIDCSGFRGLLIQQTLNTGYEDWGHWLPCDRAVAVPSKRFAETVPYTRSIAHAGGWQWRIPLQHRNGNGLVYSSKHYSDEQAKALLLGNIESEPLAEPRVIKFTTGRRRKQWHKNVIAIGLSSGFLEPLESTSIHLIQSAIVRLIHMFPQKGISTAQVDEYNRQSKIEYEQIRDFIILHYHVNQRDDSQLWRDLREMDIPESLAEKIKLFKETGKIFREQNDLFNEGSWLQVMLGQGIEPEDYHPLANDMPLEQLNSMLAKIKAIKHEPLTKLPSHDEYLTNFCRL

SEQ ID NO: 89177 - protein, 502 aa, Rheinheimera sp.
  misc_feature (1)..(502): tr|F7NX41|F7NX41_9GAMM Tryptophan halogenase OS=Rheinhe imera sp. A13L OX=506534 GN=Rhein_2359 PE=4 SV=1
MLNTKKVLILGGGTAGWMAANLMIKKWAGQNISVSLLESEEIGIIGVGEGSTPSLKDFFAYVDIPEQEWMPACNATYKNGITFKNWSSKPGFSSYCHPFPSQLDDYTADAFIYNAFVRRKGIDVEAHPDQFLFASHLCQQGLAPQAAFHFPFNVSYGYHFDSVLLGKFLKNKAKERGVTHIEGTVAAVEQHPNGDISRLVTKDGRAIEADLFVDCSGFQAVLIQQCLKEPFISFGNNLFNDSAVVMPTAATAQVNSQTIATALKAGWAWDIPLTNRTGNGYVFSSAFCSNDQAETELRTKLGLLDSAEPVRFLKMKVGRLQQHWAKNCLAVGLSQGFIEPLEATALHLVQETLLAFIEAYSAAGFTDKNRDKFNQIINHRFESVRDYIVCHYKVNSRTDTDYWRANSNNNDISESLRQVLQCWVGGADLRQEIDRQQIGRYFPSISWHCLLAGYGLFPEQSQLKPGNAEALKYNLTSIRDFVERCALNYQPHQNILQKLHQV

SEQ ID NO: 89178 - protein, 384 aa, Sphingomonadales bacterium
  misc_feature (1)..(384): tr|A0A4Q5SYE2|A0A4Q5SYE2_9SPHN Tryptophan 7-halogenase (Fragment) OS=Sphingomonadales bacterium OX=1978525 GN= EOP59_11085 PE=4 SV=1
MKKIVVAGGGTAGWMAAAAIARTMGSTASVTLIESEAIGTVGVGESTIPPLVTYNRLLGINEAEFMRATQATFKLGILFDNWKQPGDRYFHSFGYTGKDHWAAGFQHYWLEGRSRGHDQSYDDYCLELVAALQSKFAQLPDNKVNYAYQLDSGLYARFLRQMAEADGVTRIEGKIARVELNGESGDIAALELDGGRRVEGDLFLDCTGFRALLIEGTLHAGYDDWTHWLPCDSAIALQTPNVRPPVPYTRAMAHDAGWQWRIPLQHRTGNGIVYCSRYLDHDAALERLLGNIEGEPLTPPNKIRFQTGARRKQWHRNCIAIGLSGGFMEPLESTSIHLIQRAILRLIRMMPQGEISPRDIAEFNDQQFQDMEQIRDFLILHYKV

SEQ ID NO: 89179 - protein, 514 aa, Sphingomonadales bacterium
  misc_feature (1)..(514): tr|A0A4Q3ALM6|A0A4Q3ALM6_9SPHN Tryptophan 7-halogenase OS=Sphingomonadales bacterium OX=1978525 GN=EOP58_04790 PE=4 SV=1
MLQRCCTAIWGGKSVAERIRSIVIVGGGTAGWMTAAAMARILGPDYATITLVESDAIGTVGVGEATIPQIGTFNRLLGIDENDFVRRTKGSFKLGIEFVDWGGLGRRYFHPFGKYGIDMEGVSFHAYWQRLAQDPQFANVDAFSLMASAGRANRFMPPVDAGNSPLSGIAYAYHFDAGLYALYLRELAEGMGVKRVEGRIVDVERDGESGHIAAVALESGERVSGELFIDCSGFGGLLIGKTLGVPYVDWSAHLPCNRAVAVPCASVPGGLTPFTRSTARSAGWQWRIPLQHRTGNGMVYCSEYISDDEAAATLLGNLDGEALADPRFIRFTTGHRARFWEGNCVSIGLSAGFMEPLESTSIWMIQTGIARLLSNFPDSTFAEAERARYNRLMIEESELIRDFLVLHYCVTDRTDSPFWNHCRTMPIPERLAEKIRVFESSGRCFREHEELFNDTSWFAVMVGQGMRWSRYDPVAELLTLAETRDRLAHIASAVAKSVDYMPDHAEYIRQNCAA

SEQ ID NO: 89180 - protein, 148 aa, Sphingomonadales bacterium
  misc_feature (1)..(148): tr|A0A4Q5SYR0|A0A4Q5SYR0_9SPHN Tryptophan halogenase (F ragment) OS=Sphingomonadales bacterium OX=1978525 GN=EO P59_11160 PE=4 SV=1
MSGAPVHVVVAGEDAALWLAASTLHGALGRSGVTVEVVELPTRLGPADMLVTQPSLEALHDRLGVDEARLLRATRGSFALGQKFVDALGAQPGFFHAHGGYGVAIDGQPFLPVWLKARRHGLPSAFEAFSLSAAAALQGRMLLRDADT

SEQ ID NO: 89181 - protein, 445 aa, Hydrogenophaga intermedia
  misc_feature (1)..(445): tr|A0A1L1PIX6|A0A1L1PIX6_HYDIT Tryptophan halogenase OS =Hydrogenophaga intermedia OX=65786 GN=BN948_02331 PE=4 SV=1
MQEAGITQRDCDVLVIGGGPAGSTVATLLAREGHHVVLLDKDRHPRFHIGESLLPANLPLLDRLGVGDAIRAIGMHKPGAEFVSPQHTHTQVYHFADAWDKSMPAAYQVKRADFDHVLLRNAASQGVDVHEATLAREVRWSADAQRAESVTSTDENGQAIEWHPRFLVDASGRDTFLAGRLKSKEKNPNHNSAAVYAHFRGARRQAGADEGNITIFWFDHGWFWFIPLSDGTTSVGMVTWPYHMKTRGGRDLQDFLLDNIRACPALAERLAEAEPVTAAEATGNYSYRSTLSHGEGFLLLGDAYAFIDPVFSSGVWLAMSSADIGARTVDTCLREPARAARAMRHFDQHMRHGPREFSWFIYRMTNPTMRGFFMDPHNPLRMKEALLSVLAGDLFGRTPIWPSLWAFKSFYFAVNLGNPLRTWRAWRQRRRNIRPTVSANAASNP

SEQ ID NO: 89182 - protein, 114 aa, Sphingomonadales bacterium
  misc_feature (1)..(114): tr|A0A4V1SUR7|A0A4V1SUR7_9SPHN Tryptophan halogenase (F ragment) OS=Sphingomonadales bacterium OX=1978525 GN=EO P61_10495 PE=4 SV=1
ILHYHANRRKDGDLWRRVREMEIPETLRRKLDLFRNRGRFFRYEDELFAESSWIAVMLGQGVYPAGWDPLADAIDPAQIRNTLDRIRTMFAQTASTMPRHEDWLARHAPAGSLA

SEQ ID NO: 89183 - protein, 501 aa, Sphingomonadales bacterium
  misc_feature (1)..(501): tr|A0A5C7JRW4|A0A5C7JRW4_9SPHN Tryptophan 7-halogenase OS=Sphingomonadales bacterium OX=1978525 GN=E6R12_04260 PE=4 SV=1
MQQPRRIVIVGGGTAGWMAAAAFGRFLTPHYEVTLVESDAIGTVGVGEATIPQIQLFNNALGINEPDFIKATAGSFKLGIVFDGWWRPGHRYIHAFGTVGRGQGLIGFHHYWLRYRQNGGAHDFWRYSANAQAAFANRFGLGVPDAGVAIPYAFHFDASLYAAYLRRYAEARGVQRIEGRIDAVSRHGETGDILNLSLEGGRTVAGDLFVDCSGFRSLLLGEALGVGFDDWSNWLPCDRALAVPCASAEPFTPYTKASVRPAGWQWRIPLQHRTGNGYVYCSALVSDDEAAHTLLANLDGAPLAEPRPLRFTAGKRREVWRGNCVALGLAGGFLEPLESTSIHLIQTGIARLLQYLPGAGFGQADIASFNAQTDFEYTAIRDFLILHYAATERDDTEFWRARRAMAIPDSLRARIDLFAADGRFVRNGEELFAEPGWLQVMLGQGILPRGYHPLADSLSLLQLDELMGQAQRQTDAALARFMDHGAFIQRHCAMPNTESAA

SEQ ID NO: 89184 - protein, 475 aa, Sphingomonadales bacterium
  misc_feature (1)..(475): tr|A0A4Q5S4X1|A0A4Q5S4X1_9SPHN Tryptophan 7-halogenase OS=Sphingomonadales bacterium OX=1978525 GN=EOP62_00800 PE=4 SV=1
MAIRRIAILGGGVAGWMSALALGNALDGSGIAIELVETGGPDHSIGPFGPGEATLPAFHAFLGDHGVDEDALLKAARGTFALGAAFSGWAGAQSGWFLPFGEIGAGMGPVAFPPLVARLRAAGHPVRPTDFSLAAVAAAAGRFARPSLDPRSVLASYGYGLHLDKAALAAICRDLTKGVTHHAAPFVRAIRAENGHVTALELEGGEQIAADLFLDCSGPAALLCEGHGFESWSAWLGCDRVIERANSQEGIPPPYTHIGAHAAGWARAVPLIGGPSEAMLFASAHHQDANATAIHQGRRARFWHGNVVAVGAAAALVEPLYGHNLRLVHTAIQRLIALFPNHVEGPEAAEYNRITADEGDRVRDFVIAHYKTNARIGEPFWDAARAMSVPDELQYKLDLYASRGRMPMYDEEVFDRAEWIAALDGQGLHPRRYDALADTIPEAAIIQHVTRLREMIVEAAKAMPTHGATLAEVAA

SEQ ID NO: 89185 - protein, 506 aa, Sphingomonadales bacterium
  misc_feature (1)..(506): tr|A0A4V1SHH9|A0A4V1SHH9_9SPHN Tryptophan 7-halogenase OS=Sphingomonadales bacterium OX=1978525 GN=EOP60_02840 PE=4 SV=1
MTAPQPIRSIVIVGGGTAGWMAAAAFSRLARTGVKISLVESDAIGTVGVGEATIPPIRNFNGLLGIDENEFIAKTQGTLKLGIDFVGWTREGDRYFHPFGEFGFDIEGVKFHQFWRKLYESGQAADIGEYNLCAMAMNLGRYQTPSPDPASILSRMAYAYQFDASLYAAFLRDYAEKKGVVRHEGKVVHVPVRAEDGHIEAVVLEGERRIDGELFIDCTGFHALLIEETLGAGWESWAHWLQCDRAMAVPCESPEGGAITPYTRSTARTAGWQWRIPLQHRMGNGYVYCSNDIADDQVRDDLLASLDGKPLRDPFIIKFEAGRRKKAWHKNCVALGLASGFLEPLESTSIHLIQTGISKLMALLPDTGFSAVERDEYNRLTDLQMEQVRDFIILHYHANERRDGDLWRRVREMEIPETLSRKLDLFRNRGRFFRYEDELFAESSWIAVMLGQGVMPAGWDPLADTIDPAQVRHTLDRVRMLFAKTAQSMPRHEEWLARNAPARRMA

SEQ ID NO: 89186 - protein, 501 aa, Sphingomonadales bacterium
  misc_feature (1)..(501): tr|A0A4Q2ZF90|A0A4Q2ZF90_9SPHN Tryptophan 7-halogenase OS=Sphingomonadales bacterium OX=1978525 GN=EOP60_11565 PE=4 SV=1
MTVPFRIAIIGGGTAGWMCAAACAAKLDLQRYDVRLIESDEIGIVGVGEATLPQMKDFNDYIGVDEAEFMTATQATFKLGIEFVDWGHIGSRYIHPFGSFGRPIGEAEFFHYWLRARQTAGPLFDYCLPIVAAEAGRFDFPAKDPADPKSAFSYAYHLDASLYAKYLRGWSEARGMQRVEGRIIHVTRHPESGDIAHVMLASGEAIAADLFVDCSGFRGLLIEQALETGIEDWSHWLPCDRAMAVPCDKIEGITPFTRSTAREAGWQWRIPLQHRTGNGYVYASEWMSDDEAASLLLARLDGAPQADPRGLRFKACKRNKAWNRNVIAMGLASGFLEPLESTSIYLVQMSIAFLLTLMPDRAEIDPALEREYNRVMDVEYDRIRDFLILHYRATTRDDAEIWRYCRAMQIPESLADRIERFRHRGHIREYRDGLFGPPSWQAVFIGQGIVPEASDAMAELMSEAVLTERMAKLRGLVGNTAAAMPLHAETIARYCPAGGAA

SEQ ID NO: 89187 - protein, 94 aa, Erythrobacter sp.
  misc_feature (1)..(94): tr|A0A3D4M4Q1|A0A3D4M4Q1_9SPHN Tryptophan halogenase (F ragment) OS=Erythrobacter sp. OX=1042 GN=DIW45_14620 PE =4 SV=1
TRATARAAGWQWRIPLQHRVGSGLVYCDAFWDDADAAEALMANLEGEPGAEPRQLRFTTGRRSALWRSNCVAIGLAGGFLEPLESTSIDLIQSG

SEQ ID NO: 89188 - protein, 500 aa, Sphingomonadales bacterium
  misc_feature (1)..(500): tr|A0A4Q2ZKL5|A0A4Q2ZKL5_9SPHN Tryptophan 7-halogenase OS=Sphingomonadales bacterium OX=1978525 GN=EOP60_10160 PE=4 SV=1
MTDSRIRSIVIVGGGTAGWMAAATLARILGTDYASITLVESEEIGTIGVGEATIPQMATFNRMLGLDEDQFMRETQGSFKLGIQFVDWARKGHRYYHPFGKYGLDMNGVSFHAFFQRLHQMGEAPDINDFSLQATASRDNRFMRPIDAGKSPLSEIAYAFHFDAGLYARFLRKYAENLGVVRREGKIVDVKLRGEDGFVQSVVLADGSAVEGELFIDCSGFRGLIIEQALKAGYTDWSRYLPCNRAIAVPCESVEEWTPYTRSTAHSAGWQWRIPLQHRIGNGHVFCSDFMGDDEAASILLGNLDGKPLADPRVVPFTTGHRSKLWVKNCVALGLAGGFIEPLESTAIWLVQSGLSRLLTMFPDRNFNQADVDRYNRIMTTEYEELRDFIVLHYNATERDDSPFWDYCRNMEVPERLAEKMRVFRTHGRCFRENEELFNDTSWFAVMHGQLMKPQSYDPVADTMSLDETRSRLAHIRQAIANSADYMPKHRDFIREHCAA

SEQ ID NO: 89189 - protein, 506 aa, Sphingomonas sp.
  misc_feature (1)..(506): tr|A0A345WST6|A0A345WST6_9SPHN Tryptophan halogenase OS =Sphingomonas sp. FARSPH OX=2219696 GN=DM480_00205 PE=4 SV=1
MTADAPLRSIAIVGGGTAGWMAAAALARVLGPDGPAITLVESEEIGTVGVGEATIPPIQAFNALLGIDEDAFVRATGGTFKLGIEFVDWWQRGHRYFHPFGVYGIDSGAVPFEAMWQRLRMTGDALPLDAYSICTAAAAAGRFARPQASNTPLAQIGYAFHFDATLYARFLRQHAEASGVRRIEGRVVDVARRPDDGFIETVALESGVRIAADLFIDCSGFRALLLGEALGVGFQDWGHWLPNDRAVAVPSANAEPPTPFTRSTAQAAGWQWRIPLQHRTGNGYVYASGHISDDAAAATLLAGLDGAPLADPRLLRFRTGRRDVFWARNCVALGLASGFMEPLESTSIHLVQAGIARLLEMLPTRAFEQADIRRYNRLMTAEFESIRDFLILHFHATARDDTAYWRNLAAMRVPDSLAERIAIHRRTGRVYREADELFTRTSWLAVMEGQGLRPEGFDPIALGIPLDTARARLSRIAEVTRAAVGHLPPHADFIARHCAAPQEPVA

SEQ ID NO: 89190 - protein, 521 aa, Sphingomonas sp.
  misc_feature (1)..(521): tr|A0A369VYP3|A0A369VYP3_9SPHN Tryptophan 7-halogenase OS=Sphingomonas sp. WZY 27 OX=2283317 GN=DVW87_06445 PE =4 SV=1
MEQPVSRIVIVGGGTAGWLAACLLAARGDRTARPPLSVTLIESPDVATVGVGEGTWPTMRRTLERIGLSEADFLRRCEASFKQGSRFDGWRTGAEGEQYFHPFTPPVDGQAADLVAAWADDPLARPFAETVSAQPGICAQDLAPRQRGMPDYAGALNYAYHLDAGKLAALLAEHGTQVLGVRHLRDHVTRVVPGEGGDIAAVELRGAGEIAGDLFLDCTGHAALLIGGHHGVPFVDWSDVLFNDRALAVQVPVAPGSAIASQTNATAHAAGWLWDIGLPTRRGVGCVYASAFLSDAAAEETLAAYLARTAPDVDRSALSFRKLAFRSGHRERFWQGNCLAIGLAAGFLEPLEASAIVLIELSLNALLDGFPRTRGAMERHARRFNDLFRYRWDRIVEFLKLHYVPSVRSEPYWQAHRDPASIPARLQELLALWRDQPPSRADLPMVDEIFPAASYQYVLYGMGWPAPPPSRIAGETQAQVAQQLAAAAQRARVLAASLPTNRAYLDAVRADALPRQMETVR

SEQ ID NO: 89191 - protein, 167 aa, Sphingomonadales bacterium
  misc_feature (1)..(167): tr|A0A4Q2YXI7|A0A4Q2YXI7_9SPHN Tryptophan halogenase (F ragment) OS=Sphingomonadales bacterium OX=1978525 GN=EO P63_09395 PE=4 SV=1
MGDKFELVIVGGGTAGWMCAAACAAKLDPARFRVRLVESEEIGTVGVGEATLPQMKDFNDFLGLDEVEFMKATQASFKLGIEFVNWGREGHRYVHPFGTFGRPIGEADFFSYWIRAHRAGTAAPLSDYCFPIVTALQNRFMLPNGEANDVRNAFSYAYHLDAFLYAR

SEQ ID NO: 89192 - protein, 482 aa, Erythrobacter sp.
  misc_feature (1)..(482): tr|A0A3D0WJ89|A0A3D0WJ89_9SPHN Tryptophan halogenase OS =Erythrobacter sp. OX=1042 GN=DEP68_07510 PE=4 SV=1
MAAALLARFLPPDYRVELVESEAIGKVGVGEATIPQIRHFNQALGIDEAEFLRETKGSFKLGIAFDGWRGEGHSYMHAFGPVGQSSGLIAFRHYWLRAKALGHAKDLAHYSPNEMAARNLRMPGPGSADLPYAYHFDASLYAAFLRHYAETRGVVRAEGIIERVERDSETGDIAALVLDGDRRLEADFFIDCTGFRALLIEGAMEAGFDDWSNLLPCDHALAVPCASGGDFTPYTRAMARKAGWQWRIPLQHRIGNGYVFSSQFCSEDEAADTLLANLDGSPDGTPRLLSFTTGKRRRQWIGNCLALGLAAGFMEPLESTSIHLVQSALARFLQLLPAGRSTPSTIDHFNTQADFEWSRVRDFLVLHYWANGREGDPFWDAMRALDLPATLQARIDQWRDTGHIHREHEELFTEVAWFQVFAGQGVSANHYNPLADAMAEQDLRDFLASQERALEQAAAAMPHHADTLGRLMARPAKRNTAA

SEQ ID NO: 89193 - protein, 518 aa, Alteromonadaceae bacterium
  misc_feature (1)..(518): tr|A0A2D9KBZ4|A0A2D9KBZ4_9ALTE Tryptophan halogenase OS =Alteromonadaceae bacterium OX=1916082 GN=CL582_04580 P E=4 SV=1
MTSASQPVRKVVIVGGGTAGWLTAGRIAAEHATKAHHPVEVVLVESPNIPTIGVGEGTWPTMRNTLIKLGIRETDFIRECDASFKQGAKFAGWVTGDTDDFYYHPLMLPQGFSQGNLGPYWQQHQDTIEQSFSNAVCFQEALCEHNRAPKSIRHAEFGAVANYAYHLDAGKFTSFLTRHCTEKLNVRHVLADVTGVTAHDNGDIRAIQTQQAGEIGGDLFVDCTGFQSLLLGKHYKVPFVPCDDVLFIDRALAVHVPYDSPDAPVATHTISTAQQAGWIWDIGLQSRRGVGHVYASRYQSEQQALDQLAQYVGPQFNDLSVKQIQIQSGHREHFWHNNCVAVGLSAGFLEPLEASALVLVELSATMLAEQLPVNRATMPIIAKRFNQTFQYRWQRIIDFLKLHYMLTKRTDTAFWRDNCDPATIPDSLQELLDLWRYHPPYDHDFTSNNEVFPAASYQYVMYGMGFESDLSFGQQQVAKAFAQQQLQMNQQARQKVLSALPTHRDLLNKINQYGLQPV

SEQ ID NO: 89194 - protein, 519 aa, Alteromonadaceae bacterium
  misc_feature (1)..(519): tr|A0A2A5HFZ1|A0A2A5HFZ1_9ALTE Tryptophan halogenase OS =Alteromonadaceae bacterium OX=1916082 GN=COA42_19550 P E=4 SV=1
MNKATRTVVILGGGSAGWLTAGVIAAEHRTNQADGLRVILVESPDVAPIGVGEGTWPTMRNTLSKIGVRETDLFRECEASFKQGAKFSRWVTGEKNDHYYHPLVIPDGYEETDLASQWLAMQDRAPFADTVCFQGHICEKGLAPKQITTPEYASVANYAYHLNSAKLGEFLKNHCIDKLGVKHVLDHVISVKSAENGDISALATKENGDIEGDLFVDCSGFSSLLLAKHYKIPFVSKKHILFNDTALAVHVPYENEDSPIASHTISTAQSAGWIWDIGLPSRRGVGSVYSSAHQTEEGAGAELRKYIAESVGQKTADSLSFRKIPINPGHREKFWHRNCVAVGMASGFLEPLEASALVLIELAAEMISENMPATRDVMDIVSKRYNKRFLHRWDNIIDFLKLHYILTKRTDSEYWRDNLLDETIPDNLQELLKVWRHHPPTRHDFPYTEEVFPSASWQYVLYGMGFETEPRKTARLASDPKIAQRFFESTRKYTAKCIAGLPNNRELIKKIHAHGLQRI

SEQ ID NO: 89195 - protein, 497 aa, Rheinheimera sp.
  misc_feature (1)..(497): tr|F7NRC3|F7NRC3_9GAMM Tryptophan halogenase OS=Rheinhe imera sp. A13L OX=506534 GN=Rhein_0179 PE=4 SV=1
MNNEQNRIKKVVIAGGGTAGWMTAAGLTKLLGKNLEVVLVESDDIGTVGVGEATIPTMHIFHRLLNIKESEVMAATNATFKLGIQFENWKTQGENYIHSFGFLGKDCWACGFQHFWVKGKQKGIASEIGDYCVEHLGARQGRFAVTPNQDLNHAYHMDASLYAKFLRRLSEQHGIKRIEGKISEVQQHMDGSISALLLESGELIEGDLFIDCTGFRALLIEQTLNTGFEDWSHWLPCDSAYAVQTKTTQEPVAYTRAIARDAGWQWKIPLQSRVGNGLVFCSKFITEAEAKQTLIDNVEGEMLFEPRLIKFKTGTRRQHWNKNCVAIGLSSGFLEPLESTSIHLIQRSIIRLLQAFPSDGILAAEVAEFNRQTKIEMDNIRDFIILHYKATERTDTKFWRYCKAMDIPETLSHRMELFKQSGKVYKFAQELFGESSWLQVLIGQGLMPQQYHPIVDLMPDSELNDFLMSIKHNVKRTVSQFPTHHEFIQHYCKSSLV

SEQ ID NO: 89196 - protein, 495 aa, Sphingomonadales bacterium
  misc_feature (1)..(495): tr|A0A4Q5RUM9|A0A4Q5RUM9_9SPHN Tryptophan 7-halogenase OS=Sphingomonadales bacterium OX=1978525 GN=EOP62_13585 PE=4 SV=1
MTEHRLRRVVIAGGGTAGWMAAAAIARTLGNAVDLTLVESDAIGTIGVGESTIPPLVSYNRLLGINEADFMRATQATFKLGILFDNWKEPGHRYFHSFGLTGKDHWSAGFQHFWMRARANGVAGSYDDYCLELVAALQSKFAHLPDDRMNYAYQLDSGLYAKFLRKMAEADGARRIEGKIARVELDSESGDIAALALESGQRIEGDLFLDCTGFRAVLIEQAMHAGFDDWTHWLPCDSAIAIQTASVGPAVPYTRAMAHDAGWQWRIPLQHRVGNGIVYCSRYLDHDTALERLLGNIEGETLVQPNKLRFTTGVRRKQWHRNCVAIGLSGGFMEPLESTSIHLIQRAVLRLIRMMPLSEISERDVAEFNDQQFQDMAQIRDFLILHYKATERRDSPFWRQCESMAIPDSLTQKIELFRETGRVFRRNEELFAENSWVQVMMGQGITPRAWHPIAEKLSDEELGKLMTVMGDQVKHTVASLPAHADYVAQYCGAAR

SEQ ID NO: 89197 - protein, 223 aa, Sphingomonadales bacterium
  misc_feature (1)..(223): tr|A0A4Q3AQ58|A0A4Q3AQ58_9SPHN Tryptophan halogenase (F ragment) OS=Sphingomonadales bacterium OX=1978525 GN=EO P58_03755 PE=4 SV=1
MTKRFDLVIVGGGTAGWMCAAACAAKLDPTRYRVRLVESEEIGTVGVGEATLPQMKDFNDYLGLDEVAFMAATQASFKLGIEFVNWGRQGDRYIHPFGTFGRPIGEADFFSYWARANAAGRAAPLPDYCIAIVMAWANRFMLPNGAAGDVRNAYSYAYHLDAFLYARFLRRWAEERGVERVEGRIVTVARDGERGGIASVTLASGAQVTGDLFVDCSGFRSLL

SEQ ID NO: 89198 - protein, 499 aa, Alteromonadaceae bacterium; identical to SEQ ID NO: 86032
  misc_feature (1)..(499): tr|A0A2D5M3Q4|A0A2D5M3Q4_9ALTE Tryptophan halogenase OS =Alteromonadaceae bacterium OX=1916082 GN=CL579_11900 P E=4 SV=1

SEQ ID NO: 89199 - protein, 376 aa, Caulobacter sp.
  misc_feature (1)..(376): tr|A0A259J7G2|A0A259J7G2_9CAUL Tryptophan halogenase (F ragment) OS=Caulobacter sp. 39-67-4 OX=1970332 GN=B7X77 _00980 PE=4 SV=1
MTAAALSKVLKGVEITLIESDQIATVGVGEATIPPINTFNQILGIDEADFMRSTKASFKLAIEFVDWTAPGSRYLHPFGGFGLDIEAIKFHQFWLKAQSQGSTQPLDDFNLSATAAKLGKFMLPSKDTGQVLPSLKYAFHFDAVLYAGYLRDYAEKRGVIRREGKVVDVCLRGEDGFIASVTTDGGEVIEADLFIDCSGFRGLLIEQALDTGFEDWGHWLPNDRAVAMPCDTGGDGLTPYTRATADKAGWRWRIPLQHRTGNGYVYSSQHLSDEDAVARLRATLDGPARAEPNFIKFRAGRRKQIWVKNCVAIGLASGFLEPLESTSIHLIQVAITTLLELFPERGCAGADQDEYNRVMDLEFERIRDFLVLHYHN

SEQ ID NO: 89200 - protein, 366 aa, Sphingomonadales bacterium
  misc_feature (1)..(366): tr|A0A4Q3BZ83|A0A4Q3BZ83_9SPHN Tryptophan 7-halogenase (Fragment) OS=Sphingomonadales bacterium OX=1978525 GN= EOP61_38880 PE=4 SV=1
MVIVGGGTAGWMAAAALSRLTRTGVRVTLVESDAIATVGVGEATIPPIRNFNGLLGIDENDFLAKTQGTIKLGIDFHGWRNGSDRYVHPFGEFGFDVEGVKFHQLWRKMLASGQASGIEDYNLCAMAMRLGRYQPPSPDPGSVLSRMAYAYQFDASLYAAYLRAYAEKRGVVRVEGKVVDVPLRGEDGHIEAVVLEGDRRIEGELFIDCTGFRALLIEEKLGAGWESWAHWLPCDRAVAVPCDSPDGTITPYTRSTARAAGWQWRIPLQHRIGNGYVYCSGDISDDAARETLMANLDGKPLRDPFMLKFEAGRRKLAWHRNCVALGLSSGFLEPLESTSIHLIQTGEKPASGSSAISLETPVWIRW

SEQ ID NO: 89201 - protein, 525 aa, Alteromonadaceae bacterium
  misc_feature (1)..(525): tr|A0A2E9K329|A0A2E9K329_9ALTE Tryptophan halogenase OS =Alteromonadaceae bacterium OX=1916082 GN=CL587_04355 P E=4 SV=1
MKDTQQLTSVVIAGGGTAGWLTACILAAKHRPGNLSITVIESPDIPTLGVGEGTWPTMRGTLQKIGIDEATFLSACHGSFKQGTSFHHWRKPEASPHQYYHPFSLPFNYFDTDCAAWWQRHQPQMDFASVATSQGAICDRNLAPKQAETPPFAGVVNYGYHLDAVKFAGLLKHRATSESGVTHITGHISSVIPSEDGGIRSVVLDKSGRQIEGDIFIDCTGFSARLIGEHCGEPLISCKHILANDSAVAVQCQYAADDTPVTSVTRSVAQSKGWIWDIALPERRGAGYVYSSQHCTAEEAILTLHRYAGSDKSLRDVSFGEFSGKAKYFNFEPGYRRSPWQKNCVAIGTSAGFLEPLEASALVMIELAATLLSEQLPRYTNQIAPVARQFNQQLAGKWSRIVDFLKLHYVLSDRDDSAYWQEMRKLSSCSEQLQDWLSMWSTRSPNASDFNLRDEIFPAASYLYVLYGMGFNTAFLPGSADHDSSEHQHAWHKQQQLTRQHLAGLPANRALLTQLTGARQYQVNK

SEQ ID NO: 89202 - protein, 517 aa, Alteromonadaceae bacterium
  misc_feature (1)..(517): tr|A0A2E7GWI6|A0A2E7GWI6_9ALTE Tryptophan 7-halogenase OS=Alteromonadaceae bacterium OX=1916082 GN=CL578_24485 PE=4 SV=1
MDQAIKSIVIVGGGTAGWITAGTLAAKLQNEHADGFKITLVESPDVKPIGVGEGTWPTMRRTLKAMGIRETDFIRECNVSFKQGAKFAQWVTGAEDDFYYHPLVLPQDFDSTNLARHWMAHPFEQSFSQAVSPQEAVCETGLAPKTIATAEFTSIINYAYHLDAGRFSAFLQRHCIEKLNVHHILDNVSKINAAENGDIASVSTKANGDIAGDLFIDCTGFKSLLLGEHFKVRFKSCKDVLFVDQALAIHVPYDTDDAPIASHTISTGQSAGWVWDIGLQNRRGVGHVYSSAHTTEQRASEELLNYIAQTGGKVNEADIRSIGLNPGHRETFWRQNCVAVGLSAGFLEPLEASSLLLVEISAAMIADQFPATRDAMDIVAKRFNHTFLYRWERIIDFLKLHYMLSKRNDSAFWIDNRDTTTIPQSLQEQLTLWQFQPPWHNDFEHAVEVFPAASYQYVLYGMGFYTKPNELGMSQAYQQKAGALRQKNSQQVQQMLKNLPDNRGLINKIHQFGMQRV

SEQ ID NO: 89203 - protein, 253 aa, Sphingomonadales bacterium
  misc_feature (1)..(253): tr|A0A4Q5SE65|A0A4Q5SE65_9SPHN Tryptophan halogenase (F ragment) OS=Sphingomonadales bacterium OX=1978525 GN=EO P59_17345 PE=4 SV=1
LQSERLDTVPPYTRSTARDCGWQWQIPLQHRTGNGYIYSSAFLDDEAARDALLANLPTSPLIEPRPLRFTAGRRTHCWTRNCIAIGLSSGFLEPLESTSIYLIQIAAMNLVALFPEHADDPVLAAEFNRRMDVEYDRIRDFLILHYHANRRDEPFWRQCRAMAVPDSLAEKIAMFRHRGAVPRYGEGLFSPPSWVSVLFGQGLEPEAVHPLAEALPMPELTRRLAAIRAEVATGVAGMSGHDGFVSDFGEWGI

SEQ ID NO: 89204 - protein, 498 aa, Alteromonadaceae bacterium
  misc_feature (1)..(498): tr|A0A2E6SJH2|A0A2E6SJH2_9ALTE Tryptophan halogenase OS =Alteromonadaceae bacterium OX=1916082 GN=CL590_00745 P E=4 SV=1
  misc_feature (45)..(45): Xaa can be any naturally occurring amino acid
  misc_feature (233)..(233): Xaa can be any naturally occurring amino acid
  misc_feature (440)..(440): Xaa can be any naturally occurring amino acid
  misc_feature (442)..(442): Xaa can be any naturally occurring amino acid
  misc_feature (471)..(471): Xaa can be any naturally occurring amino acid
  misc_feature (492)..(492): Xaa can be any naturally occurring amino acid
MNASPLNIVIVGGGTAGWMAANLLAKRWQHKAVSVTLVESPDIGXIGVGEGSTPTLKRFFEDMNIAESDWMAACNATYKVSIQFDGWSPESGVGSYAHPFISQLDTFSERPFYVNCLTRRMGLDVNVTPGDFLFNGWLAKHKRSPQTPANFPFRIEYGYHFDSGLLGAFLQRHAHTLGVTHKSRNIESVQCHPNGDIASLHTREGEIIEGDLFIDCSGFRSLLLQQTLKVPFXSFKDNLFNDAAVVCATDALEDRPVETRSTALSTGWAWQIPLTNRTGNGYVYSSAFISQDDAEKELLTHLGVNDDDAQTRHLTMKVGQVSEHWSRNCLALGLSQGFIEPLEATALHLVQTSVEIFMDHYEKGGFSDQYRAAYNQVIGERFERVRDYIVAHYKLNTRNDSEYWRANRNNDVLSESLLQLLDVWFRRGDLQQEIQRQKLXSXFGATSWHCLLAGYGAFPRLAAQQPNQGDXYKDNNLAQFFSGCLLNFSAQXRDDSHL

SEQ ID NO: 89205 - protein, 506 aa, Sphingomonadales bacterium
  misc_feature (1)..(506): tr|A0A4Q5TGP7|A0A4Q5TGP7_9SPHN Tryptophan 7-halogenase OS=Sphingomonadales bacterium OX=1978525 GN=EOP59_00465 PE=4 SV=1
MRQAQGAPPKTRVVIVGGGTAGWMTAAGLIRRLSHACEVRLIESEDIGIVGVGEATLPHLRAFVRMLGIDEAEFMAVTHATYKLGIQFRDFGRLGHAYLHPFGNFGRPLSGVAFHHYWLRMRAEGGGDSLFEYSVANVMAEECRFQPPSDDPDSLLSTYGYAYQFDATRFAPYLRDYAVARGVERTEGRVVDVALDPLSGDVAALTLASGQRIEGDLFVDCSGFRALLIGAALGSEWEDWSRWLPCDRAVAAPCASPAGVIEPYTRATAMPAGWRWRIPLRHRVGNGYVFSSAHIGEDEAMEALVAALENKPMADPRLLRFRAGRRKRSWDRNVVAIGLASGFLEPLESTSIYLAQGAVEQLIALFPAGGQIADADRDEFNRMVDVEYDRIRDFLILHYHATQRDDSDFWNDMRTMTVPDSLAEKIELFRETGRVARYTQGLFLEPSWIAVYLGQGIVPERWDQRADAAETRLLAPALDRLRAQLADAVRAMPSHDAYLARHGASG

SEQ ID NO: 89206 - protein, 514 aa, Sphingomonadales bacterium
  misc_feature (1)..(514): tr|A0A4Q5T6H9|A0A4Q5T6H9_9SPHN Tryptophan 7-halogenase OS=Sphingomonadales bacterium OX=1978525 GN=EOP59_05870 PE=4 SV=1
MSPAGDQGQRYEIVILGGGTAGWMCAANLARHLNPRDYSVTLVESDEIGTVGVGEATLPHMKAFNDMLGVDEARFMTETRATFKLGIEFCGWDRPGDSYIHPFGAFGEPWGGAEFQHHWLRARQKGRPVQPLEAYSYAVAAARARAFEFPNEDPGSIRSTFSYAYHFDAGLYAEFLRRWATERGVTRIEGEVAYVARDPGTGDIAALVLESGERIAGDFFVDCSGFRSLLLGQTLGVGWQDWSKWLPCDRAWAVPSARAEDFTPFTRATARKAGWQWRIPLQHRTGNGYVFSSGFIGEEQARDDLLSRLDGALVAEPRLLRFQAGRRLEGWRGNCVAIGLASGFLEPLESTSIFLVQTAVHDLVTLIPACGSARAEPRLAAEFNRLFALQYDRVRDFLVLHYAANRRVGEPLWDHVRSMTLPDTLMHKIALFEARGTVPNYQYGLFARDSWLSVLIGQGIEPRAYDRLADALDLDDVEARLDDYASRIALNVGAMSSHDDFVRSYCPADKGAVA

SEQ ID NO: 89207 - protein, 505 aa, Sphingomonadales bacterium
  misc_feature (1)..(505): tr|A0A4Q5S5J4|A0A4Q5S5J4_9SPHN Tryptophan 7-halogenase OS=Sphingomonadales bacterium OX=1978525 GN=EOP62_00805 PE=4 SV=1
MTAPQPIRSIVIVGGGTAGWMAAAAFSRLIRTGVKVTLVESDAIGTVGVGEATIPPIRNFNGLLGIDENDFLAKTQGTIKLGIEFVDWTHEGHRYAHPFGEFGFDIEGVKFHQFWRKLRESDAATGIEDYNLCAMAMRLGRYAPPSPDPGSILSRMAYAYQFDASLYAAYLRDYAEKRGVVRHEGKVIDVPVRGEDGHIEAVVLEGDRRIEGELFIDCTGFRALLIEQTLGAGWESWAHWLQCDRAVAVPCEAPDGSITPYTRSTARTAGWQWRIPLQHRIGNGYVYCSGDISDDDARETLLANIDGKSLRDPIMLKFEAGRRKLAWHKNCVALGLSSGFLEPLESTSIHLIQTGISKLMALLPDAGFSPVERDEYNRLTDVQMEQVRDFIILHYHANERKDGDLWRRVREMEIPETLSRKLDLFRNRGRFFRYDDELFAESSWIAVMLGQGVYPAGWDPLADALDPAQIRHTLDRIKAMFAQTAQSMPRHEEWLARHALARSFA

SEQ ID NO: 89208 - protein, 518 aa, Sphingomonadales bacterium
  misc_feature (1)..(518): tr|A0A4Q3AL13|A0A4Q3AL13_9SPHN Tryptophan 7-halogenase OS=Sphingomonadales bacterium OX=1978525 GN=EOP58_07130 PE=4 SV=1
MAVAVSRIVIVGGGTAGWLAACLIAARADPAASPPLQVTLIESPDIPTIGVGEGTWPTMRHTLERIGLSEADFLLACDASFKQGSRFDGWRTGAPGDFYYHPFTAPADGDARALVAAWQAGGGTFAEAVGAQARIAALDLAPRQRAMPDYAGALNYAYHLDAAKLAGLLSRNAVQRLGVRHIRDHVVAVERADDGDLAAVRTREHGAIAGDLFIDCTGHAALLIGEQLGVPFVDRSDVLFNDSALAVQVPVAPGSPIASQTNATAHAAGWIWDIGLPERRGVGCVYASRFMGDEEAAETLAGYLRATAPDADLAALSFRRLTFRSGHRERFWERNCLAVGLSAGFLEPLEASAIVLAELSLEALLDNFPATRASMDTHARRFNTRFRYRWDRIVEFLKLHYVPSERDQPYWRAHRDPATIPPRLAELLALWRDQPPSPTDLPMADEVFPAASYQYVLYGMGFAPPAPGAIRADGTDSARAQIGQAEQRGRALAASLPSNRAYLDALRAEHSSGKRMAE

SEQ ID NO: 89209 - protein, 478 aa, Sphingomonadales bacterium
  misc_feature (1)..(478): tr|A0A4Q5TD30|A0A4Q5TD30_9SPHN Tryptophan 7-halogenase OS=Sphingomonadales bacterium OX=1978525 GN=EOP59_00460 PE=4 SV=1
MSDGPIRSVCVVGNGIVALSAAAAFARALPGVALHIVETPPDPTALADTPCASLPSIHHFHAAIGLDEAALLGEGAATHLLGTRFAGWSASGSPWIHAFGEHGLNAGEVPFHMLWHRARIAGRAAPFHCHSAAATLAAADKFVHPSADPASPLAGFLYGLRLERVAYGNRLGTLTADIPHRTFLAAERDMRGIAALRLTDGTAITADLYLDCTGPQALLRASLDPEFEPWDAWLPCDHIRFGAGSDAPLSPLDRVEAQPNGWRRTSSRPGHVRTVQAWSSRFADTGQEPAVIAIRPGRRPCPWAGNVLALGDAATALDPLYGAPLHLAQAGILLALELLPGRGNSPIALAEYNRRFAEEALGVRDFLALHYVRSGRSEPFWTEAAGQKLPASLARIVEQFERRGRIPPSEAEGVDRESWIAALIGLGVEPGTVNPLADSVDPDKAAAAIDALAGRIAAIPAGVPPYPEYLARMRAGGR

SEQ ID NO: 89210 - protein, 525 aa, Erythrobacter sp.
  misc_feature (1)..(525): tr|A0A2D5F217|A0A2D5F217_9SPHN Tryptophan halogenase OS =Erythrobacter sp. OX=1042 GN=CL948_02990 PE=4 SV=1
  misc_feature (5)..(5): Xaa can be any naturally occurring amino acid
  misc_feature (7)..(7): Xaa can be any naturally occurring amino acid
  misc_feature (9)..(9): Xaa can be any naturally occurring amino acid
  misc_feature (78)..(78): Xaa can be any naturally occurring amino acid
  misc_feature (96)..(96): Xaa can be any naturally occurring amino acid
  misc_feature (101)..(101): Xaa can be any naturally occurring amino acid
  misc_feature (264)..(264): Xaa can be any naturally occurring amino acid
  misc_feature (290)..(290): Xaa can be any naturally occurring amino acid
  misc_feature (368)..(368): Xaa can be any naturally occurring amino acid
  misc_feature (425)..(425): Xaa can be any naturally occurring amino acid
MTASXRXDXGQAQAIGSICIVGGGTAGWSAAALLSQVLRGSGCRITLVESSAIPTVGVGEATIPPIFDFLRNIGADEXEFIRRCQATFKLGIQFRXWLHHXHAYWHPFGNLGVTINQRPFHHYYCMNRAAGHGETLADLCPSVALAEDGKFAFPSPDGQWPGGAVAYALHFDAGLVAAFLRDHAVAAGVERLDRRIVGATRGEGERIAAVQFDDGESLEADFYIDCSGFRGLLIEETLGAGFEDWKHWLPCDSAVAAPTAAQEXRAPYTVATARSAGWQWRIPLQHRTGXGLVYASDFISDADAQAQLLAGLDGEPQADPRVLRFTAGLRKRAWVGNCLAIGLSAGFLEPLESTSIHLIHTGLNRLLXLFPDRRFDPALIAAYNRDVHREYAHIRDFLLLHYVPNRREGEPFWDHMRGLDLPDTXAEKIELFTRTGRIMSRQRELFSDISWFYVMHGMGLTPAALDPLAEAAPFGEVRKVIDQLRGAMQAFRSAAPTHDAILDRLLDPAETRRPQFGTGGGWTTR

SEQ ID NO: 89211 - protein, 434 aa, Caulobacter sp.
  misc_feature (1)..(434): tr|A0A259IGQ1|A0A259IGQ1_9CAUL Tryptophan halogenase (F ragment) OS=Caulobacter sp. 39-67-4 OX=1970332 GN=B7X77 _08665 PE=4 SV=1
LGIDEATFMRETQSTFKLGISFENWGQIGDRYIHSFGQVGKSTWMGGFHHFWLQARAQGFGGELGDYCFELKAAEADRFFTDENATTNYAYHLDATLYGRFLRKMSEGKGVRRLEGKIARVQQRAEDGFIEALVMESGEIVEGDLFIDCTGFRGLLIEQTLKAGWEDWSHWLPTNSALAVQTTSTEPAVPYTRAIAHKAGWRWKIPLQHRVGNGLVYCSDHMSDDEARALLLREIDGEPLIEPRVIRYGAGRRRKTWSKNCVALGLASGFVEPLESTSIHMIMIGVTRLMQLFPFGGVNDALIERYNRLAEDELEKIRDFIILHYKATERSDSPFWDYCRTMDIPDSLAQRIDLFRENAQVFQAPGELFQVDSWLQVLLGQRVEPRSHHHMGRMMPPDQLRQALDSLKGNIARAVEGMPSHQAFVDRYCAAWST

SEQ ID NO: 89212 - protein, 509 aa, Sphingomonadales bacterium
  misc_feature (1)..(509): tr|A0A4V1SD96|A0A4V1SD96_9SPHN Tryptophan 7-halogenase OS=Sphingomonadales bacterium OX=1978525 GN=EOP63_07460 PE=4 SV=1
MNEAIERVVIVGGGTAGWLAACLLASARRAAKLDVTLIEAPDIPTIGVGEGTWPTMRATLSAIGIGEAEFLAACDGSFKQGSRFDGWVTGAEGDRYLHPFTSPPAAPTAELLAAWQAGAPDLPFAAAMTAQTHVCASDLAPRQRAMPDYQGAANYAYHLDAGKFAALLAGHAVQRLGVRHISDHVVGVARDDDGAIASVATRHNGDIAGDLFIDCTGHAALLIGNHLGVEWIDRSDTLFNDRALAAQVPVAPGSPIASQTVSTAHAAGWIWDIGLPGRRGIGCVYASRFMDDDMAEATLRAYIARVLPDAPDVPARRLTFPTGHRARFWEGNCIAVGLSAGFIEPLEASAIVMIELSLKALIDNFPARRAAMPIHADRFNDLFRYRWDRIVEFLKLHYALSRREEPYWLAQRDPAHLPPRLSEMLQLWRDQPPSAWDFPRVDEIFSAESHQYILYGMGYPVPADLPSSERAAALLAENRQRARALAAALPANRDYLDALAPDPHSAAAR

SEQ ID NO: 89213 - protein, 525 aa, Erythrobacter sp.
  misc_feature (1)..(525): tr|A0A3D2LLK2|A0A3D2LLK2_9SPHN Tryptophan halogenase OS =Erythrobacter sp. OX=1042 GN=DHV64_16700 PE=4 SV=1
MTASTRTDHGQAQAIGSICIVGGGTAGWSAAALLSQVLRGSGCRITLVESSAIPTVGVGEATIPPIFDFLRNIGADEIEFIRRCQATFKLGIQFRDWLHHNHAYWHPFGNLGVTINQRPFHHYYCMNRAAGHGETLADLCPSVALAEDGKFAFPSPDGQWPGGAVAYALHFDAGLVAAFLRDHAVAAGVERLDRRIVGATRGEGERIAAVQFDDGESLEADFYIDCSGFRGLLIEETLGAGFEDWKHWLPCDSAVAAPTASQEQRAPYTVATARSAGWQWRIPLQHRTGNGLVYASDFISDADAQAQLLAGLDGEAQADPRVLRFTAGLRKRAWVGNCLAIGLSAGFLEPLESTSIHLIHTGLNRLLDLFPDRRFDPALIAAYNRDVHREYAHIRDFLLLHYVPNRREGEPFWDHMRGLDLPDTLAEKIELFTRTGRIMSRQRELFSDISWFYVMHGMGLTPAALDPLAEAAPFGEVRKVIDQLRGAMQAFRSAAPTHDAILDRLLDPAETRRPQFGTGGGWTTR

SEQ ID NO: 89214 - protein, 499 aa, Sphingomonadales bacterium
  misc_feature (1)..(499): tr|A0A4Q2ZRB7|A0A4Q2ZRB7_9SPHN Tryptophan 7-halogenase OS=Sphingomonadales bacterium OX=1978525 GN=EOP60_09250 PE=4 SV=1
MSENRLRRVVIAGGGTAGWMAAAAIARTMGRAVGLTLVESDAIGTIGVGESTIPPLVNYNRLLGINEADFMRATQATFKLGILFDNWKEPGHRYFHSFGITGKDHWSAGFQHFWLAAREKGLAASYDDYCLELVAALKGKFAHLPDDRMNYAYQLDSGLYAKFLRTMAEGDGAKRVEGKIAQVELDGETGDIAALVLESGERVEGDLFIDCTGFRAVLIEQALHAGFDDWTHWLPCDSAIAIQTASVAPAVPYTRAMAHDAGWQWRIPLQHRVGNGIVYCSRYLDHDTALERLLGNIEGETLVPPNKLRFVTGARRKQWHRNCVAIGLSGGFMEPLESTSIHLIQRAVLRLIRMMPLREISQRDVAEFNDQQFQDMEQIRDFLILHYKATDRRDSPFWRHCESMAIPDTLAQKMELFRETGRVFRRNDELFAENSWVQVMMGQGIEPRAWHPIAEKLRDEELAKLMTTIAENVSRTVDGLPAHADYVAQYCGIARAAAA

SEQ ID NO: 89215 - protein, 501 aa, Erythrobacter sp.
  misc_feature (1)..(501): tr|A0A2D8MJU0|A0A2D8MJU0_9SPHN Tryptophan halogenase OS =Erythrobacter sp. OX=1042 GN=CL949_22275 PE=4 SV=1
MRTATTPRRIVIAGGGTSGWMAAAALARTMGDTIELTLVESDAIGTVGVGESTIPPLVKYNQLTGIDEAEFMRETNATFKLGIEFENWKTDGESYFHSFGATGKDHWSAGFQHFWMHGLTQGHEHSYDDYCLELAAAHAGKFAILPDNRINYAYQLDATAYARFLRRKAESFGATRREGKIAAVELDSESGDIAALTLESGERIEGDLFVDCTGFRALLIEGALHVGYDDWSHYLPNDRAIAVQTESVRDPVPFTRAIAHEAGWQWRIPLQHRQGNGIVYCSRYMSDDEAEARLLSTVEGATCSTPNRLRFTTGARRKQWHRNCVAVGLSSGFMEPLESTSIHLIQRAVLRLIRMLPSGERVSQRDIDEFNDQQLTDMDQIRDFLILHYKVTQRRDSPFWRQCAAMEIPDSLTQKIELFRETGRVFRKNEELFAENSWVQVMMGQGLMPETYHPVATKMSSEELDRFLGTLRSNVARTVAGLPEHHAFVKRYCGAKQAEAA

SEQ ID NO: 89216 - protein, 395 aa, Sphingomonadales bacterium
  misc_feature (1)..(395): tr|A0A4Q3DDE4|A0A4Q3DDE4_9SPHN Tryptophan 7-halogenase (Fragment) OS=Sphingomonadales bacterium OX=1978525 GN= EOP61_03620 PE=4 SV=1
MTAPQPIRSIVIVGGGTAGWMAAAALSRLVRTGVRVTLVESDAIATVGVGEATIPPIRNFNGLLGIDENEFLRRTQGTIKLGIDFQGWTHEEDRYFHPFGEFGFDIEGVKFHQFWRKLHETGAASGISDYNLCAMAMKLGRYQPPSNDPGSVFSRMAYAYQFDASLYAAFLRDYAEQRGVVRQEGKVVQVPVRGEDGHIEAVMLEGDRRIEGELFIDCTGFRALLIEQTLGAGWESWAHWLQCDRAVAVPCAAPDETITPYTRCTARTAGWQWRIPLQHRIGNGYVYCSGDISDDAARETLLANLDGKPLRDPFMLKFEAGRRKLAWHKNCVALGLSSGFLEPLESTSIHLIQSGVTKLMALLPDAGFSSVERDEYNRLTDIQMAQVRDFIILHY

SEQ ID NO: 89217 - protein, 538 aa, Burkholderia pyrrocinia; identical to SEQ ID NO: 87078
  misc_feature (1)..(538): tr|A0A318J024|A0A318J024_BURPY Tryptophan halogenase OS =Burkholderia pyrrocinia OX=60550 GN=NA66_1001515 PE=4 SV=1

SEQ ID NO: 89218 - protein, 493 aa, Sphingomonadales bacterium
  misc_feature (1)..(493): tr|A0A4Q2ZCQ7|A0A4Q2ZCQ7_9SPHN Tryptophan 7-halogenase OS=Sphingomonadales bacterium OX=1978525 GN=EOP60_14205 PE=4 SV=1
MSAVRRVVIAGGGTAGWVAAAALVKQLGPLLDITLIESDEIGTVGVGESTIPTSRSFHQLLGIDEQIFMRETQSTFKLGIAFENWGKVGDRFIHSFGEIGRKSTWIAPFHNFWMEARKQGFGGSLDDYCFELKAADAERFATGEGATINYAYHLDATLYARFLRKLSEPAGVRRVEGKIATVERDPESGFITALAMESGARVEGDLFLDCTGFRGLLIEETLETGYEDWTHWLKTDSACVVQTESVGPPVPYTRAIAHEAGWRWQIPLQHRVGNGLVFASEHMSADEAKAKLLDGIQGKPLFDPRLIRFRTGRRRKVWNGNCVALGLASGFIEPLESTSIHLVKVAIMRLIQSFPFGGISEAVAERFNENSRQEIENIRDFIILHYHLNQRDEPFWKRCREMDVPESLKQRIAAFRDGAEAYQDGIDLFRVDSWVQVLMGQGLEPRSYHALARMMPAAELRQALAGLKANIEKAVGELPTHQAFLQSYCPAAE

SEQ ID NO: 89219 - protein, 471 aa, Sphingomonas sp.; identical to SEQ ID NO: 82654
  misc_feature (1)..(471): tr|A0A430E3Z8|A0A430E3Z8_9SPHN Tryptophan halogenase OS =Sphingomonas sp. ABOLH OX=1985881 GN=CA237_14270 PE=4 SV=1

SEQ ID NO: 89220 - protein, 518 aa, Alteromonadaceae bacterium
  misc_feature (1)..(518): tr|A0A2E6SM41|A0A2E6SM41_9ALTE Tryptophan halogenase OS =Alteromonadaceae bacterium OX=1916082 GN=CL590_05390 P E=4 SV=1
  misc_feature (85)..(85): Xaa can be any naturally occurring amino acid
  misc_feature (98)..(98): Xaa can be any naturally occurring amino acid
  misc_feature (145)..(145): Xaa can be any naturally occurring amino acid
  misc_feature (197)..(197): Xaa can be any naturally occurring amino acid
  misc_feature (234)..(234): Xaa can be any naturally occurring amino acid
  misc_feature (242)..(242): Xaa can be any naturally occurring amino acid
  misc_feature (270)..(270): Xaa can be any naturally occurring amino acid
  misc_feature (305)..(306): Xaa can be any naturally occurring amino acid
  misc_feature (318)..(318): Xaa can be any naturally occurring amino acid
  misc_feature (333)..(333): Xaa can be any naturally occurring amino acid
  misc_feature (338)..(338): Xaa can be any naturally occurring amino acid
  misc_feature (369)..(369): Xaa can be any naturally occurring amino acid
  misc_feature (371)..(371): Xaa can be any naturally occurring amino acid
  misc_feature (457)..(457): Xaa can be any naturally occurring amino acid
  misc_feature (491)..(491): Xaa can be any naturally occurring amino acid
  misc_feature (493)..(493): Xaa can be any naturally occurring amino acid
  misc_feature (505)..(505): Xaa can be any naturally occurring amino acid
MTSASQPVRKVVIVGGGTAGWLTAGRIVAEHATKAHHPVEVVLVESPNIPTIGVGEGTWPTMRNTLIKLGIRETDFIRECDASFXQGAKFAGWVTGDXDDFYYHPLMLPQGFSQGNLGPYWQQHQDTIEQSFSNAVCFQEALCEXNRAPKSIRHAEFGAVANYAYHLDAGKFTSFLTRHCTEKLNVRHVLADVTGVXAHDNGDIRAIQTQQAGEVDGDLFVDCTGFQSLLLGKXYKVPFVPXDDVLFIDRALAVHVPYDSPDAPVATHTXSTAQQAGWIWDIGLQSRRGVGHVYASRYQSEQQAXXQLAQYVGPQFNXLSVKQIQIQSGHREXFWHNXCVAVGLSAGFLEPLEASALVLVELSATMLAXQXPVNRATMPIIAKRFNQTFQYRWQRIIDFLKLHYMLTKRTDTAFWRDNCDPATIPDSLQELLDLWRYHPPYDHDFTSNNEVFPAASXQYVMYGMGFESDLSFGQQQVAQAFAQQQLQMNQXAXQKVLSALPTHRXLLNKINQYGLQPV

SEQ ID NO: 89221 - protein, 236 aa, Erythrobacter sp.
  misc_feature (1)..(236): tr|A0A3D4M2B9|A0A3D4M2B9_9SPHN Tryptophan halogenase (F ragment) OS=Erythrobacter sp. OX=1042 GN=DIW45_14625 PE =4 SV=1
MTERAQAIRNVVIVGGGTAGWMTAAALARLLGGTGLAITLVESAAIGTVGVGEATLPQIRRFNSLLGIDEREMMARTAATIKLGIEFRDWGRVGDSYIHPFGRFGQEIGPASFVEYWARAHARGMVAPIGQYCLPIMAALQGRFEPPDASGSRQPYDYAFQFDAGLYAAWLSELAQSAGVVRREGRIVDVARDSESGAISAVSLEDGAAIRGDLFIDCSGFRALLIGETLETSFED

SEQ ID NO: 89222 - protein, 514 aa, Sphingomonas sp.
  misc_feature (1)..(514): tr|A0A345WPI2|A0A345WPI2_9SPHN Tryptophan halogenase OS =Sphingomonas sp. FARSPH OX=2219696 GN=DM480_08710 PE=4 SV=1
MTHAEAASHPNPPIKTITIVGGGTAGWMTAALLSRLFLGAYTIRLIESEEIGTIGVGEATIPAIRTFNGLAGIDEFDFARATQATFKLGIEFRNWGGIGDSYVHGFGKIGQDLYWLHCHQFWLKARAAGRAKHLDLYALNTLAARMNRFALPDPSNPHSPMADLDYAYHFDASLFARFLRGRAEAAGVTRIEGRIVAANRRGHDGFLDHVVLADGRTVDGDLFVDCSGMRGLLIGDAMGIGYEDWNQWLLCDRALAVPSARGPGPLTPYTRSTAHAAGWQWRIPLQHRTGNGHVYASQFVSDDAAADTLRAHLDTPALGDPRPVRFRPGKRHRAWEKNVVALGLAGGFLEPLESTSIHLIQTGILRLIALFPGRGFNAADIDEYNRQTDFEYRDVRDFIIAHYKVTERDDSEFWRYLKAMDVPDSLTERLDLFRASARFFMHGKAELFREESWVQVLLGQRLEAAYDPMVDMIPAQEANAFLRDVEDVVADVARGLPTHEAFIARHCQAPATAA

SEQ ID NO: 89223 - protein, 374 aa, Sphingomonadales bacterium
  misc_feature (1)..(374): tr|A0A4Q5SN93|A0A4Q5SN93_9SPHN Tryptophan 7-halogenase (Fragment) OS=Sphingomonadales bacterium OX=1978525 GN= EOP59_13835 PE=4 SV=1
IQNRVAEQRRAPKRPDEEAFSAPLNYAYHFDAVKLAEVLRERAVELGVTHLRGLLTDTALTADGAIDHIVSREHGRLDADLYVDCSGFRAELIGKALQSPFKSVGDVLFTDRALACRIPYAKRDAPIESFTIATAHRAGWTWDIGLEGGRGIGCVYSSRHMSDDEAAQVLRSYIGHDEFTPRSVPFEPGYRPRQWIKNCVAIGLSGGFVEPLESTGVVLIEAAAGMVAEMFPHNGPVEAPARRFNELIAARYDNIVNFLKLHYCLSRRTEPFWRDNVDPASIPERLHELLEQWRYRPPSRFDFILDLETFAFFNYQYILYGMEFATDPGRLDFPNTAEAAKLFARIRTFSERAAEDLPSHRALIAQINAGVLAS

SEQ ID NO: 89224 - protein, 435 aa, Caulobacter sp.
  misc_feature (1)..(435): tr|A0A259IVB2|A0A259IVB2_9CAUL Tryptophan halogenase (F ragment) OS=Caulobacter sp. 39-67-4 OX=1970332 GN=B7X77 _02955 PE=4 SV=1
RFNDWAWAPRADGQRHRYFHPFEAPFSTDGTSLTPYWLLQDEATRAPFAEAMTIQARVAEAQRAPKRPHEGNFSGPLNYAYHFDAAKLANVLAERARELGVRHLQGLLTGVALDETGAIASVSCQQHGTLEADLYIDCTGFRAELIGQALNSPFKSVRSTLFADRALACKIVQDGPETPIQSFTVATAHQAGWIWDIGLNGARGVGCVYSSDHMADDQAEAALRGYVGDGVEITPRSLAFDAGYRQKPWIKNCVAVGLSAGFLEPLESTGVVLIEAAVAIIAELFPHNGPIAAPARRFNELMTARYDNIITFLKLHYCLSQRTEPFWRDNVDEASIPERLIDLLEQWRYRPPTRYDFTLDLETFAFFNYQYILYGMGFKTDLSPGRAEFPDVAGAEKLFAKIRGFGERATHDLPSHRDLIAQINQFGFDRSLEPA

SEQ ID NO: 89225 - protein, 504 aa, Sphingomonadales bacterium
  misc_feature (1)..(504): tr|A0A5C7JSJ2|A0A5C7JSJ2_9SPHN Tryptophan 7-halogenase OS=Sphingomonadales bacterium OX=1978525 GN=E6R12_04245 PE=4 SV=1
MADNPRLLTRICIAGGGSAGWMTAAALSAALGHRCRIELVESEEIGIVGVGEATIPPIKLFNQQIGVDEAAFLRATHGTIKLAIEFVGWGDTHSRYPHPFGAYGAAFDRAPVFQHWLAAHLAGAPEPLEDYSFAWALARAGRFSPLAEDPRRIQSTHDYAYHFDAMLYGRFLRSVCEPRGVVRTEGRIEVVERNGESGDVTALILADGRRVEADFFVDCTGFRGLLIEEALGTGYEDWRYLLPCDRAVALPTARTEPPSPYTRATAHAAGWQWRIPLQHRTGNGLVYASDHLSDDAAAAALLAAVEGQPLAEPRFLRFTTGRRRQAWNRNVVAIGLAAGFLEPLESTSLHLIQTGVTRLLALLPERGPDPLAQAEYNRITAEEYERIRDFLVLHYHANRRPEPFWQARAQTPPPERLQWKLDHFRQFGRVVSEGPELFANTAWTAVMIGQGVLPQSPEPLVRLRGDEDARRILPSLRRTIADTVAQCPEHLTWLEHIGALSARA

SEQ ID NO: 89226 - protein, 318 aa, Alteromonadaceae bacterium
  misc_feature (1)..(318): tr|A0A2D9KAM9|A0A2D9KAM9_9ALTE Tryptophan halogenase (F ragment) OS=Alteromonadaceae bacterium OX=1916082 GN=CL 582_02160 PE=4 SV=1
MNQPDKQHVVIAGGGTAGWMAAAAISRLLHGRVEVTLVESSDIGTVGVGEATIPTLLFFHKLLKIDEQAFMAATNATFKLGINFENWRSLNHAYLHAFGATGKDCWAAGFQHFWRRGLDLGLSEDFGQYCLERVAAEAEKFAHLPGNGLNYAFHIDATRYAGFLRELAGQAGVTRIDATIERVNVREQDGFIESLTLNNGQTLSGDLFIDCTGFRGLLIEKALHTGYEDWSQWLLCDSAVAMQTESVEAPLPYTRCIAREAGWQWRIPLQSRVGNGLVYCSNYLSDERATEILQQNINGNPLNSPRVIKFRPGRRLKQ

SEQ ID NO: 89227 - protein, 482 aa, Erythrobacter sp.
  misc_feature (1)..(482): tr|A0A3B9ULV6|A0A3B9ULV6_9SPHN Tryptophan halogenase OS =Erythrobacter sp. OX=1042 GN=DCL34_10305 PE=4 SV=1
MAAALLARFLPPDYRVELVESESIGTVGVGEATIPQIRHFNQALGIDEAEFLRETKGSFKLGIAFDGWRGEGHSYMHAFGPVGQSLGLIAFRHYWLRAKALGHAKDLAHYSPNEIAARNLRMPGPGGADLPYAYHFDASLYAAFLRHYAETRGALRTEGTIERVERDGETGDIAALVLDGDRRLEADFFIDCTGFRALLIEGAMGAGFDDWSNLLPCDRALAVPCASGGDFTPYTRAIARKAGWQWRIPLQHRIGNGYVFSSQFCSEADAADTLLANLDGSPDGDPRLLSFTTGKRRRQWVGNCLGLGLAAGFMEPLESTSIHLVQSALARFLRLLPAGRATPSTIDHFNAQADFEWSRVRDFLVLHYWANGREGEPFWDAMRALGPPATLKCKIDQWRDTGHIHREHEELFTEVAWFQVFAGQGVSANHYNPLADAMAEHDLRDFLASQERQLEQAAAAMPHHADTLGRLMARPAKRNTAA

SEQ ID NO: 89228 - protein, 505 aa, Caulobacter sp.; identical to SEQ ID NO: 84337
  misc_feature (1)..(505): tr|A0A259IPT1|A0A259IPT1_9CAUL Tryptophan halogenase OS =Caulobacter sp. 39-67-4 OX=1970332 GN=B7X77_04760 PE=4 SV=1

SEQ ID NO: 89229 - protein, 514 aa, Unknown
  misc_feature (1)..(514): tr|A0A2D6YMC2|A0A2D6YMC2_9DELT Uncharacterized protein OS=SAR324 cluster bacterium OX=2024889 GN=CMN54_13010 P E=4 SV=1
MNKNSSSSEKKIVVLGGGTAGWLSAFLLQDYCRKQELSVGVTVIESSKIPMIGVGEGTTAIFKTFLDSFGLEEAEFLRETRGTIKYGIRHKDWRKLGHYYDGPIDDPHFLIPPVGEDGFEYLNSYCVAAGHSVSETHLFQILLSKGLAPVKAKKNQLISNHPFLHAYHIDNALVGQYLLKKSKGIRIVDGVVEEAIRDSETGHILSLKMDDGDLIEGDFFIDCSGFRRILIEKTLGNKWVDYSAELPVNRAMPFFLNHDTAKEIPTYTLAWAQKCGWMWQIPTQNRLGCGYVYCDEYCNPEQAQEEIESVLGHSIEPRQDLRFQVGRLKDSWRHNCVAVGLSAGFLEPLEATSIHSTLVQLILFAKEYLSAGLNGDYSGREDFNQRIAHQFDDFRTFLNIHYVSERRDTPFWEFVHQECLGEESIDRLQQWEKSLPKREHFHGFLSGLPHVETQLYFPVLDGLGLLSQVAARQEMSKRNLKRQAQEELKRLHSKYKEMTKGSLGHREYLLMVSA

SEQ ID NO: 89230 - protein, 495 aa, Sphingomonadales bacterium
  misc_feature (1)..(495): tr|A0A5C7JTA2|A0A5C7JTA2_9SPHN Tryptophan 7-halogenase OS=Sphingomonadales bacterium OX=1978525 GN=E6R12_06610 PE=4 SV=1
MAEQRIRRVVIAGGGTAGWLAAAALSRQLGQMLDLTLVESEEIGTVGVGEATIPTIRAFHAILGLDEREFMRETLATFKLGISFENWAREGDRYIHSFGEVGRSTWMGDFQHFWLEARAQGIADPIGDYCLEHAAAEKGCFAIPSEGEISYAFHLDAGRYARYLRRRAEADGLRRVEGRIVDVERDGQTGDIAALRLDNGARVEGDLFLDCTGFRSLLIAQTLGVGYEDWTHWLPADRALAVQTATTAPAPPYTRAIAHDAGWRWRIPLQHRDGNGLVYSSRHLSDDAARERLLAAVEGETLIEPRLIRFQTGRRDRVWERNCIALSFASGFVEPLESTTIHLTMIGLSRLMQVFPFAGIQPSIVQRYNEQARNELERVRDFIVLHYHLNERPDPFWRACRETPPPESLQERIALFREAALAYQAGDDLFRVSSWLQVMLGQRLEPQAYHHMARIMGPERLAQALGNMRRAIADTVETMPAHQDFLNQYVQGAAA

SEQ ID NO: 89231 - protein, 68 aa, Erythrobacter sp.
  misc_feature (1)..(68): tr|A0A3D2E7K4|A0A3D2E7K4_9SPHN Tryptophan halogenase (F ragment) OS=Erythrobacter sp. OX=1042 GN=DFK13_08250 PE =4 SV=1
SICIVGGGTAGWSAAALLSQVLRGSGCRITLVESSAIPTVGVGEATIPPIFDFLRNIGADEVEFIRRC

SEQ ID NO: 89232 - protein, 472 aa, Sphingomonadales bacterium
  misc_feature (1)..(472): tr|A0A4Q5T0V9|A0A4Q5T0V9_9SPHN Tryptophan 7-halogenase (Fragment) OS=Sphingomonadales bacterium OX=1978525 GN= EOP59_11165 PE=4 SV=1
AITLIESEAVGTVGVGEATLPHIKAFNDALGIDEAAFMTATQATFKLGIEFRGWSAPGDSYIHPFGAFGAPWGGAEFQHHWLRAERHGRAVAPLEAYSYAVAAARARAFEFPNEDPSSIRSTFSYAYHFDAGRYAAFLRDWATERGVTRIEGQVARVERTAEGGNIAALTLQSGVRVAGDLFVDCSGFRALLLGETLGAGWDDWSDWLPCDRAWAVPSERAEDFTPFTRATARAAGWQWRIPLQHRTGNGYVFASRFLDEGQARDDALAGLDGAPLAEPRLLRFQAGRRREAWRGNCVAIGLASGFLEPLESTSIFLIQAAVHDLVTLLPSARGDTVDPRLAAEFNRLFALQYDRVRDFLVLHYAANSRVGEPLWDHLRTIKLPDSLSQKIALFEARGTVPNYQFGLFSRDSWLAVLIGQGVTPRGYDRLADALDLDDLEARLEDHASRIALNVGAMSSHAEFVRSYCAAAA

SEQ ID NO: 89233 - protein, 134 aa, Sphingomonadales bacterium
  misc_feature (1)..(134): tr|A0A4V1SD55|A0A4V1SD55_9SPHN Tryptophan halogenase (F ragment) OS=Sphingomonadales bacterium OX=1978525 GN=EO P63_09175 PE=4 SV=1
PALPAELNRVMDVEYDRIRDFLILHYIANEADAPLWERVRATDLPDTLAGKIERFRHRGHVQAYRDGLFGPPSWQAVFVGQGIEPLAADRLADTLPATTVNERLQNLVATIADAAASVPSHADFIARYCPAPAP

SEQ ID NO: 89234 - protein, 520 aa, Erythrobacter sp.
  misc_feature (1)..(520): tr|A0A2D8MB89|A0A2D8MB89_9SPHN Tryptophan halogenase OS =Erythrobacter sp. OX=1042 GN=CL949_06610 PE=4 SV=1
MAVMQTSSPTTNGSAAPLNVAIAGGGTAGWMAAAGLARLTACKVTLVESDAIGTVGVGEATIPQIRLFNRGLGIDEAEFLRETKGTFKLGIEFDGWRKAGTSYMHAFGNVGAGAGLLPFHHLWLRGRELGSAKDFGAYSLNEAAARAGRMQMWPADKAPQPDMPWAYHFDATLYAAFLRRFAETRGVTRIEGRIETVERDGESGDIAALVIDGGRRIEADFYIDCTGFRGLLAGDMPGQGFEDWSHWLPCDRAIAVPCKTGGEFTPYTRAAAHTAGWKWRIPLQHRIGNGLVYCSDYLADDEAEAQLLADLDGEPLGDPRTMRFTTGMRRAPWSGNCLALGLAAGFMEPLESTSIHLIQSGIARFLSMLPRPGMEAAMAAEFNRQSGFEWSAIRDFLILHYAANERSGEPFWDRARAMDLPASLATRIELFRSTGYLSREHDELFTEAGWTQVLLGQGILPRATHPNADALDPAALERLLAGIESDIAETVGTMPGHAQFLRATCMPQTANRPAATKETA

SEQ ID NO: 89235 - protein, 503 aa, Sphingomonadales bacterium
  misc_feature (1)..(503): tr|A0A4Q3A697|A0A4Q3A697_9SPHN Tryptophan 7-halogenase OS=Sphingomonadales bacterium OX=1978525 GN=EOP60_00455 PE=4 SV=1
MAMGVPFRIVIVGGGTAGWMCAAACVARLDPKRYDVRLVESDEIGTVGVGEATLPQMKDFNDLLGVDEAEFMTATQATFKLGIEFVDWGHIGARYVHPFGQFGRPIGEAEFFHYWLRARETAGPLSDYCLAIAVGNANRFDFPAKNPAYAKASFSYAYHLDASLYARYLRKWSEAKGLKRIEGLVESVAQHPESGNVASITLASGDVIEGDLFVDCSGFRGLLIEQTLETGIEDWSHWLPCDRAMAVPCDRVGELVPYTRSTAREAGWQWRIPLQHRTGNGYVYASQFLSDDEAASLLLSRLDGAPQADPRALRFKACKRRKAWNRNVIAMGLASGFLEPLESTSIYLVQMAVAFLLTLMPEQAEIDPSLEREYNRVMDVEYDRIRDFLILHYRATTRDDAEIWRYCRAMAIPDSLSDKIERFRHRGHIREYRDGLFGPPSWQSVFIGQGVIPTGHDAMADLMPEAVLTERMASLRALIGNTAGAMPSHADTVLRHCDAGAAA

SEQ ID NO: 89236 - protein, 507 aa, Sphingomonadales bacterium
  misc_feature (1)..(507): tr|A0A4Q2YYQ8|A0A4Q2YYQ8_9SPHN Tryptophan 7-halogenase OS=Sphingomonadales bacterium OX=1978525 GN=EOP63_07475 PE=4 SV=1
MSDKKPVRVVIAGGGTAGWMMAAAIARTMGKTVDLTLVESEQIGTIGVGESTIPPLVNFNRILGIPEPEFMRATQATFKLGILFDNWKHDGDSYFHSFGLSGKDHWSAGFQHFWLNARERGHEQPYSDYCLELVAAMEGKFAHLPEDRMNYAYHVDATLYGRFLRKLAEADGCKRVEGKIARVELNGENGDIAALHLDGDRRIEGDMFVDCTGFRGLLIDGALHAGFEDWSHWLPNDSAIAVQAKHLGPPQPYTQAIAHDAGWQWRIPLQHRMGAGIVYTSGYLSRDEAYDRLMSSVGEPLIEPFDIKFKGGVRRKQWFRNCVAVGLAGGFVEPLEATTVHLIQRAVLRFIRLMPNGRVSERDAMEFNDQQRLDIEQIRDFVVLHYKATNRRDSPFWRHVANMPIPDSLQQKIELFRETGRVFRKYEELFAENSWVQVMMGQGIEPQSYHPIADKLRDDEVERLFQSIRDNIAQTVATLPEHHAYVARYCGPTAAGGSPGRTSSTAR

SEQ ID NO: 89237 - protein, 505 aa, Roseateles depolymerans
  misc_feature (1)..(505): tr|A0A2W5DK18|A0A2W5DK18_9BURK Tryptophan halogenase OS =Roseateles depolymerans OX=76731 GN=DI603_17320 PE=4 S V=1
MQDTQALVREVVIVGGGTAGWMAAAALSKLLRQQVSITVVESDEIGTVGVGEATIPMIQRFNQVLEIDENEFMRETQATFKLAIEFVNWGRVGDRYMHGFGRIGQPLNTVAFEHYWRKLHMAGRAADLADYSITRAAALKNRFMRPLADAGNSPLGEIAYAFHFDASLYARYLRRYAEARRVTRLEGRIVDASLSGLSGRVESLKLADGRSVPGQLFIDCSGFRGLLIEQVLRTGYEDWSHWLPCDRAWAVPCESVAPLTPYTRSTAHSAGWQWRIPLQHRTGNGHVFSSRFMAEDEAQRVLMSQLDGRPTAEPRLLRFLTGMRRQAWNRNVVSMGLASGFMEPLESTSIHLVQTAIARLIDFFPHTAFDQADIDEYNRLSRFEFERIRDFLILHYHANQRDDSEFWRYCREMPIPDTLAAKLALYQRNGRIVREGAELFAEVGWLQVLHGQNLRARGYHPLADLIAERETEAYLQGVREVIANCVEVMPTHQQFIAQHCAAPRG

SEQ ID NO: 89238 - protein, 496 aa, Rheinheimera sp.
  misc_feature (1)..(496): tr|F7NSD8|F7NSD8_9GAMM Tryptophan halogenase OS=Rheinhe imera sp. A13L OX=506534 GN=Rhein_0672 PE=4 SV=1
MQTPVKKLVIAGGGTAGWMAAALLKKVFASELDIELVESEDIGIIGVGEATIPPIQIFNQYLGLDEKEFLRETHATIKLAIKFENWRVQGESYYHTFGAPGAPLGVANFQHYWLRAKELGLTESLWDFDLNYLCCEQGKFNKIKTPNPVYDMPYAYHFDSALYGKYLRKLAEQSGVVRTEGLIEHIKQDAETGFVQALQLKNGREVTGDLFIDCTGLRGLLIRKTLGVAYEHWDQYLPANSALAVPTERFAHTLPYTRSIAHSAGWQWRIPLTHRNGNGIVYSSGYLSDDQAYQTLMSNLDSNTLAEPKKISFETGRTTEQWHKNVVAIGLSSGFLEPLESTSIHLIQSGIVRLMKMFPNRGISNAQISAYNAESKDEFETIRDFIILHYHVNERDDSDFWRDMRQMAIPHRLEEKLALFKETGAIFNDANDIFRDASWLQVMLGQGLLPADYHLAARAYPKEVLLQMMQQIRTAKQQPLTKLTSHDEFLALYARP

SEQ ID NO: 89239 - protein, 516 aa, Sphingomonas sp.
  misc_feature (1)..(516): tr|A0A369VTD0|A0A369VTD0_9SPHN Tryptophan 7-halogenase OS=Sphingomonas sp. WZY 27 OX=2283317 GN=DVW87_10640 PE =4 SV=1
MRQLQRILIAGGGSAGWMAAAMFARLFKGLYEITLVESDEIGTVGVGEATIPAIKKFNELLGLDEDEFVRRTQGSFKLGIQFNDWLRPGHSYVHGFGVIGQDLEWLRCHHYWLKMQAEGRADVFDRYSINTWAALANRFMRPRADMPDSPVGQIAYAYHFDAGLYAALLADYAEAWGVQRREGRIVDIAQDAETGYLRSVTLADGQVLEADLFIDCSGFRGLLIEQTLGAGYEEWSHWLPCDRAIAVPSERSADFTPYTRSTARPAGWQWRIPLQHRTGNGHVYASRYMDEAEAEAILFEHLDAPAAGEPRRLRFVPGKRRAAWVKNCVAIGLAGGFLEPLESTGLHLIQSAILRLVRLMPDAGFDPANIAEFNRQTDFEFERIRDFIILHYKATERGDTPFWRHVRDMEVPETLARKMALFAANGRIFREDDELFAEESWIQVLIGQGVIPRAPDPLVDVTPPAEIERYLANIAGVIEKCVALMPSHEAFVARHCAAPPIADLLASRDARAAVRR

SEQ ID NO: 89240 - protein, 153 aa, Erythrobacter sp.
  misc_feature (1)..(153): tr|A0A3D4M1E8|A0A3D4M1E8_9SPHN Tryptophan halogenase (F ragment) OS=Erythrobacter sp. OX=1042 GN=DIW45_14615 PE =4 SV=1
IQSGILNLVELFPHTAIEETDRREYNRLMDLEFERIRDFLVLHYVANQHEEEFWQAMRAMPLPDSLSARIEDFRERAILPDYADGLFQPVSWISVFLGQNVVPRRWDPRADAMNADELGKRLAAIHSKIADDAAAMPLHLDFLERSGARYIDE

SEQ ID NO: 89241 - protein, 549 aa, Sphingomonadales bacterium
  misc_feature (1)..(549): tr|A0A4V1SEH8|A0A4V1SEH8_9SPHN Uncharacterized protein (Fragment) OS=Sphingomonadales bacterium OX=1978525 GN= EOP60_15890 PE=4 SV=1
MDDTGNNSVVIVGGGTAGWMAAAALSRYFNDGRRTVTLVESDLIGTIGVGEATIPPIRSFNGMLDIPENEFLRETRGTFKLGIEFVNWGQQGDRYFHPFGGHGQDLHGIAFHQLYLRERARTDTTPEIAAYSMSSVAASARSFGRPGPGAALPLSELGYAFHFDAGLYAAYLRRLAERQGTIRREGRIVRVERDGESGDVAAVILENGSRIEGDLYLDCSGFRGLLIEEAMQAGFEDWSDWLPMDSALAMPTANVGSPDPFTRSTAHGAGWQWRIPLQHRTGNGHVFSSRYMDAAEAERILRDHAEGEVLAEPRLLRFTTGMRREAWVGNVVALGLSSGFIEPLESTAIHLVQNGIQRLFALFPEGRVNPLEREEYNRGMRTLYEDVRDFVILHYKATQRDDTPFWRHVRDMAVPESLARRMELWRLHGRVFRENAELFTLPSWVAVMLGQNIWPERHDPIVDTLDPDKVAGAMAQMREGYRRRGTLAEPGSIPAPGRRVARVRSVGDFRVTGRPIRKIVIVGGGTAGWMAAAALSRIIGAMPGLTITL

SEQ ID NO: 89242 - protein, 517 aa, Erythrobacter sp.
  misc_feature (1)..(517): tr|A0A3B9ULL9|A0A3B9ULL9_9SPHN Tryptophan halogenase OS =Erythrobacter sp. OX=1042 GN=DCL34_07615 PE=4 SV=1
MSGEFTNLVIVGGGTAGWLSACILAARRPELAITLIEAPDIPTVGVGEGSWPTLRETLAVIGIDETEFLTECDASFKQGSRFDGWVDGSERDCYYHPFSAPLSGAMPDILTAWKMQNDGQPYAEAVNPQAAICNRDLAPRQRTMPPFAGALNYGYHLDAGKFGALLASHGIKKLGVRHVHGKVTRTERGVDGLFTRLLLDNGSAIEGDFFIDCTGMASKLMGEELGIGWVDRSNVSFNDRALAVQVPVVPDSAIASQTIGTAHRAGWLWDIGLPTRRGVGCVYSSGFLSDDEAQAILMNYIGSRIAGAEQTALTPRGLKFSTGYRDKFWEGNCLAIGLSAGFIEPLEASAIVLIELSLKALADGYPQSRTALPRLADRFNSLFRYRWERIVDFLKLHYVLSTRTEPYWQAQRDPATIPSSLAAHLDLWRDHAPSSGDFPQIDEIFSAASHQYVLYGMRFPQPADISSAPSSEVQRQFAKVAERSRALSAALPSNRAYFDALCSSMDKNSARGVPTRQ

SEQ ID NO: 89243 - protein, 484 aa, Sphingomonadales bacterium
  misc_feature (1)..(484): tr|A0A4Q5SQT2|A0A4Q5SQT2_9SPHN Tryptophan 7-halogenase OS=Sphingomonadales bacterium OX=1978525 GN=EOP59_13075 PE=4 SV=1
MAASALARFLPGVADVRLIESEEIGIVGVGEATLPHLRAFLQRLGIDEAEMMRATNATYKLGIDFRDFGRLGDRYVHPFGAYGVDLAGVGFHHYWLRARDEGSRWSLEDYSLPIVAARANRFALPPADGDFLSTSYGWAYQFDATKLAPMLRGYSEARGVTRTEGRVTGVERDGENGDVTELVLESGERVAGDLFIDCSGFRALLIGGEMDAAWEDWSHWLPCDRAAALPATRVDGPIEPYTRATAMSAGWRWRIPLQHRVGNGYVFSSSFLSEDAACDAILGAVEGTPLADPRILRFRAGRRRESWVGNVVSIGLASGFLEPLESTSIHLAQMAVMRLIELFPERAIDPADRAAFNATVDYEYDRVRDFLILHYHATTRDDSDFWNHVRTMELPDSLAGKLELWREAGRIEQHGEGLFLEPSWVAVYLGQGMIPARHDPRADNPSPAALTRALDDMARTIRERVDAMPDHEAALRAQGAWGAA

SEQ ID NO: 89244 - protein, 521 aa, Erythrobacter sp.
  misc_feature (1)..(521): tr|A0A356ZSR5|A0A356ZSR5_9SPHN Tryptophan halogenase OS =Erythrobacter sp. OX=1042 GN=DD795_09040 PE=4 SV=1
MRPDDGQAQAIGSICIVGGGTAGWSAAALLSQVLRGSGCRITLVESSAIPTVGVGEATIPPIFDFLRNIGADEVEFIGRCQVTFKLGIQFRDWLHHGHAYWHPFGNLGVTINQRPFHHYYCMNRAAGHGETLADLCPSVALAEAGKFAFPSPDGQWPGGAVAYALHFDAGLVAAFLRDHAVAAGVERLDRRIVGATRGEGERIAAVQFDDGESLEADFYIDCSGFRGLLIEETLGAGFEDWKHWLPCDSAVAAPTAAQEQRAPYTVATARSAGWQWRIPLQHRTGNGLVYASDFISDADAQAQLLAGLDGEAQADPRVLRFTAGLRKRAWVGNCLAIGLSAGFLEPLESTSIHLIHTGLNRLLDLFPDRRFDPALIAAYNHDVHREYAHIRDFLLLHYVPNRREGEPFWDHMRGLDLPDTLAEKIELFTRTGRIMSRQRELFSDISWFYVMHGMGLTPAALDPLAEAAPFGEVRKVIDQLRGAMQAFRSAAPTHDAILDRLLDPAETRRPQFGTGGGWTTR

SEQ ID NO: 89245 - protein, 525 aa, Erythrobacter sp.
  misc_feature (1)..(525): tr|A0A2D9U903|A0A2D9U903_9SPHN Tryptophan halogenase OS =Erythrobacter sp. OX=1042 GN=CL950_05510 PE=4 SV=1
  misc_feature (5)..(5): Xaa can be any naturally occurring amino acid
  misc_feature (7)..(7): Xaa can be any naturally occurring amino acid
  misc_feature (9)..(9): Xaa can be any naturally occurring amino acid
  misc_feature (147)..(147): Xaa can be any naturally occurring amino acid
  misc_feature (178)..(178): Xaa can be any naturally occurring amino acid
  misc_feature (236)..(236): Xaa can be any naturally occurring amino acid
  misc_feature (264)..(264): Xaa can be any naturally occurring amino acid
  misc_feature (316)..(316): Xaa can be any naturally occurring amino acid
  misc_feature (319)..(319): Xaa can be any naturally occurring amino acid
  misc_feature (324)..(324): Xaa can be any naturally occurring amino acid
  misc_feature (368)..(368): Xaa can be any naturally occurring amino acid
  misc_feature (385)..(385): Xaa can be any naturally occurring amino acid
  misc_feature (406)..(406): Xaa can be any naturally occurring amino acid
  misc_feature (425)..(425): Xaa can be any naturally occurring amino acid
  misc_feature (473)..(473): Xaa can be any naturally occurring amino acid
  misc_feature (515)..(515): Xaa can be any naturally occurring amino acid
MTASXRXDXGQAQAIGSICIVGGGTAGWSAAALLSQVLRGSGCRITLVESSAIPTVGVGEATIPPIFDFLRNIGADEVEFIRRCQATFKLGIQFRDWLHHGHAYWHPFGNLGVTINQRPFHHYYCMNRAAGHGETLADLCPSVALAXDGKFAFPSPDGQWPGGAVAYALHFDAGLVAXFLRDHAVAAGVERLDRRIVGATRGEGERIAAVQFDDGESLEADFYIDCSGFRGLLIEXTLGAGFEDWKHWLPCDSAVAAPTAAQEXRAPYTVATARSAGWQWRIPLQHRTGNGLVYASDFISDADAQAQLLAGLDGEXQAXPRVLXFTAGLRKRAWVGNCLAIGLSAGFLEPLESTSIHLIHTGLNRLLXLFPDRRFDPALIAAYNXDVHREYAHIRDFLLLHYVPNXREGEPFWDHMRGLDLPDTXAEKIELFTRTGRIMSRQRELFSDISWFYVMHGMGLTPAALDPLAEAAXFGEVRKVIDQLRGAMQAFRSAAPTHDAILDRLLDPAETRRPXFGTGGGWTTR

SEQ ID NO: 89246 - protein, 499 aa, Erythrobacter sp.
  misc_feature (1)..(499): tr|A0A350KR40|A0A350KR40_9SPHN Tryptophan halogenase (F ragment) OS=Erythrobacter sp. OX=1042 GN=DCX71_01480 PE =4 SV=1
GWSAAALLSQVLRGSGCRITLVESSAIPTVGVGEATIPPIFDFLRNIGADEVEFIRRCRATFKLGIQFRDWLHHGHAYWHPFGNLGVTINQRPFHHYYCMNRAAGHGETLADLCPSVALAEAGKFAFPSPDGQWPGGAVAYALHFDAGLVAAFLRDHAVAAGVERLDRRIVGATRGEGERIAAVQFDDGESLEADFYIDCSGFRGLLIEETLGAGFEDWKHWLPCDSAVAAPTAAQEQRAPYTVATARSAGWQWRIPLQHRTGNGLVYASDFISDADAQAQLLAGLDGEAQADPRVLRFTAGLRKRAWVGNCLAIGLSAGFLEPLESTSIHLIHTGLNRLLDLFPDRRFDPALIAAYNHDVHREYAHIRDFLLLHYVPNRREGEPFWDHMRGLDLPDTLAEKIELFTRTGRIMSRQRELFSDISWFYVMHGMGLTPAALDPLAEAAPFGEVRKVIDQLRGAMQAFRSAAPTHDAILDRLLDPAETRRPQFGTGGGWTTR

SEQ ID NO: 89247 - protein, 536 aa, Mameliella alba
  misc_feature (1)..(536): tr|A0A0B3RNZ6|A0A0B3RNZ6_9RHOB Putative Tryptophan halo genase OS=Mameliella alba OX=561184 GN=OA50_02429 PE=4 SV=1
MGDPVTSITIVGGGTAGWLAACFLRTKCAPKIKITLIESPNVPTVGVGEATVPHMPVTLREMGIDDQEFMRRCNASFKMGVMFNDWNVDRKGRFIRYMNPFASPPRIEGVEAGHYFQAYGAGNRDYIRSFSPLMDLFESWKCPFSLNKQGEDPMPRAGYAYHLDAVKFAGLLAERGRDHGIEHILDDVDDVELDERGFVAALILRETGRHPVQLVLDCTGFRGLVIQKALGEPFDSYADYLGNDRAMALQVPHPDPEKIRAATQSTALGAGWSWAVPLFNRIGTGYVFSSAHRTDDEAAEEFLAHLGDMAPPGAEPRVIPMRVGRSRRAWVKNCIALGLSGGFIEPLESTAIHMIDMGLRWLLQYFPSQDYEDATRDAYNRVSDGMFNEVRDFICLHYRLNNRTDDPYWMDSRTQLKISDRLEHLLDLWRHQLPTPLDVPSAHLFTYNVFTAVLLGKQVYDNGYGEGQLNRSFALPEKPWKAFLRQSAARNRAVLDHKADHRRVLLALRGELRAGMRANTRLGEVDESGAAESALF

SEQ ID NO: 89248 - protein, 525 aa, Erythrobacter sp.
  misc_feature (1)..(525): tr|A0A2D8MDV7|A0A2D8MDV7_9SPHN Tryptophan halogenase OS =Erythrobacter sp. OX=1042 GN=CL949_11630 PE=4 SV=1
MASRNGIGTGGGGRIKRVVIVGGGTAGWMAAAALSRFFDDGQRSIELVESDAIGTVGVGEATIPPLAKFNAMLGIREDEFLRETRGTYKLGIEFVNWGEIGDSYIHPFGSYGQPFHGIPFHQLFLREKARSGNGGKIGDYSLSTVAALRQRFGRPSPTAKSLVNQIAFAYHFDAGLYAAFLRRFAEDLGVTRTEGRIAHVEQDSEDGNVTAVVLDNGRRIEGELFIDCSGFRGLLIEETLETGYDDWSKWLPMDRALALPSSNGGSPPPFTRSIAHGAGWQWRIPLQHRIGNGHVFSSAYIEEQTALDVLLANLEGEALQDPRKLAFRSGMRRKAWNRNVVSLGLSAGFVEPLESTSIHLIQNGIARLFALFPDNPISPIERDEYNRGMAELYEDIRDFIILHYKATQREDTEFWRYVRHMPIPESLTRKMDLWKLHGRVFRENAELFAADSWIAVMLGQNVWPDTYDPIADTLDAEKIASAMVQMRQAYSETADRLPTHEDFLRQSGGWHHRQDMQIKQPDYQA

SEQ ID NO: 89249 - protein, 510 aa, Sphingomonadales bacterium
  misc_feature (1)..(510): tr|A0A4Q3AR37|A0A4Q3AR37_9SPHN Tryptophan 7-halogenase OS=Sphingomonadales bacterium OX=1978525 GN=EOP58_00855 PE=4 SV=1
MGGQRRILIVGGGTAGWLTAAYLARFLALSGRPGIQISVLESPEIGIIGVGEGTFPTIRATLKFLGIDETQFIRATSATFKQGIRFNDWLHAPEDGKRHHYLHPFEAPFYTEDASLVPYWLLQDKATRPPFAEAVTIQNRVAEQRRAPKRPGEEAFSAPLNYAYHFDAVKLARVLRERAIELGVTHLAGLLTHVELAADGAVDHVISREHGKLDADLYVDCSGFRAELIGKAMGSPFKSVNDVLFTDRALACRIPYARADAPIESFTIAAAHQAGWTWDIGLEGARGIGCVYSSRHMSDDQALQVLRGYIGHNDFTPRSVPFAPGYRPRPWIRNCVAIGLSGGFVEPLESTGVILIEAAAGMVAEMFPHSGPVDAPARRFNELISARYDNIVNFLKLHYCLSRRQEPFWRDNVDPASIPERLRELLEQWRYRPPGRYDFILDLETFAFFNYQYILYGMEFPTDPGRADYPNTAEAAKLFARIRAFSERATEDLPSHRALIQQINAGAAAA

SEQ ID NO: 89250 - protein, 356 aa, Sphingomonadales bacterium
  misc_feature (1)..(356): tr|A0A4V1ZZC8|A0A4V1ZZC8_9SPHN Tryptophan 7-halogenase (Fragment) OS=Sphingomonadales bacterium OX=1978525 GN= EOP59_17590 PE=4 SV=1
MTAPPVASIVIIGGGTAGWMTAAAAARFLNDGRRTITLVESDAIGTVGVGEATIPPIREFNHQLGIDERDFVRETGATIKLGIEFVNWGRKGDRYLHPFGDLGHDFQGVAFHQYWLKHRIGSLEDYWMAAQAARRDRFAHPAADPRTPLGGLAYAYHFDAGLYAAFLRRRAEAGGVSRVEGKIASVERDGETGHVAAVVLDDGRRISGDFFIDCSGFRSLLLGDALGVGYRDWSHWLPCDRAMAVPCERADPLTPLTRSTAHDFGWQWRIPLQHRTGNGIVYASAFGSDEAARETLLANLDAPATAEPRALSFTAGVRERQWQGNVVALGLSAGFIEPLESTSIHLIQTGISKLMW

SEQ ID NO: 89251 - protein, 561 aa, Defluviimonas denitrificans
  misc_feature (1)..(561): tr|A0A2S8SCF5|A0A2S8SCF5_9RHOB Tryptophan halogenase OS =Defluviimonas denitrificans OX=404881 GN=LX70_00307 PE =4 SV=1
MNNRLRKITIVGGGTAGWMTALILETEFSHTSSPKDRPRICLIESPNIATVGVGEATVPEMPRRLRLAGISERDFFRETNASFKLGVKFCNWNTDAQGNRIDYVNPFAYGQMLEGVDAAEYFLRFGNGDMDFTQSITPHDDLARHCKGARPLGEPEFQQRFGYAYHLDAVKFAGMLAKFCTKRGVEHIRDEVQSVELDEEGNVGHLMLERAGRHDVEMVVDCTGFRGLIINQALGEPFLDYSAYLPNDRAMALQIEHPDPDRIESLTRSTALGAGWTWRVPLYNRVGTGYVYSSAHRTDDQAAAEYLDWLGDSGKGATPRIIPMRIGRMRNGWVKNCVAIGLSGGFIEPLESTAIHMIDYSVRWLAENLPTRAIEPSLRTRYNREMDRLYNEVLDFICLHYRLNNRTDDPYWIDARTEMKIPDRLAENLELWQHRLPVERDIESATLFSHRVYQAVLLGKQVYDTGFGAGIRDRIRPLKKPIWFQFCKNAKADLAQILKAMPDHKTLLRDIRGELDRPAFGMALAAKPTVAMPGAAMAPVVVQNMPNFAEIQSGKKDLQLF

SEQ ID NO: 89252 - protein, 504 aa, Sinorhizobium fredii
  misc_feature (1)..(504): tr|A0A249Q7G9|A0A249Q7G9_RHIFR Tryptophan halogenase OS =Sinorhizobium fredii CCBAU 83666 OX=1128334 GN=SF83666 _a44280 PE=4 SV=1
MLDLTNAKRIGIIGGGIVGWLAAIALRRVFDVDVDVTVIEAPTVFPLGPGEGGSLNLIDTLCRNELDLDVFIGEAGATHKLGVLYENWRGGGIPDRYYRMFGGSGIPEIECRVGGFFPLLSARIAAGENLHTCIPGFELITKKASQVEIDELLATGESGLYPSFHFNHAGFERYLRRVGLARGITSRRAVVHGMRLDDRGHVNAFQLGGEELEVDFAVDASGFARLGLGKVFNTRWCSFANVLPTDRAIIFELEPRASSPVTRATAMKAGWMWEAPLNRSISAGYAFSSRYADAAMAIAEVENHYGFRVEAKHELSLDQGYFSTAWVNNFVALGTASGCVEPLEAALAAYTFEALRNLERILANGSGIVPARAIEGYNSANARCWTGVRDFLRLHYDSKRIDTPFWRDLAAAELPEGYANLRACFQKRTPRFIDIQPYVGSGWQSLFHEIDWISVAVPLGVVPQAAACAELRRLSTESRSEVQAYVDRLKGTIAKISSTRGCMH

SEQ ID NO: 89253 - protein, 460 aa, Erythrobacter sp.
  misc_feature (1)..(460): tr|A0A3D4LXP4|A0A3D4LXP4_9SPHN Tryptophan halogenase (F ragment) OS=Erythrobacter sp. OX=1042 GN=DIW45_05040 PE =4 SV=1
MMTQVQGEGSGADPLRSICIVGGGTAGWSAAALLARVLRGSGCRITLVESSAIPTVGVGEATIPPIFDFLRNIGADEVEFIRRCQATFKLGIQFRDWLHRDHAYWHPFGNLGVTINQRPFHHYYCRNLAQGHGESLADLCPSVALAEDGKFAFPSPDGNWPGGAVAYALHFDAGLVAAFLREHAEAAGVERLDRRIVGATRGEGERIAAVQFDDGETLAADFYIDCSGFRGLLVEETLNAGFEDWKRWLPCDSAIAAPTAAQQQRAPYTVATARSAGWQWRIPLQHRTGNGLVYASDFVSDADAHEELLSGLDGEPLADARVLRFTAGLRKRAWVGNCLAIGLSAGFLEPLESTSIHLIHTGLNRLLDLFPDRGFDPALADAYNRDVWREYAHIRDFLLLHYVPNQREGEPFWDHMRGLDLPDTLAEKIELFTRTGRIMSKQRELFSDISWFYVMHGMGL

SEQ ID NO: 89254 - protein, 511 aa, Sphingomonadales bacterium
  misc_feature (1)..(511): tr|A0A4Q3D1T7|A0A4Q3D1T7_9SPHN Tryptophan 7-halogenase OS=Sphingomonadales bacterium OX=1978525 GN=EOP61_14815 PE=4 SV=1
MMGKRSILIVGGGTAGWLAAAYLARALELSDHGRLEITLLESPEIGIIGVGEGTFPTIRETLKFLGIDESRFIRETSATFKQGIRFTDWVRTPENGAHSHFFHPFEPPFYADGANLIPYWLLQDEATRPPFAEAVTIQNRVADARRAPKRSHEGDFDGPLNYAYHFDAASLAHVLAERARELGVRHLQGTVGAVKLDSAGAVAEVVTAEHGALTADLYVDCTGFRAELIGRALQVPFKSVRNHLFANAAVTCKLPYERPDAPLESFTVATAHEAGWTWDIGLAGARGIGCVYSSDHIDADRAEAILRAYVGPRDAEYQTRRIPFEAGYREKQWVKNCVAVGLAGGFLEPLESTGVLLIEAAIGMIAELFPHNGPIDAPARRFNQLIAARYDNIVNFLKLHYCLSQRTEPFWRENADPASIPERLRELLEEWRYRPPSRYDFTLDVESFAFFNYQYILYGMGFRTDLSAGREDFPNVAGAEKLFQRIRNLGERATQDLPAHRALIAQINAGV

SEQ ID NO: 89255 - protein, 100 aa, Caulobacter sp.
  misc_feature (1)..(100): tr|A0A259IPE9|A0A259IPE9_9CAUL Tryptophan halogenase (F ragment) OS=Caulobacter sp. 39-67-4 OX=1970332 GN=B7X77 _04895 PE=4 SV=1
MDQAAQDNRIRSVVIVGGGTAGWMAAASLQRHFQGSPLKITLIESSEIGTIGVGEATIPTIRNFYQNLGLSDLDVMRATGATCKLGIRFNDWLKPGSSFL

SEQ ID NO: 89256 - protein, 518 aa, Sphingomonadales bacterium
  misc_feature (1)..(518): tr|A0A4Q2YZR3|A0A4Q2YZR3_9SPHN Tryptophan 7-halogenase OS=Sphingomonadales bacterium OX=1978525 GN=EOP63_08755 PE=4 SV=1
MAFPVAKRSILIVGGGTAGWLTAAYLARFFDLPRNPRLSITLLASDEIGSIGVGEGAFPTIRNTLQFIGIDESQFVRATSATFKQGIRFDDWVHTPNVGQSSHYLHPFEAPYHGDGCSLVSYWLLQDEKTRRPFAEAMTIQNRVAEAQRAPKRPGEGEFTGPLNYAYHFDAARLAEALSAHACAMGVKHLSGTLTGVGLDPGTGAIDHVVTAEHGTLTADLYIDCSGFRAELIGEALQSPFQNVKHQLFTDRALACKLRYDRPDISLESYTIAAAHEAGWTWDIGLAGARGIGCVYSSDHMSDDRAADILATYTGGRSHDVTVRAIPFTAGYRPASWVKNCVAVGLSGGFLEPLESTGLVMIETAAAMIAEMLPLNGPVGAPARRFNELMAARYDNIINFLKLHYCLSQRKEAFWRDNGDPASIPDRLKGLLEEWRYRPPGRFDFILDLESFAYFNYQYILYGMEYRTDLSPVREEYPDTAEAERIFARIKSFGDRAASELPAHRAMIDQINAGGAYA

SEQ ID NO: 89257 - protein, 494 aa, Sphingomonadales bacterium
  misc_feature (1)..(494): tr|A0A4Q5S887|A0A4Q5S887_9SPHN Tryptophan 7-halogenase OS=Sphingomonadales bacterium OX=1978525 GN=EOP62_00795 PE=4 SV=1
MLVKRVLVVGGGTAGWMTAAALSNKFGNSPLEIRLIESAEIGTVGVGEATVPHIRHYNATLGFDEADFLKRTQGTFKLGIEFVNWGRIGDSYIHPFGVFGQDFGGVPFHQHWLRMRGKPGVAGFEDFSLPIQAARRGRFHHPNEDPSSLLNTFNYAYQFDASLYARFLREYSEARGVVRQEGKVVDVALNGETGFVEAVTLDSGERIEADLFVDCSGFRGLLIEQALKTGYDEWTHWLPCDRAIAMPCPNDGPPAPYTRSTAQSAGWVWKIPLQHRCGNGHVYSSGFISDDAALETLLGAIAAPPLANPNKLRFVTGKRKKQWVGNTVAIGLSSGFLEPLESTSIHLIQLAIGRLLDFFPTGEWDPLDAEEFNRVMVLEYERVRDFLILHYNATQRDDSDFWNYCRTMDLPDSLTYKMELFRERGVVVNYRDGMFLEPSWLAVYLGQNILPGAHDPLSARLSDDDLMSAMAELRTRYSAAAEAMPTHLSALAAA

SEQ ID NO: 89258 - protein, 45 aa, Burkholderia pyrrocinia; identical to SEQ ID NO: 87085
  misc_feature (1)..(45): tr|A0A318IXC4|A0A318IXC4_BURPY Tryptophan halogenase OS =Burkholderia pyrrocinia OX=60550 GN=NA66_1001516 PE=4 SV=1

SEQ ID NO: 89259 - protein, 494 aa, Sphingomonas sp.
  misc_feature (1)..(494): tr|A0A345WPJ0|A0A345WPJ0_9SPHN Tryptophan 7-halogenase OS=Sphingomonas sp. FARSPH OX=2219696 GN=DM480_08765 PE =4 SV=1
MTPCGPSIAIVGGGTAGWMAACLMAKAWPDAAITLVESPDVGIVGVGEGSTPQMKALFDGLGIAESAWMPTADATYKVGIAFRSWGGAGSSYFHPFAGAVDLHTQPAFHASAHARRTGADVAAHPDRFFLNSRLAAARRAPVAPAHFPFPVGYGYHFDAHKVGEVLRAEALRRGVGHVRAHVTDVPLTETGDIAGLTLADRDPIAAELFVDASGFGGLLVQQALRVPFRPFADNLFNDRAVVMPTPRGPDLDAHTTATALSAGWAWAIPLTTRTGNGYVFSSAHLSPDAAETELRRHLGLIDSDVAARHLTMKVGRVERSWAANCLAIGLAQGFIEPLEATALHIVQATVEGFIQAYDAGGRSPRERDGFNARIARRYEGIRDYIVAHYRLNRRTDTPYWRDAAAVEHLSDDLKAIMTAWFTGRDVAAVIEGRDLRGYYAPMSWEVLLSGYGTFPPADRLRAVSPVADLAGIDALLDGCLLNFPPHAAALKDPA

SEQ ID NO: 89260 - protein, 525 aa, Erythrobacter sp.
  misc_feature (1)..(525): tr|A0A520VDJ1|A0A520VDJ1_9SPHN Tryptophan 7-halogenase OS=Erythrobacter sp. OX=1042 GN=EVA34_13740 PE=4 SV=1
MTASIRPDDGQAQAIGSICIVGGGTAGWSAAALLSQVLRGSGCRITLVESSAIPTVGVGEATIPPIFDFLRNIGADEVEFIRRCQATFKLGIQFRDWLHHGHAYWHPFGNLGVTINQRPFHQYYCMNRAAGHGETLADLCPSVALAEDGKFAFPSPDGQWPGGAVAYALHFDAGLVAAFLRDHAVAAGVERLDRRIVGATRGEGERIAAVQFDDGGSLEADFYIDCSGFRGLLIEETLGAGFEDWKHWLPCDSAVAAPTAAQEQRAPYTVATARSAGWQWRIPLQHRTGNGLVYASDFISDADAQAQLLAGLDGEPQADPRVLRFTAGLRKRAWVGNCLAIGLSAGFLEPLESTSIHLIHTGLNRLLDLFPDRRFDPALIAAYNRDVHREYAHIRDFLLLHYVPNRREGEPFWDHMRGLDLPDTLAEKIELFTRTGRIMSRQRELFSDISWFYVMHGMGLTPAALDPLAEAAPFGEVRKVIDQLRGAMQAFRSAAPTHDAILDRLLDPAETRRPQFGTGGGWTTR

SEQ ID NO: 89261 - protein, 478 aa, Sphingomonadales bacterium
  misc_feature (1)..(478): tr|A0A4Q2ZLQ7|A0A4Q2ZLQ7_9SPHN Tryptophan 7-halogenase (Fragment) OS=Sphingomonadales bacterium OX=1978525 GN= EOP60_10150 PE=4 SV=1
SRPAGSLPPSGGGVAGWMSALALGKALQGSGVTIDLVETDDPDHSVGPFGSAEAVLPAFHGFLGDHAIDEDALLRAARGTFALGAAFSGWAGQQSAWFLPFGETGAPMGPVAFPPLVARLRSAGHAVRSTDFSLAAVAAAAGRFDRPSDDPRSVQSSYGYGLHLDKGGLAEVCRALATGVKHHQAALRCAIRAENGHVAALELESGAHVAGDLFLDCSGHAALLCEGHGFDSWSAWLACDRVVERNNIQDGVPPPYALGAAHAAGWLRSVPLTGGPGEAMLFASAHHADDAATPFHQGRRTRAWHGNVVAIGAAAATIEPLYGQNLQLVAHALQRLIGLFPNRAEGAEAAEYNRITADEADRVRDFVIAHYKTNARLGEPFWDAARKMPVPDELQYKLDLFASRGRMPMYDEELFSRAEWIAMLDGQGMHPRRYDALAETIPEPAILQHMARLRDLIVDAARTMPNHGAILSRIGGRG

SEQ ID NO: 89262 - protein, 538 aa, Burkholderia pyrrocinia
  misc_feature (1)..(538): tr|A0A4R4FY90|A0A4R4FY90_BURPY Tryptophan 7-halogenase OS=Burkholderia pyrrocinia OX=60550 GN=EVG18_14040 PE=4 SV=1
MSNPIKNIVIVGGGTAGWMAASYLVRALQQHTNITLIESAAIPRIGVGEATIPSLQKVFFDFLGIPEREWMPQVNGAFKAAIKFVNWRKSPERSRDDHFYHLFGNVPNCDGVPLTHYWLHKREQGFQQPMEYACYPQPGALDGKLAPCLSDGTRQMSHAWHFDAHLVADFLKRWAVERGVKRVVDEVVEVRLNDRGYISSLSTKEGRTLEADLFIDCSGMRGLLINQALKEPFIDMSDYLLCDSAVASAVPNADARVGVEPYTSAIAMNSGWTWKIPMLGRFGSGYVFSSKFTSRDQATADFLNLWGLSDKQPLNQIKFRVGRNGRAWVNNCVAIGLSSCFLEPLESTGIYFIYAALYQLVKHFPDTSFDPRLADAFNAEIVHMFDDCRDFVQAHYFTTSRDDTPFWLANRHDLRLSDAIKEKVQRYKAGLPLTTTSFDDSTYYETFDYEFRNFWLNGNYYCIFAGLGMLPDRSLPLLRHRPESIDKAEAMFARIRREAERLRTSLPTNYDYLRSLRDGDAGLSRSQPGSTLAAPEIL

SEQ ID NO: 89263 - protein, 429 aa, Sphingomonadales bacterium
  misc_feature (1)..(429): tr|A0A4Q3A8M9|A0A4Q3A8M9_9SPHN Tryptophan 7-halogenase (Fragment) OS=Sphingomonadales bacterium OX=1978525 GN= EOP58_14960 PE=4 SV=1
IGTIGVGESTIPPIVSYNRLLGINEAEFMAATQATFKLGILFDNWKEPGHRYFHSFGTTGKDHWAAGFQHFWMYARERGLADSYDDYCLELVAAMQSKFAHLPDESMNYAYQLDSGLYAKFLRKMAEGDGTKRIEGKIARVELDGESGDIAALTLESGERIEGDLFLDCTGFRAVLIEQALHAGFDDWTHWLPCDSAIAIQTESVGPAVPYTRAMAHDAGWQWRIPLQHRVGNGIVYCSRYLDKDAALERLLGNIEGKTVVEPNFLRFTSGVRRKQWHRNCVAVGLSGGFMEPLESTSIHLIQRAVLRILRMMPQGKVSARDVAEFNDQQHQDMEQIRDFLILHYKATDRRDSGFWRQCAAMEVPESLTQKIELFRETGRVFRRNEELFAENSWVQVMMGQGIMPQSWHPIAEKLRDDELARLMTTLKD

SEQ ID NO: 89264 - protein, 507 aa, Rheinheimera sp.
  misc_feature (1)..(507): tr|F7NYZ2|F7NYZ2_9GAMM Tryptophan halogenase OS=Rheinhe imera sp. A13L OX=506534 GN=Rhein_3033 PE=4 SV=1
MINRIIIVGGGTAGWLVANHLGQAMKSRPEMKITLIESPTIPTIGVGEGTVPAIRQSLRKFGISESDFIQRCNVTFKQSIKFVNWLDKNIHGENHYHHLFDVPVPYGIDLAPFWLNQHKQTAFADLVAAQYQVVEAGLAPKAITSPEFGGLTSYAYHLDARKFADFLHEHAVKHFGINHLYGDITDIDRDVDGYITALHSPQLGLQPCDFVIDCSGFNSVLLGEKMQVKFIDRSDHLLTDVALAVQIPTMEHSIVPPYTLATAHQAGWIWDIALTNRRGVGLVYSSSHMDEEQACLKLNRYIGGGLENYPWRKINMRIGRREKFWHKNCVAIGLSQGFVEPLEATSILMTDFSADLLSKRFPENRAALELLEQRFNQRLLHAWEQTFDFIKLHYCISDRSDSSFWLDNRDPATIPDTLLQKIALWRHHPPAREDFFTKFEIFDFENYLYVLYGMKFNTPAPKLAPEYIKMAAAVQERVTLEAEVLKQKLISHRALLEKIHKFGLQRL

SEQ ID NO: 89265 - protein, 513 aa, Roseateles depolymerans
  misc_feature (1)..(513): tr|A0A2W5D9M8|A0A2W5D9M8_9BURK Tryptophan halogenase OS =Roseateles depolymerans OX=76731 GN=DI603_18790 PE=4 S V=1
MTPIRNILIVGGGSAGWLAAAYLARTLGSQSPQGPRITLVEAPGIPTIGVGEGSFPSLRGTLATIGIAEDRFIRDASASFKQGIRFDHWVRPPGQPGADHYFHPFSQPSQRAGGPELLPYWLQGEAGPGMAFAEAATLQKRVADAARAPKRPTDADYTGALNYAYHFDAGRFATLLAEQARSLGVQHIAATVERVEMGDGGLIAAVHTREAGRLQADLFLDCSGFHAALIGAALGSPFRSLASSLFVDRALAIQVPYARADAPIASYTISTAQTAGWIWDIGLRERRGIGHVYASRYLDDEQAEAQLRAYIGPAAEGLPARRLDLRIGYRETQWQGNCVAVGLSSGFIEPLEASGLGLVEAAVYLIAHLFPHGGELEAAARQFNQQMRTRYERIADFVKLHYGLTQRHDSAFWQDNTAPESFSPLLREQLAMWRHRAPHRLDFITDLEMYPPSSWQYVLYGMEYPTQLAPNATAWPRAAEARQEFQTLRQLAPRAIADLPPHRALVEHLCGRC

SEQ ID NO: 89266 - protein, 496 aa, Hyphomonas beringensis
  misc_feature (1)..(496): tr|A0A062UBP1|A0A062UBP1_9RHOB Uncharacterized protein OS=Hyphomonas beringensis OX=1280946 GN=HY29_02905 PE=4 SV=1
MQKVRKVVIAGGGTAGWITAAALSRMLGPLLDITLVESDDIGTVGVGEATIPTHRTFHHLLGIDEREFMRATKATFKLGIAFENWGGIGDNYIHSFGQVGKPSWMGEFYNIWMAAREKGIGEELDAYCFELQAAKHNKFYTDEKFKINYAYHLDASLYAKFLRTFSEGKGVKRVEGLIGEVEQDGESGFITALKLKSGERIEGDFFVDCTGFRGLLIEQTLKSGFEDWGHWLPTDSALAVQTRSVGPALPYTRSIAHQSGWQWRIPLQHRVGNGLVFCSQYMQPDEAEEVLRGNVEGDLLAEPRLIRYKTGRRQKVWSKNCVALGLSSGFLEPLESTSIHLIQIGASRLVQQFPFSGVSEAIANHYNEQSVRELERIRDFIILHYKVTERDDSAFWRDRRDMDIPDSLAQRLEVFRENGLAYQATDDLFRVDSWLQVMMGQRLKPKGYHHMGHMMTQDQMQRALGGLSTGIANAVAKMPTHQEFIDRYCAIEPEPA

SEQ ID NO: 89267 - protein, 498 aa, Acinetobacter sp.
  misc_feature (1)..(498): tr|A0A3A8EZD3|A0A3A8EZD3_9GAMM Tryptophan 7-halogenase OS=Acinetobacter sp. WCHAc060115 OX=2419601 GN=D7V20_03 385 PE=4 SV=1
MINFNEIKRVCIVGAGTAGWFSALQMRKSLKENVEICVIATPDIPTIGVGEGGVLNFMSSLIRLEIPFLEFMQETGAVHKLGFVYEGWRTGKPDDMYYHMFPYLNKHEKTKGYYPILSVLANHNVPVSNIVDSIKLREENTSQQNITDMFVNMKDHNFLSSFHFDTYKVAQYLKKIALNRNIKYIEGKVDQIFVNAQGGDIEFLEVNNQKIKTDFVIDASGFSRIFISKHFNSEWVSLSDKLVMNTAIPFHLQHSLKNPELVTRSTAMSSGWVWQIPLQERIGAGYVFNDSFISPEKAVDEVERWLGYHIDPIKIIKFEAGYYENIWIKNVLAVGLASGFVEPLEATSIGQMLLQLEVFDQIILNSAGIVSRDLVKFYNQQNQNSWQGIADFIRMHYDTQRADTEFWKSTVNMPMSEKYKELKEIWKYRTPRDYDFIEYQMDLMHHFGTYSWLAIAQALGHIKAEVTVPELMDLTSQQRQKLAKEINDIYQRLGLQPS

SEQ ID NO: 89268 - protein, 506 aa, Sphingomonas sp.
  misc_feature (1)..(506): tr|A0A345WQ59|A0A345WQ59_9SPHN Tryptophan halogenase OS =Sphingomonas sp. FARSPH OX=2219696 GN=DM480_10120 PE=4 SV=1
MKDAERQPGDRVRQVVILGGGTAGWMTAAALARTFGRRIAVTLLESDEIGTVGVGEATIPTIHWFNELVGLDEAAFLRETKATFKLGIEFVDWRGPGHRYFHPFGQYGAPLPGVAFHHRWLKARAEGYDLPLAALSLAGTLAAQNRFAKPAAEARSILSTLGYAFHFDAGLYARHLRGLAEGAGVTRVEGKLATVARDGGTGHVTALVTETGARLAGDLFIDCSGFRALLIEGAMQAGYEDWSHWLPCDRAVAVPCARVGETTPYTRSTAREAGWQWRIPLQHRTGNGYVYASRHLSDDAAAATLLANLDGEALAEPRFLRFLAGRRRRTWIGNVVAIGLSSGFLEPLESTSIHLIQSGIAKLLTLFPDRDMDPALARRYDTLLAADMDNIKDFLILHYHATTRDEPLWRHTRAMEIPDTLAARIDHYRRAGRLMVGSDDLFRDASWLAVLDGQGVTARDYNPVADTIDAATNRAQVEQIAALIARAAPTLPGHDAALAAMLAPGR

SEQ ID NO: 89269 - protein, 477 aa, Sphingomonadales bacterium
  misc_feature (1)..(477): tr|A0A4Q3DDG3|A0A4Q3DDG3_9SPHN Tryptophan 7-halogenase OS=Sphingomonadales bacterium OX=1978525 GN=EOP61_03625 PE=4 SV=1
MAIRRIVILGGGVAGWMSALALGKALAGSAIAIDLVETGGPDHSVGPFGPGEATLPAFHKFLGDHGVDEDALLRAARGTFALGAAFSGWAGRQSAWFLPFGEIGAGMGTVAFPPLVARLRAAGHPVRPTDFSLAAVAAAASRFARPSLDTRSVLSSYGYGLHLDKAGLTGMCRALARGVTRHAAPFARAVRAANGHVAALELADGEEVPGDLFLDCSGPAALLCEDHGFESWSAWLACDRVVERATSQEGIPPPYTHAAAQPAGWLRSVPLAGGPSEAMLFASAHHSDAAAIEIHQGRRTRAWHGNVIAIGAAAALVEPLYGHNLQLAHQAIQRLIALFPNNAEGPEATEYNRITAEEADRVRDFVVAHYKTNARSGEPFWDAARAMPVPDALQYKLDLYASRGRMPMYDEELFDRAEWIAMLDGQGLHPRRYDALADTVPEPAIIQHVTRLRELIVDAAKAMPHHGATLAQIGAGA

SEQ ID NO: 89270 - protein, 280 aa, Sphingomonadales bacterium
  misc_feature (1)..(280): tr|A0A4Q5SJ56|A0A4Q5SJ56_9SPHN Tryptophan 7-halogenase (Fragment) OS=Sphingomonadales bacterium OX=1978525 GN= EOP59_14910 PE=4 SV=1
MTDPLRSIVIVGGGTAGWIAAAMLSRFVPHDTRIELVESDAIGIIGVGEATIPQIRLLTAGLGVDENALLDATQGTYKLGIEFVDWLRPGDRYMHAFGQIGRGLGVLPFHQFWLRGQAQGITAPLTAYMPSAAAAYAGWSALPPQVPPTPSYAYHFDASLLAGVLRSIAEPAGVVRTEGRIVGSECGEDGNVAALVLDDGRRVEGDFFLDCSGFRSLLLGDALGIGYEDWSRWLPCDRAMAMQCEQPGAILPFTRATARPVGWQWRIPLRHRIGNGLVYA

SEQ ID NO: 89271 - protein, 514 aa, Erythrobacter sp.
  misc_feature (1)..(514): tr|A0A2D8MJR1|A0A2D8MJR1_9SPHN Tryptophan halogenase OS =Erythrobacter sp. OX=1042 GN=CL949_22260 PE=4 SV=1
MAIDFEKVVIVGGGTAGWLSAAYLAARRPELQITLVEAPDIPTIGVGEGSWPTMRETLRIIGIPESEFLFECDASFKQGSRFDGWRTGGAEDSYLHPFTPPTPGDVRPFITAWKQTDGRSFAELASPQAAVCMQNLAPRQRSMPDYAAALNYGYHFDAGKFARLLSRHAVNRLGVTHIRDQVTDILSEGPDRIAAVILRSGGQLSGDFYLDCTGMAAHLIGEHFGTAWIDRSDVLFNDRALAVQVETQPDSPIASQTIGTAHKSGWLWDIALPTRRGIGCIYSSQFTEDAEAERTLKDYVATNLPWQEPEAIVPRKISFRTGHRESFWRGNCVAIGLSAGFIEPLEASAIVLVELSLKALADSFPVTREALPAYSERFNKLFQYRWERVVDFLKLHYVLSQRSEPYWKAHRDPASIPPSLGRQLQLWRDHPPTQWDFPQVDEMFSAASQQYVLYGMGFAEPLSGSSEDLGPVQAQLAAVREKARALTAAMPTNRTYLDALRSTHPANPREGEFA

SEQ ID NO: 89272 - protein, 76 aa, Sphingomonadales bacterium
  misc_feature (1)..(76): tr|A0A4V1SHE6|A0A4V1SHE6_9SPHN Tryptophan halogenase (F ragment) OS=Sphingomonadales bacterium OX=1978525 GN=EO P60_03090 PE=4 SV=1
MGAIQRIVILGGGVAGWMTALGLAHALDASGIAIDLVETGGPDDSIGPFGPGESALPAFHGFLGDHGVDEDMLLRF

SEQ ID NO: 89273 - protein, 147 aa, Sphingomonadales bacterium
  misc_feature (1)..(147): tr|A0A4V1ZZF2|A0A4V1ZZF2_9SPHN Tryptophan halogenase (F ragment) OS=Sphingomonadales bacterium OX=1978525 GN=EO P59_17205 PE=4 SV=1
RMMPQGEISPRDIAEFNDQQFQDMEQIRDFLILHYKVTDRRDSPFWRQCAAMDVPDSLAQKIELFRETARVFRRNEELFAENSWVQVMLGQGIEPQSWHPIAGKLNDDELDRLLGMIRQDVTRTVAGLPDHAAYVARYCGAAEPAAA

SEQ ID NO: 89274 - protein, 405 aa, Sphingomonadales bacterium
  misc_feature (1)..(405): tr|A0A4Q2ZH53|A0A4Q2ZH53_9SPHN Tryptophan 7-halogenase (Fragment) OS=Sphingomonadales bacterium OX=1978525 GN= EOP60_12700 PE=4 SV=1
LDLIEFWQYWLRARREGVAEPLADYSFNQQAAKLGRFGRMPRIPNSDLDGISYAFHFDAGLYAKFLRGIAEANGVVRTEGRITGVTRDCESGFVRSVTLESGEEIAGELFLDCSGFIGLLIEQELKTGYEDWTQWLPCDRAIAVPTRNVGAPRPYTQAIAHPAGWQWRIPLQHRSGNGHVFCSEFMSEDEARALLLATIEGEPIAEPRALRFKTGMRKKAWNANVVALGLSSGFLEPLESTSIHLIQNGIAKLISHFPDRRFAQANIDAYNRRTAYDYERIRDFIILHYHANQRPEPFWQHCREMSIPDSLRDKIELFKATGRVFREQEELFVEVGWFQVLTGQNVVPETYHPLADALTREELAQFLQDIRTIVSSNAARLPSHADFIAATCAAPPAAAPAGAPA

SEQ ID NO: 89275 - protein, 502 aa, Erythrobacter sp.
  misc_feature (1)..(502): tr|A0A349TEF6|A0A349TEF6_9SPHN Tryptophan halogenase OS =Erythrobacter sp. OX=1042 GN=DCS24_07475 PE=4 SV=1
MTIKNIIIVGGGTAGWMAAAVLSRLKSDRPLNITLIESEAIGTVGVGEATIPPFVEFNQLLEIDERELLSQVQGTFKLGIQFVNWGKQGDSYIHPFGAYGYNMRGISFHHVWHRYHQDGDKRPIQAFNLETMAAHFGRFARTQDFQRDDLPPVNYAYHLDAGRYAQYLRKYAEKRGVVRQEGRIADVALDNESGFVSSVKLEDGREFAGDLFVDCSGFRGLLIEQALKTGYEDWTHWLPCDRAVALPCFREDGSPPPPYTRATAHSAGWQWQVPLQHRNGNGHVYCGNFMDDDEAHDILVNNIAGKPGADPNFLRFVTGRRKKFWNKNVVALGLAAGFMEPLESTSIHLINTGVNKLVALLSLDGVTQAQEDAFNRLTGKEYARIRDFLILHYNATQRDDSEFWNYCRTMDVPETLTEKVELFKQNGQIFREEDELFTESSWTAVMMGQGIQMQGHNAVADTLIGRETRKEVDEMEKSIRFAVQNMPGHGDYLKRYCPAPAI

SEQ ID NO: 89276 - protein, 492 aa, Sphingomonadales bacterium
  misc_feature (1)..(492): tr|A0A4V1ZXN8|A0A4V1ZXN8_9SPHN Tryptophan 7-halogenase OS=Sphingomonadales bacterium OX=1978525 GN=EOP62_08125 PE=4 SV=1
MAEQRIKRVVIAGGGTAGWVVAAALGRHLGPLLDITLVESEEIGTVGVGESTIPTARTFHAFLGIDEREFMRETGSSFKLGISFEDWGQIGDRYIHSFGQIGKGTWMGDFQHFWLRARDQGYGGDLGDYCFELQAALAGKFATGENAQINYAYHLDAGRYSRFLRNFSEKLGVKRVEGRIAQVEQHPESGDIAALVLESGVRIEGELFIDCTGFRGLLIEQALKAGHEDWSHWLPTNSALPLQTAAVGPAVPYTRAMAHSAGWQWRIPLQHRVGNGLVWCSEFMSDDEAHATLHASIEGEVLVEPRPIRFKAGRRRKAWDKNCVAFGLSSGFVEPLESTSIHLFMIGVTRLIQLFPFGGCNDAVTNRYNDLAQSELERIRDFIVLHYKLTERDDSAFWKYCREMAIPDTLAARIELFREDAHAWQASDDLFRIDSWVQVMLGQRLNPRSYHQMGQLLGDKQLREALGDLKGNIARVVAGMPSHQQFIDHYMS

SEQ ID NO: 89277 - protein, 538 aa, Burkholderia pyrrocinia
  misc_feature (1)..(538): tr|A0A104N2S7|A0A104N2S7_BURPY Tryptophan halogenase OS =Burkholderia pyrrocinia OX=60550 GN=WJ63_09430 PE=4 SV =1
MSNPIKNIVIVGGGTAGWMAASYLVRALQQQANITLIESAAIPRIGVGEATIPSLQKVFFDFLGIPEREWMPQVNGAFKAAIKFVNWRKSPDRSRDDYFYHLFGSVPNCDGVPLTHYWLRKREQGFRQPMAYACYPQPEALDGKLAPCLPDGTRQMSHAWHFDAHLVADFLKRWAIERGVSRVVDEVVQVHLNDRGYISSLSTKEGRTLEADLFIDCSGMRGLLINQALKEPFIDMSDYLLCDSAVASAVPNDDARVGIEPYTSAIAMNSGWTWKIPMLGRFGSGYVFSSKFTSRDQATADFLNLWGLPDKQPLNQIKFRVGRNGRAWVNNCVAIGLSSCFLEPLESTGIYFIYAALYQLVKHFPDTSFDPRLTDAFNAEIVHMFDDCRDFVQAHYFATSREDTPFWLANRHDLRLSDAIEEKVQRYKAGLPLTTTSFDDSTYYETFDYEFKNFWLNGNYYCIFAGLGMLPDRSLPLLRHRPESIDKAEAMFARIRREAERLRTSLPTNYDYLRSLREGDAGLSRSQPGPMFAAPEIL

SEQ ID NO: 89278 - protein, 511 aa, Erythrobacter sp.
  misc_feature (1)..(511): tr|A0A2D8MDZ2|A0A2D8MDZ2_9SPHN Tryptophan halogenase OS =Erythrobacter sp. OX=1042 GN=CL949_11625 PE=4 SV=1
MMPEPISKVVILGGGTAGWMVAAALSKAMGGIPGFSVKLVESEAIGTVGVGEATIPQIVSFNRLLGIDEMEFVRETHATYKLGIEFVDWLREGHSYVHPFGSFGIDMLGIEFRHFWLRGKEQGAAETIDSYSIAAMAAKGGRFDWPRPDMPRSPLSRLAYAFQFDAGRYARFLRKIAEARGVARIEGEVADIRQHPETGFVTGLTLVDGQQIEGDLFIDCSGFRSLLLGQTLEIPFLDWSRWLPCDSAVAVPCKLGGRNEPLTRSTARPAGWQWRIPLQHRIGNGHVFSSGHMERDIATKTLLDNLDGAPLADPIHLSFKAGRRERSWEKNVVALGLAAGFLEPLESTSIHLVQSGIARLMALFPDKDFSALEIARFNAETEKEYRDIRDFLILHYKATERDDSEFWRYCRNLEAPDGLAEKIAMFRSSGRIFREDNELFTEESWMAVMLGQGIEPDRYHPAARLLDGPETLDRLQHIRNAIAGTVAQMPTQDVFLRQRGGAITAGRISPT

SEQ ID NO: 89279 - protein, 482 aa, Erythrobacter sp.
  misc_feature (1)..(482): tr|A0A3B9AUX4|A0A3B9AUX4_9SPHN Tryptophan halogenase OS =Erythrobacter sp. OX=1042 GN=DCF81_01175 PE=4 SV=1
MAAALLARFLPPDYRVELVESESIGTVGVGEATIPQIRHFNQALGIDEAEFLRETKGSFKLGIAFDGWRGEGHSYMHAFGPVGQSSGLIAFRHYWLRAKALGHAKDLAHYSPNEIAARNLRMPGPGGADLPYAYHFDASLYAAFLRHYAETRGALRTEGTIERVERDGETGDIAALVLDGDRRLEADFFIDCTGFRALLIEGAMGAGFDDWSNLLPCDRALAVPCASGGDFTPYTRAIARKAGWQWRIPLQHRIGNGYVFSSQFCSEADAADTLLANLDGSPDGDPRLLSFTTGKRRRQWVGNCLGLGLAAGFMEPLESTSIHLVQSALARFLRLLPAGRATPSTIDHFNAQADFEWSRVRDFLVLHYWANGREGEPFWDAMRALGPPATLKCKIDQWRDTGHIHREHEELFTEVAWFQVFAGQGVSANHYNPLADAMAEHDLRDFLASQERQLEQAAAAMPHHADTLGRLMARPAKRNTAA

SEQ ID NO: 89280 - protein, 289 aa, Sphingomonadales bacterium
  misc_feature (1)..(289): tr|A0A4Q5SP04|A0A4Q5SP04_9SPHN Tryptophan 7-halogenase (Fragment) OS=Sphingomonadales bacterium OX=1978525 GN= EOP59_14720 PE=4 SV=1
MSARARPVQRIVILGGGSAGWMTAAALGRALGGQRHSITLVESEAIGTVGVGEATVPPIQEFNRYLRIDPAEFLRATSGTIKLGIQFDGWGGADSSYFHPFGYLGVEMGGIHFHHYWLRHLAQGGDPDHAPYNLETLAARAERFAPATRLGPVHHAVHFDAAGYARFLRGHAEASGVVRVEGKVAEVRLDPEDGFIDSLLLDDGRVIDGDLFVDCSGFRGVLIEGALETGYVDWRHWLPCDSAVAMPASRAGDPPPYTRSTAREAGWQWRIPLQHRDGNGYVYSSAHLE

SEQ ID NO: 89281 - protein, 538 aa, Burkholderia pyrrocinia
  misc_feature (1)..(538): tr|A0A087NKT6|A0A087NKT6_BURPY Tryptophan halogenase OS =Burkholderia pyrrocinia OX=60550 GN=JM78_31035 PE=4 SV =1
MSNPIKNIVIVGGGTAGWMAASYLVRALQQHTNITLIESAAIPRIGVGEATIPSLQKVFFDFLGIPEREWMPQVNGAFKAAIKFVNWRKSPERSRDDHFYHLFGNVPNCDGVPLTHYWLRKREQGFQQPMEYACYPQPGALDGKLAPCLSDGTRQMSHAWHFDAHLVADFLKRWAVERGVKRVVDEVVEVRLNDRGYISSLSTKEGRTLEADLFIDCSGMRGLLINQALKEPFIDMSDYLLCDSAVASAVPNADARVGVEPYTSAIAMNSGWTWKIPMLGRFGSGYVFSSKFTSRDQATADFLNLWGLSDKQPLNQIKFRVGRNGRAWVNNCVAIGLSSCFLEPLESTGIYFIYAALYQLVKHFPDTSFDPRLADAFNAEIVHMFDDCRDFVQAHYFTTSRDDTPFWLANRHDLRLSDAIKEKVQRYKAGLPLTTTSFDDSTYYETFDYEFKNFWLNGNYYCIFAGLGMLPDRSLPLLRHRPESIDKAEAMFARIRREAERLRTSLPTNYDYLRSLRDGDAGLSRSQPGSTLAAPEIL

SEQ ID NO: 89282 - protein, 500 aa, Sphingomonas sp.
  misc_feature (1)..(500): tr|A0A369VV04|A0A369VV04_9SPHN Tryptophan 7-halogenase OS=Sphingomonas sp. WZY 27 OX=2283317 GN=DVW87_10785 PE =4 SV=1
MTDMPPALPDIVIAGGGTAGWVAAAAFASQLNGLARIVLVESDEIGTVGVGESTIPTIRTFHNLLGIDERRFMAASQATFKLGISFEGWETPERRYFHAFGSVGRSVFMADFQHFWLEAAGRGFGGEYGDYSLESQAAAQGRFAAGAKSPLSYAYHLDATAYARFLRGLAEAAGVRRVEGRIERVERHDDGDIAALHLASGERVQGDVFVDCTGFRALLIGQTLGSDFVDWSEWLRADSAFAVQSAPSGAPVPYTRAIAHADGWRWRIPLQTRMGNGIVFSSKTLSADEARARLLGALDGEPLFEPRLLRFTSGMRREAWRNNCLALGLAAGFIEPLESTSIHLVMTAVTRFLQAFPFNGAAPAVRDRFNAQARAEWEHVRDFIILHYHLNRRPEAFWRECAAMRVPDTLAQRIAVFRDSAGAWQDQDEIFRTDSWVEVMLGQGEHPRAHHRLPSLLPDDQLRQSLGELSRGIAEQVRGLPSHKDFLDSYCPHQGSAAAA

SEQ ID NO: 89283 - protein, 161 aa, Sphingomonadales bacterium
  misc_feature (1)..(161): tr|A0A4Q5SHB7|A0A4Q5SHB7_9SPHN Tryptophan halogenase (F ragment) OS=Sphingomonadales bacterium OX=1978525 GN=EO P59_16260 PE=4 SV=1
FIEPLESTSIHLIQTGISKLMWLFPDSGMGSAARDEYNRLMHEAYEYVRDFIVLHYKATERRDTALWRHVGEMSVPDSLAAKLELWRERGRIRRYDHDLFGVPSWVAVLIGQGIMPEGHDPLVDSMDDARVTGAMRRIAATYAEVAGKLPGHADQIAAMVR

SEQ ID NO: 89284 - protein, 471 aa, Sphingomonadales bacterium
  misc_feature (1)..(471): tr|A0A4Q5SKR4|A0A4Q5SKR4_9SPHN Tryptophan 7-halogenase (Fragment) OS=Sphingomonadales bacterium OX=1978525 GN= EOP59_14690 PE=4 SV=1
MRRVVIAGGGTAGWVATAALVKQLGPLLDITLVESDEIGTVGVGESTIPTSRSFHQLLGLDERIFMRETQATFKLGIAFENWGRIGERYIHSFGEIGRKSTWMAPFHHFWMEARAQGFGGSLGDYCFELKAADADRFATGDGAAINYAYHLDATLYARFLRALAEPAGVRRVEGRIDRVERDPESGFLTALVLQSGARIEGDLFLDCTGFRALLIEQTLESGFEDWTQWLRTDSAFAVQTESVGPPVPYTRAIAHEAGWRWRIPLQHRVGNGLVFASETMSDDEARAKLLAALDGRPLFDPRLIRYRTGRRKQVWNRNCIALGLASGFIEPLESTSIHLVKVAVTRLIESFPFAGVSAAIAERFNDNARQEAEHIRDFIILHYHLNQRDEPFWQRCRTMDIPDSLQQRIAAFRDGAHAYQDGIDLFRVDSWVQVLLGQGLMPQGYHQLARMMPPAELRQALAALTANIDAA

SEQ ID NO: 89285 - protein, 500 aa, Erythrobacter sp.
  misc_feature (1)..(500): tr|A0A357H967|A0A357H967_9SPHN Tryptophan halogenase OS =Erythrobacter sp. OX=1042 GN=DD861_08390 PE=4 SV=1
MRSDFKPRRIVVAGGGTAGWMAAAAIAHTMGDAIDLTLVESDAIGTVGVGEATIPPLVLFNRLIGISEADFMRETQATFKLGIEFENWKRDGEKYFHSFGNTGRDHWSAGFQHFWAEGRERGHTVSYDEYCLELVAAYAKKFAHLPENGLNYAYHLNATAYAAYLLRIAEQAGAKRVEGKIGQVDIDGATGNIAAIRLEDGTRLEGDLFVDCTGFRALLIEGALHVGYDDWSHYLPCDSAIAVQTELAGPPVPYTRAIAHDAGWQWRIPLQHRGGNGIVYCSRYLSQDAAHDRLMSTLEGKPISEPRAIPFTTGARRKQWHRNCIAIGLSSGFLEPLESTSIHLIQRAVIRLLRMMPAGDVSERDIAEFNDQQLTDMIQVRDFLILHYKATERRDSPFWRQCATMDIPDSLTQKIELFRETGRVFRKNEELFVENSWIQVMLGQGIMPRAFHPVAKKMTDEELAHFLQTLREKVARTVANLPDHHAYVAQYCGAKTAQAA

SEQ ID NO: 89286 - protein, 538 aa, Burkholderia sp.
  misc_feature (1)..(538): tr|A0A3N8CC49|A0A3N8CC49_9BURK Tryptophan 7-halogenase OS=Burkholderia sp. Bp9125 OX=2184569 GN=DIE18_08065 PE =4 SV=1
MSNPIKNIVIVGGGTAGWMAASYLVRALQQQANITLVESAAIPRIGVGEATIPSLQKVFFDFLGIPEREWMPQVNGAFKAAIKFVNWRKSPDRSRDDHFYHLFGSVPNCDGVPLTHYWLRKREQGFQQPMAYACYPQPEALDGKLAPCLPDGTRQMSHAWHFDAHLVADFLQRWAIERGVNRVVDEVLEVRLNDRGYISSLSTKEGRTLEADLFIDCSGMRGLLINQALKEPFIDMSDYLLCDSAVASAVPNADARVGIEPYTSAIAMNSGWTWKIPMLGRFGSGYVFSSKFTSRDQATADFLDLWGLPDNQPLNQIKFRVGRNGRAWVNNCVAIGLSSCFLEPLESTGIYFIYAALYQLVKHFPDTSFDPRLTDAFNAEIVHMFDDCRDFVQAHYFASSREDTPFWLANRHDLRLSDAIKEKVQRYKAGLPLTTTSFDDSTYYETFDYEFKNFWLNGNYYCIFAGLGMLPDRSLPLLRHRPESIDKAEAMFARIRREAERLRTSLPTNYDYLRSLRDGDAGRSRSQPGPTLAAPEIL

SEQ ID NO: 89287 - protein, 522 aa, Rheinheimera sp.
  misc_feature (1)..(522): tr|A0A1B7UGP8|A0A1B7UGP8_9GAMM Tryptophan halogenase OS =Rheinheimera sp. SA_1 OX=1827365 GN=A5320_16720 PE=4 S V=1
MTTAVKKLVIVGGGTAGWLSAAIIAAQHRSNTADGLQVVLVESADIPTIGVGEGTWPTMKNTLQQIGLKEADVFAHCHAVFKQGGKFVNWVRSDAQDRSDPSSNTNCNKEFYYHPFTVPMGYGRIDLAPYVDDVSQFAIDSNFQHQICEAGLAPRSLAEGEYQGQCNYAYHLDAGAFADLLKQHCKTKLGVEQRIGTVERCELTADGQIKALHLTDGSMPIEADLFIDCTGFASLLLGKTLGVPFESVDHLLFNDSALAMQVPYDSPDAPIPCHTIATAQNAGWIWDIGLTHRRGVGHVYAAKYLSDDEAEFNLRRYIGKAAEGVAARKISFATGHRTKFWQHNCVAIGMSAGFVEPLEATAIMLVEISARFVADNLPADQATMPLVARRFNQQMLYRWQRILDFLKLHYMLTKRPEPYWQAHLDPATIPQSLLDDLQLWRHRGPQISDFHGALELFPAASYQYVLYGMGFKPDFTAQAYLYQQQAQAQQIIRRNQQLTAQMLQTLPPHRDYINRWLAGSRG

SEQ ID NO: 89288 - protein, 514 aa, Rheinheimera sp.
  misc_feature (1)..(514): tr|A0A1B7URH1|A0A1B7URH1_9GAMM Uncharacterized protein OS=Rheinheimera sp. SA_1 OX=1827365 GN=A5320_21465 PE=4 SV=1
MQNFATHHTTPFKLLIVGGGTAGWLTALMLAWHFRQQPWVQIELVEAPDIATIGVGEGSTPALTRLFRQLEIAEADWMPACQATYKNGIQFSHWSTIPGYQHYFHPFPSSEDNAVLPEFFRQVRAAQQAQPSDAHPDSFFLQSQLAKAGKAPFCADHYIQLQYGYHFDAGLLGQCLKKIAIKRGIAYRPFKVTDVQCFSDGAIAQLHTAEGETLTADFYLDCTGFASKLMRQTLGSKFHSYQQMLPNNAAVTIATQAKSQPLSQTTATALRHGWSWQIPLQHRTGNGYVFSQDFISADIAETELRQHLGLSEQQGSSRLLKFESGRLQRHWQHNCVAVGLSQGFIEPLEATALYLVQQTVSHFLLYWQQSQYQCRGELAARSEYNLLINNYFDRIADYIVLHYKTNSRTDSAYWQHNRKLEFISPELRQLLQCWQSGGDLPALLARKRLEKYYHAVSWYCLLAGTGYLPERSQQQCRVEQQQLRLQRWQQLVTLCPDQLEYLHQLAPSDRLVTP

SEQ ID NO: 89289 - protein, 508 aa, Rheinheimera sp.
  misc_feature (1)..(508): tr|A0A1B7UHT7|A0A1B7UHT7_9GAMM Tryptophan halogenase OS =Rheinheimera sp. SA_1 OX=1827365 GN=A5320_15565 PE=4 S V=1
MKIKKIAIVGAGTAGWLAANHLGHELRADPDVQITVIESADVPTIGVGEGTVPYVMKGLERFGISEAELLLQCDTTFKQGIKFVDWLDKKTHGDNHYYHPFDSPYPAGFDISPYWLTQQEKLPFDDIGIQARIAELGLAPKQRSSAEYQGPLAYAYHFNALKFAALLAKNAKQRFRVEHQIATVTGAETDDQGLIRCLTTSAGDKLHFDFYVDCSGFASILIDKTLKVPFISKADELLTDRALVQQIPIADGQPLPPYTTATAHAAGWIWDIPLTSRRGTGFVYSSKHMSDDEARREFASYLGLDPATFAPRQIPMPIGYREQFWLGNCVALGLAQGFVEPLEATSILVTDFAAELLARHFPRHLADVTVCQPYYNQVLRYVWDGVVDFIKLHYFLSDRQDSAFWQDNRDESKLSAQLKNRLAMFKLRPPQQSDFFSRFDLFNEKNFLYVLYGMKFQTQLQPLTPYEIRRSEELLQSNQQLVAGASREFLPHRVWLDALKHAAQQRAG

SEQ ID NO: 89290 - protein, 507 aa, Alteromonadaceae bacterium
  misc_feature (1)..(507): tr|A0A2A5HDT4|A0A2A5HDT4_9ALTE Tryptophan halogenase OS =Alteromonadaceae bacterium OX=1916082 GN=COA42_21760 P E=4 SV=1
MSEATPPISRIVIAGGGTAGWMCAAALARVCDKQTTQITLIESENIGSIGVGEATLPVLRDFNRMLGIDEQEFMKATNATFKLGIEFKNWARQGQSYFHPFSGFGLSQNLTPFHLQWLQAHHYTKNAQSKDITLPNFDEFAIVTHAARNNKFAAPGAGNQIDYTYAYHLDATAYAQYLRRYSEALGVVREEGKITHVALDSQCGNITALSLDNGKQVSGDLFIDCSGFRALLIGKVLDTAYIDWRHWLPCDRAVALQTERPPNQPLHSYTTSTAHRAGWQWHIPLQHRTGNGHVYCSKYVSDDEALSVLQSNSGKAINEPKVLHFGAGMRQQCWKRNCISIGLSSGFLEPLESTSIYLIQFGIFKLIELFPRKHNFEIEAKQYNRLMREEYESIRDFLIMHYALNQHKDLPFWADTANMPLPVSLQERLALFKSSGYLPKKRGSFGEASWLAVLYGQHCWPQFKQQGLALLEDDKLLADLQAQHQHMQKSTYTMPAHSSIFPQKPHS

SEQ ID NO: 89291 - protein, 498 aa, Rheinheimera sp.
  misc_feature (1)..(498): tr|A0A1B7UF71|A0A1B7UF71_9GAMM Tryptophan halogenase OS =Rheinheimera sp. SA_1 OX=1827365 GN=A5320_19990 PE=4 S V=1
MQSSANQGIKKVVIAGGGTSGWVAAAALSKRLKGLVEVVLVESEEIGTIGVGESTIPPVQLFHNILGIDEQEFMRATDATFKLGISFENWGQIGDRYIHPFGTTGKGSFLTDFQHYYLHGQMLGVEASFGDYCYELQAAKAHKFGKSANSQISYAYHLDAGRYARFLRTFSESHGCRRIEGKIATVTQHQNGDIKSLLLASGEEVSGDLFIDCTGFRALLIEQTLQTGFVPWDHWLPCNKAVVVQTESAATIPPYTRAIAHDSGWQWKIPLQHRVGNGLVYAGDYLSDELAKQRLLDGLETPALFEPRFLSFQTGRRKKFWSKNCVALGLSSSFIEPLESTSIYLFMNGVVRLLRLFPFDGVRQALADEYNRQSISELEKIRDFIILHYHQTERTDSPFWNYCRTMQIPDSLAQRMELFRESAHAFQSGEEMFRLESWTHVMLGQRLQPKSYHQLVASLPEQELRQHLQNIRDTIGRAVEKLPSHRDFLRQYCPANDQ

SEQ ID NO: 89292 - protein, 498 aa, Alteromonadaceae bacterium
  misc_feature (1)..(498): tr|A0A2E9KC65|A0A2E9KC65_9ALTE Tryptophan halogenase OS =Alteromonadaceae bacterium OX=1916082 GN=CL587_20610 P E=4 SV=1
MSENKKTKVVIAGGGTAGWLSAFSLATRLGNLLDITLVESDQIGTVGVGEATIPTMRSFHQLMGINEQEFMSATQATFKLGIQFENWGCKDEKYLHSFGEIGQRAWMAEFHAFWMAAKESGYSAGLDDFCLELKAAREGKFALAAGKKPLNYAFHLDATAYAAWLRKKSEAAGVKRIEGKIAAVDLNSETGNITALKLEKGQVIAGDVFIDCTGFRGLLIGEHLGVEYEDWSHYLAADSAIAVQTESVEPPLPYTRAIAHEAGWQWRIPLQTRTGNGIVYSSRFLSDEEAEKTLLANLDGKPLTQPRKLKFKTGRRVKAWHKNCVAIGLSGGFLEPLESTSIHLVTTALIRLMKLFPFSENFGILAERFNQETAVELETIRDFIILHYHQTTRDDSPFWNHYRTMDVPGSLKHRLSIFRENGYVWPDDVSLFRVDSWVQVMMGQGLMPGSYHQAGKLLPPEGLKQQLTALKNQIDNQLAQLPPHAQFIEKYCPAGKVG

SEQ ID NO: 89293 - protein, 517 aa, Simiduia agarivorans
  misc_feature (1)..(517): tr|K4KQI7|K4KQI7_SIMAS Tryptophan halogenase OS=Simidui a agarivorans (strain DSM 21679 / JCM 13881 / BCRC 1759 7 / SA1) OX=1117647 GN=M5M_17000 PE=4 SV=1
MENKAVRKVVIVGGGTAGWLTAGVLAARLRSQSGHAVSVTLVESPAVKTVGVGEGTWPSMRRTLKAIGVSETELIRRCNATFKQGAKFARWVTGSAQDHYYHPLIQPNGFHDFNLAPYWLKQSEQASFSAAVCPQDALCDAGLAPKKITTPEYAGIANYAYHLDAGAFADFLREHCVTRLDVLHRQAHVSEVRSDDQGDIVGVETNQGLIAGDFFIDCTGSQSLLLGQQLQVPFVCKKHQLFVDQALAVHVPYDSDDAPVASHTVSTAQSAGWIWDIGLQNRRGVGHVYSSAHQSPEMAERELMDYIAASGASVENLSPKHIAIHPGHRAQFWKNNCVAIGMSAGFLEPLEASAILLIEIAAGYIADQFPASRFAMEQLARKYNDTFLYRWERIIEFLKLHYVLSQRSDTAFWRDNRNAQSMPESLQQWLSYWREQSPWHGDFDRAVEVFPAASYQYVLYGMGFETRTDWPPVSEQSLARARTLFQQAQSDTNQLLRGLPDHRTLLNKIKHYGLQAV

SEQ ID NO: 89294 - protein, 538 aa, Pseudomonas sp.
  misc_feature (1)..(538): tr|A0A0C5ELJ4|A0A0C5ELJ4_9PSED Uncharacterized protein OS=Pseudomonas sp. MRSN12121 OX=1611770 GN=TO66_16635 P E=4 SV=1
MNKPIKNIVIVGGGTAGWMAASYLVRALQQQANITLIESAAIPRIGVGEATIPSLQKVFFDFLGIPEREWMPQVNGAFKAAIKFVNWRKSPHPSRDDHFYHLFGSVPNCDGVPLTHYWLRKREQGFQQSMEYACYPQPGALDGKLAPCLPDGTRQMSHAWHFDAHLVADFLKRWAVERGVNRVVDEVVEVKQNERGYISSLLTKEGRTLEGDLFIDCSGMRGLLINQALKEPFIDMSDYLLCDSAVASAVPNDDAHEGVEPYTSAIAMNSGWTWKIPMLGRFGSGYVFSSKFTSRDQATTDFLNLWGLSDNQPLNQIKFRVGRNKRAWVNNCVSIGLSSCFLEPLESTGIYFIYAALYQLVKHFPDTTFDPRLRDAFNAEIVYMFDDCRDFVQAHYFTTSREDTPFWLANRHELRLSDAIKEKVERYKAGLPLTTTSFDDSTYYETFDYEFKNFWLNGNYYCIFAGLGMLPDRSLPLLQHRPESIEKAEAMFASIRREAERLRTSLPTNYDYLRSLRDGDAGLSRSQRGPKRAAREIL

SEQ ID NO: 89295 - protein, 519 aa, Thalassotalea sp.
  misc_feature (1)..(519): tr|A0A4V5NUQ3|A0A4V5NUQ3_9GAMM Tryptophan 7-halogenase OS=Thalassotalea sp. ZS-4 OX=2572245 GN=E8M12_01345 PE= 4 SV=1
MNSDAINSVTIVGGGTAGWLTACYLARQLNQEAADTITITLVESPDVPIIGVGEGTWPTMRTTLQRIGVDESRFIRECDVSFKQASKFVNWHRPAQGNTDNFYYHLFDGPGFSWEFNPVPYWLDGSLGFSSYANAISLQEQVCQHHLAPKMMVTPQYQGVFNYAYHLDAGKFSQLLKTVATTELGVNYISANVTDVHLDNDGSIRSLSTDRTDDLGADLFIDCSGFKSLLLGEALKVPFIDLNDVLFVDRAVTIQAPYKTPECPIASQTISTAQEAGWIWDIGLQSRRGTGYVYSSKYSSAEQAEQLLRDYLNDSEAELEARHLQMRVGHRQTFWEKNCIGIGLSAAFMEPLEASAIFLIEAACFMLAEQFPKNQRGMDYVRNQFNESFAFRWQKTVEFIKMHYVLSERDDSPFWRDNKDPASIPEGLQQRLDYWLENPISKYDFSSQYEPFTKESYEFILYGMRPELRMDSPVTSPAQREKAQQQSQWLQQSWQQAKQQLPTNRELLTRLQENDFQKI

SEQ ID NO: 89296 - protein, 502 aa, Sphingopyxis sp.
  misc_feature (1)..(502): tr|A0A0Q7YXK0|A0A0Q7YXK0_9SPHN Tryptophan halogenase OS =Sphingopyxis sp. Root1497 OX=1736474 GN=ASD67_13805 PE =4 SV=1
MDEGPFNLVIVGGGTAGWMCAAACAAKLDRSRFRVRLIESEEIGTVGVGEATLPQMKDFNDFLGLDEVEFMQATQASFKLGIEFVNWGRQGDRYVHPFGTFGRPIGEADFFSYWVRGRNAGVAAPLSGYCFPIVAALQNRFMLPNGDPNDVRNAFAYAYHLDAFLYARYLRGWAEARGIERVEGRIVDVARDANSGNIAAVALASGTSVAGDMFVDCSGFRSLLLGGTLGVDLDDWSKWLPCDSAAAVPSVRSTDFTPYTRSTRRKAGWQWRIPLQHRTGNGYVYARKDISDDEAAATLLANLDGEALAEPRVLRFKAGKRDQAWAHNVVGMGLAGGFLEPLESTSIYLVQMAIMHMLTLLPSRDGIDPALPAEFNRVMDVEYDRIRDFLILHYIANDADAPLWEQVTTMNVPDTLAGKIDRFRQRAFVQAYRDGLFGPPSWQAVFVGQGIVPHAADRLADTLPDDLLADRLGNLAATIALGAKSAPSHADFVASYCPAPAP

SEQ ID NO: 89297 - protein, 545 aa, Dehalococcoidia bacterium
  misc_feature (1)..(545): tr|A0A3D3WUZ9|A0A3D3WUZ9_9CHLR Tryptophan halogenase OS =Dehalococcoidia bacterium OX=2026734 GN=DIT90_01535 PE =4 SV=1
MNVTDLSADVVVIGGGPAGSAAATMLARKGWQVTVLERENFPRDHVGESLLPASIPILEELGALPAVEEAGFLPKPGATMVWGSGSSPWSWYFKETSQRYPHSYQVWRPQFDQILLDNARAAGVTVVEGAHVSEVIFDDGEAVGVEFTNADGVEGEAECRFIVDASGQSTLLARHLEYKQWDPFFQNLAVYAYFTGGDPLPEPDQNNIFIESYQHGWLWSIPLHTGRTSVGAVVDSKIGQEGIQKEGAKAFLESQLSQSTHTKNMLAKAAMDSEPTVLLDWSYTSEKLFGPGFILAGDAACFVDPLFSSGVHLALMSGVLAAAYVTTALNDPSLAEDAGQVYQELYLKEYNQFREMARLFYSSNLSAESYFWEARRITNASHYSPRESFIQAVAGQPPRGYERVVLERGHAPEEFTESIRAVETERRARTEWLAALAGDPQRNQLLNAIPQIAEGVKVEEKPVLAEGEFVRGHVLNTISQPEGTPCSPIVAAVITAVDGQKSVADIVDSLGQHLDQSAHAQLEEAVSRTIEILFVDGAITGLTTE

SEQ ID NO: 89298 - protein, 602 aa, Microcystis novacekii
  misc_feature (1)..(602): tr|A0A552J4C9|A0A552J4C9_9CHRO Tryptophan halogenase OS =Microcystis novacekii Mn_MB_F_20050700_S1D OX=2486266 GN=EWV54_06580 PE=4 SV=1
MNSTITQSREYDVVIMGAGFAGLCQARHLMLNIPNIRVALIDPRPVERTDKDLKIGESLIEVAALFLCKELGLHDYLIENHTPKSGLNFHWPKDTSKTASLDDYYHVWANRQTPVGSFHLQRAKFEQDLLVMNCQMGADFYEGRVKDVALTSGDELKTVYAKVGEENITLQAKHVIDAAGRNFIIGRKTDNVLSGPENLLGLNNGSAWLRVKNIDRTIFHSGYHPEGASTSHYYATNHYFGQGHWLWMIPIDKHSMELSIGIIHHHEVIPAHSINNLDKFANFLKSNHTILSQLIESGEVVDFHYWPKIAHKSKVLFSPDNWYVIGDAAHIFDAFYSYGTTMIAFEVESVTEIIRAKLAEEAAAEQKRSAYNDFNLAYARTVNCLYRDHAYQLGHASVMSWRIYFEYMWWFGVHVPTYIGKWHLDLNFIPRYVKIANGNVDGIFADLCKEFHQLVEEGANIGLMDAYRADQLWGNYGTLKHFDDFLENTKFEPRRCNVFASMKAVYFYIAIWYALFQWKAFGIAGWLNPKHWYYFGRMLKLSIQATIAEVIYKRKTRGIPDNTQIEKMREEFKNYHYQPQKKSPSVVQNVISERVKIESFPA

SEQ ID NO: 89299 - protein, 498 aa, Pseudoalteromonas luteoviolacea
  misc_feature (1)..(498): tr|V4H3S7|V4H3S7_9GAMM Tryptophan halogenase OS=Pseudoa lteromonas luteoviolacea 2ta16 OX=1353533 GN=PL2TA16_04 963 PE=4 SV=1
MTKRIQNVLIVGGGTAGWLSASLLKRILKDQINITLIESDDIGTVGVGEASIPPMVNFNAALGLDERTFIEQTKATYKLGIEFEGWGYQDSRYMHAFGELGKSFPFCDFFQVWLKAKQQGLTESLAEYSLNTQAAQANRFAHLQQIPNTQLPGLTYAYHFDAGLYAKLLSRHSQNQGVKRVEGKIIEVLTDPKTGYVTEVVMENDERHSADMYLDCSGLKGLLIEQTLNVGFEDWSHWLPCDSAWALPSEQLDGDIKPYTRAIAKEAGWQWQIPLQHRVGNGYVFSSKFISEQDAKESLLQSLPSSALAEPKLIKFKTGMRRKQWQGNVFAVGLASGFLEPLESTSIHLIQTSILRLIRHFPFNEISDNAVSNVNTEFGNEMKQVRDFIILHYKLTERGDTRFWQWCKNMPIPASLQSKIALFNDTGHCTAKTDDLFQNVAWQQVMVGQGLLPKSHHPLAEQFSDEQLTSLLDSLRTLLRSTVAKLPSHQVFIDKMTK

SEQ ID NO: 89300 - protein, 521 aa, Xanthomonas arboricola
  misc_feature (1)..(521): tr|A0A2S7BDN0|A0A2S7BDN0_9XANT Tryptophan halogenase OS =Xanthomonas arboricola OX=56448 GN=XarbCFBP7697_20650 PE=4 SV=1
MTDTAPSEPQQRPVRRVVIAGGGTAGWMAAAALSKVLGRHLQIVLVESDEIGTVGVGEATIPSLVTFHRLLEIDEAAFMAATQATIKLGIGFEHWRDVDRHYIHSFGHTGTDHWSAGFQHFWLKGRQRGLARDFGDYCLELRAAQEGRFAHLPNGGMNYAYHLDAGLYARFLRRFSEGFGVQRIEGRIGNVETHAYSGYLTALTLDNGTRVEGDLFLDCTGFAGLLIGKTLGVGTDDWSQWLFADSALAVQTESVGAPVPYTRSRADQAGWMWRIPLQHRVGNGIVYSSRYMDQDSAAQVLQRNLSGRALTQPRALRFTPNQRHRVWEKNCVALGLASGFLEPLESTNIHLIQRGIIRLMQTFPQVIDNIDIAEYNRQAAAEITHIRDFVILHYHATDRRDTPFWRDCAAMDIPDTLRHRVELFRQSGRVFHQANELFAENSWVQVMLGQGITPKQHHPVADLMGDAELRHFLETIRTRVDAALARLPAHADFLHRYCPAPPLPEPATQLPADAALVTGVR

SEQ ID NO: 89301 - protein, 495 aa, Thalassotalea sp.
  misc_feature (1)..(495): tr|A0A4U1B8H8|A0A4U1B8H8_9GAMM Tryptophan 7-halogenase OS=Thalassotalea sp. ZS-4 OX=2572245 GN=E8M12_04230 PE= 4 SV=1
MQQPIKKLVILGGGTSGWISAALTKKLLGNAIDVELVESNEIGTVGVGEATIPPIKLLNDVLGLNEAEFLRETQGTIKLAIKFENWKNENHSYYHTFGAAGKSMAFCHFHHFLKRTGELENDSKLWDYDLNALLAEDGKYAHIRHQDPILEVPYAYHFDAGLYAKYLRKFSEKIGVKRTEGTVARVHQNQQSGFIQTLELKDGTLIDGDLFLDCSGFRGLLIQQTLQTGYEDWSHWLRCDRAVAVASERFDKTLPYTRSIAHKGGWQWRIPLQHRNGNGLVYNSAYYTDDEATDLLLGNLDSKPLTDPKIIKFQTGRRYQQWHKNVIAVGLSSGFLEPLESTSIHLIQSAVVRLVHLFPQHGINQAIVDEYNKQSKLEFEQIRDFIILHYHVNQRTDSLFWQDMRNMAIPDTLAHKIELFKQDGRLFRDQNDLFLESSWLQVMLGQGLVPNSYHPMANAMPEAQVKSMLQKIKAIKHEPLASIPSHDEFLKRYCG

SEQ ID NO: 89302 - protein, 505 aa, Xanthomonas arboricola
  misc_feature (1)..(505): tr|A0A381LTF7|A0A381LTF7_9XANT Tryptophan 7-halogenase OS=Xanthomonas arboricola OX=56448 GN=CPBF424_32270 PE= 4 SV=1
MSQAPIRKVVIAGGGTAGWIAACALSHQFRDLLEITLVESEQIGTVGVGESTVPPIRSFHRFLQIDEQEFLRAVAGTFKLSISFEHWRRQGERYIHPFGITGQSTLVCAFHHLWLESQRRGMPGSFGDYCLETVASRLDRFALLREPAVNYAYHLDAALYARFLRTRSEACGVRRIEGRIQQVTLQPDSGDVASLVLEDGQVLEGDLFIDCSGFRGLLIEQALHTGYEDWSHWLPCDRAVAVQTQALGPPVPYTRAIAHEAGWRWQIPLQHRVGNGLVFSSKHLSDDEAHARLLRDVAAPALKDPWLVPFRTGRRRKAWNRNVVSLGLASGFIEPLESTSIHLTIAAVVRLITLFPADGIAPSQVELFNDISRAEMEHVRDFIILHYHATQRDEPLWRQCRAMELPASLALRLRAWRERAHAWQAADELFRVDSWTHVLMGQGIVPAQHHPLARAISDHDLRRLLDGIAQPIRHAVEQMPSQQAFIDAYCKAGERVWGLRSPVVA

SEQ ID NO: 89303 - protein, 471 aa, Stappia sp.
  misc_feature (1)..(471): tr|A0A1H2HHG4|A0A1H2HHG4_9RHOB Tryptophan halogenase OS =Stappia sp. ES.058 OX=1881061 GN=SAMN05428979_2902 PE= 4 SV=1
MSDLRQTDIAVIGGGATGWMAAAYLKRFLPSAGITVMESPTVAPLGVGESLNDISRRFNSALGLDEHDFLRATDGTYKIGIRFENFDRPGGDFYHPFGRPGTHHRARPDAQEAYAATGLCRQNRFDPGQEARGYHVCATRYSAVLRDFARALGVHHIKRHARDVERIGDDVASVEGVSADLFIDCTGFRALLIGEALDTPFEPLSDVLFNDAAVALRVPYDAVSERPFPYTRCTAMDAGWIWRIPLWSRLGAGYCYSSAHISPAQAEADLRAELKLPPGTPDFAGTSDTAWGDHDLKPMHIAFRHGRHARARRGNCVALGGAFGFIEPLESTGLSMTQAAIMALVPGLADLGGWDRLCRDRFDTTVDFIFAHYWLSKRMDTAYWRDLKQCTPSRRLSRVIEAAGRGDYRAIETDPGFFYRPSNWDVVLSGMGAFDDRPRIVATDPEDRHCPDFVSHLATHIHGPTKWSQLQ

SEQ ID NO: 89304 - protein, 507 aa, Litorilituus sediminis
  misc_feature (1)..(507): tr|A0A4P6P7W6|A0A4P6P7W6_9GAMM Tryptophan 7-halogenase OS=Litorilituus sediminis OX=718192 GN=EMK97_07160 PE=4 SV=1
MQIKRIAIVGAGTAGWLAANHLGSELNAEENIEITVIESPDVPTIGVGEGTVPYIMKGLERFGISEAELLVSCDATFKQGIKFVNWLDSEKHGQDNYYYHPFDAPYPQGFNATPYWLAHEQHRPFDDVGIQARVCELGLAPKLKSSGEYQGQLSYAYHFDAAKFAQLLANNAKQRFKVQHQFATVTGAKLCDKGNISHLETKQGELLAYDFYVDCSGFSSILIDKALKVPFISKADELLTDTVLVQQVPISEEEALNPYTTATAHKAGWIWDIPLTTRRGTGFVYSSRHMDEQEAKALYAEYLGIDSKDFNPRKLPMKIGYRETFWQNNCVALGLAQGFLEPLEATSILLSDFSAELLARNFPRELAEIDSTTPYYNEVVSYAWQRTVDFIKLHYCLSDKTDSAFWCENRDPATYSDELIQRLNKFKSKPPQQSDFFSRFDMFDDKNFLYVLYGMKYQTKALAISDAEQQHSKSLLLQNDDLVAKAPEHLMKHKDWLLGLKAAMQAR

SEQ ID NO: 89305 - protein, 535 aa, Verrucosispora sp.
  misc_feature (1)..(535): tr|A0A2G7D1E5|A0A2G7D1E5_9ACTN Tryptophan halogenase OS =Verrucosispora sp. CNZ293 OX=2035249 GN=CLT74_1059 PE= 4 SV=1
MTVSGAAAKNTRDPGRTQRVVIVGGGTAGWMTASYLAAAFGKRVDVTVVESATVGTIGVGEATFSDIRHFFEFLRLEESEWMPACNATYKLAVRFENWREPGHHFYHPFEQMASVDGFPLSDWWLRYPTTSRFDKDCFVMASLCDAERSPRYLDGSLVDQGFVEQTHDETSARSTIAEYQGAQIPYAYHFEAHLLAKFLTGYSTQRGVKHVVDNVVDVALDDQGFISHVRTAEHGEIAGDLFVDCTGFRALLLNKALDEPFVSYQDTLPNDSAVALQVPLDMDSKPLRPCTTATAQDAGWIWTIPLISRIGTGYVYASDYATPEEAERVLREFVGPEAADVSANHIRMRIGRSRRSWVKNCVAVGLSSGFVEPLESTGIFFIHHAIEQMVKYFPSGRGDDLLREQYNRSVTHVMDGVREFLCLHYRGAKRVDNQYWKDTKTRVIPDALAERIEIWQHKVPDSESIYPHYHGLPPYSYNCILLGTGGIDVRHSPAVELADERAALAEFERIRLKAEKLVQELPTQNQYFAAMRANA

SEQ ID NO: 89306 - protein, 511 aa, Alphaproteobacteria bacterium
  misc_feature (1)..(511): tr|A0A2N3DIP4|A0A2N3DIP4_9PROT Tryptophan halogenase OS =Alphaproteobacteria bacterium HGW-Alphaproteobacteria- 14 OX=2013660 GN=CVT75_00440 PE=4 SV=1
MTDGAPASGPTPLKSIVIVGGGSAGWMTAAALADAVGSECAITLIESDAIGTIGVGEATIPPIRNFNRRLGIDEATFVRETQGSFKLGIEFVDWGRQGHSYFHPFGQYGAEFDQVPFYHHWMREYLEGRVAGPIDDFAMCWAMARAGKFTHPSADLRLIQSTFDYAYHFDATRYAAFLRRFAEARGVTRVEGRVVDVGLRGEDGFIDSVTLENGTHIAGEFFIDCSGFRGLLIEDALEAGYDNWQHWLPCDRAVAVACESGDFTPYTRSTAKAAGWQWRIPLQHRTGNGYVHCSEFISEDEASAELVATLDGKPLADPRPLRFIAGRRREFWKRNCVAIGLSAGFMEPLESTSLHLIQYGILRLIALLPDSGMSPLLAREYNAQTTAEYERIRDFLILHYKASERDDSELWRYCAAMPIPDSLQYKIDHFRDYGLLVSDERELFANPSWIAVYLGQGIVPKRAPALAAMRSGVPVAERLAQIRSAMDEAVAAMPSHGEFIARHCAAPLPTA

SEQ ID NO: 89307 - protein, 505 aa, Xanthomonas arboricola
  misc_feature (1)..(505): tr|A0A2S7BK42|A0A2S7BK42_9XANT Tryptophan halogenase OS =Xanthomonas arboricola OX=56448 GN=XarbCFBP7697_07330 PE=4 SV=1
MSQAPIRKVVIAGGGTAGWIAACALSHQFRELLEITLVESEQIGTVGVGESTVPPIRSFHRFLQIDEQEFLRAVAGTFKLSISFEHWRRQGERYIHPFGITGQSTLVCAFHHLWLESQRRGMPGSFGDYCLETVASRVDRFALLREPAVNYAYHLDAALYARFLRTRSEACGVRRIEGRIQQVTLQPDSGDVASLLLEDGQVLEGDLFIDCSGFRGLLIEQALHTGYEDWSHWLPCDRAVAVQTEALGPPVPYTRAIAHEAGWRWHIPLQHRVGNGLVFSSKHLSDDEAHAKLLRDVAAPALKDPWLVPFRTGRRLKAWNKNVVSLGLASGFIEPLESTSIHLTIAAVVRLISLFPADGIAPSQVELFNDISRAEMEHVRDFIILHYHATQRDEPLWRQCRAMELPESLALRLRAWRERAHAWQAADELFRVDSWTHVLMGQGIVPEQHHPLARALSDRDLRRLLDGIAQPIRHAVEQMPSQQAFIDAYCKAGAGVWGLRSPVVT

SEQ ID NO: 89308 - protein, 505 aa, Xanthomonas arboricola
  misc_feature (1)..(505): tr|A0A2S6YU55|A0A2S6YU55_9XANT Tryptophan halogenase OS =Xanthomonas arboricola OX=56448 GN=XarjCFBP7652_08825 PE=4 SV=1
MSQAPIRNVVIAGGGTAGWIAACALSHQFRELLEITLVESEQIGTVGVGESTVPPIRSFHRFLQIDEQEFLRAVAGTFKLSISFEHWRHQGERYIHPFGITGQSTLVCAFHHLWLESQRRGMPGSFGDYCLETVASRVDRFALLREPAVNYAYHLDAALYARFLRTRSEACGVRRIEGRIQQVTLQPDSGDVASLLLEDGQVLEGDLFIDCSGFRGLLIEQALHTGYEDWSHWLPCDRAVAVQTEALGPPVPYTRAIAHEAGWRWHIPLQHRVGNGLVFSSKHLSDDEAHAKLLRDVAAPALKDPWLVPFRTGRRLKAWNKNVVSLGLASGFIEPLESTSIHLTIAAVVRLISLFPADGIAPSQVQLFNDISRAEMEHVRDFIILHYHATQREEPLWRQCRTMELPESLALRLRAWRERAHAWQAADELFRVDSWTHVLMGQGILPEQHHPLARALSDRDLRRLLDGIAQPIRHAVEQMPSQQAFIDAYCKAGASVWGLRSQVVT

SEQ ID NO: 89309 - protein, 501 aa, Tolypothrix sp.
  misc_feature (1)..(501): tr|A0A218QV22|A0A218QV22_9CYAN Putative tryptophan halo genase OS=Tolypothrix sp. NIES-4075 OX=2005459 GN=NIES4 075_66370 PE=4 SV=1
MSTLPKFTQVLVIGGGPAGSTTATLLAREGFDVTLMEKAVGPRYHIGESLLPSSMEILELTNAKEKVEAYGFQRKEGAYFEWGTDKWSFDFGQLNGKQKYSYHVRRADFDKLLLDHATSQGVKVFEGTEVRELSFNGARPQSAIWSQNSGDNSSGEISFDILVDASGRAGVMATRYLKNRQQNQVFQNIAVWGYWKGAGKLTEAPAGAFVGGSTEDGWLWGIPLHDGTLSVGVVMHKESYKARRSTSLEEFYLGAIAESPLMTKLLTQAELVSSVQAEQDYSYAAENFCGPGYFLIGDAACFLDPLLSTGVHLANLSALLASASITSLLRNEVSENQAISFYEKSYRQAYLRFLSLVSFFYDKKRGTEAYYEEAQELAHNDYRDSAPNTAFVNLVSGMEDLTEAQNGIDNLVIEKISQRAARSLSLEQVQEDLDGEKMDTQIMNVMEGMYTFSKDLSVEAAIDGFYVVTRPRLGLGRVSEKVEESAQKRLADSNAPSPSIR

SEQ ID NO: 89310 - protein, 500 aa, Dehalococcoidia bacterium
  misc_feature (1)..(500): tr|A0A2D6N4L5|A0A2D6N4L5_9CHLR Tryptophan halogenase OS =Dehalococcoidia bacterium OX=2026734 GN=CL878_05025 PE =4 SV=1
MRSDFKPRRIIVAGGGTAGWMAAAAIAHTMGDAIDLTLVESDAIGTVGVGEATIPPLVLFNRLIGIGEADFMRETQATFKLGIEFENWKRDGEKYFHSFGNTGRDHWSAGFQHFWAEGRERGHTVSYDDYCLELVAAYAKKFAHLPENGLNYAYHLNATAYAAYLRRIAEQAGAKRVEGKIGQVDIDGETGNIAAIGLEDGTRLEGDLFVDCTGFRALLIEGALHVGYDDWSHYLPCDSAIAVQTELAGPPVPYTRAIAHDAGWQWRIPLQHRGGNGIVYCSRYLSQDAAHDRLMSTLEGKPISEPRAIPFTTGARRKQWHRNCIAIGLSSGFLEPLESTSIHLIQRAVIRLLRMMPAGDVSERDIAEFNDQQLTDMIQVRDFLILHYKATERRDSPFWRQCATMDIPDSLTQKIELFRETGRVFRKNEELFVENSWIQVMLGQGIMPRAFHPVAKKMTDEELAHFLQTLCEKVARTVANLPDHHAYVAEYCGAKTAQAA

SEQ ID NO: 89311 - protein, 521 aa, Aliiglaciecola lipolytica
  misc_feature (1)..(521): tr|K6X7J4|K6X7J4_9ALTE Tryptophan halogenase OS=Aliigla ciecola lipolytica E3 OX=1127673 GN=GLIP_3983 PE=4 SV=1
MTNSVHTHQPKKLLIVGGGSAGWITALYLHKYFNQQGQHLDISLIESDHIGPIGVGEATVHSIRFLFAALGLDEAELMRDTNATLKSGILFRNWMKPVNGKTHEYFHPFEQQRHSGNLDISSEWILGEHYLHQRYDQGTCASSAFLEGMQCPKAPMSHPYQGLVPYGYHLDATLLGQFLQKKGLEAGIKRVVDTIEVVHVEDGEISSVSSKSTTYEADFYIDCSGFRGKLIEALAEDNWISFEDELPCNKAVAIQREYLPGEVPKPYTTATALSHGWAWQIDLVNRQGTGYVYDGKRLSKDQAEQELRALLGDAVTTKDALHLDMKVGCRKAFWVGNCLSVGLSAGFIEPLESTGLHLINLGARLFATHFTAGQCNQTIRDSYNRQLSGIYDDLKQFIVLHYCLTDRDDSAFWQQAQRSADNNPQLTEKLQIWKHKICEFMDLAGGFTTTFSDENYRYVLYGMQHFPSLHACIDKQQNHTLFSQLKKHSDNLMRQSSSHQAFLERLHQRPLFERQETKNER

SEQ ID NO: 89312 - protein, 505 aa, Xanthomonas campestris; identical to SEQ ID NO: 89083
  misc_feature (1)..(505): tr|A0A1T1RBS7|A0A1T1RBS7_XANCA Tryptophan halogenase OS =Xanthomonas campestris pv. vitiscarnosae OX=487900 GN= Xvtr_04955 PE=4 SV=1

SEQ ID NO: 89313 - protein, 496 aa, Proteobacteria bacterium
  misc_feature (1)..(496): tr|A0A3E0MQY4|A0A3E0MQY4_9PROT Tryptophan 7-halogenase OS=Proteobacteria bacterium OX=1977087 GN=DWQ28_11990 P E=4 SV=1
MSHQPIKRVVIVGGGTAGWNAAALLARTLSKVISVTLVESDDIGIVGVGEATIPPIINFNNALGFNEADFLKATNGSIKLGIQFENWGEDGDSYMHAFGNIGKDFAFCTFHNFWLRSQAEGIESNFWDFSLNYQTAKNNKFAKVQQLPGTDLAGIAYAYHFDAGLYAKYLRGFCEAKGVKRVEGIINKVNQCPDTGFIQSVALESGQVVEGDLFLDCSGFRGLLIEQALETGYEEWGHWLPCDRAMAVPTASTGEIRPYTRSIAHKAGWQWNIPLQHRTGNGHVYCSRYISDDEARKVLLDHVEGEPLAEPRNIPFKTGRRKKQWNKNVISFGLASGFLEPLESTSIHLIQAGLRRLVQHFPHNGIRETEVDEFNRQSQIEFEKIRDFIILHYKVNQRTDSQFWIDCRNMDIPDSLAHRIELFRSSGKVFKDNDELFHEIAWQQVMIGQRLMPEDYHPLAHSITSEQLEGLLGDLKTLIGNTVSKLPSHNQFLQSQ

SEQ ID NO: 89314 - protein, 589 aa, Microcystis novacekii
  misc_feature (1)..(589): tr|A0A552J4H1|A0A552J4H1_9CHRO Tryptophan halogenase OS =Microcystis novacekii Mn_MB_F_20050700_S1D OX=2486266 GN=EWV54_06575 PE=4 SV=1
MNTTQALHYDVVIMGAGFAGLCQARHLMLKIPNIRVALVDPRPEQRTDKDLKIGESTIEIAALFLAKELGLHDYLIENHAPKQGLNFHWPKNPAKTETIDDYYHAGSNRQVPIPSFQINRAKFEQDLLKMDKAMGITFYNGQVVDVDLTPGDAIKTVKIKVGDERMELQAKHVIDAAGRKFIIGRKTDNLLFGPENLMGLNTGSAWVRVKNVDRTIFHSGYDPLNASTSHYYSTNHYFGEGHWLWMIPIDTQTMELSIGVIHHHDVINSTQVNSREKFHDFLRNNHQILANIIDSGEAVDFHYWPRISHTSKTLFSPDNWYVLGDAAYIFDAFYSYGTTTIALAIEGITEIVRAKLAGEESAEQKRAAYNEFNLAYSRSVNCLYRGHAKQLGQASVMSWRIYFEYMWWFGVQVPMYVGKWHLDLTYIPIFLKTLNSNIDGLFADLNEQFTELADKDVNIGLMDCYRGDQLFNGYHTLKHFDDFLENTKLEPRRCNVFAGLKATCFYAALWYALFQWKGFGIQGCLHPHHIYHFLRLLGLSGQATIGELIYKFKTKGLPANSEIEAMRQEFKTYQYQPKLQPWLTEATNS

SEQ ID NO: 89315 - protein, 505 aa, Thalassotalea sp.
  misc_feature (1)..(505): tr|A0A4U1B9R9|A0A4U1B9R9_9GAMM Tryptophan 7-halogenase OS=Thalassotalea sp. ZS-4 OX=2572245 GN=E8M12_01340 PE= 4 SV=1
MNKKRLLILGGGTAGWMTALLMAKRLGENIDIILVESPDIPVIGVGEGTTPYIKQFFKQLDIREQDWMRECQATYKCGIRFPDWSTKIGYQSYFHPFFSPLDKQVGEAFFHNVNCRRAGIDVNANPSHYFVTSYLGERGLSPHCYQALPFELDYAYHFDAALLGNYLRKIAVEIGIIHRQANIISVGHQVNGNIEALITDSGDKLTADLFIDCSGFRALLLAEELNVPLHSYADSLLNNAAVAIQVDHQQSSCLDTLLPTETRSSALSNGWMWNIPLNQRWGNGYVYSRDYISANSAEQELRVALAIDDSVDARHLSMQVGRRTRHWQNNVIAVGLSQGFVEPLEATALMLVQYTIEHACAVIEKSDSQNLQDIADGEKRTFNDIINAMFDGVRDYILVHYLTNSRDDTKYWRDNRHGLMIPDTVRHLLEVWQSDADIEQELGGYFKTSMYSKASWYCLLAGMGVFPELVDDNKRSSHSIAPLEPVIAYNQNCMQHFRPQREIIG

SEQ ID NO: 89316 - protein, 420 aa, Shewanella woodyi
  misc_feature (1)..(420): tr|B1KLX6|B1KLX6_SHEWM Tryptophan halogenase OS=Shewane lla woodyi (strain ATCC 51908 / MS32) OX=392500 GN=Swoo _4606 PE=4 SV=1
MQTASATQGKQADIDVVIIGAGPSGSIAASLLHQAGKRVVVIEKQHFPRFSIGESLLPCCMQLIEEANMLDAVNAAGFQFKNGAAFRYRDQYINFDFTDKFTPGPGTTFQVERGNFDKLLADTAAEQGVEIRYGETVESVDLSADPTLSIRDEAGKLYTIEAKYLLDASGFGRVLPRLLNLEKPSNLANRSAVFTHIQDNIGDKEVDGKPFDRNKILVSVHPKNRDIWYWLIPLSEGKCSLGVVGEPHLLSGLEDNLEEMLLDMVKQEPGLNQLLSDAEVLRECALLKGYSANVSTLATDKFALLGNAGEFLDPVFSSGVTIAMQSASMAVKCIARQLNGTPVNWEQEYSIPLMRGVDTFRTYVEAWYDGRFQDVIFYDDPDNKIKQMICSILAGYAWDESNPFVNDSRKRLNLIVELCK

SEQ ID NO: 89317 - protein, 506 aa, Xanthomonas arboricola
  misc_feature (1)..(506): tr|A0A2S7AFM2|A0A2S7AFM2_9XANT Tryptophan halogenase OS =Xanthomonas arboricola OX=56448 GN=XarjCFBP7645_12865 PE=4 SV=1
MIPAPLRNIVIVGGGTAGWMAAAAFARVLGPGFKVQLIESEQLGTVGVGEATVPHIKAFNNLLGIDEAEFVRQTQGSFKLGIEFVDWQRPGTSYIHGFGTQIGHPLGLLPFHQYWIKQRARGKAQPLGTYTLNTVAAMRGKFMTSAGDVPANSPLANIAYAYHFDATQYARFLRTYAEQRGVTRIEGLVEQVRLHADSGHVQALQLASGQVVGGDLFIDCSGFRGLLIEEALHTGYHDFTHWLPCDRALAVPSENVGPPTPYTRSTARAAGWQWRIPLQHRTGNGYVYSSAHISDDEAAATLLANLEGKPLADPRPLRFTTGRRKQFWNRNVVALGLASGFLEPLESTSIHLIQAGISRLLELFPREGISPVLVQRYNDRLAFEFDRIRDFLVLHYHATERDDSAFWRHCRTMPITPELQTTLDLFRDSGRFYRNAEEMFAEISWVQVMVGQGILPRGYHPLVDQVPDHDAERFLASVAQTIGHCVDVMPTHQQFIDRYCKAAAPR

SEQ ID NO: 89318 - protein, 530 aa, Thalassotalea sp.
  misc_feature (1)..(530): tr|A0A4U1B3M8|A0A4U1B3M8_9GAMM Tryptophan 7-halogenase OS=Thalassotalea sp. ZS-4 OX=2572245 GN=E8M12_11735 PE= 4 SV=1
MNNIAPNDRENRQRPIQRVLIVGGGTAGWLTANHLASQLKPSPDKGVEIILVDSEHIPAIGVGEGTVPMLRHSLQAFGIDEGRLIQECDATFKQGIKFIDWLDTPPFGQSSHYHHLFDYPLISEIPDLTAYWLQLPVDKRPAYTDFVAFQGQVCDKGLAPKHITSAQYQGHCQYAYHLDAAKFTRLLQQHATEHFGVTLIKANVSDVTLDPQGDIAAVVTDCAGAINADLFVDCSGFNAILLEKALGVGFIRKNQSLFVDKALAVQVPYQDAEQPIPSFTKATAKSAGWVWDIGLTTRRGCGYVYSSAHLSESLAEQDFRNYLGDTKEDYEIRQIDMNVGYRQTFWHKNCVAIGLSQGFVEPLEATGLLLFDVTAKMLAQQFPSHRALMPLVAEQFNQNVRHSWERVIDFIKLHYFLSRRDDSDFWHDNRQWSGLSPVLQERLQRWQWQLPSAYDFASGYEIFNLENYLYVLYGMEFCTDLSQSQYRYNEQQRVAQLQHQLQQHRQQLLKQLPEHRQLLAKIRQFGLQRQ

SEQ ID NO: 89319 - protein, 512 aa, Lysobacter capsici
  misc_feature (1)..(512): tr|A0A0S2FWZ2|A0A0S2FWZ2_9GAMM Tryptophan halogenase fa mily protein OS=Lysobacter capsici OX=435897 GN=LC55x_4 850 PE=4 SV=1
MHNDAERGASATRPIKRVVIAGGGTAGWMAAAAISNIFGATLQISLIESEEIGTVGVGEATIPTLSTFHRLLDIDEREFMAATQGTIKLGISFENWTTEQHRYIHSFGSTGKDHWSAGFQHFWRRGRELGLAGSYDDYCVELQAALQGKFAHLKNYRMNYAYHLDASLYARFLRTMSEGNGCRRIEGKIVEVLTDADSGFITALRLERGEVIEGDLFIDCTGFRALLIDKTLGVGFEDWSHWLLNDSAIAVQTTSVCDPVPYTRAIAEQWGWQWRIALQHRVGNGIVYSSRHVGDDEAKQALLCSVDGEILKNPWPVRFRPGRRLQCWSHNCIALGLAGSFIEPLESTTIHLIQRGITHLIRSFPQVISQAGVDEYNTQMADELQHVRDFVVLHYHATQRRDSPYWEYVSSMTLPDTLRRRIELFRETGTVFHVPGELFAENSWIQVMMGQGITPKTHHPTADTMSEADLRRFLDDIRNHVDTIVRALPSHQAYLNQYCPSAPRATVPAHVA

SEQ ID NO: 89320 - protein, 522 aa, Proteobacteria bacterium
  misc_feature (1)..(522): tr|A0A3E0N6X7|A0A3E0N6X7_9PROT Tryptophan 7-halogenase OS=Proteobacteria bacterium OX=1977087 GN=DWQ28_06005 P E=4 SV=1
MVNHPIQHIVIVGGGTAGWLTANVIAARFRPEQGLGVRVTLVESPNVPTIGVGEGTWPSMRTTLKDIGISEADFIRSCDASFKQGTWFKDWIHKGDSCYYHPFSLPEGFDTVNLAEHWLAGEAGEISFAEAVTPQYAACELGKAPKQIGIPNYAYTVNYGYHLDAGKFASLLTKNATEKLGVTHISADVVSVNSDNDGYITSVMTEQSGEIYGDLFVDCSGFQSLLLGQHFGVENVSIDQYLFNNAAVAVQVPYAEEDAPIATTTHSTAQENGWIWDIGLQHRRGVGHVFSKAFQTHDQTLQVLDTYLKETGHTTGLDDLAPRLLEFEPGYKRHFWVKNCLGIGLSAGFIEPLEASALVLVELSATALANQMPRHRGDMEVISGRFNREFASRWSQIIDFLKLHYVLSKRDDSAYWQENREGDSIPDSLKENLVVWANRPPWYHDDLRRDEMFPAASYQYVLYGMGFESQPAFMATRTGDQQREVARRLFAETQKKAGKYGQFLPPNRFLMNQLRDQDFARI

SEQ ID NO: 89321 - protein, 491 aa, Nocardia terpenica
  misc_feature (1)..(491): tr|A0A291RRG3|A0A291RRG3_9NOCA Tryptophan halogenase OS =Nocardia terpenica OX=455432 GN=CRH09_30915 PE=4 SV=1
MSVEDFDVVVAGGGPGGSTVAALVAMQGHRVLLLEKETFPRYQIGESLLPATVHGVCRMLGVTDELAEAGFPLKRGGTFRWGARPEPWTFHFSISARMAGSTSFAYQVERARFDEILLNNAKRKGVVVRVGCPATDVVEDGERVTGLRYTDPDGNEREVSARFVIDASGNKSRLYSHVGGTRNYSEFFRSLALFGYFEGGKRLPEPASGNILSVAFDSGWFWYIPLSDTLTSVGAVVRREMAEKIQGNREAALEALIAECPMISDYLSQARRVTTGKYGELRVRKDYSYQQTNFWRPGMILVGDAACFVDPVFSSGVHLATYSALLAARSINSVLAGDLDEKTALTEFEARYRREYGVFYEFLVSFYQMNVNEESYFWQAKKITKNQNTEIESFVELIGGVSSGETVLTAADKIAERSAEFAAAVDRMAGGDTDNMVPMFESQVVQQAMQEAGQVQMKAILGEDAEPELPLFPGGLVASPDGMKWLPYHPE

SEQ ID NO: 89322 - protein, 169 aa, Proteobacteria bacterium
  misc_feature (1)..(169): tr|A0A4Q6F4Y1|A0A4Q6F4Y1_9PROT Tryptophan halogenase (F ragment) OS=Proteobacteria bacterium OX=1977087 GN=EOP0 2_29720 PE=4 SV=1
MDGKAIKAIVIVGGGTAGWMAAAALSKVLGRTYDIRLVESDAIGIVGVGEATVPHIRAFNSLLRIDETAFVRETQGTFKLGIEFVDWRRIGESYMHGFGTEIGHPLGLLPFHQYWIKARQAGRAGDLGQYTLNTVAAMAGRFMVSATDVPPNSPLANISYAYHFDAALY

SEQ ID NO: 89323 - protein, 506 aa, Xanthomonas arboricola
  misc_feature (1)..(506): tr|A0A2S6Y8J6|A0A2S6Y8J6_9XANT Tryptophan halogenase OS =Xanthomonas arboricola OX=56448 GN=XarjCFBP7653_15265 PE=4 SV=1
MLPAPLRNIVIVGGGTAGWMAAAAFARVLGPGFKVQLIESEQLGTVGVGEATVPHIKAFNNLLGIDEAEFVRQTQGSFKLGIEFVDWQRPGTSYIHGFGTQIGHPLGLLPFHQYWIKQRARGKAQPLGAYTLNTVAAVRGKFMTSAGDVPANSPLANIAYAYHFDATQYARFLRTYSEQRGVTRLEGLVEQVQLHADTGHVQSLQLASGQVVSGDLFIDCSGFRGLLIEEALHTGYHDFTHWLPCDRALAVPSENVGPPTPYTRSTARAAGWQWRIPLQHRTGNGYVYSSAHISDDEAAATLLANLDGKPLADPRPLRFTTGRRKQFWNRNVVALGLASGFLEPLESTSIHLIQAGISRLLELFPREGISPVLVQRYNDRLAFEFDRIRDFLVLHYHATERDDSAFWRHCRTMPITPELQTTLDLFRDSGRFYRNAEEMFAEISWVQVMVGQGILPRGYHPLVDQVPDHDAERFLASVAQTIGHCVDVMPTHQQFIDRYCKAAAPR

SEQ ID NO: 89324 - protein, 506 aa, Xanthomonas arboricola
  misc_feature (1)..(506): tr|A0A2S6YUE2|A0A2S6YUE2_9XANT Tryptophan halogenase OS =Xanthomonas arboricola OX=56448 GN=XarjCFBP7652_06485 PE=4 SV=1
MIPAPLRNIVIVGGGTAGWMAAAAFARVLGPGFKVQLIESEQLGTVGVGEATVPHIKAFNNLLGIDEAEFVRQTQGSFKLGIEFVDWQRPGTSYIHGFGTQIGHPLGLLPFHQYWIKQHARGKAQPLGAYTLNTVAAVRGKFMTSAGDVPANSPLANIAYAYHFDATQYARFLRTYAEQRGVTRIEGLVEQVQLHADSGHVQSLQLASGQVVSGDLFIDCSGFRGLLIEEALHTGYHDFTHWLPCDRALAVPSENVGPPTPYTRSTARAAGWQWRIPLQHRTGNGYVYSSAHISDDEAAATLLANLDGKPLADPRPLRFTTGRRKQFWNRNVVALGLASGFLEPLESTSIHLIQAGISRLLELFPREGISPVLVQRYNDRLAFEFDRIRDFLVLHYHATERDDSAFWRHCRTMPITPELQTTLDLFRDSGRFYRNAEEMFAEISWVQVMVGQGILPQGYHPLVDQVPDHDAERFLASVAQTIGHCVDVMPTHQQFIDRYCKAAAPR

SEQ ID NO: 89325 - protein, 569 aa, Fimbriimonas ginsengisoli
  misc_feature (1)..(569): tr|A0A068NLR1|A0A068NLR1_9BACT Tryptophan halogenase OS =Fimbriimonas ginsengisoli Gsoil 348 OX=661478 GN=OP10G _0332 PE=4 SV=1
MESLTTDVAIIGGGPSGSTCGGFLKKYQPDSKVLILEREQFPRDHIGESQLPLIGRILDELGVWDRVEAAGFPVKIGGTYRWGTTDDLWDFDFLPFGQFDDAPRPGRYEGQRKRTAFQVDRSAYDKILLDYAEELGCEVRQRSAVREVRRKGDRVEGLVLADGTEIEAKWYVDATGHSGLLRRAMDVEIDEPSSLKNVAGWYYWRNAEWAVSLGVGGTRIQILSLGYGWIWFIPISPDRTSIGFVCPADHYKKSGLSMEELYRRAIAEEPRLQRLIQNATREDRFTTTKDWSFVANRMAGPNWLLVGEAAGFADPILSAGMTLAHAGAREAAFLIMEAARGGNVPWMAENYERRNERRVRQHIRFADYWYKANTNFTDLKEYTSEIARDAGLELSGDQAFQWLGTGGFIEEDMEVAGLALIRLDQLHSLTGRLSEAPATSSLDGYSVFLPHLSGAEQVKVARFENGGVKAMVALRRDGKFLPLYGLFGLMVDALKFSPLLNEAFGFVQRTMGDAFNHELHARLTECLDAMIREGWVRPKKFGEAPAVRHELPMETAAIHQHTPDRGDGV

SEQ ID NO: 89326 - protein, 506 aa, Xanthomonas arboricola
  misc_feature (1)..(506): tr|A0A2S7BE07|A0A2S7BE07_9XANT Tryptophan 7-halogenase OS=Xanthomonas arboricola OX=56448 GN=XarbCFBP7697_2135 0 PE=4 SV=1
MIPAPLRNIVIVGGGTAGWMAAAAFARVLGPGFKVQLIESEQLGTVGVGEATVPHIKAFNNLLGIDEAEFVRQTQGSFKLGIEFVDWQRPGTSYIHGFGTQIGHPLGLLPFHQYWIKQHARGKAQPLGAYTLNTVAAVRGKFMTSAGDVPANSPLANIAYAYHFDATQYARFLRTYAEQRGVTRIEGLVEQVQLHADSGHVQSLQLASGQVVSGDLFIDCSGFRGLLIEEALHTGYHDFTHWLPCDRALAVPSENVGPPTPYTRSTARAAGWQWRIPLQHRTGNGYVYSSAHISDDEAAATLLANLEGKPLADPRPLRFTTGRRKQFWNRNVVALGLASGFLEPLESTSIHLIQAGISRLLELFPREGISPVLVQRYNDRLAFEFDRIRDFLVLHYHATERDDSAFWRHCRTMPITPELQTTLDLFRDSGRFYRNAEEMFAEISWVQVMVGQGILPRGYHPLVDQVPDHDAERFLASVAQTIGHCVDVMPTHQQFIDRYCKATAPR

SEQ ID NO: 89327 - protein, 119 aa, Rhizobiaceae bacterium
  misc_feature (1)..(119): tr|A0A4Q3HLD0|A0A4Q3HLD0_9RHIZ Tryptophan halogenase (F ragment) OS=Rhizobiaceae bacterium OX=1913961 GN=EOP17_ 21765 PE=4 SV=1
MAQPLEVVIVGGGTAGWMTAAALTSVVRPEFRRVRLIESDQIGTVGVGEATLPQMKDFNDWIGVIESEMMRETNATFKLAIEFRDWGFKGSSYLHPFGAHGQPISGVAFHQHWLRAAQA

SEQ ID NO: 89328 - protein, 502 aa, Rhodanobacter lindaniclasticus
  misc_feature (1)..(502): tr|A0A4S3KJZ5|A0A4S3KJZ5_9GAMM Tryptophan halogenase OS =Rhodanobacter lindaniclasticus OX=75310 GN=B1991_04430 PE=4 SV=1
MQAQPIQRVVIVGGGTAGWMAAALLARALGKAVRIRLVESDEIGIVGVGEATIPQIRHINTFLGIDEDDMLRATQGTFKLGVQLNDFGRLGDSYLHAFSDIGLPLGLIGFHHYWLRERRRDPASDLWAYSLNTQAANEHRFARMEKVGDTPLGGIKYAYHFDAGLYGQYLRKRCDPAVVQRTEGKVVEVRLREGDGFIESVRLASGETIEGDLFVDCSGFRGLLIEGALHAGYESWQHWLPCDRAMAVACARSEPLWPYTRATARAAGWQWRVPLQHRTGNGLVYASAHMGDDEAAATLLAHLDGEPLGEPRPLRFTTGMRRKAWQRNCVALGLAAGFMEPLESTSIHLIQSGISRLLAMFPDRQCDPVLVDEYNRQTRFEYESIRDFLILHYKATERDDTPFWRQCAAMDIPPGLARKLALFRGHGQIFREREELFTEVAWLQVMIGQRIEPQAYHPLADALGTAQLDGFLTDIRTLVGRAAASMPDHARFVADHCRAGDS

SEQ ID NO: 89329 - protein, 536 aa, Serratia plymuthica
  misc_feature (1)..(536): tr|A0A1B1KWB6|A0A1B1KWB6_SERPL Flavin-dependent tryptop han halogenase PrnA OS=Serratia plymuthica PRI-2C OX=11 54756 GN=prnA PE=4 SV=1
MSKPIKNIVIVGGGTAGWMSASYLVKALQQQANITLIESAAIPRIGVGEATIPSLQKVFFDFLGIPEQEWMPQVNGAFKAGIKFVNWRTSPDHSRNDYFYHLFGNVPSCDGVPLTHYWLRKREQGFQQSMAYACYPQPGALDGNLAPCLHDGTRQMSHAWHFDAHLVADFLKRWAVDRGVNRVVDEVVEVNLNEHGFISSLFTKEGRKLEADLFIDCSGMRGLLINQALKEPFIDMSDYLLCDSAVATAVPNDDAQVGVEPYTSSIAMNSGWTWKIPMLGRFGSGYVFSSKFTSRDQATTDFLNLWGLSDNQSLNQIKFRVGRNKRSWVNNCVSIGLASCFLEPLESTGIYFIYAALYQLVKHFPDTSFDPRLADAFNAEITYMFDDCRDFVQAHYFTSSREDTPFWLANRHDLRLSDSIKEKVERYKAGLPLTTTSFDDSTYYETFDFEFKNFWLNGNYYCIFAGLGMLPDRSLPLLQLRPESIEKAEAMFARIQREAERLRVSLPTNYDYLRSLREGGVGLSRPGPTPASPESR

SEQ ID NO: 89330 - protein, 548 aa, Dehalococcoidia bacterium
  misc_feature (1)..(548): tr|A0A2E7SAY8|A0A2E7SAY8_9CHLR Tryptophan halogenase OS =Dehalococcoidia bacterium OX=2026734 GN=CL886_05915 PE =4 SV=1
MTLPNSNEQFDIIVIGGGPAGSTTATMLAKYGYSVLLLERSEFPRDHVGESLLPASIPVLEELGVIDEIRQAGFLPKWGATMIWGVDKDPWSWHFRETNEQYPYSYQVWRPEFDKILLDNSRNHGVDVREGHRVLNVLFDGSKAVGVQYTDSYGYSNVASAEYIVDASGQQNLLGSQLKTKREDPFFRNLAVYGYYTGVPKLPEPDQNNIFIESYENGWTWNIPLHNGFNSVGVVVDCDANQSSIQEYGAQKFYTEELSKTSYMSKLLQTAVLESMPSVVKDWSYSCSPMVGDGYILVGDAACFIDPLFSSGVHLALMSGVLSSTYINTSMKDKTLGLACREVYESLYMKEYGHFRELARLFYSSNRSVESYFWEARRVLDNDSSLSPRSAFIQAVAGQSARGYERVVLQHGDLPKSFVGSINRIESEVRRRAEQFPLDEDSIVLEGATLIPKLAKGVVLERKPVLGEGIFDWGYVLTTLNRNNGIECSELVAILLSKVDGESTLDDLLALFRERASEDDWPTLRKALLNSVRLLYMDGVIERFDPKD

SEQ ID NO: 89331 - protein, 500 aa, Shewanella woodyi
  misc_feature (1)..(500): tr|B1KHC5|B1KHC5_SHEWM Tryptophan halogenase OS=Shewane lla woodyi (strain ATCC 51908 / MS32) OX=392500 GN=Swoo _1140 PE=4 SV=1
MDNKIKKVVIAGGGTAGWMTAAALSKLMGKHLDIVLVESDEIGTVGVGEATIPTLHIFHRLLGLKEQEVMAATNATFKLGISFENWKELNQSYLHSFGFLGKDCWACGFQHFWLKGKKQGIASEIGDYCTEHVAAREGRFAILPNQDQNHAYHMDASLYAKYLRKFAEQHGMSRIEGKIADVLQHQDSKSNSNGHIKALVLESGQVINGDLFIDCTGFKALLIEQTLNTGFEDWSHWLPCDSAIAVQTEATNSPIPYTRSIAHQSGWQWRIPLQNRTGNGMVFCSKFISDDDATQQLLSNIEGEPINKPRVIKFKTGTRRLHWHKNCVAIGLSSGFLEPLESTSIHLIQRSIIRLMQLFPTQEFAQQNTDEFNAQTKFEMDNIRDFIILHYKATNRDDSRFWRYCKEMSIPDSLRHRIEMFNETGNIYKFGNELFGESSWIQVMIGQGIMPKEYHSIVDSMEDEELTSFLHQIKSAAKRKVETLPPHFDFVQHYCKSTVV

SEQ ID NO: 89332 - protein, 523 aa, Aliiglaciecola lipolytica
  misc_feature (1)..(523): tr|K6YIZ1|K6YIZ1_9ALTE Tryptophan halogenase OS=Aliigla ciecola lipolytica E3 OX=1127673 GN=GLIP_3982 PE=4 SV=1
MKSNTRVIKQVVVLGGGTAGWLSACHLAKKLLPNHPDGIRVMLVDSPDIPTVGVGEGTVPAIRESLQYLGISETDLLQTCDATFKQSIQFINWQPPMADGKMHSYHHVFDYPAPGFQQDLPYWALGHAGDSSFADSFSIQSSLCDAQLAPKLITQPEYQGTCNYAYHFDAGKFGKLLCDHGVNKLGVEHRQAKISLIETDEQGNISALVTDKNERISGDFFVDCSGSQSILLGKTLQVPFVSKKHMLFTDTALAVQVPYSKPTDEIPSCTLATAQTAGWIWDIGLTSRRGVGLVYSSAHLSDSEAELQLAEYLKGTNGQRVQVEPRKIPMRTGYHQEFWKNNCVAIGLSQGFVEPLEATGLLLFDISARMLAENFPSHQELMPLAANKFNKKVRLAWDKVLDFIKLHYCISQREDSDFWQDHRQSSSMSEQLAEDLARWQWQLPNQYDFTERAAIFNLENYLYVLYGMNFKTDLSQSAYRFEQVNVAKTNFQRYADMAAQAKQQLPGHRDLLDRIQRFGLQRI

SEQ ID NO: 89333 - protein, 524 aa, Shewanella woodyi
  misc_feature (1)..(524): tr|B1KET1|B1KET1_SHEWM Tryptophan halogenase OS=Shewane lla woodyi (strain ATCC 51908 / MS32) OX=392500 GN=Swoo _3837 PE=4 SV=1
MDKPTQKIVIVGGGTAGWITAGWLAAHHKVTSGSPVEVILVESPDTPSIGVGEGTWPTMRNSLIKMGISETDFIRECDATFKQGAKFAKWVDGSDDDFYYHPLVLPQGFTQHDLAPYWASLHAESNEESKHSFSNAVCFQESVCEQGLAPKTIRTAEYSDVANYAYHLDAGKFSQFLQRHCTEKLGVTYLSAHVTAINEHSNGDIASLTTQTTDKLEKEIEGDLFVDCSGFKSLLLGQHYQIPFIDCSNVLFIDTALAVHVPYDEENSPIASHTISTAQEAGWIWDIGLQHRRGVGHVYSSRYTDEATAMQALADYIGPKFDSLTVRKIPIKSGHRKTFWHKNCVAVGLSAGFLEPLEASAIVLVELSAQMISEQLPANREVMDIVAKRFNQTFNYRWERIIDFLKLHYILSRRCDSDFWKDNRDPKTIPDSLQDLMKVWQHRAPADMDFTSNNEVFPAASYQYVLYGMGFDTDYSVTPHLLNDWQYAHRQFAKNQYLIERATVQLPSNRELINKIKQYGFSQI

SEQ ID NO: 89334 - protein, 545 aa, Dehalococcoidia bacterium; identical to SEQ ID NO: 85286
  misc_feature (1)..(545): tr|A0A3D2YWB9|A0A3D2YWB9_9CHLR Tryptophan halogenase OS =Dehalococcoidia bacterium OX=2026734 GN=DHW65_10305 PE =4 SV=1

SEQ ID NO: 89335 - protein, 534 aa, Dehalococcoidia bacterium
  misc_feature (1)..(534): tr|A0A352UBF2|A0A352UBF2_9CHLR Tryptophan halogenase OS =Dehalococcoidia bacterium OX=2026734 GN=DC056_01155 PE =4 SV=1
MPDAVVIGGGPGGGTAATLLARRGYSVVLLEREIFPRAHVGESLLPASMPVLEELGVLGQIESENFPKKYGATMVWGRDDTPWSWYFRETNRTYPYAYQVSRPRFDQILLDNAKSSGVDVRENCNVFETLSDSESGAIHGVRFRRDSGIVESVEADFVMDASGQSALLARSMNLRTWDTFFQNLAVYGYYRGAKRLPSPDETNIFIESYGLGWTWTIPLKDGLASVGAIVDSESAQAMLADIGPDEFLRQQISQTARTNDMLSDAELTGAPRVVRDWSYTTNRMVGDGWILLGDAACFVDPLFSSGVHLALMSAVMAAAYVHGAKTDPTLRVPAGQVYEQLYRKEYAHFRELASLFYASNRTEESYYWQARRLLGDTNVGARESFIRAVAGQPPRGYERSALSRGELPSEISEMFASVASDKRLRDATVAMGLSLNLVPRLAGEAKLERRPIFVEGEFQWSAVLSSATRPEGTPLSNFVAALVNLVDGKRNIGQILDKFTQGVEDSEQIEQAHDSMINAISILYVDGAIDSLMG

SEQ ID NO: 89336 - protein, 537 aa, Dehalococcoidia bacterium
  misc_feature (1)..(537): tr|A0A357FK75|A0A357FK75_9CHLR Tryptophan halogenase OS =Dehalococcoidia bacterium OX=2026734 GN=DEA18_00020 PE =4 SV=1
MEKSDEVDILVIGGGPAGSTAASMAAKSGLSVKVCERSKFPREHVGESLLPASIGILEELGLNEAISNAGFLPKYGATMVWGKDETPWSWRFSETNKQNIHSYQVSRPIFDEILLKRSAELGVLVEEESSVSKILTDDSNRGVVVTNKMGQEYFQPAKFIVDASGQSALLARNFDLRQWDEHFQNLAIYGYFAGAKKLDAPNENNIFIESYENGWVWVIPLNDDTTSVGAVVDSNETNAKLRKTDPITFLKDQLSLTNRTSHMLSEAELKSDVKILKDWSYTTSKMAGNGWVLAGDAACFIDPLFSSGVHLAMMSGVLASAYAVTCLKDKILGIVSASVYETTFRQEYDHFRDLALLFYSSNRTVDSYFWEARRIFKEENYFSDRISFIRAVSGQSVRGYERVALERGELPKEFMSAISLHNKKSEDRNAELLFIQDSILEKIPCLASEAKLEKKPVLSEGEFKWGTIITTPYRKEGVPCSNLVANLLMKIDGEKSIRKILENLSTSASEDTRKQLLKYGIEAISILFIEGVIDSLN

SEQ ID NO: 89337 - protein, 509 aa, Sphingopyxis sp.
  misc_feature (1)..(509): tr|A0A0Q7Z2T5|A0A0Q7Z2T5_9SPHN Tryptophan halogenase OS =Sphingopyxis sp. Root1497 OX=1736474 GN=ASD67_13920 PE =4 SV=1
MAKTVERVVIVGGGTAGWLAAARLAAARPTLDVTLIEAPDIPTIGVGEGTWPTMRATLAAIGIPEGEFLAACDGSFKQGSRFDGWVDGAVDGAADDRYLHPFTTPPALPTGELLAAWQATAADRPFGAAMTAQAAVCDLDLAPRQRAMPDYQGAANYAYHLDAGKFAALLRDHATRRLGVRHLADHVTAVTRGEGDTLAAVATRAHGEIAGDLFLDCTGHAALLIGGELGVEWIDRSDTLFNDRALAAQVPVAEGSAIASQTISTAHRAGWIWDIGLPGRRGIGCVYASRFLGDDAAEAELRAYIARVLPGAPDVPVRRLSFPTGHRARFWQGNCVAIGLSAGFIEPLEASAIVLIELSLNALIDNFPASASAMPIHAERFNTLFRYRWDRIVEFLKLHYLLSKRPEPYWLAQRDPASVPQRLTDMLALWQEQPPSAWDFPQVDEIFSAESHQYILYGMRHQVPAGLQSSDRAVAALAEQRQRARSLASALPTNRDYLDALTATATAAE

SEQ ID NO: 89338 - protein, 512 aa, Thalassotalea sp.
  misc_feature (1)..(512): tr|A0A4U1B3S5|A0A4U1B3S5_9GAMM Tryptophan 7-halogenase OS=Thalassotalea sp. ZS-4 OX=2572245 GN=E8M12_11740 PE= 4 SV=1
MNQTAVRSITIVGGGSSGWMTALYLNKLYNHQQSQVAIRLIESKDVGILGVGEATVHSIRFFFAAMGLDEAELLRETNATLKTGILFNNWMQPENGVMHQYFHPFEHQPLGNILDISTSWILRSRHLFERYDQGVSLSAALMAHNHCPKMPDSRPYEGITPYGYHLDASAMARFLRRKAVQAGVKHIEALVQEVVVEGGNIHSVMTDKGEFSSDIFIDCSGFKGLLIEPLKADNWQSFQHQLPCDKAVAMQVAYRDQQTPRSYTTATALSHGWAWEIDLTSRRGSGYVYDSRYIDKAQAEQELREHLGDDVEVLKTLHLDMKVGCRKEFWLGNCIAIGLSGGFIEPLESTGLHLINVGAKLLSTHINSRDISQATRDSYNRLMNGVYDDLKRFIVLHYCLSDRDDSQFWRNAQRSVDYCPQLSQQLQTWQHKTCEFMDLAGGYATTFTDENYRFILYGMGHYPSLHMPFDQASCDQIFDRLQSMSQRALQVSMPHERFLASIHPEKQCITGA

SEQ ID NO: 89339 - protein, 534 aa, Dehalococcoidia bacterium
  misc_feature (1)..(534): tr|A0A3B9HFV5|A0A3B9HFV5_9CHLR Tryptophan halogenase OS =Dehalococcoidia bacterium OX=2026734 GN=DCF86_06980 PE =4 SV=1
METTDIVVIGGGPAGSTAASMSARAGLSVVLLERERFPRDHVGESLLPASMPILEELGVYSRIADAGFPPKYGATMVWGKDNTPWTWRFAETNNTYKHSYQVSRRDFDLILLNRSRELGVDVREECTVNKILLDGDRIVGVEYQDREDNRVSLMARFVIDGSGQSAIISRLKGARKWDKNFRNLAVYAYFKGIARLPSPDQNNIFVESYADGWIWNIPLKDGLSSVGAVVDAKKATKVLKHQSIQEFFENQISATSHNREMIKIAEQVGHPTVVRDWSYISEEMAGPGWASAGDAACFIDPLFSSGVHIALMSGILSSAYAVTSLESPDMSEPTAAVYQEMILREYSLFRELANLFYESNRSVDSYFWEARRIAGTREDTDARSAFVRAVSGQSVRGYERAVLERGDLPNTVSLALDGVAKELKMRQDVLHNIGSSIPDAVPVLHPDTRIVRKPVLSEGRFEYGVLLYSPGRIEGTVCSRFVEMLVNYIDGCSTVKQITKRLATQAENTSEEALRDYVKEAIKILYFEGAIQRL

SEQ ID NO: 89340 - protein, 208 aa, Proteobacteria bacterium
  misc_feature (1)..(208): tr|A0A3E0N7Q6|A0A3E0N7Q6_9PROT Tryptophan halogenase (F ragment) OS=Proteobacteria bacterium OX=1977087 GN=DWQ2 8_05610 PE=4 SV=1
MSQRTVEKVVIAGGGTAGWMAAAALSRLVGRKISVTLVESEEIGTVGVGEATIPTILTINRLLQIPEPDFIKLTSGTFKLGIRFENWRKQGEDYIHSFGDTGKGSWAAGFHHFWLRAKEMGLAEDYGEYCTELKAAEAERFAITSQNKLNYAYHLDASKYGMYLRKLAESSGTTRIEGKIQRVETSSEDGFIEALHLEDGQRIDGDLF

SEQ ID NO: 89341 - protein, 511 aa, Shewanella woodyi
  misc_feature (1)..(511): tr|B1KFL8|B1KFL8_SHEWM Tryptophan halogenase OS=Shewane lla woodyi (strain ATCC 51908 / MS32) OX=392500 GN=Swoo _3936 PE=4 SV=1
MTKPITQVIIVGGGTAGWMSAASLGRYAQGKNLTITVIESSQLPTVGVGEATIPNIVEFNHSIGLNEIEFIKATQASFKLGIKFENWSQTSPSFFHPFSDYGLPINKVDFHQYVNRLAIENYKLEGHKLEGHNFKLEDYSFSSVLAQQGNFAQPHPNPPSPLADYSYAYHFDAGLYAELLKSHSLKMGVEHVDATIDQVNLHKNGFIESVSLHDGRVLEADLFIDCSGFKALLIEQAMKTGFDDWSEWLLCDTALAVQTKSTSSPNPYTRSIAHNSGWQWHIPLQHRTGNGYIFSSQFENKASAEQNLLTSLTGEPISQIRQFSFTPGRRKQIWNKNCFAVGLSSGFLEPIESTSISLIQSAIAKLLSFFPDTSFNEHDINEVNRLHNSELEHVRDFIILHYKLASGIDSPFWQYCQEMRVPETLSHKIDVYRSQGHIILRENESFEAASWLTMYHAFGVLPNRYDPRVDAIPLETVKQNLAQMKHSIINAASQSVSHQTFIDRHCKAVSQ

SEQ ID NO: 89342 - protein, 506 aa, Erythrobacter sp.
  misc_feature (1)..(506): tr|A0A125QJZ9|A0A125QJZ9_9SPHN Tryptophan halogenase OS =Erythrobacter sp. YT30 OX=1735012 GN=AUC45_13240 PE=4 SV=1
MTAEFSPLKSIVIVGGGSAGWMTAAALSDALGKACSITLIESEAIGTVGVGEATIPPIRTFNQRIGIDEATFIKETAGSYKLGIQFVDWARKGHSYFHPFGQYGAEFDKVPFYHYWMRESLAGTVDGPIDEFSMCWAMAKAGKFAHPEPDRRKIQSTFDYAYHFDAGLYAAFLRRFSESRGVKRLEGKVVEVSVRGEDGFIEAVTLDGGERVGGELFIDCSGFRGLLIEGALEAGYENWQHWLPCDRAVAVPCAKGPEITPYTRSTAKEAGWQWRIPLQHRTGNGYVHCSEFISEDEATETLMNSLDGEAQADPRTLRFVTGRRKKFWDKNCVAIGLSAGFMEPLESTSLHLIQYGILRLIALLPDSEMSPLLAQEYNAQTATEYERIRDFLILHYKATTRDDAELWRYCSAMEIPDSLQYKMEHFRNYGLLVADERELFANPSWIAVYLGQDIVPQRAPAITEMRSSVPVAERMQMISNAMTQAVDQMPPHADFLARHCRSPLAV

SEQ ID NO: 89343 - protein, 504 aa, Thalassotalea sp.
  misc_feature (1)..(504): tr|A0A4U1B6X8|A0A4U1B6X8_9GAMM Tryptophan 7-halogenase OS=Thalassotalea sp. ZS-4 OX=2572245 GN=E8M12_04545 PE= 4 SV=1
MKTDTRADATTSPFNIVILGGGSAGWMTAAALANTLPQEHFNISLVESEQIGTVSVGEATIPGIHDFNRFLNINEQELVKATNATFKLGIEFEGWTKGGKYLHPFGPYGLNKNGVPFHQLWLKAKLAGEDVGELVNFNMEGLAAQQNKFSPKLNIPNFPIKHLNYAFHLDAVLYANYLRQYAEPKGVKRIEGQFEQARLNNEGFIQSLTLTDGREVPGDFFIDCSGFKALLIEKTLHARYEDWRHWLPCDSAVAIQSKSQPQVNSFTKAIAHEHGWRWQIPLQNRVGNGLVYSSRFMTEDQALEKLQSLVKEELITEPNQLRWVNGCRPEPWRKNCVAIGLSAGFIEPLESTGLQLIQSAIFRLLSLFPDKHFNQSNIDTYNRFANAEIASIRDFVILHYKQTDNDHSPFWNYCRNMDVPDSLKDKMEMYQQNGNLFRENNELFSELNWLSVMNGQGMLPKTTHPLTRQFTTQEIMSDLQQIESGYSRIVDSLPSHDEFLAMLG

SEQ ID NO: 89344 - protein, 506 aa, Xanthomonas arboricola
  misc_feature (1)..(506): tr|A0A0E3UFG2|A0A0E3UFG2_9XANT Tryptophan halogenase OS =Xanthomonas arboricola OX=56448 GN=XB05_16190 PE=4 SV= 1
MIPAPLRNIVIVGGGTAGWMAAAAFARVLGPGFKVQLIESEQLGTVGVGEATVPHIKAFNNLLGIDEAEFVRQTQGSFKLGIEFVDWQRPGTSYIHGFGTQIGHPLGLLPFHQYWIKQHARGKAQPLGAYTLNTVAAVRGKFMTSAGDVPASSPLANIAYAYHFDATQYARFLRTYAEQRGVTRIEGLVEQVQLHADSGHVQSLQLASGQVVSGDLFIDCSGFRGLLIEEALHTGYHDFTHWLPCDRALAVPSENVGPPTPYTRSSARAAGWQWRIPLQHRTGNGYVYSSAHISDDEAAATLLANLDGKPLADPRPLRFTTGRRRQFWNRNVVALGLASGFLEPLESTSIHLIQAGISRLLELFPREGISPVLVQRYNDRLAFEFDRIRDFLVLHYHATERDDSAFWRHCRTMPITPELQTTLDLFRDSGRFYRNAEEMFAEISWVQVMVGQGILPQAYHPLVDQVPDHDAERFLASVAQTIGHCVDVMPTHQQFIDRYCKAAAPR

SEQ ID NO: 89345 - protein, 483 aa, Aliiglaciecola lipolytica
  misc_feature (1)..(483): tr|K6YCF8|K6YCF8_9ALTE Tryptophan halogenase OS=Aliigla ciecola lipolytica E3 OX=1127673 GN=GLIP_1665 PE=4 SV=1
MAANLFANQWSNKGIKITLVESPEIGIVGVGEGSTPTLKRFFNILNIPESSWMPRCNATYKTNIRFAGWSPRSGIEHYSHPFSCQTDTFTQKSFLVNCQTRRLGLDTHVTPEDFFINGLLAAQGKGPIATENFPFTMEYGYHFDSHLLGSFLSEHAKTLGVEHQQVKIQDVITHNNGEIASLVASNGDSIHGDFFVDCTGFASVLMQKTLGVSFTNFNQNLFNDAAVVMPTPMHDENIPVETTSTALSNGWAWKIPLTNRYGNGYVYSSDFISPEEAEIELRQHLGLQESAESGRHLKMRVGQLEKHWHKNCLGLGLSQGFIEPLEATALHLVQVCIEMFITEFEKGQFSNQHQQSFNRLISERFEKVRDYIVAHYKLNTRDDSEYWRANRNNEHLSDSLIQLLNCWYQRNDLNAEIHRQQINHHFDSLSWHCLLAGYGAFPPLAEKQPGTGDLYKEQGIAEFNRRCGLNFSSHKINLQRLQS

SEQ ID NO: 89346 - protein, 502 aa, Shewanella woodyi
  misc_feature (1)..(502): tr|B1KEB2|B1KEB2_SHEWM Tryptophan halogenase OS=Shewane lla woodyi (strain ATCC 51908 / MS32) OX=392500 GN=Swoo _2208 PE=4 SV=1
MHSPIKKIVIVGGGTAGWMAAAMLVRFLGKQLTITQIESDKVGTVGVGEASIPPLKMFNQALDIDEHEFLKATNGTYKLGIEFDNWAQEGDSYMHAFGPLGKDLALTPFHHYYLNHYLKSEHQISKQLGKYSLNYLSAKKNNFQPLDAIAGTGLPGLTYAYHFDASLYAKYLKSYSKQAGVDSIEGLVIRTNLNSSNGAIDSVTLASGQTIEGDLFIDCSGFKGLLIEQALNSGYEDWRHWLPCDSALAVASEVKKPISPYTRSTANEAGWQWRIPLQSRTGNGIVYSSQFINDEQAEKLLFKQLDGKPLTLPQKVNFVTGRRKHQWLKNCISLGLASGFVEPLESTSLHLVQSGIIRLLKLFPSQEMEQANIDQYNQQSKQEFEQIRDFIILHYRLSGQKQTPFWQYCREMPIPNSLQQKLDLFKASGVVSRYQDELFTENAWVQVMLGQRFTPNTYSTLTENINTTQNIQFLNDLHKIFDTTSSKLMSHDSYLTQYCGLK

SEQ ID NO: 89347 - protein, 506 aa, Pseudoalteromonas luteoviolacea
  misc_feature (1)..(506): tr|V4HJB2|V4HJB2_9GAMM Tryptophan halogenase OS=Pseudoa lteromonas luteoviolacea 2ta16 OX=1353533 GN=PL2TA16_01 281 PE=4 SV=1
MIKKIVIVGGGTAGWLAANHLGKRFLGSETVVKLIESANIPTIGVGEGTVPMMRQTLEYFGIDEGEFIKECNVAFKQGISFENWMAPQAGKTHRYYHPFDFFSSELGLVTAWLNDNSGIHFADFVGFQSTLCDHNLAPKLITQPQFDGAASYAYHLDAGAFSELLKKNAINNLGVVHHYNELDEVALDNDGAISHLVTDAGVETADLYIDCTGFKSLLLGTAMKTPFVAKGDVLFADKALAVQVPYADNEQIPSYTRSTAQTAGWIWDIGLYSRKGIGHVYSSSHTTETQAYAELESYIGTNLDSLNVRNIDMKVGYRSKAWSKNCVALGLSQGFVEPLEATGLLVFDVTAKMLADTLPTSTLAFETVAKHFNNTVTNMWSKVIDFIKLHYCISDRCDSQFWLDNRSPESIPDSLREKLELWKYKVPTNYDFGGKFDVFDIDNYLYVLYGMSYPTCVDSNLISPAEIRRMSDVIGTIKYQQKQARELAIDNKSLLEKIHQFGLAKQ

SEQ ID NO: 89348 - protein, 444 aa, Variovorax paradoxus
  misc_feature (1)..(444): tr|C5CVR8|C5CVR8_VARPS Tryptophan halogenase OS=Variovo rax paradoxus (strain S110) OX=543728 GN=Vapar_3957 PE= 4 SV=1
MTPGPFTSTEPDVVVIGGGPAGSTVAALLADKGHDVVLFEKAHHPRFHIGESLLPMNMPLFDRLGVRTEVEAIGIAKHGAEFVSPWHDHTSHFFFGEAMDKSFPYAVHVRRSEFDELLFRHAGKRGARTFEGQRVMGVDMDAGKGADKRALVKIKAEDGSETSWRPRFVIDASGRDTVLSNQFDAKQRNRKHASAALFGHFANAERRPGRYEGNISLFWFDHGWFWYIPLKDGTVSVGAVASPAYFKRRKGTLEEFLMETIALAPKLAARLKNATLMEGATTTGNYAYDSKFCRGDRFMMVGDAYAFVDPMFSSGVYLAMNSAFESATAADLWLRGEMKEAEKAFRRFDKVMKHGPKMFSWFIYRITSPAIRRLFMNPRNIWRMQEALLSILAGDLFRNTPIGPRFWGFKITYYASCIGILPQAIKTWAWRRRNLKESLEAAKT

SEQ ID NO: 89349 - protein, 505 aa, Shewanella woodyi
  misc_feature (1)..(505): tr|B1KFM0|B1KFM0_SHEWM Tryptophan halogenase OS=Shewane lla woodyi (strain ATCC 51908 / MS32) OX=392500 GN=Swoo _3938 PE=4 SV=1
MMENSKQVIRSIVIVGGGTSGWMTAAALSHFFKDKPVKLTLIESSTIGTIGVGEATIPTLRRFYSKLGFSDFDVIKATNATCKLGIEFKDWKQKGSRFIHPFGLFGQGTKEVDFHHYWNRARLAGEAELLSEFSLGASLALNNKFVLPSITPSSQLDIFDWALHFDAALFANLMKEFSLAHGVMLKDNVVEKVNVAQSTGNIASVTLDSGELVEGDLFVDCSGFKSLLLQEALKTGYQDWSDYLVCDRAVAVQTQARENPIVRTISQAQESGWTWKIPLQHRTGNGHVYSSQFISDDEATSTLVEQLDGEMLHTPRMFSFTPGRAEKAWNKNCIAVGLSSGFLEPLESTSIALVETAIEKILLSVKDASYTEQVRDRFNQVTALEYERVRDFIILHYKLTHRTDSAMWRYCQQMAIPEELASKMQAFSRDGSIKSYPWEIFGKDSWLAIYDGFDFRPDNFSPKALNMELGYLKKHLNFMKSSIDNAVELAPTHAEFLAQVAADEA

SEQ ID NO: 89350 - protein, 547 aa, Dehalococcoidia bacterium
  misc_feature (1)..(547): tr|A0A2E2VGK4|A0A2E2VGK4_9CHLR Tryptophan halogenase OS =Dehalococcoidia bacterium OX=2026734 GN=CL895_02815 PE =4 SV=1
MTAHEQSPDVVVIGGGPAGSTAATMLARQGVSLLLLERERFPREHIGESLLPASIPILEELGVLPAVEAAGFLTKWGATMVWGSDPTPWSWYFRETNQRNPHSYQVWRPQFDQLLLENSRAHGVDVREGHRVLEVLWQDGKATGVRYQSDDGETGTIQCRYVVDASGQTGLLARDLNLRQWDPFFQNLAVYGYFRGAHPLPEPDETNIFIEAHPHGWLWSIPLHTGWTSVGAVVDSATSQNEISTGSLDGFLQAQIDQAPHTSKMLRDAHLESGPFIVKDWSYVCERVAGDGYVLAGDAACFVDPLFSSGVHLALMSGIMAAAYVTSALKDPEIVEAAAAAYHELYLKEYGHFREMARLFYSSNLTSDSYFWEARRLLEDAGNFTPRQAFIQAVAGQPPRGYERAVLEQGQAPLEFASSVRQVESERERRRVRWEAALSGTDNGDPIMAAVPRLAPETQIQRKPVLGAGEFVWGTVLTTVSQPEGIPCSGLISAMVSQIDGARTVAQLLDELASLGEPSQADQIRQTALAALGILYVDGTVEELGGL

SEQ ID NO: 89351 - protein, 507 aa, Shewanella woodyi
  misc_feature (1)..(507): tr|B1KIV0|B1KIV0_SHEWM Tryptophan halogenase OS=Shewane lla woodyi (strain ATCC 51908 / MS32) OX=392500 GN=Swoo _1306 PE=4 SV=1
MKIKRIAIVGAGTAGWLAANHLGSELSADQDVEITVIESKDVPTIGVGEGTVPYIMNSLKRFGISEAELLYSCDTTFKQGIKFVNWLDSGSRGDNFYYHPFDVPYPSGFDVSPYWVAHGGKRPFDDVGIQARICELGLAPKRKSSGEYEGALTYAYHFNALKFAQLLAKNAQKRFNVTHQFATVVGAKKAENGDITHLITKDDTELVFDFYVDCSGFSSILIDKELKVPFVSKADELLTDSVLVQQVPLKDEDELPPYTTATAHSAGWIWDIPLTTRRGTGFVYSSRHMSDEQALSEYADYLGVEQGTISPRKLPMEIGYREAFWSQNCVALGLAQGFVEPLEATSILVTDFSAELLARNFPRNTSDIEALIPHYNKVVTYVWERVVDFIKLHYCISDREDSQFWLDNRKEDTFSDELKQRLTKFKVSTPKQSDFFSKFDLFNDKNFLYVLYGMEFKTKAISISAKEIEHCSMLLQSNDNLVKTAADELLSHKSWLLGLKAAMSPNG

SEQ ID NO: 89352 - protein, 512 aa, Lysobacter capsici
  misc_feature (1)..(512): tr|A0A291A6D6|A0A291A6D6_9GAMM Tryptophan halogenase OS =Lysobacter capsici OX=435897 GN=CNO08_21905 PE=4 SV=1
MHNDAERGASATRPIKRVVIAGGGTAGWMAAAAISKIFGATLQISLIESEEIGTVGVGEATIPTLSTFHRLLDIDEREFMAATQGTIKLGISFENWTTEQHRYIHSFGSTGKDHWSAGFQHFWRRGRELGLAGSYDDYCVELQAALQGKFAHLKNYRMNYAYHLDASLYARFLRTMSEGNGCRRIEGKIVEVLTDPDSGYITALRLERGEVIEGDLFIDCTGFRALLIDKTLGVGFEDWSHWLLNDSAIAVQTTSVCDPVPYTRAIAEQWGWQWRIALQHRVGNGIVYSSRHVGDDEAKQALLDSVDGEILKNPWPVRFRPGRRLRCWSHNCIALGLAGSFIEPLESTTIHLIQRGITHLIRSFPPVISQAGVDEYNTQMADELQHVRDFVVLHYHATQRRDSPYWEYVSSMTLPDTLRRRIELFRETGTVFHVPGELFAENSWIQVMMGQGITPKTHHPTADTMSEADLRRFLDDIRNHVDTTVRALPSHQAYLSQYCPSAPRATVPAHVA

SEQ ID NO: 89353 - protein, 542 aa, Dehalococcoidia bacterium
  misc_feature (1)..(542): tr|A0A2E1E0Z2|A0A2E1E0Z2_9CHLR Uncharacterized protein OS=Dehalococcoidia bacterium OX=2026734 GN=CL899_00250 PE=4 SV=1
MKKIVIVGGGTAGYMTAATLLSEFPEKEITLIEPADIPTIGVGESTVAGGQGGFSGILHWLRMVNIKDEEFMPHTDAVYKHSIAFENWYRKDSGRFHYPFGQPYLEGSELALKDWHLKKLKYPETPTRDYADCMYPGMALINQNKSMFTDTFSSAHGRARLEEDPYLHEVQLLSHYSYQFDAAKFGNWLRDKYCKARYPDRFTHFVSKVQVVRTREDGEGGIEYLFLEGGQQVYADLFIDCTGFRALLINSKMHVPFIPYDHIFPNNKAWATRIPYTNPNKQIVNYTNCTAIENGWVWEIPLWSRMGAGYVFSDKFISSEDALKEFKQTLVKKGYQKVEDLEYNLIPMKCGIQSKLWVKNVCAIGLAAAFIEPLQSNGLQSMHEFLFNLTRILERGHISQWDRDEFTAKCHSDFDRFVMGVSLPYALSHRDDTDYWKALQKKDWSSLLSYTKGQLSGFLKEPFSKRHTDFNYGQANNLTNCMAVGLNWNPLDSHTLKYKLALSSLKTVESRKDKLDERKKRWNKEVKNFPTPYEYLRKRFHA

SEQ ID NO: 89354 - protein, 495 aa, Aliiglaciecola lipolytica
  misc_feature (1)..(495): tr|K6Y8R6|K6Y8R6_9ALTE FADH2 O2-dependent halogenase I OS=Aliiglaciecola lipolytica E3 OX=1127673 GN=prnA PE=4 SV=1
MQKAVRKVVIAGGGTAGWMTAALLRKVLQQTIEIELVESEAIGIVGVGEATIPPIQIFNQYLGLDEKEFLRETKGTIKLAIKFENWRVQGESYYHTFGAPGANIGFCSFQHFWLKAKEAGNEHTLWDYDLNYLACEQGKFNKINTQNPVYDMQYAYHFDSGLYGQYLRKLAEKAGVKRTEGIIAQVNQDPRSGFITSLELNNGQKIEGDLFIDCTGLRALLSRKTLGVKYESWDHFLPADSAIAVPTERFEHTVPYTRSIAHANGWQWRIPLTHRNGNGIVYSSKYCSDDEAMQTLMGNLDSKPLDEPRKIQFETGRTEQQWHKNVVAIGLSSGFLEPLESTSIHLIQSGIVRLLKMFPNQGITPAMVEMYNQESKQEFETIRDFIILHYHVNQRNDSDFWKDLRNMDIPPRLQQKINAFKESAAIFNDNNDIFRDASWLQVMLGQGINPTDYHPAAKVHGDKALLDIMHKIYHAKQQPLTKMLPHDEFLARYTG

SEQ ID NO: 89355 - protein, 537 aa, Dehalococcoidia bacterium
  misc_feature (1)..(537): tr|A0A349K873|A0A349K873_9CHLR Tryptophan halogenase OS =Dehalococcoidia bacterium OX=2026734 GN=DCS57_05430 PE =4 SV=1
MQKSDEVDILVIGGGPAGSTAASMAAKSGLSVKVCERSKFPREHVGESLLPASIAILEELGLKEAISNAGFLPKYGATMVWGKDETPWSWRFSETNKQNIHSYQVSRPIFDEILLKRSAELGVVVEEESFVGKIMTDDSNRGAVVINNNGQKYFQPAKFIVDASGQSALLARNLKLRQWDDNFQNLAAYGYFTGAKKLPTPDENNIFIESYENGWVWIIPLNGGITSVGAVVDSNESAAELLKIDPITFLKDQISLTNRTSDMLSQAELKSDVKILKDWSYTTSKMAGDGWVLAGDAACFIDPLFSSGVHLAMMSGVLASAYAVTYLKDKALGKESALVYETIFRQEYDHFRDLALLFYSSNRTVDSYFWEARRIFKEENYFSDRVSFIRAVSGQSVRGYERVALERGELPNEFMSAISLHNKNSEDRNVELHFIQDSILEKIPCLASEAKLEKKPVLSEGEFELGTVITTPYRKEGVPCSNLVANLLMEIDGEKSIRKIVEDLSASTSEDTKKQLLKYSIEAISILFIEGVIDSLD

SEQ ID NO: 89356 - protein, 517 aa, Thalassotalea sp.
  misc_feature (1)..(517): tr|A0A4U1BB29|A0A4U1BB29_9GAMM Tryptophan 7-halogenase OS=Thalassotalea sp. ZS-4 OX=2572245 GN=E8M12_00895 PE= 4 SV=1
MNQPVRRIIIVGGGSAGWLSAGLIAAEHETKNSNSIEVVLIESANIPTVGVGEGTWPSMRASLKKMGISETQFLTECDASFKQGSKFSNWLHGGGDSYYHPFTPPVGFFETNIAQHWYPHRDKVSFADAVTCQGQLCDNNLAPKQIATPEYAFHANYGYHLDAAKFSKLLQQHCTQELGVKHILDDVTDINSCPHSNDIASVSTLEHGDIQGDLFIDCTGSKSLLLGGYYGVEFIDQSSVLFNDSALAVHVSYQTPDAEIASHTLSTAQTSGWIWDIGLPSRRGVGHVYASDYISDEQAEQQLRDYIRADIGDQANTLDIRKISIKPGHRKTFWHQNCVAVGMSAGFIEPLEASALALIEQSAKMIAEQLPANRQIMDITAKRFNQRFSHHWQRIIEFLKLHYVLSKRSEPYWQDNRAQHSIPEPLQELLTLWQYQTPFTFDSSRTEELFPAASFQYVLYGMGFDTDLSWLQKRHVPMQSVQQYFNENNKKTQHLLRTLPTNRELLNKIRQFGLSKV

SEQ ID NO: 89357 - protein, 501 aa, Erythrobacter sp.
  misc_feature (1)..(501): tr|A0A109LR18|A0A109LR18_9SPHN Tryptophan halogenase OS =Erythrobacter sp. YT30 OX=1735012 GN=AUC45_13225 PE=4 SV=1
MGTHINKLVIVGGGTAGWITAAAFSRLLGKTLSIELVESDAIGTVGVGEATIPQIIRLNTILGLDEHDFVKRTNGTFKLGIEFVDWGQLGSSYLHTFGDAGMNLASVPFHHYWKRAENAGLNKDLWHYSLHKCAADQAKFGKLDRVGNTSMTGLAYAYHFDASLYAAYLRAYSEKHGVKRTEGIVQTVARNAESGDLTAITLDNGQEIAGDFFIDCTGFRALLLGQELGVEYQDWSKWLPCNSAQAVPSERLETLVPYTRATAKTAGWQWRIPLQHRTGNGHVYCSDFISDDEAGETLLAGLDTKPLADPRPIRFTTGRREQFWSHNCAAIGLSSGFLEPLESTSIHLIQSHVSRLLQLFPTSANPEKERAEYNRRCVAEFEQIRDFLILHYHQTEREDSGFWRYCKNMEVPDSLSHKQELFASSGRIGRDADDLFREASWVQVMLGQGVTPEAYDPMANGLADAQLGEFLGNVRTLIERAVHSLPTHEQYLQKHCASAGS

SEQ ID NO: 89358 - protein, 534 aa, Dehalococcoidia bacterium
  misc_feature (1)..(534): tr|A0A3D1ZBS6|A0A3D1ZBS6_9CHLR Tryptophan halogenase OS =Dehalococcoidia bacterium OX=2026734 GN=DEW32_03610 PE =4 SV=1
MPDAVVIGGGPGGGTAATLLARRGYSVVLLEREIFPRAHVGESLLPASMPVLEELGVLGRIESENFPKKYGATMVWGRDDTPWSWYFRETNRTYPYAYQVSRPRFDQILLDNAKSSGVDVRENCNVFETLSDSESGAIHGVRYRRDSGIVESVEANFVMDASGQSALLARSMNLRTWDTFFQNLAVYGYYRGAKRLPSPDETNIFIESYGLGWTWTIPLKDGLASVGAIVDSESAQAMLADIGPDEFLRQQISQTARTNDMLSDAELTGAPRVVRDWSYTTNRMVGDGWILLGDAACFVDPLFSSGVHLALMSAVMAAAYVHGAKTDPTLRVPAGQVYEQLYRKEYAHFRELASLFYASNRTEESYYWQARRLLGDTNVGARESFIRAVAGQPPRGYERSALSRGELPSEISEMFASVASDKRLRDATVAMGLSLNLVPRLAGEAKLERRPIFAEGEFQWSAVLSSATRPEGTPLSNFVAALVNLVDGKRNIGQILDRFTQGVEDSEQIEQAHDSMINAISILYVDGAIDSLMG

SEQ ID NO: 89359 - protein, 521 aa, Xanthomonas campestris; identical to SEQ ID NO: 88966
  misc_feature (1)..(521): tr|A0A1T1R980|A0A1T1R980_XANCA Tryptophan halogenase OS =Xanthomonas campestris pv. vitiscarnosae OX=487900 GN= Xvtr_06400 PE=4 SV=1

SEQ ID NO: 89360 - protein, 545 aa, Dehalococcoidia bacterium
  misc_feature (1)..(545): tr|A0A3B8NSE7|A0A3B8NSE7_9CHLR Tryptophan halogenase OS =Dehalococcoidia bacterium OX=2026734 GN=DCE26_01580 PE =4 SV=1
MNVTDLSADVVVIGGGPAGSAAATMLARKGWQVTVLERENFPRDHVGESLLPASIPILEELGALPAVEEAGFLPKPGATMVWGSGSSPWSWYFKETSQRYPHSYQVWRPQFDQILLDNARAAGVTVVEGAHVSEVIFDDGEAVGVEFTNADGVEGEAECRFIVDASGQSTLLARHLEYKQWDPFFQNLAVYAYFTGGDPLPEPDQNNIFIESYQHGWLWSIPMHTGRTSVGAVVDSKIGQEGIQKEGAKAFLESQLSQSTHTKNMLAKAAMDSEPTVLLDWSYTSEKLFGPGFILAGDAACFVDPLFSSGVHLALMSGVLAAAYVTTALNDPSLAEDAGQVYQELYLKEYNQFREMARLFYSSNLSAESYFWEARRITNASHYSPRESFIQAVAGQPPRGYERVVLERGHAPEEFTESIRAVETERRARTEWLAALAGDPQRNQLLNAIPQIAEGVKVEEKPVLAEGEFVRGHVLNTISQPEGTPCSPIVAAVITAVDGQKSVADIVDSLGQHLDQSAHAQLEEAVSRTIEILFVDGAITGLTTE

SEQ ID NO: 89361 - protein, 496 aa, Thalassotalea sp.
  misc_feature (1)..(496): tr|A0A4U1BAD1|A0A4U1BAD1_9GAMM Tryptophan 7-halogenase OS=Thalassotalea sp. ZS-4 OX=2572245 GN=E8M12_00880 PE= 4 SV=1
MTDKKIQNVVIAGGGTAGWMAAAALTKLLGKTISVTLVESDEIPTVGVGEATIPTLHIFHRMLGINEAEVMAATNATFKLGISFENWRDVNKDYVHSFGFLGQDCWACGFHHFWLKGLQKGLVGDIGDYCPEHLASREGKFAVMANQDLNHAYHLDAGLYAKFLRNIAEQHGCQRVEGKIQKVVLNSDNGYIEKLHLANGKTVEGDLYLDCTGFRGLLIEQALHSGYDDWSHYLPCDSAIAVQTKSTERPVPYTRSIARDAGWQWRIPLQSRTGNGLVFCSKYMSDEEAKQTLLDNIDGELLNEPRVIKYKTGARRTHWKKNCIAVGLASGFIEPLESTGIHLFQKAIVRLMQLFPHHGIQQSDVDEYNAQTREEANNIRDFIILHYHLTDRRDTPFWRYCANMDIPESLQHRMKLFKESGRNFKKQDDLFGESSWVQVMLGQGLMPEQYHPIVDMMGDKELEAFLNKIKNGVRKKVDSWPDHNDFIQHYCRAANS

SEQ ID NO: 89362 - protein, 504 aa, Aliiglaciecola lipolytica
  misc_feature (1)..(504): tr|K6WW98|K6WW98_9ALTE Tryptophan halogenase, putative OS=Aliiglaciecola lipolytica E3 OX=1127673 GN=GLIP_0069 PE=4 SV=1
MSPQNPIQKIVIVGGGTAGWMTAAALSNSLLKGVSITLIESEDIGTVGVGEATIPPIKTFNNTLGISENEFLKNTHGSFKLGIEFVNWGKLNNRYFHPFGQYGRQFDIVNVHQHWLAAEQSGTAHPLDEYCMAWAAAKQRRFSPPQPDPRNVLSTYEYAYHFDAGAYAMFLRKYSEQRNVKRIEGKIKHSQLNPNSGFVDAVVLDNDQLIKGELFIDCSGFRGLLIEQALKTGYEDMSEYLPCNSAWAVPCELKDFTPYTRSTAHTAGWQWRIPLQHRTGNGHVFSNEFISEQEALDTLMQNLDGEPLADPRLLKFTTGRRKRFWNKNVVAIGLSSGFLEPLESTSIHLIQAGIAKLLALFPTTDFDQHVIDEYNRIAINEFEAIRDFLILHYKLTERDDSEMWRYCKNMPIPETLESKLLHFESFGRVIKGEMDLFADASWLAVYIGQGLRPKQRDPLMSYRNSEGDVWLSKLHQALHQAAQQLPSHADYITKHCRSDINFMS

SEQ ID NO: 89363 - protein, 502 aa, Shewanella woodyi
  misc_feature (1)..(502): tr|B1KFL9|B1KFL9_SHEWM Tryptophan halogenase OS=Shewane lla woodyi (strain ATCC 51908 / MS32) OX=392500 GN=Swoo _3937 PE=4 SV=1
MTPESIKKFVIVGGGTAGWIAAATLGNIFRHSEVEIELVESDDIGVIGVGEATIPPLLTILESLGIDLVDFIKHTQASFKLGIQFDDWHTIGEGYFHPFGTLGRSIDGHDFFQCWLKSKAEGDDTPLMAHSPEAVLAQQGRFFLPFEAQGTPLASTTFALHLDAVLAGKYLRKFAEKSGVKRTEGLVESVSRSDKGLIKSVTLQSGVEIAGDFFIDCSGFKGLLIEEALETGYEDWSEFLPCNRAVTVQTENMGDTTPYTIATARAAGWTWRIPLQHRTGNGYVFCDKYCSDEEAIETLLSSIEGQPLTEPRVIPFTTGVRHKAWNQNCLALGLAQGFLEPLESTAIHLVSKSLALFVRLFPTAECDTQLSDEFNRRVRQDYEEIRDFLVLHYCTTQRDDTPFWRWCQQMELPVKLKAKLDLFKVHGGLIPGTEELFQPTSWYAVFDGMGVEPVGYNPTLDAIDYHKLKQSLHSGKTAIQTSAATQPSHDEFLRTYCPAPKI

SEQ ID NO: 89364 - protein, 492 aa, Dehalococcoidia bacterium
  misc_feature (1)..(492): tr|A0A3D1M1V1|A0A3D1M1V1_9CHLR Uncharacterized protein OS=Dehalococcoidia bacterium OX=2026734 GN=DEP04_07150 PE=4 SV=1
MQGTNTNKRHVTIVGGGNAGLICALILRRVFSEYEITVVKSEKIGTIGVGEGSTEHWLGFMNFVDIPVAELLVATLGTHKKGIRFEGWTNHTPDYFHSISSLPDGVPHVSNFNGAYAKLLVEGQLFTDAISPLGIKDNKVHAIYPHRAVNQFHFDTQELNDFFISKAKSRQIDFVEGEVKTVNVSEDWIGSVELEDGTKLTSDFWIDASGFNRVLMSCLPDEKWNSFSDYLLTDSAIAFRTPSDESGQIRPYTRSRAMSSGWAWEIPTQTERGNGYVYSSQHCTEEEAISEMEELLNIRISDYKHFQFDPGYLEKAWVGNCVAIGLSGSFVEPLEATSIGTSINQSFALITPLSSFRKGHTWVAKEYNRVFEKMMLNILNMIRLHYISDRDDSSFWVAQQEMPIPDELEHLLGVWSERTPVESDVHGLWNLFGFAHFYYVGQGQGVISPQSAQESINALGLENITDKFLWELRESRNSHPLKDHAETLKELT

SEQ ID NO: 89365 - protein, 497 aa, Sphingomonas sp.
  misc_feature (1)..(497): tr|A0A345WRD7|A0A345WRD7_9SPHN Tryptophan halogenase OS =Sphingomonas sp. FARSPH OX=2219696 GN=DM480_12765 PE=4 SV=1
MNAVTPRRIVVAGGGTAGWMAAAALMRTLGRTATVTLVESDAIGTVGVGESTIPPLITFNRLLGINEAEFMAATQATFKLGIQFDGWKGPEDRYFHAFGLTGKDHWAAGFQHFWLEGQVRGHHQSYDDYCLELIAAREGRFAHLPDDRMSYAYQLDSTLYGRFLRRMAEGDGATRIEGRIADVDLDAQSGDIAALVLDDGRRVEGDLFLDCTGFRALLIERALHVGYDDWTHWLPCDAAIAVQTQSVRPPVPYTRAMAHGAGWQWRIPLQHRVGNGIVYCSRYLNQDAALAQLLGNVEGTVLTEPNRIRFVTGARRKQWYRNCIAVGLAGGFMEPLESTSIHLIQRAILRLIRLLPAAGPISPHDIAEFNDQQLTDMDQIRDFLILHYKVTERRDSPFWRQCAAMEIPDSLAQKIGLFRETGRVFRRNDELFAENSWIQVMLGQGIVPEAHHPIAAKLPDEELARFLTGLRDQVATTVRTLPAHAAYVAHYCAAAAA

SEQ ID NO: 89366 - protein, 492 aa, Sphingomonadales bacterium
  misc_feature (1)..(492): tr|A0A4Q3DFL0|A0A4Q3DFL0_9SPHN Tryptophan 7-halogenase OS=Sphingomonadales bacterium OX=1978525 GN=EOP61_00050 PE=4 SV=1
MPEQLVKRVVIAGGGTAGWVVAAALGRHLGPLLDIVLVESEEIGTVGVGESTIPTARTFHAFLGVDEREFMRETGSSFKLGILFENWARIGDRYVHSFGQVGKGTWMGDFQHFWLHAREQGYAGDLGDYCFELQAALAEKFATGENAQINYAYHLDAGRYARFLRGFSEKLGVRRIEGKITQVEQHPESGHIDAILLESGDRIEGDLFIDCTGFRGLLIEQTLGAGYEEWSDWLPTDSALPIQTAAVGPAVPYTRAMAHSAGWQWRIPLQHRVGNGLVWCSAFMSDDEAQATLHASIEGEIRVQPRAIRFKAGRRRKVWDKNCVAFGLSSGFVEPLESTSIHLFMIGVTRLIQLFPFAGFNQPLIGRYNELARGELERIRDFIVLHYKLTERDDSAFWRHCRDMPIPDSLAERIDMFRENGHAWQTPDDLFRIDSWVQVMLGQRVEPKAWHEMGRLLGDEPLREALADLKGNIARAVAGMPRHQDFLDRYMA

SEQ ID NO: 89367 - protein, 534 aa, Dehalococcoidia bacterium
  misc_feature (1)..(534): tr|A0A2D9LZ34|A0A2D9LZ34_9CHLR Tryptophan halogenase OS =Dehalococcoidia bacterium OX=2026734 GN=CL879_11535 PE =4 SV=1
  misc_feature (198)..(198): Xaa can be any naturally occurring amino acid
  misc_feature (327)..(327): Xaa can be any naturally occurring amino acid
MPDAVIIGGGPGGGTAATLLARRGYSVVLLEREIFPRAHVGESLLPASMPVLEELGVLGQIESENFPKKYGATMVWGRDDTPWSWYFRETNRTYPHAYQVSRPRFDQILLDNAKSSGVDVRENCNVFETLPDSESGAIHGVRYRRDSGIVESVEADFVMDASGQSALLARSMNLRTWDTFFQNLAVYGYYRGAKRLPXPDENNIFIESYGQGWTWTIPLKDGLTSVGAIVDSESAQAMLADIGPDEFLIQQISQTARTNDMLSDAELTGPPRVVRDWSYTTNHMVGDGWILLGDAACFVDPLFSSGVHLALMSAVMAAAYVHGAKTXPTLRVPAGQVYEQLYRKEYAHFRELASLFYASNRTEESYYWQARRLLGDSNVGARESFIRAVAGQPPRGYERSALSRGELPSEISEMFASVASDKRLRDATVAMGLSLNLVPRLAGEAKLERRPIFAEGEFQWSAVLSSATRPEGTPLSNFVAALVTLVDGKRNIGQILDRFTQGVEDSEQIEQAHESIINAISILYVDGAIDSLMG

SEQ ID NO: 89368 - protein, 519 aa, Aliiglaciecola lipolytica
  misc_feature (1)..(519): tr|K6XQF2|K6XQF2_9ALTE Tryptophan halogenase OS=Aliigla ciecola lipolytica E3 OX=1127673 GN=GLIP_1265 PE=4 SV=1
MLDNEIRKIVIVGGGTAGWLTAGVIAAEHMANSEQGVAVTLIESPDVKPVGVGEGTWPTMRGTLRKMGVTETDFIRCCDATFKQGAKFAKWVTGADDDAYYHPLVLPQGYEQINLVPFWQQQASNIPFADAVSFQGQICERNLAPKQNTTPEFAHVANYAYHLDAGKFAAFLQQHCIEKLGVKHVLDTVVEVSSHDNGDIRSLVTKQHGELSGDLFIDCSGFHALLIGKHYQIPFINKKDILFNDAALAVHVPYLDEHSPIASHTISTGQSAGWIWDIGLPSRRGVGHVYSSAHISDEQAEVELRQYIRDSVGDKAEELSVRKIPIVPGHRETFWHKNCVAVGLSAGFLEPLEASALVLVELSAAMISEQLPANRKVMDIVAKRFNDKFRYRWDRIIDFLKLHYILTQRKDTQYWIDNCHIDTIPDALTELMELWQHHSPWHSDFTQVDEVFPSASYQYVLYGMGFKTQQAKTERRSNNQQLALESFRQNQQMTEKLLRGLPTNRELINKIQQYGLQRI

SEQ ID NO: 89369 - protein, 117 aa, Erythrobacter sp.
  misc_feature (1)..(117): tr|A0A3B9AUW0|A0A3B9AUW0_9SPHN Tryptophan halogenase (F ragment) OS=Erythrobacter sp. OX=1042 GN=DCF81_01200 PE =4 SV=1
EGIRDYIVAHYRLNQRSDTRYWRDNAANEALSDNLKGMITAWFTHKDLREVNLRQHDGNPHYASMSWHALFAGYGTFPPEAKMVPTPTGLVTAEVDHTRRMLSACATNFLRYAPLSD

SEQ ID NO: 89370 - protein, 520 aa, Aliiglaciecola lipolytica
  misc_feature (1)..(520): tr|K6XUI9|K6XUI9_9ALTE Tryptophan halogenase OS=Aliigla ciecola lipolytica E3 OX=1127673 GN=GLIP_2684 PE=4 SV=1
MGADPIQNIVILGGGSAGWLTAGLIAAEHNTSSNQGIKVTLIESANVPTIGVGEGTWPSMRNTLQRIGISETELFRECDAAFKQGAKFAKWVTGAEDDFYYHPLVLPHGFNDSDLVSPWLQQNHGMSFADAVCCQSHICERGLAPKQITTPEYASVANYAYHLDAVKLGILLHKHCTQKLQVNHIVDHVIDVTSTEQGDIKGLMTQQHGEIEGDLFVDCSGLTSLLLGQHFNIPFISKKETFFNDTAIAMHVPYPNEEAPIASHTISTAHSAGWIWDIGLPTRKGVGIVFASDYMDDDSAENALREYVRASVDAETEKNLSCRKISFDPGHRKTFWHRNCVGIGLSAGFLEPLEASALVLVEQSASMLVNDLPANRQVMDVIAKRFNTRLQYYWDTIVDFLKLHYVLTKRTDSQYWLDHCDRKTWSDTLNESLALWKTQIPNKYDFPLREEMFPEASWQYVLYGMGFKTNPPASGLKADKIEKANQYMRESAQLTQRYIKALPTNRDLIKKIMQYGMQKV

SEQ ID NO: 89371 - protein, 500 aa, Erythrobacter sp.
  misc_feature (1)..(500): tr|A0A3B9B3R0|A0A3B9B3R0_9SPHN Tryptophan halogenase OS =Erythrobacter sp. OX=1042 GN=DCF81_08660 PE=4 SV=1
MSSDYKPRRIVVAGGGTAGWMTAAALAKTMGDAIDLTLVESDAIGTVGVGEATIPPLINFNRLLGINEAEFMRETQATFKLGIEFENWKRDGEKYFHSFGSTGRDHWSAGFQHFWGEGLLRGHDYSYDDYCLELCAAYAGKFAHLPDNRLNYAYHLNATAYAAFLRRIAEGAGASRVEGKIAHVELDGESGNIAAIGLENGQRLEGDIFVDCTGFRSLLIEGALHVGYDDWSHHLPCDSAIAVQTELSASPVPYTRANAHDAGWQWRIPLQHRGGNGIVYCSRYLSKDAAHDRLMSTLEGKAISEPRAIPFTTGARRKQWHRNCIAIGLSSGFLEPLESTSIHLIQRAVIRLLRMMPAGEVSERDIAEFNDQQLTDMIQVRDFLILHYKATDRRDSAFWRQCATMDIPDSLTQKMELFRETGRVFRKNDELFVENSWVQVMLGQGILPQAFHPVAKKMSDEELSKFLEMLRTNVARTVQGLPAHHTYVAQFCGAKEVAAA

SEQ ID NO: 89372 - protein, 528 aa, Shewanella woodyi
  misc_feature (1)..(528): tr|B1KHC8|B1KHC8_SHEWM Tryptophan halogenase OS=Shewane lla woodyi (strain ATCC 51908 / MS32) OX=392500 GN=Swoo _1143 PE=4 SV=1
MHQAISNIIIVGGGTAGWITAGILAAEHNTDNGKLLTTPKLNITLIESPDIPPIGVGEGTWPSMRNTLTKIGISETQFIIECDASFKQGSRFINWHSELSAPHTPNNANDYLHPFSLPFAHQEIDLAPFWLAHQEEVSFALAVSSQDQLTQLGLAPKSISTPEYHFHNNYGYHLDAGKFSQLLMKHCTEKLGVNYISDHVVGINEHTNGDIKSVQCTQSGSVSGDLFVDCSGLKSLLLGKHYQEPFLSQKSVLFNDSALAIQIPYPEENSPIASCTLSTAQESGWIWDIGLPTRKGVGYVYSSEHASDQEAEKALLDYIGKDAYKRAKTEIRKLEIAPGYHQKCWRNNCIAIGMAAGFIEPLEASALALVEWSATTLAQQLPPNRASMELIATRVNNRYVQHWQQIIDFLKLHYVLSSRNNTPYWRDHQQTSSIPDSLQSQLEFWHYQVPCSQDIDHKDPLFPAASFQYVLYGMGFQTQKPTCIKPSMLQQAQTMFVENQKRTRSLSQTLPSNRELLDKVKQFGFPTL

SEQ ID NO: 89373 - protein, 503 aa, Brevundimonas sp.
  misc_feature (1)..(503): tr|A0A0F3LB85|A0A0F3LB85_9CAUL Tryptophan halogenase OS =Brevundimonas sp. KM4 OX=1628191 GN=VH88_10780 PE=4 SV =1
MTPAPLKRILIVGGGTAGWMAAAALAHVTRGTIKVELIESEVIGTVGVGEATIPPILLFNQLLGIDENEFIRATQATYKLGIQFHDWFQKGQSYFHPFGTYGTRIDAASFHQYWLRLNKAGLDDDLDAYSVTTMAARMGRFSRPDTDPRGAASQMTYAFHFDAGLYARFLRKRAEANGVVRHEGKIADVRLRDGDGFIQSVRLDDGRELEADFFIDCSGFRGLLIEGALKTGYEDWTHWLPADRAVAMPCTRVGDPTPYTQSTALEAGWRWRIPLQHRTGNGYVYCSPFISDDEAQAKLRASLDGEAMAEPNFLRFTTGRRKKTWNKNCLALGLASGFLEPLESTSIHLVQSGISKLLLHFPDTGFAQADIDNYNRMMRLETERIRDFIILHYHATARDDSPLWRHVRAMPIPETLKQKMDQFRSRGRIFRYEDELFQETSWIAVLLGQGVIPERHDPITETIPLEQVQQWLQKMKAMIQQGVARMPTHEAFIAANCKAPPIN

SEQ ID NO: 89374 - protein, 506 aa, Thalassotalea sp.
  misc_feature (1)..(506): tr|A0A4U1B6T0|A0A4U1B6T0_9GAMM Tryptophan 7-halogenase OS=Thalassotalea sp. ZS-4 OX=2572245 GN=E8M12_04235 PE= 4 SV=1
MSEQNPFHIVILGGGTAGWMAANLFAKRWQNQAQHRPVKITLIESKDVGIIGVGEGSTPTLKRFFEDLQIPESEWMPLCDATYKINIRFKGWSPKSGIEDYSHPFTTQVDTFTKRAFLVNGRTRRMGLDTHTRPDDFLLNGVLASQGKGPITPNNFPFIMEYGYHFDSAKLGEFLKQKAIAAGVNYQTAHISQSKRAATGELEALIDDQGNVFSGDFFIDCSGFSSLLMQKAMQVPYKSFKSNLFNDSAVVMPTPIDRIVPVETEATTLSSGWCWKIPLTSRYGNGYVFSSDFISRDQAETEFRQHLGMLDSEQECRFLSMQVGQLSEHWSHNCLGLGLSQGFIEPLEATALHLVQISIELFANLLEKGNFSHHYAHEYNQKISERFERVRDYIVAHYKLNTRDDSEYWRANRNNDQLSQSLISILDCWYQRNDLSEEIQRQNLDTHFDAISWNCLLAGYGTFPPLAPNQPGKGDLYKEKGIASFLQGCSLNFNDHHNNLRALNKS

SEQ ID NO: 89375 - protein, 524 aa, Roseateles depolymerans
  misc_feature (1)..(524): tr|A0A0U3D5M5|A0A0U3D5M5_9BURK Tryptophan halogenase OS =Roseateles depolymerans OX=76731 GN=RD2015_4477 PE=4 S V=1
MKAIEDILIVGGGTAGWLTAAFLAQQLGTAHGGVRITLVESSDIGIIGVGEGTFPSIRGTLSAIGISESRFLQACSATFKQGVQFNDWVRPPVNDRGPGESGRDHYFHPFSLPSQRPGAPELLPYWLMGEAGPDRAFAEAVTLQKAVVDARHGPKRPTDGDYLGALNYAYHFDAGRFAGLLAEQAQSLGVKRVIATVDQVELDEQGAIAAVVTREAGVLRAGLYVDCSGFHARLIGQALGSSFTSLNDVLFVDRALAMQVPYARPDAPIASCTLSTAQRNGWIWDIGLQERRGIGHVYSSRHTDDEQAERELRRYIGPASDALSPRKLTLNVGYRETQWVKNCVAVGLSGGFLEPLESSGIGLIETAAYLIAQLFPFDGDTAPVARHFNRFMAERYARIVDFIKLHYALTKRRDTAFWRDNADPATHPDSLKDKLAMWRQRPPQRLDFITDVEMYLPASWQYVLYGMEYETQLDAARAPLQRAEDARKEFGMIAQLGQHAVRDLPRHRDLIETMLSRAGLKMAA

SEQ ID NO: 89376 - protein, 500 aa, Aliiglaciecola lipolytica
  misc_feature (1)..(500): tr|K6YAW2|K6YAW2_9ALTE FADH2 O2-dependent halogenase I OS=Aliiglaciecola lipolytica E3 OX=1127673 GN=prnA PE=4 SV=1
MNTNTTPARKRVIVAGGGTSGWLAAAALGKVLGKQLDVSIIESEAIGRIGVGEATIPPLRTFHRLLGINERQLMSEIQATFKLGIEFNNWGNEGDSYIHSFGVNGKDCWACDFQHFWLAGRKKGLNNDLIGAYCRELIAAKQGKAMGGDSSGVQYAYHLDAGLYAEFLKRLAIGNGVKHIEGIITNVNTNEINGNIDSLDMQDGSKVEGDLFIDCTGFSGRLIHGALNTSYKPYGHYLPCDSAVAIQTEKVGPPRPYTQAIAHKFGWQWRIPLQHRVGNGMVYSSRFVSDDEALSTLLANLEGKPITEPRAFKYATGRRTKVWNKNCIAIGLSAGFLEPVESTSIHLAMSSILRLLKLFPQQEIKQSYIDEFNKQSIEEMDRVRNFIILHYHATERSDSAFWRYCKNMEIPAELAHRIQLFRDTGTIPLTEKELFRTDSWSQVMLGQHIMPETYHPIVDMMETVELERFLEGLKAKVNQEVAQMPSHQNFIDHYCKAKPM

SEQ ID NO: 89377 - protein, 506 aa, Xanthomonas campestris
  misc_feature (1)..(506): tr|A0A1T1R1K2|A0A1T1R1K2_XANCA Tryptophan halogenase OS =Xanthomonas campestris pv. vitiscarnosae OX=487900 GN= Xvtr_13150 PE=4 SV=1
MIPAPLRNIVIVGGGTAGWMAAAAFARVLGPIFKVQLIESEQLGTVGVGEATVPHIKAFNNLLGIDEAEFVRQTQGSFKLGIEFVDWQRPGSTYMHGFGTQIGHPLGLLPFHQYWIKQHARGKAQPLGAYTLNTVAAARGKFMTSAGDVPANSPLANIAYAYHFDATQYAHFLRRYSQQRGVTRIEGLVEQVQLHPESGHVQSLQLASGQVVHGDLFIDCSGFGGLLIEQALHTGYHDFTHWLPCDRALAVPCEKVGPPAPYTRSTARAAGWQWRIPLQHRTGNGYVYCSAHISDDEAAATLLANLDGKPLADPRPLRFTTGRRKQCWNRNVVALGLASGFLEPLESTSIHLIQSGISKLLELFPREGISPVLVQRYNDRLAFEFDRIRDFLLLHYHATERDDSAFWRHCRHMPITPELQATLDLFRDSGRFYRNAEEMFAEISWVQVLVGQGILPQGYHPLVDQVPDRDAEGFLASVAQTISHCVDVMPSHQQFIDRYCKAATLP

SEQ ID NO: 89378 - protein, 455 aa, Variovorax paradoxus
  misc_feature (1)..(455): tr|C5CNW2|C5CNW2_VARPS Tryptophan halogenase OS=Variovo rax paradoxus (strain S110) OX=543728 GN=Vapar_2969 PE= 4 SV=1
MSLPQATSSISSAPPAADESCDVLVIGGGPAGSTISALLAQQGRKVVLLEKEHHPRFHIGESLLPANVELFDRLGVRDQVEKIGMPKFGIEFVSPEHEHRSYVDFAEGWDKSLDSAWQVRRSELDELLFRNAAARGAQALEGCKVRDVAFDANGATVQAQMDDGARRSWRARFVVDATGRDTLLANKFRCKEKNPDHNSTALFGHFTNAERLEGKKEGNISICWFAHGWFWFIPLADGTTSVGAVCWPYYLKTRDKPLKDFFYDTIALCPVLVDRLKHATLVDDAVHATGNFSYSSTHATGDRYLMLGDAFTFIDPMFSSGVYLAMHSAFDGAGLVATALDRPAELAPVRENFEAMMRKGPREYSWFIYRVTNPTIRDMFMHPGNPFRVKEGLMSLLAGDIYRGTPIWRALGMFKFLYYFISITHLRRTWAGWKRHRFNIRDMGALKGETILKSE

SEQ ID NO: 89379 - protein, 495 aa, Proteobacteria bacterium
  misc_feature (1)..(495): tr|A0A2W4MTR3|A0A2W4MTR3_9PROT Tryptophan halogenase OS =Proteobacteria bacterium OX=1977087 GN=DIU71_04010 PE= 4 SV=1
MQKLVIAGGGTAGWLAAAALAQQFRGILDVTLIESDEIGTVGVGESTIPTIRGFHRLLGIDEQAFMRATSATFKLGIHFENWKLPQHRYAHAFGRVGLSTWICGFHHFWLHSLTRGMCSELEDYCVERLASKQHKFATSPDSEINYAYHLDAGVYAKFLRKMSEHDGARRIEGKITEVRQHPDTGFIESLVLDSGQVVEGDFFIDCTGFRGLLIEQTLQSGFEDWSHWLPCDRAVAVQTESVGPAVPYTLSAAHEAGWRWRIPLQHRVGNGLVYCSRYMSDEEATGKLLREVQGRTLTQPRVIRFRAGRRRCTWNKNVVALGLASGFLEPLESTSIHLIMSGITRLMQLFPFGGVQPCLVEHYNRATRTELESIRDFIVLHYHATEREDTPFWRHVRSMAIPESLAHRLEMFRSCAHVWQHEGELFRTDSWLQVMLGQGVQPRRYHHYARAMSDHDLERLLTGLRRSVAETVRELPSHQEFLDRYCRATEILDAS

SEQ ID NO: 89380 - protein, 552 aa, Dehalococcoidia bacterium; identical to SEQ ID NO: 85276
  misc_feature (1)..(552): tr|A0A2A5EVZ4|A0A2A5EVZ4_9CHLR Tryptophan halogenase OS =Dehalococcoidia bacterium OX=2026734 GN=COA56_15520 PE =4 SV=1

SEQ ID NO: 89381 - protein, 517 aa, Erythrobacter sp.
  misc_feature (1)..(517): tr|A0A3B9B0X4|A0A3B9B0X4_9SPHN Tryptophan halogenase OS =Erythrobacter sp. OX=1042 GN=DCF81_08675 PE=4 SV=1
MSGEFTNLVIVGGGTAGWLSACILAARRPELAITLIEAPDIPTVGVGEGSWPTLRETLAVIGIDETEFLKECDASFKQGSRFDGWVDGSERDCYYHPFSAPLSGSMPDILTAWKMQNDGQPYAEAVSPQAAICNRDLAPRQRTMPPFAGALNYGYHLDAGKFGALLASHAVKRLGVRHVHGKVTGTERGVDGLFTRLLLDNGSAIEGDFFIDCTGMASKLIGEELEIGWVDRSDVSFNDRALAVQVPVVPDSAIASQTIGTAHRAGWLWDIGLPTRRGVGCVYSSRFLSDDEAQAILMNYIGARIAGAGQTALTPRGLKFSTGYRDKFWAGNCLAIGLSAGFIEPLEASAIVLIELSLKALADGYPQSRAALPRLADRFNSLFRYRWERIVDFLKLHYVLSTRTEPYWQAHRDPATIPSSLAAHLDLWRDHAPSSGDFPQIDEIFSAASHQYVLYGMRFPQPADISSAPSSEVQRQFAKVAERSRALSAALPSNRAYFDALCSSMDKNSARGVPTRQ

SEQ ID NO: 89382 - protein, 499 aa, Erythrobacter sp.
  misc_feature (1)..(499): tr|A0A3B9UKQ0|A0A3B9UKQ0_9SPHN Tryptophan halogenase OS =Erythrobacter sp. OX=1042 GN=DCL34_10325 PE=4 SV=1
MTERKPPHVVVLGGGSAGWITACLLHHRWHSRGGKVTVVESPEIGIIGVGEGSTPQLKAFFDHLGIDEDDWMAACDATYKLGIRFTGWSERPGFESYFHPFPGPVDLHTEPGFVHNCKLRRRGFDVPAHPDDWFLAEVLADDHRGPHPRDNFPFMPSYGYHFDAHKLGQFLRDWATERGVSHRPLRVTDVEQGAQTEIVALLCEDGTRIEGDIFVDCSGFRSVLAQQKLGAQFIPFGENLFNDRAVVLPSAHGTRFKPQTDSIAMRAGWRWSIPLTTRVGNGYVYSSKYVSDEDAEAELREAIGMQDEGEARILEMRVGRIAESWTGNCLAAGLSQGFIEPLEATALHIVIATALDFADAYEKGGYGSAHRDRFNQRIAAKYEGIRDYIVAHYRLNQRSDTQYWRDNAANDALSDNLKGMITAWFTHDDLREVNLRQHDGNPHYANMSWHALFAGYGTFPPEAKMVPTPTGLVTVEVDHTRRMLSACATNFLRYAPLSD

SEQ ID NO: 89383 - protein, 143 aa, Erythrobacter sp.
  misc_feature (1)..(143): tr|A0A3D0WKH9|A0A3D0WKH9_9SPHN Tryptophan halogenase (F ragment) OS=Erythrobacter sp. OX=1042 GN=DEP68_06985 PE =4 SV=1
ADEFNRQSAFEWSAIRDFLILHYAANERSGEPFWDRARAMDLPASLATRIELFRSTGYLSREHDELFTEAGWTQVLLGQGILPRATHPNADALGPAALERLLAGIESDIADTVGAMPGHAQFLRSYCMPQTANRPAATKETAR

SEQ ID NO: 89384 - protein, 396 aa, Sphingomonadales bacterium
  misc_feature (1)..(396): tr|A0A4Q5T1U9|A0A4Q5T1U9_9SPHN Tryptophan 7-halogenase (Fragment) OS=Sphingomonadales bacterium OX=1978525 GN= EOP59_08145 PE=4 SV=1
GDVAIVCAGHVADLALDAEDAALDGPAARKFEFPNEDPASIRSTFSYAYHFDAGLYAEFLRRWAIERGVLRIEGKVRDVARADNGDIAALNLESGETVAGDFFVDCSGFRALLLGQTLGVGWEDWSEWLPCDRALAVPTARAEDFTPFTRVTAQEAGWIWRIPLQHRTGNGYVFSSRFTDEERACEILLGAIDGEPIAEPRLLRFSAGRRAEGWRGNCVGIGLASGFLEPLESTSIFLIQAAVHDLITLMPARGSGIDPRLAAEFNRLCEIQYDRVRDFLVLHYTANRRLGQPLWDHVRSMKLPDSLVHKIALFEARGAVPNYQFGLFARDSWLSVLVGQGIVPRTYDRLADALDLDEAEERLDDFASRIALNVAAMTSHQDFIQSYCAAGREVAA

SEQ ID NO: 89385 - protein, 494 aa, Sphingomonadales bacterium
  misc_feature (1)..(494): tr|A0A4Q3A4L2|A0A4Q3A4L2_9SPHN Tryptophan 7-halogenase OS=Sphingomonadales bacterium OX=1978525 GN=EOP60_00465 PE=4 SV=1
MSAAGIRHTVIVGGGTAGWMCAAALGKTLGPGHRITLIESDAIGIVGVGEATVPSIREFNKLLQIDEDAFLRATRATIKLGIEFVDWSGAGQSYLHPFGYFGVDMSGVGFHHHWLRHVAEGGDADPWHYNLEAQAARSGRFERGMRHGPVNHAFHFDAGLYARFLRGEAEKRGVSRVEGEIVDVALDGESGHVTGLTLRSGARIEGDFFIDCSGFRGLLIEGALKTGYIDWSHWLPCDRAVAMPCARGDGPVTPVTRSTAREAGWQWRIPLQHRTGNGYVYSSAHLDDDRAVELLVSRLDGEQLAEANRLRFTAGRRRKSWNGNVVALGLASGFLEPLESTSIHLIQTGIIRLLGLYPRNSIDPAVVDRFNADTAHEYELLRDFVLAHYAVSSGIDAPFWRDVRATPLPDSLAARLDAFRTSGNILNEPTEFFGPTNWFAILWGQGLRPGDYHPLADTLPADERVRRLTLLRQRISEGLADLPPHEAFLAQHAV

SEQ ID NO: 89386 - protein, 519 aa, Sphingomonadales bacterium
  misc_feature (1)..(519): tr|A0A4Q5RUJ3|A0A4Q5RUJ3_9SPHN Tryptophan 7-halogenase OS=Sphingomonadales bacterium OX=1978525 GN=EOP62_13600 PE=4 SV=1
MDTSVRRIVIVGGGTAGWLAACLIAARANPDAVEPLSVTLIESPDIPTIGVGEGTWPTMRRTLERIGISEADFLLACDASFKQGSRFDGWRTGAADDSYYHPFVPPIDGDPHALVAAWQQAGDMPFAAAMGPQPRIAALHLAPRQRAMPDYAGALNYAYHLDAAKLAGLLSRHAVQRLGVEHIRDHVTGVTMAENGDIAAVQTRGSGELEGDLFLDCTGHAALLIGEQFGVPFIDRSDVLFNDRALAVQVPVAPDSPIASQTTATAHAAGWIWDIGLPARRGVGCVYSSKYMTDEVAAETLGAYLRATMPAGEVAPSFRRLVFRSGHRERFWERNCLAVGLSAGFLEPLEASAIVMIELSLEALLDNFPSTRGAMDLHARRFNDRFRYRWDRVVEFLKLHYVPSKRDEPYWQANRDPASIPPRLCDLLEIWRDQPPSITDFPMADEIFPAASYQYVLYGMGYPPPAPGAIRRQASEAIAGHMRQAEQRGRALAASLPENRAYLDALRAERPSSDKRMAE

SEQ ID NO: 89387 - protein, 500 aa, Erythrobacter sp.
  misc_feature (1)..(500): tr|A0A3B9UNG8|A0A3B9UNG8_9SPHN Tryptophan halogenase OS =Erythrobacter sp. OX=1042 GN=DCL34_13690 PE=4 SV=1
MSSDYKPRRIVVAGGGTAGWMTAAALAKTMGEAIDLTLVESDAIGTVGVGEATIPPLINFNRLLGINEAEFMRETQATFKLGIEFENWKRDGEKYFHSFGSTGRDHWSAGFQHFWGEGLLRGHDYSYDDYCLELCAAYAGKFAHLPDNRLNYAYHLNATAYAAFLRRIAEGAGASRVEGKIAHVELDGESGNIAAIGLENGQRLEGDIFVDCTGFRSLLIEGALHVGYDDWSHHLPCDSAIAVQTELSASPVPYTRAIAHDAGWQWRIPLQHRGGNGIVYCSRYLSKDAAHDRLMSTLEGKAISEPRAIPFTTGARRKQWHRNCIAIGLSSGFLEPLESTSIHLIQRAVIRLLRMMPAGEVSERDIAEFNDQQLTDMIQVRDFLILHYKATDRRDSAFWRQCATMDIPDSLTQKMELFRETGRVFRKNDELFVENSWVQVMLGQGILPQAFHPVAKKMSDEELSKFLEMLRTNVARTVQGLPAHHAYVAQFCGAKEVAAA

SEQ ID NO: 89388 - protein, 513 aa, Erythrobacter sp.
  misc_feature (1)..(513): tr|A0A2D8MDV2|A0A2D8MDV2_9SPHN Tryptophan halogenase OS =Erythrobacter sp. OX=1042 GN=CL949_11610 PE=4 SV=1
MKQSGQSRSGGSRKRRVVVLGGGTAGWMTAAGLVRLLPDAVDVQLVESEDIGIVGVGEATLPHIRSFIETLGIDEAAFMEATHATYKLGIDFRDFGRIGTSYIHPFGSFGEELNGVGFHHYWLELHRHGLAGQLGDYSLAVAAALANKFRPPAADESLASTYGYAYQFDATLFGPFMRSFSTEAGVTRHEGKVVAVQRNTANGDVAALELDDGRLIEGDLFVDCSGFRSLLLGEELGEQWEDWSHWLPCDRAAAMPCTHSSEDISPYTTATAMPAGWRWQIPLQHRMGNGYVFSSTHVSEDRACEAIIGHVDGKPLADPRILRFRPGRRRRSWSHNVIGVGLASGFLEPLESTSIYLAQMAITYLIELFPQADAIDASDRDEFNRLVDMEYDRIRDFLILHYHVTTRDDSEFWNDMRTMRVPDTLADKLELWRRTGRVAKYSEGLFFEPSWVAVYIGQGLLPEQHDARPAALDRTKLTRAVDRLEQAVRAEVQGMPRHRDFLRSDASRLAPAA

SEQ ID NO: 89389 - protein, 500 aa, Sphingomonadales bacterium
  misc_feature (1)..(500): tr|A0A4Q3D8E6|A0A4Q3D8E6_9SPHN Tryptophan 7-halogenase OS=Sphingomonadales bacterium OX=1978525 GN=EOP61_10490 PE=4 SV=1
MTDRKIRSIVIVGGGTAGWMSAATLARILSTQYASITLIESDEIGIVGVGEATIPQMATFNRMLGLDEDQFMRETQGSFKLGIQFVNWGRQGHTYYHPFGKYGLDMQGVSFHAFFLRLHQMGEAPNIDDWSLQATASRANKFMRPIDAGNSPLSEIPYAFHFDAGLYAKFLRRYAEGLGVVRREGKIVDVKLRGEDGFIQSVVMENGDAVEADLFIDCSGFRGLIIEQVLKAGFTDWSHWLPCNRAVAVPCESVDEWTPYTRSTAHTAGWQWRIPLQHRTGNGHVFSVDYMSEDEATQILLDNLDGKPLADPRIVRFTTGHRNKFWIKNCVSMGLAGGFIEPLESTAIWLIQSGLSRFLTMFPDRDFNQADIDRYNRIMTTDYEEIRDFIILHYHATERDDSPFWNYCRTMDIPERLAEKMRVFRSHGRCFRENEELFNDTSWFAVMHGQLMNAQSYDPVADIMSLDETRSRLAHIKEAISASADYMPKQRDFIREHCAA

SEQ ID NO: 89390 - protein, 505 aa, Sphingomonadales bacterium
  misc_feature (1)..(505): tr|A0A4Q2ZKL0|A0A4Q2ZKL0_9SPHN Tryptophan 7-halogenase OS=Sphingomonadales bacterium OX=1978525 GN=EOP60_10155 PE=4 SV=1
MTAPQPIRSIVIVGGGTAGWMAAAAFSRLVRTGVKVTLVESDAIGTVGVGEATIPPIRNFNGLLGIDENEFLAKTQGTIKLGIDFVGWHREGERYFHPFGEYGVDIEGVKFHQFWRKMAASGQASDIGDYNLCAMAMRLGRYAPPSPDPASILSRMAYAYQFDASLYAAFLRDYAEKRGVVRVEGRVIDVPLRGSDGHIEAVVLEGERRIDGELFIDCTGFRALLIEETLGAGWESWAHWLQCDRAVAVPCESMPDGTITPYTRCTARTAGWQWRIPLQHRLGNGYVYCSGDISDETARDTLLANLDGKPLRDPFMLRFEAGRRRKAWHKNCVALGLSSGFLEPLESTSIHLIQTGISKLMALLPDAGFSAVERDEYNRLTDAQMEQVRDFIILHYHANARQDGDLWRRAREMAIPETLRRKLDLFRGRGRFFRYDDELFAESSWIAVMLGQGVMPAGWDPLADATDPAQVRHTLDRIRTLFAQAAQSMPRHEEWLARNASGRAA

SEQ ID NO: 89391 - protein, 276 aa, Sphingomonadales bacterium
  misc_feature (1)..(276): tr|A0A4Q5SQX8|A0A4Q5SQX8_9SPHN Tryptophan 7-halogenase OS=Sphingomonadales bacterium OX=1978525 GN=EOP59_13395 PE=4 SV=1
MLIEGALKSGYVDWRHWLPCDSAVAMPSERQGDPPPFTRSTAREAGWQWRIPLQHRDGNGYVYSSAHLGHDDAVANLTERLPGKALADPNRLRFVAGHRRVIWNRNCVAIGLAGGFLEPLESTSIHLIQTAIIRLLALLPRDGFDPGVAARFNRETINEVERIRDFVIAHYALAGRDDTDFWRDIAAAPIPDSLAERIAVFRATGNILFEPGDLFGPTNWYCVLAGQGARALSWHPIADGLAPEELARRLATLRGRVAEQLAELPPHTAYLASLAR

SEQ ID NO: 89392 - protein, 516 aa, Erythrobacter sp.
  misc_feature (1)..(516): tr|A0A354VU16|A0A354VU16_9SPHN Tryptophan halogenase OS =Erythrobacter sp. OX=1042 GN=DDZ54_07430 PE=4 SV=1
MSSEFNRLVIVGGGTAGWLSACLLAARRPELDVTLVEAPDIPTIGVGEGSWPTLRETLAAIGIDEARFLSACDASFKQGSRFDGWVDGSADDSYYHPFTPPASGQMADILSAWSAQPRKTASFAGAVTPQIAVCDRDLAPRQRAMSAFTGALNYGYHLDAAKLGALLAEHGTAHLGVKHVRAHVTGVERGEDGLLAKLMLRGSDTVEGDFFIDCTGMAARLIGDELGVGWRDRSDVSFNDRALAMQVPVAPGSAIASQTVGTAHKAGWLWDIGLPTRRGIGCVYSSRFLSDEDAETILADYITAKVPGADPGALASRKLQFATGHREQFWRGNCLAVGLSAGFIEPLEASAIVLIELSIKALADAYPHSRSALPRLADRFNALFRYRWDRIVDFLKLHYVLSKRGEPYWRAQRDPATIPETLAAQLELWRDHPPSAADFPQVDEIFSAFSQQYVLYGMGFPLPSAARPAPGHDALRRLAEVSERSRALTAALPSNRTYLDTLRAAQTGRGAQGAIA

SEQ ID NO: 89393 - protein, 521 aa, Erythrobacter sp.
  misc_feature (1)..(521): tr|A0A357H8I5|A0A357H8I5_9SPHN Tryptophan halogenase OS =Erythrobacter sp. OX=1042 GN=DD861_10345 PE=4 SV=1
MRPDDGQAQAIGSICIVGGGTAGWSAAALLSQVLRGSGCRITLIESSAIPTVGVGEATIPPIFDFLRNIGADEVEFIRRCRATFKLGIQFRDWLHHNHAYWHPFGNLGVTINRRPFHHYYCMNRAAGYGETLADLCPSVALAEDGKFAFPSPDGQWPGGAVAYALHFDAGLVAAFLRDHAVAAGVERLDRRIVGATRGEGERIARVQFDDGESLEADFYIDCSGFRGLLIEETLGAGFEDWKHWLPCDSAVAAPTAAQEQRAPYTVATARSAGWQWRIPLQHRTGNGLVYASDFISDADAQAQLLAGLDGEPQADPRVLRFTAGLRKRAWVGNCLAIGLSAGFLEPLESTSIHLIHTGLNRLLDLFPDRRFDPALIAAYNRDVHREYAHIRDFLLLHYVPNRREGEPFWDHMRGLDLPDTLAEKIELFTRTGRIMSRQRELFSDISWFYVMHGMGLTPAALDPLAEAAPFGEVRKVIDQLRGAMQAFRSAAPTHDAILDRLLDPAETRRPQFGTGGGWTTR

SEQ ID NO: 89394 - protein, 68 aa, Sphingomonadales bacterium
  misc_feature (1)..(68): tr|A0A4Q5TAA0|A0A4Q5TAA0_9SPHN Tryptophan halogenase (F ragment) OS=Sphingomonadales bacterium OX=1978525 GN=EO P59_05865 PE=4 SV=1
MSGAPSHIVVVGEDAALWLAVSTLHAALRGAGVSVQAVELPPRLRAADVLVTQPSLEALHGRLGIQED

SEQ ID NO: 89395 - protein, 500 aa, Sphingomonadales bacterium
  misc_feature (1)..(500): tr|A0A4Q3A216|A0A4Q3A216_9SPHN Tryptophan 7-halogenase OS=Sphingomonadales bacterium OX=1978525 GN=EOP60_02845 PE=4 SV=1
MTDRKIRSIVIVGGGTAGWMAAATLSRILGIDYASITLIESDAIGTIGVGEATIPQMATFNRMLGLDENQFMRETQGTFKLGIQFVDWARKGHRYFHPFGKYGLDMKGVSFHAFFQRLHQMGEAPDIDAWSLQAMASRDNKFMRAIEAGNSPLSEIPYAFHFDAGLYARFLRNFSENLGVVRREGKIIDVKLRGEDGFVQSVVLEDGSEVEGDLFVDCSGFRGLIIEQALKAGYTDWSRYLPCNRAIAVPCESIDDWTPYTRSTAHTAGWQWRIPLQHRIGNGHVFCSEFMSDDEATGILLANLDGKPLADPRVVPFMTGHRNKLWVKNCVALGLAGGFIEPLESTAIWLVQSGLSRFLTMFTDRDFNQADIDRYNRIMTTDYEEIRDFLVLHYNATERDDSPFWDYCRNMEVPERLAEKMRVYRSHGRCFRENEELFNDTSWFAVMHGQLMKAHSYDPVADTMSLDETRARLAHIKEAIANSADYMPRHRDFIREHCAA

SEQ ID NO: 89396 - protein, 538 aa, Pseudomonas sp.
  misc_feature (1)..(538): tr|A0A1H3R230|A0A1H3R230_9PSED Tryptophan halogenase OS =Pseudomonas sp. NFIX28 OX=1566235 GN=SAMN03159453_0263 2 PE=4 SV=1
MNKPIKNIVIVGGGTAGWMAASYLVRALQQQANITLIESAAIPRIGVGEATIPSLQKVFFDFLGIPEREWMPQVNGAFKAAIKFVNWRKSPAPSRDDHFYHLFGNVPNCDGVPLTHYWLRKREQGFQQPMEYACYPQPGALDGKLAPCLSDGTRQMSHAWHFDAHLVADFLKRWAVERGVNRVVDEVVDVRLNNRGYISNLLTKEGRTLEADLFIDCSGMRGLLINQALKEPFIDMSDYLLCDSAVASAVPNDDARDGVEPYTSSIAMNSGWTWKIPMLGRFGSGYVFSSHFTSRDQATADFLKLWGLSDNQPLNQIKFRVGRNKRAWVNNCVSIGLSSCFLEPLESTGIYFIYAALYQLVKHFPDTSFDPRLSDAFNAEIVHMFDDCRDFVQAHYFTTSRDDTPFWLANRHDLRLSDAIKEKVQRYKAGLPLTTTSFDDSTYYETFDYEFKNFWLNGNYYCIFAGLGMLPDRSLPLLQHRPESIEKAEAMFANIRREAERLRTSLPTNYDYLRSLRDGDAGLSRGQRGPKFAAQESL

SEQ ID NO: 89397 - protein, 274 aa, Moraxellaceae bacterium
  misc_feature (1)..(274): tr|A0A4Q6EL99|A0A4Q6EL99_9GAMM Tryptophan 7-halogenase (Fragment) OS=Moraxellaceae bacterium OX=1889775 GN=EOO 68_07120 PE=4 SV=1
LHTGFEDWSHWLPCDRAVAVQTKSVREPFPYTRSIAHPAGWQWQIPLQHRVGNGLVYCSRYLSDEGAKKVLLENVEGETITEPRVIHLRIGRALKQWNKNCISIGLASGFLEPLESTGLHLIQTGIIRLIKMFPAGEIDLTEVEEYNRQSKYEYERIRDFIILHYHVTNRSDSPFWNYCRTMSIPETLSNRIKIYKATTSVFRDHDELFHEGSWQQVMHGQGIVPNGYHPVVNKLSVEELKRFLSNIDMEIEKLVNLMPTHQQYIEKNCKANLI

SEQ ID NO: 89398 - protein, 451 aa, Moraxellaceae bacterium
  misc_feature (1)..(451): tr|A0A4V2BBY6|A0A4V2BBY6_9GAMM Tryptophan 7-halogenase (Fragment) OS=Moraxellaceae bacterium OX=1889775 GN=EOO 68_06050 PE=4 SV=1
MIQKHIVIVGGGTAGWMTAAALANQFNSDEIKITLIESESIGTVGVGEATIPHLRYFNQRLGIDEREFVRATNATYKLGIELVNWSAQPGSYIHPFGDFGEKLGSDEFYLGWLAHKRHYASADFSKCSTAVVAAKKHKFDYPKAQSEDWQGYSYAFHFDALLYAHYLRAYAERKGVIRREGVIKSVDFEQGESLTGDMFMDCSGFRSLLLTGALKVAFDDWSEWLICDRAIAVPSQSDQQFRPYTQAEAMSCGWRWEIPLVNRTGNGLVYSSAHMSDDNACAYLKSKIIGDTLAEPNFIRFKAGRREHCWARNCVAIGLASGFLEPLESTSIYLIQLGIMKFLELYSPHSNNIGARQEFNAVMGLEYERMRDFVILHYFAAQRIDSDFWRYCASMSLPASLQERLDIYRATGLIDQYDLGLFKTPSWASVLIGQHYFPDELLRRVAHLDKN

SEQ ID NO: 89399 - protein, 491 aa, Sphingomonas sp.
  misc_feature (1)..(491): tr|A0A0Q4HYZ5|A0A0Q4HYZ5_9SPHN Tryptophan halogenase OS =Sphingomonas sp. Leaf22 OX=1735687 GN=ASE70_00640 PE=4 SV=1
MTRMRIVIAGGGTAGWLAAALLTRQLSSLVEVTLVESEDIGTVGVGEATIPTIRSFHALLGLDEADFMGATGASFKLGIAFENWARAGDRYLHSFGEVGRSTWMGDFQHFWLEARAQGVAGPIGAYCLEHEAAEAGRFATGPDAPLNYAYHFDAGRYAAYLRTRSEAQGLTRVEGRIARVERVGESGDIAALVLDDGRRVAGDLFLDCTGFHALLIEQTLGVGFEDWGHWLPTDRALAVQTVATGPAPPYTRAIAHDAGWRWQIPLQHRVGNGLVYSSRHLSDDAARDRLLASVEGQTLTEPRLIRFRTGRRLTTWERNCVAISLSSGFVEPLESTSIHMVMIALTRLVQLLPFGHPGEAARARFNEQSRREIEAVRDFVLLHYHLNQRPEPFWRERREIAPPDTLAERIALFAQGAHAYQSADDLFRVGSWLQVMLGQGLEPAAHHPLAKMMPPGQLAAVLRDLNDGIAARVAALPAHQQFLDQYCRSSA

SEQ ID NO: 89400 - protein, 499 aa, Alteromonas sp.
  misc_feature (1)..(499): tr|A0A1L8MBI9|A0A1L8MBI9_9ALTE Tryptophan halogenase OS =Alteromonas sp. V450 OX=1912139 GN=BK026_04445 PE=4 SV =1
MNKPIHIVIAGGGTAGWMAANYFAHKWSSGKVNITLVESSDIGIIGVGEGSTPTLKRFFDELNIPENDWMPKCNATYKVSIQFNNWSPGSGINQYRHPFISQTDTFTQRAFEVNCRTRRLGLDTHVAPEDFLINGMLAKQNKAPLTPDNFPFRMEYGYHFDSALLGNYLRELAIGKGVTHVNAIISDVVLHPSGDISHLVTDKAIIEGDFFLDCTGFSSTLLQQALGVKFNSYSENLFNDSAVVLPTQAQKNIKVETQSTALSSGWCWTIPLQNRTGNGYVYSTAHLSKDQAEEELRRHLGFESTDVEARHLKMKVGQVGQHWHKNCLALGLSQGFIEPLEATALHLVQICIEYFSDTFEKNGFSTKPCSNYNSFARERFDRVRDYIVAHYKLNTREDSDYWHDNRENMVMSDSLNSILSAWFSRQDLASEIKRQNIGMHWDSVSWHCLLAGYGAFPPLEKNQPGRGDLYKEQNIERFIQGCALNFSDHNVVLNSQSRL

SEQ ID NO: 89401 - protein, 557 aa, Nitrospirillum amazonense
  misc_feature (1)..(557): tr|A0A248JVE4|A0A248JVE4_9PROT Tryptophan halogenase OS =Nitrospirillum amazonense CBAmc OX=1441467 GN=Y958_173 70 PE=4 SV=1
MADTEAPTDDARAKGAPVKNVLIVGGGTAGWLAAAYLARTLSIGQPGSARITLVESADIGILGVGEGTFPNIQRTLRRIGIDESVFMRESEATFKQGIRFDHWQHAPGPSATGAGQRDHYFHPFQSAIGPQDLDLIPYWLLGAAGDGVPLDTALTMQKRVADAALAPKRSGDADYAAPLNYAYHFDAVKFARLLRVVATDLGVRHVIDTVDAVPLDETGAVAGVVTRENGTLTADLYIDCTGFRAQLIGQALKSPYQSCRKWLFCDRAVALQVPYDQPDAPIPSYTISTAHEAGWTWDIGLETRRGIGHVYSSDHTDDARAEQVLRDYIGPAAADKTARTFRFEAGYRPEPWVRNCVAIGLSSGFFEPLESTGIVLIEVASVLLTSLFPWAGDMATAARQFNRIMRQRYERALDFLKLHYCLTRRTDTAFWRDNADAATVPDTLHDLLDRWRHRPPEGLDFDLNLDTFSEASWQFVLYGMGYHTDLSAQAGAFRHMDEARQQFAAIRAGTEQALAALPRHRDLITQIYRHGLRPRTPFGGAPSGRANLSSGMAGLSR

SEQ ID NO: 89402 - protein, 497 aa, Croceicoccus marinus
  misc_feature (1)..(497): tr|A0A217EYZ0|A0A217EYZ0_9SPHN Tryptophan halogenase OS =Croceicoccus marinus OX=450378 GN=A9D14_18570 PE=4 SV= 1
MGGTMHDFVIVGGGTAGWMAAAALARFLPRERSVALVESDAIGTVGVGEATIPQIRLFNQSLGIDDAELIRQTNGTIKLGIEFVDWSQNGSRYYHAFGTIGRRLGLVPFHHYWLRHQAQQPDADLWAFSTSALAAGANRFAPDQGRPDLPTGLAWAFQFDAALYAAFLRSYAEGRGVRRTEGRVADIRHDGASGLIQAVQLDDGRSIAGRFFIDCTGFASMLLGGKLGVGFDDWSRWLPCDRALAVQCEGVRPLTPYTRATARVAGWQWRIPLQHRTGNGLVYSSAHMDDQQAADTLLTNLDGRPLSQPRPLRFRAGRRRRAWVGNCLALGLAAGFLEPLESTSIHLIQSGIARLLELLPAADVAPALAAEYNRQTEREWQAVRDFLILHYHANDRPEPFWAERRSTPLPDRLQHRIDLFRATGQIARDPDDLFTEVAWLQVMVGQGIVPARHHPLANAPTPAELAEFLALARRHSAATVDRMPSHEAFLAALETPA

SEQ ID NO: 89403 - protein, 508 aa, Alteromonadaceae bacterium; identical to SEQ ID NO: 86020
  misc_feature (1)..(508): tr|A0A2D5M4H6|A0A2D5M4H6_9ALTE Tryptophan halogenase OS =Alteromonadaceae bacterium OX=1916082 GN=CL579_13515 P E=4 SV=1

SEQ ID NO: 89404 - protein, 522 aa, Alteromonas mediterranea
  misc_feature (1)..(522): tr|F2GAR4|F2GAR4_ALTMD Tryptophan halogenase OS=Alterom onas mediterranea (strain DSM 17117 / CIP 110805 / LMG 28347 / Deep ecotype) OX=1774373 GN=MADE_1019530 PE=4 S V=1
MTTATPITHIVVVGGGSAGWLTAGRIAAQHQCATRKDIKVTLVESPNVPIIGVGEGTWPTMRSTLIALGISETTFIKECDATFKQGAKFAKWTTGEESDFYYHPLMLPQGFSQTNLGPYWQTVAPELNESFSHAVCVQEAICEAGCAPKSIRHAEFAGTANYAYHLDAGKFTAFLTKHCTEKLGVHHVLADVNHVESFDNGDIKALHTEQGVIVEGDLYVDCTGFKSMLLGEHYKVPFIPCDDVLFIDRALAVHVPYDTPQSPIASHTISTAQDAGWIWDIGLQSRRGVGHVYSSRHQNKDEAYARLDTYVRQTSSLNGIDDINVKDITIQSGHRQRFWQNNCVAVGLAAGFLEPLEASALVLVELSASMIAEQLPANRAVMAIVAKRFNDTFSYRWQRIIDFLKLHYMLSKREDSAFWRDNRDSHTIPDSLKELLALWQYHPPSDKDFTSNNEVFPAASYQYVLYGMGFTSQLGTHQQWVNADFAKQQLMQNRKARSMAVEKLPKHRELINKIHQFGLQAV

SEQ ID NO: 89405 - protein, 538 aa, Burkholderia thailandensis
  misc_feature (1)..(538): tr|A0A5F1BZ17|A0A5F1BZ17_BURTH Tryptophan 7-halogenase OS=Burkholderia thailandensis OX=57975 GN=C6946_25200 P E=4 SV=1
MSNPIKNIVIVGGGTAGWMAASYLVRALQQQANITLIESAAIPRIGVGEATIPSLQKVFFDFLGIPEREWMPQVNGAFKSAIKFVNWRKSPERSRDEYFYHLFGSVPNCDGVPLTHYWLRKREQGFQQPMQYACYPQPEALDGKLAPCLPDGTRQMSHAWHFDAHLVADFLKRWAVERGVNRVVDEVVEVHLNDRGYISSLSTKESRTLEADLFIDCSGMRGLLINQALKEPFIDMSDYLLCDSAVASAVPNDDARVGIEPYTSSIAMNSGWTWKIPMLGRFGSGYVFSSKFTSRDQATADFLDLWGLSDKQPLNQIKFRVGRNGRAWVNNCVAIGLSSCFLEPLESTGIYFIYAALYQLVKHFPDTSFDPRLADAFNAEIVDMFDDCRDFVQAHYFTTSREDTPFWLANRHDLRLSDAIKEKVERYKAGLPLTTTSFDDSTYYETFDYEFKNFWLNGNYYCVFAGLGMLPDRSLPLLRHRPESIDKAEAMFARIRREAERLRTSLPTNYDYLRSLREGDAGLSRSQPGPTLATPEIL

SEQ ID NO: 89406 - protein, 510 aa, Stenotrophomonas sp.
  misc_feature (1)..(510): tr|A0A1E7RTA7|A0A1E7RTA7_9GAMM Tryptophan halogenase OS =Stenotrophomonas sp. BIIR7 OX=1904462 GN=BIY45_00440 P E=4 SV=1
MNAANTTTQGRIRKVVIAGGGTAGWLAGCALAHQFRDQLEITLVESEQIGTVGVGESTVPPIRTFHRFLQIDEQEFLREVAGTFKLSISFENWRRPGERFIHPFGTIGQNTWATPFHHFWLDSQRRGMASDLGDFCLESVASRGDQFSLQTQPQVNYAYHFDAGLYAKFLRRKAEANGLRRVEGKIREVRQHAHDGSVQALVLEDGQVLEGDLFIDCTGFRGLLTEQTLHTGYEDWNQWLPSDRAVAVQTESVKPPVPYTRAIAHEAGWRWHIALQHRVGCGLVFSSRHMSDDEAQAKLLRDIEGEPLRDPWLVPFRSGRRLKAWNKNVVALGLASGFIEPLESTSIHLTISSVVRLIQLFPIEGITPTLQALYNDVGQKEMEHVRDFIILHYHATQRDEPMWKAAREMELPESLAVRLRAWRERAHAWQDPGELFRVDSWTSVLMGQGIQPGPAHPLASAISDDDLRTLLQRIRQPIQQAVATMPSQADFIAQYCKASEDVWPRRMATA

SEQ ID NO: 89407 - protein, 496 aa, Alteromonadaceae bacterium
  misc_feature (1)..(496): tr|A0A2E7GVA4|A0A2E7GVA4_9ALTE Tryptophan halogenase OS =Alteromonadaceae bacterium OX=1916082 GN=CL578_22170 P E=4 SV=1
MQKDSIKHIVIAGGGTAGWMTAAALGKLFGANIKVTLIESDAIPTVGVGEATIPTLHLFHDLLKIKESEVMAATNATFKLGIKFEDWYQRNQSYIHSFGRFDHGCWAAGFQHFWLRGRQLDIASEIGDYCPEHLACRMGKFATAPKQERNHAFHLDAGLYAKFLREFAEQYGVRRIEGKIDNVNLNHNNGFIQSISLESGQRVEGQLFIDCTGFRGLLIEQALHTGYEDWSHWLPCDSAVAVQTELNESNVPYTRSIAHDAGWQWQIPLQTRVGNGLVFCSKYISDDEAKTQLLNNIRGKTLNPPRVLKFKTGVRRKLWNKNCVAIGLAGGFIEPLESTSIHLIQQSIIRLMQSLPSAHMESPIIDKFNATMRNEIDNIRDFIILHYHATARKDSAFWRYCKDMPIPTSLHERMEQFAHSAHVHQGNGELFGEASWLQVMLGQGITPKAYHPIVDLMPVQELASFLDNVKQQTARRVSSLPNHLAFIRYYCKRAAV

SEQ ID NO: 89408 - protein, 533 aa, Xanthomonas sp.
  misc_feature (1)..(533): tr|A0A3Q9Q5L7|A0A3Q9Q5L7_9XANT Tryptophan halogenase OS =Xanthomonas sp. ISO98C4 OX=1680158 GN=AC801_21310 PE=4 SV=1
MGMWPVERGQLAPFAYPSAVLAQECIGMIPAPLRNIVIVGGGTAGWMAAAAFARVLGPTFKVQLIESEQLGTVGVGEATVPHIKAFNNLLGIDEAEFVRQTQGSFKLGIEFVDWQRPGSTYMHGFGTQIGHPLGLLPFHQYWIKQHARGKAQPLGAYTLNTVAAARGKFMTSAGDVPANSPLANIAYAYHFDATQYAHFLRRYSQQRGVTRIEGLVEQVQLHPESGHVQSLQLASGQTVHGDLFIDCSGFGGLLIEQALHTGYHDFTHWLPCDRALAVPCEKVGPPTPYTRSTARAAGWQWRIPLQHRTGNGYVYCSAHISDDEAAATLLANLDGKPLADPRPLRFTTGRRKQCWNRNVVALGLASGFLEPLESTSIHLIQSGISKLLELFPREGISPVLVQRYNDRLAFEFDRIRDFLLLHYHATERDDSAFWRHCRQMPITPELQATLNLFRDSGRFYRNAEEMFAEISWVQVLVGQGILPQGYHPLVDQVPDRDAEGFLASVAHTISHCVDVMPGHQHFIDRYCKAAAVP

SEQ ID NO: 89409 - protein, 502 aa, Sphingopyxis flava
  misc_feature (1)..(502): tr|A0A1T5AUR2|A0A1T5AUR2_9SPHN Tryptophan halogenase OS =Sphingopyxis flava OX=1507287 GN=SAMN06295937_1004179 PE=4 SV=1
MSDSRITKVVIVGGGTAGWMAAAALSRTMDGLSIRLVESEEIGTVGVGEAAIPSIRLFNALIGIDEDDFVRETRGSFKLGIEFQNWGRIGDVYMHAFGQIGRSLGMLPFQQFWLRGRAEGVAGRFGTYSLNETAALQNRFARLPHIPNTGLDGIAYAFHFDAALYAAYLRRIAEAAGVDRTEGKIAEVRWDGESGHVEAVVLEDGTAIDGELFIDCSGFRALLIESALQTGFEDWTHWLPCDRAIAVPSENIGPARPYTQAIAHQSGWQWRIPLQHRTGNGHVFCSDFISEDEAAAVLLAHIGGRLLAEPRTLRFRTGMRSRAWSGNVVALGLASGFLEPLESTSIHLIQNGIARLLAHFPGRDFDAANVDAYNRRVRFDYERIRDFIILHYHANQRTDSAFWTRCREMAIPETLMQKIDLFRSQGRIVREGDELFVEIGWFQVLTGQNVAPRAYHPMADQLSRDELSGFFGDIKTIVAGTASRLPTHDDFIAQHCAAGVTV

SEQ ID NO: 89410 - protein, 517 aa, Alteromonadaceae bacterium; identical to SEQ ID NO: 86919
  misc_feature (1)..(517): tr|A0A2D9KM56|A0A2D9KM56_9ALTE Tryptophan halogenase OS =Alteromonadaceae bacterium OX=1916082 GN=CL582_22815 P E=4 SV=1

SEQ ID NO: 89411 - protein, 514 aa, Stakelama pacifica
  misc_feature (1)..(514): tr|A0A4R6FL87|A0A4R6FL87_9SPHN Tryptophan halogenase OS =Stakelama pacifica OX=517720 GN=EV664_10688 PE=4 SV=1
MVARTRHIVIVGGGTAGWLTAGLIAAKHRARIPHDLTVTLVESPTTPILGVGEGTWPTLRSTLARIGVSETDFFRECDAAFKQGALFARWTTGAADDAYYHPLMLPQHFSKLNLVPHWLAQQEASSFCDAVCPQGRLCDDGLAPKTIATPEYDGVANYAYHLDAGKFAPFLQRHCCEKLGVCHVLADVREVRLHEHGDIRAIDTEQAGEIAGDLFIDCTGFRSLLLGDAMGVGFKDCSDILFCDTALAVQMPYPDEHSPIATHTISTAQSAGWIWDIGLPTRRGIGHVYSSRHQSQDAAERELRAYLGPGGADLPIRQIAIRSGHRETFWKRNCVAVGVAAGFLEPLEASAIVLIELSAKMIAEQLPACREVMDVIASRFNETTHYRWGRIIDFLKLHYVLSKREDSEFWRDNRLPETVPDRLRDLMLLWRYQSPWFHDEFDRVEEVFPPASYQYVLYGMGFETEVEPALLVSDRRLADQAMRENAVQTQRMRQGLPRHRDLIDRIHQHGLQPV

SEQ ID NO: 89412 - protein, 501 aa, Sphingomonas sp.
  misc_feature (1)..(501): tr|A0A0Q4GTZ1|A0A0Q4GTZ1_9SPHN Tryptophan halogenase OS =Sphingomonas sp. Leaf22 OX=1735687 GN=ASE70_08975 PE=4 SV=1
MEARDRIRRVVILGGGTAGWMTAAALSRSFGRAVDVTLLESEAIGTVGVGEATIPTIHWFNELIGLDEREFLRATKATFKLGIEFVDWTAPGHRYFHPFGQFGAALPGVAFHHRWLKARADGMDVPLPALSLAAQLARQGRFAKPVGDARSILSTLGYAYHFDAGLYAAYLRQMSEAGGVRRVEGKLQAVDRDGETGFVTALTTERGERIDGDLFIDCSGFRALLIGEAMGEPFEDWSHWLPCDRAVAVPCARLPATTPYTRSTARAAGWQWRIPLQHRTGNGYVFASRYVSEDEATATLMANLDGEALAEPRLLRFTAGTRRRPWRDNVVAIGLSSGFLEPLESTSIHLIQSGITKLLTLFPNRDCDPALADRFNDVFTRDMDGIKDFLILHYHATSGRSEPLWQHCRTMELPATLVARETQYRRSGRLILDGDELFRDASWLAVLNGQGIVAQGYNPLADAIDADGNRAQVRQIADVIARAAPTLPLHDVALAQAMGAT

SEQ ID NO: 89413 - protein, 508 aa, Nitrospirillum amazonense
  misc_feature (1)..(508): tr|A0A248JVG6|A0A248JVG6_9PROT Tryptophan halogenase OS =Nitrospirillum amazonense CBAmc OX=1441467 GN=Y958_173 60 PE=4 SV=1
MAEAMRSGRRIVIVGGGTAGWMAAAVLARVLKGRYGTIELVESAEIGTVGVGEATIPPIQFLNHLLGIDEVDFVRKTQATFKLGIEFVDWTRLNHRYFHPFGPHGHTIDAVSFHHYWLRQRAKGDTSDIGDYSPSTVAARMGKFQPPAPDARPGGPVIAYAYHFDAGLYAQYLRGIAERNGVKRTEGKIVQVTRRAPDGFIDSLVLENGTRVAGDLFVDCSGFRGLLIGETLKAPYEDWSHWLPCDRAVAVPCEGVAAITPYTRSTARPAGWQWRIPLQHRIGNGHVYSSRFISDDEATATLLANLDGRPLADPRPLRFTTGRRRNSWTKNCISLGLASGFMEPLESTSIHLVQSGLFRMVSLLPRDGFEQATVDEYNRLTNIEYEQIRDFLILHYHAVERDDSPLWNYCRTMEIPDSLRHKIDLFRARGRIARFDEQLFAEPSWVAVFLGQGIQPHSYDPVADVMPEAEVTARLARIREAIRRMADALPTHADFINRHCRADRPVAA

SEQ ID NO: 89414 - protein, 517 aa, Alteromonadaceae bacterium; identical to SEQ ID NO: 86008
  misc_feature (1)..(517): tr|A0A2D5LYC1|A0A2D5LYC1_9ALTE Tryptophan halogenase OS =Alteromonadaceae bacterium OX=1916082 GN=CL579_02375 P E=4 SV=1

SEQ ID NO: 89415 - protein, 513 aa, Sphingomonas sp.
  misc_feature (1)..(513): tr|A0A1H8DIM9|A0A1H8DIM9_9SPHN Tryptophan halogenase OS =Sphingomonas sp. S6-262 OX=1166340 GN=SAMN05192583_194 3 PE=4 SV=1
MQQVRNIVIVGGGTAGWLTAGVIAAKHQGRRPHGFTVTLVESPNVPTIGVGEGTWPTLRTTLKRMGVSETEFFRQCDAAFKQGARFNRWTTGAADDGYYHPLMLPQQFGQVNLAPHWLADDGDEDFCDTVTPQGRICDEGLGPKTMATPEFEGQANYAYHLDAGKFYHFLQRHCCDTLGVRHVLADVTQVQLAENGDIAGVETAQAGTIHGDLFIDCTGFSALLIGGAMQVPFKPCNDVLFCDTALAMQVPYDTPAAPIASHTISTAQSAGWIWDIGLPTRRGVGHVFSSSHIDADTAEQQLRAHVGEAARDLTVRRIPIRAGHRERFWVRNCVAVGLAAGFLEPLEASAIVLIELSAKLIAEQMPACREVMDTVAARFNATTSYRWGRIIDFLKLHYALTKRTDTDFWRDNLRAETMPDRLRALMELWQYQSPWLHEEFDRADEVFPSASYQYVLYGMGARTAVMPGSLDEDMALARRARRENQVQTQRLLSSLPGHRELIDRIVRHGLQPI

SEQ ID NO: 89416 - protein, 554 aa, Nostoc sp.
  misc_feature (1)..(554): tr|A0A252E3A1|A0A252E3A1_9NOSO Tryptophan halogenase OS =Nostoc sp. 106C OX=1932667 GN=BV375_04615 PE=4 SV=1
MSQYVQNIVIVGGGSAGWMTAAYLSKALKKNVHITLVESSNITKVGVGEATFSSIKSFFDFLGLQEYEWMPKCNATYKMGIKFVDWNSDRRHFYHPFERFDFIDGFSISEWWLKLKSFNEPFDYSCFMAPTLCDHQRSPRYLNGKIFDDRVEHLFSEKHFSEKNLITLADAEGQYPYAYHFDANLIARFLKDYSRQRGVKQIVDDVVDVNLTEDGSIDSLNTKEHGIVSGDLFIDCTGFRGLLINKALGEPFISYSESLLCDRAIAMQIPSDIQKNGINPYTTATALSSGWVWDIPLYGRNGTGYVYSSAFISAEEAEQEFRHHLGNVAHNCKASHIHMRIGRNRNSWVKNCVAIGLSSGFVEPLESTGIFFIQHGIEELVNHFPGKSFNEELICNYNKAVANCIDGVRDFLVLHYFASDRADTKFWQATKQEIKVPAELQEKFKLWRRRLPNKKNINPYFHGFETYSYSVMLLGLNHKPEGSLPLLEHLDNEKALAKFTAIKEKARYLSTNLPSQYEYLTYVIKSQEHSEYLSENHLPASFVSDSAHQIPIAS

SEQ ID NO: 89417 - protein, 519 aa, Stakelama pacifica
  misc_feature (1)..(519): tr|A0A4R6FYV1|A0A4R6FYV1_9SPHN Flavin-dependent dehydro genase OS=Stakelama pacifica OX=517720 GN=EV664_101606 PE=4 SV=1
MDDGKGKPDHINTVTVVGGGTAGWLAACRIAAEARRMGREIRLCLVESDRVPPIGVGEGTWPTMRNTLAKIGVSETDFVRECDATFKQGARFTGWADGSPGDSYYHPLNPPAGATRIDLARFWPGEGGGASFAGWIDFQAALCDAGLAPKAITSAEYQGQANYAYHLDAGKFAAFLKEHATSRLGVEHIVGDVADAVLDDSGDIGHLTLSDGRSVSGDLFIDCTGFAALLIGKVYAVPFRSCRDILFADRAIAMQVPYAQENAPIASQTISTATGAGWIWDIGLWARRGVGHVYSSAHCDDERAEKMLRDYIGPAAKDLTSRRIDIDAGYRTRFWQNNCVAVGLSAGFLEPLEASALMLVETSLDAIAERLPQNRQAMRIAARQFNTTFLHHWARIIEFLKLHYGITRRRDTDFWRDNADPASFPDELAERLEFWRHHSPNAQDFTHAREVFGWPSYQYVLNGMGFAADRSSLGDGSPNAAVARGLLEQLDRLRSEALTRLPAHRDLIRAIREHGLQRI

SEQ ID NO: 89418 - protein, 534 aa, Sphingomonas sp.
  misc_feature (1)..(534): tr|A0A1H8DGZ9|A0A1H8DGZ9_9SPHN Tryptophan halogenase OS =Sphingomonas sp. S6-262 OX=1166340 GN=SAMN05192583_192 4 PE=4 SV=1
MNEHTIRNVVIVGGGTAGWMAAAALSRFLNNGVTRITLVESEEIATVGVGEATIPPLLTFNRMLGIDENQFIRETGGTYKLGIEFAGWGDIGERYFHPFGAHGHDLGGVHFHQLYLRERRRRVMQDISAWSMSAVAAQAGKFARPAEGAQSAVKELMYAYHFDAGLYARFLRRYAEDNGVQRIEGKVVDVTVRPDDGHVTAVTLEGGRSVEGELFIDCSGFRGLLIEEALATGYEDWRHWLPCDRAVAVPSRYHGDPDPFTRATARGAGWQWRIPLQHRMGNGLVYCSEFMTADAAERELLGNLEGEPIADPRHLSFTTGRRKLAWNRNVVALGLSSGFVEPLESTSIHLIQSGIARLVALFPDRRFNPVERDEYNRQMRDLYEDVRDFVILHYKATRRTDTPFWDRCRTMSVPDSLQRKIDLFRAKGRIFRDAAELFATTSWVSVCLGQHVVPEEHEPAADALDEDKVAAAMEQMRQGYLQVEAQLPGHGDFLRHTGAGPANAPQPAPTPVPAGEPQFSFASETPFNFSATPL

SEQ ID NO: 89419 - protein, 513 aa, Pseudoalteromonadaceae bacterium
  misc_feature (1)..(513): tr|A0A2D6VQ94|A0A2D6VQ94_9GAMM Tryptophan halogenase OS =Pseudoalteromonadaceae bacterium OX=2026783 GN=CMK61_0 7770 PE=4 SV=1
MQKNEVKKVVILGGGTAGWLSAGLIAAQPHLTHNAQITLIESPDIATIGVGEGTWPTMRQTLKTIGISESEFIQRCDASFKQGSRFDGWCDDEGDAHYYHPFSLPVAYQQLNIAPYWFANKDAVSFSHAVASQTYLCDHHKAPKNHLHSAYQGEANYGYHLDAGKFAMLLQKHCTTKLNVEHIVSHVECINSDEDGYISSLQTRDHGTIAGDLFIDCSGTHAKLLHQHYGIELIEQHDVLFNDRAVAVQVPYLNPQQEILSYTKATAQDAGWIWDIGLQSRRGLGMVYSSRFANSEDAKQALSQYIAKTQPGTAQNELIFREISFTPGYRRRFWYKNCLAIGMSAGFIEPLEASALVMVELGLNNLLANFPTHRAAMPTLAKRFDEQCHYRWQRIIEFLKLHYVLSKRTSPYWQAHKEANSIPLQLQENLALWQYQSPWLNDFDRAQEVFSAASYQYVLYGMKQLPQFPVLAMPAAIIEHFSANQQQAKRGLQQLPTNRELLNHIQQFGIQPI

SEQ ID NO: 89420 - protein, 507 aa, Ponticaulis sp.
  misc_feature (1)..(507): tr|A0A2E7F217|A0A2E7F217_9RHOB Tryptophan halogenase OS =Ponticaulis sp. OX=2020902 GN=CMK08_15260 PE=4 SV=1
MEEAVKHIVIVGGGTAGWITAGTIAARHPDRSENGVQITLIESPDVPTIGVGEGTWPTIRRTLSRMGITEAEFLKTCDASFKQGSRFDRWVTGDASDSYHHPFDLPVSQNGTDVLHAWKTFAPEKSFAEAVCAQGSAPLNNLCPRQKGMPDYLGAMNYAYHLDAVKLAHLLKSHVLGKLGVRYVQDHVTEIVGAPDEDVSAVRCRDAGLIEGDLFVDCTGQASLMLGQHYGVGLHDQSHILFNDSAVVAQLPVAPDSPIVSQTVSTAHEAGWIWDIGLTTRRGIGCVYASRYMDADKAEATLRNYMGNSDVKVRHLNFTSGYRDEFWHRNCVAVGLSAGFIEPLEASAIVMVELSAEMIAENLPVSRAVMLLEADRFNKLFTYRWERIVDFLKLHYVLSKRTEPYWQENRDRETIPERLRNLLEIWKHRPPGPHDFEHASEVFPAPSYLFIMYGMGMEHQMHPTLQPRVQDQLQKEMQNVIRKQRSFASGLPTNRAYLSAYSAEPAL

SEQ ID NO: 89421 - protein, 496 aa, Moraxellaceae bacterium
  misc_feature (1)..(496): tr|A0A4Q6ERM5|A0A4Q6ERM5_9GAMM Tryptophan 7-halogenase OS=Moraxellaceae bacterium OX=1889775 GN=EOO68_03675 PE =4 SV=1
MAQSIQKIVIVGGGTAGWMAAAALSQYLKNKPVSIQLIESDAIGTVGIGEATVPAIHEFNRYLNISELEFIKFTKATFKLGIEFQHWFKEGHSFFHPFADYGVPINGISFYQCWLRMQQTGNSYDLEKFCLATQMAKQHKFAQPDSEVETPLALYNYAYHFDATLYAKFLRNYAEQNGVTRIEGKILHVHQHPTTGFIESVSLESEQKIEGELFIDCSGFSGLLIDKVLKTEYVDWSKWLQCDRAVAVQTINAESPVPYTKSTALAAGWQWKIPLQHRVGNGYVYASSVISDDEAIASLMKNIEGEALTTPRVIKFTAGMRKEFFVKNCVALGLASGFIEPLESTSISLIQTGISKLINFFPDLDFDPAKIAEVNRFNEMEYSRLRDFIILHYKANQRETNDFWRSLAAMDVPDSLQQKLEAFKTNGTLISYELETFQNPSWLSMYNGFNVVPERCSSEALALDPKQLKVAMDKIKSAIEQGVVHAPTHQDFLLQL

SEQ ID NO: 89422 - protein, 504 aa, Sphingomonas sp.
  misc_feature (1)..(504): tr|A0A0Q4HY45|A0A0Q4HY45_9SPHN Tryptophan halogenase OS =Sphingomonas sp. Leaf22 OX=1735687 GN=ASE70_16530 PE=4 SV=1
MPKPATVSTTDALVRQVVIVGGGTAGWMAATALSRALGPVGRHITLIESDAIGTVGVGEATIPPIRAFNAMLDIAEDRFLRETMGSYKLGIEFVDWGRIGQRYFHPFGAAGQDFHGVPFHQLWLRHRARGGDTGLTDYSMCTVTAREGRFGIPPAGDRTPLAHIAHAYHFDATLYAALLRRVAEEQGVVRHEGRVVQVDRDGGTGDVTAVRLDDGRTIAGDLFVDCSGFAGLLIEGALVTGYHDWRHWLPMDRALAMPTTRLDPLPPYTRATAHSAGWQWRIPLQHRTGNGHVYSSGFTTADDAERLLRDHVPGEPCGDVRSLSFTTGMRRKAWSHNVVALGLAAGFVEPLESTSIHLIQHGIQRLIALFPGAAVHPAERDAYNADMARAFEAVRDFVVLHYKATTRDDSDFWRTMRAMTVPDSLAHRIELWRAQGRLIPQAGDIFAVPSWAAVLTGQELWPAAYEPGVDRLNADSVEAALRDMHAAYRRAARSLPMHAAALPR

SEQ ID NO: 89423 - protein, 528 aa, Rheinheimera sp.
  misc_feature (1)..(528): tr|A0A1B7UMY4|A0A1B7UMY4_9GAMM Tryptophan halogenase OS =Rheinheimera sp. SA_1 OX=1827365 GN=A5320_10470 PE=4 S V=1
MDNSIRNIVIVGGGAAGWITAGLLAAEHNADQGVLAAIPKLTISLIESPDVPIIGVGEGTWPSMRLTLQKIGISETEFLLCCEASFKQGSKFINWRGQTTANRTLPDSYLHPFSLPIGQQELNLCPFWLPHQQDVAFADAVCQQFQLTELGLAPKQIATAEYSFINNYGYHLNAGKFSQLLQKHITEKLGVRYIADHVLTIHSQVNGDIKSVATREHGEIAGDLFIDCSGLRSILLGEHLQVPMISQQQVLFNDSALAVQMPYPTADAPIASCTHSTAQSCGWIWDIGLPTRRGIGHVYSSSHISDSAAEQQLRSYLTADFGETAANSAEFRKLSIAPGHRALCWKNNCIAIGMAAGFIEPLEASALALVEWTAKTLSSQLPANRAVMDIVAARLNKAFLQHWQQIIEFLKLHYVLSQRADHDYWHDHRESSSIPASLQDALRLWRYQVPSAMDISHSDVLFPAASYQYVLYGMGFQTQLSGSQKPSLQRKAQQLFNENIQRIQTLKKALDDNRGLLQKIRLHGLPTI

SEQ ID NO: 89424 - protein, 511 aa, Croceicoccus marinus
  misc_feature (1)..(511): tr|A0A1Z1FB83|A0A1Z1FB83_9SPHN Tryptophan halogenase OS =Croceicoccus marinus OX=450378 GN=A9D14_07225 PE=4 SV= 1
MNGEPIRKIVIVGGGTAGWMAAAATSRIMGAFPGLTIELVESEAIGTVGVGEATIPQIISFNMMLGIDEAEFVRETRATYKLGIEFVDWLRIGHSYVHPFGSYGIDMLGIDFHHFWLRGQRAGLDMPLDEFSISAMAGKAGRFIHPRKDQPNSPLARMAYAFQFDAGRYARFLRNRAEAQGVIRTEGRITEVLQDGETGFVTGVRLEDGKIVEGDLFLDCSGFRSLLLGQTLGVGFTDWSKWLPCDRAIAVPCSLAGDNEPLTRSTAQPAGWQWRIPLQHRIGNGHVYSSAHMEDAEAEDILHAGLDGTPLAEPNRIRFTAGHRDRIWEKNVIALGLSGGFLEPLESTAIHLVQSGIARLMILFPSRAFNPKEIERFNRDTFADYLDIRDFLVLHYKATERDDSEFWRYCRNLPPPDGLADKLEMFRSSGRIIREHNELFTEASWLAVMVGQGVEPSGYHPAAALLDEDETRRRLSHIRQTVAHAVSQMPTQDEYLAGIGGAIAGTDRMRA

SEQ ID NO: 89425 - protein, 492 aa, Streptomyces griseus; identical to SEQ ID NO: 87587
  misc_feature (1)..(492): tr|A0A2P5JGT5|A0A2P5JGT5_STRGR Tryptophan halogenase OS =Streptomyces griseus OX=1911 GN=BF14_033870 PE=4 SV=1

SEQ ID NO: 89426 - protein, 496 aa, Sphingomonas sp.
  misc_feature (1)..(496): tr|A0A0Q4I8N6|A0A0Q4I8N6_9SPHN Tryptophan halogenase OS =Sphingomonas sp. Leaf22 OX=1735687 GN=ASE70_12760 PE=4 SV=1
MTDPIRTVVIIGGGTAGWMTAAAAGRYLDDGRRRIKLVESDAIGTVGVGEATIPSILNFNKLLGIDEVEFLRETRGSFKLGIEFAGWHTADSRYFHPFGNFGRDIEGVNFHQLWAKLKGQDGIGPIGDYSPATVAARANAFGPPHPDPRSPLSGIAHAYHIDATLYARFLRRRAEADGVARIEGRIVAVEHSANGHVAAVRLDDGRRVEGDLFIDCSGFRSLLLGEAMGVGFEDWSHWLPCDRAIAVPTERTEPVLPYTRATAHAAGWQWRIPLQHRTGNGVVYASRYMDDDAAEALLLSRLDAAPTATPRRLSFTAGQRDAMWAGNVVAIGLSGGFLEPLESTSIHLIQQGISKLFALFPDRGFSPVERDEYNRQMADNYRSIRDFIILHYHATVRDDSPFWNHVGTMDVPDSLTRKIELFRQKGRIFRYEDELFATPSWVAVLLGQGVEPVGYDPVADALDEERLLPAIRQMRSATAAAVATLPQHGAVLTRLK

SEQ ID NO: 89427 - protein, 498 aa, Croceicoccus marinus
  misc_feature (1)..(498): tr|A0A1Z1FGZ8|A0A1Z1FGZ8_9SPHN Tryptophan halogenase OS =Croceicoccus marinus OX=450378 GN=A9D14_16930 PE=4 SV= 1
MESQGIRRVVIAGGGTAGWMAAAVMSKTFGAQDLSITLVESPSIGTVGVGEATIPPILTLNRLLGLDEDELVRRTGATFKLGIEFRDWGGLGERYIHPFGHYGANLRGVSFHQHWLLHGDAPLGDYSMTVAAAREGRFTRPSADPKHIHSRLSYALHFDAALYAEFLREQAAARGVRHVQGRIEHVELDDRGHVAALALDQDRRIEGDLFIDCTGFRGLLIGEALGTAYDDWSRWLPMDRALAVPSQAVTPRTPYTRSTAGKAGWRWRIPLQHRTGNGHVYCSAHLSDDEAAAQLLDGLDSPASGDPRPLRFTTGRRQKMWDRNVVALGLASGFLEPLESTSIHLIQQGVVTLMSLFPDRGFAQADIDEYNRTMADEFEKVRDFIILHYHQTRRDDSDFWNDMRTMEVPGSLRRRMDLFASHGRVFIKPDELFTETSWVTVMLGQGLRPRNADPVAAAMPKGEIAPQLTRMRQLVQNGVEAMPTHDQFIAAHCAAEAA

SEQ ID NO: 89428 - protein, 505 aa, Xanthomonas sp.; identical to SEQ ID NO: 83174
  misc_feature (1)..(505): tr|A0A3T0G0S3|A0A3T0G0S3_9XANT Tryptophan halogenase OS =Xanthomonas sp. ISO98C4 OX=1680158 GN=AC801_15025 PE=4 SV=1

SEQ ID NO: 89429 - protein, 133 aa, Caulobacter sp.
  misc_feature (1)..(133): tr|A0A257WXD8|A0A257WXD8_9CAUL Tryptophan halogenase (F ragment) OS=Caulobacter sp. 12-67-6 OX=1970329 GN=B7Z44 _14660 PE=4 SV=1
MADGGLKSLTIVGGGTAGWMSAAMLSRALGSTVAITVVESDEIGTVGVGEATIPAIKLLNTFLGLDENDFLATTNGTIKLGIEFVDWHTVGQSYLHAFGPVGRPLGLAAFHHYWNRRRLQGHDESLWDYSLNA

SEQ ID NO: 89430 - protein, 497 aa, Nitrospirillum amazonense
  misc_feature (1)..(497): tr|A0A248K3Z3|A0A248K3Z3_9PROT Tryptophan halogenase OS =Nitrospirillum amazonense CBAmc OX=1441467 GN=Y958_304 45 PE=4 SV=1
MRRIVIVGGGTAGWMAAASLTRFLRNLKCDIVLVESEQIGTVGVGEATIPPIMNFIRVLGIDEDDLIRQTNATFKLGIRFQDWTRLGHSYFHPFGHTGFEMEGIGFPAYWMRQRLAGAAAPLEEYSLQAQAAAHNRFMRPVKAPGSPLEGITYALHFDAALFARYLRTYSEARGVTRVEGKVVKVDLRPEDGFIDALRLEDGRRVEGDFFIDCSGFRGLLIEEALQAGYENWQSYLPCDSAVAVPSERAGAPPSYTLAAAREAGWQWRIPLQHREGNGVVYARDFLDDEAARETLLANLAGKPLADPRILRFVTGRRRETWKRNCLSLGLASGFLEPLESTSIHMVHRGLALFIQMLPDRRCEPADVARYNRMVAFEYERIRDFLVLHYATNERRDTDFWRHCAGIEWPDSLKSKIELFQSHGRIQREDTELFPEQSWLYVFTGQGLVPRRYDPLTDLLDPEKMRGALANIHDVIGWVVQTMPHHQAFIDRYCAAQS

SEQ ID NO: 89431 - protein, 491 aa, Nonomuraea sp.
  misc_feature (1)..(491): tr|A0A429AFX3|A0A429AFX3_9ACTN Tryptophan halogenase OS =Nonomuraea sp. WAC 01424 OX=2203200 GN=DMB42_42905 PE= 4 SV=1
MSVEEFDVVVAGGGPSGSTVAALVAMQGHRVLLVEKEVFPRYQIGESLLPSTVHGVCRMLGVADELAAAGFPVKRGGTFRWGARPEPWTFSFAVSPRMTGPTSFAYQVERARFDEILLNNAKRKGVEVREGCSVTGVVEEGERVTGLRYTDPDGGAHEVRARFVIDASGNKSRLYSNVGGSRNYSEFFRNVALFGYFENGKRLPEPYSGNILSVAFDSGWFWYIPLSDTLTSVGAVVRRDMAEKIQGDREKAYDALIAECPLISEYLSQARRVTTGRYGELRVRKDYSYHQTTFWRPGMVLVGDAACFVDPVFSSGVHLATYSGLLAARSLNSVLAGDLDEKTALTEFEARYRREYGVFYEFLVSFYEMNVNEESYFWHAKKVTNNEHTELESFVELIGGVSSGEAALTASGRIAERSAEFAAAVDRMAGSDDGDMVPLFKSQVVKQVMLEGGQVQLRAALGEGAEPEEPLFPGGLVTSPDGMKWLPYRPA

SEQ ID NO: 89432 - protein, 521 aa, Croceicoccus marinus
  misc_feature (1)..(521): tr|A0A1Z1FB33|A0A1Z1FB33_9SPHN Tryptophan halogenase OS =Croceicoccus marinus OX=450378 GN=A9D14_07220 PE=4 SV= 1
MSARKVIVTNNRIDRIVVVGGGTAGWMAAAAFSRYFDNGRRKIIVVESDAIGTVGVGEATIPAIKGFNAMLDIPENEFLRETRGTFKLGIEFVNWGRQGDRYIHPFGAFGTDLHGIPFHQLWLREHARGGGGDITDFSMSAAAAALGRFGRPAVGARPPVSEINYAFHFDATLYAAYLRRLAERQGAIRQEGRIVKVHRDGESGDVTSVELEGGRLVEGDLFLDCSGFRGLLIEDALETGYEDWSHWLPMDRAIAMPTANRSSPDPFTRATAHAAGWQWRIPLQHRTGNGHVFCSAFMQEDEAERILRDTVEGEELADPRLIRFTTGMRRKAWSHNVVSLGLSSGFIEPLESTSIHLVQNGIARLFGLFPEKDISPVERDEYNRGMREIYEDVRDFIILHYKATQRDDTEFWRSVRDMDIPASLARKMELWRLHGRVFRENAELFTLPSWVAVMLGQNVWPERYDPIADTLDENRVAQAMEKMRAGYRQTAQQLPPQEQFLRSANAWAVSDEMPLSMGVAR

SEQ ID NO: 89433 - protein, 496 aa, Ponticaulis sp.
  misc_feature (1)..(496): tr|A0A2D7XR37|A0A2D7XR37_9RHOB Tryptophan halogenase OS =Ponticaulis sp. OX=2020902 GN=CMK09_01575 PE=4 SV=1
MLKNILIVGGGSAGWITANLLNHFIQRFELPCQITLVESPDIPTIGVGEATVPSIRRTMSLIGIAEGDLMASSEATFKCLIRFENWNDGQSYDHPFDRRHRTQTDPLAEAWTAQNGKDFDRTFSVLTNLADHNIAPKSPQTPQYLANFPYAYHLDAIKMALRLAEFGRSKGILHKRANITEANVSPEGLIESVETDQGETLSADLFVDCTGFRSVLMGGALGVGVKDYSKYLLCDRAVTMRVPYEVHKPERIVTYTRSIARDHGWQWDINLHTRRGLGYVYSSQFLSDDEAEASLRKFEGPHTDGLSAGRLKFASIQRKQAWKGNCVAIGLSAGFLEPLESSGLYMIEFAAQMLGNTLIDYINAPAAAQRNFNRNMDDLYEEVMGFINLHYVTSTRRDTEFWRAATSQEAIWDGLQDKLEIWRNRSPIDYDFHGSQRLFALDSFEFVLHGMKWVNPPPRGNYALPDHSELLAQCRQKLPTHEQFLELLIRSASQAR

SEQ ID NO: 89434 - protein, 274 aa, Moraxellaceae bacterium
  misc_feature (1)..(274): tr|A0A4Q6DWE1|A0A4Q6DWE1_9GAMM Tryptophan 7-halogenase (Fragment) OS=Moraxellaceae bacterium OX=1889775 GN=EOO 68_18190 PE=4 SV=1
MNPIKKIVIVGGGTSGWIAASMLSYHLKSDLCEIELVESDDLGTIGIGESTIPPVVRLIQNLGIDEQQFIQNTQACFKLGIKFIDWRQKNESYFHPFGVIGKRIGSHDFYQCWLKATMQGDTSPLQDFSPCSVMAEQEKFFWPTQLQNTPIGGASYAVHLDAKLVVEYLHSYAYERGVKRTEGTVEQVTKTENGNIEKLILSDGREIQGDFFIDCTGFKALLIEKTLGVGFEDWSKYLPCDRAVVVKTSAQEKRPPYTTATARKAGWGWKIPLR

SEQ ID NO: 89435 - protein, 486 aa, Sphingomonas sp.
  misc_feature (1)..(486): tr|A0A0Q4IDD7|A0A0Q4IDD7_9SPHN Tryptophan halogenase OS =Sphingomonas sp. Leaf22 OX=1735687 GN=ASE70_00400 PE=4 SV=1
MTAAALANRLQGLGVRVQLIESDEIGTVGVGEATLPHIRAFNTTLGIAESDLMRATEATYKLGIEFCDWGRIGDRYIHPFGNYGPTDDGIPFYHQWLRLRELGDATRLDEYSFPVIAAEHNRFRHPGSDVRQVESSFGYAYQFDASLYARFLRRYAETRGVERIEGKVVDFALYGENGHVRNVTLADGRVLDADLFVDCSGFRGLLIEGALQSGYDDWSNWLPCNRAVAVPTYSRGPLGPYTRATARTAGWQWRIPLQHRVGNGHVYCSSFISDDDAQDQLIANLDAPMQAEPRRLRFTTGRRRDFWKRNVVAIGLASGFLEPLESTSIHLIQDGITELLALFPTRAFDAGDIAEYNRRMALHFERVRDFLLLHYVATEREDSEMWRHFRALTLPDSLQAKIDAWLTRGYVVPYQFGLFLPPSWVAVMLGQRLMPKGYDPRVLAQDDATIAARAAALRRAVAQAVQATPDHADYIRRSPAAAGLAA

SEQ ID NO: 89436 - protein, 497 aa, Ponticaulis sp.
  misc_feature (1)..(497): tr|A0A2E0U4W7|A0A2E0U4W7_9RHOB Tryptophan halogenase OS =Ponticaulis sp. OX=2020902 GN=CMK06_03645 PE=4 SV=1
MLSSILIVGGGSAGWITANLLNAFVKRLGLPTRISLLESPDIPTIGVGEATVPTIRRTMAQIGISEQDLMVSAEATFKSLIRFVDWNLGESYDHPFDRRLRPQTDAAVRQWSADNGKAFDETFSVLTKISNENFAPKSPQTPQYIANFPYAYHLDAIKMAVRLAEFGRENGIVHHLANVRHVHISAGGQIEDIETDTEETLNAELYVDCTGFRSVLLGGALNVPVKDYGKYLLCDRAVTMRVPYDLHTPERLLPYTKATARDFGWQWDINLQTRRGLGYVYSSKFLSDDDAEAALRRYEGPHTKDLTAARIRFASTKREASWKGNCVAIGLSDGFLEPLESSGLYMIEFAAQMLGTMLTDYQAAPDATRRNFNRNMSDLYEEVLEFINLHYVTSTRCDTPFWRAATSEEAVWDGLKDKLEVWRQRSPSEMDFHGSLRLFALDSFEFVLHGMKYVRSVERGNATLPDHNDVVAQCRQKLPSHETFIKLLEAAANRHSN

SEQ ID NO: 89437 - protein, 111 aa, Moraxellaceae bacterium
  misc_feature (1)..(111): tr|A0A4Q6DNN5|A0A4Q6DNN5_9GAMM Tryptophan halogenase (F ragment) OS=Moraxellaceae bacterium OX=1889775 GN=EOO68 _23580 PE=4 SV=1
CMTQREDTDFWRWCKNLELPESLQERIALFKGHGLVREGTDELFKASSWQSVFEGMGIRPNKYCPRVDNMDYQEISDTLKVARQAIQSMVKNLPTHDDFLRQHCDDASEKS

SEQ ID NO: 89438 - protein, 505 aa, Caulobacter sp.; identical to SEQ ID NO: 83752
  misc_feature (1)..(505): tr|A0A257X338|A0A257X338_9CAUL Tryptophan halogenase OS =Caulobacter sp. 12-67-6 OX=1970329 GN=B7Z44_07395 PE=4 SV=1

SEQ ID NO: 89439 - protein, 499 aa, Ponticaulis sp.
  misc_feature (1)..(499): tr|A0A2E0U545|A0A2E0U545_9RHOB Tryptophan halogenase OS =Ponticaulis sp. OX=2020902 GN=CMK06_04195 PE=4 SV=1
  misc_feature (30)..(30): Xaa can be any naturally occurring amino acid
  misc_feature (165)..(165): Xaa can be any naturally occurring amino acid
MQKKIRKYVIAGGGTAGWMAAAMLSKTMGXEISITLVESDALGTIGVGEATIPPILRFNQLLGINEAEFMRETMATFKLGIQFENWKTGDDAYLHAFGNLGKSHWSCGFHNFWLAGKQRGMGGDFGEYCLETQAARLSRFAQLPDNGLHYAYHLDATRYAAYLRXLAEENGVVRQEGKISDVVLDAQTGNIASLKLETGDNVEGDFFLDCTGFRALLMGRALHVGYDDWSHYLPCDSAIAVQTKSVGPPVPYTRAIAHDAGWQWRIPLQHRTGNGLVYCERHLDKDMAVERLLSNIEGETLTDPLFIRFQTGSRRKQWHKNCVALGLASGFMEPLESTSIHLIQKSVMRLIRLLPSSHLIDADIREFNDQTLEDMLAIRDFLILHYKLTERRDSDFWRYCADMEIPDTLQQKIDLFRESGRVFRKNDELFAENSWIQVMLGQGLIPKTYHPLADKMTDEELTYFLDQIKADFARHAARLPRHEDFVRQYCGQAEAREMA

SEQ ID NO: 89440 - protein, 292 aa, Moraxellaceae bacterium
  misc_feature (1)..(292): tr|A0A4Q6CT55|A0A4Q6CT55_9GAMM Tryptophan 7-halogenase (Fragment) OS=Moraxellaceae bacterium OX=1889775 GN=EOO 68_36890 PE=4 SV=1
MNAENNIKRIVIVGGGTSGWMVAAALAKLFVGKDCLITLVESEEIGTVGVGEATIPAILHFNKIIGLDEDDFLKFTQGTFKLGIEFVNWGKCGDSYYHPFGGYGTRIDRLAFQHYWQRLFNKGKVPDLPEFSFNVMASKANRFTRPINLERSPLQEVAYAFHFDAGLYAKYLRGIAESLGVIRVNNIVDSVKLRETDGFIESVLLKNGELVEGELFIDCSGFRGLLIEGALKTGYEDWSHYLPCNKAVTVPSQRLNPLPPYTRATALEAGWQWRIPLQHRTGNGYVFCDKYI

SEQ ID NO: 89441 - protein, 500 aa, Sphingomonas sp.
  misc_feature (1)..(500): tr|A0A1H8GNR6|A0A1H8GNR6_9SPHN Tryptophan halogenase OS =Sphingomonas sp. S6-262 OX=1166340 GN=SAMN05192583_283 2 PE=4 SV=1
MTGPAPYRIVIAGGGTAGWMAAAAIARTMGKAVDLTLVESDAIGTVGVGESTIPPLATYNRLLGINEADFMRATRATFKLGIMFDGWKRAGDSYFHSFGLTGKDHWSAGFQHFWLEGLRRGHTQPYDAYCLELLAAADNRFAHLPDERMNYAYQLDSTLYGRFLRGLAEADGARRVEGRIQQVALDGESGNIAALVLDSGVRIEGDLFLDCTGFRALLIEQALHAGYDDWTHYLPCDSAIAVQTESAEPPPPFTRAMAHDAGWQWRIPLQHRTGNGIVYCSRYLDHDAAQERLLGNVQGPVLTEPNRLRFVTGTRRKQWHRNCIAIGLSGGFMEPLESTSIHLIQRAILRLIRMMPAGPVSERDIAEFNDQQNADMLQIRDFLILHYKVTERRDSPFWRQCAAMEIPDTLAQKIELFRETGRVFRRNEELFAENSWVQVMMGQGIVPQERHPIAGKLRDDELAKLLETLRETTRRTVAGLPDHGAYVARYCGVLPQGQAR

SEQ ID NO: 89442 - protein, 519 aa, Nitrospirillum amazonense
  misc_feature (1)..(519): tr|A0A248JX12|A0A248JX12_9PROT Tryptophan halogenase OS =Nitrospirillum amazonense CBAmc OX=1441467 GN=Y958_195 95 PE=4 SV=1
MTVERTILIVGGGTAGWLAAAYLAKYLGVREGGPIGITLLEAPDIGIVGVGEGTFPTIRGTLRFLGLNEAQFMRDTSATFKQGIRFARWVDGGEDDSFFHPFEAPFPTDGAGLVPYWLLQDGDRRPPFAQAMTFQQQVTDARRAPKRGPEGDFEAPLNYAYHFDAAKAAQALAARARELGVRHLRGTVTDVALAADGAIAHLVTREYGAIAADFYVDCSGFRAELIGRALGVPQKSVKSILFTDRALSCKVPYEAADTPLESCTVATAHAAGWTWEIGLEGARGVGCVYSSDHMSDDEAEEVLRAYVAPHLDSGVEPPPLRKTAFDAGYRETPWVRNCVAIGLAGGFLEPLESTSVVLIEVAVGMLAELFPHDGRWDAPAARFNELMTRRFENIVNFLKLHYCLSKREEPFWRDNRDPATIPPALRDLLAQWRTRPPSRFDFALDLEAFAFFNYQYILYGMGFETDLSAARAAFPQAEAAQKTFARIRAYGDHATKDLPAHRALIRRMSQISALGKVGT

SEQ ID NO: 89443 - protein, 499 aa, Stakelama pacifica
  misc_feature (1)..(499): tr|A0A4R6FWX9|A0A4R6FWX9_9SPHN Tryptophan halogenase OS =Stakelama pacifica OX=517720 GN=EV664_102251 PE=4 SV=1
MEGSIVVPIRVVILGGGTAGWMTAAALSILLSRQMAQVTLVESEEVGIIGVGEATLPHIRAFNERLGIDEADFMRATGATFKLGIEFRDWARIGDSYIHPFGVFGHDVEGVGFHHYLNRAGRIATLFDYSVPIVAAREARFAPPAADPRSLASTYGYAYQFDATRYGPYLRNRAEAAGTRRIEGRVEAVERSEHGDIAALRLSDGRRVEGDLFVDCSGFRSLLLGQACDEPFEDWSRWLPCDRAVAVPCEGKGPLLPYTSAVAMSAGWRWRIPLQHRTGNGYVYSSAHIGDDAAREQLLSELEGPPLAEPRLLRFKAGRRRRNWVRNVIGIGLSGGFLEPLESTSIYLIQIAITRLIELFPQRPAAAIDRDAFNRAIDLEYDRIRDFLILHYHATQRDDSPFWNHVRTMEVPESLSEKMALFRKRGRVARYREGLFLEPSWLAVYFGQRIVPTGYDQRADGPDDGALTRALDQLRQEVAAAAAALPDQSVYLERVGALA

SEQ ID NO: 89444 - protein, 465 aa, Stakelama pacifica
  misc_feature (1)..(465): tr|A0A4R6FX29|A0A4R6FX29_9SPHN Tryptophan halogenase OS =Stakelama pacifica OX=517720 GN=EV664_102252 PE=4 SV=1
MTSRAIRTIAVVGNGIAGWSAAAALKKRVPGISVALVPVADLKPGLADLCASAAPSIGDFHSDIGLSERDIVRRTGAAFRLGSRYQDWHGPGSGFFHAYGPAGFAQGQLPFAALWLRAGSPRPYQDYAPGAVLAEQGRFLPGGTDLPGDYAHGLMLDLHVYPRFLAAYARHLDVLVSEGTLAGMDVSDGRVTGLRLSDGSTLRADMYVDASNVAASLMRALADPDWQDWRQWLPADTLERSRTAPDPGLPPFDRVRAISNGWEATISLPACTETLRVTAKPGDAGASAVRFASGRRAQAWSGNVVAIGDAYAVIEPLEGAPLHLLHSQIDRLVGSLPDRDFDAIELAQYNRETGEEADRVRDFLIAHYVLSGRCDAAPPLLAETLALFAHRGRLPMRDGESFDKHSWLALLFGHGTVPAHADPLAVALDTGEAQRALADHRLHLEQGAAKAPAHSAYLKSLEASA

SEQ ID NO: 89445 - protein, 511 aa, Sphingomonas sanxanigenens
  misc_feature (1)..(511): tr|W0A9T2|W0A9T2_9SPHN Tryptophan halogenase OS=Sphingo monas sanxanigenens DSM 19645 = NX02 OX=1123269 GN=NX02 _07560 PE=4 SV=1
MVNPVRNIVIVGGGTAGWLTAGVIAARHQGRIGAGGFTVTLVESPNIPIIGVGEGTWPTLRTTLSKIGVSETDFFRECDAAFKQGARFARWTTGAVDDGYYHPLMLPQGFGQVNLAPHWLAGDDGKSFCDAVCPQGHICDDGLAPKTIATPEFDAIANYAYHLDAGKFADFLRRHCCDVLGVRHVLADVQRVVQTESGDIAHLVTEQAGEIAGDLFVDCTGFKALLIGQTMGVRFKPLSDTLFCDTALAVQVPHADAHAPIASHTISTAQSAGWIWDIGLPTRRGTGYVFSSAHISDEDAERELRAYLGPIADGLDVRKIAINAGHRETFWRGNCVAVGLAAGFLEPLEASAIVLIELSAKLIAEQMPACREVMDVIASRFNATTHYRWGRIIDFLKLHYALTQRQDSDFWRDNQRPETMPDRLRELMLLWRHHSPWFHDEFDRVEEVFPPASYQYVLYGMRFRTEVDPAALAQDARAATRAMQENAAQTERLRGRLPRHRDLIEKICVGR

SEQ ID NO: 89446 - protein, 511 aa, Nitrospirillum amazonense
  misc_feature (1)..(511): tr|A0A248K3F8|A0A248K3F8_9PROT Tryptophan halogenase OS =Nitrospirillum amazonense CBAmc OX=1441467 GN=Y958_304 30 PE=4 SV=1
MDRPIQHIVIVGGGTAGWLTAGVIAARHKARMASGFKVTLVESPNVAIIGVGEGTWPTMRTTLEKMGVSETEFFRHCDTAFKQGGKFVGWTTGAPDDAYYHPLMLPHGWSQVNLVPHWLQDARGRTFSAAVCPQEAICEEGLAPKTIATPEYRGLANYAYHLDAGKFASFMQKHCTQKLGVHHVLADVTQVKQDESGDIASLVTEQAGEITGDMFVDCTGFRALLIEKTLGVGFKDCRDVLFCDTALAIQVPHESEDAPMASQTIATAQSSGWIWDIALPTRRGLGYVYSSDHIDEEAARVELARYAGTQAEARKIPIRSGHREMFWKNNCVAVGLAAGFLEPLEASAIMLIELSAKIIADQLPARRSVMDVVARRFNEVTHYRWGRIIDFLKLHYVLTQRTDTAFWRDNVDPASTPERLQDLLRLWKYRAPWFLDEFDRLEEVFPAASYQYVLYGMGFRTEVDPAENSADALLASRIMAENAAMAQKMRANLPKNRDLVRKIRDHGMQSI

SEQ ID NO: 89447 - protein, 487 aa, Caulobacter sp.; identical to SEQ ID NO: 88085
  misc_feature (1)..(487): tr|A0A257X9P3|A0A257X9P3_9CAUL Tryptophan halogenase OS =Caulobacter sp. 12-67-6 OX=1970329 GN=B7Z44_01870 PE=4 SV=1

SEQ ID NO: 89448 - protein, 492 aa, Sphingomonas sp.
  misc_feature (1)..(492): tr|A0A1H8AJQ5|A0A1H8AJQ5_9SPHN Tryptophan halogenase OS =Sphingomonas sp. S6-262 OX=1166340 GN=SAMN05192583_094 7 PE=4 SV=1
MSGPKRRVVVAGGGTAGWVAATALVKQLGPLVDVTLVESDAIGTVGVGESTIPTTRSFHDLIGVDESAFVRATGATFKLGISFENWLREGVRYFHPFGSIGRAMPLADFQHFWLEARAQGHGGNFIDYSAEALAAAERRFSADADAGLAYAYHLDATAYAAFLRGLAEAAGARRVEGRIAEVDQDGDTGDIRALVLDDGRRIEGDLFIDCTGFRALLIGGALKTGYEDWSGWLPTDSALAVQTEVVEPPVPFTRATAHRAGWRWRIPLQRRVGNGLVYASAEMAEEEARALLLGALDGAPLFDPRLIRFTTGMRRRMWNRNCVSLGLASGFIEPLESTSIHLVMIAVTHLLQSFPFGTETETLADRYNTRARAEWEDVRDFIILHYTLNDRPEPFWRRAATMDLPDSLTRRIRLFREHGMAHQDQDQLFRTDSWVQVMLGQGVMPTGHHRMPAAIPPGELRTALESLSAGIRRRVSAVPPHHQFLSRYRQAG

SEQ ID NO: 89449 - protein, 515 aa, Nitrospirillum amazonense
  misc_feature (1)..(515): tr|A0A248K1A7|A0A248K1A7_9PROT Tryptophan halogenase OS =Nitrospirillum amazonense CBAmc OX=1441467 GN=Y958_274 80 PE=4 SV=1
MTFAPLRDIVIVGGGTAGWMAAALFSHILGPGGHRIHLVESEEIGTVGVGEATIPPIAIFNRALGLDENDFLRQTQGTIKLAIEFVDWLRPGHRYLHSFGAFSRSLGLGHFQDFWLRAHRLGMTDDWEPYILNSVAARRGRFIQPDPRRQSPLEPLAHAFHIDAGLYARYLRRFAEQRGVRRTEGKIVRTVLRAHDGFVDAVEMADGTRIAGDLFIDCSGFRGLLIEQALNTGFEDWTHWLPCDRAWAVPSAHDGSAAALTPYTRSTARPAGWQWRIPLQHRTGNGYVYSSRHVSDDEAAATLMANLDGEALAEPRQLRFTAGRRRRFWNRNVVAVGLASGFMEPLESTSIHLVQSAISRLITLLPNHSLANGGVDPAVADEFNRASAIEYERIRDFIILHYAATERADSPFWRACRDRPVPEELARRMRVFRALGRVARDHDELFSEVSWLHVFLGQGVWPRDHHPLADQLSEEDLHCFLDDIKAAVAREVDAMPTHADFIAHHCKADSLTRTA

SEQ ID NO: 89450 - protein, 505 aa, Sphingomonas sp.
  misc_feature (1)..(505): tr|A0A1H8CTS0|A0A1H8CTS0_9SPHN Tryptophan halogenase OS =Sphingomonas sp. S6-262 OX=1166340 GN=SAMN05192583_175 3 PE=4 SV=1
MAPPDRIVILGGGTAGWMAACLMARAWPASAITVVEAPDIPIVGVGEGSTPQLRAFFDRLGIPESTWMAACHATYKVGIAFRGWSDRPGHQSYFHPFAGPADLHTEAAFHHSTLARRLGHDVEAHPDRFFLSTRLASQRLAPLAPAHFPFGPGYGYHFDAHLVGAFLAEWATARGVTHLRRRVEDVLITEGGDIASVLVEDGEAILGDLFVDASGFGGVLIQQALGESFLPFADNLFCDRAVVVPTPADPAGPEVHTTATALNHGWAWRIPLTTRTGNGYVYASRYVSPDGAAAELRAHLLLPDDAPVRHLSMKVGRVDRSWVGNCLAVGLAQGFIEPLEATALHMVQATVEGFIDALEAHGFTTAGRDDFNARIARRYEGIRDYIVAHYRMNQRADTDFWRDNAGHDRLSDTLKAMMTAWFTGRDLPAEVQRLDIGGYYAPLSWGCLFAGYGVFPEPARLHAAPSPVDLPAIDRLLDRCLLNFRPQTAVLPQRAGTPRTSREIA

SEQ ID NO: 89451 - protein, 405 aa, Nonomuraea sp.
  misc_feature (1)..(405): tr|A0A429AZK6|A0A429AZK6_9ACTN Tryptophan halogenase OS =Nonomuraea sp. WAC 01424 OX=2203200 GN=DMB42_27750 PE= 4 SV=1
MINTHDEFDVVVIGGGPGGSGTAGLLAQRGHRVLVLEREKFPRYHIGESLITGSMPTLEELGLKDRLDQMGFVKKYGGTLLWGKNQGTWDFRFAEASNYEYAYQVRRADFDSLLLARARELGATVFEEATVKDLEFEGERVTGVTYTVKGDAEPRTARCRLLIDATGQQHLLARRFDLIEYHDDLRNIAVWSYWQGCKRYGGTRFGDTVTENRPAGWFWFIPLHDGTVSVGYVTPIDEYKKSGKSLEDLYASELAAAEEVRALTEGATRVSGFRSIRDWSYTCTKFHGPGWALVGDAAAFIDPLLSTGVGLALRGAHGLAGAADEILNDPASEEAVLARYEKDYREFLDSLLDFVRFFYDRTKHKEEYWDRAQKTLDPTKLRPRKIDFATMLSGVSGIHAIFHDD

SEQ ID NO: 89452 - protein, 512 aa, Croceicoccus marinus
  misc_feature (1)..(512): tr|A0A1Z1FAM5|A0A1Z1FAM5_9SPHN Tryptophan halogenase OS =Croceicoccus marinus OX=450378 GN=A9D14_05580 PE=4 SV= 1
MDKVDSIVIVGGGTAGWLTAGVIAARHQGRRPHGFSVTLVESPNVPIIGVGEGTWPTLRSTLRKIGVSETDFFRECDAAFKQGARFNRWTTGEADEGYYHPLMLPQGFARLNLVPHWLENGDESFCDAVTPQGRICDQGLAPKTIATPEYEGLANYAYHLDAGKFSKFLTKHCVEKLGVRHVLADVSEVVQAPNGDVACVKTADGQAIDGDLFIDCTGFKALLIEEAMKVPFRDCNDVLFCDTALAVQVPYADPSDPVASHTISTAQSAGWIWDIGLPTRRGVGHVFSSSHVDADHAERELRDYIGPAARDLTVRRIPIRSGHRETFWKGNVVAVGLAAGFLEPLEASAIVLIELSAKMIAEQLPPNRDVMDVIARRFNDTTAYRWGRIIDFLKLHYTLTKRTDTDFWRDNTRAETIPDRLQGLMELWKYQTPWLHDEFDRAEEVFPAASYQYVLYGMGYRTDVPPGDVAAERELAQRVRRENDALTARLLAGLPGHRDLLSKISQHAMMPV

SEQ ID NO: 89453 - protein, 503 aa, Sphingomonas sanxanigenens
  misc_feature (1)..(503): tr|W0ADV6|W0ADV6_9SPHN Tryptophan halogenase OS=Sphingo monas sanxanigenens DSM 19645 = NX02 OX=1123269 GN=NX02 _18010 PE=4 SV=1
MQQDPTSDRVVKRVVVAGGGTAGWVTATALVRHLGPLLDVTLVESDEISTVGVGESTVPTFKGFHDLLRIKEDVFMSAAQATFKLGIEFENWGRIGDRYIHPFGIIGRRASWMAPFHHFWLHARARGFGGDLGEYCLEHMAGEANRIALDAAPNLGYAYHVDATRYARFLRGLAEPAGVRRVEGKIRAVELHPESGFVDAIVLDSGERIEADLFIDCTGFRSLILGEALGVPFEDWGRWITTNSAVAVQSRSVRPPQPYTSAIAHEAGWRWRIPLQHREGNGLVFCNEFMSDDEARAKLLAEIAGEPLVEPWLLRFKTGMRVDSWSRNCIALGLAGGFIEPLESTSIHLMMAGVTRLIEDFPFNGCSPGLVRRFNEKSRLEFECIRDFIILHYHVTERDDSAFWRRARTMEIPDSLQARLALWREDARAYQLDHELFRIESWSSVLLGQRFAPRGYHRLAEMMPEDALRDFLDRTRGEIAGIVATMPTHPEFLARYCPAPPPE

SEQ ID NO: 89454 - protein, 500 aa, Sphingomonas sp.
  misc_feature (1)..(500): tr|A0A0Q4HXI7|A0A0Q4HXI7_9SPHN Tryptophan halogenase OS =Sphingomonas sp. Leaf22 OX=1735687 GN=ASE70_15985 PE=4 SV=1
MPNEPVRSIVIVGGGTAGWMAATYLARRLTHLNLSIIVVDSAAIGTVGVGEATVPAIRDFLSAIELGEPDVLRETGGTIKYGIRFDGWGGEGHRFFHPFGLYGVGAQGVAFHHYWLKLNAADRAGPLADYCLATQLARNGLFLPPADQPANDLGVFNFALHFDAAAFAAMLRRLALANRVAHVDGRIGAVATDPARGHVTGVTLDDGRTIEGDLWIDASGFRSLLLGDALGVPYIDWRHWLPCDRAIAIPCKAAAGDPTPYTVATARKAGWQWRIPLRHRIGNGSVYCSAFQSDGDAENALLATLEGAPLADPNRLRFTTGHRERFWSGNVIGLGLASGFLEPLESTSISLIQSGLERLVALFPDRDCDPRLAATYNRQSVLEFERLRDFLFLHYLANGRNEPFWQAIRAVEPPEPLQIKLDAWRSGGEFVRNEWDTFQDPSWLSLYAGFGDLPARHSPLADAIDEDTLADSFARMREAIGKTLAHAEPHGRFLARVTGA

SEQ ID NO: 89455 - protein, 84 aa, Pseudomonas sp.
  misc_feature (1)..(84): tr|A0A2N7XT07|A0A2N7XT07_9PSED Tryptophan halogenase (F ragment) OS=Pseudomonas sp. GP01-A4 OX=2070571 GN=C1X83 _37465 PE=4 SV=1
FLRQFSEARGVTRVEGKIGQVHQHPETGFIEALELADGRRIEGDLFIDCTGFRGLLIEQTLQAGYEDWSHWLPTNRALAVQTKA

SEQ ID NO: 89456 - protein, 506 aa, Colwellia sp.
  misc_feature (1)..(506): tr|A0A1V0KMV1|A0A1V0KMV1_9GAMM Tryptophan halogenase OS =Colwellia sp. PAMC 21821 OX=1816219 GN=A3Q33_00830 PE= 4 SV=1
MSKTVKNIIIIGGGTAGWLSAAIIAAHHKDAKTTELKIKLVESSDIPTIGVGEGTWPTMKNTLHKIGLKESDVFRKCYATFKQGGKFVEWVHGNGDFYYHPFTVPLGYGQIDLAPYVSNVENFAQESNFQYDICEAGLAPRTLADSEYQGQCNYGYHLDAGALAELLKRHCIDTLNVEHVVDTVDECISENGERIDAVVLNKAGKLTADLFIDCSGTRSLLLGQTLNVPFKKVDDVLFNNRALAMQVPYESEDSPVACHTIATAQNAGWIWDIGLTSRRGVGHVYSSKFLSDEEAEQNLRNYLGDAANGLEARKISFEPGHREQWWKGNCVAVGMAAGFVEPLEATAIMLVELSARYIAENLPADDSLMPVVAKRFNTQMSYRWQRIIDFLKFHYMLTKRPEPYWQAHCDPKTFPESLKEDMALWQYRGPTTNDFNSAMELFPAASYQYVLYGMEFKPDFTRQGYLHNQQQKAEQVINRNEQLTQQMLQSLPPHRDYIEKWLATST

SEQ ID NO: 89457 - protein, 507 aa, Streptomyces thermoautotrophicus
  misc_feature (1)..(507): tr|A0A132MSZ3|A0A132MSZ3_9ACTN Tryptophan halogenase OS =Streptomyces thermoautotrophicus OX=1469144 GN=LI90_18 84 PE=4 SV=1
MIVGGGTAGWMSATYLKAAFGDRVSVTLVESDRVSTIGVGEATFSTIRHFFDYLDLPEEKWMPHCSASYKLAIRFENWRKPGHHFYHPFERLRVVDGFHLAEWWLQLGEDTAAFDRACFLTPWLCEAKRSPRNLDGSLFVAGLDGPLGRSTLAEQRAQFPYAYHFDADLLAKFLARFGIERGVRHVVDDVIAVGQDERGWITHVRTKGHGDLTGDLFIDCTGFRGLLINQTLGEPFRSFQNVLPNNRAVSLRVPRDIERVGIAPYTTATAMEAGWIWTIPLYGRIGTGYVYSDEFCTPEEAEQTLRKFAAPGQDDLEANHIRMRIGRNERSWVANCVAIGLSSAFVEPLESTGIFFIQHGIEELVKHFPDATWNPVLVDSYNRRVARVVDGVKEFLILHYRAAARDDTLYWKETKTREIPESLAERLALASTMLPDENNIYPYYHGFEPYSWVTMVLGLGGVRTKARPALASMDPSAARRQFAVLRREADLLTASLPSCYEYLATLN

SEQ ID NO: 89458 - protein, 491 aa, Alteromonadaceae bacterium; identical to SEQ ID NO: 83444
  misc_feature (1)..(491): tr|A0A2D9KDJ5|A0A2D9KDJ5_9ALTE Tryptophan halogenase OS =Alteromonadaceae bacterium OX=1916082 GN=CL582_07460 P E=4 SV=1

SEQ ID NO: 89459 - protein, 587 aa, Microcystis sp.
  misc_feature (1)..(587): tr|A0A552CDD8|A0A552CDD8_9CHRO Tryptophan halogenase OS =Microcystis sp. Msp_OC_L_20101000_S702 OX=2486218 GN=E WV60_14240 PE=4 SV=1
MIKTTNSVRQFVYDVVIMGAGFAGVCQARHLMLKVPNIKIALIDPRPENRSDKDLKIGESTVEIANLFICKELGLYEYMIENHPPKFGLNFHWPKDSHKTDTIEDYYHIWTNRQPPLASSQMNRAKFERDLLRMNKETGVDFYNGRVVDVTIHPGNDPHQVKVKLHDEVIELTAKHLVDAAGRQFIIGKKTDNVIFDPEHLCGVNTGSAWVQVKNIDRTLFHSGYDPEATSCSHYYATNHWFGQGHWLWMIPTDTDTQEISIGVIHHHEIIPADYLNQEQKFYAFLKANHKLLYDLLSSGEKIDFHYWPRIAHTSKEVLSADNWYVIGDAAYIFDAFYSMGTSLTTFAIESVTEVIRSKLAGEADAEVKRVAYNQFNLAQAEGVNQLMRDHKTQLGHASIMSWRIYFEYIWWFGILVPLYVGKWHLNVSFIEGFVKIHRQTVNSLFVEIYEQLNQLVERKANLGLLDCYRGDQLLGDYQPLVHFDSFLENVQYEPFRSNIFTSIKYTHFYGAIWYLVFQWRGFGLGGVIAPKHLYHFLRLLLLSGVASFGEFYHRLKMKKIPHNHQIACTTEEFKHYQYQSSLNPWF

SEQ ID NO: 89460 - protein, 482 aa, Rhodobacteraceae bacterium
  misc_feature (1)..(482): tr|B9NM47|B9NM47_9RHOB Putative tryptophan halogenase O S=Rhodobacteraceae bacterium KLH11 OX=467661 GN=RKLH11_ 934 PE=4 SV=1
MTTETEICVIGGGPAGAATALRLAQLGRQVCLLERAAFPRQHVGESLPPSIWPVLQLLGVDDLVAQAGFLRATGSVLHWGGGFERRGRNSTRPGLLVDRGRFDALLLQAAAAAGVQVPQPARAYRPVRHGDGWKIPVHSSAGHHAITAQILVDAAGRQAGLGRRFRPTSKPLLALYAYWQVPPGFGAQARVEAGRAHWYWGALLPGGVVNAMVFVDPATCTGLSPAARRDLYLNLLAQSTLLSPCLEQRRIGPVRRSDATSLTETTRPAPDLLRVGEAAFTVDPLSSQGVQLSMGQAVQAAVVLNTILNSPEKGDLALSFYADRQAERVQTHAALAAGFYAKQQAITPAPFWANRSTPLEPGRTAQPDLNPDELRSDQLVHLSPLTSLQVSGVQSATRIEAAPVLTHPNLPRPVACLEGTPLAPLLQRLEGRATVGQIRQRWSDMLGPEHAMRLVHWLWHHRILVPAGESDVIPVSSARRMT

SEQ ID NO: 89461 - protein, 495 aa, Permianibacter aggregans
  misc_feature (1)..(495): tr|A0A4R6V587|A0A4R6V587_9GAMM Tryptophan halogenase OS =Permianibacter aggregans OX=1510150 GN=EV696_101318 PE =4 SV=1
MTTTTPIKKIVIAGGGTAGWMAAAALVKLLGKTLSVTLIESDEIGTVGVGEATIPSLVFFHQLLGINEQAFMSATQGTFKLGIQFENWRKLDHRYIHAFGVTGKDCWAAGFQHFWLKGLEKGFSADFGDYCLERRAAEAHRFAHLPKNGLNYAFHMDATQYAQFLKQLSLPLGVERIEGKIQRVNTDNESGFIRSLSLNDDRTIEGDFFIDCTGFRGLLIEQALHTGYEDWSHWLPCDSAVAVQTESVAPPLPFTRSIAHDAGWQWRIPLQHRVGNGLVFCSKYLGDEQAKALLARNIEGKVLTEPRVIKFKTGRRLKQWNKNCVALGLASGFLEPLESTSIHLIQQGIVRLLRMFPHHGVRQVDIDEYNKQTDFDVEHIRDFIILHYHATERDDSPFWNYCRQMKVPDSLAHRIQLFKETGRVFRDGNELFDDSWQQVMIGQGVMPEQYHPIVNTMPDGELKAFLEHIRSSIDKTVERLPSHQEYLNQYCPGNR

SEQ ID NO: 89462 - protein, 520 aa, Alteromonadaceae bacterium
  misc_feature (1)..(520): tr|A0A2E9KC88|A0A2E9KC88_9ALTE Tryptophan halogenase OS =Alteromonadaceae bacterium OX=1916082 GN=CL587_20615 P E=4 SV=1
MTNRVVIVGGGAAGWLTAGILAAKNGEKSGCTHPVRIELVESPNVKNLMVGEGTWPTMRDTLRQIGISEKDFMQFCNAGFKQASKFVGWQYGNGEHYYHPFTAPAGYGAVNLSQYFLKNRPGSDFETLVCAQGAVCEQSLAPKTLATPEFAFALNYGYHLNAGKFTEMLRLHCTQELGVVHTTGHVEQVNGAPDGDIASVTLSDGRVIEGDLFIDCSGFKALLLNGFYNVPMVCRRDQLFNDAALALQVPYRDEHAPVASATVATAQKHGWIWDIALSGRRGIGHVFSRQYCSADQAQDALMQYVKNDPHLDASNAEPRLITFEPGHRSVFWHRNCVAIGVSAGFVEPLEATALVLVEKSVEWISHQFPRCRNAMTVLAKRYNEITHSRWEEIIDFIKLHYVLSSRDDSEYWRAHRDASSVPQSLKDSLALWQTQPPWLYESDRRLELFSSASKQYVLMGMQSTFGEACTGLSQHEMRVADKALNDVLRSTEQLLNGLPTNREFLSRLAGAVKKDCRATA

SEQ ID NO: 89463 - protein, 499 aa, Alteromonadaceae bacterium
  misc_feature (1)..(499): tr|A0A3R7WRC6|A0A3R7WRC6_9ALTE Tryptophan 7-halogenase OS=Alteromonadaceae bacterium TMED7 OX=1986650 GN=CBB67 _015485 PE=4 SV=1
MTTPPKQIVIAGGGTAGWIAAAALARKMGPLVNIRLVESSTIGTIGVGEATIPPLRTFHKLLQIDEQAFMRATAATFKLGIRFENWGRIGEQYIHSFGMTGQQSWLAEFVHFYLSAKARGLEGDYGDYCFELEAARQHKFATSAQSNIQYAYHLDAGNYVAFLKRFCNNLGVNHCEGVISQVLQHENGDIKALRLDSGELIEGDFFIDCTGFKGLLIEETLHTGYEDWSHWLLCDSACAVQTTSTAPAAPFTRSAAHHAGWQWEIPLQHRTGNGNVYSSAFMDDNEASEQLMQNVQGEAITTPRTLRFKTGRRNKAWHRNCLALGLASGFVEPLESTSIHLVIMGITRFMQLFPHGGNDQALADEYNQQTQLELERIRDFIILHYHVTDRDDSPFWEHCKNMTVPDSLQTRIALFKEQAHAFQKQNELFRVDSWAQVMLGQGVTPDYHHPAAAMLSDAQLNQSMQQQRQQVLQAVAQLPAHDDFIRRYCATPQEATALS

SEQ ID NO: 89464 - protein, 495 aa, Alteromonadaceae bacterium
  misc_feature (1)..(495): tr|A0A2E9K4H1|A0A2E9K4H1_9ALTE Tryptophan halogenase OS =Alteromonadaceae bacterium OX=1916082 GN=CL587_06990 P E=4 SV=1
MTSGVRKLVIAGGGTAGWMAAALFKKVLADNIEVELIESEDIGIIGVGEATIPPIQTFNQYLGLDEKAFLKETHASIKLAIRFENWKQEGSSYYHTFGAPGATLGFVGFQHYWLRAAQNGLTQSLWDFDLNYLACLEGKFNKIQTDNPVYQLPYAYHFDATLYGQFLRRMAENAGVKRTEGTIEHVKQNATTGFVEALQLKSGQQIAGDLFLDCTGMRGLLLQKTLGTEYEDWSHWLCADRAWAVPSQRHEHTAPFTRSIARSTGWQWRIPLTHRNGNGLVYSSKYMDDDTARDMLMTNLDTPALDEPRKISFRTGRTVKQWSKNVIGIGLSSGFLEPLESTSIHLIQSGLVRLLKMFPHKEINPSMETVYNAESKEEFETIRDFIILHYVVNERDDSEFWRDMRTMPIPARLEQKINAFKDTATIFNEQNDIFRDASWLQVMAGQGIMPRDHHPAANTQTVHQLLDVMGKVLQAKQQPLTQMLPHDEFLKRFTQ

SEQ ID NO: 89465 - protein, 501 aa, Alteromonadaceae bacterium
  misc_feature (1)..(501): tr|A0A2D9RZK1|A0A2D9RZK1_9ALTE Tryptophan halogenase OS =Alteromonadaceae bacterium OX=1916082 GN=CL586_05755 P E=4 SV=1
MQTQLKKIIILGGGSAGWMTAAALGKILSKHPCDIQVIESEEIGTVGVGEATIPQIQLFNDLIGLDEDTFIKRTQGTFKLGIQFQNWRKPGHSYYHAFGEVGKNMEGVHFYQYWLKMRQQGKAAPLDEYTLSSLACNEKRFMRPFEAGNSPLSNIAYAFHFDAGLYAKFLREVAESHGVQRTEGKVTEVRQHPDGAIQSLILENGSEHGADFFIDCSGFRALLIEQTLKTGYEDWRHWLPCDRAVTAPSSLTETPWPFTRAAAQQAGWQWRIPLQHRVGNGHVYCSEFMTDEEAEKTLRLNIEGDLLADPRQIRFITGKRNKFWHKNCLAVGLSGGFMEPLESTSLHLVQVAISKLFSYFPFQQPCQSDIDQYNAEMDFEFTRIRDFLILHYHVTEREDTEFWRYCKHMAIPDTLQEKIDHFKANGRISRFNNELFNDLSWFEVMYGQGLRPEGYHALADIFPEEELARRLEGIQRVVRKSVDYMPGHAEFIAKTCAANRD

SEQ ID NO: 89466 - protein, 506 aa, Ensifer sp.
  misc_feature (1)..(506): tr|A0A1S1T1F9|A0A1S1T1F9_9RHIZ Uncharacterized protein OS=Ensifer sp. LCM 4579 OX=1848292 GN=LCM4579_23690 PE= 4 SV=1
MLDLRNARRIGIIGGGIVGWLAAIALSRVFDPAVEVTVIETTALFPLGLGEGGSLNLIDTLCRNDLDLDVFIGEAGATYKHGVLYENWTGGGVPDRYYHLFGGPGIPEIEHHVDGFFPLLSARIAVGASLHTCIPGFEAIARNASHQEIDELMATGQSGLYPSYHFDDIGFEQYLKRVGLARGITSRESPVCDIRLDNRGHACALQLQGEQLEVDFAVDASGLARMGLGTAFNPHWRSFANVLPTDQAITFDLQPAGSSRQPLTRSTAMTAGWIWEVPLNRTTKAGYVFSSRHADHTMAIAEVQHRFGCDVQPRRELSFDQGYLETAWVNNVVALGTASGFVEPLGAALAAHTFEQLRNLERILTNGGGIAPAQAIEAFNRANVRSWTGVRDYLRLHYNGSRNDTPFWRDLASAELPESYAQLRACFQKRTPRFIDIEPYVGSGWQSLFHQVDWISVAAPLGVVPSTAARAELSQLPMEWQSKAQAYLDLLKGTSPTFRPRSGWRH

SEQ ID NO: 89467 - protein, 499 aa, Alteromonadaceae bacterium
  misc_feature (1)..(499): tr|A0A2E7GP03|A0A2E7GP03_9ALTE Tryptophan halogenase OS =Alteromonadaceae bacterium OX=1916082 GN=CL578_10755 P E=4 SV=1
MKKTAITILGGGTAGWMTAAILAKGLPKDKFHICLVESPDISSVGVGEATIPPMTSLLAYLELDESSFLKRLNGTFKYGIQFENWSELGNQYMHAFGDIGTPLGTLSFTQAWLKSAAALNFTELGSYIPSAVAAKTGKFHPPVDIPQGANPTHFYPLSLLFYAYQFDATELASLLKDYATDHSVKHIVGMVNRVNNKRNGDISSLSLRDGRNIAGDYFVDCSGMRGRLNKSHFGCEFDDWSNELPCNSAIAVQTKRDTPAAPYTKSIAMSAGWRWEIPLRDRTGNGYVFSSRFLTDEQALQELNEALAGEQFITEPKIIHFKTGCLTTPWHRNSIAIGLASGFTEPLESTSIHLIHKYALELKDALLCGQDLAHEAKRFNHMFYQEALSIKDFLLAHYHVSKRTDSPFWQHCKNMPITQTLQNYLAEFARNGYINLPESSLFPFQSWFQVLVGQGYLADYCAFSDKQFDAQQAKPFFNNVKLAIQSEVARLAPHQSYLQ

SEQ ID NO: 89468 - protein, 518 aa, Alteromonadaceae bacterium
  misc_feature (1)..(518): tr|A0A2E9KB44|A0A2E9KB44_9ALTE Tryptophan halogenase OS =Alteromonadaceae bacterium OX=1916082 GN=CL587_18845 P E=4 SV=1
MSKRVLIVGGGTAGWITAAYMARMLAADTPGGVSITLVESDEIGTLGVGEGTFPIIRKTMKRIGIDESDLIKHADATFKQGIRFNNWKYNPADKPDDSYLHPFQVASQHTDMDLLPYWLLGVAGDVPWAKACSVQSTVIDEKLAPKLITHPQFDAPLNYAYHFDATKLAALVRNKATDTGVRRLVDTIDNVTLAEDGSIASVTAREHGELTADLYIDCTGFRARLIGETLGMPFTSFKKELFCDRAVALQVPYDNPQAGIPSCTYTTAKEAGWIWDIGLHHRRGVGYVYASEYCDEETAVKTLKAHIGPAAKDLSHRLLKFEPGYRQTQWHKNCIGVGLSVGFIEPLEATGISFAEVAALMLCNLFPWSGDYEASARQFNEAMCKRFEHVKDFIKVHYYLSERYDTAFWRDNRAPDSASEYLKGKLAQWRHRPPSFLDIDASHDIFDENSWQYILYGMGFKTDISARADALRFYDDARREFHSIQQQSRNAMTAVPAHRQLINEVASGGFRPRAGGRR

SEQ ID NO: 89469 - protein, 517 aa, Alteromonadaceae bacterium
  misc_feature (1)..(517): tr|A0A424TAB6|A0A424TAB6_9ALTE Tryptophan 7-halogenase OS=Alteromonadaceae bacterium TMED7 OX=1986650 GN=CBB67 _021860 PE=4 SV=1
MSHSANPVNTPEVKRVVIVGGGSSGWMCAAAIARIAPPETRITLVESEDIGVIGVGEATIPTLMEFNDFLGIKEHDLLRECQGTYKLGIDFVDWYQKGESYFHPFGFYGRDTPEFSFHQLWLRLNAMAEKGEIPADAPGIISDYNLCSVAAKQGRYAPPQGGADTILSTMRYAYHFDSARYGQLLRRYAEQHNVGRIEGIVNSVKQDHNTGLLQSVTLNSGQILEGDLFVDCSGFKALLIDGAMQSEFVDWHHYLPCDRAIAVQTKLAGSPDPFTRSTADDAGWRWRIPLQTRLGNGHVYSSDFMEQDEALQKLLAGVEGEPVTQPLPLKFRTGHRKAFWEKNCVAIGLAGGFIEPLESTSIHLTQMGIQRLVNLWPGRGCNRSEIAQYNALMTADYERLRDFIVLHYNATEREDTEFWRYVKHMEIPDTLAAKLEIFRSSGRVIPSPEDLFTPHSWLAVMLGQGIYPQNYDVLVDRVPAQALLKNMQMLRMSVAKTAESMPTHEEFIRRYCQAAAA

SEQ ID NO: 89470 - protein, 520 aa, Alteromonadaceae bacterium
  misc_feature (1)..(520): tr|A0A2E7GPT9|A0A2E7GPT9_9ALTE Tryptophan 7-halogenase OS=Alteromonadaceae bacterium OX=1916082 GN=CL578_12120 PE=4 SV=1
MSHRSIKNILVVGGGSAGWLTAGIIAAEHQCNKQNSKIKVTLVESPEVNIVGVGEGTWPSMRNSLQRMGLSETDFIRHCGAAFKQGSKFVGWKNGADNDFYYHPFVIPNGYGQANQYSAWKTHGQGHAFADVVCAQSQICQAGLAPKQNATPEYAGVLNYGYHLDAGKFSQMLQQHCVQNLGVTYIQDHVEGVVSHDNGDIKALQTRANGELNADLFVDCSGARSLLLGQHFNVPFIDKKSVLFNDSAMALHVPYSTPDEPIASATISTAQEAGWVWDIGLQDRRGVGYTYSCKHTDDQQALRTLKAYVAQSVGGEVADSLSARKISFEPGHRSHFWHKNCVAVGLSAGFLEPLEASALALVELSATAIAENLPVTAQHMQITRDNFNRRFLLHWENIVEFLKLHYVLSERTEPYWQQMRAPDSVSPRLNDLLTQWRYQPPNRSDFVQNEIMFPSASYQYVLYGMGFETLNDVSSREFDAPQSAIKHLQENQQRLHKLMGGLKSNRQLLKHVVQYGFQKV

SEQ ID NO: 89471 - protein, 497 aa, Alteromonadaceae bacterium
  misc_feature (1)..(497): tr|A0A2E7GQM4|A0A2E7GQM4_9ALTE Tryptophan halogenase OS =Alteromonadaceae bacterium OX=1916082 GN=CL578_13535 P E=4 SV=1
MNKKPIKRVVIAGGGTAGWMAAAALAKLLGKNLSVSLIESDDIPTVGVGEATIPTLHIFHRLLGINEQEFMAATNATFKLGIKFENWKAQNDDYIHSFGFLGQGCWAAGFQHFWLKGKEKGMVTQIGDYVPEHLACREGRFAVLANQEQNHAYHLDAGLYAQFLRKIAEQHGCKRVEGKIQTVTLNEDSGDISSLTLASGETVEGDLFIDCTGFRALLIEQALHTGFEDWSHWLPCDSAVAVQTTAKPNRVPYTRSIARDAGWQWRIPLQNRTGNGLVFCSKYVSDEQAKAALLANIEGETLNEPRVIKYKTGTRRKHWNKNCLAVGLSSGFIEPLESTGIHLFQRAIVRLMLMFPSNGIEQADVDEFNAQSRADVEDIKDFIILHYHQTERTDTPFWRYCKNMPIPDTLAHRMDLFAGTGKVFKKAEELFGETSWIQVMLGQGIMPKQYHPIVDMMSDDELQRFLNNIKANVKRKVANWPDVNDFIRHYCQSQAAQ

SEQ ID NO: 89472 - protein, 516 aa, Sphingomonas sp.
  misc_feature (1)..(516): tr|A0A0Q4QYI0|A0A0Q4QYI0_9SPHN Tryptophan halogenase OS =Sphingomonas sp. Leaf242 OX=1736304 GN=ASF09_06920 PE= 4 SV=1
MRKRILIVGGGTAGWLTAGYLAKRLGADLAGGVSITLVESRDIGILGVGEGTFPTIRRTLATIGIDEAELVRRCGATFKQGAKFVHWRHEPGQSRTDHYLHPFQIADASDGLDLLPYWLLGYGGPDNWDEVSNPQKKAADQMRAPKLASNPDYVGPLNYAFHFDAVALAGLLREQGVKNGVRHLTDTVTEVLLDADGAIGGVRTEQNGLLDADLYIDCTGFRAELIGKAMKIPYRSCRDVLFCNRAITAQLPYARRDAPIASYTISTAQESGWIWDIGLDRRRGIGHVYSSDHSDDETAERVLRGYLGAGGDEADVRHFKFDAGYREVNWYKNCVAVGLSSGFFEPLEATGIAFAEVSAGMIANLFPWGGDYETSARQFNANMLRRYERALDFIKLHYCISERRDTAFWRDNVADSSVPDSLLELLDRWRFRPPNELDIDGQVDIFTDASWQYVLYGMGWKTDLSAKAGALRYPDDARRAFAEVQRQAQYAIANLPSNRALVDYAQTHRFGARAPA

SEQ ID NO: 89473 - protein, 550 aa, Nitrospirillum amazonense
  misc_feature (1)..(550): tr|A0A248JXS7|A0A248JXS7_9PROT Tryptophan halogenase OS =Nitrospirillum amazonense CBAmc OX=1441467 GN=Y958_213 00 PE=4 SV=1
MTAAEGAQRRILIVGGGTAGWLTAAYLAKTLGANLSGGTEITLIESSDIGIIGVGEGTFPTIRSTLAAIGIDEARFLRESTATFKQGVHFVDWAETPAPDASPTQALGAVAGHTHYFHPFNFPHQGNGPELLPYWLLGGAGDLAFAEAVTLQKAVADAARGPKRPIDPPYAAPLNYAYHFDANRLAVLLRTVAIELGVRHRVGTVTDVVLDGSGAVARVETREHGSLSADLYIDCSGFRAEIIGRALKVPFKSYQDVLFNDRAVALQVPYDRPDAPIPSYTVATAHEAGWTWDIGLNDRRGTGYVYSSRHTDDARAEQVLRRYLGPAAEGRDVRLLKFDSGCRTAQWVGNCVAVGLSGGFFEPLESTGIMLIEVAAHMIAQYFPWGETGLDSAQTAASMAATARTYNALMGKRYERIVDFLKLHYCITRRTDSAYWRDNADPATIPESLRDRLAVWAHRPPGRFDFVADHETFLPASYQYVLYGMGFKTDLEPARALHRRMDEAGHEFRGLRTVAPQAVSSLPTHRELVEEVYRNGFRPPQAAPAVGGRR

SEQ ID NO: 89474 - protein, 101 aa, Alteromonadaceae bacterium
  misc_feature (1)..(101): tr|A0A2D9RYT6|A0A2D9RYT6_9ALTE Tryptophan halogenase (F ragment) OS=Alteromonadaceae bacterium OX=1916082 GN=CL 586_04370 PE=4 SV=1
MTNSTQQPESIVIVGGGTAGWMCAAYLAAKWSKRYRITLIESAQIGTVGVGEGSTPFLKQFFAELGWQESDWMPACDATYKTGIEFSNWSNSKRFKRYFHP

SEQ ID NO: 89475 - protein, 505 aa, Alteromonadaceae bacterium; identical to SEQ ID NO: 86934
  misc_feature (1)..(505): tr|A0A2D9KC84|A0A2D9KC84_9ALTE Tryptophan halogenase OS =Alteromonadaceae bacterium OX=1916082 GN=CL582_05150 P E=4 SV=1

SEQ ID NO: 89476 - protein, 217 aa, Alteromonadaceae bacterium
  misc_feature (1)..(217): tr|A0A2E6EFP3|A0A2E6EFP3_9ALTE Tryptophan halogenase (F ragment) OS=Alteromonadaceae bacterium OX=1916082 GN=CL 577_03395 PE=4 SV=1
MHTDNQHHTAVKKVVIAGGGTAGWVAAAALSKRLKGQIDVVLVESAEIGTVGVGESTIPPVQLFHNLLGIDEQEFMRATDATFKLGISFENWGQLGDRYIHPFGVTGKGSFLADFQHYYLHGRTLGIDEPFGSYCYELQAALAGKFAKTDSSNISYAYHLDATRYARFLRAFSEAQGAVRIEGKIAQVQQQVNGDIRALVLEDGTEISGDLFIDCTG

SEQ ID NO: 89477 - protein, 498 aa, Alteromonadaceae bacterium
  misc_feature (1)..(498): tr|A0A3R7XAB6|A0A3R7XAB6_9ALTE Tryptophan 7-halogenase OS=Alteromonadaceae bacterium TMED7 OX=1986650 GN=CBB67 _005595 PE=4 SV=1
MAQKKTRVVVAGGGTAGWLTAFSLVTRLGNVLDIILVESDQIGTVGVGEATIPTMCNFHQLMGINEGEFMAATNATFKLGIQFDNWANDGDSYIPSFGEIGQRSWMAEFHEFWMEAAANGQQDSLEDYCLELKAAKANKFATKIGNRPLNFAYHLDATAYAAYLRKKSEAAGVTRCEGKIQSVDTDPQNGNLTRLTLDTGIAIEGDVFIDCTGFRGLLIGEHLGVGYEDWSHWLAADRAIAIQTQSTEAPKPYTIATAHKAGWQWRIPLQSRVGNGIVYSSRFLSDDDALATLKQNIDGEMLTEPRYLKFKTGRREKAWHKNCIAVGLASGFLEPLESTSIHLVTTALIRLMKLFPFSSDHELLAEQYNRETQKEMETIRDFIILHYNLTKRTDSDFWDHYRTMDIPEPLAHRMAIFAQNGYVWPDDVALFRVDSWVQVMMGQGLMPAQHHGASRMLPTDGLKQQLSAFKQSVDNALGQLPAHADFIARYCPAGEQVK

SEQ ID NO: 89478 - protein, 497 aa, Alteromonadaceae bacterium; identical to SEQ ID NO: 86910
  misc_feature (1)..(497): tr|A0A2D9KIB3|A0A2D9KIB3_9ALTE Tryptophan halogenase OS =Alteromonadaceae bacterium OX=1916082 GN=CL582_15955 P E=4 SV=1

SEQ ID NO: 89479 - protein, 485 aa, Streptomyces sp.
  misc_feature (1)..(485): tr|A0A0F5W0Q6|A0A0F5W0Q6_9ACTN Tryptophan halogenase OS =Streptomyces sp. WM6386 OX=1415558 GN=TN53_09955 PE=4 SV=1
MTREYDLIVVGGGPAGSTAATVVAKRGHRVLLLERETFPRYQIGESLLPATVHGLCRILGVADEVQQAGFTLKRGGTLRWGRDPEPWQFSFAMTPRVPEPTATAFQVERSRFDEILLRGARRAGVEVREGSPVRRVVADDERVRGVEYTDADGTSRTAYAPYVIDASGNTSRLHGGVGGGRVYSDFFRNLAVFGYFAGGARLPEPNSGNIFCAAFDAGWLWYIPLRDDLTSVGAVISPEHTPAVQRDARAAWRDMIAACPEVSRLVAGVPEATERPYDQVRVRKDWSYWKKSFWTPGMALVGDAACFVDPVLSSGVHLATYGALLAARSVNSALDGSVSEERGFAEFEARYRREYRVFYDFLISFYDMERNENSYFWSAKKITEVELGEAAAFAELAGGLVSGDTAVVHTGWHTAAAQLDSAVGKLAASDGRINPLLSAPVVGETFRTGNDLQEQALYGGPLDDPGPADPDGLAVTPDGLAWVKA

SEQ ID NO: 89480 - protein, 496 aa, Alteromonadaceae bacterium; identical to SEQ ID NO: 86056
  misc_feature (1)..(496): tr|A0A2D5M3L7|A0A2D5M3L7_9ALTE Tryptophan halogenase OS =Alteromonadaceae bacterium OX=1916082 GN=CL579_11905 P E=4 SV=1

SEQ ID NO: 89481 - protein, 515 aa, Alteromonadaceae bacterium; identical to SEQ ID NO: 86917
  misc_feature (1)..(515): tr|A0A2D9KIA1|A0A2D9KIA1_9ALTE Tryptophan halogenase OS =Alteromonadaceae bacterium OX=1916082 GN=CL582_15960 P E=4 SV=1

SEQ ID NO: 89482 - protein, 497 aa, Alteromonadaceae bacterium; identical to SEQ ID NO: 86127
  misc_feature (1)..(497): tr|A0A2D5M4G5|A0A2D5M4G5_9ALTE Tryptophan halogenase OS =Alteromonadaceae bacterium OX=1916082 GN=CL579_13245 P E=4 SV=1

SEQ ID NO: 89483 - protein, 105 aa, Alteromonadaceae bacterium
  misc_feature (1)..(105): tr|A0A2D9S2P7|A0A2D9S2P7_9ALTE Tryptophan halogenase (F ragment) OS=Alteromonadaceae bacterium OX=1916082 GN=CL 586_11545 PE=4 SV=1
MSRSANPVNTPEVKRVVIVGGGTSGWMCAAAIARIAPPHTHITLVESEDIGVIGVGEATIPTLMEFNDFLGIKEHDLLRECQGTYKLGIDFVDWYQKGQSYFHPF

SEQ ID NO: 89484 - protein, 499 aa, Alteromonadaceae bacterium
  misc_feature (1)..(499): tr|A0A2E9KB27|A0A2E9KB27_9ALTE Tryptophan halogenase OS =Alteromonadaceae bacterium OX=1916082 GN=CL587_18800 P E=4 SV=1
MDSNTQSEKTRVVIAGGGTAGWLTAAALAKKLGPLVDITLVESSDISTIGVGEATIPPLRVFHQLLGINEAEFMRATSATFKLGIQFTDFGNKQTEYIHSFGQTGQSGWLAEFFHFWREAHERGIPGEYGEYCLELEAAKANKFFTSTQNSPLNYAYHLDAGAYAAYLKKLAVNSGITHIVDNIDAVNRAPSGDIYALLLRQQGLLTGDLFIDCTGFKALLIGEALNTGYEDWSHWLFCNRALAVQTELAPPLRPYTVASAHEAGWRWEIPLQHRMGNGFVYSSQFLTDEQAELQFQKTLNSAPLQIIRRIEFKTGRRDHAWQNNCVAIGLSAGFVEPMESTSIHLIVTGITRLMQLFPYRGDATRLRNEYNNQTRAEIEKIRDFIILHYHVTERDDSEFWKMCKKMNIPDSLAERIELFREHGHAFQKNGELFRVDSWTQVMLGQGILPGSWHPAAKMMSSGQLSAAMEKGKQEIKQRVAQLPGHEAFVSQYYASVKH

SEQ ID NO: 89485 - protein, 495 aa, Alteromonadaceae bacterium; identical to SEQ ID NO: 83233
  misc_feature (1)..(495): tr|A0A3R7Y6P5|A0A3R7Y6P5_9ALTE Tryptophan 7-halogenase OS=Alteromonadaceae bacterium TMED7 OX=1986650 GN=CBB67 _007285 PE=4 SV=1

SEQ ID NO: 89486 - protein, 533 aa, Sagittula sp.
  misc_feature (1)..(533): tr|A0A2K8W9F9|A0A2K8W9F9_9RHOB Tryptophan halogenase OS =Sagittula sp. P11 OX=2009329 GN=CDO87_06930 PE=4 SV=1
MHSMAEPVTSITVVGGGTAGWLAATYLRSKCAPKIAITLIESPNVPTVGVGEATVPHMPVTLREMGIDDKEFFRRCNTSFKMGVMFRGWNVDHKGRPFDYMNPFAPPPKIDGVEVGHYFQAFGAGRRDYIQSFSPLMDLLDAGKGPLSFNAANDPMPRAGYAYHLDAGAFAKMLAEVGVARGVEHVLDDVDGVELDDTGHVAALKLRQTGRRPVQLVIDCTGFKGLVIREALGEPFENYSDYLANDRAMALPIPHPDPERLPAATSSTALGAGWSWAVPLYHRIGTGYVYSSAHRTDDAARDEFLAHLGDRAPKGAEPRVIPMRIGRMRRAWVKNCIALGLSGGFIEPLESTAIHMIDMGIRWLLQYFPSQDYEESTRAAYNRCADEMYNEVRDFICLHYRLGNRTDTDYWRDARGLKISDRLEGWLDLWQRQLPVEMDIGRANLFDHNTFQAVLLGKRVYENGWGAARLNRSFALSEKRWKGFLRDSAARNMAVVKVKADHRRALRVLRGEAKDGAVTRQTLGVVADEAVLF

SEQ ID NO: 89487 - protein, 498 aa, Alteromonadaceae bacterium
  misc_feature (1)..(498): tr|A0A2E7GNR0|A0A2E7GNR0_9ALTE Tryptophan halogenase OS =Alteromonadaceae bacterium OX=1916082 GN=CL578_09095 P E=4 SV=1
MSQPFNIVILGGGTAGWMAANLFAHKWADRLANNELTVTLVESPDIGIVGVGEGSTPTLKRFFSMLGIADADWMRQCNATYKMNIAFKGFSPASGIDCYSHPFVSQIDTFTQRAFLVNARTRRLGLDTHTEPADFLLNGVLAKQNKGPQTPANFPFRMEYGYHFDSHLLGVFLQQHAISLGTEHIQANVDQVKQHENGDIAALCCKDGRELNGDLFVDCSGFSSVLMQKTLGVKFNRYQENLFNDSAVVVPTPIGKHIPVETTSTALSAGWCWKIPLTNRFGNGYVYSSDFISANHAERELKQHLQLGEDIECRHLSMQVGSLAKQWQNNCLGIGLSAGFIEPLEATALHLAQISVEQFILEFEEGGFTNRLQGQYNTKMHHRTERTRDYIVAHYKLNTRNDSEYWRANRNNMHLSESLLQILDVWYKRGDLEAEINRQNLSSHFNAVSWNCLLSGYGAFPPLAAKQPGTGDLYKEQNIESFLQGCALNFSNHAENLR

SEQ ID NO: 89488 - protein, 501 aa, Alteromonadaceae bacterium
  misc_feature (1)..(501): tr|A0A424T9U5|A0A424T9U5_9ALTE Tryptophan 7-halogenase OS=Alteromonadaceae bacterium TMED7 OX=1986650 GN=CBB67 _022275 PE=4 SV=1
  misc_feature (6)..(7): Xaa can be any naturally occurring amino acid
  misc_feature (39)..(39): Xaa can be any naturally occurring amino acid
  misc_feature (42)..(42): Xaa can be any naturally occurring amino acid
  misc_feature (58)..(58): Xaa can be any naturally occurring amino acid
  misc_feature (71)..(71): Xaa can be any naturally occurring amino acid
  misc_feature (83)..(83): Xaa can be any naturally occurring amino acid
  misc_feature (85)..(85): Xaa can be any naturally occurring amino acid
  misc_feature (92)..(92): Xaa can be any naturally occurring amino acid
  misc_feature (94)..(95): Xaa can be any naturally occurring amino acid
  misc_feature (100)..(100): Xaa can be any naturally occurring amino acid
  misc_feature (103)..(104): Xaa can be any naturally occurring amino acid
  misc_feature (106)..(106): Xaa can be any naturally occurring amino acid
  misc_feature (112)..(112): Xaa can be any naturally occurring amino acid
  misc_feature (129)..(129): Xaa can be any naturally occurring amino acid
  misc_feature (134)..(134): Xaa can be any naturally occurring amino acid
  misc_feature (137)..(137): Xaa can be any naturally occurring amino acid
  misc_feature (161)..(161): Xaa can be any naturally occurring amino acid
  misc_feature (165)..(166): Xaa can be any naturally occurring amino acid
  misc_feature (170)..(170): Xaa can be any naturally occurring amino acid
  misc_feature (185)..(185): Xaa can be any naturally occurring amino acid
  misc_feature (196)..(197): Xaa can be any naturally occurring amino acid
  misc_feature (200)..(200): Xaa can be any naturally occurring amino acid
  misc_feature (202)..(202): Xaa can be any naturally occurring amino acid
  misc_feature (206)..(206): Xaa can be any naturally occurring amino acid
  misc_feature (209)..(209): Xaa can be any naturally occurring amino acid
  misc_feature (225)..(225): Xaa can be any naturally occurring amino acid
  misc_feature (237)..(237): Xaa can be any naturally occurring amino acid
  misc_feature (241)..(241): Xaa can be any naturally occurring amino acid
  misc_feature (245)..(245): Xaa can be any naturally occurring amino acid
  misc_feature (295)..(296): Xaa can be any naturally occurring amino acid
  misc_feature (302)..(303): Xaa can be any naturally occurring amino acid
  misc_feature (305)..(305): Xaa can be any naturally occurring amino acid
  misc_feature (311)..(311): Xaa can be any naturally occurring amino acid
  misc_feature (321)..(321): Xaa can be any naturally occurring amino acid
  misc_feature (325)..(325): Xaa can be any naturally occurring amino acid
  misc_feature (358)..(358): Xaa can be any naturally occurring amino acid
MQTQLXXIIILGGGSAGWMTAAALGKILSKHPCDIQVIXSEXIGTVGVGEATIPQIQXFNDLIGLDEDTFXKRTQGTFKLGIXFXNWRKPGXSXXHAFGXVGXXMXGVHFYXYWLKMRQQGKAAPLDEXTLSSXACXEKRFMRPFEAGNSPLSNIAYAFHXDAGXXAKFXREVAESHGVQRTEGXVTEVRQHPDGXXQSXIXENGXEHXADFFIDCSGFRALLIXQTLKTGYEDWRXWLPXDRAXTAPSSLTETPWPFTRAAAQQAGWQWRIPLQHRVGNGHVYCSEFMTDEEAXXTLRLNXXGXLLADPXQIRFVTGKRXKFWXKNCLAVGLSGGFMEPLESTSLHLVQVAISKFFXYFPFQQPCQSDIDQYNAEMDFEFTRIRDFLILHYHVTEREDTEFWRYCKHMPIPDTLQEKIDHFKANGRISRFNNELFNDLSWFEVMYGQGLRPEGYHALADIFPEEELARRLEGIQRVVRKSVDYMPGHAEFIAKTCAANRD

SEQ ID NO: 89489 - protein, 504 aa, Sphingomonas sp.; identical to SEQ ID NO: 82615
  misc_feature (1)..(504): tr|A0A430E3T6|A0A430E3T6_9SPHN Tryptophan 7-halogenase OS=Sphingomonas sp. ABOLH OX=1985881 GN=CA237_14280 PE= 4 SV=1

SEQ ID NO: 89490 - protein, 496 aa, Alteromonadaceae bacterium
  misc_feature (1)..(496): tr|A0A3R7XGX6|A0A3R7XGX6_9ALTE Tryptophan 7-halogenase OS=Alteromonadaceae bacterium TMED7 OX=1986650 GN=CBB67 _010275 PE=4 SV=1
MPEAIKKVVIAGGGTAGWMTAALLNKVLGNSVTIELVESEQIGIVGVGEATIPPIQTFNRFLGIDEKAFLRETQGTIKLAIKFENWRKPGESYYHTFGAPGTTMGFCSFHHYWLKAKEAGLDKSFWDFDLNYLACQQGKFNKINTQNPLYDMPYAYHFDSALYGQFLRRFAEQGGVKRTEGIIEHVQQHPQSGFITGLQLTDGRQIEGDLFIDCTGLNGLLIRKTLGVNYEDWSHWLPADSAQAVPSERFDKTLPYTRSIAHSCGWQWRIPLTHRNGNGIVYSSQFTTDEQANETLLGNLDTQALGEPRTIRFNTGRTDQQWCKNVVAIGLSSGFLEPLESTSIHLIQSGIIRLMKMFPNQGISPTMVDMYNAESKDEFETIRDFIILHYHVNERDDSEFWRAMREMTIPERLAQKIEAFKETAAIFNEQNDIFRDASWVQVMMGQGLSPRDYHAAVNAMDNQTLLSAMQQIQQAKMQPVAKLLGHDEFIERYTSA

SEQ ID NO: 89491 - protein, 510 aa, Alteromonadaceae bacterium; identical to SEQ ID NO: 86095
  misc_feature (1)..(510): tr|A0A2D5M4V9|A0A2D5M4V9_9ALTE Tryptophan halogenase OS =Alteromonadaceae bacterium OX=1916082 GN=CL579_14115 P E=4 SV=1

SEQ ID NO: 89492 - protein, 521 aa, Permianibacter aggregans
  misc_feature (1)..(521): tr|A0A4V3D8D4|A0A4V3D8D4_9GAMM Tryptophan halogenase OS =Permianibacter aggregans OX=1510150 GN=EV696_101321 PE =4 SV=1
MQGEIQQIIILGGGAAGWLTAGILAAQHQLNPAIRITLVESPDVKILGVGEGTWPTMRDTLRKMGVSETAFIRECDASFKQGTQFQSWVNGDDKDCYFHPFSLPQGHFDGLPTRYWPMLADKLSFAEAVSTQPLLCQQFRAPKQPQTPEFAGVVNYGYHLDAVKFADFLRRHCTEKLGVHHHYAHVTGVTVDEQEHITALQTLGEPIIGDLFIDCSGFQAQLIHQHYHIPFHDLRHVLFNDSAMVWQQTHDTENSSLASATISTAQAAGWIWDIALPTRRGLGYVYASEHLSDEQAAAGLQDYIRKHFAGSDPESITPRKISFNPGYRTKFWHRNCIAIGTSAGFIEPLEASALVLIELSASYLSQQLPRTREQMNIVAKRFNEVFQYRWQRITEFLKLHYVASQRRDHDYWLAHQMPDSIPEALRENLLLWQHNTPSRFDFPHAEEVFPAASYQYILYGMGVHANTPVPNQTMQRSLAEQYLKQTLELGQKQLQYLPSNRELLAHIHHHATDPQRLQGIT

SEQ ID NO: 89493 - protein, 500 aa, Alteromonadaceae bacterium; identical to SEQ ID NO: 86875
  misc_feature (1)..(500): tr|A0A2D9KDZ5|A0A2D9KDZ5_9ALTE NAD(FAD)-dependent dehyd rogenase OS=Alteromonadaceae bacterium OX=1916082 GN=CL 582_08225 PE=4 SV=1

SEQ ID NO: 89494 - protein, 500 aa, Alteromonadaceae bacterium
  misc_feature (1)..(500): tr|A0A2E7GNW8|A0A2E7GNW8_9ALTE Tryptophan halogenase OS =Alteromonadaceae bacterium OX=1916082 GN=CL578_10725 P E=4 SV=1
MLPIPQNITIVGLNVHGLLTALLLRKTYKPAVTGITLVGLKEEDSPPKAYIAGKALNTLLEHFGYSEANWMRQTQATFKLSNRYVGFSEQEFSVANASEVDILHQPLMLELSKLKRQAYQLDLSLDDFFFAAALAKRNLSPKAQDFPFETDYQYQVDANCLFTLLQKIAAEHSITTRPSTLETLQLDQHGTLKHIECEDQILSGDYFFDCTQSAQLLIGNMPDFRQETLPEVRINDRVLTYTLAVECCASEVVTTALDCGFVLQYTLQDAVHFQYHYSSKFIQDPQAVQRLERHISQQGYKKVLQRHLSASQAYLVSQPWIHNCLAIGPACGLTQGTEDHELSHTFAMLEQFVSSIQSPDDAKDVIKNYNHRIKSRFVYAHSYHSTLQLLNSRRNSPYWQTPQDANALTPIGRSLFSQWLSGEDLSVEPILDINGLTAWYALFSGLGHYPTGELKPHPKSRAIQDNIQDMCRKLAGCCLNFQTHDNLIAEGKHHANVTAV

SEQ ID NO: 89495 - protein, 506 aa, Simiduia agarivorans
  misc_feature (1)..(506): tr|K4KH12|K4KH12_SIMAS Tryptophan halogenase OS=Simidui a agarivorans (strain DSM 21679 / JCM 13881 / BCRC 1759 7 / SA1) OX=1117647 GN=M5M_05405 PE=4 SV=1
MKTNRWIIVGGGTAGWIAASALAHQYRNQAVSITLVESSEIGTVGVGEAVIPPFITFIRNLGLDEQQFIAAVGGTFKLGIEFKNWRRQHHSYFHHFGDLGRPLNGNDFYHCFLHAGRAGDCGDLMDYAPSAVMARQHRFFLPFKLAPDSGLNGANYALHFDASRVAAELRRFACDAGVKRVDAKVERVLTDDAGTIQTLQLSTGEQLDGDYFIDCSGFRSLLLGQTLNIPYDDWSDLLPCNSAAAVQSEHTGDTPPYTTASAQDAGWIWRIPLQHRMGNGYVFSNDYISDDEACASLLAQLTGKPLHDPRILRFTTGMRQQLWAKNCIALGLAGGFLEPLESTAIHLVTRGVQFLLQLLPTVATTETQCQALAAEYNQRMRADYEEIRDFLVLHYCLTERDDSPFWRYVRDMPLPASLKHRLALFDASGQLPPENDELFRKPSWQAVLHGMGRRPAHYHPAVDQLDAAQVNQALNAARQQMANACQQLPTHNEFIQQFCATPQAAQ

SEQ ID NO: 89496 - protein, 518 aa, Pseudoalteromonadaceae bacterium; identical to SEQ ID NO: 88853
  misc_feature (1)..(518): tr|A0A2D7MWE1|A0A2D7MWE1_9GAMM Tryptophan halogenase OS =Pseudoalteromonadaceae bacterium OX=2026783 GN=CMK62_0 2575 PE=4 SV=1

SEQ ID NO: 89497 - protein, 507 aa, Croceicoccus marinus
  misc_feature (1)..(507): tr|A0A1Z1FBB7|A0A1Z1FBB7_9SPHN Tryptophan halogenase OS =Croceicoccus marinus OX=450378 GN=A9D14_07240 PE=4 SV= 1
MIQDGSSPVRVVVLGGGTAGWMTAASLARLLPGQVTVELIESEDIGIVGVGEATLPHIRGFVERLGIDEASFMKATHATYKLGIDFRDFGAIGESYIHPFGGFGEAVQSVGFHHWWLEQRRLGLGSDIGDYSFAVRAARENRFRPPAQDGSLGSTYGYAYQFDATLFGPFMRQFGLTIGVTRHEGIVTSVKRNGESGDVAALLLKDGRRIEGDLFVDCSGFRSLLLGQEMAEEWEDWTHWLPCDRAAAMPCAHESDDLPPYTTATAMPAGWRWEIPLQHRMGNGYVFSSAHLSEDQACDAIRGAARGKPLADPRILRFRPGRRRRSWSGNVVAVGLASGFLEPLESTSIYLAQMAITNLIELFPADGRIEQRDRDEFNRLVDMEYDRIRDFLILHYHVTRRNDSDFWNHVRTMQVPDSLADKIELWRNTGRVEKYGEGLFFEPSWIAVYVGQGLLPERYDPRVPQVDPVRVRGALDRLKQAIDDEVAAMPGHADYLRSEAARLARAA

SEQ ID NO: 89498 - protein, 527 aa, Pseudoxanthomonas sp.
  misc_feature (1)..(527): tr|A0A3R8MPI8|A0A3R8MPI8_9GAMM Tryptophan 7-halogenase OS=Pseudoxanthomonas sp. SGD-10 OX=2493089 GN=EIM50_030 65 PE=4 SV=1
MDNNRIRKVVIAGGGTAGWVAACALTHQFRDLLEITLVESEEIGTVGVGESTIPTIRTFHRLLQIDEREFMKAVAGSFKLAISFENWKRPGERYFHPFGTTGVNTWSCDFHQFWLESRRRGIHSDLGDYCLETAAARLDRFALFDANDSAQQWSMRWTKAATRLERSDVSYAYHFDAALYAAFMRAKCEGRGLKRIEGKIREVRQDPDNGYVKTLVLEDGQLVEGDLFIDCTGFRGLLIEQTLKTGFEDWNNWLPCNRAVAMQVESDVPPVPYTRAIAHEAGWRWHIALQHRVGCGWVFSSEHMSDDEAAARLRAAYPDDRLVREPWVVPFRTGRRRQAWNKNVVSLGLASSFIEPLESTSIHLTLSAVTRLVQLFPFEGISQAVVDRYNKVSRDELEHIRNFIILHYHLNQRDEPMWKQCREMQLPPELAERIQVFRDTAYAWQGEDELFRLDSWTHCMLGQGVVPKDHHPLTRGLSDADMQTLLQGVRRPIERAVQAMPQHHEFLKRYCPADPSVWHNRRRSTVG

SEQ ID NO: 89499 - protein, 492 aa, Sphingomonas sp.
  misc_feature (1)..(492): tr|A0A1H8AWD4|A0A1H8AWD4_9SPHN Tryptophan halogenase OS =Sphingomonas sp. S6-262 OX=1166340 GN=SAMN05192583_109 3 PE=4 SV=1
MIEQTVIVGGGTAGWMAAAAIARGLGRHQRVTLIESDRIGTVGVGEATVPSIRDFNRYLGLDEDQFVSATGGTFKLGIEFQGWNGPGSRYFHPFGFLGPDTSGVDFHHLWLRHVADGGSRDLVAISPEASAARDNRFGRTTPHGALQYAFHIDAARYAALLREQAEANGVVRIEGEVIGVERDPATGDVAAVVLADSRRISADLFVDCSGFRAVLVGEALGSGYVDWSRWLPCDRAVAVPSTRLDTMPPFTRAEVRETGWQWRIPLQHRTGNGYVFASGFEREDDAVRALSARLDTDAIAEPRLLRFTAGHRRAPWSHNCVSLGLAAGFLEPLESTSIHLIQTAIIRLLALFPHRSIDTRLVERFNRDTIAEYEAVRDFVIAHYRTSDGMDTAFWAAVRDQSPPDSLLARLEAFTATGTILYERGDLFGPTNWLAVLTGQGLWPLDHHPIAAAMPQDAVALRLKQLRDRAAAMAASLPSHASFLMDRGVRSL

SEQ ID NO: 89500 - protein, 495 aa, Alteromonas sp.
  misc_feature (1)..(495): tr|A0A1L8MJ75|A0A1L8MJ75_9ALTE Tryptophan halogenase OS =Alteromonas sp. V450 OX=1912139 GN=BK026_04440 PE=4 SV =1
MNKTVKNVVIVGGGTAGWISAAVIKRLIGAGVDVTLVESEEIGTVGVGEATIPPIITLNNVLGIEEKEFLRETNATMKLAIKFENWRVQGESYFHTFGAPGKSYAFCHFHHYLKRAQELGLADSIWDYDLNYLACKAGKFAHIKSPDPIIEMPYAYHFDASLYARFLRKKCESMGVTRREGIITDVQQDADSGFITGVTLKDGTDIEGDLFIDCSGFKGLLTQQTLNTGYEDWSHWLPCDRAVAMPSERHEHTRPYTRSIAHSAGWQWRIPLQHRNGNGLVYSSNYYSDEQALDILSSNLDTKPLAEPNFIRFKTGRRRKQWNKNVVAVGLSSGFLEPLESTSIHLIQSAVVRLIHLFPHDGFKQHQIDEYNKQSQLEFEQIRDFIILHYHVNERTDSHFWKDLREMDVPDNLTHKIELFRASGNLFREQNDLFLESSWLQVLIGQGVIQKDYHPLANALSEQKLQELLQNIKRIKNEPIGKIATHDDFLKQFCS

SEQ ID NO: 89501 - protein, 495 aa, Alteromonadaceae bacterium
  misc_feature (1)..(495): tr|A0A2E6SJH7|A0A2E6SJH7_9ALTE Tryptophan halogenase OS =Alteromonadaceae bacterium OX=1916082 GN=CL590_00740 P E=4 SV=1
  misc_feature (77)..(77): Xaa can be any naturally occurring amino acid
  misc_feature (82)..(82): Xaa can be any naturally occurring amino acid
  misc_feature (114)..(114): Xaa can be any naturally occurring amino acid
  misc_feature (117)..(117): Xaa can be any naturally occurring amino acid
  misc_feature (132)..(133): Xaa can be any naturally occurring amino acid
  misc_feature (136)..(136): Xaa can be any naturally occurring amino acid
  misc_feature (147)..(147): Xaa can be any naturally occurring amino acid
  misc_feature (180)..(180): Xaa can be any naturally occurring amino acid
  misc_feature (195)..(195): Xaa can be any naturally occurring amino acid
  misc_feature (204)..(205): Xaa can be any naturally occurring amino acid
  misc_feature (220)..(220): Xaa can be any naturally occurring amino acid
  misc_feature (223)..(224): Xaa can be any naturally occurring amino acid
  misc_feature (243)..(243): Xaa can be any naturally occurring amino acid
  misc_feature (301)..(301): Xaa can be any naturally occurring amino acid
  misc_feature (319)..(319): Xaa can be any naturally occurring amino acid
  misc_feature (337)..(337): Xaa can be any naturally occurring amino acid
  misc_feature (361)..(361): Xaa can be any naturally occurring amino acid
MPQTIQNVVIAGGGTAGWMTAALLRRVLSPTIRIELVESEQIGIVGVGEATIPPIQTFNQFLGIDEKAFLRETHATXKLAIXFENWKTQGDSYYHTFGAPGTTMGFCSFHHYWXKAXQAGLAQSLWDFDLNXXSCXQGKFNKINTPXPLYEMQYAYHFDSALYGQFLRKTAEQAGVVRTXGIIEHVQQDPDSGFXTALQLTNGXXIQGDLFIDCTGLRGXLIXXALGVSYEDWSHWLPADSAXAVPSERFDKTLPYTRSIAHRVGWQWRIPLTHRNGNGIVYSSQYLSDDEAGQTLLNNLXTKALDTPRTIRFKTGRTXQQWCKNVVAIGLSSGFLXPLESTSIHLIQSGIVRLMKMFPNXGISQAMVDLYNAESKDEFETIRDFIILHYHVNQRDDSDFWRDMRNMAIPDRLAQKIAAFEDTAAIFNEQSDIFRDASWVQVMMGQGLDPKDYHPAADAMDNAQLMDAMQQIYKAKQQPLDKLMSHDEFIKRYTA

SEQ ID NO: 89502 - protein, 496 aa, Sphingomonas sp.; identical to SEQ ID NO: 82659
  misc_feature (1)..(496): tr|A0A430E9T7|A0A430E9T7_9SPHN Tryptophan 7-halogenase OS=Sphingomonas sp. ABOLH OX=1985881 GN=CA237_04325 PE= 4 SV=1

SEQ ID NO: 89503 - protein, 532 aa, Serratia rubidaea
  misc_feature (1)..(532): tr|A0A3S5AZ98|A0A3S5AZ98_SERRU Geranylgeranyl reductase family OS=Serratia rubidaea OX=61652 GN=NCTC10036_0360 4 PE=4 SV=1
MSKPIKNIVIVGGGTAGWMSASYLVRALQQQANITLIESEAIPRIGVGEATIPSLQKVFFDFLGIPEREWMPQVNGAFKAGIKFVNWRKPPSPSHNDYFYHLFGNVPNCDGVPLTHYWLRKREQGFQQSMAYACYPQPGALDGNLAPCLHDGSRQMSHAWHFDAHLVADFLKRWAVDRGVNRVVDEVVEVKLNEHGFISNLLTKEGRQLEADLFIDCSGMRGLLINQALKEPFIDMSDYLLCDSAVASAVPNDDTQAGVEPYTSSIAMNAGWTWKIPMLGRFGSGYVFSSKFTSRDQATSDFLNLWGLSDNQPLNQIKFRVGRNKRAWVNNCVSIGLASCFLEPLESTGIYFIYAALYQLVKHFPDTAFDPRLADAFNAEIVYMFDDCRDFVQAHYFTSSREDTAFWLANRHELRLSDAIQEKIERYKAGLPLTTTSFDDATYYDTFDFEFKNFWLNGNYYCIFAGLDMLPDRSLPLLQLRPDSIDKAEAMFASIQHEAERLRTSLPTNYDYLRSLQKGYAEQSRPASPEIL

SEQ ID NO: 89504 - protein, 502 aa, Streptomyces sp.; identical to SEQ ID NO: 87728
  misc_feature (1)..(502): tr|A0A3S8X3R9|A0A3S8X3R9_9ACTN Tryptophan halogenase OS =Streptomyces sp. WAC 01438 OX=2203204 GN=DLM49_32970 P E=4 SV=1

SEQ ID NO: 89505 - protein, 519 aa, Alteromonadaceae bacterium; identical to SEQ ID NO: 83219
  misc_feature (1)..(519): tr|A0A424TAB7|A0A424TAB7_9ALTE Tryptophan 7-halogenase OS=Alteromonadaceae bacterium TMED7 OX=1986650 GN=CBB67 _021865 PE=4 SV=1

SEQ ID NO: 89506 - protein, 530 aa, Nonomuraea sp.
  misc_feature (1)..(530): tr|A0A429AX30|A0A429AX30_9ACTN Tryptophan halogenase OS =Nonomuraea sp. WAC 01424 OX=2203200 GN=DMB42_29135 PE= 4 SV=1
MVKNVVIVGGGTSGWMTAAYLRAAFGDRIAVTLVESKNIATIGVGEATFSTIRHFFDYLGLDEREWMPECHATYKLGIRFENWRAPGHHFYHPFERLRVVDGFPLTDWWLGTRPGGDFDRDCFVISWLCEAKRSPRYLSGELFEQDFTENPDERAYRTTLTEQNTQFPYAYHFDAALLASYLTRFGTERGVRHVLDDVVDVRLDERGWIDHVLTKEHGELAGDLFIDCTGFRGMLLNKALSVPFVSYQESLPNDRAVALRVPADMAARGLRPCTTATAMDAGWIWTIPLYGRVGTGYVYAGDYCTPEEAERTLREFVGPEADDLEANHIRMRIGRSERSWVNNCVAVGLSSGFVEPLESTGLFFIQNAIEQLVKHFPADRWDDRLRESYNRQVANVMDGVREFLALHYHAAARSDNDYWKDAATRPVPDGLAERLELWQARLPDSETVFPHYHGFESYSYIAMLLGLGGVPVQAPPALRHFDHGRAERELRLVREQAEALVANLPSQYEYIAALNGDTLPGRRPELSRTR

SEQ ID NO: 89507 - protein, 508 aa, Alteromonadaceae bacterium
  misc_feature (1)..(508): tr|A0A2E7GR55|A0A2E7GR55_9ALTE Tryptophan halogenase OS =Alteromonadaceae bacterium OX=1916082 GN=CL578_13265 P E=4 SV=1
MLKAVNKIVIVGGGTAGWLTAAIIAAQHKTDDNQGLQILLVESSDIPTVGVGEGTWPTMKNTLQQIGLKESDVFARCHAGFKQGGKFVDWVHGNGDFYYHPFTVPLGYGRIDLAPYVDNIENYAVESNFQHHVCEAGLAPRSMAEGEYKGQCNYAYHLDAGEFAEVLKEHCKNNLNVSQIIGTVASVNLTPEGAIGSILLSNQQQIDGDLFVDCTGFSSLLLGQALEVPFISADKVLFNDSALALHMPYESGTSPIASHTIATGQNAGWIWDIGLTHRRGVGHVYSSQYLSDDEAEANLRRYLGPTSDDIPVRKINFKSGHRAQVWKQNCVAVGMSAGFVEPLEATAIMLVEISARFIADNIPPDASLTPIIAKRFNQQMAYRWSRIIDFLKLHYMLTKRPEPYWQAHTDPDSIPDSLKEDLALWKFRGPISADFDAAIELFPAASYQYVLYGMGFKPDFSRQAHLYNQQQNAQKVMLRNQQLTQQLLETLPPHREYIERWLSTQSMR

SEQ ID NO: 89508 - protein, 496 aa, Sphingomonas sp.
  misc_feature (1)..(496): tr|A0A0Q4HV89|A0A0Q4HV89_9SPHN Tryptophan halogenase OS =Sphingomonas sp. Leaf22 OX=1735687 GN=ASE70_12770 PE=4 SV=1
MKQGEGRKVRVVVVGGGTAGWMTAAGLVGLLPAACDVTLVESEAIGIVGVGEATLPHLRLYLERLGIDERAFMAATDATYKLGIEFRDFGRIGDRYIHPFGTYGRPLAGVAFHHYWLRRDRAGAVQPIGAFSAGVVAAERRRFERPGNDPGDPTTSFGYAYQFDATRFAPFLRDWAEARGVTRIEGRIVGADRQGDSVAAVELDDGRRIEGDLFVDCSGFRSLLLGETLAEPWEDWSHWLPCDRAVAVPCASPSGPIEPYTRATAMPAGWRWRIPLRHRVGNGYVYASAHCSDDEAVAALLAGLDGEPLADPRPLRFRAGRRRRSWSGNVVAVGLASGFLEPLESTSIYLVQAAITSLIEHFPDTRVAPADRDGFNAAIDAEYDRIRDFLILHYHATERADSPFWNHVRTMTIPDTLADKLALWRGSAQVARYGHGLFLEPSWVAVYLGQRVVPTGWDPRADQPDAAGLDRALGSLAQAIADRVRAMPGHDAALGL

SEQ ID NO: 89509 - protein, 506 aa, Alteromonadaceae bacterium
  misc_feature (1)..(506): tr|A0A2E7GNW2|A0A2E7GNW2_9ALTE Tryptophan halogenase OS =Alteromonadaceae bacterium OX=1916082 GN=CL578_10730 P E=4 SV=1
MQTSLPFKKIIIIGGGTAGWMSACYLAKMWQDYDLEIKIIESDAIGTIGVGEGTTPSIKGFFEQLGIEAKEWMPACNATYKTGIRFVNWSSDPNYKSYFHPFYSQLDEYFQHEFFQNIQLKHRGFDVHAHPDQYLLASELAQQRKAPIEPEHYPFDMAYAYHFDATLLAQFLKKKALQWNVTHQVATINEVKQKDDGSIASVVTESGATIEADFFVDCSGFRSLLLGKSLKVPYNSFADSLLNDSAVTIVTEREDTTPSMTLSTALSCGWAWRIPLTNRFGNGYVFSSRFQSPQDAEEEFRRHLALPESAQFNHLKMRVGHFAKGWEKNVLAVGLSQGFIEPLEATALHFATQSVVDFVSAVDNSTDQAGYSNQTAYNNKLSDRFSCVRDYIELHYLANSRHDTPYWKAARSHTPSRRLQRILTTWHQGKSVPRVLDEEAVSLQLFGHESWLCLLAGKGVFPESEHTIDALPTAMRIDMQKIKHFVETSAKHYPLHDDALAALKQS

SEQ ID NO: 89510 - protein, 492 aa, Alteromonadaceae bacterium
  misc_feature (1)..(492): tr|A0A2E9K370|A0A2E9K370_9ALTE Tryptophan halogenase OS =Alteromonadaceae bacterium OX=1916082 GN=CL587_04360 P E=4 SV=1
MNNKKQRVVIAGGGTAGWMAAAALTRLLHNRVDVTLVESSDIGTVGVGEATIPTLVFFHQLLKIDEKAFMAATNATFKLGINFENWRTTQDSYLHAFGATGQDCWAAGFQHFWTRGRQLGLSGDFGQYCLERVAAEAHKFAHLPKNGLNYAFHIDAGRYAGFLRQLAEEAGLKRIDARIEKVVTRPADGFITQLQLDNGDRVDGDLFIDCTGFRGVLIEETLHTGYTDWSHWLLCDSAVAVQAESHAPPLPYTRCIAHEEGWQWRIPLQNRTGNGLVFCSKYLSDDAATQRLTGNIEGAALNDPKVIKFRPGRRVKQWNRNCVSLGLASGFIEPLESTSIHLIQQGIVRLLRMFPHGEVQQSVVDEFNRQSVDEIEHIRDFIILHYHVTERTDSAFWRHCKQMDVPDSLARRLTIFRESGQIHRKNNELFDDSWQQVMIGQGLLPEAYHPIADMMSEQELQNFLTHIKTNIDRTVAGLPTHRQYLNSLFNRA

SEQ ID NO: 89511 - protein, 494 aa, Alteromonadaceae bacterium
  misc_feature (1)..(494): tr|A0A2E7GRH7|A0A2E7GRH7_9ALTE Tryptophan 7-halogenase OS=Alteromonadaceae bacterium OX=1916082 GN=CL578_12125 PE=4 SV=1
MNSEKVKNVVIAGGGTAGWMAAASLSKLLGKSLNITLVESDEIGTVGVGEATIPPIRTLHKLLNIDEQAFMRATNSTFKLGIEFSHWGQKSDSYIHSFGVTGKECWAGEFHHFWLRGKELGINVPFGDYCYELQASKQGKFAFSANSPMNFAYHLDATLYAQFLRDFCADVVTRIEGKIATVNKHTNNGFIRSLTLESGQEVEGDFFIDCTGFKGLLIEGALHTGYEDWSHWLPCDSAVAVQTQSTSDPLPYTRATAHDFGWQWRIPLQNRVGNGMVFCSRYASDEQAKQALLANLEGDPITEPRVIKFKTGRRRKGWNKNCVALGLASGFVEPLESTSIHLIMTGIVRLMRLFPFDGVRQSGIDEYNEKLTSELHSIRDFIVLHYKVTQRDDSDFWRHCQSMEVPDTLAHKIHLFKETGRVFLDDGDIFRVDSWTQVMLGQGLEPKQYHRIVNEMSEEELTRFLAGLRSAIEQRVNQLPSHQQFITRYCNASA

SEQ ID NO: 89512 - protein, 490 aa, Sphingomonas sp.
  misc_feature (1)..(490): tr|A0A1H7ZET7|A0A1H7ZET7_9SPHN Tryptophan halogenase OS =Sphingomonas sp. S6-262 OX=1166340 GN=SAMN05192583_065 2 PE=4 SV=1
MADRVRRVVIVGGGTAGWMTAAALSKALGKTDTAITLIESEEIGTVGVGEATIPTIHWFNTLVGLDEARFMADTGATWKLGIEFRGLQGEGSAYFHPFGTFGGPGDAAMFPHRLIRAWNVGEAAPIEEYSLTTQVARAGRFAKPVPDPRSLLSTLGYAFHFDAARYAAHLRVLAESRGVVRHEGRVVQVDRDAATGNVTTLQTATGDAIGGDLFIDCSGLRGLLIERAMGAGFEDWSHWLPCDAAWAAPTRAMERRPLYTQASADTAGWRWRIPLKHRTGNGYVFSSRFEEPDAARDRLLAALGEAVLAEPRLIRFTPGRRRRAWVGNVVAIGLSAGFLEPLESTSIHLIQSGIGRLLSLFPRADASPLLAEQYNRLSAREFEEVRDFIILHYHRTQGRTEPLWRYCQQMPIPDTLASRIDQFRASGRLMLATDDLFRDASWFAVLTGQGVRAEDHNPLLDVISDADNARQLAAMRQAIRSAALQVPLAQ

SEQ ID NO: 89513 - protein, 508 aa, Pseudoalteromonadaceae bacterium; identical to SEQ ID NO: 88857
  misc_feature (1)..(508): tr|A0A2D7MYT5|A0A2D7MYT5_9GAMM Tryptophan halogenase OS =Pseudoalteromonadaceae bacterium OX=2026783 GN=CMK62_0 7010 PE=4 SV=1
  misc_feature (33)..(33): Xaa can be any naturally occurring amino acid

SEQ ID NO: 89514 - protein, 530 aa, Lechevalieria fradiae
  misc_feature (1)..(530): tr|A0A1G8BL30|A0A1G8BL30_9PSEU Tryptophan halogenase OS =Lechevalieria fradiae OX=200378 GN=SAMN05216553_119115 PE=4 SV=1
MEDHRISNVVVLGGGTAGWMTASYLGKALGRYATITVLEAPSIPKIGVGEATVPNLHKTFFDFLGIPEEEWMRECNASFKMAVKFVNWRTPGEGEPVGRQLRGRPDHYYHLFGLLPTHQNLPLSHYWAAKSLGGQTTEQFDYACYRESPIIDARLSPRFADGTKWTNYAWHFDAHLVADFLKRFAIEKQGVVHVEDEMVDATIDQRGHITSLRTKAGRTIEGDLFVDCSGFRGLLINKLMREPFLDMSDHLLNDSAVATSVPHDDEAHGVEPATSAIAMKSGWTWKIPMLDRFGTGYVYSSRFTDPDEATKDLCALWDLDPEEQPLNHVKFRVGRNRRAWVRNCVSIGLSSCFLEPLESTGIYFITAALYQLGKHFPDKRFDPVLIESFNREIETMFDDSRDFLQAHFTLAPRRDTPFWRACKDLVLPEDIQHKIAQYRAGLAVNMPVTDEATYYENFEAEFRNFWTNSSYYCIFAGLDVLPEHPLPALAFRPDAVEGAEPVFAQIKQKQAELLKTLPTTHEYLRELHGR

SEQ ID NO: 89515 - protein, 516 aa, Permianibacter aggregans
  misc_feature (1)..(516): tr|A0A4R6UFQ0|A0A4R6UFQ0_9GAMM Tryptophan halogenase OS =Permianibacter aggregans OX=1510150 GN=EV696_11946 PE= 4 SV=1
MPVSEREQSMNTNAIKNVVIVGGGTAGWMTAAALSKVFGQRLSIHLIESEEIGTVGVGEATIPQIRVFNGMLGIDENEFVRSTQGTFKLGIEFADWLRPGHRYMHAFGAVGGRDLGSVPFHQYWLKMRLVNQAAALDDYTFNSVAAYQNKFMRSVNMPNSPLASIFYAFHFDASLYARYLRAYAETRGVRRTEGKVMHSRLRGQDGFIEAVTLESGEVVNGDLFIDCSGFRGLLIEQAMETGYIDWSHYLPCDRAVAVPSESVTPLLPYTRSTARQAGWQWRIPLQHRIGNGMVFSSNFLSEEKANQQLLDNLDGKALSEPRVLRFKTGMRRKFWNKNCVAIGLASGFLEPLESTSIHFIQSSIAKLVALFPDKQFSDVDIHEYNRQTRYEFERSRDFLLLHYWANERDEPFWQYFRHLKLPETLQHKIELFRSQGRVFKEGDELFGEASWLQVMVGQNVMPERYHPVVDLRSGDDVHSMLSGVNKLLRDCVSVMPDHAEYVKKSCRGISESVKTA

SEQ ID NO: 89516 - protein, 521 aa, Alteromonadaceae bacterium; identical to SEQ ID NO: 83491
  misc_feature (1)..(521): tr|A0A2D9KAM8|A0A2D9KAM8_9ALTE Tryptophan halogenase OS =Alteromonadaceae bacterium OX=1916082 GN=CL582_02165 P E=4 SV=1

SEQ ID NO: 89517 - protein, 493 aa, Sphingomonas sp.; identical to SEQ ID NO: 82619
  misc_feature (1)..(493): tr|A0A430E6L9|A0A430E6L9_9SPHN Tryptophan 7-halogenase OS=Sphingomonas sp. ABOLH OX=1985881 GN=CA237_09695 PE= 4 SV=1

SEQ ID NO: 89518 - protein, 507 aa, Alteromonadaceae bacterium
  misc_feature (1)..(507): tr|A0A2E9K4K6|A0A2E9K4K6_9ALTE Tryptophan halogenase OS =Alteromonadaceae bacterium OX=1916082 GN=CL587_06995 P E=4 SV=1
MSAPHQIVIAGGGTAGWIAACLMAHHWRDKPVSITLVESADIATVGVGEGSTPTLKRFFSDLNIAESDWMPACNATYKVNIRFKGWSPQSGPASYSHPFISQPDAFTERPFHVNCHNRRRGLDVNVTPENFLLNGWLAGAGKAPVAPPSFPFRIEYGYHFDSALLGRYLKRHAVSLGVHHIEGKIDDVITSLSGHITSLKLQSGEMVEGDFFIDCTGFRSLLLQQTLDIRFNPFSENLFNDRAAVLATPAQAQLPVETSSTALSNGWAWSIPLSSRTGNGYVFSSAHLSDDKAEAELRRHLSVQDNDGDVRFLSMRVGQVEKHWHKNCLALGLAQGFIEPLEATALHLVQLSVEFFIEDYEQGNFSPALQDKFNKDVTERFSGVRDYIVAHYKLNTRDDSAYWRENRNNMALSESLLQLLDVWYRKGDFPAEIQRQNIQSHFGITSWHCLLAGYGIFPPLAKQQPGRGDLYKDNDTEAFFKGCLLNFPDHSAYLKDVARRSPAHQLV

SEQ ID NO: 89519 - protein, 520 aa, Alteromonadaceae bacterium; identical to SEQ ID NO: 86106
  misc_feature (1)..(520): tr|A0A2D5M4Y7|A0A2D5M4Y7_9ALTE Tryptophan halogenase OS =Alteromonadaceae bacterium OX=1916082 GN=CL579_14120 P E=4 SV=1

SEQ ID NO: 89520 - protein, 498 aa, Simiduia agarivorans
  misc_feature (1)..(498): tr|K4KM68|K4KM68_SIMAS Tryptophan halogenase OS=Simidui a agarivorans (strain DSM 21679 / JCM 13881 / BCRC 1759 7 / SA1) OX=1117647 GN=M5M_10730 PE=4 SV=2
MQPKRLVIVGGGTAGWMAANLFAARWASAGVHITLVESPDVPTVGVGEGSTPTLKRFFQAIGVQESDWMPAANATYKVNIRFKDWAPDAGAVDYSHPFISQPDTFTQRDFLINARTRRMGLDTHTTPADFLLNGVLAKHGKGPITPDNFPFRIEYGYHFDAGLLAQHLRRTAIDRGVNHLTAHIDTVGQSDDGAITRLHTRDGQSIDGDFFIDCSGFKAMLMRETLGVAHKSFNANLFNDAAVVAATEALHPLPPETLSTALSAGWAWRIPLTNRTGNGYVYSSDFISREQAEQEFRQHLGLSEQQECRHLRMQVGQLEKHWHKNCLALGLSQGFIEPLEATALHLVQICTELFMDLFEKAGFSSQHAQEYNQRVSDRFERVRDYIVAHYKLNNRNDSDYWRACRAMTDLSPSLQGILDCWYKAGDLETEIQRQGIENHFGAVSWNCLLAGYGVFPKLAPTQPGTGDLYQEKRIAQFLEGCALNFSDHAHNLQLLHKK

SEQ ID NO: 89521 - protein, 486 aa, Simiduia agarivorans
  misc_feature (1)..(486): tr|K4KJB6|K4KJB6_SIMAS Tryptophan halogenase OS=Simidui a agarivorans (strain DSM 21679 / JCM 13881 / BCRC 1759 7 / SA1) OX=1117647 GN=M5M_05400 PE=4 SV=1
MAAASLARHFQHTPLTITLVESPEIGTIGVGEATIPTIRRFYRNLGLSDGQVMMATQATAKLGIAFDGWRAPGEQFIHPFGRFGQDLNGIGFHHYWQRLASMGDTRPLSDYCLPIQLAEANKFTTPAPNPSNSLGVFDWALHLNATAFAKLLKETALQMGVQHVEGNITQVQLESDNGFISALQLADGRQLPGQLFIDCTGFRARLLGEALAVPFESWQDQLLCDRAVVVQSELASPTNPPSFTRARAMRAGWQWRIPLQSRQGNGLVYSSHFLSEDEATAHMLDDCGASPLQEPRHLRFTPGMRKVSWEKNCIALGLAAGFLEPLESTSIALIETAIEKIKLLFPNADCDRAIIDEFNNMTRLEYERVKDFILLHYVLNGRQGEAFWQACREVHQPDTLKNKLSLFKARGHLVKYRWEMFQPASWLALFSGFGFQSDMYDPAADAIPEQQLKSIMDSMAKGIQTAVADSPSHQAFLQHLKQAAGA

SEQ ID NO: 89522 - protein, 537 aa, Alteromonadaceae bacterium
  misc_feature (1)..(537): tr|A0A2E7GN06|A0A2E7GN06_9ALTE Tryptophan halogenase OS =Alteromonadaceae bacterium OX=1916082 GN=CL578_08875 P E=4 SV=1
MTFNEQLNREKYVQLNSQVKDIVIVGGGTAGWLTAGLLASRLSSRVKSGELNITLCESPDVPTIGVGEGSWPTLRSTLQSIGVAETDFIHQCNVSFKQGSRFVNWQHDCPSQYDHPFDVPQQASQGAEAQHWLSTQSQVPFSQAYCLQTELANNNLAPKLITTPEFTGFANYGYHLDAVLFAEFLREHCIQHLQVKHVLASVKQVEQDENGDITCLHLAPPSQNNSNHPDYINGDLFVDCTGFRALLLGDTLGVCNTQVDDVLFANNAIATQLPYVEQNSPIASFTESTAQDNGWIWDIGLPNRRGIGYVYSDRYCDEQDAHRTLVKFLQKTQQNTDTLSYKQIHFTPGYKQQFWKNNCVAIGLSAGFIEPLEASALVLVEMSANMLAEQLPNTRSCMDVIAKRFNQTFTYRWQRIIDFLKLHYVLSRRSSAFWQDNRAQSSVPDSLKELLALWQHKVPDMNDFPARDEVFQAASYQFVLYGAGFKSQLLSTPDKNLLEAAEQQFLSIRGYTSQLTNKTINNRDLLSKIYRYGLQKR

SEQ ID NO: 89523 - protein, 513 aa, Sphingomonas sp.
  misc_feature (1)..(513): tr|A0A430E6F9|A0A430E6F9_9SPHN Tryptophan 7-halogenase OS=Sphingomonas sp. ABOLH OX=1985881 GN=CA237_09710 PE= 4 SV=1
MRVTQRVRQIVVVGGGTAGWLAACRIAAAADPHAAEPLAVTLIESPDVATIGVGEGTWPTMRGTLARIGIDEATFLRSADASFKQGSRFDGWRTGAPDDFYYHPFTAPADVPAADLLRAWDGGRFAEAVCAQPAVCADDLAPRQPGMAPYAGALNYGYHLDAGKFATLLRDTACNRLGVRHVRDHVTGVEAADDGAITAVLTRGSGRIAGDLFLDCTGHAALLIGGHFGIGTIDRTPILFNDRALAVQVPVAPDSPIASQTNATAHDAGWIWDIGLPDRRGVGCVYASDFLSDDAAEATLRQYLSMTAPGAEAAALAFRQLRFRSAHRERFWQGNCVAIGLSAGFLEPLEASAIVLIELSIDALLDGFPADRSAMPLLARRFNDLFRYRWDRIVDFLKLHYALSERDTPYWCAHRDPGSWTESLRDRMALWRMQPPSPADFAHADEIFPAASHQYVLYGMGVSPPPPGALRPHPGTASALHQVRQRARTLAASLPTNRAYLRALTPPTGMAHV

SEQ ID NO: 89524 - protein, 513 aa, Sphingomonas sp.
  misc_feature (1)..(513): tr|A0A0Q4R1P4|A0A0Q4R1P4_9SPHN Tryptophan halogenase OS =Sphingomonas sp. Leaf242 OX=1736304 GN=ASF09_02360 PE= 4 SV=1
MHQIRNIVIVGGGTAGWLTAGVIAARHKGQREHGFTVTLVESPNIPTIGVGEGTWPTLRATLRKMGVSETELFRHCNAAFKQGARFNRWTTGAVDDGYYHPLMLPQQFGSLNLAPHWLAEDGADSFCDAVTPQGRICDEGLAPKTMATPEFDGVANYAYHLDAGKFSHFLQRHCCDTLGVHHVLADVTEVILDETGDIARVETAQGVSIEGDLFVDCTGFAAKLIGDAMGVPFRCCTDTLFCDTALAVQLPYERPDDPIASHTISTAQSAGWIWDIGLPHRRGVGHVFSSSHIDVDAAERELRAYIGPAGKDLPVRKLSIRAGHRETFWKGNCVAVGLAAGFLEPLEASAIVLIELSAKMIAEQMPVCREVMDVVANRFNDTTTYRWGRIIDFLKLHYTLTKRTDTDFWRDNVRPETIPDRLRGLMELWQYQSPWIHDEFDRAEEVFPSASYQYVLYGMGARTTVMPGTIEADAELARRARRENHFQTQRMMSSLPGHRDLIDRIVKHGLQPI

SEQ ID NO: 89525 - protein, 520 aa, Simiduia agarivorans
  misc_feature (1)..(520): tr|K4KRL8|K4KRL8_SIMAS Tryptophan halogenase OS=Simidui a agarivorans (strain DSM 21679 / JCM 13881 / BCRC 1759 7 / SA1) OX=1117647 GN=M5M_18325 PE=4 SV=1
MSSNEIEQILVLGGGAAGWLTAALLAAEHGLKQGGQCRVMLVEAPGIPTIGVGEGTWPSMRDTLRRIGLPEIALFSHCDASFKQGSQFIGWRDGAAGDSYYHPFSLPHGYFQMDLGPYRQGRDYAYGVSAQAAACDAGRAPKQLATPEYAGVLNYGYHFDAGKFGECLREHCVQQLGVAHVQAEVVAVEADSGGFITGLKTSAGDTLAADFFVDCSGSASRLVGEHYRVPWVSKTQVLFNDRAIATQLPYVNAQASIASVTKACAHANGWVWDIALPSRCGIGFVYSSAHQTESEAESAFRQFLQTRAVSAGLDAERIVPDLTLRKLKFEPGHREIFWTHNCVAVGMSAGFIEPLEASALALVEQSAAAIRDFLPVQKSGLRAAANQFNTRFQQHWQSIVDFLKLHYVLSKRTERYWSDHRDQASVPDSLAEALALWRDRAPMGRDIAEAQPLFPAASYRFVLQGMQAECSYLRSPRADRNNAMAGQLLNEVAQQTRRCLDGLPDNRALIDAWLAGPGAH

SEQ ID NO: 89526 - protein, 500 aa, Alteromonadaceae bacterium; identical to SEQ ID NO: 86829
  misc_feature (1)..(500): tr|A0A2D9KL81|A0A2D9KL81_9ALTE Tryptophan halogenase OS =Alteromonadaceae bacterium OX=1916082 GN=CL582_20905 P E=4 SV=1

SEQ ID NO: 89527 - protein, 513 aa, Alteromonadaceae bacterium; identical to SEQ ID NO: 83173
  misc_feature (1)..(513): tr|A0A424TWT6|A0A424TWT6_9ALTE Tryptophan 7-halogenase OS=Alteromonadaceae bacterium TMED7 OX=1986650 GN=CBB67 _005590 PE=4 SV=1

SEQ ID NO: 89528 - protein, 496 aa, Sphingomonas sp.
  misc_feature (1)..(496): tr|A0A0Q4QT61|A0A0Q4QT61_9SPHN Tryptophan halogenase OS =Sphingomonas sp. Leaf242 OX=1736304 GN=ASF09_14850 PE= 4 SV=1
MTSPTAPVPLKTIVIVGGGTAGWIAAAMLARFVPRTAKIRLIESDAIGTVGVGEATIPQIRLLTAALGIDENAMLAATQGTFKLGIEFVDWTGPGSRYMHAFGAVGRGLGVVPFHHHWLRAQASGTAAPLGDYIASARAAADARFDRHPDLAYAYHFDATLLARGLRGLAETAGVDRIEGRIVTAQRDGETGDLTGVTLDDGRTVEGDFFLDCSGFRSLLLGEALGIGFEDWSHWLPCDRAVAVACEATTPLLPCTRATARPVGWQWRIPLQHRTGNGLVYAAAHLSDDEAAARLLANLDGAAIGDPRPLRFATGKRATFWERNVVALGLASGFMEPLESTSIHMVQSAVARLLSLFPSAGDNAAARTAYNRQTHVEYDTVRDFLILHYHANRRPEPFWQRCRDMPLPDRLAEKIAQFRAAAILTQDVADLFTEPAWLQVMIGQGINPATWSPLAEALSPDQLAEFLADIHDRHAATARALPAHADTVARHCRAKR

SEQ ID NO: 89529 - protein, 547 aa, Sphingomonas sp.
  misc_feature (1)..(547): tr|A0A0Q4R645|A0A0Q4R645_9SPHN Tryptophan halogenase OS =Sphingomonas sp. Leaf242 OX=1736304 GN=ASF09_15490 PE= 4 SV=1
MNEHSIRRVVIVGGGTAGWMAAAAFARFLNNGYTEITLVESEEIGTVGVGEATIPPLINFNQMLGLDENAFLAATSGTFKLGIEFVDWGALGERYFHPFGNYGHDLQGVHFHQLWLREKARRPIDDISVWSMSAMAAANGKFGRATGDARSPVRELFYAFHFDASLYARYLRDYAERAGIVRIEGKIAEVNQRPADGYVAAVTLEDGRRIKGDLFIDCSGFRGLLIEETLHTGYESYAQWLPCDRAVAVPCALPNPGEPDAFTRSTAHKAGWRWRIPLQHRMGNGLVYCSKYLGDDEAEAQLLASLEGEQLAEPRRLQFTAGRRRDCWNRNVVALGLSSGFIEPLESTSIHLVQAGIQRLIALFPDKRFDPVERDEFNRQMHDLYEDIRDFIVLHYKATRRDDSPFWNQVRTMDVPESLQRKIDLFAGKGRLFREGYDLFSNPSWVAVCLGQGITPEGWEPAADALDEQKVASALEQMRRGYLDTAQRLPTHGEFLRRTALSPLAAQAAPSSSAPASAPAPTSSDDVPFFAFTAESPFDVGGGGSPL

SEQ ID NO: 89530 - protein, 537 aa, Alteromonadaceae bacterium; identical to SEQ ID NO: 86128
  misc_feature (1)..(537): tr|A0A2D5LY31|A0A2D5LY31_9ALTE Tryptophan halogenase OS =Alteromonadaceae bacterium OX=1916082 GN=CL579_01895 P E=4 SV=1

SEQ ID NO: 89531 - protein, 515 aa, Alteromonadaceae bacterium
  misc_feature (1)..(515): tr|A0A2E6SNW6|A0A2E6SNW6_9ALTE Tryptophan halogenase OS =Alteromonadaceae bacterium OX=1916082 GN=CL590_08385 P E=4 SV=1
  misc_feature (111)..(111): Xaa can be any naturally occurring amino acid
  misc_feature (113)..(114): Xaa can be any naturally occurring amino acid
  misc_feature (118)..(118): Xaa can be any naturally occurring amino acid
  misc_feature (138)..(138): Xaa can be any naturally occurring amino acid
  misc_feature (144)..(144): Xaa can be any naturally occurring amino acid
  misc_feature (208)..(208): Xaa can be any naturally occurring amino acid
  misc_feature (218)..(218): Xaa can be any naturally occurring amino acid
  misc_feature (220)..(220): Xaa can be any naturally occurring amino acid
  misc_feature (257)..(257): Xaa can be any naturally occurring amino acid
  misc_feature (289)..(289): Xaa can be any naturally occurring amino acid
  misc_feature (295)..(296): Xaa can be any naturally occurring amino acid
  misc_feature (304)..(304): Xaa can be any naturally occurring amino acid
  misc_feature (316)..(316): Xaa can be any naturally occurring amino acid
  misc_feature (319)..(319): Xaa can be any naturally occurring amino acid
  misc_feature (349)..(349): Xaa can be any naturally occurring amino acid
  misc_feature (372)..(372): Xaa can be any naturally occurring amino acid
MNTASKKTRVVIVGGGTAGWLTAGIIAARHPLLGENSNTELVLLESPDVKNLGVGEGTWPTMRDTLKQIGLSERAFLSCCDASFKQASKFAGWRQNPAQHYYHPFTAPAGXGXXSLAXAWIEAGYPQDFESWVSAQGXACERQXSPKLPQLPEYAFTYNYGYHLNAGKFVALLQAHCTEKLGVTYRQGHVAHIVSHDSGAIKALQLEXGNTVEGDLFXDXSGFAAVLMGKHFQIPFVSQRGVLFNDTAIAAQVNHAXPQTPIASATVATAQTSGWIWDIALQHRRGIGXVFASEXXAVEDAEQXLRNYIANDPNLXQDXVTTRVIKFDPGHRKYFWHHNCVAIGVSAGXVEPLEATALVLIEKSAEWVAEQXPRSPSAMPVLAKRFNQLTNERWQEIIDFIKLHYVLSDRTDSAYWRAHQQHESWTDSLSEALQLWQSQPPGLYESSNRQELFSSASKQYVLFGMGFRAEQWQSCGRLALQQPLIERFRREVQQQVNRVNAQLLTNREYLQKLRK

SEQ ID NO: 89532 - protein, 496 aa, Simiduia agarivorans
  misc_feature (1)..(496): tr|K4KR94|K4KR94_SIMAS Tryptophan halogenase OS=Simidui a agarivorans (strain DSM 21679 / JCM 13881 / BCRC 1759 7 / SA1) OX=1117647 GN=M5M_18335 PE=4 SV=1
MKKPIRKVVIAGGGTAGWMTAAALAKLMGKNLDITLVESEQIGTIGVGEATIPTLVFFNRLLGIDEAEFLAATQGTYKLGIRFENWRDVGKDYLHAFGVTGKDCWACGFQHFWLKGRELGLASDFGDYCLERRAAETHKFSHLPNNGLNYAFHIDASRYAKYLRGFAEHFGARRVEGKINRVAVHPDSGYIQSLTLDNGQTVEGDFFIDCTGMRALLIEKALHTGYESWTHWLPCDSAVAVQTAKVQEPIPYTRSIAHDTGWQWRIPLQTRVGNGYVYASSFEDDVHARERLLGNIEGEQLTDPLLIKFQTGRRRKQWHKNCLAVGLSSGFLEPLESTSIHLIQQNIVRFLRFFPQQGILDSEVDEFNRQADFEMERIRDFIILHYKVTERTDSEFWRHCRNMAIPDTLANKIDVFRETGHVFREGSELFVDSWQQVMLGQGLTPERYHPLVDTMSQQELADFLSQVKAQVDQTVDKLQSHNAYLAQFTANAKPPM

SEQ ID NO: 89533 - protein, 505 aa, Sphingomonas sp.; identical to SEQ ID NO: 82640
  misc_feature (1)..(505): tr|A0A430E3Z6|A0A430E3Z6_9SPHN Tryptophan 7-halogenase OS=Sphingomonas sp. ABOLH OX=1985881 GN=CA237_14265 PE= 4 SV=1

SEQ ID NO: 89534 - protein, 505 aa, Simiduia agarivorans
  misc_feature (1)..(505): tr|K4KGG8|K4KGG8_SIMAS Tryptophan halogenase OS=Simidui a agarivorans (strain DSM 21679 / JCM 13881 / BCRC 1759 7 / SA1) OX=1117647 GN=M5M_04370 PE=4 SV=1
MTKRIIIVGGGTAGWLAANHLAVELRGEPVEIMLIESDEIGIIGVGEGTVPHIRRSLKKFGIPESELLARCDVTFKQGIRFDGWMSGTDSSYFHPFASPFPNGYDATSCLLSQPDVRFDSVSAAAPLMESGRSPKLISSSEYEGVVDYAYHFDAKKFGELLADNAVSRLGVKRHTATVREVRLSHSGEIESLVAADGKVFTADFFVDCSGFSALLLGGALSIPFMDQSSRIQTDTVLATQQLATPEHIPCFTLAKAHEAGWLWDIPLQSRRGVGFVYSSQSIDRDQAVVALANYCQVVPEDLTYRMLPMRIGYRNAFWSKNCASLGLSQGFVEPLEATSILVTDFSAELLARNIHFGADGMNAAAQYCNRVVRYVWERIIDFVQLHYCISDRRDTDFWRAVTAPSAMSDTLAERLSIWRSRTPLKSDFFSRFDLFDVDNYLYVLYGMKYPTNLKTSTPYEEEFLRQQLVAHQSQAGQWISQLLAHREWLNRFNAAYAAAHAKGQY

SEQ ID NO: 89535 - protein, 412 aa, Bacteroidetes bacterium
  misc_feature (1)..(412): tr|A0A136NGF1|A0A136NGF1_9BACT Tryptophan halogenase OS =Bacteroidetes bacterium OLB10 OX=1617421 GN=UZ10_BCD00 3002034 PE=4 SV=1
MEQVDVLIIGAGPAGAVSSAWLNKNKYKVLVLEKQKFPRFVIGESLLPHCMDHLAEVGFIDNVKKHGFQIKTGASFYRGDHKTDFLFADQFTNGWSWTWQVKRADFDNILINSAIEQGVPVKFECEVKTVESNDTEQVTTYTDNSGKTHTVKSRFIIDASGYGRVLPRMFNLDAPVSTPPRGAVFCHIQDTKRKPEESGNIFIHSFNENSAWIWVIPFSDQTTSIGVVSDSSLVQDFYADNGAKFLQHIRNFPELKGRFTSEKTVFEPRTILNYAVGVKQLFGPGYVLCGNSTEFLDPVFSSGVTLATGSGIRAAKLTHKTLSGEKVDWMNDYENILRRGIDVFRTFVLGWYNGDMQTIIYSKTMDPELKRQICSVLAGYVWDENNPVVKKHKTLVPTLAKVIKINQSDPVQ

SEQ ID NO: 89536 - protein, 499 aa, Ponticaulis sp.
  misc_feature (1)..(499): tr|A0A2E7F220|A0A2E7F220_9RHOB Tryptophan halogenase OS =Ponticaulis sp. OX=2020902 GN=CMK08_15275 PE=4 SV=1
MQKKIKNYVIAGGGTAGWMAAALLSKTMGNEISITLVESEMIGTVGVGEATIPPILRYNNILGVNEAEFMRETMATFKLGIEFEHWKDVGHKYLHSFGHAGKDHWTAGFQHFWLAGKKRGISTDYGDYCLEVLAANQNRFAQLPDNGINYAYHLDASRYAAFLRRFAEKHGVVRREGKIGDVRLNAETGNIEALQLEAGDVIEGDFFIDCTGFRSLLMGRALHVGYDDWSHYLPCDSAVAVQTKSVGAPVPYTRSIAHAEGWQWRIPLQHRTGNGLVYCERYLGRDEAAERLLANVEGETLTDPLHIRFQTGARRKQWHKNCVVVGLAGGFMEPLESTSIHLIQKSIMRLVRLLPTTHLVDADIREFNDQTFEDMITIRDFLILHYHVTERRDSAFWRFCAEMDIPDSLQQKIDLFCESARVFRKGEELFAENSWTQVMMGQGLEPKSYHPIADKMTDDELTYFLNQIKTDASRAAARLPKHEEYIRQYCASADVMEMA

SEQ ID NO: 89537 - protein, 484 aa, Moraxellaceae bacterium
  misc_feature (1)..(484): tr|A0A4Q6E3J7|A0A4Q6E3J7_9GAMM Tryptophan 7-halogenase (Fragment) OS=Moraxellaceae bacterium OX=1889775 GN=EOO 68_13910 PE=4 SV=1
MNKPVKKIVIIGGGSAGWLTAGIIAADHIVNKETGIEVILIESPDIASIGVGEGTWPSMRATLKKIGISETQFIRECDASFKQGSKFINWIKGEGEFYYHPFTLPEKYSEINLAEHWLSLKSDMSFSDAVCPQSFLSDRHLAPKQMATPEYAAVVNYGYHLDAGKFAVLLKKHCIDVLGVTYISDNVGHINSTESGDIASLSTRDNGDIEGDIFIDCTGFASLLIGQHYQIPFKEQRNILFNDSALAVQVPYVNPEGDIESCTHSTATACGWIWDIGLPTRRGVGHVFSSAHTTDENAEHLLRKYLEPSIGKAAADKVSPRKLTFNPGYREKFWHKNCVAVGIAAGFIEPLEATALVLIEESAHMISQQLPVNREIMDITASRFNTKFAHHWKKIIEFLKLHYVLTQRTDSDYWRDHCNPDTMTESLKDLLALWKYQVPWTYDTTHVGEMFPSASFQYVLFGMGFDNNYGESSRRLYKSGAEMA

SEQ ID NO: 89538 - protein, 504 aa, Sphingomonas sp.
  misc_feature (1)..(504): tr|A0A1H8DJ89|A0A1H8DJ89_9SPHN Tryptophan halogenase OS =Sphingomonas sp. S6-262 OX=1166340 GN=SAMN05192583_192 6 PE=4 SV=1
MAEPDLQRVVVVGGGTSGWMTAAALVRLLPHRCQVHLVESEAIGIVGVGEATLPHIRAFNERLGIAEAEFMAATRATFKLGIEFRDWARIGDSYIHPFGTFGRGSGDVQFHHYYARLLHAGVQMPPIEAFSMACTLARTNRFALPSNDGRQITSTFGYAYQFDAVAFAPYLRRFAEQLGAGRTEGRIVDVRRDGESGDVSALVLEDGRTVEGDLFVDCSGFASLLIGKTLGEPFQDWSRWLPADRAVAMPCRTATAVTPYTSAIAMPAGWRWRIPLQHRTGNGYVFASDFVSDQQAMDALRGAVEGVALAEPRVLRFKAGRRERSWVNNVIAVGLSGGFLEPLESTSIYLVQQAITALIELFPERHVSDVDRDEFNRIVDMEYDRVRDFLILHYHATQRDDSEFWNYVRTMPIPDSLAEKMDLFRRRGRVVKYREGAFLDASWVSVYLGQRVLPAGHDPRAETPSADSLIAGMKALEAEIRAAAVAMPDHLAYLDRYCPMSAAA

SEQ ID NO: 89539 - protein, 495 aa, Pseudoalteromonadaceae bacterium
  misc_feature (1)..(495): tr|A0A2E9T339|A0A2E9T339_9GAMM Tryptophan halogenase OS =Pseudoalteromonadaceae bacterium OX=2026783 GN=CMK63_1 1390 PE=4 SV=1
MRHQSIKQVIIAGGGTAGWMTAAALAKLLNKDIKVSLVESDDIGTVGVGEATIPPIRTFHKLLGIDEKLFMKATQATFKLGISFENWHKPQSDYIHSFGMTGKECWAGEFHHFWLHAKKMGNKDDFGDYCYELQAAKQGKFGISPHNPINYAFHMDASRYAAFLREFAENLGVKRFEGKIERVNKHADNGFIKSLLLDDGTEITGDFFIDCTGFKGLLIEQALHTGYEDWSHLLPCDSAVAVQTKGTPEIAPYTRSIAHQSGWQWQIPLQNRVGNGLVYCSRYLSDHDATQLLLNNLSSETLTEPKIIKFKTGRRRKGWNKNCLALGLASGFLEPLESTSIHLIMTGIIRFMRLFPFTGITQHAIDEYNKQLQSELESIRDFIVLHYKVTDRDDSEFWQHCKTMETPKSLAHKVALFKETGRVFLDDGDIFRVDSWVQVMLGQGIMPEQYHHVASLMNDQELSRFMQGIKQQIAQRLQQLPTHRAFIEQYCPVDT

SEQ ID NO: 89540 - protein, 508 aa, Sphingomonas sp.
  misc_feature (1)..(508): tr|A0A0Q4HWL0|A0A0Q4HWL0_9SPHN Tryptophan halogenase OS =Sphingomonas sp. Leaf22 OX=1735687 GN=ASE70_15930 PE=4 SV=1
MPDRGVSARADGPLRRIAIVGGGTAGWMAAAALSRLLGPHGPTITLIESEEIGTIGVGEATIPPIQAFNAMLGIDEDDFVRATQGTFKLGIDFHDWGRVGHRYFHPFGVYGIDAGAVPFEATWRRLHAAGQAGPLADYSICAAAAYAGRFQRPQPGNTPLAQIGYAFHFDAGLYARFLRARAETAGVVRIEGRIVDIGRDGSGWIDAVLLADGRRIDADFFIDCSGFRALLIEGAMGAGFEDWSHWLPNDRAVAVPSANAGPPSPFTRSTARAAGWQWRIPLQHRTGNGYVYSSNHVSDDEAAATLLANLDGPALADPRPLRFRTGRRDRFWVGNCVALGLSGGFLEPLESTSIHLVQAGIARLLEMLPTRACDPADTARYNRLMAAEFDQVRDFVILHFHASERRDTAYWRDQAERSIPETLAERLAIYARTGRVYREGDELFTKTSWLAVMDGQGLRAASYDPLADAMPLDAAAARLQRIGAVVAATAAQMPAHDAFIARHCAAAG

SEQ ID NO: 89541 - protein, 546 aa, Nostoc sp.
  misc_feature (1)..(546): tr|A0A1Z4S463|A0A1Z4S463_9NOSO Tryptophan halogenase OS =Nostoc sp. NIES-4103 OX=2005458 GN=NIES4103_21070 PE=4 SV=1
MIKNIESIVIVGGGTAGWMTAAYLIKAFNKNMQITLVESSNLTTISVGEATFSTMKLFFDFLGLPEYEWMPKCKATYKMAIKFVNWNAQARHFYHPFQRYEVVDGFDVSEWWLKMKKEQDAFDYSCFLIPTLCDNQKSPRYFNGQVFDDKVQKLFSQEKNQEKDVLANLKVQYPYAYHFDAKLLAKFLKDYAMHRGVKLIVDDVVEVGLREDGSIDCIKAKKHGKISGDLFIDCTGFSGLLINQALDEPFISFSESLLCDSAIAMQIPTNMAKDGINPYTTVTALSSGWVWNIPLYGRAGTGYVYSSAFISKQAAQEEFRKHLGEAADNCKALHIKMRIGRNRNSWVKNCVAIGLSSGFVEPLESTGIFFIQHGIEELVSHFPDKSFNEDLIRSYNQAIANCIDGVRDFLILHYYASDRADTPFWKATKQDIVVSEELRERLRLWKSRLPNNKNINQNYHGFESYSYSVMLLGLNYMPEASLPILDLIDDHNAVSIFNEIKQKAEYLSATLPSQYNYLNYLVESSKNKAILKKGEKIENISFLNVD

SEQ ID NO: 89542 - protein, 516 aa, Caulobacter sp.
  misc_feature (1)..(516): tr|A0A426GLZ4|A0A426GLZ4_9CAUL Tryptophan 7-halogenase OS=Caulobacter sp. 602-1 OX=2492472 GN=EIK80_06260 PE=4 SV=1
MTNTNPNAIKKIVIVGGGSAGWISAAMLAHYFEKGGCQVELIESEEIGTIGVGESTIPPFLQLIASLGIDEREFIQATQASFKLGIRFEDWKQKGQHYYHPFGAIGGPIGPHEFYQCWLRAKANGHPSELQDFAPGTVMADQWKFMLPFKAQRSLIAGASYALHIDARLIAKVLRGFAEARGVKRTEGIVTDVVTHPDGSVAKVIMKNGQEVEGDLFIDCSGFRALLIGKTLDVPFNDWSDMLLCDRAVVVQTENVGEPHPYTLSKAEDAGWRWRIPLQHRAGNGYVFSSRHLSDDEARATLVRNVQGPMLMEPMFIPFKTGMRQRLWEKNVVAVGLAGGFIEPLESTALHLIYRGMDFLLRFFPDRDFSPELAAEYNRRMTADYEEIRDFIVLHYCTTQRDDTPFWRDVRQAPVPDSLKARMELFKAHGVLREGVDEMFRNPSWQSVMEGMGVRPRRYQQLVDTAPYEVISRTLDQSKPMLAAQVAGLPSHGEFLAQNCPAPPPEPVAAPFKTVA

SEQ ID NO: 89543 - protein, 532 aa, Streptomyces sp.
  misc_feature (1)..(532): tr|A0A3Q8W7U4|A0A3Q8W7U4_9ACTN Tryptophan 7-halogenase OS=Streptomyces sp. W1SF4 OX=2305220 GN=D1J60_27065 PE= 4 SV=1
MTGTDSRIQKVVILGGGTAGWMTAAYLGKALQGTVDITVLEAPAIPRIGVGEATVPNLHKVLFDYLGIAEEEWMRECNASFKMAVRFVNWRTGGQGQPDARELENGGPDHFYHPFGILPDSDNVPMSHYWAKRKLEGLTEEPFDYACFREPPVMDAKKSPKWLDGTPSTRYAWHFDAALVADFLRRFATEKQGVHHVQDEMTHAEKDERGFVKALHTKAGRVLDADLFVDCSGFRGLLINQALEEPFIDMSDHLLCDSAVATAVPHDDEANGIEPYTSAIAMSSGWTWKIPMLGRFGSGYVYSSKFTTKEEATREFSALWGLDPETTKFNHVKFRVGRNRRAWVNNVVSIGLSSAFLEPLESTGIYFITAAIYQLAKHFPDRTFNPELANSFNHEIEVMFDDTRDFIQAHFYYAPRNDTPFWRANKELTLPKNIQEKISAYKAGLAINSPIADESTYYGNFEAEFRNFWTNGSYYCVFAGLGLEPDAPLPILAHKPDSVAGAEALFGKVKQEQNHLLDTLPSTYDYLRKLHG

SEQ ID NO: 89544 - protein, 504 aa, Pseudoalteromonas sp.
  misc_feature (1)..(504): tr|A0A4Q0JCZ8|A0A4Q0JCZ8_9GAMM Tryptophan 7-halogenase OS=Pseudoalteromonas sp. A757 OX=2250709 GN=DRB05_19185 PE=4 SV=1
MKSQKIVILGGGTAGWMAANMMAKSWADKAIEITVVESSSIGTIGVGEGSTPQFKGFMDYLGISEAEWMPACNATYKNGIRFIDWSTKPGFSSYFHPFPAQPDDYSAPAFFHNSFVRRKAIDVEGHPDHFFLATHLADLNKSPIAAENFPFEINYGYHFDSALLGQLLARKAAEFNVKHIDTTITDVRTHVDGDIAALITSEGTEVAGDIFIDCSGFKSLLLQHTLGVGFESFESNLFNDAAVVIPTKQLDTIRSETQSVARQFGWSWHIPLTNRIGNGYVYSQRYCDADQAETELRAALGLLDSEVEARHIKMKVGQVKAHWSKNCIAIGLSQGFIEPLEATALHIVQETVQSFIECYQDADFTDGNRDKHNRALSERYQAIRDYIVAHYRVNSRTDTNYWLDNANNNHLSRSLYQILQTWVSGNNLSDELVRQNVEQYYPSVSWHCLLAGYGIYPEQSQLKSGNALANQHSIEKVNDFIRRCGLNFKDHRMELESFVANVHK

SEQ ID NO: 89545 - protein, 550 aa, Thalassococcus profundi
  misc_feature (1)..(550): tr|A0A369TPY8|A0A369TPY8_9RHOB Tryptophan 7-halogenase OS=Thalassococcus profundi OX=2282382 GN=DU478_08285 PE =4 SV=1
MGQPVRNVTIVGGGTAGWLAAVLLRKVLDDRVAITLIESPNIPTVGVGEATVPNMPQTLKLLGISDQEFFRTCNASFKLGVVFSDWNTDRHGKFISYINPFSSAPQLQGYDWADFYRHFGAGQRDYVQSYSPLMDMVRASKGPRMLNLPKTDSRLPYAFHLDAVKFAELLRGVGVERGVTHILDDVDGVDLDERGFIAAVQLRDHGRHPVELVVDCTGFRSLILGDALKEPFVSYSKYLGNDRAMAVQIPHPHPEKLEPATRSTALGAGWSWRVPLFNRIGTGYVFSSAHRSDDAARDEFLAHLGPAGKGAEPRIIPMRIGRARNAWVKNCVAIGLSGGFIEPLESTAIHMTDMGVRWLATHFPDTDYAEPLRRQYNKTVDALYNEVRDFICLHYALNNRTDSQYWIDARESLDVPDRLAALLELWAHRPPAHTDLETQYLFTTSTYNTVLLGKQVYQTGFGVKRPDSGIRLDRGAWMRALDQTAKVNAAEVKRKADHRSLLRQLRGEAGPVRTPGATTLNQPTLGLPQAGGQPLPRSAKELAENGAGLL

SEQ ID NO: 89546 - protein, 508 aa, Pseudoalteromonas nigrifaciens
  misc_feature (1)..(508): tr|A0A379I4W3|A0A379I4W3_9GAMM Geranylgeranyl reductase family OS=Pseudoalteromonas nigrifaciens OX=28109 GN=N CTC10691_03995 PE=4 SV=1
MNKTIKTVAVIGGGTAGWLSAAIIASHHQSQNGDGLKVMLVESSDIPTIGVGEGTWPTMKNTLQQIGLREVDVFKACNATFKQGGKFVNWTHGNNDFYYHPFTVPLGYGRIDLAPYLDNVENYAQQTNFQHDICEENLAPRSITQGEYQGDCNYAYHFDAGAFADLLKQHCKNNLGVEHIIGTVDKVKLDNSGEINELTLKDSTHTINADLYIDCTGFSSLLLGQTLNVPFKKIDHVLFNDSALAMKVPYGEDDQSIASHTIATAQNAGWIWDIGLTDRRGVGHVYSSKFLSDDEAEENLRNYLGDAAKGLTARKISFESGYREKFWHKNCVAIGMSAGFVEPLEATAIMLVEISARFVAEHMPTDTQVMPIIAKRFNEQMDYRWQRIIDFLKLHYMLSKRPEPYWQAHVKPETIPQSLQEDLLVWGGRGPLIQDFHGSLELFPAASYQYVLYGMGFKPDFTKQAYLYTQHTQAKQIIERNTQLTQQMLQTLPPHRAYINQWLAANSI

SEQ ID NO: 89547 - protein, 512 aa, Xanthomonas campestris
  misc_feature (1)..(512): tr|A0A125PW14|A0A125PW14_XANCT Tryptophan halogenase OS =Xanthomonas campestris pv. translucens OX=343 GN=ATB53 _12490 PE=4 SV=1
MIAAPLRNLVIVGGGTAGWMAAAALARVLGPDYRITLIESEQIGIVGVGEATVPHIKAFNNLLGINEAEFVRQTQGSFKLGIEFVDWQRPGTSYIHGFGTEIGHSLGLLPFQQYWFKQALAGKAKPLGAYTLNTVAARRGKFMTSASDAPPNSPLGNIAYAYHFDASLYAAFLRRFSEQRGVTRHEGIVEQVQLHPESGDVLSVRLASGDTIAGDLFIDCSGFRGLLIEQALHTGYHDFTHWLPCDRALAVPCAKVGPPTPYTRATARAAGWQWRIPLQHRTGNGYVYSSAHISDDEAAATLLANLDGAALADPRPLRFVTGRRKQVWNRNVIALGLASGFMEPLESTSIHLIQSGISKLLELFPREGISPVLVQRYNDRIAFEFDRIRDFLVLHYTATERDDSDFWRQCRAMAIPPELQATLDLFGDSGRFYRNGDEMFAEISWVQVMVGQGILPRGAGRPAARRAKKRGHAHQGAGLFKIRPKPENGLWRISGKAGRCACYRECAANAMV

SEQ ID NO: 89548 - protein, 504 aa, Pseudoalteromonas sp.
  misc_feature (1)..(504): tr|A0A2C6E2Q1|A0A2C6E2Q1_9GAMM Tryptophan halogenase OS =Pseudoalteromonas sp. GCY OX=2003316 GN=CBQ28_19785 PE =4 SV=1
MNITKIAIVGGGTAGWLAANHLGLALSSNSNVEITVIESLDIPSIGVGEGTVPYIVKSLKKFGISEAELLGSCDATFKQGIRFVSWLDEKVHGAHNFYYHPFEAPYPEGLDITNIWLNLGKKIPFDYVGIQSRVCESGLAPKLKTDGNYQGVLPYAYHFDAAKFAKLLKRNALDRFNVRVLNGTVDESKLDQTGHIESLCMTNGDILHFDFYVDCTGFSAKLISSVSNDSFQDKSEQLLVDTALVQQIERDDPSSLNPYTTATAHKAGWMWEIPLTSRTGTGFVYASKYMSHKEALETYARMLNVDSVNPRKIEMRVGYRNQSWSKNCVALGLAQGFVEPLEATSILLTDFSAEFLSKNFPLSRAEISVFSDHYNDAVNCAWESTIDFIQLHYILSDRVDSDFWVEYRSDVKLSDSLERKLAKFRLRSPQQMDFWSRFELFNEKNFLYVLYGMKFNTHPQTTSQAEFDIGLKLLDKNNEQLRRAKGALLDHGEWLKQFKQYMSS

SEQ ID NO: 89549 - protein, 493 aa, Pararheinheimera tangshanensis
  misc_feature (1)..(493): tr|A0A5C8LZ31|A0A5C8LZ31_9GAMM Tryptophan 7-halogenase OS=Pararheinheimera tangshanensis OX=400153 GN=FU839_04 055 PE=4 SV=1
MQQVKKVVVAGGGTAGWVAAAALSKRLQGLIEVVLIESEEIGTVGVGESTIPPVQLFHNLLGIDEQEFMKATDATFKLAISFENWGQTGDQYFHPFGVTGKGSFLTDFQHYYLHGLTLGVDAPFGDYCYELQAAKQHKFGKTDKSNINYAYHLDAGRYARFLRKFSEDLGAVRIEGKIAQVQQHVNGDIRSLVLESGQEITGDLFIDCTGFRALLIEQTLKTGYDHWDHWLPCNKAVVVQTEPGPNIHPYTRAIAHDSGWQWKIPLQHRGGNGLVYASDYLSDEKAKQRLLDGLEAPALFEPRVLSYQTGRRKKFWNKNCVAIGLSSGFIEPLESTSIFLFMSGIIRLLRLFPFNGVTPALMDEYNQQSITEVEKIRDFIILHYHQTERSDSPFWDYCRTMSIPDTLAHRIELFKESAHAFQTGDEMFRLESWSHVMLGQRLRPNSYHQLVAALNQGELSRHLHSIRETINAAVDRLPSHRDFLRQYCPSTIS

SEQ ID NO: 89550 - protein, 497 aa, Pseudoalteromonas sp.
  misc_feature (1)..(497): tr|A0A4V1K813|A0A4V1K813_9GAMM Tryptophan 7-halogenase OS=Pseudoalteromonas sp. A757 OX=2250709 GN=DRB05_00905 PE=4 SV=1
MNERISNSVPKSIAIIGGGTAGWMSAILLKSHWVNTRVILIESPDVPVIGVGEGSTPALKYFFQSLNIDEKEWMQRCNATYKVGIQFPNWSTVQGYESYFHPFFSALDSQTSTAFVKQAKKWRQGERVNVLPDNFFVAASLAKKHKAIITKKPLPIELDYGYHFDSALLGDYLKEKSIERGVIYQEATVDSVIHSDKNIDSLVLDTKQTVTAELFVDCTGFSGVLVNKALKRDFHSYSDMLFNDAAVAIQTPKVTEQLESKTISAAMSCGWRWQIPLRNRDGNGYVYSSKYLSSDEAEHELRSLLPEQGKGCHARHIKMRVGRLNEHFLGNCLAVGLSQGFIEPLEATALMLVQYTVMSYINGVENEYSAEKLNKKINDQFDSVRDYVVCHYKINSKEGKYWQDCRENNSISANLNAILQAWTSSGDFESSYKELLGDSAYAKASWYSILCGMGLSDLDIEAGTTLDSLATKALAYCEDTADLFIDQAELFASDNTQ

SEQ ID NO: 89551 - protein, 529 aa, Streptomyces sp.
  misc_feature (1)..(529): tr|A0A1V2RUW3|A0A1V2RUW3_9ACTN Flavin-dependent tryptop han halogenase RebH OS=Streptomyces sp. MP131-18 OX=185 7892 GN=STBA_70240 PE=4 SV=1
MDHRIRKIVVLGGGTAGWMTASYLGKWLGNTVSLTLIESPSVPRIGVGEATIPNLQPLFFDFLGLKEKDWMPQCNASFKIGIDFINWKTGGPGQAQARTVDGRRDSFYHVFAPLPEHQGVPMFQYWDYLRHHGLTEKSFDAACFWESSLLDSRKSPCWLDGRPSTAYAWHFDAHLVADFLRRFSTKEFGVRHVEDEMTGAEQDGRGYVTALRTASGNRYEADLFIDCSGFRGLLINKAMAEPFIDMNDYLLCDSAVATAVPHDDDARGVEPYTSAIAMESGWTWKIPMLGRFGTGYVFSSRFVERDRATRDLCRMWNLDPDRAELNQITFRVGRNRRAWVRNVVGVGLASCFLEPLESSGIYFITTALHHLVRHFPDKRFNETLISQYNREIEFMFEESRDFIQLHFLAAPRDDTEFWRANKNLRLSPQLEQKIAMYRAGLPVNQPIESGAGSYSDAMVNSRLCFPNSSYCCILAGSGVYPDAPLPSLAHQDDVVAASEPMFATVERKRRELAGTLPTTVEYLRAIHAK

SEQ ID NO: 89552 - protein, 516 aa, Catenovulum maritimum
  misc_feature (1)..(516): tr|A0A0J8GN43|A0A0J8GN43_9ALTE Tryptophan halogenase OS =Catenovulum maritimum OX=1513271 GN=XM47_15395 PE=4 SV =1
MAKPLQDILILGGGTAGWLTAGILAARHQAKIQANQLSITLCESPNIPTIGVGEGTWPTMPKTLQSLGISEAEFVSECDASFKLGSKFNGWDRADSEDYYYHPFEDIHASKEGLTAEYWLYLQSKGQVTDKYSAMYCFSDLLANAGLGPKTPENQAYQSVVNYGYHLDAGKFSKFLTRHCTDKLGVKHVLADITRVNLTPTGEIDSVLTSKNESLTADLFIDCTGFKALLLGEALNIPFISVKDCLFADTAIATQVQYVDAQASISSVTQSTAQRAGWIWDIALPTRRGVGHVFSSKYTDVNTATEDLYHYIEASGSSTKDLKLKEIKFNPGHRQKFWHKNCVAVGLSAGFLEPLEASALILVELSAQMIADQLPPTKTCMEISEQRFNKKFRHHWQNAINFLKLHYVLSQRDTPFWHDNRTVESIPESLLQMLELFKHKVPNAHDFEVVGELFSATNYQFVLYGNQFNTQVAFGLSTAEIDYMARHVTENQHKMRQFLKQMPTNRQLLAKMVSQA

SEQ ID NO: 89553 - protein, 388 aa, Myxococcus hansupus
  misc_feature (1)..(388): tr|A0A0H4X1P3|A0A0H4X1P3_9DELT Tryptophan halogenase OS =Myxococcus hansupus OX=1297742 GN=A176_005976 PE=4 SV= 1
MSEATCDIAIIGGGPAGAAMAVALRDQAPFLSVTLIERTAYDTPRSGETLSPEVRLPLSRLGVWGSFLRDGHLASRGTASCWSRPEPSTQDTHMSPWGSAWHLDRARFDERLSLEATRLGVQMLRLTTLLDSERLGKDGYRLHLSQRKAGATTLRARFVVDATGWKATFAMSQGARRRVRDRCIAVYGTFQRRTGEPFPTEALVESCPEGWWHSALLPNGRVAVALVGDGDSLHGLRWATPQPWMALLDQAPATQARLAVCDFAGESLVAAPILVGQLDAMHGERWVAVGDAACTQDPLSAQGVASAMDSALLAAGAVGQYLRGDSEALRDYEATLQRRFEDHLRLRGHAYREEQRWRDAPFWKNRHEAFPAPPTAHQQHSTPGGLPT

SEQ ID NO: 89554 - protein, 506 aa, Catenovulum maritimum
  misc_feature (1)..(506): tr|A0A0J8JI53|A0A0J8JI53_9ALTE Tryptophan halogenase OS =Catenovulum maritimum OX=1513271 GN=XM47_15790 PE=4 SV =1
MTQDQSIEKIVIVGGGTAGWMTAAAMAKLIKKPNCTITLIESADIPTVGVGEATIPQIQLFNALLGIDENEFVKATQATFKHGIEFVNWKQNNHKYMHPFGTIGLNFEGVDFHHYWNKLNQTNQAGSIEDYAFNCVAAYNHKMMRSINVPNSPLNNIAYAFHFDAGLYAKWLRNFAEKNGVIRIENTVQEVKLDSKSGFINSVELADGQVVEGELFIDCSGFKGLLIEEALNTGYEHWGHWLPCDRAVVAPSKNVADPVPYTRSTAHGAGWQWRIPLQHRTGNGHVYSSRFMSDDEAKQTLLDNIEGQVLTEPRVVKFTTGTRRKHWNKNCVAIGLSSGFIEPLESTSIHLIQSSISRLMSLFPDKSFEKSVIDTFNSQTKLEVERIRDFIILHYKVTEREDTEFWRYCKNMEVPAYLEQKIKLFSQTGRIFRQDDELFNQSSWLAVMLGQGITPEAYHPLVDNLSLEEIRHRCDNIKKVIKESVERMPKQSEFINKFCRANLESV

SEQ ID NO: 89555 - protein, 510 aa, Caulobacter vibrioides; identical to SEQ ID NO: 82650
  misc_feature (1)..(510): tr|Q9A9K9|Q9A9K9_CAUVC Tryptophan halogenase, putative OS=Caulobacter vibrioides (strain ATCC 19089 / CB15) OX =190650 GN=CC_0971 PE=4 SV=1

SEQ ID NO: 89556 - protein, 508 aa, Duganella sp.
  misc_feature (1)..(508): tr|A0A1E7V7X1|A0A1E7V7X1_9BURK Flavin-dependent tryptop han halogenase RebH OS=Duganella sp. HH105 OX=1781067 G N=rebH_3 PE=4 SV=1
MNPGTRDPNNRRPVRRVVIVGGGTAGWMAAAGIAKVLGKRLDIKLIESDEIGTVGVGEATIPTLMNFHNLLEINEQEFMAETQATFKLGISFESWRNVRQDYIHSFGVTGTDHWTAGFQHFWHKGVERGLAGDYGDYCLELKASLEHRFAHLPDNGMNYAYHLDASRYAKYLRRLSEPRGVQRIEGKIVRYTKHGDNGDVRSVVLESGQEIEGDLFIDCTGFRGLLIGDAMQEPMEDWSQWLFCDRAIAVQTESVGDAVPLTRSMAHQAGWQWRIPLQHRVGNGIVYSSRHLDEDVAMRQLMGNVEGKALIAPRVIKFKPCQRKHTWKGNVVAIGLSSGFLEPIESTSIHLIQRSVVRLMQTFPTDGISQADIDEYNNQCNSEIEHIRDFIILHYHVNNRTDSPFWVEAREMSIPASLQHRIALFRETGRVFRVPNELFAENSWIQVMLGQGIMPRSHHQSADLMGDEELRHFLGGIKSRVDRIVVQLPSHQAYVERYCGRAESARAA

SEQ ID NO: 89557 - protein, 506 aa, Sphingomonas sp.
  misc_feature (1)..(506): tr|A0A258TKT9|A0A258TKT9_9SPHN Tryptophan halogenase OS =Sphingomonas sp. 28-66-16 OX=1970435 GN=B7Y45_00850 PE =4 SV=1
MAEARIGEIVIIGGGTAGWMAAAALARFVGSQVSIRLIESDAIGTIGVGEATIPQLKLFNAGLGIDEAMFVRATSATFKLGIEFDGWREPGARYIHAFGAIGRGHGLIPFHHYWLRHRAEGGTIPLWAFSASAQAAARNRFAPLQEQPDQLPSGMDYAFHFDAGLYAAFLRDYAERLGVRRIEGRIADVVLGGETGFVQAVTLEDGTRLAGDLFVDCSGFRGLVIEQALGAGYDDWSRWLPCDRALAVPSARVDPLTPFTRSSARKAGWQWRIPLQHRTGNGHVYCSAFTSDDDAAATLLAHLDGAPLADPRPLRFTTGKRRRMWIKNCVALGLAAGFMEPLESTSIHLVQAGIARLLQLFPTAGFDPADIAEFNRQSDFEWTSIRDFLILHYHANARDGAFWAACRNIAIPDSLAHKIALFRANGRLFREHEELFTELGWLQVMIGQGIDPAGYHPLADQLAPQELVDFMTLARQHTDRVVASLPDHAAFIARHCAAPARDTVAA

SEQ ID NO: 89558 - protein, 661 aa, Emcibacter congregatus
  misc_feature (1)..(661): tr|A0A2G4YWA7|A0A2G4YWA7_9PROT Tryptophan halogenase OS =Emcibacter congregatus OX=2043170 GN=CRD36_01725 PE=4 SV=1
MVKSIVVVGGGAAGWITAGLLGAKYIRGAEASVSVTVVESENIGIIGVGEGTWPTMVDTLRKMGIEEIDFIRNCDATFKQASKFRCWTTGEEDDSYYHPFSLPQRFEEVSLAAEWRDNHRGTPFATAVGLQADLCDRKCAPKQVSSPEYASVENHGYHLDAGKFTKFLTAHCRGKLGVNHILADVVSVNTAENGDILSLTTQQGAEITGDLFIDCSGSAGLLIDKHYQVPFLSQKDVLFIDSALAVQVPYEHPDAEIESATLSTAQTAGWIWDIGLSSRRGVGHVFSSRHISDAEATEQLKNYLRPDVPDVEALSFRKLSFQPGYRAKFWVNNCVAVGMSAGFIEPLEASALVMVELAANTISQHLPASRAAMDVVATKYNETFLFRWQRVIDFLKLHYVLSRRRDSAFWRDNQKAESIPESLQDLLTLWRHQSPSNNGFLSPYDLFPAASYQYILYGMGFRTHPNPLESMPHLTAAARTQLEKVKERKVKVLPRLPGNRELINGLCRPAAAVELNLVKTTSGSWRRVAPDEVDRMANHCPLFFRRDSITAQFECIALVGLAQDETLIEAPEIPVTGGEGETSGITLSPQEEALLEPVKLDIAFSDKSTLLITGLHVVNREKLSGLSARNRRRRTALFQTMQESLQHVSALIEMRNRQLMS

SEQ ID NO: 89559 - protein, 500 aa, Alteromonas macleodii
  misc_feature (1)..(500): tr|K0D3H4|K0D3H4_ALTMS Tryptophan halogenase OS=Alterom onas macleodii (strain Black Sea 11) OX=1004785 GN=AMBL S11_13295 PE=4 SV=1
MTTPHRIVIAGGGTAGWMAANLLAHRWADEAVAITLIESEDIGTIGVGEGSTPTLKRFFQTLDISEFEWMEQCQATYKVNIKFTGWSGNDLQSYSHPFISQLDVFSERAFHVNALTRRLGLDVETRPDKFLMAGYLAKKNLAPLPSHNFPFDIEYGYHFDSLKLGQFLRERAKLKGVSHIVGNIESVHTTPSGDISHLVCQDGQTLDGDLFIDCTGFAGLLLQKTLGVSFKDFGNNLFNDSAVVLPTPACASLPVETESVAMSNGWRWQIPLRNRTGNGYVYSQRYQDKDAAECELRRALGLENTDVEAKHLSMRVGQCERHWEKNCLALGLSQGFIEPLEATALHLVQTSIELFADNYSFNETTQQQRQAFNQEVTERFERVRDYIVCHYKLNGRNDSDYWRDNRANMKLSESLLSLLDVWYRKGDIVEEIKRQGIGRHFSTTSWHCLLSGYGIYPPPALNQPASLKESGDLFEEKKLAAFFNRCSLNFDKQSALFRAG

SEQ ID NO: 89560 - protein, 513 aa, Sphingomonas sp.
  misc_feature (1)..(513): tr|A0A258TD88|A0A258TD88_9SPHN Tryptophan halogenase OS =Sphingomonas sp. 28-66-16 OX=1970435 GN=B7Y45_11990 PE =4 SV=1
MSDRRIKKVVIAGGGTAGWVAAAALVKHLGPLIEVTLVESDDIGTVGVGESTIPTARTFHELLGIYEQAFMRATNATFKLGISFENWGRIGDRYLHPFGSVGRAVWMGEFQHFWLQAREEGIAEPYGAYSLEHQAAMQGRFATGGEPALSHAYHLDATAYARFLRSLAEPAGVRRIEGRIDHVVLDPENGFIAALHLANGDRVEGDLFIDCTGFRALLIGAAMGVGFRDWGQWLATDRALAVQTESVGPPVPYTRAIAHEAGWRWRIPLQSRVGNGLVYASAFMSDDEARARLLADIEGRPLFEPRPIRYATGMRAEPWARNCIALGLAAGFIEPLESTSIHLIQIAVTRLIQLFPFDGISDAVVGRFNAQATREWEHVRDFIIMHYKLTERDDTAFWRRCRDMPIPPSLAERIALFRESAQLGLGGEALFRVDSWVSVMLGQRLEPAHWHQLARLLEPGALRQALGDIRRAIDARLATLPAQERFIAGYCPAAPPSAAPARGTVRISVCGRA

SEQ ID NO: 89561 - protein, 501 aa, Alteromonas macleodii
  misc_feature (1)..(501): tr|K0D8S7|K0D8S7_ALTMS Tryptophan halogenase OS=Alterom onas macleodii (strain Black Sea 11) OX=1004785 GN=AMBL S11_18850 PE=4 SV=1
MTVSGLDSSNSQTPVKNVVIAGGGTAGWMAATALSRLLGKSINVTLVESKDIGIVGVGEATIPPIRTFHKLLGIDEKAFMRATQATFKLGIEFENWREQGHSYIHSFGITGRECWAGEFHHFWLRAKEYGFGGEFGDYCPELIAAKQSKFATSESMPLNFAYHFDAVAYGRFLKSLACDAGVVHKEGDIEKVVVCSQTGNIQSLQLASGEAIDGDFFIDCTGFKGLLIEQALHTGYDDWQHYLFCDRAVAMQTELTAPPVPYTKSVAHQAGWRWQIPLQKRMGNGLVFCSRFMSDEDALDTLKSQVTGAPINEPRVIRFTPGKRRRGWNKNCVALGLSSGFIEPLESTSIHLIMTGLIRLMRLFPFDGITQSAIDEYNNKFDSEMSAILDFIVMHYKVTQREDSPFWQQCQRMDIPSSLKHKLDLFAESGRVFLDDGDIFRVDSWTQVLMGQGMTPKQYHRVADEMSEQSLRQFMTGLKQQVDNHVANLPPHQAFLTQYLR

SEQ ID NO: 89562 - protein, 493 aa, Alteromonas macleodii
  misc_feature (1)..(493): tr|K0D8J9|K0D8J9_ALTMS Tryptophan halogenase OS=Alterom onas macleodii (strain Black Sea 11) OX=1004785 GN=AMBL S11_18405 PE=4 SV=1
MNKSVKKIVIAGGGTAGWTAAAAIAKQMGPTISITLVESDEIGTVGVGEATIPPMRVFHKLLGIDEKEFMQATSATFKLGIQFENWGQNGDAYIHSFGVTGRESFVAPFHHFWLYGKEQGVVKDFGNYCFELQAAKQDKFATSQNSNTQYAYHLDSSLYAQMLHDYCETRGVVRKEGKIEYVHQNKETGYIEYLQLASGEVIHGDFFIDCTGFKGLLIEETLKTGYEDWSQWLPCDRAIAVQTESVGAPRPITMAIAHDSGWQWKIPLQHRTGNGLVYCSQYLSDDDAKQRLLDNVIGKTITTPRVIKFKTGRRLQAWNKNCLALGLSSGFVEPLESTSIHLIIMGVIRFLKLFPNSGVSERIAKEYNRQTLDEIVKIRDFIILHYHATHRKDSPFWQYCHDMEVPETLKHRMQLFEEFGHAFQEDGELFRVDSWTQVMLGQGIIPKSYHSSVRGMPVHELQRFLQGIEMAVQKGLQNMPSHEAFLQHYCSSS

SEQ ID NO: 89563 - protein, 503 aa, Brevundimonas vesicularis
  misc_feature (1)..(503): tr|A0A2X1B956|A0A2X1B956_BREVE Tryptophan halogenase OS =Brevundimonas vesicularis OX=41276 GN=NCTC11166_01421 PE=4 SV=1
MIPAPLKRILIVGGGTAGWMAAAALAHVTRGTVKIELVESKVIGTVGVGEATIPPILLFNQLLGIDENEFVRATQATYKLGIQFHDWHQKGESYFHPFGVYGTRIDAASFHQYWLRLNKAGLDDDLSAYSVTTVASQMGRFTRPDGDPRGVASQMTYAFHFDAGLYASFLRQRAEANGVVRHEGTIADVRLRDGDGFIQSVRLDDGRELAADFFIDCSGFRGLLIEGALKTGYEDWTHWLPADRAVAMPCTRVGDPTPYTQSTALEAGWRWRIPLQHRTGNGYVYCSPFISDDEAQARLRASLDGEVMADPNFLRFTTGRRKKTWNKNCLALGLASGFLEPLESTSIHLVQSGISKLLLHFPDTGFAQADIDSYNRQMRLEVERIRDFIILHYHATTRDDSALWRHVQAMDVPETLKQKMEQFRSRGRVFRYDDELFQETNWIAVLLGQGIVPERHDPITETIPLDHVRQRLQHMKAMIRQGVERMPTHEAFIAANAKAPPLS

SEQ ID NO: 89564 - protein, 506 aa, Catenovulum maritimum
  misc_feature (1)..(506): tr|A0A0J8GR53|A0A0J8GR53_9ALTE Uncharacterized protein OS=Catenovulum maritimum OX=1513271 GN=XM47_18430 PE=4 SV=1
MENPDHINSYVILGGGTAGWMSAAILARALEHTDAQITVIESPHVPSVGVGEATIPSIIDLLNYLNISQIDFVSQTDATFKLAIRFVDWLKQGTEYWHPFGKIGSQIDGIPFYQHWLKQQKIDPSFEFTDFSPAVALSKQNKFFIPDPKNPTNLSSTSHALHFDASKVAQYLQKYCLNKNVNIITDHLVETDLSIEGNIKTLHLESGRQLDADFFIDCSGQKALLIGKALRVGYDSWQDFLPVDSAVAMQTEKLDIIPPYTLSTAAEHGWRWQIPLQNRTGNGYVYASDYCNNEEAIESLIKHACTNSKAITDPKVIKFVTGKRKKMWHRNCLSVGLSTGFLEPLESTSIYLIMRAMLNFVQVLPSKSICEPSIKEYNRLIDDEYNSIRDFIVLHYCVTQRKDTKFWRMWQNLSIPDSLSEKLALFKSHGRLYKNPSDLFSQDSWYAVLEGMKVRPTSYDPLVDRSNFNLIKQSFIQTKQALWFNASETLNHEDYLKRIKRARMVN

SEQ ID NO: 89565 - protein, 509 aa, Duganella sp.
  misc_feature (1)..(509): tr|A0A1E7V7F8|A0A1E7V7F8_9BURK Flavin-dependent tryptop han halogenase RebH OS=Duganella sp. HH105 OX=1781067 G N=rebH_4 PE=4 SV=1
MIRRIVIVGGGSAGWLTAGLIAADHQGTPLHITLIESPDIAPIGVGEGTWPSMRDTLRRIGVSEADFFRECDAAFKQGSRFNHWRGDHPLGSGRDYYFHPFVLPQGYGEVNLPQQWQAQHPDTPFADLVSFQPHLCVNGRAPKQASTPEFASVANYGYHLDAGKFGVFLRKHCLEKLGVHHVPDNVVGITSHDNGDIAALQTQAHGALEAELFIDCTGMQSLLLGKHYEVPFISQKHVLYNDSALAVQIPYPAADYPIASQTSSTAQSAGWIWDIGLPTRRGVGHVYSGAHIGDDQAEAELRRYISATGGPRDIPSPRKLSFNPGYRARFWHRNCVAIGLSAGFIEPLEASALALVEMSAAMVSDELPATRAAMDIVARRFNDAFTYRWERVIDFLKLHYVLSRRRDSDYWRDNTAAVPERLSDLLTLWRHRAPSRNDFNRIEEVFPAASYQYVLYGMGFRSEYTHPQPQQAAQADHYFREAAALTRKMLGALPGNRELINHITQRHHA

SEQ ID NO: 89566 - protein, 510 aa, Rhodanobacter sp.
  misc_feature (1)..(510): tr|A0A1V3QJF4|A0A1V3QJF4_9GAMM Tryptophan halogenase OS =Rhodanobacter sp. B04 OX=1945860 GN=B0E46_07495 PE=4 S V=1
MRRIVVVGGGTAGWMTALTLANSGYGSRLEVTVIESPQVATIGVGEGSTPFLRRFFEDLGIEEAEWMPACNATYKNGITFDKWSTRPGFESYFHAFASMLDNLTMTQFINNVHSRLNHADVHAHPDRFFIASRLARDCRAPKPAHSFPFDIWHGYHFDATLLGAFLLRKALERGVRHVARHVNEVILKDNGDIGSLRLDGDEMLDADFFIDCTGFASMLIGKALKTSFVPYAENLFNNAAIALATPIDGPIMSQTVSTALKNGWAWKIPLTNRYGNGYVYSTDYCSPEQAETELRAHLGVLDADVPARHLKMRVGRVAESWNRNCLAVGLAQGFIEPLEATTLLFVQRTAYMFVAALEKGDLGAEARANFNQTINVQFEGTRDYIVTHYKTNTRTDTDYWRANAANTHLSRPLQHLLTTWLASKPIIPGLKKGVFGQGYPTMSWYSLLAGVGLFPDPQHMRPPTSEEAQHDLAQIDNLLERSAMNYPDQRELLQRIPLKSREPSLQVYLW

SEQ ID NO: 89567 - protein, 516 aa, Catenovulum maritimum
  misc_feature (1)..(516): tr|A0A0J8GTX3|A0A0J8GTX3_9ALTE Uncharacterized protein OS=Catenovulum maritimum OX=1513271 GN=XM47_15800 PE=4 SV=1
MHLVKNIVIVGGGTAGWMTAAALSKLVMPHGFQVTLIESDKIGTVGVGEATLPHLRYFNQLLGIDEKEFMQATSATFKLGIKLKNWKNLNQDYIHPFGDFGQSIQGANFIHAWLKATQAGLNSDISDFSVGVQVAQNNKFKFPESNPNSVLSSYSYAYHLDAGLYAKFLTDFSIENGVKRIAGEIEKVELNNQGDVFQLILQSGESITGDLFIDCSGFRGLLINQALNVEFDNWQHWLPCDSAVAIASEKTDELLPYSTATAKTAGWQWKIPLQTRVGNGLVYCSQYMNKGQAEDEVLAGLESKPISTFNHLNFKTGKRKQTWHKNVVAIGLSSGFLEPLESTSIYLIQDSIEKLIEFFPHNGLLQVHIDEFNRLVDNEYLRIRDFLIMHYHVNQRSDSQFWLDMQNMAIPESLEEKLTLFKKYAHVPYYGQGLFLEPSWVAVLVGQGMLPENYSPKLTNLNQADLIQMLEKMKDLIKQASLSLPEHSDFLTNFLANENRLSNSKLASKSLYGSRN

SEQ ID NO: 89568 - protein, 506 aa, Rhodanobacter sp.
  misc_feature (1)..(506): tr|A0A1V3QEA6|A0A1V3QEA6_9GAMM Tryptophan halogenase OS =Rhodanobacter sp. B04 OX=1945860 GN=B0E46_11885 PE=4 S V=1
MGDPQIKNIVIVGGGTAGWMAAAAFAKVLGPAYAIRLIESDEIGIVGVGEATVPHLKLFNNLLEIDEIEFVKQVQGTFKLGIQFNDWGRIGDSYIHGFGTIGHDVSLLPFHQFWIKARQQGIADDIGAYSLNTVAAPLGKFMASATDVPASSPLANIAYAYHFDAGLYAKYLRGYAEKRGVRRTEGKIAQTTLRAHDGFVEAVILENGERIEGELFIDCSGFRGLLIEQALHTGYHDFTHWLPCDRAMAVPCERVGPPTPYTRSTARDAGWQWRIPLQHRTGNGYVYSSAHLSDDEAAAMLLANLDGRALGDPRALRFTTGMRKKFWHRNVVALGLASGFLEPLESTSIYMIQSGIARLLNLFPQRDFSEVVIERYNAQAVFEYERIRDFLILHYHATARDDTPFWNQCRTMSIPDRLRDTIELFRDSGRFFRDAEEMFATVSWVQVMIGQGILPRGYHPLVDQMPEQDLRRFITGVAKVIASCVDSMPMHQVFIDRYCAAPDMAA

SEQ ID NO: 89569 - protein, 507 aa, Emcibacter congregatus
  misc_feature (1)..(507): tr|A0A2G4YVR2|A0A2G4YVR2_9PROT Tryptophan halogenase OS =Emcibacter congregatus OX=2043170 GN=CRD36_00510 PE=4 SV=1
MMQKKPFGEKHIIILGGGTAGWMAASLFDQAWGADGARITLIESAEIDTIGVGEGSTPYLRQFFRTLNIPENEWMPACNATYKCGIRFPGWSGKPGFESYFHPFFSELDQDTGYAFFHNCALRRGGIDVPVNPDRFFVSAQLAAQHKSPVAGDGLRHTPDYGYHFDAGLLGAFLKKRAEARGINHRIDTVERVAQDESGDITALHLKDGGSVDGDLFIDCTGFAALMIQKSLGERFVSYGDVLFNDRAVALASPLNPAEGLPSETVSTALGHGWAWKIPLTTRFGNGYVYSSAHIDESTAEDALRRHLGPAAKGGEARHLKMRVGRVENHWQKNCLAVGLSQGFIEPLEATALMLVQLTIEKFIQMYGEGDYTSRHQPAFNQRINMFFDGIRDYIVTHYKINGRNDSDYWIENRDNPHISDRLAELLAVWDGGGDFETLLDRYGDALIYLRPSWYAILAGMGRFPSHATSAPAKTPIAPMHQIHDLHTEALAYFPDHRDHLARMYPF

SEQ ID NO: 89570 - protein, 510 aa, Shewanella baltica
  misc_feature (1)..(510): tr|A0A165JWQ0|A0A165JWQ0_9GAMM Tryptophan halogenase OS =Shewanella baltica OX=62322 GN=A1L58_16165 PE=4 SV=1
MKIKRIAIIGGGTAGWLAANHLGAELCHDPEIEITLIESLDVPTIGVGEGSVPYLAKGLKRFGISEAELLLTCDATFKQGIKFVNWLDKNVHGDNHYYHAFDAPYPAGIDVSSYWVSHASQRPFDDVGIQARICDLGLSPKRKGSGDYDGALSYAYHFNALKFAGLLAKNAQKKFNVKHQFATIVGVERDQVGLISHLITADNSSLAFDFYVDCSGFSSIIIDKALKVPFESKSSELLTDTVLVQQVPLNAKENINPYTTATAHKAGWIWDIPLTTRRGTGFVYSSRHISDEEALTLYADYLQVDKAQFKPRKIPMEIGYRKEFWHKNCVALGLAQGFVEPLEATSILVSDFSAELLARHFPRTIEDISISTSYYNSVITYVWERVVDFIKLHYCISDRKDSSFWLENQKEDTISFELKQRLARFKLRPPHQSDFFSRFDLFDHKNFLYVLYGMKFKTNHSVLSQQEIKHCETLFSDNDLLVGRAETLLLNHREWLEGLMRAVESKTLKL

SEQ ID NO: 89571 - protein, 523 aa, Colwellia sp.
  misc_feature (1)..(523): tr|A0A1D8RXD0|A0A1D8RXD0_9GAMM Tryptophan halogenase OS =Colwellia sp. PAMC 20917 OX=1816218 GN=A3Q34_13470 PE= 4 SV=1
MTTVNNDILIIGGGTAGWLSAAILAKSLNCKAENGIKVTVVESPDIPIIGVGEGTWPNLRATLHKIGVSETDFIRECDATFKQGAEFINWATTPKQNEKSSYYHPLGTVSHSSYDFNLAPYWLLKNKTTRLPYDQAVASQARICDQGLAPKQIVMPEYSAAQEYAYHLNANKFSNFLKKHCIDNLGVKFVSANVTNIVLDENDFITHVETDHCEEKQISADFFIDCSGSKGLIIKQTYNIEWHDISDVLFNDTAFAVQVPYADKKQPIKTHTLSTAQEAGWIWDIGLQERRGVGHVFSSKYISDEKAKQQLIDYIGEDYTDDLVIRKIPIKLGYHQKFWHKNSVAIGMSAGFVEPLEASAIYLFDAAATMIAAQFPRDKKQMLYAEQQFNQNFKIRMERTVEFIKLHYCISARRDSQYWIDNCEPTTIPNKLKQRLEFWKNQPPTKFDFDHAWEPFNLDSYLYVLYGMHYQTDLSGNLSAYPDVKKAEKLFSNVDRQSELLKNQLPKQRDLIEKVKEFGFNKV

SEQ ID NO: 89572 - protein, 521 aa, Erythrobacter sp.
  misc_feature (1)..(521): tr|A0A176EBZ9|A0A176EBZ9_9SPHN Tryptophan halogenase OS =Erythrobacter sp. HI0028 OX=1822227 GN=A3723_02385 PE= 4 SV=1
MRPDDGQAQAIGSICIVGGGTAGWSAAALLSQVLRGSGCRITLVESSAIPTVGVGEATIPPIFDFLRNIGADEIEFIRRCQATFKLGIQFRDWLHHGHAYWHPFGNLGVTINQRPFHHYYCMNRAAGHGETLADLCPSVALAEDGKFAFPSPDGQWPGGAVAYALHFDAGLVATFLRDHAVAAGVERLDRRIVGATRGEGERIAAVQFDDGESLEADFYIDCSGFRGLLIEETLGAGFEDWKHWLPCDSAVAAPTAAQEQRAPYTVATARSAGWQWRIPLQHRTGNGLVYASDFVSDADAQAQLLAGLDGEAQADPRVLRFTAGLRKRAWVGNCLAIGLSAGFLEPLESTSIHLIHTGLNRLLDLFPDRRFDPALIAAYNRDVHREYAHIRDFLLLHYVPNRREGEPFWDHMRGLDLPDTLAEKIELFTRTGRIMSRQRELFSDISWFYVMHGMGLTPAALDPLAEAAPFGEVRKVIDQLRGAMQAFRSAAPTHDAILDRLLDPAETRRPQFGTGGGWTTR

SEQ ID NO: 89573 - protein, 543 aa, Shewanella baltica
  misc_feature (1)..(543): tr|A0A380A3K9|A0A380A3K9_9GAMM Geranylgeranyl reductase family OS=Shewanella baltica OX=62322 GN=NCTC10735_030 92 PE=4 SV=1
MQQATHTAINNIVIVGGGTAGWITAALLAAEHNVDKGQLAHSPKLNITLIESPDVATIGVGEGTWPSMRNTLDKIGISETEFIRQCDASFKQGSRFIHWQHDDTEHTKPFGSNQYLHPFSLPHGHQELDLCPFWLPHSDKVSFAQAVSNQDALTQLGLAPKTIATPEYHFQNNYGYHLDAGKFSQLLMQHCTEKLGIKYIRDHVTQVHSHANGDIESLATKEHGVILGDMFIDCSGTKSLLLGEHFNVPFLSQKAVLFNDSALAIQVPYTEENRPIASCTLSTAQPNGWIWDIGLPTRKGVGYVYSSAHCSDDEAEQTLRAYLANDTSTKPQSASSNALDSRKQECRKLNINPGYHAKCWQNNCIAIGMAAGFIEPLEASALALVEWTANTLATQLPTHRGVMDTIAQRVNERYERHWQQIIDFLKLHYVVSRREVDDYWRDHREAASIPERLQQQLDLWRYQAPSSHDISYKEPLFPAASFQYVLYGMGFNTALPTHIKPSQQQVAQRLFSENQQKIHGLSQSLPSNRDLLNKVRQFGFPKI

SEQ ID NO: 89574 - protein, 544 aa, Emcibacter congregatus
  misc_feature (1)..(544): tr|A0A2G4YR78|A0A2G4YR78_9PROT Tryptophan halogenase OS =Emcibacter congregatus OX=2043170 GN=CRD36_08840 PE=4 SV=1
MPRWYRYIKSDVWQVFRRNANSEGILRADTAIKSIVIVGGGTAGWLAANYLARCLKAGPGDDFSITLIESPDIPTIGVGEGTVPSMRQTLKFLGISETEFIRECDATFKQSIEFVDWLHVPKDGKHHRYYHLFDDPIRQDFDLTPYWLKGCAGATNYADAVSMQSLFCDQSRGPKHITTPEYEGASGYAYHLDAVKFAKLLTRHATERHSVRHLLGNVTQVVVKDNGHVDYLDTDRCGRLQADFYVDCSGFASLLVGGALGVPFIDKGGELFVDHAVAIQVPYADPEGPIASQTISTARDAGWIWDIGLSARRGTGYVYSSKYTDHDTAEQVIRDYIGPAADELPCRKIPMRIGYRETFWQGNCVAIGLSQGFIEPLEATALLMVDGACRMLAEQFPTDSAALDGAAKRYNRLLRYGYDRVIDFIKLHYYLSRRDDSAFWIDNRRAETVSDHLLERLDQWRYAPPSAYDFFSKFEVFNLENYLYVLYGMDFVTDMASHGARYPEDEAARRLFDQIRQARNNAAVQMPDHRGLIDKIHKFGLQKT

SEQ ID NO: 89575 - protein, 531 aa, Rhodanobacter sp.
  misc_feature (1)..(531): tr|A0A1V3QNB5|A0A1V3QNB5_9GAMM Tryptophan halogenase OS =Rhodanobacter sp. B04 OX=1945860 GN=B0E46_00720 PE=4 S V=1
MPRLKKVLVVGGGTAGWLAACYLAKAMNAVHPDSVQVHLVESDHIGLLGVGEATFPSIRGTLSAIGLDERRFLVGATATYKQGIHYRHWVRPPGTPGSDHFFHPFSQPSQRPGGPELLPYWLLGAAPAGMPFADAVTMQSTLVDHGRGPKRVTDPDYQGPMNHAFHFDAACFAKVLAEHGQETLGVKRHVATVECAELDEYGAIASVVTKELGKLTADLYVDCTGLRSILIGGVMQSSFRSRRDVLFADRAVAMQVPYAKPDTPIPPYTISTAQEAGWIWDIGLQKRRGVGYVYSSRHTDDERAEEVFRRYLGPAGAGLKAMHIKFETGYRPEHWRKNCVAVGLAGGFVEPLESTGIALIELATYLLTHLLPGDADDMESAARHFNEMMVARYDRIIDFIKMHYCLSQRRDSQFWIDNADDASIPQTLQEKLAKWKQRPPHRLDFVGDLEMFMTASWQYVLYGMEFRTDLEPMRSAYPQVEAARREFAMIRQAAVRALDDLPDHRALVEQLCREHMQRIRPDADLAASVGG

SEQ ID NO: 89576 - protein, 519 aa, Catenovulum maritimum
  misc_feature (1)..(519): tr|A0A0J8GNP0|A0A0J8GNP0_9ALTE Tryptophan halogenase OS =Catenovulum maritimum OX=1513271 GN=XM47_14175 PE=4 SV =1
MSKPIKQIIILGGGTAGWLTAGTIAAEHMSHSDSGVKVTLIESPDVKPIGVGEGTWPTMRGTLKKMGISETDFIRECDASFKQGAKFAGWVTGQTDDFYYHPLVLPQGYTEVNLANYWQQICPNKNFTDAVSFQGYLCEKGLAPKQKNTPEFAHVANYAYHLDAGKFSQFLQKHCTEKLGVKHVLDHVTQVNPEVNGDIKSLSTKANGDLLGDLFIDCSGFKSLLLGQHYQIPFISKKHILFNDTALAVHVPYQTETSPIASHTISTAQSAGWVWDIGLPSRRGVGHVYSSQHISDDQAEAELRQYIRQNLQADDSQLTPRKIDINPGHREVFWHKNCVAVGLSAGFLEPLEASALVLVELSSAMISEQLPETREVMPVIAKRFNQKFRYRWDRIIDFLKLHYVLTKRTDTAYWVDNCRSETIPDDLQELLALWQYHTPWHNDFTQVDEVFPSASYQYVLYGMGFKTQPSASQKRANTNAALAKQHFQHNVQLTEKLLRGLPQNRQLINDIKQQGLHKI

SEQ ID NO: 89577 - protein, 521 aa, Massilia yuzhufengensis
  misc_feature (1)..(521): tr|A0A1I1DMF2|A0A1I1DMF2_9BURK Tryptophan halogenase OS =Massilia yuzhufengensis OX=1164594 GN=SAMN05216204_101 289 PE=4 SV=1
MVSSAIRHVVIVGGGSAGWLTAAVLASSLETQERGGARVTLVESPDVPTIGVGEGTWPTMRDTLRAAGLSESAFFRECDAAFKQGSRFNGWVTGAADDVYFHPFVLPQGWGDADLAGRWLERHSHVPFADMASYQPHLCVQGRAPKQAMTPEFAAVANYGYHLDAGKFGSFLKKHCLEQLGVHFVPDHVTGIASHDNGDIAALHTKAHGALAGDLFVDCSGMQSLLLGQHYGVPFLSQRGVLFNDSALAVQVPYANEHDPIASQTSSTAQAAGWIWDIGLPARRGIGHVYSSAHTSDEQAELALRAYIRATGGPGDIPPPRKLSFHPGYREQFWHRNCVAIGLSAGFIEPLEASALAMVELSAAMLADEMPVTRAQMDISARRFNETFTYRWERVIDFLKLHYVLSRREDSDYWRDNRRSETIPQRLADMLALWTHRPPSRHDFSRIQEVFPAASYQYILYGMGFRPEPGLARRPRVGESDGDTADGFFRQAADLTRRMLPALPDNRALIAHIVRHGLPKH

SEQ ID NO: 89578 - protein, 522 aa, Alteromonas macleodii
  misc_feature (1)..(522): tr|K0D5T0|K0D5T0_ALTMS Putative tryptophan halogenase O S=Alteromonas macleodii (strain Black Sea 11) OX=100478 5 GN=AMBLS11_17850 PE=4 SV=1
MTTATPITHIVVVGGGSAGWLTAGRIAAQHQCAIRKDIKVTLVESPNVPIIGVGEGTWPTMRSTLIALGISETTFIKECDATFKQGAKFAKWTTGEEHDFYYHPLMLPQGFSQTNLGPYWQSVAPELNESFSHAVCVQEAICEAGRAPKSIRHAEFAGTANYAYHLDAGKFTAFLTKHCTEKLGVHHVLADVNRVESSDNGDIKALHTEQGVIVEGDLFVDCTGFKSMLLGEHYKVPFNPCDDVLFIDRALAVHVPYDTPQSPIASHTISTAQDAGWIWDIGLQSRRGVGHVYSSRHQSKDEAYARLDSYVRQTSTLNGIDGINVKDITIQSGHRQHFWQNNCVAVGLAAGFLEPLEASALVLVELSASMIAEQLPANRAVMDIVAKRFNETFSYRWQRIIDFLKLHYMLSKREDSAFWRDNRDSHSIPDSLKELLALWQYHPPSDKDFTSNNEVFPAASYQYVLYGMGFTSDLATHQQWVNADFAKQQLMQNRKARAMAVEKLPKHRELINKIHQFGLQAV

SEQ ID NO: 89579 - protein, 565 aa, Alteromonas macleodii
  misc_feature (1)..(565): tr|K0D9Y2|K0D9Y2_ALTMS Tryptophan halogenase OS=Alterom onas macleodii (strain Black Sea 11) OX=1004785 GN=AMBL S11_18855 PE=4 SV=1
MSDKDSHGNMHRVVIVGGGTAGWLAAGVLAAKLSAKHTITLIESPNIPSIGVGEGSWPSLRDTLLDIGISETEFLTLCQGAFKQGSSFVNWRKGGHCYHHPFTVPTGYNELDIHTCWQELAPNTSYEDAFSLQAVMCRADKAPKQVATPDYAHVLNYGYHFDATKLAELLKKHCVSKLNVAYLVGHIARINPHPNGDIESVLTEDGQKVVGDLFIDCSGSSGLLIKEHFNIPWVPVKQTMLNDRAVAMQVPYSDNDSVIKSTTVATAQTCGWTWDIALQHRRGVGLVYSSEYASEEQAKQTLIDYVSERYPGAQDAQFSCRTLSFEPGYRAQFWVRNCLSLGMSSGFVEPLEASAIAMVELGLRMLCEAYPQNKAHMEIVSKRYNKRFEYRWQRVIDFLKLHYVLSDREEAYWLAQRNEASIPDSLSELLELWKYQSPSRLDLIENEEIFPSASYQFVLYGMGFSTSSSALRLSEEDKRKVLHIRESLQQTKQQYLHGLPSNNALLNDIARRYNELTNQHKHHPHLPSESQTDHHISSSTDNGAEVSKNSTSQKKDASYDRIGFR

SEQ ID NO: 89580 - protein, 503 aa, Caulobacter vibrioides; identical to SEQ ID NO: 82629
  misc_feature (1)..(503): tr|Q9A4M2|Q9A4M2_CAUVC Tryptophan halogenase, putative OS=Caulobacter vibrioides (strain ATCC 19089 / CB15) OX =190650 GN=CC_2808 PE=4 SV=1

SEQ ID NO: 89581 - protein, 504 aa, Caulobacter vibrioides; identical to SEQ ID NO: 82628
  misc_feature (1)..(504): tr|Q9A607|Q9A607_CAUVC Tryptophan halogenase, putative OS=Caulobacter vibrioides (strain ATCC 19089 / CB15) OX =190650 GN=CC_2288 PE=4 SV=1

SEQ ID NO: 89582 - protein, 505 aa, Emcibacter congregatus
  misc_feature (1)..(505): tr|A0A2G4YSY8|A0A2G4YSY8_9PROT Tryptophan halogenase OS =Emcibacter congregatus OX=2043170 GN=CRD36_06820 PE=4 SV=1
MTAEPIQKLVIVGGGTAGWMSASLLVKLMGADLDITLVESDEIGTVGVGEATIPPIQTFNNVLGLDENAFLRQTQGTFKLGIQFENWGAPGDKYMHAFGPIGRELGFSAFHHFWLRRAKQGASDSLWDYSLNYQAAKADKFARLDHLPGSSLPGLTHAFHFDAGLYARYLRAGSEQMGVRRVEGRITQTQLNSETGFIEAVILEDGTRLEGDLFLDCSGFRSLLMGEALQVGYEDWTHWLPCDRAIAVPAENGPRLRPYTQSIAHQAGWQWRIPLQNRAGNGHVYCSDHISEDEATAVLMNNLEGMPLAEPRTLRFTTGRRAKFWHKNCIAVGLSSGFMEPLESTSIHLIQTAVVRLAQMFPTKAFDAVNEGEYNRQLGFEYERIRDFIILHYHTNQRTDSPFWTTCREMAIPESLQHKMDLFTATGRIFRENNELFTEDGWLQVMIGQGLRPASYHPLADQVPMDTLTDFMANLRGLHQRALTDLPSHTAFIAAHCAAGQVREI

SEQ ID NO: 89583 - protein, 502 aa, Shewanella piezotolerans
  misc_feature (1)..(502): tr|B8CSA5|B8CSA5_SHEPW NAD(FAD)-dependent dehydrogenase , putative OS=Shewanella piezotolerans (strain WP3 / JC M 13877) OX=225849 GN=swp_3711 PE=4 SV=1
MNIPPRHIIIVGGGTAGWMAANLMSHRWAKLDCTITLVESTKIGTVGVGEGTTPFFQGFFDRLGIHESEWMKAANATYKCGISFPDWITAPQKTSYFHPFYSYIDSPQVPLFFSNANFRREGMDVDAHPDDFFVTSKLAMQCRSPIAKEEVSQRLDYGYHFDAGLLGEFLKKKGVERGVKLVDDKVSDVRLNGKGDISSVITENTGELNADLFVDCSGFKGLLIQQALGEKMISYQSQLFNNSAVAIPTAIDSNEELSSETVSKALSNGWVWHIPLASRYGNGYVYSREYLSPEEAELELRHHLGEKAEGVKALHLSWTPGRISEHWKNNCVAIGLSQGFLEPLEAPMLNIIQRSIENFVELYEKSGFTREYQQEFNSDINSLIDGTRDYLQAHYKLNGRNDSQYWKDCRANVSQSKELKSILDGWIGNRNFDQVLRENIHNQVYFKTSWYCILAGMNHFQESNKPSLRAGKRNHQRAKEACLIKAGGFIKHKEQLAQIYSA

SEQ ID NO: 89584 - protein, 528 aa, Catenovulum maritimum
  misc_feature (1)..(528): tr|A0A0J8JQ34|A0A0J8JQ34_9ALTE Tryptophan halogenase OS =Catenovulum maritimum OX=1513271 GN=XM47_01485 PE=4 SV =1
MNTGVTNIVVVGGGTAGWITAGTIAAESIKKYGLGVINVTLVESANIAPIGVGEGTWPTMRQTLANMGISEYDFIKKCNATFKQGSQFNAWCSGQIEDSYYHPFSLPADFVNTNLAWHWMSNSHQMPFAELVSPQQVVCQYQLAPKPFPYDEYSAVCNYGYHLDAAAFAEFLKNHCMTKLGVTHIIDDLVAVNAADKLNTKDKCNSQNPIDLDIESITTRKHGNIEGDFFIDCTGQKALLIGEHYQVPFICKKDVLFIDSAIAVQLPTEIEDEIASVTLSTAQPAGWIWDIGLHNRRGIGHVYASDYINDERAQQQLISYLNKQANRTVKQDDLSFRQIKFKPGHRAKFWHRNCVAVGLSAGFVEPLEASSLALVELSAQMIAQQLPSNRAAMSRLAEQFNQRFLYRWQRVIDFLKLHYVLSQRQDSQFWLDNRKPDSIPESLKHQLAIWQDQTPWHYDFDRIEVFPSASYQYVLCGMGFKTNLNGLKPSLQQETIAVENYNRVQASTGQFLAKLASHRKVIQQIRAA

SEQ ID NO: 89585 - protein, 217 aa, Bosea sp.
  misc_feature (1)..(217): tr|A0A258AAS5|A0A258AAS5_9BRAD Tryptophan halogenase (F ragment) OS=Bosea sp. 12-68-7 OX=1970324 GN=B7Z40_06135 PE=4 SV=1
MTEPVRTILIVGGGTAGWMAAAALQRTLGPHAKVSLVESDDIGIVGVGEATVPPIRDFNAMIGLDEAEFMRETKATLKVAIVFKDWGHIGNRYVHPFGTFGRGPTLAEFQQTWFALKARGLAGDLSDYSVCSRAADAGKVGDRDPDPRSPKNSLFSAYHFDAGLYAKYLRKVCEGRGVERIEGKIVDVFQRADDGFVTGVTLEGGRVLEADLFIDCT

SEQ ID NO: 89586 - protein, 503 aa, Shewanella baltica
  misc_feature (1)..(503): tr|A0A165K6M5|A0A165K6M5_9GAMM Tryptophan halogenase OS =Shewanella baltica OX=62322 GN=A1L58_01700 PE=4 SV=1
MKVKQAIRKIIILGGGTAGWMAAAALANNPVFAAIELCLVESDNIGTIGVGEGSTPHLKRFMDNLGISEKDWMERCHASYKTGIDFINWNGDGQQYFHPFYFQMDVKPAEVFFINANARRRGHGNAIKPDAFFSSGVLAKHNLSPRPNKAMPYINEYGYHFDATELANYLKDYACQRGVRQIIADVVEVSTTQHQQIETLILANGERLSADFFIDASGFSAKLIHKALGVPFQSFAEELLNDSAVTVPVPVPALLDSTQTQQAKYHTRATALSAGWLWQIPLTHRLGNGYVYSSRHLSANAAAKELLHSVNLPESTQVRFLKLRVGVSDKAWHNNVLAIGLAQSFIEPLEATSIMMTQFTLERFMSLFERYQLNKQAETLSRQTLNQAVMQLVLGIKDYIQAHYVTSQRSEPYWMAARKVAISQRLTQLLQAWYQGEDFDLLLYQYDQQLAYFRPSWYALLAGMDYRDPKLKRPFEPISAEITAQAINYCQTLVEQYFQPKHS

SEQ ID NO: 89587 - protein, 499 aa, Shewanella baltica
  misc_feature (1)..(499): tr|A0A379ZED3|A0A379ZED3_9GAMM Lycopene cyclase family protein OS=Shewanella baltica OX=62322 GN=NCTC10735_021 16 PE=4 SV=1
MNKIKDIVIVGGGSSGWMTAAMLARLFKSTLNITLIESEDIGTVGVGEATIPPLQIFNNVLGISEADFINATQATFKLGIQFENWGKPDEAYMHAFGNVGKDIGFTQFHHYWLSTSPKEVNSFWDYSVNYQAAKHNKFQVLQQIPNSPLAGLTHAYHFDAALYAQFLRRFSEQLGVKRIEGQITAVELTPNGDIESVTLGSGQTIKADFFIDCSGFAALLIKKALKVGFDSYQHLLPCDSAYAVPCEKTPAITPYTRSIAHDAGWQWRIPLQHRTGNGLVYCSRYISDDAAKQLLLSNLDGKPLAEPKKINFTTGRRIKQWHKNCVAIGLSSGFLEPLESTSLHLVQSAIIRLSKLFPHQGIAQANVDEFNRQSQLEFEQIRDFIILHYHLNQREDAQENGFWHQCRTMVLPESLQQKIALFRATGTVFRHQDELFTEAAWIQVMLGQGIRPRDFNPLAATIQPQALSEFLLNMRTIIDNTVTKLPTHDQYLAHLSTHK

SEQ ID NO: 89588 - protein, 532 aa, Shewanella piezotolerans
  misc_feature (1)..(532): tr|B8CL82|B8CL82_SHEPW Tryptophan halogenase OS=Shewane lla piezotolerans (strain WP3 / JCM 13877) OX=225849 GN =swp_1630 PE=4 SV=1
MNNDIKKVIIVGGGAAGWLTAGVIAAEHINAAATPSQRTLEVILIESPQVPTIGVGEGTWPSMRGTLKKMGISETEFMIECDASFKQGSKFIDWLHSPETASSDKLPLNSQSYYHPFSLPSQFNEINLAKHWQAHKQQVSFTNAVTYQGRLCDQGCAPKLISTPEYECNANYGYHLDAGKFAQFLQRHCSKKLGVQHIVDHVESVSSHGNGDIAAVNTKSNGAISGDLFIDCSGFKSLLIGEHYQVTFIEKKSVLFNDSALAVQVPYENQQSAISSCTHSTAQSSGWVWDIGLPSRRGVGYVYSSSHTDDDRAESELRSYLLSSISKSQAESASLRKITFNPGHRAHFWHKNCVAVGIAAGFIEPLEASALALIEQSAKMISEQLPQNRQSMEIVAKRFNEKFLQRWRQVVDFLKLHYAISQRDDSDYWRDNRDIASIPQSLQQQLALWQYQQPYSYDITETEALFPAASFQYVLFGMGFNSAPPRYIKLAEQEKAMALFQQNIQRSHQLLSALPSNRALLDKVHQFGFPKI

SEQ ID NO: 89589 - protein, 497 aa, Shewanella piezotolerans
  misc_feature (1)..(497): tr|B8CL79|B8CL79_SHEPW Tryptophan halogenase OS=Shewane lla piezotolerans (strain WP3 / JCM 13877) OX=225849 GN =swp_1626 PE=4 SV=1
MNTNKPIKNVVIAGGGTAGWMAAAALSKLLGKNLNISLIESDDIPTVGVGEATIPTLHVFHRLLGINEQEFMAATNATFKLAISFENWRDENQDYLHSFGFLGKDCWAAGFQHFWLKGRDKGFASEIGDYCAEHLGSRTGKFAVLPNQDLNHAYHHDAGLYAKFLRKIAEQHGINRIEGKITEVNLNQQDGQIESLLLASGQLVEGDLFIDCTGFRGLLIENALHTGFEDWSHWLPCDSAIAVQTTTTSTPVPYTRSIARESGWQWRIPLQNRTGNGLVFCSKYMTDEQAKQLLLDNIEGDLLTEPRVIKYKTGTRRKHWNKNCVAIGLSSGFIEPLESTSIHLIQRGIVRLMQMFPAQGLVQADIDEFNAQTKFETDNVRDFIILHYHVTQRRDSKFWRYCSSMPIPESLAHRLEMFAAAAKVYKYPNELFGESSWIQVMLGQGIEPKQYHPIVDMMEDEELKAFLNNIKSVVKRKNDNLPHHYDFIQHYCKSPMM

SEQ ID NO: 89590 - protein, 508 aa, Brevundimonas vesicularis
  misc_feature (1)..(508): tr|A0A1Z3U4Z9|A0A1Z3U4Z9_BREVE Tryptophan 7-halogenase OS=Brevundimonas vesicularis OX=41276 GN=CEP68_01695 PE =4 SV=1
MTPAPLKRILIVGGGTAGWMAAAALAHVTRGTVKVELVESEVIGTVGVGEATIPPILLFNQLLGIDENEFIRATQATYKLGIQFNDWFQKGRSYFHPFGTYGTRIDAASFHQYWLRLNKAGLDDDLDAYSVTTMAARSGRFTRPDTDPRGAASQMTYAFHFDAGLYARFLRQRAEANGVVRYEGKIADVRLRDGDGFIQSVRLDDGRELEADFFVDCSGFRGLLIEGALKTGYEDWTHWLPADRAVAMPCTRVGDPTPYTQSTALEAGWRWRIPLQHRTGNGYVYCSPFISDDEAQAKLRASLDGEAMAEPNFLRFTTGRRKKTWNKNCLALGLASGFLEPLESTSIHLVQSGISKLLLHFPDTGFAQADIDNYNRMMRLETERIRDFIILHYHATARDDSPLWRHVRTMPIPETLKQKMDQFRSRGRIFRYEDELFQETSWIAVLLGQGVIPERHDPITETIPLEQVQQWLQKMKAMIQHGVARMPTHEAFIAANCKAPPLQQGGDA

SEQ ID NO: 89591 - protein, 510 aa, Unknown; identical to SEQ ID NO: 84044
  misc_feature (1)..(510): tr|A0A4S1I4P5|A0A4S1I4P5_9BACT Tryptophan 7-halogenase OS=bacterium M00.F.Ca.ET.141.01.1.1 OX=2563898 GN=EN784 _07680 PE=4 SV=1

SEQ ID NO: 89592 - protein, 468 aa, Brevundimonas vesicularis
  misc_feature (1)..(468): tr|A0A2X1B804|A0A2X1B804_BREVE Tryptophan halogenase OS =Brevundimonas vesicularis OX=41276 GN=NCTC11166_01241 PE=4 SV=1
MSGSDKVWVIRGGGLAAWAAAALLAKTLPSGHSVLMEDAVAPALGEEPEVVIAEPDGVLVQLSEAADLLAQGHGGFFLGSLLRNWRDGRDIAVVEQEPLPGIDGVALVDVVLRAARLSPAAPDYAALLAPLQFQARVMAAGRYAHPSPDRQSPRSLLRPRLRLDARVLTARLRDTALGAGVREGLGDIREIAPFMTVDTRATSAFDGDDDWTARLGYDRCLTLRYAGGDHAPRLDMASLEEGLASRSPLPGGGFASLAYAADRTTADVAKAALAAWLGDVDVAAPSDVALAPGLDTHPWSGRRLALGPAAARFGDPLSLDSAALERQLTQLVASLPGASEQISACAEAYNEAVVRDIAHRADRLHLILLSGSQGQRLAPAGDNLARRIAQFTSRNAGVGLDGDPYDAQHWIMLMASLGIMPRRYDVQADRLDIKAAMASLGRMVIAFDQTLAALPAHSRFVDRLREGG

SEQ ID NO: 89593 - protein, 516 aa, Caulobacter vibrioides; identical to SEQ ID NO: 84523
  misc_feature (1)..(516): tr|Q9A9K8|Q9A9K8_CAUVC Tryptophan halogenase, putative OS=Caulobacter vibrioides (strain ATCC 19089 / CB15) OX =190650 GN=CC_0972 PE=4 SV=1

SEQ ID NO: 89594 - protein, 507 aa, Alteromonas macleodii
  misc_feature (1)..(507): tr|K0D0I7|K0D0I7_ALTMS Putative tryptophan halogenase O S=Alteromonas macleodii (strain Black Sea 11) OX=100478 5 GN=AMBLS11_08935 PE=4 SV=1
MQNPQNKPIKRVVIAGGGTAGWLAASLMKKVLGKAVDITLVESEAIGTVGVGEATIPPIRLVNQVLGIDEAQFIHDTKATIKLAIRFENWKTKGQSYYHTFGAPGKSMAFCHFHHYWVKARQQGLTHDLWDFDLNFHAAEAGRFAQINAKDPVVELPFAYHFDASLYAQYLRKLSENMGVVRKEGKIARVQRCSDSGFIQSLHLESGEEIKGDLFVDCTGFKGLLIEGALGAGYDDWSHLLPCDSALAVPSERHEKTAPYTRSIAHDAGWQWRIPLQHRNGNGHVYSSRYISDDQACETLLSNLDTKPLGDPKLIKFTTGRRRKQWYKNVVAVGLSSGFLEPLESTSIHLIQSAIVRLIQLFPHNGFAPTLESEYNKQSELEFEQIRDFLVLHYNVNERTDSAFFNDMRNITLPDSLAHKIELFKESGNLLREQNDLFLESSWLQVMYGQGITPMDYHGLVNSVPESQLNQMLIRLLEIKKEPITKLPTHDEYINGMVAKYKRSMNS

SEQ ID NO: 89595 - protein, 504 aa, Alteromonas macleodii
  misc_feature (1)..(504): tr|K0D6R7|K0D6R7_ALTMS NAD(FAD)-dependent dehydrogenase OS=Alteromonas macleodii (strain Black Sea 11) OX=1004 785 GN=AMBLS11_13790 PE=4 SV=1
MNKLPQEIVIVGGGTAGWMTTCYLARTAELMASNSNVPACASKITLLESAVISTVGVGEGSTPYLRHFFEFLGISESEWMLKCSATYKMGISFERWTATAESKTTRPAFTDSDRYFHPFFSSLDIPTADMYFSAVNEYRQGASQDINPSHYFTAAHMVEKGITPDAICSSANIDYAYHFDAGLLGDFLKEYALNKGVSHQIGTVANVECHKHTITALKLDDGNTLSADFFIDCSGFRGLLGKQALSRRFTSYADTLFNDAAVAIASDATASPDTALQTRSVALSYGWQWHIPLTSRTGNGYVYSSQFCTEAQAEEGLRLALEPDQPHQQARHLKMTVGRLEEHWKGNCLCIGLSQGFIEPLEATALMLVQYALHHFIDCWQSNNPQRVERYNSEINRMFDGIRDYIAAHYYLNTRDDSAYWVACREDLKVPDTLSFLLNAWDKGASFEQALNEVDNKLVYLRPSWYCIFAGMKRFSNNSTPLAQPNILALRTMQQSVDGAYRAR

SEQ ID NO: 89596 - protein, 507 aa, Caulobacter vibrioides; identical to SEQ ID NO: 84517
  misc_feature (1)..(507): tr|Q9A7G8|Q9A7G8_CAUVC Tryptophan halogenase, putative OS=Caulobacter vibrioides (strain ATCC 19089 / CB15) OX =190650 GN=CC_1755 PE=4 SV=1

SEQ ID NO: 89597 - protein, 505 aa, Sphingomonas sp.
  misc_feature (1)..(505): tr|A0A258TL38|A0A258TL38_9SPHN Tryptophan halogenase OS =Sphingomonas sp. 28-66-16 OX=1970435 GN=B7Y45_00875 PE =4 SV=1
MTEAAPRRIVILGGGTAGWMAATLFAQAWGRMKGTGQAEVTVIESPEIGIIGVGEGSTPQLRAFFAHIGIAERDWMPRCHATYKAGIAFHGWSERPGYAAYFHPFATDLDVHSQDAFFTHAAARRGGYDLDAHPDRFFLPALLARDRLAPIPADNFPFDIGYGYHFDAHLVGAVLRDHARSIGVTHLERRVTEVRIGADGNVSELVTAEGEAIGGDLFVDSSGFASVIAQQALGVPFRSFADTLFNDSAVVMPTPADPGGINVHTKATALSAGWAWDIPLTSRTGNGYVYASGYVSADAAETELRGHLGLLDSAVAARHLKMKVGRIEHSWAGNCLAVGLSQGFIEPLEATALHLVQATVEGFIDAYQQGDFSPRHRDAFNARIAARYEGVRDYIVCHYRLNQRTDTPYWRDNAANNALSGSLKALLHCWFTGGDLVAEVDGQGIAGYYSAISWHCLLAGYGTFPPDARLRAAPGAGENMTRIGDFLTRCARNFRQHDIQLAMLA

SEQ ID NO: 89598 - protein, 499 aa, Streptomyces sp.
  misc_feature (1)..(499): tr|A0A0H4CCF1|A0A0H4CCF1_9ACTN Tryptophan halogenase OS =Streptomyces sp. PBH53 OX=1577075 GN=QR97_23410 PE=4 S V=1
MTAAYLRRALGDKVSVTLVESKRIKTIGVGEATFSTVRHFFDYLGMAEHEWMPRCNATYKLGIRFENWREKGHYFYHPFERLPVVDGFPLTDWWLAKKPGPRFDQDVFLMSSIVDNERSPRFLDGTLFEQEFVERAGDQARTTLSEQSTQFPYAYQFDASLLADYLCEYATERGARHIEDDVLDVVRDERGWISHVVTKEHGDLTGDLFIDCTGFRGLLINQALEEPFVSYQDTLPNDSAVALRVPVDMEKRGLRPCTTATAQDAGWIWTIPLYGRIGTGYVYASDYCGPEEAERTLREFVGPEAADLEANHIRMRIGRTRQSWVNNCVAIGLSSGFVEPLESTGIFFIQHGIEQLVKHFPDAGWDPGLRNSYNTAVARVMDGVREFLVLHYHCAARADNAYWRDAKTRALPDGLAERLEQWRSKLPSMDTIYPHYHGFEPYSYLSMLLGLGGLELKPANAVSLMDDSRAADEFRRIKDLSHDLVKRLPSQYEYLSQMR

SEQ ID NO: 89599 - protein, 504 aa, Rheinheimera sp.; identical to SEQ ID NO: 83482
  misc_feature (1)..(504): tr|A0A2E6Z4I6|A0A2E6Z4I6_9GAMM Tryptophan halogenase OS =Rheinheimera sp. OX=1869214 GN=CML21_16415 PE=4 SV=1

SEQ ID NO: 89600 - protein, 499 aa, Caulobacter vibrioides; identical to SEQ ID NO: 84511
  misc_feature (1)..(499): tr|Q9A9H8|Q9A9H8_CAUVC Tryptophan halogenase, putative OS=Caulobacter vibrioides (strain ATCC 19089 / CB15) OX =190650 GN=CC_1002 PE=4 SV=1

SEQ ID NO: 89601 - protein, 416 aa, Flavobacterium sp.
  misc_feature (1)..(416): tr|J1KT83|J1KT83_9FLAO Tryptophan halogenase OS=Flavoba cterium sp. F52 OX=1202532 GN=FF52_12351 PE=4 SV=1
MTKEFVDVLVIGAGPSGCVSASYLFKNNVKVKVVEKTKFPRLVVGESLIPRVMDHFAEAELFDALDAMNFEKKLGARFIRGEEICNFDFSVKFGEGWDWTWQVPRADFDNTMAQEIIRKGIDLEFETEVLEVSFEGKNSKTIVKDKDGNLKEIHAKFIIDSSGYGRVLPRLLDLDTPSKLDPHSSIFTHVKDINREEGVEGTQISFDILETEVWLWVIPFSNGNTSLGVVGPTDFINSLSENKDNAEALRNAIQKSDYYIKRFAGTEFLFEPVKLENYSRAVKRMYGDGFALTGNSSEFLDPVFSSGVAFATESGMLAAKLYLKESQGIPVDWEVEFTQYMKRGIAVFTTYVQEWYTGNLQTLFFHQPENPEVKEKICAVLAGYVWNEENSFVKKHDHVIANMAYLLNMQKEQSSE

SEQ ID NO: 89602 - protein, 504 aa, Caulobacter vibrioides; identical to SEQ ID NO: 84483
  misc_feature (1)..(504): tr|Q9AA21|Q9AA21_CAUVC Tryptophan halogenase, putative OS=Caulobacter vibrioides (strain ATCC 19089 / CB15) OX =190650 GN=CC_0787 PE=4 SV=1

SEQ ID NO: 89603 - protein, 499 aa, Sphingopyxis sp.
  misc_feature (1)..(499): tr|A0A0W1CHP2|A0A0W1CHP2_9SPHN Tryptophan halogenase OS =Sphingopyxis sp. H115 OX=1759073 GN=ATE71_18290 PE=4 S V=1
MSDRKPVQRVVIAGGGTAGWMMAAAIARTMGHTVDLTLVESEAIGTIGVGESTIPPLVNFNRILGIPEPEFMRATQATFKLGILFDNWKHDGDSYFHSFGLSGKDHWSAGFQHFWLNARERGHEQPYEDYCLELVAGMQGKFAHLPEDRMNYAYHVDATLYGRYLRKLAEADGCTRVEGKITRVELDSETGDIAALHLDGERRVEGDMFVDCTGFRGLLIDGALHAGFEDWSHWLPNDSAIAVQSKHLGPPMPYTQAIAHDAGWQWRIPLQHRMGAGIVYTSGYLSRDEAYDRLMSSVGEPLIEPFDIKFKGGVRRKQWYRNCVAVGLAGGFVEPLEATTVHLIQRAVLRFIRLMPNGRVSERDAQEFNDQQRLDIEQIRDFVVLHYKATNRRDSPFWRHVATMPVPDTLQQKIELFRETGRVFRKYEELFAENSWVQVMMGQGIEPQTYHPIAAKLRDDEVERLFQTLRDNIAQTVATLPEHHAYVARYCGAEEPKAA

SEQ ID NO: 89604 - protein, 515 aa, Sphingopyxis sp.
  misc_feature (1)..(515): tr|A0A0W1CHP3|A0A0W1CHP3_9SPHN Tryptophan halogenase OS =Sphingopyxis sp. H115 OX=1759073 GN=ATE71_18305 PE=4 S V=1
MNSAIERVVIVGGGTAGWLAASLLATSRRAKAAPLSVTVVEAPDVAIVGVGEGTWPTMRATLHTIGLDEGAFLAACDGAFKQASRFDGWVDGSAGDSYLHPFTTPPPIPTGELLAAWQASAPGQSFAAAMSAQAAVCMDHLAPRQRTMPDYQGAANYAYHFAAEKFAALLSAHATQALGVEHIRARVTATRRAANGDIAAVIIADGDAIAGDLFIDCTGFKGLLIDGELGVEWIDRGDHAFNDRAIASQVPVPPGSPIASQTIATAHEAGWIWDIGLPSRRGIGCVYSSRFMDTERAEAILRDYIARELPGAIPEEGAFGVPLKHISFRTGHRARFWEKNCLSIGLAAGFIEPLEASAIVLIELSMRALTDNFPADRAAMDIHAARFNRLFRYRWDRIVEFLKLHYVLSRRDEPYWRAHRDPDHIPPHLVELLTLWRDQPPSSSDFPYVDEIFSAESHQYILYGMGFPAPAGWPASDRALSALAEMRQRARTLAAGLPTNRAYLDTLAADRVAAE

SEQ ID NO: 89605 - protein, 511 aa, Luteimonas sp.
  misc_feature (1)..(511): tr|A0A290XEJ6|A0A290XEJ6_9GAMM Tryptophan halogenase OS =Luteimonas sp. 100111 OX=2006110 GN=CNR27_08975 PE=4 S V=1
MDTAHAAPGRIRKVVIAGGGTAGWLAGCALAHQFRDLLDITLVESDQIGTIGVGESTVPPIRNFHRFLQIDEQEFLRAVAGTFKLSISFEGWGQPGDRYLHPFGPAGQGTWATPFHHFWLDSRRRGMPPSTLADFCLEGVAALADRFSLDTRPQVNYAYHLDAGLYARFLRGIAERHGLVRVEGKIGEVERHAHSGDVAAVVLDDGRRLEGDLFIDCTGFRGLLIEQALETGYEDWSHWLPCDRAIAVQTESARGPVPYTRAIAHEAGWRWQIPLQHRVGNGLVYCSRYLSDDEAQARLMHDMESRPLREPRLVPFRTGRRLRTWNRNVVALGLTSGFVEPLESTSLHLTMSAIVRLIQLFPFEGISPALVDRFNDLGRAEAEHVRDFVILHYHATRRDGPMWAECREMELPASLEQRLRAWRDRAHAWQLGDELFRVDSWAHVLMGQGVQPGPPHPLVRGLGDDALRQLLAGIRAQIAHAAAGMPSQQTFIASYCKAGPGVWSAGMPAPA

SEQ ID NO: 89606 - protein, 483 aa, Sphingopyxis sp.
  misc_feature (1)..(483): tr|A0A0W1CK51|A0A0W1CK51_9SPHN Tryptophan halogenase OS =Sphingopyxis sp. H115 OX=1759073 GN=ATE71_16990 PE=4 S V=1
MTAAALSRTMDNLSIHLVESDEIGTVGVGEATIPAIRLFNALIGIDENEFIRETGGTFKLGIQFHDWGRIGDVYMHAFGQIGRSLGMLPFQQYWLRGRNEGVAGRLGDYSLNETAGRQNRFARLPQIPNTSLDGIAYAFHFDAALYVAYLRKVAEAAGVVRTEGKIVSVRKDGERGHVEAVVLEDGTAIEGELFIDCSGFRALLIEEALETGFEDWTHWLPCDRAIAVPSENAGPARPYTQAIAHKAGWQWRIPLQHRTGNGHVFCSDFISEDEATATLLANVEGRPLAEPRTLRFRTGMRSRAWNANVVALGLASGFLEPLESTSIHLIQNGIAKLIAHFPGRDFDAANIDAYNRRIRFDYERIRDFVILHYHANQRSDSPFWVRCREMGVPETLAAKIELFRSQGQIVREGEELFVEIGWFQVLTGQNIVPCGYHPMADALTSDELAGFFDDIETIVARTASRLPFHEEYIAQHCAAGVPA

SEQ ID NO: 89607 - protein, 503 aa, Duganella sp.; identical to SEQ ID NO: 88139
  misc_feature (1)..(503): tr|A0A1E7VC17|A0A1E7VC17_9BURK Flavin-dependent tryptop han halogenase PrnA OS=Duganella sp. HH105 OX=1781067 G N=prnA_1 PE=4 SV=1

SEQ ID NO: 89608 - protein, 508 aa, Brevundimonas vesicularis
  misc_feature (1)..(508): tr|A0A2X1CWY4|A0A2X1CWY4_BREVE Tryptophan halogenase OS =Brevundimonas vesicularis OX=41276 GN=NCTC11166_01240 PE=4 SV=1
MMTQTDAGPIRKVVILGGGTAGWMTAAALSHRLAGSPVSIELVESDEIGIVGVGEATLPHIRAFNTAMGIDEQSLIDQTQATFKLGIQFVDWGRPGDSYIHPFGAYGEPIEGIDFHHVWAARRAMGDAADISDYSYPVRAAEANRFQRPASDPGSILSTFSYAFQFDASLYAAFLCQVSCGRGVVRTEGKVVDHVLNGATGDVDAIVLSDGRRISGDLFVDCSGFRGRLINQALETTFEDWSHWLPCDSAFAVPCQTTAAVGPYTRATARAAGWQWRIPLQHRTGNGHVFSSAHISDEDAVATLMSNLEGPALAEPRRLGFKTGRRQRLWSRNVVAIGLSGGFLEPLESTSIYLIQLGITTLLDLFPDRVGMAADAQEYNRIMALEFDRVRDFLVLHYVANQRDEPFWREMRTMAWPDSLSAKVEAFKSRGLLPDYDIGVFLPPSWLAVLVGQNIVPNAWDPRVDRLEPHVLSAKLAALRDAVRSTVGRTPDHMTFIRQAAQRAGGVR

SEQ ID NO: 89609 - protein, 492 aa, Catenovulum maritimum
  misc_feature (1)..(492): tr|A0A0J8H1G3|A0A0J8H1G3_9ALTE Uncharacterized protein OS=Catenovulum maritimum OX=1513271 GN=XM47_01760 PE=4 SV=1
MLSIKNKILIVGGGTSGWMTASLLAKKWPDSQIELIESKNIGTVGVGEGSTPYIKQFFNALEIKEADWMPYCSATYKNGIQFVNWSKTPGYEQYFHAFLSDLDEKYASEFEQATIERRNGQAVKAHPDGYFFLQSLTKDLRQPVTDAKVDHENVYAYHFDSGKLADYLKQYCLNLGVKHQYVDVETVELNANGEIAAVISQEQKRFTADLYIDCTGFKALLIQQHLNEPFIPFNNNLLNDRAVTVATKATAHYQPQTISTALSNGWAWKIPLTTRTGNGYVYSSKYISDEEATQELIEFVGEDNLISEPKIIPMKVGRVKRSWVKNCVAIGLSQGFIEPLEATGLHFIQSTIETFILLYEMGEGTDDYQEVYNREIEHLFENVRDYIVSHYLTNTRSDSEYWRACREQIKISDSLKALMNAWCSGKDFRDTLVKAEIANIYPSESWHMLLAGMGFLPPIAGAHEPSMQEQKILAKIASEYQHYVDLYPKTHG

SEQ ID NO: 89610 - protein, 503 aa, Shewanella baltica
  misc_feature (1)..(503): tr|A0A380A5Q8|A0A380A5Q8_9GAMM Tryptophan halogenase OS =Shewanella baltica OX=62322 GN=NCTC10735_03095 PE=4 SV =1
MTTAIKRVVIAGGGTAGWMAAAALTKLMGKHLEMVLVESDEIGTVGVGEATIPTLHIFHRLLGLKEQEVMAATNATFKLGISFENWQDINKNYLHSFGFLGKDCWACGFQHFWLKGKQLGMVSEIGDYCAEHLAARQGRFAVLPNQDYNHAYHMDASLYAKYLRKMAEQHGIHRIEGKIKQVLQHHDSGNIKALVLENDETIEGDLFIDCTGFRALLIEQTLNTGFEDWSHYLPCDSAIAVQTQSVGAPIPYTRSIARDSGWQWRIPLQNRTGNGLVFCSKFISDEDATELLLANLEGEPLNKPRVIKFKTGTRRLHWHKNCVAVGLSGGFLEPLESTSIHLIQRSIIRLMQLFPSAGIVQSDIDEFNQQTKLEMDNIRDFIILHYKATEREDSRFWRYCKNMDIPASLKHRIEMFADSGKVYKYGSELFGESSWIQVMMGQGIMPKHYHPIVDVMEEPELEAFLNNIKSTVKRKVESLPAHIDFIQHYCPAEVLANTKPMAM

SEQ ID NO: 89611 - protein, 502 aa, Rhodococcus sp.
  misc_feature (1)..(502): tr|A0A2A3FHR1|A0A2A3FHR1_9NOCA Tryptophan halogenase OS =Rhodococcus sp. ACPA4 OX=2028571 GN=CJ178_19510 PE=4 S V=1
MSSRIDEVDVVVVGGGPGGSSAATLLAKGGHRVVQLEMEQFPRYQIGESLLPATVHGVCRLLGVEKEMEEAGFMRKRGGSFRWGKNPVPWNFLFAITPEFAGPTSYAYQVERMKFDHILLKHASNCGVDVREQAAVTGPILDDNGRVVGVTYTDVDGDVCEVRAKYVVDASGNKTRLTKYAGTERVYSDFFQNVALFGYFNGGKRFPEPDSGNILCAAFDEGWMWYIPLTDELTSVGAVIAKDHAAKIQGDQEHALAKFVKRCAIVDDMLSDATRVTEGVYGQIRTRKDYSYANTKFWGNGMVLVGDAACFIDPVFSTGVHLATYSAVLAARSINSVLSGELTEERAFGEFEGRYRREYAVFYEFLSSFYDMEQSEDSYFWKARRVTNFDRQDMTAFVSLVAGAYSQEDVLTDADAVVKRFSASTKALTDATVKTGGMDTASGQRMNHLFAAPVVREVMEEMNSLQARGATDSIQTPPPLLEGGLVPSPDGLAWAEPAVAAR

SEQ ID NO: 89612 - protein, 504 aa, Altererythrobacter epoxidivorans
  misc_feature (1)..(504): tr|A0A0M4LWL3|A0A0M4LWL3_9SPHN Tryptophan halogenase OS =Altererythrobacter epoxidivorans OX=361183 GN=AMC99_02 455 PE=4 SV=1
MNDSKPMAKPIKRVVVAGGGTAGWMAAAALARAFGNVIDLTLVESEAIGTVGVGEATIPPLVGYNRLLNINEAEFMRETQATFKLGIEFENWKVDGEKYFHSFGTTGRDHWAANFLHFWMHGKTRGHTASFDDYCLELKAAYAHKFAQLPDNRLNYAYHLDSSRYAAFLRKIAESEGATRVEGKIAEVELDSESGDIAALRLDSGKRIEGDLFVDCTGFRALLIGGALHVGYDDWTHWLPCDAAVAVQTESVREPIPYTRAIAHDAGWQWRIPLQHRQGNGIVYCSRYLDKDAAAERLLSSVEGKTLTDPNFIRFQTGARRKQWHRNCVAVGLSGGFMEPLESTSIHLIQRAVVRLIRMLPAGTIDQSDIDEFNDQQLTDMVQIRDFLILHYKATERGDSPFWRQCRDMDIPDSLQHKIDLFRQTGLVFRKNDELFVENSWIQVMMGQGIVPESYHPIATKLSDSELDNLLTNIRESVEKTVAGLPAHHAYVSQFCGANTKAAA

SEQ ID NO: 89613 - protein, 545 aa, Nostoc punctiforme
  misc_feature (1)..(545): tr|A0A367RFA3|A0A367RFA3_NOSPU Tryptophan halogenase OS =Nostoc punctiforme NIES-2108 OX=1356359 GN=A6769_19205 PE=4 SV=1
MSQNVQNIVIVGGGTAGWMTAAYLSKALDKNINITLVESSNITKIGVGEATFSTIKVFFDFLGLQEHEWMPKCNATYKMAIKFVNWNAKGQHFYHPFQRYEVIDGFDISEWWLKMKKDQEAFDYACFLTPWLCDHQLSPRYLDGKVFDRKVQNEFSQEDIVKKNILDKLNIQYPYAYHFDANLLARFMKDYAMERGVKQTVDDVVDIKLTEDGSIDSLITKEYGILSGDLFIDCTGFRGLLINKALGEPFISYSDSLLCDRAIAMQIPTDIKKDGIKPYTTATALSSGWVWNIPLYGRDGTGYVYSSAFISAEDAEQEFRQHLGAATDNRQVSHIKMRIGRNRNSWVKNCVAIGLSSGFVEPLESTGIFFIQHGIEELVSHFPSKSFNQELIHSYNKVIADCIDGVREFLTLHYYASDRTDTEFWKATKNNIKVPEELQEKLRLWKKRLPSNKTINLKYHGFESYSYSVMLLGLNYIPESSLPIFEHVGNHNAEAAFVEIRERANYLTSTLPSQYEYLTHVIKSQEQSEYLSVSDRAYQIPTLVS

SEQ ID NO: 89614 - protein, 509 aa, Brevundimonas vesicularis
  misc_feature (1)..(509): tr|A0A2X1CVY0|A0A2X1CVY0_BREVE Tryptophan halogenase OS =Brevundimonas vesicularis OX=41276 GN=NCTC11166_00908 PE=4 SV=1
MQADPSRKIRKVCIVGGGSAGWMAAALLSEHLKGALGQIELVESDDIGTIGVGESTVPPFLQLLAKLGVDEQVFVREVQASFKLGIEFRDWKAKGQSYFHPFGTIGAPVDLADFYQVWLKAALQGYPGGLQDFAPAAVMAREGRFTLPFKAARTPVGGASYALHVDAKRVARFLRTFAEARGVTRVEGIVEDVRVRADGFVDHLVLKGGRTVEADFFIDCSGFRSLLIGKALKVGYHDWSHWLLCDRAVAVQTENVGPPAPYTLAQAQDYGWRWRIPLQHRTGNGYVFCSQYLSDDEATASLMAQVEGAPVVKPMVVPFKTGVRERLWDKNVLALGLAGGFIEPLESTAIHLIYRGLDFFFRFLPDRDCDPVLADEYNRRMIADYEEIRDFIVLHYCLTERDDTPFWRACRTMELPPELKRKIALFRSGGRLAEGLDELFRAVSWQSVMEGMGVRPHTHHPLTNRIPFDDVPGQLDHAAELLRRVVADLPTHQQFIDRHCAAPSPKVSA

SEQ ID NO: 89615 - protein, 415 aa, Burkholderia ambifaria
  misc_feature (1)..(415): tr|Q0B9K3|Q0B9K3_BURCM Tryptophan halogenase OS=Burkhol deria ambifaria (strain ATCC BAA-244 / AMMD) OX=339670 GN=Bamb_3616 PE=4 SV=1
MSEMKSNSVDVAIIGAGPSGAVAAALLRRAGRSVLVLERQHFPRFSIGESLLPQSMQYLEEAGMLQAVVEAGFQFKNGAYFVYRDRMSSFDFREKFSDGWGTAYQVERAAFDDLLIRCAADQGADVRFGHTVQAFHPGDMQRLEVVDEAGCEYSVHASFVLDASGFARVLPRLLDLEAPTGMPTRAAIFSHVEDSLPAGSTDRDKICIAVHPARRDVWFWMIPLTNGRSSVGCVADAGFLDVPQAQQESLLRELLQSEPTLSRLVGSKPFVMLVRRIAGYASNVEHLHGRGYALLGNAGEFLDPIFSSGVTIAMRSAQLAVAVLERQLRGETVDWTHDYDIALRKGIDTFRAFVERWYSGALQDIVFHEDKASDVKRMVCSILAGYAWDESNPFVREPARGLDVLAEFCRAGGLG

SEQ ID NO: 89616 - protein, 505 aa, Sphingomonas edaphi
  misc_feature (1)..(505): tr|A0A418PZ92|A0A418PZ92_9SPHN Tryptophan 7-halogenase OS=Sphingomonas edaphi OX=2315689 GN=D3M59_07620 PE=4 S V=1
MTDSRIRDVVIVGGGTAGWMAASALSSVLGEQLNIRLIESDEIGIVGVGEATIPAIRLFNGLVGINEDEFVAATQGSFKLGIEFQNWGKPGDSYMHAFGMVGQSLGLVEFWQYWLRGRNEGVADRFWDYSLNETAARMNRFGRLPTIPNSNLDGIAYAFHFDAGLYARFLRRIAERNGVTRIEGKITSVQRDGETGFVSSVTLESGEAIGGELFIDCSGFRGLLIEQALETGYDDWTHWLPCDRAIAVPSENVGPARPYTQSIAHQAGWQWRIPLQHRTGNGHVFCSDFISEDEATATLLSNLEGPALADPRSLRFATGMRKRGWNKNVVALGLSSGFMEPLESTSIHLIQNGIAKLISHFPDRGFAPANVEAYNRRVAYDYERIRDFIVLHYYANQREESFWKRCREMAIPDSLRQKIDLFRATGRIFREQEELFVEVGWFQVLTGQNIVPNTYHPLADALTKDELRQFFADLKTIIGGTASRLPPHDIFIRQFCAAASQKVPA

SEQ ID NO: 89617 - protein, 500 aa, Variovorax sp.
  misc_feature (1)..(500): tr|A0A1E4IQI1|A0A1E4IQI1_9BURK Uncharacterized protein OS=Variovorax sp. SCN 67-85 OX=1660152 GN=ABS94_31655 P E=4 SV=1
MLNLRGISRAVVIGGGTAGWFAALTLRRMFSSQVEIRVIESPDIGIVGVGEGGLLNLVDALRRNGIDLDEFVRETGAAFKLGFSYEGWRTGAEDDRYYHLFGRPGLPETDWVERGFHPLFSGMVHEGIELHRYIPGFAEIASNATQQEAAAMLRHGPVSGLSASFHFDSHKLADYLRRVAVSRGVVHQQARVEELVCDEQRLARSLRLDNGESIDLDLLIDASGLARLGIGKKLGVRWRSFSEHLLLDRAVPFHMPHPQPNPSLVTRAIAMPAGWMWQIPLVERVGAGYVFSSAHTDETQVIDEIHRRIGPKVEPMRTLRFEPGHFEQVWVGNIMAIGLASGFVEPLEATSIGQMLEQLRNFERIVTASNGVVSGYLIEGFNEANARCWSGIRDFLRMHYDCPRRDTAFWRDVAALPLPPGYAELKQCFQQRTPRLIDVENYAMHGWQGIFHVINWLFVAAPLGVVPPEAAAFELASLPAVSRRRVATRVSELRKSSVPG

SEQ ID NO: 89618 - protein, 515 aa, Colwellia sp.
  misc_feature (1)..(515): tr|A0A3Q9G8X3|A0A3Q9G8X3_9GAMM Tryptophan 7-halogenase OS=Colwellia sp. Arc7-635 OX=2497879 GN=EKO29_00280 PE= 4 SV=1
MDKVVKKIVIVGGGSAGWLTAGVIAAEHRIAEQQALEITLIESPDVKSIGVGEGTWPSMRNTLDKIGITELEFIQQCDASFKQGSKFINWQSAQSGDFYYHPFMTPEGYTEVNLSRHWQEQQQKQPFAGTVNAQYHVCEAGLAPKQFTTPAYAGVANYGYHLNAGKFATLLQQHCTKKLAVKHIVAHIENILASPSGDIEKLATKDGQLIEGDLFIDCSGSAGLLISKYFNIPLIKQDKVLFNNCALATQVPYTLQQDIASATLSTAQTSGWIWDIGLPSRRGVGHTYSSAHISDTDAEQQLRHYIAGSIGEKETEKLSIRKLKFTPGYREKFWHKNCVAVGMSAGFIEPLEASALAMIELSVTMISEQLPQTRGQMDIVAERFNSRFSYRWQRVIEFLKLHYILSARRDSEYWRDNQLASSIPERLMQLMQLWQYQPPSRYDFIENEEVFPSASYQYVLYGMGHYTQPRAHQSLFENKQLAEQLFAKVQHQKQQFLQGLPTNRALIDYYCQQPL

SEQ ID NO: 89619 - protein, 497 aa, Aliiglaciecola sp.
  misc_feature (1)..(497): tr|A0A553L446|A0A553L446_9ALTE Tryptophan 7-halogenase OS=Aliiglaciecola sp. M165 OX=2593649 GN=FM019_07860 PE =4 SV=1
MNTTYQNSVKRVIIAGGGTAGWMTAAALSKLIGKSLDITLVESDQIATIGVGEATIPPIRTFHRLLGIDERDFMRATQATFKLGIQFENWRTANDVYIHSFGVTGRECWAGEFHHFWLKAQQLGIAEAFGDYCFELKAAQQQKFGFNEQNPINFAYHLDAIGYAKFLRVFAEKHGVKRVEGKIDKVSVDQATGFISSLSLDKGKTLTADLFIDCTGFRGLLIEQALHSGYEDWSHYMLCDSAVAMQTSPTEAPLPYTRSIAHDSGWRWQIPLQNRVGNGMVYSSSHLSKEQAEQRLRENVTGEPLNQPNHIRFRPGKRKQPWKKNCIAIGLSSGFIEPLESTSIHLIMTSIVRLMRLFPFDGVTQSATDEYNRKLGCEMDCILDFITMHYKVTQRDDSEFWRYCKQMDVPDSLAHKLQLFEDTGRVFLDEFDIFRVDSWTQVMLGQGLVPKQFHRIVDEMDQAELSRFMATIKNDVDKRLTSLPSHTEFLSHYLKQQ

SEQ ID NO: 89620 - protein, 511 aa, Rheinheimera sp.
  misc_feature (1)..(511): tr|A0A5C7TPV7|A0A5C7TPV7_9GAMM Tryptophan 7-halogenase OS=Rheinheimera sp. OX=1869214 GN=E6Q75_01895 PE=4 SV=1
MQQGPIRKIVIVGGGSSGWMSAALLSKLLRNRAGAMVEICLVESEQIGTVGVGEATIPAIKVFNQLCGIDEREFIQATGATFKLGIDFVNWGQIGEHYFHAFGAIGRSWEWLSFHQYWLALREAGLALPFDDYCIGAVMAREQRFMQADLSRPQSPVSQIAYAYHFDAGLYAQFLRRHSEARGVTRIAGTISAVTRHAYNGHIHQLVLDDGQVIDGDLFLDCSGSRSLLLGQTLGVGYDDWSHWLPNNSALAVPSAALAELPPFTRSTAHHSGWQWRIPLQHRTGNGMVFASGFVSDSTAEQLLLSSLDTPALAAPRLIRFTTGKRKQMWWGNCVAIGLASGFLEPLESTSLHLVQTAVTRLVNLFPDLSFQQANIDHYNSLAATEMAQIRDFIIAHYKVTQRNDSEYWRYCQRMAVPDSLAQKLEIFAAHGRVHRIADELFREDSWVQVLLGQGLLPSRPDPLCQQKSLAEMQDFAESTAQVIAGCTAQMPTHTDFIRKVAPFSAGAPLR

SEQ ID NO: 89621 - protein, 496 aa, Aliiglaciecola sp.
  misc_feature (1)..(496): tr|A0A553L618|A0A553L618_9ALTE Tryptophan 7-halogenase OS=Aliiglaciecola sp. M165 OX=2593649 GN=FM019_06420 PE =4 SV=1
MNKAIKKVVVVGGGTAGWLSAALLKKVVGGPVEIELVESESIGTVGVGEATIPPIRLVNNVLGINEAEFLRETNATLKLAIKFENWRVQGEGYFHTFGAPGKSMAFCQFHHFWKRAKTLGFDSNLWDYDLNYLCCLEGKFAHINSKDPILELPYAYHFDASLYAKFLRTFSEKMGVVRTEGLVEHVKQDPQTGFVTQLQLNDGKIISGDLFIDCSGFRGLLIQKTLGTGYEDWSHWLPCDRAVAVPSERLEKTLPYTRSIAHKAGWQWRIPLQHRNGNGLVYCSDHCSDDEAASTLMGNLDTQALDEPRVIHFKTGRRRKQWNKNVVSVGLSSGFLEPLESTSIHLIQSGIVRLIHLFPHNGIDPVNVNEYNQQSELEYEQIRDFLILHYHVNERDDSQFWRNMRDMQIPDSLTHKIELFRETGKLFREQNDLFLESSWLQVMLGQGIEPKDYHPIANNLDKERLFSMLNTVKNVKQQPIPQLPTHDEFLKHYCKV

SEQ ID NO: 89622 - protein, 516 aa, Aliiglaciecola sp.
  misc_feature (1)..(516): tr|A0A553L4A1|A0A553L4A1_9ALTE Tryptophan 7-halogenase OS=Aliiglaciecola sp. M165 OX=2593649 GN=FM019_07855 PE =4 SV=1
MHNHHIVIVGGGSAGWLTAGLLAARITAQRSQGIKITVIESPDVATIGVGEGTWPSMRHTLQQIGIPETQFMLHCNASFKQGSSFYGWRSGEKNDYYVHPFTTPPGYAELDIASGWRALHPDRAYSDTVSAQSQVCAYGKAPKQLQTPDYAGVTNYGYHFNADKFVELVKNHCIDQLGVNCLVDHVESVTAHPNNDIDAVTCKTHGMVQGDLFVDCTGMRSLLIGQHFNVPWISQRHVLFNDSAVAVQAPYDSAQTDIVSTTLATAQSEGWIWDIGLSNRRGVGYVFASQYTDAATAEQSLTEYLARSMSKDAMSALTPRVLHFKPGYRQEFWKGNCVAIGMSSGFIEPLEASALAMVELSATMLCDHLPSLMTQMPTVRKRFNQRFRYRWQRVIDFIKLHYAISERTDSEYWRDNRSQNSIPDSLHELLELWRHQSPSRYDFIENEEVFPSASYQYVLYGMDYHTQSTSLSTAELEHCQQLFAKNTEYVSRLLQGLPSNRDWLTAKSQSGLAQTG

SEQ ID NO: 89623 - protein, 542 aa, Duganella sp.
  misc_feature (1)..(542): tr|A0A1E7VKU4|A0A1E7VKU4_9BURK Flavin-dependent tryptop han halogenase RebH OS=Duganella sp. HH105 OX=1781067 G N=rebH_1 PE=4 SV=1
MPGRRRTLPMETGKTMKTIPTPVKNILIVGGGTAGWLTAAFLARTLGADADPGAGGDSVRITLVESKEIGIIGVGEGTFPSIRGTLAAIGIDEARFIRECNATFKQGIKFTDWVRPPGTPGNDHYFHPFSLPSQRPGGPELLPYWLQGAAPAGVGFAAAATMQKRVADAAHAPKRFNDADFMGPLNYAYHFDAGKFAALLSTHAQSLGVRHVLATVERVSLDEQGAIGAVHTKEAGELTADLYIDCTGFRAALIGDALGTPFRNINDTLFVDRALAMQVPYDTADAPIPSYTIATAHEAGWTWDIGLHQRRGIGYVYSSRHTDDARAEQVLRAYIGEASDGLNPRQLKLNVGYREQHWVKNCVAVGLSGGFLEPLESSGIGLIETAAYLVSYLFPHDGDMAPVAKVFNEMMKARYERIVDFVKLHYCLTQRRDHAFWTDNTDPASIPASLRDKLAMWRRRAPHRMDFVVDLEMYPPSSWQYVLYGMEYPTAQYANASTLPRFDEARREFQMIEQMSQRALADLPTHRALIDHFLQRGERKTA

SEQ ID NO: 89624 - protein, 495 aa, Sphingopyxis sp.
  misc_feature (1)..(495): tr|A0A0W1D8R3|A0A0W1D8R3_9SPHN Tryptophan halogenase OS =Sphingopyxis sp. H115 OX=1759073 GN=ATE71_08735 PE=4 S V=1
MSARERPVRRIVIVGGGSAGWMTAAALGRALAGQPHSITLVESEMIGTVGVGEATVPPIHEFNRYLRLDQAEFLCATHGTIKLGIEFEGWGGVGHRYFHPFGYLGIEMSGIHFHHYWLRHLAAGGDPDHSPYNLETMAARESRFAPATRHGPVHHAVHFDAAAYARFLRAYAEDKGVVRIEGKVADVRLDGEDGFITALVLDDGRAVDGDFFVDCSGFRGLLIEGALATGYEQWGHWLPCDSAVAMPSESEGDPAPFTRSTAREAGWQWRIPLQHRDGNGYVYSSAHLGHDEAEALLRSRLPGAPLADANRLRFVAGHRKAIWNRNCVAIGLAGGFLEPLESTSIHLIQTTIIRLLSLLPRDAIDPHVVARFNRDALHEYRTIRDFVIAHYALAGRDDTPFWRDVAAAGIPDTLAERIEAFRATGNILFEPGDLFGPTNWYAVLTGQGVRPQSWHPIADGLPDAELAARLATLRGRVAEQLAELPPHVEFLRRSN

SEQ ID NO: 89625 - protein, 494 aa, Rheinheimera sp.
  misc_feature (1)..(494): tr|A0A356BCL5|A0A356BCL5_9GAMM Tryptophan halogenase OS =Rheinheimera sp. OX=1869214 GN=DD408_08010 PE=4 SV=1
MVIRAETKVLIAGGGTAGWMTAALLSRLLGPAVKIRLIESDAIGTVGVGEATIPAIQHFNAVLGIPEAEFLNATQGTIKLGIQFEHWGKQGDSYMHAFGPVGRQLGVTSFHHYWLAAQARGDTSGFWDYSLNYQAAKTGKYAPLPQVPNTPLQGLVHAYHFDASLYAALLRRYSEQLGVQRTEGTIASVNKTTSGDIASVTLQDGSSYKADLFIDCSGLRALLIGQELSVGYEDWRHWLPCDTALAVPSEVILPIMPYTRSIAHTGGWQWRIPLQHRTGNGLVYSSQFLTDDAAHNTLLDNLDAPALAEPRKINFVTGRRKQQWVRNCIAIGLSSGFLEPLESTSIHLIQSAVLRLVQCFPGADNIDTVRQEYNRQSQTEYEAIRDFIILHYHLNQRDDNGLWQYCRQMVLPDSLKQRIELFKQSALVFRQQDELFTEVAWQQVMLGQGLIPTAYHPMADNLTDKQLSSFLIDLKHIITHTTQQLPPHQAFLQQ

SEQ ID NO: 89626 - protein, 507 aa, Shewanella sp.
  misc_feature (1)..(507): tr|A0A2M7LX97|A0A2M7LX97_9GAMM Tryptophan 7-halogenase OS=Shewanella sp. CG_4_10_14_3_um_filter_42_91 OX=19755 35 GN=COZ42_05110 PE=4 SV=1
MKIQSVAIVGGGTAGWLAANHLAKALFNQNITITLIESPDIPTIGVGEGTVPTIRKTLQSFGISETEFITRCDVTFKQSIKFQNWLDSHRHGRDNFYHHLFDPPSSMGDDLSSLWLQNPSDAYSQLVSSQFDVCEANLAPKLITTPEYQAVQGYAYHLNAAKFALLLAENAKQKFAVNHVKANVIDTRLHLDGSIASLVLDKCGEQEFDFYIDCSGFDSILLAKALKVPFVDKSQELFVNKAVVVQVPTDPDAIIPPYTKATAHQAGWIWDIALSNRRGVGLVYSSAHLDDEQAEQKLNRYLSGQLDQYSYRTIPMKVGYRKQFWAKNCVALGLAQGFLEPIEATSIMLTDFAAGYLASRFPSDSSQCESLSERFNQTMSYAWERVVEFAKMHYCLSDRHDSDFWIDNRDPQTIPAGLSNKLALWQEYVPLSEDLFSKFEVFNVENYLYVLYGMKFLTYKKTMSESSLVLAKQHAARIRRHSEQLCQHLPAHRELLSKIHQYGLQKI

SEQ ID NO: 89627 - protein, 498 aa, Rheinheimera sp.
  misc_feature (1)..(498): tr|A0A356BDH1|A0A356BDH1_9GAMM Tryptophan halogenase (F ragment) OS=Rheinheimera sp. OX=1869214 GN=DD408_09565 PE=4 SV=1
MHTDNQHHTAVKKVVIAGGGTAGWVAAAALSKRLKGQIDVVLVESAEIGTVGVGESTIPPVQLFHNLLGIDEQEFMRATDATFKLGISFENWGQLGDRYIHPFGVTGKGSFLADFQHYYLHGRTLGIEAPFGSYCYELQAALAGKFAKTDSSNISYAYHLDATRYARFLRAFSEAQGAVRIEGKIAQVQQQVNGDIRALVLEDGTEISGDLFIDCTGFRALLIEQTLHTGFERWDHWLPCNKAMVVQTESGSSLPPYTRAIAHDSGWQWRIPLQHRVGNGLVYAADYLSDDKARQRLLGNLETAPLFEPRMLSYQTGRRKKFWHKNCVALGLSSGFIEPLESTSIYLFMNGVIRLLRLFPFNGVQQPLIDEYNQQSISELEKIRDFIILHYHQTERSDSEFWNYCRTMSIPDTLAHRMELFRASAHAFQTGEEMFRLESWSHVMLGQRLMPQSYHQLVASLPPQQLQAHLQQIRDTISHAVARLPKHSDFIRQYCAAN

SEQ ID NO: 89628 - protein, 505 aa, Duganella sp.
  misc_feature (1)..(505): tr|A0A1E7V7U8|A0A1E7V7U8_9BURK Flavin-dependent tryptop han halogenase PrnA OS=Duganella sp. HH105 OX=1781067 G N=prnA_2 PE=4 SV=1
MTNNRIKRVVVVGGGSAGWMAAAAVATYLGKQTSVRLIESEEIGIVGVGEASVPHIRMFNGQMLGIDETEFVKRTQGTIKLGIQFQDWSRIGDSYIHGFGVIGRSLGPLPFHQFWLKLFQSGRAAPIGEYSLQTVMAPQGKFVPGDRNSPPNSPLADIAYAYHFDAGLYARFLRELSEQRGVQRIEGKIVGVNQRADDGFVESVTMENGQVVDGELFIDCSGFRGLLIEQALKTGYVDWSHWLPCDRAMAVPSERIDPITPYTRATARAAGWQWRIPLQHRTGNGYVYSSQYIGDDEAAATLLANLDGKPLADPRPLRFTPGMRKKCWNKNVVALGLASGFLEPLESTSIYMVQSGITRLLGLFPGSDFNPLLAERFNRESAFEYERVRDFLILHYHATERNDTPFWDYCRTMSVPDSLKEAMDLFRSDGRYFRNGEDFFALPSWVQVMLGQRIMPQSYHPIVDDMPEDKLVQYVEDMRATLAHAVAAMPTHGQWIDRYWKASAL

SEQ ID NO: 89629 - protein, 441 aa, Caulobacterales bacterium
  misc_feature (1)..(441): tr|A0A1F8IGJ4|A0A1F8IGJ4_9PROT Tryptophan halogenase (F ragment) OS=Caulobacterales bacterium RIFCSPHIGHO2_01_F ULL_67_30 OX=1797584 GN=A2795_09995 PE=4 SV=1
IQKTQASFKLGIQFEDWTQKGESYFHPFGAIGAPVDVSDFYPVWLKARMNGYDRPLMDFAAAARMADQGRFMLPFKAQRTPIGGASYAVHVDAKRVARYLRDFAEARGVKRTEGIVEDVATRPDGFVSSLKLKSGQTVQADFFIDCTGFRALLIGKTLGVGYTDWSEWLMCDRAIAVQTENVGPPKPYTLAQAQDCGWRWRIPLQHRTGNGHVFCSRYLSDDEATARLLEQVEGRPVVNPMVVPFKTGVREKIWDKNVLSLGLASGFIEPLESTAIHLIYRGMDFLFRLMPDLDCDPNLIAEYNRRMTVDYEEIRDFIILHYALTRRDDTAFWRACRDMVLPEGLQHKLEVFRANGSLVEALDPLFRNVSWYAVMDGMGVRPRSYPPLVDRIDFNGLTDEMDRAANILNAFVADLPTHQAFIDTHCQAPPVEAPAPLVMPA

SEQ ID NO: 89630 - protein, 399 aa, Campylobacter virus
  misc_feature (1)..(399): tr|H6SUC8|H6SUC8_9CAUD Putative tryptophan halogenase O S=Campylobacter virus IBB35 OX=1006972 PE=4 SV=1
MKVTVIGKGTAGILTTKSLRFNFPDLEIDWIYPESNKFIGVGEALVPGSSKFLKSIGIDNKMILKDFRGSIKAGLKMIGWADKTFNLPFDNSVLLNRYMNKDLYPENFIDFENVSHHFNTFSLQDLYIENINNINRTITSFKDIDSDLIVDCRGFQDSDDFIDPGILKNNIALTTRIPVQNFLNPYSTFFARDFGWCWTIPLQDYISIGYVTNDSFINQASEDLKKHLQENFKTDLKDYNTIRFKTGYKKHQIAKIESHNIFSVGLNGAFIEPLQSSGLRLASHQIQELINYIKNGDTNWNQRFEDMYNRAYQFILNHFILCKKSNEYWDYYKNFNFKDSLFVGSNGNDLFDDKFEQFLYANFQGKPVKYDIDKNIVEGKGALTKLKKFDELLRDYLSK

SEQ ID NO: 89631 - protein, 59 aa, Bacillus sp.
  misc_feature (1)..(59): tr|A0A292GNC7|A0A292GNC7_9BACI Tryptophan halogenase OS =Bacillus sp. FW1 OX=1882659 PE=4 SV=1
MAEHLSLFAFIDKHVSLHYDFHIFLKNLKEGIGTFYESYPTHTRYIPAYCARRRHGDRA

SEQ ID NO: 89632 - protein, 508 aa, Pseudoalteromonas fuliginea
  misc_feature (1)..(508): tr|A0A5B0UM07|A0A5B0UM07_9GAMM Tryptophan 7-halogenase OS=Pseudoalteromonas fuliginea OX=1872678 GN=EU508_0454 0 PE=4 SV=1
MNKTIKTIAVIGGGTAGWLSAAIIASYHQGKNGDGLKVMLVESSDIPTIGVGEGTWPTMKNTLQQIGLREVDVFKACNATFKQGGKFVNWTHGNNDFYYHPFTVPLGYGRIDLAPYLDNVEDFAQQTNFQHDICEASLAPRGIAQGEYQGNCNYAYHLDAGAFAQMLKQHCKSKLGVEHIIGTVDQVKLDDDGAINELTLKDQTRTISADLFIDCTGFSSLLLGQALNVPFKKMDHVLFNDSALAMQVPYDENDDSLASHTIATAQSAGWIWDIGLTHRRGVGHVYSSKFLSDDEAEQNLRNYLGDAANGLTARKISFESGYREKFWHKNCVAIGMSAGFVEPLEATAIMLVEISARFVAEHMPVDTQVMPIVAKRFNEQMDYRWQRIIDFLKLHYMLTKRPEPYWQAHVQPDTIPQTLQEDLLLWGSRGPLIQDFHGALELFPAASYQYVLYGMGFKPDFTKQAYLYSHHVQAKQIIERNSQLTQQMLQTLPPHRAFIEQWLAANPV

SEQ ID NO: 89633 - protein, 538 aa, Sphingomonas olei
  misc_feature (1)..(538): tr|A0A4S4GE62|A0A4S4GE62_9SPHN Tryptophan 7-halogenase OS=Sphingomonas olei OX=1886787 GN=E5988_04200 PE=4 SV= 1
MDGRLLWVKRRVGAPTEVSVGVKRQVANIVIVGGGTAGWLAAATIAACADPTAQPPVQVTLIESPDVPTIGVGEGTWPTIRRTLARIGISEAEFLLACDASFKQGSRFDSWRNGAPDDSYLHPFSAPVEADPRALVAAWQAGGEPGFAAAVTPQARACALDLAPRQRAMPDYAGALNYAYHLDAVKLAALLRRHATQRLGVRHVRDHVLSVDRRHDGDIAAVRCRDHGAMEGDLFIDCTGHAALLIGGALGVPFIDRGHELFNDRALAVQVPVAAGSAIASTTNATAHEAGWIWDIGLPTRRGVGCVYSSAHLTDDAAEGILHAYLARTAPAADLDALAPRTLTFRSGHRTRFWERNCLAVGLSSGFLEPLEASAIVTIELALDALVANFPATRASMDAHADRFNALFRYRWDRIVDFLKLHYVLSDRDQPYWRDNRDRASIPHSLAGLLAIWREQPPSGHDLGMVDEVFPAASYQYVLYGMGMAPPPPGPMRIDGVPAASAALRQAAQRARALAASLPTNRAYLDALRADRQNEIIA

SEQ ID NO: 89634 - protein, 193 aa, Streptomyces albogriseolus
  misc_feature (1)..(193): tr|A0A1B1V585|A0A1B1V585_STRAO Flavin reductase OS=Stre ptomyces albogriseolus OX=1887 GN=thdF PE=4 SV=1
MTGAAGGVTTEQQHYRDLMSAFPTGIAVVTSLDAQGVPRGMTCSSVTSATLSPPTLLVCLRNGSATLDAVSATRGFAVNLLHDGGRHAAEVFSGPDPNRFSRVQWKQCRSGLPWLSKDAFAVAECRVSGTQEVGDHTVVFGEVARIAQTDGTPLLYGLRSFAAWPLPSESARQGSEAAPRGSEPAYGARSSRG

SEQ ID NO: 89635 - protein, 534 aa, Streptomyces sp.
  misc_feature (1)..(534): tr|A0A141R7F4|A0A141R7F4_9ACTN Halogenase OS=Streptomyc es sp. 551F OX=1517246 PE=4 SV=1
MSAEESRIRKVVILGGGTAGWMTASYLGKALQDTVEITVLEAPTIPRIGVGEATVPNLQRSFFDYLGIPEEEWMRECNASFKMAVRFINWRTEGRGEPNPRTLPGDGPDHFYHPFGLLPDHDQTPLSHYWFQRKHQGETTEPFDYACFREPPLMDAMKAPRHTDGTAATRYAWHFDAHLVADFLRRFATEKQGVRHVQDEMVRVEQDERGYVTALHTKGGQALDADLFVDCSGFRGLLINQALEEPFIDMSDHLLCDSAVATAVPHDDEANGVEPYTSAIAMSSGWAWKIPMLGRFGSGYVYSSKFTSPEEATREFCEMWGLDEESTTFNHIRFRVGRNRRAWVKNVVSIGLSSCFLEPLESTGIYFTSAAIYQLAKHFPDRNFHQGLVDGFNREIELMFDVTRDFLQAHFYYAPRTDTPFWKANKELELSENIKQKISAYKAGLPINTPITDESTYYGNFEAEFRNFWTNGSYYCVFAGLGLEPDAPLPSLAHRPASSAGAQPLFDEVKRTQNHLVETLPSALDYLKRLHGKD

SEQ ID NO: 89636 - protein, 510 aa, Unknown; identical to SEQ ID NO: 84044
  misc_feature (1)..(510): tr|A0A4S0FPK5|A0A4S0FPK5_9BACT Tryptophan 7-halogenase OS=bacterium M00.F.Ca.ET.199.01.1.1 OX=2563913 GN=EN842 _06945 PE=4 SV=1

SEQ ID NO: 89637 - protein, 238 aa, Streptomyces albogriseolus
  misc_feature (1)..(238): tr|A0A1B1V590|A0A1B1V590_STRAO Uncharacterized protein OS=Streptomyces albogriseolus OX=1887 GN=thdY PE=4 SV=1
MTSPSFPERSTTMLESTVPLGESDPGGILENIDVVVIDTETFAPFVEDAIEQYSLGLASVKAAGSRLHRPNSFGLLGGTFEGDAMIVKQVAFATNVRAVESVPLEEFKENIVPQFGKQYDDGERGFWCDSRELLKIVREFENAGLEMLGSVHMHPDWHRIGPAHERGTENLSENPSRMDEYLFRNAGWPLNIICYLESRGGGITHTYAAWRPPALDDPSGRARKVTVRHFAHGHVGSE

SEQ ID NO: 89638 - protein, 219 aa, Streptomyces platensis
  misc_feature (1)..(219): tr|V9XLW8|V9XLW8_STRPT Tryptophan 5-halogenase (Fragmen t) OS=Streptomyces platensis OX=58346 PE=4 SV=1
GGGTAGWMSASYLKAAYGDRINVTLVESDRVATIGVGEATFSTVRHFFDYLGLDEREWMPECSGSYKLGIRFENWREPGQHFYHPFERLRTSDGYTLADWWLQEGDRSEPFDRSCFITPALCEAKRSPRLLDGSLFAGGLDGSLGRSTLEEQRAQFPYAYHFDAALLAKFLTKYGTDRGVRHVVDDVTQVGRDERGWISHVATREHGDLTGDLFIDCSG

SEQ ID NO: 89639 - protein, 516 aa, Pseudoalteromonas fuliginea
  misc_feature (1)..(516): tr|A0A5B0UGR3|A0A5B0UGR3_9GAMM Tryptophan 7-halogenase OS=Pseudoalteromonas fuliginea OX=1872678 GN=EU508_0794 5 PE=4 SV=1
MTKPITKIVVLGGGTAGWLSAGLLAAEHPHLNVTLVESANVPILGVGEGTWPSMRNTLQRIGIKESDFITQCDASFKQGSKFINWRNLSEGENYYHPFMNPQGYEHTNLHASWQRIAPNQKFADVVNMQSFVCQAALAPKQLQTPEYAAVTNYGYHLDAGKFAEFLKNHCVKNLNVTHITDDVTEVINDDHGYIASLKTNNNGDITGDLFIDCSGSCARLIGDHFNSEFITQDHILFNNSAVAAQIPNAHINQPIASATLSIAQSNGWIWDIALPTRRGTGYVFSSKYQSDESATNTLKSYIAKSTSEQQAEQLTYRVLKFSPGYRQQFWIKNCVAVGMSAGFLEPLEASALAMVELSISMISEQLPQNRTHMSQLETRFNERFSTRWQRVIEFLKLHYVLSERDDTPYWQDISNLNTAPERLQNLLKLWQFQPPSRFDFIENEEVFSSSSYQYVLYGMGFNTQTVSAQNTFNDPRAGDYYYQQNREKIAQCLNGLPSNRALLNHLLSNNGQPHND

SEQ ID NO: 89640 - protein, 318 aa, Streptomyces albogriseolus
  misc_feature (1)..(318): tr|A0A1B1V583|A0A1B1V583_STRAO Putative LysR family tra nscriptional regulator OS=Streptomyces albogriseolus OX =1887 GN=thdR PE=3 SV=1
MTPTQLRAYAAVVRLGSVKGAAADLSVSEAAVSMHVAQLRKELGDKLFARTGAGLAFTPGGLRLASRATELLGLQDRTILEVSQAGSGRRLLRVATSSLFAEHAAPGLIELFAGRADDLDVELSVHSPQRFATLLRNRTVDVAIGPRPAAVDDGMKCTPFLNYQMVGVVGPDHPLAARRPGPGELRRQTWLLGPSAADRAGLVPSVLQQLQVDEENQRIFQSHAAALEEAKHGKGVALALSFSVTRALSGGELKQLLSPALPAKGSWNALALPGRDAPPAAAELMRFVTTPRALQAMLRGEGVTAGRFRPAIHVTLWS

SEQ ID NO: 89641 - protein, 220 aa, Streptomyces albogriseolus
  misc_feature (1)..(220): tr|A0A1B1V557|A0A1B1V557_STRAO Putative response regula tor OS=Streptomyces albogriseolus OX=1887 GN=thdL PE=4 SV=1
MIRVLVADDEPLIRAGIRMILTSADDIDVVAEAGDGREAVETARGTAVDVALLDIQMPVMDGLAALTELRRAAPDVRVLILTTFGERENVLRALGHGGVGFLLKDSAPDELIHAVRAAAAGNAYLSPAATRHVVDALASPGATTRADEARQRVDRLSARERDVLALLGEGLSNADAGRRLHMSEATVKTYVSRILTKLGCENRVQAALLARDAGMHPDGV

SEQ ID NO: 89642 - protein, 519 aa, Marinobacter sp.
  misc_feature (1)..(519): tr|A0A5B0VQN6|A0A5B0VQN6_9ALTE Tryptophan 7-halogenase OS=Marinobacter sp. ZYF650 OX=2604327 GN=FWJ25_02965 PE =4 SV=1
MKQSEKKVINIVIAGGGSAGWMAAAFLSEAFKTKDNKQYKISLVESDNIAPIGVGEATIHTMRGFLGACGIDEGEFLVATDATFKHGILFKDWLQKTAPDVPPHQYFHPFESFVHLSPEPQTSHWLNARLRGATTERYDRWAGIQGALAASGCAPKTWQNSQYEAPVNYGYHLDANKFAEFLKKTSIQKRVSHVRANITAVTLDELGNIRSLGLANGESIQGDLFIDCTGFSGLLNRAVGAQFIDYSNYLFCDQAVTLRYPRTGKDYQPRPYTTATARESGWTFEIDLQERTGLGHIYSSKHCSPEAAETALRNFFPDIDPAAEATHLKMKVGRLEKSWNKNCVALGLSSGFLEPLESTGLYFIEIALRLLVDYWDPLSQSAACREQFNSSFNATFDESMEFIVLHYVLSEREDTAFWRDIQTETGDLPALKSKLAMWEHKPPTDADFKNETIAFRAPNYSAVLYGMNWLPHEIPIGISHIPPEKSLENYTTMKKLQKMAVEGSPKHTEYLQKFTASFR

SEQ ID NO: 89643 - protein, 481 aa, Sphingomonas olei
  misc_feature (1)..(481): tr|A0A4V3WW27|A0A4V3WW27_9SPHN Tryptophan 7-halogenase OS=Sphingomonas olei OX=1886787 GN=E5988_04185 PE=4 SV= 1
MAAAAIARTMGRAAQVTLVESEAIGTIGVGESTIPPIVGFNRLLGINEAEFMAATNATFKLGIVFDGWRNGTDRYVHAFGLTGKDHWAAGFQHFWLAGRAKGHQAPFGDYSVELQAALAGKFAHLPDDRLNYAYQLDSGLYAKFLRGMAERDGAVRIEGKIATVQLDGDSGDIAALVLEDGTAIAGDLFLDCTGFRALLIEGALHAGFDDWTHWLPCDSAIAVQTASVGPAVPYTRAMAHDAGWQWRIPLQHRVGNGIVWCSRYLSREDALERLLGNVEGEVLTQPNHLRFTTGVRRRQWHRNCVAVGLSGGFMEPLESTSIHLIQRAVLRLIRMMPAAGPISPRDIAEFNDQQHADMVQVRDFLILHYKATDRRDSAFWRQCAAMPIPDSLEQKIELFRDTARVFRRNEELFAEHSWLQVLLGQGIEPHAWHPITGKLTDEELARLLQTLRAQVTRTVNGLPAHADYVARYCAGARQTAA

SEQ ID NO: 89644 - protein, 497 aa, Pseudoalteromonas fuliginea
  misc_feature (1)..(497): tr|A0A5B0U8J2|A0A5B0U8J2_9GAMM Tryptophan 7-halogenase OS=Pseudoalteromonas fuliginea OX=1872678 GN=EU508_1549 5 PE=4 SV=1
MKSIKHVVIAGGGTAGWITAALLNKVLGKVINITLIESSSISTVGVGEATIPPIIQLNNALGINEKEFINETNATIKLGIEFENWKNHSHSYMHAFGSFGKDFPFCDFYNFWVKGNITGSEDSLWDFSLNYQAAKQHKFAPLNTIPNTQLPGLSYAYHFDATLYAEYLKKLAISRGVKHIDAKISEVTQCLATGNVETLILDDNKQINGDLFIDCTGLRALLIEKTLNTGFVDWSHYLPCDSAIAVQTKSNDELKPYTQSIAHSAGWQWQIPLQSRIGNGLVYCSRYLSDEDAKALLLNNLPADPITEPRFIKFKTGRRVKQWHKNVVAVGLSSGFLEPLESTSIHLIQSAVTRLIKLFPHHGISDALASEFNKQNVTEIEHMRDFIILHYKLTERGDSAFWRQCKQMEIPDSLAHKLSLFKHTGKVVRENDELFAEVAWQQVFIGQGLIPDDYNSIVDSLSSEQLNDLFSTLKTLITSTVEQLPTHKDFLKEIKKA

SEQ ID NO: 89645 - protein, 496 aa, Glaciecola sp.; identical to SEQ ID NO: 86563
  misc_feature (1)..(496): tr|F4AS48|F4AS48_GLAS4 Putative tryptophan halogenase O S=Glaciecola sp. (strain 4H-3-7+YE-5) OX=983545 GN=Glaa g_2305 PE=4 SV=1

SEQ ID NO: 89646 - protein, 513 aa, Streptomyces violaceusniger
  misc_feature (1)..(513): tr|A0A1L1QK36|A0A1L1QK36_STRVO Thermophilic tryptophan halogenase OS=Streptomyces violaceusniger OX=68280 PE=1 SV=1
LNNVVIVGGGTAGWMTASYLKAAFGDRIDITLVESGHIGAVGVGEATFSDIRHFFEFLGLKEKDWMPACNATYKLAVRFENWREKGHYFYHPFEQMRSVNGFPLTDWWLKQGPTDRFDKDCFVMASVIDAGLSPRHQDGTLIDQPFDEGADEMQGLTMSEHQGKTQFPYAYQFEAALLAKYLTKYSVERGVKHIVDDVREVSLDDRGWITGVRTGEHGDLTGDLFIDCTGFRGLLLNQALEEPFISYQDTLPNDSAVALQVPMDMERRGILPCTTATAQDAGWIWTIPLTGRVGTGYVYAKDYLSPEEAERTLREFVGPAAADVEANHIRMRIGRSRNSWVKNCVAIGLSSGFVEPLESTGIFFIHHAIEQLVKNFPAADWNSMHRDLYNSAVSHVMDGVREFLVLHYVAAKRNDTQYWRDTKTRKIPDSLAERIEKWKVQLPDSETVYPYYHGLPPYSYMCILLGMGGIELKPSPALALADGGAAQREFEQIRNKTQRLTEVLPKAYDYFTQ

SEQ ID NO: 89647 - protein, 517 aa, Pseudoalteromonas fuliginea
  misc_feature (1)..(517): tr|A0A5B0U8Q4|A0A5B0U8Q4_9GAMM Tryptophan 7-halogenase OS=Pseudoalteromonas fuliginea OX=1872678 GN=EU508_1595 5 PE=4 SV=1
MNDDIKSIVIVGGGTAGWLSAGIIAAYLQKHHSKKINITLLESSDIPTVGVGEGTWPTMRRTLKDMGIRETEFIKKCNVSFKQGAKFAKWVTGENDDYYYHPLELPTGMFENNLATSWLNINNAQPPFAQYVSAQQSICESGLAPKQITTPEFSAIANYAYHLDAGLFATFLKNHCIDNLNVKHIVGTVVGVNNCTNGDIKSVSLNNKIEIAGDLFIDCSGFKSLLLGENLGVGFKSCKDVLFADSALAIHMPYKDDEPICSHTLSTAQTSGWIWDIGLQTRRGIGHVYSSKHISDEDAKQQLFDYLNINKDQQSEYKVKKLSFEPGHREKFWHKNCVAVGLSAGFLEPLEASALLLVEISANFVAQQFPANRHVMNITAQHFNRTFSYRWERIIDFLKLHYMLSKRTDSPFWQAHCHQNTIPQSLKDNLSLWEFHTPSDNHFDHSQEVFPAASYQYVMYGMGFTGSSELYGNSESYFKKAIALVNNNQQYTQKLLNKLPTNKALLAQINQFGMQQI

SEQ ID NO: 89648 - protein, 468 aa, Streptomyces albogriseolus
  misc_feature (1)..(468): tr|A0A1B1V591|A0A1B1V591_STRAO Putative FAD-dependent o xidase OS=Streptomyces albogriseolus OX=1887 GN=thdO PE =4 SV=1
MDRYPRNAGTVVSPADPDYERARRIWNNRFDCRPRAIMYPRDEAEAAAALGYARDNEVPFRIRSGGHNSEGFCTVDDGIIIDLSKLGSIAVNNDRTRAVISPGVMLGEVYANLWSVGGTIPAGVCPDIRIGGHVLGGGIGMLVRSRGLLIDNLVGLTVVDARGERLQVDADHHPDLFWACKGGGGGNYGIATSYTFEMRPISDVTIFKLQWDWQGGMAVLDAWQHWLLSADSRVNARFNVFSSTVGTVMTVGLFEGSADELKSILQPLVEKFPPRDSFVRTMPYMECVGTFSEQVPSIRAKFVPALSAGPLDADALKTLERWHKDAPTGVKTGLYGLGGEVLGSVSPDSSAFAHRDASICVEYLGHWQGAEHDREHLGWLSGVREEMDAFMTGGAYVNSPDRDLENWLHAYYGESLPRLMDVKRRYDPDNVFAFEQSIPGSLTLPEARAAGLTDTVVEDLRARGLLSA

SEQ ID NO: 89649 - protein, 500 aa, Glaciecola sp.
  misc_feature (1)..(500): tr|F4ASY0|F4ASY0_GLAS4 Tryptophan halogenase OS=Glaciec ola sp. (strain 4H-3-7+YE-5) OX=983545 GN=Glaag_3530 PE =4 SV=1
MLPIPQNITIVGLNVHGLLTALLLRKTYKPAVTGITLVGLKEEDSPPKAYIAGKALNTLLEHFGYSEANWMRQTQATFKLSNRYVGFSEQEFSVANASEVDILHQPLMLELSKLKRQAYQLDLSLDDFFFAAALAKRNLSPKAQDFPFETDYQYQVDANCLFTLLQKIAAEHSITTLPSTLETLQLDQHGTLKHIECEDQILSGDYFFDCTQSAQLLIGNMPDFRQETLPEVRINDRVLTYTLAVECCASEVVTTALDCGFVLQYTLQDAVHFQYHYSSKFIQDPQAVQLLERHISQQGYKKVLQRHLSASQAYLVSQPWIHNCLAVGPACGLTQGSEDHELSHTFAMLEQFVSSIQSPDDAKDVIKNYNHRIKSRFVYAHSYHSTLQLLNSRRNSPYWQTPQDANALTPIGRSLFSQWLSGEDLSVEPILDINGLTAWYALFSGLGHYPTGELKPHPKARAIQDNIQDMCRKLAGCCLNFQTHDNLIAEGKHHANVTAV

SEQ ID NO: 89650 - protein, 520 aa, Glaciecola sp.
  misc_feature (1)..(520): tr|F4ARR1|F4ARR1_GLAS4 Tryptophan halogenase OS=Glaciec ola sp. (strain 4H-3-7+YE-5) OX=983545 GN=Glaag_1077 PE =4 SV=1
MSHRSIKNILVVGGGSAGWLTAGIIAAEHQCNKQNSEIKVTLVESPEVNIVGVGEGTWPSMRNSLQRMGLSETDFIRHCGAAFKQGSKFVGWKNGADNDFYYHPFVIPNGYGQANQYSAWKTHGQGHAFADVVCAQSQICQAGLAPKQNATPEYAGVLNYGYHLDAGKFSQMLQQHCVQKLGVTYIQDHVEGVVSHDNGDIKALQTRANGELNADLFVDCSGARSLLLGQHFNVPFIDKKSVLFNDSAMALHVPYSTLDEPIASATISTAQEAGWVWDIGLQDRRGVGYTYSSKHTDDQQALRTLKAYVAQSVGGEVADSLSARKISFEPGHRSHFWHKNCVAVGLSAGFLEPLEASALALVELSATAIAENLPVTAQHMQITRDNFNRRFLLHWENIVEFLKLHYVLSERTEPYWQQMRAPDSVSPRLNDLLTQWRYQPPNRSDFVQNEIMFPSASYQYVLYGMGFETLNDVSSREFDAPQSAIKHLQENQQRLHKLMGGLKSNRQLLKHVVQYGFQKV

SEQ ID NO: 89651 - protein, 535 aa, Actinomadura melliaura
  misc_feature (1)..(535): tr|Q0H2V9|Q0H2V9_9ACTN Putative tryptophan halogenase O S=Actinomadura melliaura OX=360723 GN=atH PE=4 SV=1
MDSRIRNIVILGGGTAGWMAAAYLGKALQGTAKITVLEAPDIPKLGVGEATIPNLQTAFFDFLEIAEDEWMREVNASYKIAIKFINWRTGGEGSAQPRAAGGRSDHFYHIFGLLPFHQGIPLSHYWVRKKHLGQTAQEFDYACYREPLLLDANKAPRWMDGTRATNYAWHFDAHLVADYLRRFSTGKLDVEHIQDRMEDVTFDPNGYLTSLRTATGRVLTADLFVDCSGFRGLLINKAMNEPFVDMSDHLLNDSAVATAVPNDDAATGVEPFTSAIAMKSGWTWKIPMLGRFGTGYVYSSQFAGQDEAVKDFCDLWGLDPDRTNLNLIRFRVGRNRRAWVKNCVSIGTSSCFVEPLESTGIYFIYAALYQLVKHFPDKSFDPVLIDRFNREIETMFDDTRDFIQAHFHFAPRDDTPFWRANKELKLGDGMQDKMDMYRAGLPINNPPSDDASHYYANFEEEFRNFWNNGNYYCVLAGLDHLPPRPLPRLAHLPESVASAEALFARVSEEQRRLVESLPTNYGFLRSLHGHTEPGR

SEQ ID NO: 89652 - protein, 494 aa, Dactylosporangium aurantiacum
  misc_feature (1)..(494): tr|E9LIP1|E9LIP1_9ACTN Putative tryptophan halogenase O S=Dactylosporangium aurantiacum subsp. hamdenensis OX=7 03577 GN=tiaM PE=4 SV=1
MADAMPKVIVIGGGPGGSTAAGLLAKGGVEVKLLERAEFPRYHIGESITTSCRAIIDYVGALEKVNACGFTTKTGVLMRWGQEKDWVIDWTAQFGADTRSWQVDREIFDQVLLDNAADSGAEVVQQAHVKRVLFDGDRAVGVEWQPAGGELRTETADYVIDASGRAGLISAQHYNNRRPHEIFRNVAIWGYWENAELLPDSPAGGINVISSPDGWYWLIPLRDNRFSVGFVTHKTNFVERRREFDSQEAMLAAVLGESETMKQVLAQATQLPGVRIEQDFSYAADKFCGDGYFLVGDSACFLDPLLSTGVHLAMYSGMLSAASILSLQRGEVNEPEAQAFFESLYRNAYHRLFTLVISFYQQHAGKDRYFALADTLSRAAQGDTQSADLAFGEIIAGLTDLREAADRAGTAAAPITETIDAAATGGAKPVQELLGAAEQARLRAEESSPNQRVTMAPMYIDANDLYDAASGLYLVTEPRLGISRVTSEAAVAAG

SEQ ID NO: 89653 - protein, 534 aa, Saccharomonospora sp.
  misc_feature (1)..(534): tr|W5VG40|W5VG40_9PSEU Tryptophan halogenase OS=Sacchar omonospora sp. CNQ490 OX=1137271 PE=1 SV=1
MSVSGSERSAEGNRKKRVVIVGGGTAGWMTASYLTAAFGDRVDLTVVESAQIGTIGVGEATFSDIRHFFEFLRLEESDWMPECNATYKLAVRFENWREPGHHFYHPFEQMSSVDGFPLSDWWLRNPTTSRFDKDSFVMTSLCDAGVSPRYLDGSLIDQDFVEQERDDDSARSTIAEYQGAQFPYAYHFEAHLLAKYLTGYATRRGTRHIVDNVVDVALDERGWISHVRTEEHGDLEADLFVDCTGFRGLLLNKALGEPFVSYQDTLPNDSAVALQVPLDMEREPIRPCTTATAQEAGWIWTIPLISRVGTGYVYASDYTTPEQAERVLRDFVGPAAADVPANHIKMRIGRSRRSWVNNCVGVGLSSGFVEPLESTGIFFIHHAIEQIVKYFPSGGAGDDRLRELYNRSVGHVMDGVREFLVLHYRSAKRADNQYWKDTKTRTVPDSLAERIEFWKHKVPDAETVYPYYHGLPPYSYNCILLGMGGIDVNYSPALDWANEKAALAEFERIRVKAEKLVQELPTQNEYFAAMRAGR

SEQ ID NO: 89654 - protein, 222 aa, Streptomyces tosaensis
  misc_feature (1)..(222): tr|V9XPW3|V9XPW3_9ACTN Tryptophan 5-halogenase (Fragmen t) OS=Streptomyces tosaensis OX=285487 PE=4 SV=1
GGGTAGWMSAAYLQAALGANVDVTVVESKRIQTIGVGEATFSTVRHFFEYLGLSEHEWMPACNATYKLGIRFENWRHQGHAFYHPFERLRIVDGFPLTDWWLKQQPGERFDHDVFLMATLCDAQRSPRHMDGTLFEQDFVEAPAGVTERSTLSEQKTQFPYAYHFDAALLARFLTKYATDRGARQIEDDVVDVALDERGWIRHLVTKEHGEIAGDLFIDCSG

SEQ ID NO: 89655 - protein, 515 aa, Unknown
  misc_feature (1)..(515): tr|F6LWA5|F6LWA5_9BACT Tryptophan 5-halogenase OS=uncul tured bacterium AB1650 OX=1047164 GN=abeH PE=4 SV=1
MLKNVVVVGGGTAGWMTASYLTAAFGDRIGVTLVESKRVGSIGVGEATFSTVRHFFEYLGLEEKEWMPACNATYKLAIRFENWREPGHHFYHPFERQRVVDGFPLTDWWLREPRSDRFDKDCFLVGTLCDDLKSPRQLNGELFEGGLGGRSAYRTTLAEQTTQFPYAYHFDATLVANYLRDYAVARGVKHVLDDVQDVALDDRGWISHVVTGESGNLTGDLFIDCTGFRSLLLGKALAEPFQSYQDSLPNDSAVALRVPQDMENRGLRPCTTATAQEAGWIWTIPLFDRIGTGYVYAGDYISPEEAERTLRAFVGPAAEHADANHIKMRIGRSNRHWVNNCVAVGLSSGFVEPLESTGIFFIQHAIEQLVKHFPDERWDDGLRTAYNKLVNNVMDGVREFLVVHYYAAKRQDNQYWKDAKTRPLPDGLAERLERWQTRLPDNESVFPHYHGFESYSYVCMLLGLGGLDLKSSPALGLMDAAPARHEFKLVGEQAAELARTLPTQYEYFAQLHRAR

SEQ ID NO: 89656 - protein, 397 aa, Streptomyces albogriseolus
  misc_feature (1)..(397): tr|A0A1B1V567|A0A1B1V567_STRAO Putative cytochrome P450 OS=Streptomyces albogriseolus OX=1887 GN=thdC PE=3 SV= 1
MSAEFFPFPEEPLGAVPQSCAWRRESDPLGQVTLPSGDAVRLAVRFEDVEAVLTDPRFSRDLSKPGCPRLQSGADMSDDRDTLINMDPPRHTRVRRLLSRAFTVRNIEKLRPRIREIVQELVDDMAAAAPGPVDLMAGLAEPLPMRVIAGVLGVADSDLAQFRHWSYVAMSITPDMADERVTGREEFFAYLVDLIEQHRREPGTDLLDAMIQATEDGDRLSEAELCDTARSLLLAGHETTMTSIGRGIFTLLRHPEQYAQLVADPSLVPAAVEEVLRHDFPAEVGFLRVATQDVDLPSGQVRRGEGVMPLISSAHRDTKKFADPDRFDIHRVDNAHIAFGKGAHYCIGAYLARVQLQEAYDVIVRTFPDLRLAVPAEEIVWKPDMMTHAIAELPITW

SEQ ID NO: 89657 - protein, 606 aa, Streptomyces albogriseolus
  misc_feature (1)..(606): tr|A0A1B1V559|A0A1B1V559_STRAO Putative histidine kinas e OS=Streptomyces albogriseolus OX=1887 GN=thdK PE=4 SV =1
MMRALPPVAYRRSVEVEEAVTPRTARPLLTRLAAASPWGRYRIAGEAVLTVALAGIAGLFDAVGSGFGARTFVVVAGVALLSLTRRALPATALVLSAAAAGALIAAVPLLVYVSWSAGSRIVKPWRVAVAYAAALVAHTALTAHDEIGASSVASPVTAGALGAGVFLALAIVPGLAARYRAQRRALLGALRSNNAQLVREQAMVAREARLLERHRIARDMHDSLGHQLALISVHSGALQVDPELTDRQREGVRILREASVTAMGELREAVGILRDDRDDREGADGRDGRDGPNPAAGPGDGRPVRRPAASVDGLVESSRAAGAAVELHRSGVHRPLMPAVEQAAYRIAQEGLTNAHKHAPGAPISLALRYEPDSLVVEVANGPVPAGAARGPAVISGGQGLKGLRERARLVGGMVHTGPTADGGFRIAGMLPYGTGDGEPGPGPDGATSVGPGSDLVGQMRRGAAGDGGAVINRIDPPTEFTTIMTNKKNVAIGCAAVAVVLVGGVVAMGIWGTKELMKEMKKAEISPSVYESVKVGDAEADVQEKLPDGDSWTTSDLADQGPELPEGATCRHFTSDADESLDSLTVFRFCFRDGKLVAKDTFQAT

SEQ ID NO: 89658 - protein, 497 aa, Glaciecola sp.; identical to SEQ ID NO: 86468
  misc_feature (1)..(497): tr|F4AIE6|F4AIE6_GLAS4 Tryptophan halogenase OS=Glaciec ola sp. (strain 4H-3-7+YE-5) OX=983545 GN=Glaag_3730 PE =4 SV=1

SEQ ID NO: 89659 - protein, 494 aa, Microbispora sp.
  misc_feature (1)..(494): tr|A0A5J5JTM5|A0A5J5JTM5_9ACTN Tryptophan 7-halogenase OS=Microbispora sp. Gxj-6 OX=2614688 GN=F5972_31800 PE= 4 SV=1
MEREEFDVVVVGGGPGGATLAALVAMQGHRVLVLEKETFPRYQIGESLLPSTIHGVCKMIGVTDALAAAGFTHKKGGTFRWGAKPEPWTFSFSVSPKIASSTSYAYQVERSKFDKILLDNAVSKGAEVRFRTQVGDVIEEDGRVVGVTYSGEDGAERRAYARFVVDASGNGSRIYKRVGGTRVYSEFFRSLALFGYFEGGRRLPAPYSGNILSVAFNSGWFWYIPLSDTLTSVGAVVRRENAEKVQGDPEASLSALIDECPLIKDYLSGATRVTEGQYGQIRARKDYSYHQTTFWRPGFVLIGDAACFVDPVFSSGVHLATYSALLASRSINSALAGLVGEEEAFTEFEARYRREYGVFYEFLMSFYDMHRDEDSYFWSAKKVTHSGHTELESFVELVAGVSSSEFALRDAESAAVRMKDKSAEFAAAIDELAADREGNMAPLFKSSAVRQAMQEGAQVQSRAFLGEDLGPDVPMFPGGLVTSNDGLFWLPAKA

SEQ ID NO: 89660 - protein, 409 aa, Streptomyces sp.
  misc_feature (1)..(409): tr|A0A3B8GHH3|A0A3B8GHH3_9ACTN Tryptophan halogenase OS =Streptomyces sp. SoC090715LN-16 OX=1898658 GN=idmB26 P E=4 SV=1
MPEHHVRTTEYDVIVIGGGPAGSATAGLLARSGHDVLLLEREKFPRYHIGESLITGCMGVLEELGIRERVAALGFVEKYGGSLVWGRDGRWRFAFAEGKPEFPHAYNVRRADFDALVLTRARELGAHVLEQATVKEAVVDNGRVVGVRYVVRGGEEGEARARMVVDASGQARVLGRTLGGVDWQDDLRNVAVWSYYQDGEPLAGDETGNIFVEHVPGGWFWYIPLHDGTHSVGFVTAAEDAAATGLELPALFEAKVEESVHLKQYMKRAKRTDAFRTARDWSYVCREFAGPGWMLVGDAAGFVDPLFSTGVTLAMLAGRAAAEAIPVILKDPERESTVQARYDKSYREFLGTILSFVRYFYDVGLDRDAYYQYAQALVDPGQLFFPRKDFVTLISGLNSLQPVFDLDVD

SEQ ID NO: 89661 - protein, 494 aa, Glaciecola sp.
  misc_feature (1)..(494): tr|F4ARB6|F4ARB6_GLAS4 Tryptophan halogenase OS=Glaciec ola sp. (strain 4H-3-7+YE-5) OX=983545 GN=Glaag_1076 PE =4 SV=1
MNSEKVKNVVIAGGGTAGWMAAASLSKLLGKSLNITLVESDEIGTVGVGEATIPPIRTLHKLLNIDEQAFMRATNSTFKLGIEFSHWGQKNDSYIHSFGVTGKECWAGEFHHFWLRGKELGINVPFGDYCYELQASKQGKFAFSANSPMNFAYHLDATLYAQFLRDFCADVVTRIEGKIATVNKHTNNGFIRSLTLESGQEVEGDFFIDCTGFKGLLIEGALHTGYEDWSHWLPCDSAVAVQTQSTSDPLPYTRATAHDFGWQWRIPLQNRVGNGMVFCSRYASDEQAKQALLANLEGNPITEPRVIKFKTGRRRKGWNKNCVALGLASGFVEPLESTSIHLIMTGIVRLMRLFPFDGVRQSGIDEYNEKLTSELHSIRDFIVLHYKVTQRDDSDFWRHCQSMEVPDTLAHKIHLFKETGRVFLDDGDIFRVDSWTQVMLGQGLEPKQYHRIVNEMSEEELTRFLAGLRSAIEQRVNQLPSHQQFITRYCNASA

SEQ ID NO: 89662 - protein, 495 aa, Pseudoalteromonas fuliginea
  misc_feature (1)..(495): tr|A0A5B0UEV3|A0A5B0UEV3_9GAMM Tryptophan 7-halogenase OS=Pseudoalteromonas fuliginea OX=1872678 GN=EU508_0795 0 PE=4 SV=1
MTKTNAVKNVVIAGGGTAGWMAAAALAKLVGNNISITLVESDDIGTVGVGEATIPPIRTFHKLLGINEQAFMKATQASFKLGISFENWGDENTHYIHSFGATGKECWAGEFHHFWLQGKALGINNPFGDYCYELQAAKAGKFAFNQQNPINYAYHMDATRYAQFLREFSEPLGVKRIEGKIQKVVKNTKTGHIESLILNNSEHINGDFFIDCTGFRGLLIEQALHTGYEDWSHLLPCNSAIAVQTKSTSDTVLPLTRSIAHKSGWQWRIPLQNRVGNGLVYCSQYMDDEQAKALLLNNIEGEPLTEPRIIKFKTGRRLKGWNKNCLALGLASGFVEPLESTSIHLIMSGIIRFMRLFPFNGITNHAIDEYNKQLKSEIENIRDFIVLHYKVTNRDDSEFWQHCNAMEVPKTLQHKIDLFKQTGRVFLDDGDIFRVDSWVQVMLGQGIEPNQHHLIASMMSDEELTRFLHGIKQQIEQRVSQLPSHHEFLKQYCPA

SEQ ID NO: 89663 - protein, 499 aa, Glaciecola sp.
  misc_feature (1)..(499): tr|F4ASX5|F4ASX5_GLAS4 Tryptophan halogenase OS=Glaciec ola sp. (strain 4H-3-7+YE-5) OX=983545 GN=Glaag_3525 PE =4 SV=1
MKKTAITILGGGTAGWMTAAILAKGLPKDKFHICLVESPDISSVGVGEATIPPMTSLLAYLELDESSFLKRLNGTFKYGIQFENWSELGNQYMHAFGDIGTPLGTLSFTQAWLKSAAALNFNELGSYIPSAVAAKTGKFHPAVDIPQGANPTHFYPLSLLFYAYQFDATELASLLKEYAIDRSVEHIEGMVNRVNNKRNGDISSLSLRDGRNIAGDYFVDCSGMRGRLNKSHFGCEFDDWSNELPCNSAIAVQTKRDTPAAPYTKSIAMSAGWRWEIPLRDRTGNGYVFSSRFLTDEQALQELNEALAGEQFITEPRIIHFKTGCLTTPWHRNSIAIGLASGFTEPLESTSIHLIHKYALELKDALLYGQDLAHEAKRFNHMFYQEALSIKDFLLAHYHVSKRTDSPFWQHCMNMPITQTLQNYLAEFARNGYINLPESSLFPFQSWFQVLVGQGYLADYCAFSDKQFDAQQAKPFFNNVKLAIQSEVARLAPHQSYLQ

SEQ ID NO: 89664 - protein, 498 aa, Glaciecola sp.; identical to SEQ ID NO: 86555
  misc_feature (1)..(498): tr|F4AS47|F4AS47_GLAS4 Tryptophan halogenase OS=Glaciec ola sp. (strain 4H-3-7+YE-5) OX=983545 GN=Glaag_2304 PE =4 SV=1

SEQ ID NO: 89665 - protein, 517 aa, Glaciecola sp.
  misc_feature (1)..(517): tr|F4ANR0|F4ANR0_GLAS4 Tryptophan halogenase OS=Glaciec ola sp. (strain 4H-3-7+YE-5) OX=983545 GN=Glaag_1905 PE =4 SV=1
MDQAIKSIVIVGGGTAGWITAGTLAAKLQNEHADGFKITLVESPDVKPIGVGEGTWPTMRRTLKAMGIRETDFIRECNVSFKQGAKFAQWVTGAEDDFYYHPLVLPQDFDSTNLARHWMAHPFEQSFSQAVSPQEAVCETGLAPKTIATAEFTSIINYAYHLDAGRFSAFLQRHCIEKLNVHHILDNVSKINAAENGDIASVSTKANGDIAGDLFIDCTGFKSLLLGEHFKVRFKSCKDVLFVDQALAIHVPYDTDDAPIASHTISTGQSAGWVWDIGLQNRRGVGHVYSSAHTTEQRASEELLNYIAQTGGKVNEADIRSIGLNPGHRETFWRQNCVAVGLSAGFLEPLEASSLLLVEISAAMIADQFPATRDAMDIVAKRFNHTFLYRWERIIDFLKLHYMLSKRNDSAFWIDNRDTATIPQSLQEQLTLWQFQPPWHNDFEHAVEVFPAASYQYVLYGMGFYTKPNELGMSQAYQQKASALRQKNSQQVQQMLKNLPDNRGLINKIHQFGMQRV

SEQ ID NO: 89666 - protein, 494 aa, Pseudoalteromonas sp.
  misc_feature (1)..(494): tr|A0A0X8XVI1|A0A0X8XVI1_9GAMM Tryptophan halogenase OS =Pseudoalteromonas sp. An33 OX=1719994 PE=4 SV=1
MNQNAIKKIVIAGGGTAGWMCSAAMAKLLGKNIEVCLVESDLIPTVGVGESTIPTLHIFHDLLKISESEFMAATNATFKLGISFEGWKQNQQSYFHSFGYVGQGCWAAGFQHFWLKGMQQGVAADIGDYCTEHVASRLGKFAVVPNQDRNHAYQLDAGLYAKFLRNFAEQNGAKRIEGMISKVNLEPTNGFIKSLTLGDGQIIEGDLFIDCTGFKGLLIEQALHTGYEDWSHWLPCDSAVAVQTELVSPIVPYTRAMAHKCGWQWQIPLQSRRGNGLVFCSKYMSDDEAKTALLNNVEGKLINEPRVIKYRTGTRRKHWNKNCVAIGLASGFIEPLESTSIHLIQQSIIRLMQNMPTKAIESCYQDDFNNKMRFEAENIRDFIVLHYHVTQRTDSDFWRYCKNMPIPESLAKRIELFKQSGHVYKVEQELFGEASWLQVMLGQGLLPQNYHPIVDSMSDDELKRFLESIKTHAAKKANSLPSHIDFINHYCKAK

SEQ ID NO: 89667 - protein, 533 aa, Streptomyces sp.
  misc_feature (1)..(533): tr|A0A4S2VCZ2|A0A4S2VCZ2_9ACTN Tryptophan 7-halogenase OS=Streptomyces sp. A0592 OX=2563099 GN=E6U81_19100 PE= 4 SV=1
MTSTDTRLQKVVILGGGTAGWMTAAYLGKALQGTVDITVLEAPTIPRIGVGEATVPNLQRSFFDYLGIAEDEWMRECNASFKMAVRFVNWRTDGQGESTARELPGGGPDHFYHPFGLLPDYDQTPLSHYWFKRKYEGRTTEPFDYACFREPPVMDAMKAPRWLDGRPATRYAWHFDAQLVADFLRRFATEKQGVNHVQDEMVRVEQDSRGYVTTLHTKGGLALDADLFVDCSGFRGLLINQALQEPFIDMSDHLLCDSAVATAVPHDDAAGGVEPYTSAIAMSSGWAWKIPMLGRFGTGYVYSSKFADQDTATREFADMWGLDVEETKFNHIRFRVGRNRRAWVKNVVSIGLSSCFLEPLESTGIYFITAAIYQLAKHFPDKTFNEGLVDSFNHEIEVMFDDTRDFIQAHFFYAPRNDTPFWQANKKLVLPDNIKQKISAYKAGLPINSPITDESTYYGNFEAEFRNFWTNGSYYCIFAGLGLEPDAPLPTLAHRPESVAGAEPLFDTVKRQQQNLLETLPSAYDYLRQLHGA

SEQ ID NO: 89668 - protein, 542 aa, Hapalosiphon welwitschii
  misc_feature (1)..(542): tr|A0A075X6F6|A0A075X6F6_9CYAN Halogenase OS=Hapalosiph on welwitschii UH IC-52-3 OX=1524913 GN=welH PE=4 SV=1
MLTQNTTNVVIVGGGTAGWMTASYLSKALQRNISITLIESSNITKIGVGEATFSSIKSFFDFLGLQEHEWMPKCNATYKMAIKFVNWNTNKKHFFHPFERLDIVDGFSISEWWMKLKKHSEPFDYSCFAAPTLCDSQRSPRYLNGEVFDSRVKQLFSDEHFSEKRLITLADAEGQYPYAYHFDANLIAKFLKDYAMQRGVKQIVDDVMDVKLTTEGSIDCVHTKGNRSITGDLFVDCTGFRGLLINKALSEPFISFSESLLCDSAIAMQVPTNIKKDGINPYTKATALSSGWVWEIPLYGRNGAGYVYSSAFISKEDAEQEFRQHLGPVCQHQQASHIKMRIGRNRNSWVKNCVAIGLSSGFVEPLESTGIFFIQHGIEELVSHFPSNSLNEELIKSYNQAIAKCIDGVRDFLILHYHASDRTDTPFWKATKHDIQLPDELSQRFKLWKKRLPNKKNINPYFHGFETYSYSVMMLGLNHVPESSLPIMEYMDDHKATAQFRSIKEKTELLNSTLPSQYEYLTYVMKSQEQSEYLNENLLDAV

SEQ ID NO: 89669 - protein, 496 aa, Glaciecola sp.
  misc_feature (1)..(496): tr|F4AP63|F4AP63_GLAS4 Tryptophan halogenase OS=Glaciec ola sp. (strain 4H-3-7+YE-5) OX=983545 GN=Glaag_4254 PE =4 SV=1
MQKDSIKHIVIAGGGTAGWMTAAALGKLFGANIKVTLIESDAIPTVGVGEATIPTLHLFHDLLKIKESEFMAATNATFKLGIKFEDWYQRNQSYIHSFGRFDHGCWAAGFQHFWLRGRQLDIASEIGDYCPEHLACRMGKFATAPKQERNHAFHLDAGLYAKFLRDFAEQYGVRRIEGKIDNVNLNHNNGFIQSLSLESGQRVEGQLFIDCTGFRGLLIEQALHTGYEDWSHWLPCDSAVAVQTELNESNVPYTRSIAHDAGWQWQIPLQTRVGNGLVFCSKYISDDEAKTQLLDNIRGKTLNTPRVLKFKTGVRRKLWNKNCVAIGLAGGFIEPLESTSIHLIQQSIIRLMQSLPSAHMESPIIDKFNATMRNEIDNIRDFIILHYHATARKDSAFWRYCKDMPIPTSLHERMEQFAHSAHVHQGNGELFGEASWLQVMLGQGITPKAYHPIVDLMPVQELASFLDNVKQQTARRVSSLPNHLAFIRYYCKRAAV

SEQ ID NO: 89670 - protein, 502 aa, Erythrobacter sp.
  misc_feature (1)..(502): tr|A0A5E7ZPB6|A0A5E7ZPB6_9SPHN Tryptophan halogenase OS =Erythrobacter sp. EC-HK427 OX=2038396 GN=ERY430_80428 PE=4 SV=1
MNEEAPYDYVIAGGGTAGWMAAAGLARFAPPGTRIALVESDAIGTVGVGEATIPQIHLWLNALGLDEREFLIKTKASFKLGIAFDGWLREGHSYMHAFGQVGRAHGLLPFQHYWLRAKAAGFAKPLAAYSLNEVAARNLRMAKGQPGALPYAYHFDAGLYAQHLRAFAEMRGVVRIEGTIGDVVCDGESGDIAALLLDGGRRVAGKFFMDCSGFRALLIEGALGAGFDDWSHYLPCDRAMAVACDSGGEFTPYTRSIARKAGWQWRIPLQHRIGNGMVFSSAHLSEDEAAATLLANLDGAPQGDPRPIRFTTGKRKEHWKNNCLALGLAAGFMEPLESTSIHLVQSAVSRFLSVLPGTTGTQATRNWFNSQADFEWQRIRDFLVLHYHANQREGEPFWDDVRHMALPDTLVAKLDLWRATGFIHREHEELFTEVGWFQVLAGQGVAAESYNPMADSLSEAELRLMLDQTEAAIANQTRPMQGHIQFLQNYASGPSPRVEVPA

SEQ ID NO: 89671 - protein, 537 aa, Burkholderia cepacia
  misc_feature (1)..(537): tr|Q9RPG7|Q9RPG7_BURCE Tryptophan halogenase OS=Burkhol deria cepacia OX=292 GN=prnA PE=4 SV=1
MSHPIKNIVIVGGGTAGWMSASYLVRALQQQANITLIESEAIPRIGVGEATIPNLQKVFFDFLGIPEREWMPQVNGAFKSAIKFVNWRKSPDRSRDDHFYHLFGSVPNCDGVPLTHYWLRKREQGFQQPMEYACYPQPEALDARLAPCLLDGTRQMPHAWHFDAHLVADFLKRWAVGRGVTRVVDEVVEVHLNERGDIASLSTKEGRTLEADLFIDCSGMRGLLINQALKEPFIDMSDYLLCDSAVASAVPNDDARVGIEPYTSAIAMNSGWTWKIPMLGRFGSGYVFSSKFTSRDQATADFLNLWGLSDKQPLNQIKFRVGRNGRAWVNNCVAIGLSSCFLEPLESTGIYFIYAALYQLVKHFPDTGFDPRLRDAFNAEIVYMFDDCRDFVQAHYFTASRDDTPFWLANRHDLRLSDAIKDKVERYKAGLPLTTTSFDDATYYETFDYEFKNFWLNGNYYCIFAGLGLLPDRSLPLLRHRPASVDKAEAMFARIRREAERLRASLPTNYDYLRSLRDGEAGRARSRPGPVAAPETL

SEQ ID NO: 89672 - protein, 510 aa, Kitasatospora aureofaciens
  misc_feature (1)..(510): tr|A0A0L8NXQ2|A0A0L8NXQ2_KITAU Tryptophan halogenase OS =Kitasatospora aureofaciens OX=1894 GN=ADK78_40550 PE=4 SV=1
MGERAVANSANAGNPANPETYDVVIVGGGPAGSTLGALVARQGHRVLILEKEFFPRYQIGESLLPSTVHGVCRLTGVADDLAAAGFTRKRGGTFRWGATPEPWTFSFSVSEHMAGPTSYAYQVERSKFDEILLRHAGRCGAEVREGCAAADVIADEERVRGVRYTDADGAEREAYGTFVIDASGNKSRLFQRVGGQRTYSEFFRSLALFGYFEGGKRLPEPNSGNILSVAFDSGWFWYIPLSPTLTSVGAVVRREMAEKIQGDQEEALRALIAECPLISEYLADARRVTTGQYGQLRVRKDYSYHQTTFSRPGMLLVGDAACFVDPVFSSGVHLATYSGLLAARSINSVLAGLVDEAVALREFEARYRREYSVFYEFLLSFYEMHHSEQSYFWQAKKVTHHKRSEMEAFVDLVGGVSSSETALTDADAMAERLRADSAEFAGAVDQLAHSEDGSMLPLFKSSVVSQVTREGSQVQMRALLGADAEPETPLLPGGLVSSPDGMFWLPASSG

SEQ ID NO: 89673 - protein, 219 aa, Streptomyces erythrochromogenes
  misc_feature (1)..(219): tr|V9XQZ2|V9XQZ2_9ACTN Tryptophan 5-halogenase (Fragmen t) OS=Streptomyces erythrochromogenes OX=285574 PE=4 SV =1
GGGTAGWMSASYLKAAYGDRINVTLVESDRVATIGVGEATFSTVRHFFDYLGLDEREWMPECSGSYELGIRFENWREPGQHFYHPFERLRTSDGYTLADWWLQEGDRSEPFDRSCFITPALCEAKRSPRLLDGSLFAGGLDGSLGRSTLEEQRAQFPYAYHFDAALLAKFLAKYGTDRGVRHVVDDVTQVGRDERGWISHVATREHGDLTSDLFIDCSG

SEQ ID NO: 89674 - protein, 472 aa, Rubrivivax sp.
  misc_feature (1)..(472): tr|A0A519HVU0|A0A519HVU0_9BURK Tryptophan 7-halogenase (Fragment) OS=Rubrivivax sp. OX=50259 GN=EOP39_20795 PE =4 SV=1
RAEVVLVESPDIGTIGVGEATLPPIRAFNRTLGLDGADFVKKTQGSFKLGIEFRDWGKVGNRFFHGFGDFGPAIDGRMPWQHWLRLEKSVGNLPSYEEWSTSSVMAKANRFKPPVDGPPSAANAYSFAYHFDAGLYAAYLREYAIERGAQRIEGLIVGVELRPEDGFVAAVKLADGRRIEGDLFIDCSGFRALLIGGAMQSPYEDWSALLPCNSAQAVPSARVEPLTPYTTSTAKAAGWQWRIPLQHRTGNGHVYCNHFISDDEAAATLLSGLDSAALDTPRQLRFITGRRKQSWVKNVVAIGLAGGFLEPLESTSIQLIMDAVGRLIQFFPDRSFKPHLAAEFNRRMSVQYESVRDFIVLHYKLTERQDSELWRYCAAMPIPDTLAHQIELFRSAGRVTILDPDGFAEPSWVSLFLGLGLKPEALDPFIDLIDEGALVQHFARLRQAIHQTVAGMPGHGDYINRHTKAPPA

SEQ ID NO: 89675 - protein, 505 aa, Kitasatospora aureofaciens
  misc_feature (1)..(505): tr|A0A0L8PH98|A0A0L8PH98_KITAU Tryptophan halogenase OS =Kitasatospora aureofaciens OX=1894 GN=ADK78_14765 PE=4 SV=1
MSASYLKAAFGDRLSVTVLESKRIKTIGVGEATFSTVRHFFDYLGLPEHVWMPKCNATYKLGIRFENWHRKGSYFYHPFERLRVVDGFPLTDWWLHRKPGNSERFDQDVFLMSAICDAERSPRYMDGTLFEQDFKEQTDPKDRKPERSTLTEQDTQFPYAYQFDASLLADYLCAYSTERGVRHIEDDVVEVARDDRGWIGHLRTREHGEVTADLFIDCTGFKGLLLNEALEEPVISFQDTLPNDRAVALRVPVDMEKRGLRPCTTATAQDAGWIWTIPLFGRIGTGYVYASDYTTPEEAERTLREFVGPDAKDVEANHIRMRIGRSRNAWVNNCVAVGLSSGFVEPLESTGIFFIQQGIEQLVKHFPGADWNPQLRDSYNRAIGNTIDGVREFLVMHYRGAGRNDNQYWKDAKTRALPDGLAERLDMWRSKLPTTETIFPNYHGFEPYSYHSMLLGLGGVDLKAPPALALMDDSAAQAEFKLLRAQSQELAKRLPSQYEYLAQMH

SEQ ID NO: 89676 - protein, 516 aa, Erythrobacter sp.
  misc_feature (1)..(516): tr|A0A5E7Y996|A0A5E7Y996_9SPHN Tryptophan halogenase OS =Erythrobacter sp. EC-HK427 OX=2038396 GN=ERY430_40637 PE=4 SV=1
MNKRSIEGHGAIGSIVIVGGGTAGWMTAAACSRYLADGARSITLVESDEIGTVGVGEATIPPIINFNRMLDIDENAFLKATKGTFKLGIEFVNWGQQGDRYFHPFGAYGEDLHGVPFHQLWLREKHLGEPGQIADYCISAAAAAARRFGRPVRDPKSPLARLFYAFHFDAGLYAAFLRQIAERQGAKRQEGRIVKVHRHSESGDVTSVELEGGRLVEGDLFVDCSGFAGLLTAKELETPWRDWSHWLPADRAIAVPTANVGTPDPFTRSTAHGAGWQWRIPLQHRTGNGHVFSSRFMDEDAARDILLANLEGAALADPRTIRFATGRREQAWSHNVVAIGLSSGFLEPLESTSIHLIQNGIQRLLALFPGKPISPVERDEYNRGMADLFDDIRDFIILHYKATQRDDTAFWRYVRDMEIPDTLARKIDLWRLHGRVFREGADLFNVTSWVAVLLGQNIAPSAYDPVVDSLDESRVSLALRQMREGYARAAQSLPVQEEFLRRAGAWAEEPQLTGAW

SEQ ID NO: 89677 - protein, 510 aa, Rubrivivax sp.
  misc_feature (1)..(510): tr|A0A520C2J6|A0A520C2J6_9BURK Tryptophan 7-halogenase OS=Rubrivivax sp. OX=50259 GN=EOP35_03520 PE=4 SV=1
MKHVCVVGGGTAGWMTALMLATSAYGPRLKVTVLESPQVGIIGVGEGSTPWLRGFFEGLGIEESEWMPACNATYKSGISFENWSTNPGFERYFHPFASMLDNLTMHQFVDNVHERLGGADVHAHPDRFFVAAALARQGRGPRAHANFPFDVWYGYHFDATLLGQFLAARAVARGVRHLQRHVSEVRLDERGDIGHLQLDDGDTLAADLFVDCTGFASLLIGQALQTPFIPYAENLFNDSAIAMPTPLDGPIASQTVSTALRHGWAWKIPLTNRHGNGYVYSSAHCSADQAETELRTHLGLLDADVPARHLKMRVGCMAKVWNRNCVAIGLSQGFIEPLEATALLFVQRTAAMLVEVLEKGDLGPASQSAFNEAMHTRFENTRDYIVAHYKTNSRTDTDYWRENADNMHLSDSLQGVLMTWMSRKPLVAGLNAGRFGQGYPTVSWYALLAGMGIFPDVQDLQPPTEHQARHRLESVDDFVERSALNFPDHRELLSNIPARVSDKSLQLYLW

SEQ ID NO: 89678 - protein, 510 aa, Rubrivivax sp.
  misc_feature (1)..(510): tr|A0A519IMB5|A0A519IMB5_9BURK Tryptophan 7-halogenase OS=Rubrivivax sp. OX=50259 GN=EOP39_00195 PE=4 SV=1
MNERLRHVIVLGGGSAGWLTAGLLAAEHPDLHITLIESSDVPTIGVGEGTWPSMRDTLRRIGLSEADFIRRCHVSFKQGSRFDGWVHGASGAKGDRYYHPFMLPLGYGDAELVQAWLAAQPGRPFADVASPSVQVCEAGLAPKQVQTPGFAAVANYAYHFDAGLFGQLLREHAVAKLGVHHVIDHVDAVTAHENGDIAALQTREHGALTADLFIDCSGLASRLIGQHFGVPLKSERDVLFNDAALPVQVPYAEADAPLASVTIATAWAKGWIWDIGLPTRRGVGCVYSRAHASDDEAQAAMQAYLDATGTPPERPAPRSLRFDPGYRERFWVGNCVAIGLSSGFIEPLEASALAMVELSAQRLCDELPMARSSMAAVAQRFNDDFSYRWARVIDFLKLHYALSQRDDSDYWRAHRDPDTWPQRLRELLPQWQLRAPARHDFGRIDEVFPSASYQYVLYGMGFRPDMHELSANKLQAAQACFDEAARQARRYLSALPSHRSLISHIRKTEP

SEQ ID NO: 89679 - protein, 512 aa, Rubrivivax sp.
  misc_feature (1)..(512): tr|A0A519IEE7|A0A519IEE7_9BURK Tryptophan 7-halogenase OS=Rubrivivax sp. OX=50259 GN=EOP39_07445 PE=4 SV=1
MPDGGPLRRIVIVGGGTAGWMAAAPLGQLLGGGDLAGSCEIVLVESPEIGTIGVGEATLPTIRYYNNSLKLDNSEFIRKTQASFKLGIEFKDWGHLGHRFFHGFGEFGPSILNRSSVHHWLRLHGQAGGMGYEDLSTATVMALRNRFVPPEGDIASAANAYSYAFHFDAGLYAAFLRDYAMAHGVKREEGTIVDVSLRPGDGFVTAVTLSDGRRIEGDLFIDCSGFRALLIEGVCRVGYHDWTHWLPCDSAQAVPCDRVDPLTPYTTSTARSAGWQWRIPLQHRTGNGHVYCSGYTSDDEAGRVLMGSLDGAAQGDPRQLRFKTGMRKKAWERNVVAIGLSSGFLEPLESTSIQLIMDGIGRLIELFPDRRCDLHLSAEYNRRMSRQYESIRDFIVLHYKLTKRDDSEFWRYCAAMPIPDALHHQIELFRRSGRVAILDPDSFAEPSWLSLFLGLGLWPERHDPLLKQVDEQALRTHFQRLRDAISHNVNDMPDHGAFIARNVRAPAMEMSA

SEQ ID NO: 89680 - protein, 496 aa, Rubrivivax sp.
  misc_feature (1)..(496): tr|A0A520BF19|A0A520BF19_9BURK Tryptophan 7-halogenase OS=Rubrivivax sp. OX=50259 GN=EOP35_21800 PE=4 SV=1
MTAAYLAKALRLPERPHLEVTLLESPDIGTVGVGEGTFPTIRNTLQFLGIDEAHFIRETSATLKQGIRFVDWTHTPTEGRHQQFFHPFEAPFYAEDVNLVPYWLLQDEATRPPFAQALTLQQRVAEAQRAPRRAGEAPYTAPLNYAYHFDAIKLARLLADRARELGVRHEQGTVTDVTLDARGAIAQLHTLQGRFEADLYIDCTGFRADLIGRALGSPLKSCRGQLFADRALACKLPDARPDGPDAPLESCTIATAHEAGWLWEIGLNGARGIGCVYSSSHMSDQRAAEVLRGYIGPGHEDVALRSIPFAPGYREQQWVKNCVAVGLSAGFLEPLEATGLVLIEAAVGMIAEMLPHSGPIEAPARRFNELMALRFDNIINFLKLHYCLSQRDEPFWRDNADPATIPERLADLLEQWKLRPPGRFDFVLDTETFAFFNYQYILYGMGFHTDLAAGRADFTQADQAAKLFAKIQRFADRALVELPSHAALIRQINAGK

SEQ ID NO: 89681 - protein, 517 aa, Rubrivivax sp.
  misc_feature (1)..(517): tr|A0A519ECG4|A0A519ECG4_9BURK Tryptophan 7-halogenase OS=Rubrivivax sp. OX=50259 GN=EOP37_08490 PE=4 SV=1
MQPIQDILIVGGGTAGWLTAAFLARQLGTAHGGVRITLVESSDIGIIGVGEGTFPSIRGTLSAIGIGEAEFLDACSATYKQGIRFEHWVRPPGAAGADHYFHPFSQPSQRPGAPELLPYWLIGEAGQGRAFAEAVTLQKAVADARHGPKRASDGDFLGPLNYAYHFDAGRFAALLAEHGQALGVKRVIATVDRVDLDEQGAIAAVHTKEAGTLTAGLYVDCSGFRARLIGEALGSPFKSLNDVLFVDRALAMQVPYARPDAPIASYTIASAQDHGWIWDIGLQERRGIGHVYSSRHCDDEEAERTLRRYIGPASDTLTPRKLVLDVGYRETQWVKNCVAVGLSGGFLEPLESSGIGLIETAAYLIGQLFPFNGDTAPVAKHFNAFMKERYARIVDFIKLHYGLTQRTDTAFWRDNADPASFTDTLKEKLAMWRCRPPQRLDFVTDVEMYLPASWQYVLYGMEFKTQLGTGAAALMRSEEARKEFATIAQLGAHALRDLPPHRVLIEQLLARTGKRAA

SEQ ID NO: 89682 - protein, 511 aa, Erythrobacter sp.
  misc_feature (1)..(511): tr|A0A5E7Y3N5|A0A5E7Y3N5_9SPHN Tryptophan halogenase OS =Erythrobacter sp. EC-HK427 OX=2038396 GN=ERY430_40636 PE=4 SV=1
MAGEPISKVVIVGGGTAGWMAAAALSRVFGAMPALSVELIESEAIGTVGVGEATIPQILVFNRMLGLDEDEFVRETHATYKLGIEFVDWLRKGHSYIHPFGFYGLDMLGVEFHHFWLRAKELGEDLPLDPYSISAMAAQFSKFDRPRNDLPNSPLAKLGYAFQFDAARYARFLRRRAEAQGVVRTEGRIVRVEQDPDSGFVTAVQLDDGQRIAGELFIDCSGFRSLLLGETLGVAFNDWSKWLPCDRAVAIPCELGGKDQPLTRSTARPAGWQWRIPLQHRIGNGHVYSSAHMEEQEAIDLLLANLDGKPLAEPNRLRFRAGHREKSWDKNVVALGLAGGFLEPLESTSIHLVQQGIARLMTLFPTRDFGEAERARYNRLCAQDYLDIRDFLVLHYRATERDDSDFWNYCRTLDPPDGLLEKLEMYRSSGRVFREHNELFTETSWLSVMAGQGLVAGGYHPAVHLMDDAEVLRRLAHIREVIGNTVAQMPSQREFFQRHGSAMREEALVAS

SEQ ID NO: 89683 - protein, 496 aa, Erythrobacter sp.
  misc_feature (1)..(496): tr|A0A5E7ZVJ5|A0A5E7ZVJ5_9SPHN Tryptophan halogenase OS =Erythrobacter sp. EC-HK427 OX=2038396 GN=ERY430_80422 PE=4 SV=1
MSAPTPPHIVVLGGGSAGWITACLLHHRWGARGGRVTVVESPDIGIIGVGEGSTPQLKAMFDHLGITEAEWMAACDATYKLGIRFSGWSERAGFESYFHPFPGPVDLHTEPAFTHNVMLARRGADVPAHPDDWFLASVLAEAGKGSQAAESFPFAPSYGYHFDAYKLGAFLRDWAVARGVVHRPLTVEQVEVGEDGEVAALLCEGGERVTGDLFVDCSGFRAVIAGDALGGEFLPFADNLFNDRAVVVPTARVTDFKPQTGAVAMQAGWRWHIPLTTRTGNGYVYSSKYISDEDAAAELLGSVGLSEDDAEPRFLRMKVGRMRESWRGNCLAAGLSQGFIEPLEATALHIVIATALEFAEAYEAGGFTAQHRDTFNANIGARYDAICDYIVAHYRMNQRSDTQYWRDNAANQHLTDGLKAMLTAWFTHQDIAAANAQQYRIPAYAPMSWHVLFAGYGTFPPADRMQALPQGVQAADLDGVRELLAKSAGNFAAVDW

SEQ ID NO: 89684 - protein, 228 aa, Rubrivivax sp.
  misc_feature (1)..(228): tr|A0A519E1E6|A0A519E1E6_9BURK Tryptophan halogenase (F ragment) OS=Rubrivivax sp. OX=50259 GN=EOP37_21065 PE=4 SV=1
MTFTAPESQSPRRPVKRVVIAGGGTAGWMMAACISKHLGKQLDIRLVESDEIGTVGVGEATIPTMLTFHQLLGLDEREFMAATQATIKLGIKFEGWRETDSTYIHAFGNTGIDHWTAGFQHFWLKGRERGLASDYADYCLEARAAQALKFAHLPDQGINYAFHLDATLYGQYLRRFSEGFGVKRLEGKIAEVLMHVDGDIRALKLQDGTEIEGDLFVDCTGMRSVLLG

SEQ ID NO: 89685 - protein, 536 aa, Alteromonas sp.
  misc_feature (1)..(536): tr|A0A5H3A7E1|A0A5H3A7E1_9ALTE Tryptophan halogenase OS =Alteromonas sp. I4 OX=2652380 GN=AltI4_44200 PE=4 SV=1
MIQNLREGDAVVNAPIQQVVIVGGGTAGWLCAGMLAAKLGKQGERQLGVEITLIESPDVSTIGVGEGSWPSLRDTLREIGLSESAFITHCQASFKQGSTFVGWRDGSEHDRYHHPFTNPAGYTEIDVHACWQALHSNKPYDRAFSVQPELCEQHKAPKQLATPDYAYVLNYGYHFDATRLAEMVADHCVNQLGVRHVQAHIDQVVSHHNGDIKALTTQCGQNLEGDLFIDCSGQSALLAGKHYNVPWHSVKDILLNDSAMAVQVPYHEQDNTIASTTLATAHPQGWSWDIGLQHRRGVGMVYSSDFASAEDIEQSLKQYLIKRLPHDVVEQATCRQLKFSPGYRSEFWTHNCLSLGMASGFIEPLEASAVAMVELGVRMLCEQFPQNRDHMRILAARYNERFAYRWARVIDFVKLHYAINQRSNDAYWNAHRDPATWPDSLKSLLSLWQYQPPSRYDVVQNEEIFPSASYQFVLYGMGFKTQSPTLADASDMLQRAGAISQKLQATLMQFSQGLPDNRALLNAIRERHQHSSGATL

SEQ ID NO: 89686 - protein, 523 aa, Rubrivivax sp.
  misc_feature (1)..(523): tr|A0A519IDR1|A0A519IDR1_9BURK Tryptophan 7-halogenase OS=Rubrivivax sp. OX=50259 GN=EOP39_08050 PE=4 SV=1
MNSELTTAVRRIVVLGGGSAGWLTAATLAVEFGGDAPDALQITLLESPDVPSIGVGEGTWPTMRSTLHRIGISEIDLIRECDAAFKQGSRFDGWVHGGADDRYYHPFTLPHQHGEADLAGAWLQGDHAQPFAESVSAQPHVCTACLAPKQTTTPDFGGVVNYGYHFDAVKLGHLLRRHATTVLGVCHVVDHFTEVRSRENGDIAALTTREHGEIEGDLFIDCSGLASLLLGKHYGVGYRSQKHVLFNDSALAIQLPHQDARAPLASATVSTAHAEGWTWDIGLPTRRGIGLVFSSSHTNDAAAERALRAYIERSGLALGDATPRTLRFNPGYREHFWHRNCVAVGLSAGFIEPLEASALAMVELSAAFIRDEMPTHRADMELVAKRFNEAFDYRWSRIIDFLKLHYVLSRRDDADYWREHRGAASQPESLRELLQLWAHRAPTRNDFYRVEEVFPAASYQYVLYGMGFKPAGRLLNGPKLMAGKSGLNDVATITRRMLGGLPRHRELIQHIDRHGMPPRPPDL

SEQ ID NO: 89687 - protein, 475 aa, Alteromonas sp.
  misc_feature (1)..(475): tr|A0A5H3A3A0|A0A5H3A3A0_9ALTE Tryptophan halogenase OS =Alteromonas sp. I4 OX=2652380 GN=prnA_1 PE=4 SV=1
MSKLFQRDLFETPTNPHSRALKSIWVVGDDVHGLSTAVAFATALKPFGIKVGVVSLTTPAKQASLHTCNGHLFAFHRRYQLPERAFMQSQGVAFFTAMSLATASCPNEQVWLANDTWLPLFNGIELHQVKRWLSDFASMETSFAVAAAKAGKTVFPSGQQGTLGNSFELGAVVDTKAYCTFLSQHAAERGVTIVTSDDIAFEQCPHSGDITTLLLSNNQRIQCDWVVDATGPQARVIRQALKRPFESWHAYLPIGLLGETTEQSASNTPGIAVSVNDAGYQQTQHLGGKKRTATFTAVHSGVGECEASFRNPVSHNCLAVGPAAYHIDVPGMSTLHITHRIIDRFLNVVPCLPAPATWGRAFNRTTKQDCEHLRDFGCLLLSAMATRQQETGKPWQVLPKLSDSLDQALTLFNESARCTVPPDAMIHRQRWLDALALASSNEQAFEPLLNAVSQTSGQQFLQRIATQIQSLVSQC

SEQ ID NO: 89688 - protein, 501 aa, Rubrivivax sp.
  misc_feature (1)..(501): tr|A0A520C405|A0A520C405_9BURK Tryptophan 7-halogenase OS=Rubrivivax sp. OX=50259 GN=EOP35_02490 PE=4 SV=1
MSSASAPPRRIVILGGGAAGWMSAATLTTAIRSAEVVLVESEEIGIIGVGEATFPSIRTFNQVLGIDEGEFLAATRGSYKLGIQFCDWHRRGEQFFHTFGNFGYTDGPMALWGQLRRLREHIPAQLGDFCLPAVMASKGRFLPPSSQEGLESYGYAYHFDAARYAAFLRQWSEKRGARRIEGRVAEVARREDGGVRALRLADGREIEGDLFVDCSGFASLLIGQTLSQRFIDYSHWLPVDRAWAVPSERPTGGLTPYTRAVAQEAGWTWRIPLQDRTGNGHVFSSRYIDETKAREQLLAQLDAPALAEPRLLRFQSGHRERFWVHNVVAIGLAGGFLEPLESTAIYLVQTAIGRLVEALLDTKQTPAELTTGFNIQQLRQYQRLRDFLILHYHLSERRDSEFWRAMTSMALPESLAYKLHAWQETGTLQIYDNEAFEATSWLTIHAGMDNWPRRSSPWLLEIPADVARRYLAEHHHAVNALAERMPDHDAFLRHICARAQG

SEQ ID NO: 89689 - protein, 491 aa, Alteromonas sp.
  misc_feature (1)..(491): tr|A0A5H3A5L3|A0A5H3A5L3_9ALTE Tryptophan halogenase OS =Alteromonas sp. I4 OX=2652380 GN=AltI4_32020 PE=4 SV=1
MNASPLNIVIVGGGTAGWMAANLLAKRWQHKAVSVTLVESPDIGIIGVGEGSTPTLKRFFEDMNIAESDWMAACNATYKVSIQFDGWSPESGVGSYAHPFISQLDTFSERPFYVNCLTRRMGLDVNVTPGDFLFNGWLAKHKRSPQTPANFPFRIEYGYHFDSGLLGAFLQRHAHTLGVNHKSRNIERVQCQPNGDIASLRTREGEIIEGDLFIDCSGFRSLLLQQTLKVPFRSFKDNLFNDAAVVCATDALEDRPVETRSTALSTGWAWQIPLTNRTGNGYVYSSAFISPEDAEKELRAHLGVNDDDAQTRHLTMKVGQVSEHWSHNCLALGLSQGFIEPLEATALHLVQTSVEIFMDHYEKGGFSDQYRAAYNQVIGERFERVRDYIVAHYKLNTRNDSEYWRANRNNDVLSESLLQLLDVWFRRGDLQQEIQRQKLDSHFGATSWHCLLAGYGAFPRLAAQQPNQGDLYKDNNLAQFFSGCLLNFSAQ

SEQ ID NO: 89690 - protein, 287 aa, Rubrivivax sp.
  misc_feature (1)..(287): tr|A0A519DVN0|A0A519DVN0_9BURK Tryptophan 7-halogenase (Fragment) OS=Rubrivivax sp. OX=50259 GN=EOP37_28480 PE =4 SV=1
SVLLGGALGVGYEDWSHWLPCDSAIALQTASVREAVPYTRSIAHPWGWQWQIPLQHRVGNGVVFSSRYTDDETARAALLGNIEGEVLTPHRVIRFKPGQREVVWKRNCVGAGLSSGFLEPLESTSIHLIQRTAIRLLQMFPKDGIRQSDIDEYNAQMRHELEHIRDFIVLHYHLQQRTDSPMWRDMREMPVPASLQHRLDLFRETGRVFRVPNELFTENSWVQVLLGQGLMPEQHHPSADLMGDRELSSFLGGITTRIEKTVVQMPSHQQYVARYAPAAVVKAPVPA

SEQ ID NO: 89691 - protein, 462 aa, Rubrivivax sp.
  misc_feature (1)..(462): tr|A0A520BKI6|A0A520BKI6_9BURK Tryptophan 7-halogenase OS=Rubrivivax sp. OX=50259 GN=EOP35_17710 PE=4 SV=1
MKNRALRRIVIVGGGSAGWITAAPLARMLCRPDEPDQHCEVTLIESAEIGTVGVGEATLPTIRFYNQLLGIDEADFVRNTRATFKLGIEFQDWGRIGNRFFHGFGGFGPAIHNRPLWAYWLRLQAAGDNLPSYEEWSTATVMARHMRFVPPTPGEPSAANAFDYAFHFDASLYGAYLRDYALQRGARRVEGTITRVETRPDDGFVAALHMSNGSRIEGDLFIDCSGFRALLIDGAMKSPYEDWSRWLPCDRAMSVPCERAGAMTPYTLDEPRRQRFVTGRRRQAWMKNVVAIGLSSGFLEPLESTSLHLIMDGVSRLTAMLPDLSFQPALADEFNRQMAYRYESVRDFIILHYKLGERRDSEFWRYCADMPIPDDLAHQIALFRKTGRVAVIEPEGFTEPSWASILMGLGVHPERYDPYIDLVDPQTIRRHMHHVHRSIARTVSSMPSHQDFLDRIGQTPRA

SEQ ID NO: 89692 - protein, 56 aa, Rubrivivax sp.
  misc_feature (1)..(56): tr|A0A519I6K3|A0A519I6K3_9BURK Tryptophan halogenase (F ragment) OS=Rubrivivax sp. OX=50259 GN=EOP39_14480 PE=4 SV=1
MSDPSIKKIVIVGGGTAGWMTAAPMAQRFAGAGAARPEVVLVESPDIGTIGVGEAT

SEQ ID NO: 89693 - protein, 522 aa, Rubrivivax sp.
  misc_feature (1)..(522): tr|A0A520C4X5|A0A520C4X5_9BURK Tryptophan 7-halogenase OS=Rubrivivax sp. OX=50259 GN=EOP35_01260 PE=4 SV=1
MNSELTTAVRRIVVLGGGSAGWLTAATLAAELGRDAPDALQITLIESPDVPSIGVGEGTWPTMRATLHGIGLSEVDLIRECDAAFKQGSCFDGWLHGGAGDRYYHPFTLPHGHGDADLPGAWLQAGGDPGFAESVGAQPHVCDARLAPKQTTTPDFGGVLNYGYHFDAVKLGHLLRRHATTVLGVRHVVDHFVSVRSHENGDIAALVTREHGDLEGDLFIDCSGMASLLLGQHYGVGLRCQKGVLFNDSALAVQVSHADANAPLASATISTAHAEGWTWDIGLPTRRGIGLVYSSSHTGDAAAERALLAYLQRSGLGEADVSPRRLSFSPGYREQFWHRNCVAVGLSAGFIEPLEASALALVELSVAMIRDEMPTNRADMSLVAKRFNEAFSYRWSRIIEFLKLHYVLSRRDDADYWLEHRSASTQPESLRELLQLWAHRSPSRNDFYRNEEVFPAASYQYVLYGMQFKPALRPLRADQRAAADAGLKDVATITRRLLGALPRHRDLIQHIREHGIPGRTAP

SEQ ID NO: 89694 - protein, 515 aa, Alteromonas sp.
  misc_feature (1)..(515): tr|A0A5H3A1X2|A0A5H3A1X2_9ALTE Tryptophan halogenase OS =Alteromonas sp. I4 OX=2652380 GN=AltI4_23860 PE=4 SV=1
MNTASKKTRVVIVGGGTAGWLTAGIIAARHPLLGENSNTEMVLLESPDVKNLGVGEGTWPTMRDTLKQIGLSERAFLSCCDASFKQASKFAGWRQDPAQHYYHPFTAPAGYGVVSLADAWIEAGYPQDFESWVSAQGHACERQLSPKLPQLPEYAFTYNYGYHLNAGKFVALLQAHCTEKLGVTYRQGHVAHIVSHDSGAIKALQLEDGNTVEGDLFIDCSGFAAVLMGKHYQIPFVSQRGVLFNDTAIAAQVNHAEPQTPIASATVATAQTSGWIWDIALQHRRGIGHVFASEFCAVEDAEQTLRNYIANDPNLQQDKVSTRIIKFDPGHRKYFWHHNCVAIGVSAGFVEPLEATALVLIEKSAEWVAEQLPRSPSAMPVLAKRFNQLTNERWQEIIDFIKLHYVLSDRTDSAYWRAHQQHESWTDSLSEALQLWQSQPPGLYESSNRQELFSSASKQYVLFGMGFRAEQWQSCGRLALQQPLIERFRREVQQQVNRVNAQLLTNREYLQKLRK

SEQ ID NO: 89695 - protein, 511 aa, Rubrivivax sp.
  misc_feature (1)..(511): tr|A0A520C373|A0A520C373_9BURK Tryptophan 7-halogenase OS=Rubrivivax sp. OX=50259 GN=EOP35_03110 PE=4 SV=1
MQDKHHAPLRTEPVKRVVIAGGGTAGWMVAALMSRILGKALDIRLVESDEIGTVGVGEATIPTLLTYHQLLGINEQEFMAATQATFKLGIQFEGWRNVGEDYVHSFGLTGKDHWTAGFQHFWLAAQQRGQARVPHGDYGDHCLELRAGIENRFAHLPRNGLNYAFHLDASRYAVFLRGISEGYGVKRIEGKIAQVLQHDSGDVRALKLADGSEIDGDFFIDCTGFRSLLLGQTLGVGFEDWSQWLPCDSAVAVQTESVGEPVPYTRSIAHPFGWQWRIPLQHRVGNGLVFASKYLGDDEAKATLLKHIEGAPLTQPRVLKFTPGQRDVTWQRNVVAIGLASGFLEPLESTSIHLIQRGITRLMQCFPAGGIHQTDIDEYNRQVREEIEHIRDFIILHYKVTNRRDAPLWRYCAEMEVPQSLAHRIQMFRDTARVFKAPHELFGENSWVQVMLGQGITPAAHHPTAELMGDEELGHFLGDIRKQVARQVMQLPRHGDYVRGYAVPPGQLSTA

SEQ ID NO: 89696 - protein, 521 aa, Xanthomonas campestris
  misc_feature (1)..(521): tr|A0A3S9RYH9|A0A3S9RYH9_XANCA Tryptophan 7-halogenase OS=Xanthomonas campestris pv. musacearum NCPPB 4379 OX= 1094184 GN=KWO_017755 PE=4 SV=1
MPHTMPSDPQQRPVRRIVIAGGGTAGWMAAAAMSKLLGRHLQITLVESDEIGTVGVGEATIPSLVTFHRLLEIDEAAFMAATQATIKLGIAFEHWRDVDRHYIHSFGHAGTDHWSAGFQHFWLKGQQRGVARDFGDYCLELRAAQEGRFAHLPNGGMNYAYHLDAGLYARFLRRFSEGFGVTRIEGRIGQVETNAESGFLTALTLQDGTRVEGDLFLDCTGFAGLLIGKTLGVGSDDWSRWLFADSALAVQTESVGPPVTYTRSRADQAGWMWRIPLQHRVGNGIVYSSRHMDQDSARVVLERNLTGRALTAPRPLRFTPNQRHRVWEKNCVALGLASGFLEPLESTNIHLIQRGIIRLLQTFPQVINAVDIAEYNRQAADEITHIRDFVILHYHATDRRDTSFWRDCAAMDIPDSLRHRVELFRQSGRVFHQANELFAENSWVQVMLGQGIVPQQHHPVADLMGDAELSRFLETIRTRVEGALVRLPAHADFLQRYCPAPPPPEPAARVPAPTVMATLAG

SEQ ID NO: 89697 - protein, 494 aa, Alteromonas sp.
  misc_feature (1)..(494): tr|A0A5H3A618|A0A5H3A618_9ALTE Tryptophan halogenase OS =Alteromonas sp. I4 OX=2652380 GN=prnA_3 PE=4 SV=1
MKQTHPASVIIVGGGTAGWMCAAYLAKQWGAKSRITLIESSQIGTVGVGEGSTPFLKQFFTDLGWQEQDWKPHCDATYKTGIEFANWTNNQRFSEYFHPFFTPLDQQTGELFFDSCQTLRSSRGNADVKPEHYFCAAEMVRKRVTPQSTKLPGDIDYAYHFDASKLALSLKSFSMQLGVQHKEGKVAEVYTDEGNIRGLCMEQGDVLDADLYVDCSGFVGLLMKKALNAPFKSYRETLFNDAAVALPTQHNSNEPIAPQTRSVGMDNGWMWQIPLTSRIGNGYVYSSDFCSADEAEAALRKALNVDDSVPARHLKMQVGRLDQHWQGNCVAIGLAQGFIEPLEATALMLVQYALYQLVDGVDSAKPLASAQQAYNREMNRMFDGIRDYIAAHYYLNTRSDSAYWQACRHDMCVPENLQYLLDKWDSGACFETALDHLDSELVYLRPSWYCILAGMGRFNSPEAHQKAPVHQASLAHLTKLTAHYFSQQQRPSGW

SEQ ID NO: 89698 - protein, 534 aa, Rubrivivax sp.
  misc_feature (1)..(534): tr|A0A519I8U1|A0A519I8U1_9BURK Tryptophan 7-halogenase OS=Rubrivivax sp. OX=50259 GN=EOP39_12460 PE=4 SV=1
MSDTATVFNQQVTARPAGGSTGREPPVKHICVVGGGTAGWMTALMLATSAYGPRLNVTVLESPQVGIIGVGEGSTPWLRGFFDGLGIEESEWMPACNATYKSGITFEGWSTRPGFERYFHPFASMLDNMTMHQFVDNVHERLSGADVHAHPDRFFVAAALARQGKGPRAHRNFPFDIWYGYHFDATLLGQFLGRKAAALGVTHLQHHVAEVQLSEAGDIARLRLDDGETLAADFFVDCTGFSSLLIGQALKTPFIPYAENLFNDAAIAMPTPLDGPIASQTVSTALRHGWAWKIPLTNRQGNGYVYSSAHCSADQAETELRRHLGLLDSDTPARHLKMRVGRMSKQWMRNCVAVGLSQGFIEPLEATALLFVQRTAAALVEALEKGDLGPAAQDEFNEFMRTRFENTRDYIVAHYKTNSRTDTDYWRANAENMQLSDSLQGVLMTWMSRKPLAAGLKQGRFGQGYPIVSWYALLAGMGLFPDDLEPPTPHQARHKLEAVDDFVERSAMNFPDHRELLANIPPRVGDKTLQLYLW

SEQ ID NO: 89699 - protein, 500 aa, Alteromonas sp.; identical to SEQ ID NO: 86823
  misc_feature (1)..(500): tr|A0A5H2ZY91|A0A5H2ZY91_9ALTE Tryptophan halogenase OS =Alteromonas sp. I4 OX=2652380 GN=AltI4_05750 PE=4 SV=1

SEQ ID NO: 89700 - protein, 256 aa, Rubrivivax sp.
  misc_feature (1)..(256): tr|A0A519HAK9|A0A519HAK9_9BURK Tryptophan halogenase (F ragment) OS=Rubrivivax sp. OX=50259 GN=EOP39_28125 PE=4 SV=1
AQAVPCGKTMPLTPYTTSTARSAGWQWRIPLQHRTGNGHVYCSGYTSDEEAGRVLMQNLDGAPQGEPRQLRFKTGMRRRIWEKNVVAVGLASGFLEPLESTSLSLVIHGVSALVELFPDRHCEPHLVDEYNRRMAQQYTSIRDFIILHYKQTRREDSEFWRYCAAMPIPDTLAHQMDIFHRSGRVAILDRDSFGEDSWLSLFLGLGMQPEALDPLLAQVDERALREHFKRLHAAIERTVDDMPDHAAYLDRLVGVR

SEQ ID NO: 89701 - protein, 521 aa, Rubrivivax sp.
  misc_feature (1)..(521): tr|A0A520BWW5|A0A520BWW5_9BURK Tryptophan 7-halogenase OS=Rubrivivax sp. OX=50259 GN=EOP35_08415 PE=4 SV=1
MSDIQSIVIVGGGTAGWLAACYLQRTLGAARQSPLPVTLIEPPQAAALGAELATVPTLRHTLQALGLPERLLFTGADATLTNGIRFNGWRHGGAPADDSFDHPFDIPPPFHGFATTAHWLNLLQRGLTRQPMAQACTVQTTLFDGHLSPKLMDSPDYQAPVSYGYQLDAARLAMLLQQTALERGVRHVRGEVTQVHRCSDGNVGIESVELADGRRFAASFFIDCTGAQSLLLQQALGVPWVSFADSLPCDRALSQPLAHALPKDALRSHTTATAQDAGWTWQMDLQSRRGTGYVYASRFCSDDEALHRLQAANLGHTALAEPRLRHLRAGHAARVWEGNCLALGAAGGDIEPLESTGLYIVEWMLQLFADHVAPAGDSAACRARVNRLSGDFFAEMRDFIVAHYALSQRRDTPFWRACTDAAALPPRLAGLLALWDSKVPTPTDLDQRLSLFGVANWSYLLAGLQRLPSRGIGLSGHISPEISQKALAHVRDIRRAASEQSPTMLDYLLSLRDVAAPQAAH

SEQ ID NO: 89702 - protein, 415 aa, Rubrivivax sp.
  misc_feature (1)..(415): tr|A0A519FT94|A0A519FT94_9BURK Tryptophan 7-halogenase (Fragment) OS=Rubrivivax sp. OX=50259 GN=EOP38_26805 PE =4 SV=1
WGQRGERYLHTFGSVGRDLGLASFHHFWVRMHHEGKALPLDAYALNSLMAEANRFAREARPLQGEGLGVPVSYAYHFDAGLYAATLRQISEARGVRRTEGKVVRALQRPSDGFVTALQMENGEQIEGDLFIDCSGFRGMLIEDTLHTGYEDWTHWLPCDRAVAVPCESVATLTPFTRATARTAGWQWRIPLQHRIGNGHVFSSAHVSEDEATAQLLANLDGPALAEPRTLRFKTGKRKKMWHKNVVAMGLASGFLEPLESTSLYLVQSSLSRLIKFFPDADFHQADIDEHNAQADEEFERIRDFIILHYHLTRRDDSPFWRQVRTMSIPEPLHRKMAAFARAGHLHPAHLDLFSDPSWLQVMVGQGLVPQRHHPLADHLSGAECEFFLQHVSKQLQSVAMKLPGHADYVRNYCTA

SEQ ID NO: 89703 - protein, 498 aa, Alteromonas sp.
  misc_feature (1)..(498): tr|A0A5H3A6J8|A0A5H3A6J8_9ALTE Tryptophan halogenase OS =Alteromonas sp. I4 OX=2652380 GN=prnA_4 PE=4 SV=1
MSGIKHIVIAGDGLAANMTALALQQQLPPDINLTLISSAKYADLDCLYGSTSAPDMYAFNLMLNLSEPDLLFNTNSTFCWGNYFDHWAMTSCSWLQGFHLPFPAMRGVGLHHFVTRHGETELAPYLINAQADQTGKFAHPPEDNRHPLSRAEYGYQIDASALSALYASKLSSKVTVINTSIADVVTDPAADSTGNINITGLQLDNGQRIEADLYIDCTGPDAMLYSALEQNSLVKNARPLFAIHSTLQRGEALPTHRHVRAHEFGWQADTYLRDSIQRLTVCAPEQKSQAIDAHGAKASIAMAFSAGHRQQAWTGNCVAMGQAANVLEPLTPAPMMMLIRDIQRLLELIPVTSRMSAEATEYNRRFIADVEHSGLFQGALFVLKHLPDSLPAHTYWQHATQCVQGEKLTRKLTQYHHRGILVNYDLEPFNEQDWLILHSGMQRRPQTYDIVADQVPPAEMANQLNGMGNVIQQVVSQMPPHAIYLEKLMAYLSQKRNQ

SEQ ID NO: 89704 - protein, 511 aa, Rubrivivax sp.
  misc_feature (1)..(511): tr|A0A520BL41|A0A520BL41_9BURK Tryptophan 7-halogenase OS=Rubrivivax sp. OX=50259 GN=EOP35_17280 PE=4 SV=1
MSARSDLPIRKIVIVGGGTAGWMTAAPLARLLARVGAASRAEVVVVESPDIGTIGVGEATLPPIRAYNTTLGLDGADFVRKTQGSYKLGIEFRDWGRVGNRFFHGFGDFGPAIEGRSPWQHWLRLQRIEPGLPSYEDWSMATAMAQRNRFAPPRDGPPSAANAYSFAYHFDAGLYAAYLRDYALQRGAERIQGLIVDVELRPEDGFVAAVKLEDGRRIDGDLFVDCSGFRALLIGGAMQSPYEDWSALLPCNSAQAVPSERVTPLTPYTTSTAKAAGWQWRIPLQHRTGNGHVYCNGFISDDEAAGTLLAGLDSKPLDTPRQLRFTTGRRRQGWVKNVVAIGLAGGFLEPLESTSIQLIMDGVGRLIQFLPDRSFKPHLAAEFNRLMAQQYESTRDFIVLHYKLTERRDTELWRYCAAMPIPDPLAHQIELFRTTGRVAILDPGGFAEPSWVSLFMGLGLRPESYDPFVEHVDEAALVQHFARLRQVIAQTAADMPDHGDYIRRHVMAPAA

SEQ ID NO: 89705 - protein, 495 aa, Alteromonas sp.
  misc_feature (1)..(495): tr|A0A5H3A419|A0A5H3A419_9ALTE Tryptophan halogenase OS =Alteromonas sp. I4 OX=2652380 GN=prnA_2 PE=4 SV=1
MPQTIQNVVIAGGGTAGWMTAALLRRVLSPTIRIELVESEQIGIVGVGEATIPPIQTFNQFLGIDEKAFLRETHATIKLAIKFENWKAQGDSYYHTFGAPGTTMGFCSFHHYWLKAKQAGLAQSLWDFDLNYLSCLQGKFNKINTPNPLYEMQYAYHFDSALYGQFLRKTAEQAGVVRTEGIIEHVQQDPDSGFITALQLTNGQQIQGDLFIDCTGLRGLLIQQALGVSYEDWSHWLPADSAQAVPSERFDKTLPYTRSIAHRVGWQWRIPLTHRNGNGIVYSSQYLSDDEAGQTLLNNLDTKALDTPRTIRFKTGRTDQQWCKNVVAIGLSSGFLEPLESTSIHLIQSGIVRLMKMFPNQGISQAMVDLYNAESKDEFETIRDFIILHYHVNQRDDSDFWRDMRNMAIPDRLAQKIAAFEDTAAIFNEQSDIFRDASWVQVMMGQGLDPKDYHPAADAMDNAQLMDAMQQIYKAKQQPLDKLMNHDEFIKRYTA

SEQ ID NO: 89706 - protein, 512 aa, Rubrivivax sp.
  misc_feature (1)..(512): tr|A0A519IJB6|A0A519IJB6_9BURK Tryptophan 7-halogenase OS=Rubrivivax sp. OX=50259 GN=EOP39_02975 PE=4 SV=1
MSNKRRILIVGGGTAGWLTAAYLAKALRLSERPHLEVTVLESPDISSVGVGEGTFPTIRNTLQFLGIDEARFIRETSATMKQGIRFVDWARTPTAGQHQQFFHPFEAPFYAEGINLVPYWLLQNETERPPFAQAMTLQYRVTEAQRAPKRAGEAPYAAPLNYAYHFDAIKLARLLADHARQLGVAHVEGTVTDVGLDSRGAISHVDTDRQGRFDADLYVDCTGFRAELIGRALGSPFKSCRGLLFSDRALACKIPLPSDAPMESCTIATAHEAGWLWEIGLNGSRGVGCVYSSTHMTDERAAEVLRAYCGNGKDGEDVAMRSIPFAPGYREKQWVKNCVAVGLSAGFLEPLESTGLVLIEAAVGMIAEMLPHSGPIEAPARRFNELMVTRFDNIVGFLKLHYCLSQRSEPFWRDNANPETIPERLADLLEQWQLRPPGRFDFVLDTETFAFFNYQYILYGMGYRTDLNAGRADFTQGEEAKKLFAKIQRFADRALVDLPSHRSLIQQINAVR

SEQ ID NO: 89707 - protein, 497 aa, Alteromonas sp.
  misc_feature (1)..(497): tr|A0A5H2ZWF0|A0A5H2ZWF0_9ALTE Tryptophan halogenase OS =Alteromonas sp. I4 OX=2652380 GN=AltI4_01320 PE=4 SV=1
MHTSAIHHYVIAGGGTAGWMTAALLGKLLNGTGARITLVESPDQPGVGVGEATVPSFVDFIKLLGIDEQTFVKATQATFKLGIQFTHWQTPGHSYWHPFGHVGARIDGKPFFQQWLHARRSGLTQTYTDFSASARMAQETKFYIPNPQQPNNLSQMGYAYHFDAQQVAVFLRDFAVSKGVVHKQAHIEHVQMSPDNSAIQRLTTRTGEHIDGDFFIDCTGTQARLMGQALNTGFTDWQRYLPVDRAWVVQTQNTEEPVPYTKAIAEPMGWRWQIPLQHRTGNGLVFCSQYTSPDEAKRYLQTHLTTPLLNEPRLLTFKTGHLKQFWRSNCVAIGLSAGFLEPLESTGIYLIMRGILNLAKLLPSSPPCKATIHEYNQLMLAEYQHIRDFIVLHYCVSQRNDTSFWQSWQQREIPTTLAHKLALYRTRGVVSHGQSDLFADHSWHAVATGMNVLPRNVDPVVATTDVKALQDLLARIDHALAHSVGQLMPHGEYLKAW

SEQ ID NO: 89708 - protein, 506 aa, Xanthomonas campestris
  misc_feature (1)..(506): tr|A0A3Q9H8D5|A0A3Q9H8D5_XANCA Tryptophan 7-halogenase OS=Xanthomonas campestris pv. musacearum NCPPB 4379 OX= 1094184 GN=KWO_017000 PE=4 SV=1
MIPAPLRNIVVVGGGTAGWMAAAAFARVLGPTFNVQLIESEQLGTVGVGEATVPHIKAFNNLLGIDEAEFVRQTQGSFKLGIEFVDWQRRGSAYMHGFGTQIGHPLGLLPFHQYWIKQHARGKAQPLGAYTLNTVAAARGKFMTSAGDVPANSPLANIAYAYHFDATQYAHFLRRYSEQRGVTRIEGLVEQVQLHPESGHVQSLQLASGQTVHGDLFIDCSGFRGLLIEEALHTGYHDFTHWLPCDRAFAVACEKVGPPTPYTRSTARAAGWQWRIPLQHRTGNGYVYCSAHISDDEAAATLLANLDGKPLADPRPLHFTTGRRKQFWNRNVVALGLASGFLEPLESTSIHLIQSGISKLLELFPREGISPVLVQRYNDRSAFEFDRIRDFLLLHYHATERDDSAFWRHCRSMPITPELQTTLDLFRDSGRFYRNAEEMFAEISWVQVMVGQGILPQGYHPLVDQVPDRDAEGFLASVAQTIAHCVDVMPTHQQFIERYCKAAVPA

SEQ ID NO: 89709 - protein, 514 aa, Rubrivivax sp.
  misc_feature (1)..(514): tr|A0A519IM94|A0A519IM94_9BURK Tryptophan 7-halogenase OS=Rubrivivax sp. OX=50259 GN=EOP39_00180 PE=4 SV=1
MNTTNKPVRRVVIAGGGTAGWMTAALMSKLLGKRLDIRLVESEEIGTVGVGEATIPALHTFHNLLGINEAEFMAATNATFKLGINFEGWKDIGDNYFHSFGATGNDHWSAGFQHFWLKGRAEGLARTYTDYNPETVAAHANRFAHLPRNGLNYAYHLDAGRYAKFLRAMSEGFGVNRVEGKIAAVLQDGPEGKDGDITALLMQDGSRVEGDLFIDCTGFRSLLLGETLGVGYEDWSHWLPCDRAVAVQTAAVREAWPYTRSICHPFGWQWRIPLQHRVGNGLVYSSKELSDADAPDVLKANVEGELLIQPRVIKFQPGQRQKVWHRNCIAIGLSSGFIEPLESTSIHLIQRSAIRLMQLFPSNGINAADVSEFNLQCERELMHIRDFIILHYTVTDRSDTALWNHVRTMELPATLRHRIELFQESARVFRSSDELFAENSWVQVMMGQGLMPQSYHPVADLMGRTELGQFLDDIQVRVSRTVAGLPQHQAYVEQLCAPYRQAIAERLAAAPQRA

SEQ ID NO: 89710 - protein, 498 aa, Alteromonas sp.
  misc_feature (1)..(498): tr|A0A5H3A893|A0A5H3A893_9ALTE Tryptophan halogenase OS =Alteromonas sp. I4 OX=2652380 GN=AltI4_44190 PE=4 SV=1
MNKPDNSSNKVNNVIIAGGGTAGWMAAAALSRLIGKSVNVTLVESKDIGIVGVGEATIPPIRTFHKLLGIDEKAFMRATNATFKLGIEFANWREPEHAYIHSFGVTGRECWAGEFHHFWMRAQQEGLGSAFGDYCFELKAAQQYKFGMSERMPINFAYHFDAVAYGKFLRQFAEKLGVTHVEGDIEKVNVNVTSGDIESLTLKDGRTLAGDLFIDCTGFKGLLIEQALHTGYENWSHWLPCDRAVAMQTESVEAPAPFTRSVAHKAGWRWQIPLQNRVGNGLVYCSRYMSDEQAKQTLMDQVTGNPINEPRVIQFTPGKRRLGWNKNCVALGLASGFIEPLESTSIHLIMTGIIRLLRLFPFDGITQSAIDEYNNKYNSEMAAILDFIVMHYKVTNRDDSLFWQHCQRMAIPDSLIHKINLFKETGRVFLDDGDIFRVDSWTQVMLGQGLVPEQYHRVADEMSIEELTRFMNGLHQHVSQQVQALPAHGDFLKQYLGM

SEQ ID NO: 89711 - protein, 518 aa, Alteromonas sp.
  misc_feature (1)..(518): tr|A0A5H3A5N0|A0A5H3A5N0_9ALTE Tryptophan halogenase OS =Alteromonas sp. I4 OX=2652380 GN=AltI4_34040 PE=4 SV=1
MTSASKPVRKVVIVGGGTAGWLTAGRIAAEHATKAHQPVEVVLVESPNIPTIGVGEGTWPTMRNTLIKLGIRETDFIRECDASFKQGAKFAGWVTGDADDFYYHPLMLPQGFSQGNMGPYWQQHQDTIEQSFSNAVCFQEALCEHNRAPKSIRHAEFGAVANYAYHLDAGKFTAFLTRHCTEKLNVRHVLADVTGVIAHDNGDIRAIQTQQAGEIDGDLFVDCTGFQSLLLGKHYKVPFVPCDDVLFIDRALAVHVPYDSPDAPVATHTISTAQQAGWIWDIGLQSRRGVGHVYASRYQSEQQALDQLAQYVGPQFNDLSVKQIHIQSGHRAHFWHNNCVAVGLSAGFLEPLEASALVLVELSATMLAEQLPVNRATMPIIAKRFNQTFQYRWQRIIDFLKLHYMLTKRTDTAFWRDNCDPATIPDSLQELLDLWRYHPPYDHDFSSNNEVFPAASYQYVMYGMGFESDLSFGQQQVAQAFAQQQLQMNQQARQKVLSALPTHRDLLNKINQYGLQPV

SEQ ID NO: 89712 - protein, 511 aa, Rubrivivax sp.
  misc_feature (1)..(511): tr|A0A520C3N3|A0A520C3N3_9BURK Tryptophan 7-halogenase OS=Rubrivivax sp. OX=50259 GN=EOP35_02495 PE=4 SV=1
MENIAKPLRRVVIVGGGAAGWMSAAALSAVLKPPYEIRLVESEEIGIIGVGEATIPLIRMFNGLAQIDEAAFLKATQGTFKLGIEFVNWGREGERYFHGFGRVGKDPLWPVDFTQYWLRLRALGRAQPIDAYVISSMAAKANRFMLPRPEMQNSPMADLAYAYHFDANLYARHLRALSERRGVRRTEGKVVRVLLNEDAGPAHGHVRAVQLESGELVEGDLFLDCSGFTGLLTDKTLGVAFEDWSHWLPCDSAWAVPSESTQPLLPYTRATAQSAGWQWRIPLQHRVGNGHVFSSRHMSDDEAAAVLLRNLDAPPLADPRLIRFKTGMRKEAWTRNVVAIGMSAGFVEPLESTALHLVQMGVAKLIEAFPHSGFDPAEIAEYNRQSRERYESVRDFIVLHYHLNQRKDGGFWESCANMAVPEGLRWRMDLYAGSGRLVYVDTDLFREPSWFEVMEGQNLRPRGWLTLAELQGVEDTANYLKGVSDTIANCVAVMPEHAEFIRSYCASAPLK

SEQ ID NO: 89713 - protein, 498 aa, Alteromonas sp.
  misc_feature (1)..(498): tr|A0A5H2ZWH7|A0A5H2ZWH7_9ALTE Tryptophan halogenase OS =Alteromonas sp. I4 OX=2652380 GN=AltI4_05710 PE=4 SV=1
MNSTQPATKPHVVIAGGGTAGWMTAAALARKLGPLVRITLVESSDIPTIGVGEATIPPLRVFHQLLGINEAAFMRATSATFKLGIEFADFGQLNQRYIHSFGQTGQSSWLAEFIHFWREGLDRGIATDYGSYCLELEAAKANKFYTSAQNAPLNYAYHLDAGAYATFLKHISVQAGVNHVVDTIEQVTLNDAGHIDALQLRQTGNLHGDLFVDCTGFRARLLGESLDVGYEDWSHWLFCDRALAVQTELTPPLKPYTIASAHSAGWRWEIPLQHRMGNGFVYSSQYLDETTAHDTFTALLRNTPLQDVRSLQFTTGRRLKAWHKNCVAIGLSSGFVEPMESTSIHLIVMGITRLMQLFPYSGDYQHLQDEYNAQTQIELERIRDFIVLHYHVTQRDDSAFWRACKDMVIPDSLSERIELFKEHGHAFQKANELFRVDSWSQVMLGQGLLPKNWHPAAKMMSDEQLAGALKKGQMEISQRVAQLPDHEAFVAQYCGQNR

SEQ ID NO: 89714 - protein, 515 aa, Streptomyces kanamyceticus
  misc_feature (1)..(515): tr|A0A5J6GRP3|A0A5J6GRP3_STRKN Tryptophan 7-halogenase OS=Streptomyces kanamyceticus OX=1967 GN=CP970_02920 PE =4 SV=1
MRDVVIVGGGTAGWMTAAYLTAAFGNRVKITLVESADVGTIGVGEATFSDIRHFFEFLGLAERDWMPACNATYKLAVRFENWREPGHHFYHPFEQLKSVKGFPLTDWWLRYPTSKRFDTDCFVMASLIDANRNPRYLDNRLLEQEFVESDDLPNTIAEYQGAQFPYAYHFEAHLLAKYLTKYATDRGVRHVVDNVVDVGRDERGWLSHVDTAEHGRLAGDLFVDCTGFRGLLLNKALEEPFVSYQDTLPNDSAVALQVPMDMDKDPLRPCTTATAQDAGWIWTIPLISRIGTGYVYSGDYIDPEEAERTLREFVGPAAADVPANHIKMRIGRSRRSWVNNCVAIGLSSGFVEPLESTGIFFIHYAIEQLVKYYPAADWERSLREQYNSALMNVMDGVREFLVLHYRGAKRADNQYWRDTKIRTVPDSLAERLEQWESKVPDAGTVYPRYHGLPPYSYNCVLLGTGGIDVRPSPALDLIDEKDALAEFQAVRDKARHLVRTLPTQNEYFRRMREGV

SEQ ID NO: 89715 - protein, 556 aa, Rubrivivax sp.
  misc_feature (1)..(556): tr|A0A519I278|A0A519I278_9BURK Tryptophan 7-halogenase OS=Rubrivivax sp. OX=50259 GN=EOP39_18490 PE=4 SV=1
MQDARSPASLQVTAGRSGRNVAPPRRCCLPAGLIRSPVVSDIQSIVIVGGGTTGWLAACYLQRTLGAARQSPLPITLIEASQMARLGADEATVPTLRHTLQALGIRESAVFSAADATLTNGIRFNGWRQGGPAADDSFDHPFDLPPPFHGFAATAHWLNLMQRGLTKQPMAHACTVQTSLFDARLCPKLMDSPDYQAPVSYGYQLDASRLAMLLQQTALERGVRHVQGEVVKVHRGADGIESVELANGQRHSASFFIDCTGSQSLLLQQALGVPWVSYQEWLPCDRAVSLPVAHAKVHEPLRSYTTVTAQDAGWTWEMDLQSRRGTGYVYSSRFLGDDEAVQQLRNLHAGHLELAAPRVRHLRSGHAARAWEANCLALGPAGGYVEPLESTGLYVVEWMLQLFADHVAPAGNSVACRTRVNRVFADFYEEMRDFIVAHYALSRRRDTPFWRACTEEATLPPRLAELLALWDSKVPTPTDLDRRLSLFGAANWSYLLAGQHRLPSGGIGLSAHISPEISQKAMAHVRDIRRKASEASPTMRDYLLSLRTSAAPQAAH

SEQ ID NO: 89716 - protein, 519 aa, Alteromonas sp.
  misc_feature (1)..(519): tr|A0A5H3A677|A0A5H3A677_9ALTE Tryptophan halogenase OS =Alteromonas sp. I4 OX=2652380 GN=AltI4_40000 PE=4 SV=1
MNRNDIKRVVIVGGGTAGWMTAAALANKLQGLAIDIELIESDSIGTVGVGEATLPHIRFFNSALGIDEAAFMRETEATIKLGIEFCDWGNLGESYIHPFGDFGLPINNVDFYQHWLKHFQSGAISTPLHEYAAGVMSARHNKFRIPEQSSSNIEQHYGYAYQFDSSLYAKFLQRYAQAKGVIRTEGKIVEVKQHNDSGEVVSLVLDNQAVIEGDFFVDCSGFRGLLIEQTLHAGYDDWSEWLPCNRAVAIPCESTDPLMPYTRATAKAAGWQWRIPLQHRTGNGFVYWSEHISDDEASSQLLSALDGKPLAEPNQLYFKAGRRNVCWEKNVVAIGLSSGFLEPLESTSIHLIQEGITTLIELFPQQRVQQQDADEYNRRMALNFERVRDFLLLHYVATKRDDSDMWRYFRNLTLPDSLQTKIELWLSRGYIQRYEFGVFLPPSWIAVLLGQNLMPTGFDPRVNNTSDAEFIHTSERMRKAILNSVNNTPLHREFLTGYGAASNSKPLMSAMASTTSRGN

SEQ ID NO: 89717 - protein, 505 aa, Alteromonas sp.
  misc_feature (1)..(505): tr|A0A5H3A6H5|A0A5H3A6H5_9ALTE Tryptophan halogenase OS =Alteromonas sp. I4 OX=2652380 GN=AltI4_40030 PE=4 SV=1
MSAHSIKKIVIVGGGTAGWMAASAMSKLLHDDSITIELIESEEIGTVGVGEATIPHILYFNRLLGINENDFVKFTNGTFKLGIEFVDWGQTGESYIHPFGPYGMDMEGIHFHHLWLRQQKMGQAKPIDEFNLQILAAQANKFQRAQVELKGSPLSTIAYAFQFDAMLYARHLRGIAEANGVVRTEGKITRVNQHPENGHIASVDTDNGHHVEGDLFIDCSGFKGLLIEQTLNSGYEDWSHYLPCDRAIAVASNKLDELTPFTRATAKSAGWQWRIPLQSRTGNGHVYCSKFMDDDTALQSLYADLNSEPISEPNYLRFKAGIRKKPWNKNVVSLGLASGFLEPLESTSIHLIQTAIARLMTNFPDKLFNQHDIDYYNERTRLEYEQVRDFLILHYKATRRNDSPFWHYCRTMDIPESLHKRIEIYKQNARLYRHDNELFNHVSWFAVMHGQGIQPERYHPIADILSGDELHRRMEEIHSVTGKCLQVMPGHADFIAKHCKANLPG

SEQ ID NO: 89718 - protein, 183 aa, Nitrospira sp.
  misc_feature (1)..(183): tr|A0A532E5J6|A0A532E5J6_9BACT Tryptophan 7-halogenase OS=Nitrospira sp. OX=70125 GN=E8D44_08435 PE=4 SV=1
MEKAKPLTQTYAAANFSYRRDTMSGDGYLMVGDAFAFIDPVFSSGVHLALNSGTRGAKVVDAYLRKSPEYTAHLQEFERMVRRGIKTFSWFIHRFNQPAFQSMFVSTRRPPKIERAVLSLLAGDVFAQSQARIPLFCFKVVYYIVFVLNWKENWAVARRRKQGTKTTVTEVKDYAVNQANAPS

SEQ ID NO: 89719 - protein, 537 aa, Pseudomonas fluorescens
  misc_feature (1)..(537): tr|A0A4Y4JKF7|A0A4Y4JKF7_PSEFL Tryptophan halogenase OS =Pseudomonas fluorescens OX=294 GN=PFL02_59380 PE=4 SV= 1
MNKPIKNIVIVGGGTAGWMAASYLARALQQQVNITLIESAAIPRIGVGEATIPSLQKVFFDFLGIPEREWMPQVNGAFKAAIKFVNWRKSPDPSREDYFYHLFGSVPNCDGVPLTHYWLRKREQGFQQPMAYACYPQPGALDGKLAPCLADGTRQMSHAWHFDAHLVADFLKRWAVERGVNRVVDEVVEVQLNDRGYISTLLTKEGRTLEADLFIDCSGMRGLLINQALKEPFIDMSDYLLCDSAVASAVPNDDAREGVEPYTSAIAMNSGWTWKIPMLGRFGSGYVFSSKFTSRDQATADFLKLWGLSDNQQLNQIKFRVGRNKRAWVNNCVSIGLSSCFLEPLESTGIYFIYAALYQLVKHFPDTSFDPRLRDAFNAEIVYMFDDCRDFVQAHYFTTSREDTPFWLANRHELRLSDAIQEKVERYKAGLPLTTTSFDDSTYYETFDYEFKNFWLNGNYYCIFAGLGMLPDRSLPLLQHRPESIEKAEAMFASIRREAERLRTSLPTNYDYLRSLRDGAQLSRNQRGPTLAAQERQ

SEQ ID NO: 89720 - protein, 517 aa, Pseudoalteromonas sp.
  misc_feature (1)..(517): tr|A0A5H2Y1Q9|A0A5H2Y1Q9_9GAMM Tryptophan halogenase OS =Pseudoalteromonas sp. A25 OX=116092 GN=PA25_11710 PE=4 SV=1
MEVNETIDSVVIVGGGTAGWITAAKLAKRFNCKAEGAVSVTLIESPDIPTIGVGEGTWPTMRKTLASIGIDESEFIRTCNASFKQGSKFVNWKAAPTTTNNHYYHLFSSIADPAEFNLSPYWRLGHAGTKSYAEAVSTQGYLSDLYKAPKTIASKAYDGIQSYAYHLDAGKFAELLKKHAIDNLGVKFLSCNVTDVMTDTDGISSVMTDQCGQVKGDFFVDCSGFSCLLLGQALGVPFKPVSDVLFTDYAVAIQVPYSDPECDINSCTISTAQEAGWIWDIGLQNRRGVGHVYCSEFMSHEQAEKLLREYIGETSQDLPAKLVKMNVGYREKFWHKNCIAIGMSAAFVEPLEASAIFLIEAASNMLADQLPKKKSLLNIVENKFNESFLFRWNRTIDFIKLHYVLSERDEPFWLKNKETNSIPQSLLDALEQWATEPISPYDFSHVYDPFPMESYQYVLNGMNFKQDLSASGSKYSDVDNAKRAFGQIEKYRDMLIRDLPSNRALLNKLSSFSFSKV

SEQ ID NO: 89721 - protein, 511 aa, Pseudoalteromonas sp.
  misc_feature (1)..(511): tr|A0A5H2Y013|A0A5H2Y013_9GAMM Tryptophan halogenase OS =Pseudoalteromonas sp. A25 OX=116092 GN=PA25_16680 PE=4 SV=1
MVHSKQIKRVLIVGGGSAGWLTAGILAAAHKNKLEISLIESANIGTIGVGEGTWPTMRETLRKIGITEGEFIQQCDASFKQGSEFINWASSVDHAYYHPFSLPVGFEQGIDMVTPWLAVHDKVDFAHAVCAQAYWCDESKAPRLPSDIQFGGKGNYGYHLNADKFAKLLKRHCINELGVKLVLDDVHEVISLSDGDIRAVKTLQNVELEADLFIDCTGSRSLLLGKHYGISWLSQKHVLQNDRAIAVQVPHADERAPVASCTKSTGQPHGWIWDIALPTRRGIGYTFASNHCDFDIAKQQLSNYISEQGLEVSKENTFKEIHFNPGYREKFWHNNCLAIGMSAGFLEPLEASALVMIELSASYLSDNFPSTRSLMNVVASRFNAKFNYRWQRIIDFLKLHYVLSTRDDTPYWQQMRSEHIPQSLQELLLLWQYQAPKSTDLDRIDEVFSAASYQYVLYGMGFLPSNYEPTLNQDSASLFKQVTQNAQRGLGVLPTNRDLLTNVAKFGIPTI

SEQ ID NO: 89722 - protein, 507 aa, Alteromonas sp.
  misc_feature (1)..(507): tr|A0A5H3A337|A0A5H3A337_9ALTE Tryptophan halogenase OS =Alteromonas sp. I4 OX=2652380 GN=AltI4_28570 PE=4 SV=1
MVTTPQHICIAGGGTAGWMTAAALANRLPHSHYRITLVESSQIGTVGVGESTIPHIRQFNSALGITEDEFIAATSATCKLGIEFTDWGKVGDSYVHPFGELGKPLAGIEFHHLWQAASLQGLDVPIESFSVAAVAARQRKFSPPHASREHLLSTYTYAYHLDASAYARFLRDYAEQRQVIRVEAQIREVKHDHQGGPITALSLNNGQQISADWFIDCTGFRSLLINDFPQAGFIDWSAWLKTNRALVLPCEKDGASRPYTKAMARDAGWQWQIPLQHRIGNGYVYCSDYISDEEAEHTLRSTLPGEALADARFLDFKAGCRKQLWVENCVAIGLSAGFLEPLESTSIFLIQMGIAKFLEHLPGTHNDEGRNQYNRELTEQYQVIRDFIILHYYLTQRHDTPFWRDCQAMTLPDSLTELILAFRDSGLVDKKQYGLWPAVCIGQHLHPKQVDSRVAAIPPQQLIGILNQLKSDIAAQVATLPNMDDYLSSLVAQTPLQKNGMRAGGQV

SEQ ID NO: 89723 - protein, 506 aa, Rubrivivax sp.
  misc_feature (1)..(506): tr|A0A520C5B2|A0A520C5B2_9BURK Tryptophan 7-halogenase OS=Rubrivivax sp. OX=50259 GN=EOP35_00745 PE=4 SV=1
MNSALIQDIVIVGGGTAGWMTAAALSTVLRGRYRIRVVESDEIGTVGVGEATIPMIQRFNRIIGLDENEFLRATGGTFKLGIEFVNWGRIGDRYMHGFGRLGQDLWTVQFEQYWHRMRKLGRAQPLEQYCLARMAALANKFMPPRSDLGNSPLGEIAYAYHFDASLYARYLRGLSEQRGVVRTEGKVTHATRRGEGAHAGHVDAVVLEGGERIAGDLFIDCSGFRGLLIEQTLQTGFEDWTHWLPCDRALAVPCESAVPLTPYTRSTAHRAGWQWRIPLQHRTGNGHVYCSRYVSDDEAAATLLANLDGKPLADPRPIRFQTGMRKLAWKENVVAVGLAGGFMEPLESTSIHLIQSAIQQLIDFFPDRGFNADDIAEFNRSSRFHYERIRDFVILHYHLNQRDDSAFWQDCAHMSVPDSLQEKLDLYRSHGRVVRRDNELFAEVGWIQVMEGQNLLPERFHPLAELPDEQATADYLEGVRQVIAKCVDFMPDHAAYIAEHCAAKAL

SEQ ID NO: 89724 - protein, 497 aa, Alteromonas sp.
  misc_feature (1)..(497): tr|A0A5H3A1X6|A0A5H3A1X6_9ALTE Tryptophan halogenase OS =Alteromonas sp. I4 OX=2652380 GN=AltI4_23870 PE=4 SV=1
MTQSKTRVVIAGGGTAGWLSAFSLVTRLGALLDITLVESDQIGTVGVGEATIPTMCNFHRLMGLDEREFMAATQATFKLGIQFDNWGNQGDSYVHSFGEIGQRSWMAEFHEFWMEAVANGQQDTLEDYCLELKAAKQNKFALKVGNRPLNFAYHLDATAYAAYLRNKAEQAGVTRIEGKITTVNKHPDSGNLRELVLDNDARIEGDVFIDCTGFRALLIGEALGVGYDDWSHLLAADRAIAVQTTAVEPPRPYTIATAHNAGWQWRIPLQSRVGNGIVYSSRFSDDETALATLMSNVTGEAVTEPRYLKFKTGMRQQAWAKNCVAIGLSSGFLEPLESTSIHLVTTALIRLMKLFPFEGECGLLAERYNRETQKEMETIRDFIVLHYHLTQRDDSAFWDFYRNMEIPESLRHRMAMFVEHGYVWPDDVALFRVDSWVQVMMGQGLMPKRHHGASRMLPTASLTQQLTAFKQSVNNALAQLPEHDAFIKQYCPADKSA

SEQ ID NO: 89725 - protein, 505 aa, Xanthomonas campestris
  misc_feature (1)..(505): tr|A0A3S9RTH4|A0A3S9RTH4_XANCA Tryptophan 7-halogenase OS=Xanthomonas campestris pv. musacearum NCPPB 4379 OX= 1094184 GN=KWO_007010 PE=4 SV=1
MTQAQIRKVVIAGGGTAGWIAACALSHQFRDLLDITLVESEQIGTVGVGESTVPPIRTFHRFLQIDEQEFLRAVAGTFKLSISFENWLRQGDRYIHPFGITGQSTLVCAFHHLWLESQRRAMPGSFGDYCLETVASRVDRFALHGEPAVNYAYHLDAALYAKFLRARSEACGVKRIEGKIQQVTVQPHSGDVASLVLEDGQVIEGDLFIDCSGFRGLLIEQTLHTGYEDWSHWLPCDRAVAVQTEAVGPPVPYTRAIAHEAGWRWHIPLQHRVGNGLVFSSKHLSDDEAHTKLLHDVAAPAVKDPWMVPFRTGRRLKAWNKNVVSLGLASGFIEPLESTSIHLTISAVVRLLALFPAEGIAPSQVQLFNDVSRAEMEHVRDFVTLHYHATQRDEPLWQQCREMELPESLALRLRAWRERAHAWQGADELFRVDSWTHVLMGQGIAPEQHHPLTRAFADHDLRRLLDGIAQPIQHAVQQMPSQQAFIERYCKAGAQVWGMRSPMPA

SEQ ID NO: 89726 - protein, 514 aa, Alteromonas sp.
  misc_feature (1)..(514): tr|A0A5H3A7V5|A0A5H3A7V5_9ALTE Tryptophan halogenase OS =Alteromonas sp. I4 OX=2652380 GN=AltI4_40020 PE=4 SV=1
MKDSTPNILKQITIVGGGSAGWMTAAALSRMLPSGDVKITLVESEQIGTIGVGEATIPDMINFNKLLGISESEFIKATNGTFKLGIEFNDWGKLGDSYFHPFGGHGVDMNGVDFHQYWLHTLAAGNTCDLEDYSICAVAAKQNKFVLPEQNPNSVLSHLRYAYHFDATAYAAYLRKYAEQRGVKRIEGKIASVQQHTDTGNIAGLTLEDGTTVGGELFFDCSGFRSLLLGDTLGVKFRDWSHWLPCNTAQTVATEQTDKVLPFTRSTAKTAGWQWRIPTQQRVGNGHIYCDRFMGHDQARQILLDGLDSKPISEVRTIKFKTGCQEAFWEKNCIGIGLSAGFLEPLESTSLFLIQQGISRFISLYPDAGLHPVIRNEYNRLMTREFEQVRDFIILHYKATTRDDSPFWRYVRDMDIPDSLTHKMTLFQQGGRVFRDDHELFTRSSWVAVMVGQGIFPNTFDPILANIPVADIQRSLNSMKLAMEQSVSRLPDHAAFIDKYIAMQPNPTFSMGRQ

SEQ ID NO: 89727 - protein, 525 aa, Mesorhizobium sp.
  misc_feature (1)..(525): tr|A0A527DJ85|A0A527DJ85_9RHIZ Tryptophan 7-halogenase OS=Mesorhizobium sp. OX=1871066 GN=E5Y19_32500 PE=4 SV= 1
MTKSVLIVGGGTAGWMTASYLAKVFPKLRITVLESDIIPTIGVGEATFSTIKVFFDFLGLPESEWMPHCNATYKLAIKFANWGPEPGHFYHPFQRYATIDGFNAGEWWLRLKPGQQFDRSCFVTPALCEAKLSPCFLDGRVFDEKVQDLFADPRRKASVLSEHKEQYPYGYHFDAALFAKYLRDYATKLGVKQILDDVINVELADDGSIDHVIGKISERVSADLFVDCTGFRGLLLNEALQEPFISFKDSLLNDRAVALRVPSTPDTDEIEPFTTATTMSAGWTWNIPLYNRIGTGYVYSSQFITPEMAESELRNHVGSRAENCSANHIKMRIGRSRNSWVKNCIGIGLTSGFVEPLESTGIFFIQHNIEELVAHFPGENIDPDVVASFNRIVGSCIDGVRDFLVLHFKGSGRNDTPFWKAVKQTPLPDHLEERFQLWRKRLPNAKSIDSRYHGFEYYSYSVMMLGLGSAPTEYLPTLAQRDPTNAILSFNQVNEQSQKLVSTLPSHREYIMQLYSTAPHSERHK

SEQ ID NO: 89728 - protein, 538 aa, Pseudomonas fluorescens
  misc_feature (1)..(538): tr|I1V4X0|I1V4X0_PSEFL Tryptophan halogenase PrnA OS=Ps eudomonas fluorescens OX=294 GN=prnA PE=4 SV=1
MNKPIKNIVIVGGGTAGWMAASYLVRALQQQVNITLIESAAIPRIGVGEATIPSLQKVFFDFLGIPEREWMPQVNGAFKAAIKFVNWRKPPDHSRDDYFYHLFGSVPNCDGVPLTHYWLRKREQGFQQPMEYACYPQPGALDGKLAPCLLDGTRQMSHAWHFDAHLVADFLKRWAVERGVNRVVDEVVEVRLNDRGYISTLLTKEGRTLEGDLFIDCSGMRGLLINQALKEPFIDMSDYLLCDSAVASAVPNDDVREGVEPYTSAIAMNSGWTWKIPMLGRFGSGYVFSSKFTSRDQATADFLNLWGLSDNQSLNQIKFRVGRNKRAWVNNCVSIGLSSCFLEPLESTGIYFIYAALYQLVKHFPDTSFDPRLSDAFNAEIVYMFDDCRDFVQAHYFTTSREDTPFWLANRHELRLSDAIKEKVQRYKAGLPLTTTSFDDSTYYETFDYEFKNFWLNGNYYCIFAGLGMLPDRSLPLLQHRPESIEKAEAMFASIRREAERLRTSLPTNYDYLRSLRNGDAGQSRNQRGPTLAAKEGL

SEQ ID NO: 89729 - protein, 518 aa, Pseudoalteromonas sp.
  misc_feature (1)..(518): tr|A0A5H2YE62|A0A5H2YE62_9GAMM Tryptophan halogenase OS =Pseudoalteromonas sp. A25 OX=116092 GN=PA25_11720 PE=4 SV=1
MSQINNVVIVGGGTAGWISAALLAKKLNASSLGGVSITLVESPDIPIMGVGEGTWPTIRKTLQEIGIAEDEFIKECDASFKQGAEFVNWCQDPTKVGKHSYFHPLNATFHAAYDFNLAPYWLLDETKSKQPYDLASATQSYISSQGLAPKSITTPQYDAILNYSYHLNANKFAKLLTKHAVKLGVHHIQANIHHVHLDTAGFVRSVDTDTHGTIEGDFFIDCSGSKAIVLGEALGIKWKSISDIIFNDTALAVQVPYEKADSPIASNTIATAQTHGWTWDIGLQNRRGVGYVYSSSHTSEEHAYSTLVDYLGMPESDLSIRKLPLNLGYRKKFWNKNCVAVGMSAAFIEPLEASAIFLIEAAVNMIAEKFPRHLSELDYVEKQFNDTFTLRWEKSVDFIKLHYCISQRRDTQYWIDNAEDSTIPQTLQQKLQHWRYNVPSKYDFDYAFEPFVLDSYLFVLYGLKYKTDLQLKRSFYPQTQMANKKFSDVVKLNEHLSANLPTNRDLLEKILQNGLSKI

SEQ ID NO: 89730 - protein, 497 aa, Pseudoalteromonas sp.
  misc_feature (1)..(497): tr|A0A5H2XVC9|A0A5H2XVC9_9GAMM Tryptophan halogenase OS =Pseudoalteromonas sp. A25 OX=116092 GN=PA25_12430 PE=4 SV=1
MSAKQIKNVVIVGGGTAGWLSASFLAKVMGRLLNITVLESKDIGTVGVGEATIPPLQPFNSAMGIDETAFIKATKATIKLGIQFEGWGTQTSCYMHAFGAIGKDFPFCEFHNHWLHAKQQGNDSDFWDFSLNYQAAKNHKFAKLNAIPGTKLPGISYAYHFDAGLYAQFLTEHAKSMGVNHILGTVKEVIKDHKSGNIAALELDCGQQVQGDLFIDCTGMHGLLIDKALSTGFEDWSHWLPCDSALAVPCEHSDNKRAPYTRSIAHGCGWQWQIPLQHRIGNGLVYASKHLSDAQAKQMLLDNLPGKPLAEPKLIRFRTGRRRKQWHKNVVAIGLSSGFLEPLESTSIHLIQTAIVRLVKLFPHHGIEPTQVALFNEQSKVEFERIRDFIILHYKLNEREDSDFWRQCQDMEIPQSLSKKISLFAQIGKLIREDDELFAEVAWQQVFIGQGLKPEQLHPLIHAIDEQQRTELLSNLNTLIQQTVAAMPSHEQFLAKL

SEQ ID NO: 89731 - protein, 494 aa, Unknown; identical to SEQ ID NO: 87703
  misc_feature (1)..(494): tr|X2LAY5|X2LAY5_9BACT Tryptophan halogenase OS=uncultu red bacterium lac16 OX=1447240 PE=4 SV=1

SEQ ID NO: 89732 - protein, 578 aa, Deltaproteobacteria bacterium
  misc_feature (1)..(578): tr|A0A534Q075|A0A534Q075_9DELT Tryptophan 7-halogenase (Fragment) OS=Deltaproteobacteria bacterium OX=2026735 GN=E6J79_20185 PE=4 SV=1
MDGSSVLLSALCGKGTPSMTDRTDSNVLEQRLSSIVDALEAENVAADENELWFEPKLGGGLQIRLGREPHARCYDRSANFAISYGGHPATEPMSPAFRDALQRIKAIDDSPIDGAASAFPSAARAVADRFAPAPPVATAAVPLARPKVTGLRSVVVVGGGTAGYFAALALKREFRDLDVTLIESSKIPIIGVGEATTTLMPPFLHLQLGLDIVELYREVRPTWKMGIKFDWGQPGDYYFNYPFGNGNPVEARAHDGHINNQSLCSLMMSADRAPIVIGDDGAPISLLEYMPYAYHLENKSFVAHLEKCAQAAGIRHIDAEIKTVVPTADRESVDRLILDDGRELRADLYVDASGFRALMIEKALGSSFISYASSLFCDTAVVAEVPQRGPIQPYTTAQTMDAGWCWRIPVEGEDHRGYVFSSAHLSVDQARDEMRSKNPGMGDAWTVRFRSGRHEEFWKGNTVAVGNAYGFVEPLESTALHMVIMEMRVLLRCLHTAADGQWDRSFANRSVGLHWDYLRWFLAMHYRFNRKSDSEFWRTCRETVDVSGIEPMLERFRREGPVKEGGISPHAIPDPVFN

SEQ ID NO: 89733 - protein, 194 aa, Unknown
  misc_feature (1)..(194): tr|A0A059WI49|A0A059WI49_9BACT Tryptophan halogenase (F ragment) OS=uncultured bacterium OX=77133 PE=4 SV=1
AVVDGSRQLQIEAPHVRVLVLEKRRHPVREAAFKVGESSVEIGAHYFRSVLGLEPVLRSQHLEKLGLRYFFPHDGNQDITRRTELGPAFFPVVPSFQLDRGRLENWLLASLRESGVEVLDDCAVKRIDLQRGNHTVEFTGPGGSGTVRAKWLVDASGRAGLIRRQLGLTRTVNHGAKRTVNTAPMRPGSASRRA

SEQ ID NO: 89734 - protein, 348 aa, Deltaproteobacteria bacterium
  misc_feature (1)..(348): tr|A0A538Q5T6|A0A538Q5T6_9DELT Tryptophan halogenase (F ragment) OS=Deltaproteobacteria bacterium OX=2026735 GN =E6J90_34905 PE=4 SV=1
MSEYQDKVYDVAIMGGGPAGATLAARLARETELSVAIFEAEFFPRDHIGETLVHTIVPSLYESGALGKVLSSDCYVKKAGGFYSWDPKQPWASYFEHELHEHDGYFRWSIHCNRPEFDHILLTHARDSGAEVYEGTPVNGVSRQDDITTLDLGVHGTARCKLFVNCSGRTSSTTITGERQFLSNYRNIAIWNHIVGGRPAQSLPGDWNIFRERNLSPIASLAFEHGWFWYIPVPKLVQGKRVVTHSLGVVTDPSALSDPKKRFTDPRIFMDTARRVPLLGELIKDAQLVSDKFMTAPNYSRISGRMCDWDKREIRVGDAAYFVDPLFSSGVHFALQHAGMAMVMIKAA

SEQ ID NO: 89735 - protein, 513 aa, Devosia sp.
  misc_feature (1)..(513): tr|A0A0K0TRA9|A0A0K0TRA9_9RHIZ Tryptophan halogenase OS =Devosia sp. H5989 OX=1643450 GN=XM25_00370 PE=4 SV=1
MAKPSRFVIVGGGTAGWLAAFIIQDSARRMKLDATISVVESSKIRTVGVGEATTAAFRVFLQHFGIDEFEVFRETEATFKLGIRHQDWRRKGFTYYGPIDDPHQVVQPPQGAPSDYLNVYAVSVGKKVQDMHLFGPLLERRKAPYARKADGSLVRLGPFHHAYHFDQSLVGKYLKRKSNGVEIVDAVVEGVERDSERGDITALKLDSGERLEGDFFIDATGFRKRLIVQELQAPWISYARELPVNRALPFWLDIKEGDEIANYTLAWAQENGWMWQIPTQTRYGCGYVYSDEFTTPEQAKLEVERALGHEIEVRDDIRFSIGRLEKAWMGNCVAVGLSSSFLEPLESTSIHGTIVQMMLFAEHYLKEPGRMTPAERDDYNRRVGRQVDDFRTFVNTHYATERDDTPFWRNVRAERLHPETQERLARWRTEMPRAEHFPNYLGGLPHIETQLHYPVLDGLGLLDPAVAKAEMARDPKLRAFAKKTHDELVKEYKQAATRAMGHAEFLQAVRDMA

SEQ ID NO: 89736 - protein, 508 aa, Massilia sp.
  misc_feature (1)..(508): tr|A0A344JJN3|A0A344JJN3_9BURK Tryptophan 7-halogenase OS=Massilia sp. YMA4 OX=1593482 GN=DPH57_20335 PE=4 SV= 1
MAHPIRHIVIVGGGSAGWLTAGVIAADHRAHAPDGLRVTLIESPDVAPIGVGEGTWPTMRDTLARIGVSETAFFRECDAAFKQGSRFDGWRGSEHADYYFHPFVLPRGYGETDLVQPWQREFSHVPFADLVSFQPHLCVQGRAPKQATTPEFAAVANYGYHLDAGKFGVFLRKHCLERLGVHYVPDHVTGIASHENGDIAALQTRAHGALAGDLFIDCTGMQSLLLGQHYGIGLVDQRHVLFNDSALAVQVPYLNEDSPIASQTTSTAQRAGWIWDIGLPTRRGIGHVYSSAHTSDDGAAADLCAYLGTDATPRKLTFQPGYRRTFWHRNCVAIGLSAGFIEPLEASALALVELSAALVSDDLPATRATMDAVARRFNDAFTYRWERVIEFLKLHYVLSRRPGAYWDDHRDERSIPVRLQELLALWRHRPPSRLDFHRIEEVFPSASWQYVLYGMGFTPEPGGTRRTDPTVAAQYYREAADLTRRMLGALPSNRALIDHIRRHGLQKI

SEQ ID NO: 89737 - protein, 477 aa, Massilia sp.
  misc_feature (1)..(477): tr|A0A344JP03|A0A344JP03_9BURK Tryptophan halogenase OS =Massilia sp. YMA4 OX=1593482 GN=DPH57_20350 PE=4 SV=1
MVAAGLSKSLGKLLDIKLIESDEIGTVGVGEATIPTLMNFHHLLEIDEREFMAETMATFKLGISFENWRNVGEDYIHSFGTTGTDHWTAGFQHFWHKGRERGLAGDYGDYCLELKASLHNRFAHLPKNGMNYAYHMDAGRYAKFLRRFSERYGVQRVEGKIAEVRKDLICGDIRALRLDSGVELEGDLFIDCTGFRALLIGETMGVGYEDWSHWLFNDSAAALQTKSVGDAIPLTRSIARESGWQWRIPLQHRVGNGIVYSSRYTDDDTAIRTLQANVEGEPLMTPRIIRFKPGQRQQTWKGNCVAIGLASGFLEPIESTSIHLIQRGIIRLMQMFPTDGISQADIDEYNKQAETEIHHIRDFIILHYHVTNRRDTPYWRDAASMPVPASLRHRIDLFRETGRVFRIPNELFAENSWIQVMLGQGIHPRQHHQTADLMGDDELAHFLGSMATSIERTVAQLPSHQQYVQQYCAGTGW

SEQ ID NO: 89738 - protein, 219 aa, Streptomyces hebeiensis
  misc_feature (1)..(219): tr|V9XSP3|V9XSP3_9ACTN Tryptophan 5-halogenase (Fragmen t) OS=Streptomyces hebeiensis OX=229486 PE=4 SV=1
GGGTAGWMTASYLKEAFADRIDVTLVESAAVSRIGVGEATFSTIRHFFDYLGLDEADWLPKCAGGYKLGIRFENWDGDGGHFYHPLERLRMVDGFSLADWWLELGDRGRPMDRSVFLTTALSEAKRSPRMLDGTLFAAGLDGSLGRSTLDEQRAQFPYAYHFDADKVARYLADHATGRGVRHVIDSVEQVVQDQRGWISEVRTAGHGSLHGDLFIDCSG

SEQ ID NO: 89739 - protein, 219 aa, Streptomyces fungicidicus; identical to SEQ ID NO: 86383
  misc_feature (1)..(219): tr|V9XPW9|V9XPW9_9ACTN Tryptophan 6-halogenase (Fragmen t) OS=Streptomyces fungicidicus OX=68203 PE=4 SV=1

SEQ ID NO: 89740 - protein, 589 aa, Microcystis aeruginosa
  misc_feature (1)..(589): tr|A0A5J5LSX9|A0A5J5LSX9_MICAE Tryptophan halogenase OS =Microcystis aeruginosa EAWAG127a OX=2529855 GN=EZJ55_0 8480 PE=4 SV=1
MQMTQDKEYDVVIMGAGFAGLCQARHLMLKIPNIKVALVDPRPEQRTDKDLKIGESTIEIAALFLAKELGLHDYLIENHAPKQGLNFHWPKNPAKTETIDDYYHAGSNRQVPIPSFQINRSKFEQDLLKMDKAMGINFYNGQVVDVDLTPGDAIKTVKIKVGDERMELQAKHVIDAAGRKFIIGRKTDNLLFGPENLMGLNTGSAWVRVKNVDRTIFHSGYDPLNASTSHYYSTNHYFGEGHWLWMIPIDTQTMELSIGVIHHHDVINSTQVNSREKFHDFLRNNHQILANIIDSGEAVDFHYWPRISHTSKTLFSPDNWYVLGDAAYIFDAFYSYGTTTIALAIEGITEIVRAKLAGEADAEQKRAAYNEFNLAYSRSVNCLYRGHAKQLGQASVMSWRIYFEYMWWFGVQVPMYVGKWHLDLTYIPIFLKTLNSNIDGLFADLNEQFTELADKDVNIGLMDCYRGDQLFKGYHTLKHFDDFLENTKFEPRRCNVFAGLKATCFYAALWYALFQWKGFGIQGCLNPRHIYHFLRLLGLSGQATIGELIYKFKTKGLPANSEIEAMRQEFKTYQYQPKLQPWLAEATNS

SEQ ID NO: 89741 - protein, 447 aa, Deltaproteobacteria bacterium
  misc_feature (1)..(447): tr|A0A534XBD3|A0A534XBD3_9DELT Tryptophan 7-halogenase OS=Deltaproteobacteria bacterium OX=2026735 GN=E6J59_05 560 PE=4 SV=1
MRDAPDVVVIGGGPAGAVAATLLADAGHRVLVLERERFPRYHIGESLLSATLPILDAVGATPAIERHGFLKKPGGTFLWGRQREPWSFWFREDPGGRPHAYQVVRAEFDQLLLENARAHGADVREEHAVTAVEPDDGRPIVRARSARGAALRLAPRFVVDASGQAAVVGRARAFRQFDDFFKNLAVFGYFRGAERLPGELANHILSAAFADGWFWYIPLHDGTMSVGAVVDARRWRTLADGDPEGTYRGLIARCPAIAERLARAALVSPIRVIRDYSYTSTRFTGPGFLLAGDAACFIDPVFSTGVHLACLAGFLGARAVDSILSGAAPEAEALARYEAAYRGAFERYLRFLYFFYDHNEDPDSYFWTARRILTHAPAELSTREAFVRLISGNGDWDAAATLVASEHARWAEGIHSGRPSAVPGSDLLRVRTTSVLTGLPARPRDDS

SEQ ID NO: 89742 - protein, 508 aa, Pseudoalteromonas distincta
  misc_feature (1)..(508): tr|A0A5B0UP76|A0A5B0UP76_9GAMM Tryptophan 7-halogenase OS=Pseudoalteromonas distincta OX=77608 GN=EU511_00945 PE=4 SV=1
MNKTIKTIAVIGGGTAGWLSAAIIASYHQGKNGDGLKVMLVESSDIPTIGVGEGTWPTMKNTLQQIGLREVDVFKACNATFKQGGKFVNWTHGNNDFYYHPFTVPLGYGRIDLAPYLDNVEDFAQQTNFQHDICEASLAPRGIAQGEYQGNCNYAYHLDAGAFAEMLKQHCKSKLGVEHIIGTVDQVKLDDDGAINELTLKDQTRIISADLFIDCTGFSSLLLGQALNVPFKKMDHVLFNDSALAMQVPYDENDDSLASHTIATAQNAGWIWDIGLTHRRGVGHVYSSKFLSDDEAEQNLRNYLGDAANGLTARKISFESGYREKFWHKNCVAVGMSAGFVEPLEATAIMLVEISARFVAEHMPADTQVMPIVAKRFNEQMDYRWQRIIDFLKLHYMLTKRPEPYWQAHVHPDTIPQTLQEDLLLWGSRGPLIQDFHGALELFPAASYQYVLYGMGFKPDFTKQAYLYSQDAQAKQIIERNSQLTQQMLQTLPPHRAYIEQWLAANPV

SEQ ID NO: 89743 - protein, 290 aa, Unknown
  misc_feature (1)..(290): tr|A0A2I6QNI1|A0A2I6QNI1_9BACT Tryptophan halogenase OS =uncultured bacterium OX=77133 PE=4 SV=1
MLIGGTLGVEFDDWTHWLPCDRAVVAPCEKVGPPTPYTRSTAHKSGWQFRIPLQHRTGNGHVYSSQYISDDEAADTLLSNLDGRALGDPKLLRFKTGKRRKLWDRNVIALGLAGGFLEPLESTAIYLIQAGINRLMNLFPTADCDPALQDVYNEQAEFEYERIRDFLILHYHATERDDSDFWNYVRTMSIPDALKSHIDLFAANGQFFRNGEELFGLTSWVQVMLGQGITPRTYHPAVDWVEDKDMLALVSHVEKVLESNVRLMPHHEEFIQRCCAATDVRFQVEAVHKF

SEQ ID NO: 89744 - protein, 175 aa, Unknown
  misc_feature (1)..(175): tr|A0A0U3ACG4|A0A0U3ACG4_9BACT Tryptophan halogenase (F ragment) OS=uncultured bacterium OX=77133 PE=4 SV=1
MNQPLDTIVIVGGGTAGWMTAGGLAHFLRNSRTQITLIESDDIGTVGVGEATLPSIIGFNRLLGIDERDFVRATQGTFKLGIQFVDWKQKGETYFHPFGSYGHKLDICDFHHYWLKARRSGLKAPLDDYCLNAILARDHLFSPPVNDPSTPLSTLTHAYHFDAGLYARYLRTYAE

SEQ ID NO: 89745 - protein, 530 aa, Unknown
  misc_feature (1)..(530): tr|V9Y1J3|V9Y1J3_9BACT RebH-like halogenase OS=uncultur ed bacterium OX=77133 GN=asmbl_17 PE=4 SV=1
MADKIEKILIVGGGTAGWMAASYLGKALQGTVDITVLQAADIPTLGVGEATIPNLQTAFFDFLEIEEDDWMRECNASYKMAIKFVNWRSAGEGVADPREAAGRSDHFYHSFGLLKYHERIPLSHYWFDRKYRGETTEPFDYACYKEPVILDAKKSPRWLDGTKATNYAWHFDAHLVADYLRRFATEKLGVHHVEDRVEHVTRDANGLIESVRTATGRVVGADLFIDCSGFRGLLINQAMAEPFVDMSDHLLNDRAVATAVPHDDATHGVEPFTSAIAMRSGWTWKIPMLGRFGTGYVYSSQYATEDEAVREFCDLWRLDPETQPLNKIRFRVGRNRRAWVKNCVSIGTSSCFVEPLESTGIYFIYAALYQLVKHFPDKGLNPVLADRFNREIEIMFDDTRDFIQAHFYFSPRTDTPFWKANKQLRLGDSMREKIDMYRAGMAINAPASDDAQLYYGNFEEEFRNFWNNSNYYCVLAGLGLEPDAPSPRLAHMPMATESVAEVFRVIEAEQRHLLEKLPSCYDFLKLQHGR

SEQ ID NO: 89746 - protein, 602 aa, Microcystis aeruginosa
  misc_feature (1)..(602): tr|A0A5J5LTJ4|A0A5J5LTJ4_MICAE Tryptophan halogenase OS =Microcystis aeruginosa EAWAG127a OX=2529855 GN=EZJ55_0 8475 PE=4 SV=1
MNYTITQSREYDVVIMGAGFAGLCQARHLMLNIPNIRVALIDPRPVERTDKDLKIGESLIEVAALFLCKELGLHDYLIENHPPKSGLNFHWPKEPAKTETLDDYYHVWANRQTPVGSFHLQRAKFEQDLLVMNCQMGADFYEGRVKDVALTSGDELKTVYAKVGEENITLQAKHVIDAAGKNFIIGRKTDNVLSGPENLLGLNNGSAWLRVKNIDRTIFHSGYHPEGASTSHYYATNHYFGQGHWLWMIPIDKHSMELSIGIIHHHDVIPAQSINNLEKFSNFLKSNHTILSRLIESGEVVDFHYWPKIAHKSKVLFSPDNWYVIGDAAHIFDAFYSYGTTMIAFEVESVTEIIRAKLTEEAAAEQKRSAYNDFNLAYARTVNCLYRDHAYQLGHASVMSWRIYFEYMWWFGVHVPTYIGKWHLDLNFIPRYVTIADGNVNGIFADLCREFHQLVSQGANIGLMDAYRADQLLGGYGTLKHFDDFLENTKFEPRRCNVFASMKAAYFYIAIWYALFQWKAFGIAGWLNPKHWYYFGRMLKLSIQATIAEVIYKRKTRGIADNSQIEKMREEFKNYHYQPQKKSPSVVQNVVGERVTIESFPA

SEQ ID NO: 89747 - protein, 196 aa, Unknown
  misc_feature (1)..(196): tr|M9QXS1|M9QXS1_9BACT Flavin reductase OS=uncultured b acterium OX=77133 GN=borF PE=1 SV=1
MEGSVNGSQRGNGSQRERVPEPGAGPTTDLLRDSRSLRGIFSSFATGVTVVTVGGDSPHAMTANSFTSVSLDPPLILVCVECDAAMHGSLLEVGSFGVSVLAADQQHVALLYANRWRPRDPTQFDRPGWARGARTGAPLARGALAWFECALWRAYDAGDHSIFVGRLLTAERHDRRDALVYHSGQFRGLPDRAPVE

SEQ ID NO: 89748 - protein, 238 aa, Streptomyces albogriseolus
  misc_feature (1)..(238): tr|A0A1B1V576|A0A1B1V576_STRAO Uncharacterized protein OS=Streptomyces albogriseolus OX=1887 GN=thdM PE=4 SV=1
MSTEEKSSAEKSSVPDGSPVLYRPEDLARITEDLPFIRTIADWCTEFLSKPHPDLGRGGSVCPFIPRALAMNRVSFVVLHTANRTEAEIDGIIASYRQTILDMEPRSGQEAIDKAIMVILPDVSGEDAAEVVDETHRRLKAEFVASGLMIGKFHPRSEQGGLHNPGFRPLRSPIPLLAIRHMVDSDLPFLNRVDDPVPDRIKFLESYGQRFEDAEESRWSEKGRAAIGELRVRAESDK

SEQ ID NO: 89749 - protein, 153 aa, Streptomyces albogriseolus
  misc_feature (1)..(153): tr|A0A1B1V578|A0A1B1V578_STRAO Putative Protein/1 bindi ng protein OS=Streptomyces albogriseolus OX=1887 GN=thd B PE=4 SV=1
MRSSELTIGRSFGLNFDHKEDFFQTLADFCKENDVRQGYIPMFLAAFAETEIAGTCDRVEDPEAPVRLPVYLEKVEAVGSGTFSYDPDRDIVVPHVHVTVGLKQQSALAYSSHLISATVQYLTEMLIVEVASPHMRRPVKTELYDVPLLTFES

SEQ ID NO: 89750 - protein, 523 aa, Streptomyces toxytricini
  misc_feature (1)..(523): tr|E9P162|E9P162_9ACTN Tryptophan 6-halogenase OS=Strep tomyces toxytricini OX=67369 GN=stth PE=1 SV=1
MNTRNPDKVVIVGGGTAGWMTASYLKKAFGERVSVTLVESGTIGTVGVGEATFSDIRHFFEFLDLREEEWMPACNATYKLAVRFQDWQRPGHHFYHPFEQMRSVDGFPLTDWWLQNGPTDRFDRDCFVMASLCDAGRSPRYLNGSLLQQEFDERAEEPAGLTMSEHQGKTQFPYAYHFEAALLAEFLSGYSKDRGVKHVVDEVLEVKLDDRGWISHVVTKEHGDIGGDLFVDCTGFRGVLLNQALGVPFVSYQDTLPNDSAVALQVPLDMEARGIPPYTRATAKEAGWIWTIPLIGRIGTGYVYAKDYCSPEEAERTLREFVGPEAADVEANHIRMRIGRSEQSWKNNCVAIGLSSGFVEPLESTGIFFIHHAIEQLVKHFPAGDWHPQLRAGYNSAVANVMDGVREFLVLHYLGAARNDTRYWKDTKTRAVPDALAERIERWKVQLPDSENVFPYYHGLPPYSYMAILLGTGAIGLRPSPALALADPAAAEKEFTAIRDRARFLVDTLPSQYEYFAAMGQRV

SEQ ID NO: 89751 - protein, 505 aa, Betaproteobacteria bacterium
  misc_feature (1)..(505): tr|A0A537ATW7|A0A537ATW7_9PROT Tryptophan 7-halogenase OS=Betaproteobacteria bacterium OX=1891241 GN=E6H52_061 95 PE=4 SV=1
MNENRVRRIGILGGGTAGWMTASALSKAIGPRVQTFLIESDEIGTIGVGEATIPTIHWFNQLTGLNHNEFMRETKATYKLGIEFENWARPGHVYLHPFGRYGDTNDSLPFHHRWIRARQEGLDDGIEQYSLTTLVARAGKFAFPASDPNSPLATLGYAFHFDASLYARYLRKHSEARGVRRFEGKVIKIDQHPETGFVTSLRTDKGDQLDADLFIDCSGLRGVLIGGVLGSAFEDWSHWLPCDRALAVPTERTGPPVPYTRSEALAAGWQWRIPLQHRNGNGYVYSSKFISDDEAASVLLNNLDGKPLADPRPIRFTAGRRKRSWDKNVVAIGLSGGFLEPLESTSIHLIQSAIAKLLSLFPTRQCDPYTAEQFNRVLSQEFEAVRDFLVLHYHSTTGKNEPMWEYCRSMPLPEALVYKEEHFKRSGRIVLAPEELFKDGSWLAVLTGQGHIPGDYNPLLDSVSSKDNFVYLRRTKDLLRATCQRLPSHESHIRAITEAPPVGVA

SEQ ID NO: 89752 - protein, 439 aa, Betaproteobacteria bacterium
  misc_feature (1)..(439): tr|A0A536TFI8|A0A536TFI8_9PROT Tryptophan 7-halogenase (Fragment) OS=Betaproteobacteria bacterium OX=1891241 G N=E6H76_12415 PE=4 SV=1
ATYKCGITFDGWSTKPGFESYFHPFASMLDNLTMTQFVHNSQARVNGADVCAHPNRFFIASYLAHNNLAPKPERTFPFDVWYGYHFDSVLLGQYLHKKALQRGVKYTKCHVTGVQLNERGEIASVSIQDGEPVTADIFVDCTGFAGILIQKALGTPFVSFSNNLFNDAAIAMPTPIGDDIPSQTISTALKHGWRWKIPLTSRYGNGYVYSSAFCSADDAERELREGLGMLDSDTPARHLKMKIGRVTKHWNKNCLAVGLAQGFIEPLEATALLFIQRTVTAFVEFLEAGDLSEAAHERFNQRVNDHFEGTRDYIVTHYKTNTRRDTEYWRANAANTNLSDSLRQLYGLWMSGKSIAADVGRQAIGKGYPVFSWYCIMSGMGIFPDPKDLRPAAPPDNRYSMEEIDNLLQRSTLNFRSQRDVLMNIPQKVQERSLQIYFW

SEQ ID NO: 89753 - protein, 542 aa, Betaproteobacteria bacterium
  misc_feature (1)..(542): tr|A0A536W2X6|A0A536W2X6_9PROT Tryptophan 7-halogenase OS=Betaproteobacteria bacterium OX=1891241 GN=E6H64_135 55 PE=4 SV=1
MTAPPDRAPTATLFNYSYSVKQSDKPTSIPPAIRKIVIVGGGSAGWMTAMILANALIRHGIEISVLESPMVGIIGVGEGSTPWLRGFFDSLGIEESEWMPECNATYKCGITFDGWSTKPGFESYFHPFASMLDNLTMTQFVHNSQARVNGADVCAHPNRFFIASYLAHNNLAPKPERTFPFDVWYGYHFDSVLLGQYLHKKALQRGVKYTKCHVTGVQLNERGEIASVSIQDGAPVTADIFVDCTGFAGILIQKALGTPFVSFSNNLFNDAAIAMPTPIGDDIPSQTISTALKHGWRWKIPLTSRYGNGYVYSSAFCSADDAERELREGLGMLDSDTPARHLKMKIGRVTKHWNKNCLAVGLAQGFIEPLEATALLFIQRTVTAFVEFLEAGDLSEAAHERFNQRVNDHFEGTRDYIVTHYKTNTRRDTEYWRANAANTNLSDSLRQLYGLWMSGKSIAADVGRQAIGKGYPVFSWYCIMSGMGIFPDPKDLRPAAPPDNRYSMEEIDNLLQRSTLNFRSQRDVLMNIPQKVQERSLQIYFW

SEQ ID NO: 89754 - protein, 542 aa, Betaproteobacteria bacterium
  misc_feature (1)..(542): tr|A0A536Z740|A0A536Z740_9PROT Tryptophan 7-halogenase OS=Betaproteobacteria bacterium OX=1891241 GN=E6H53_141 20 PE=4 SV=1
MTAPNDRAPTATLFNYSYSSKESDKPTSIPPGIKKIVIVGGGSAGWMTAMILANALISQGIEISVLESPAVGIIGVGEGSTPWLRGFFDSLGIQESEWMPECNATYKCGITFDGWSTKSGFESYFHPFASMLDNLTMTQFVHNSQARVNGADVYAHPNRFFISSYLAHNNLAPKPQRTFPFDVWYGYHFDSVLLGQYLHKKAMQRGVKYTKCHVTGVQLNERGDIASVSIKDGEPVTADIFVDCTGFAGVLIQQALGTPFVSFSNNLLNDAAIAMPTPIGDEIPSQTISTALKHGWRWKIPLSSRYGNGYVYSSAFCSADDAEHELREGLGMLDSETPARHLKMKIGRVTKHWNKNCLAVGLAQGFIEPLEATALLFIQRTATTFVEFLEAGDLSEAAHDRFNQRVNDHFEGTRDYIVTHYKTNTRRDTEYWRANAENTNLSDSLRQLYGLWMAGKSIAPDVGRQAIGKGYPVFSWYCIMSGMGIFPDRKALRPATAAEERYSMEEIDNLLQRSALNFGRQREVLTNIPKKVDERSLQIYFW

SEQ ID NO: 89755 - protein, 512 aa, Mycobacterium sp.
  misc_feature (1)..(512): tr|A0A145U243|A0A145U243_9MYCO Tryptophan halogenase Pr nA OS=Mycobacterium sp. QIA-37 OX=1561223 GN=Chelonae_p 3235 PE=4 SV=1
MLEEVVIVGGGTAGWMTASYLKVAFGDRIAVTVVESARIGAIGVGEATFSTIRHFFEYLGLEEHEWMPSCCATYKLGIRFQDWRKPGHHFYHPFERQRVVDGFGLTDWWLDNPRSDSFDRDCFLIGTLCDNDKSPRRLDGSLFMGTDGENTAYRTTLSEQDTQFPYAYHFDASLLADFLRDFAVRRGTRHVVDDVVDVLQDDRGWISQVRTRAHGSIGGDLFIDCTGFSGLLLGRAMGEPFESYQGSLLNDRAVALRVPTDQDRGHLPPYTTATAQDAGWIWSIPLFDRIGTGYVYAEDYCSPEDAERALRDFVGPEAEGLEANHIRMRIGRSRRSWVGNCVAIGLASGFVEPLESTGIFFIQHGIEQLVKHFPDANWEESLRDSYNRVINRCMDGVREFLVLHYYLAARVDTQYWRDTKSVQLPAALAERIEHWRSKLPDTGSVYPHYHGFEPYSYVCMFVGLGGIPARPSTVVRYLDATRAQREFDLLAQQASRLRHSLPTHREYLAQMY

SEQ ID NO: 89756 - protein, 542 aa, Betaproteobacteria bacterium
  misc_feature (1)..(542): tr|A0A536ZRH9|A0A536ZRH9_9PROT Tryptophan 7-halogenase OS=Betaproteobacteria bacterium OX=1891241 GN=E6H55_054 35 PE=4 SV=1
MTAPNDRAPTATLFNYSYSVKQPDKPTSIPPAIRKIVIVGGGSAGWMTAMILANALIRHGIEISVLESPMVGIIGVGEGSTPWLRGFFDSLGIEESEWMPECNATYKCGITFDDWSTKPGFESYFHPFASMLDNLTMTQFVHNAQARVNGADVCAHPNRFFIASYLAHNNLAPKPERTFPFDVWYGYHFDSVLLGQYLHKKALQRGVKYTKCHVTGVQLNERGEIASVSIQDGEPVTADIFVDCTGFAGILIQKALATPFVSFSNNLFNDAAIAMPTPIDNDIPSQTISTALKHGWRWKIPLTSRYGNGYVYSSAFCSADDAEHELRDGLGMLDSDTPARHLKMKIGRVTKHWNKNCLAVGLAQGFIEPLEATALLFIQRTATTFVEFLEAGDLGEAAHERFNQRINDHFEGTRDYIVTHYKTNTRRDTEYWRANAANTNLSDSLRQLYGLWMSGKSIASDVGSQAIGKGYPVFSWYCIMSGMGIFPDLKDLRPASPTDNRYSMEEIDNLLQRSVLNFRSQRDVLMNIPKKVEERSLQIYFW

SEQ ID NO: 89757 - protein, 291 aa, Betaproteobacteria bacterium
  misc_feature (1)..(291): tr|A0A536VQQ1|A0A536VQQ1_9PROT Tryptophan 7-halogenase (Fragment) OS=Betaproteobacteria bacterium OX=1891241 G N=E6H65_00340 PE=4 SV=1
IQQALKTPFVSFSSNLFNDAAVAMPTPIGDDIPSQTVSTAMKNGWAWKIPLTARYGNGYVYSSSFCSADEAERELREHLGLLDSPTPARHLKMKIGRVTKHWNRNCLAVGLAQGFIEPLEATALLFIQQTASAFVEALEAGDVSEAAHERFNERVNQHFEGTRDYIVTHYKTNSRSDTEYWRANASNENLSEPLKQLFGFWMAGKPIAGDVGRQTIGKGYPVFSWYCIMSGMGIFPDAHTLRAPTPSEARYKMSEIDNLLQRSALNFVKQRDLLADIPPKRREDALQIYFW

SEQ ID NO: 89758 - protein, 541 aa, Betaproteobacteria bacterium
  misc_feature (1)..(541): tr|A0A536ZTP9|A0A536ZTP9_9PROT Tryptophan 7-halogenase OS=Betaproteobacteria bacterium OX=1891241 GN=E6H48_178 05 PE=4 SV=1
MTIRTQGPTATVFNYSYTFTQPAKPTSIPPAIKKIVIVGGGSAGWMTAMILADALIKKGIEIEVLESPTVGIIGVGEGSTPWLRGFFDGLGIEESEWMPACNATYKCGITFDGWSTKPGFESYFHPFASMLDNLTMTQFVHNAEARANGTDVCAHPNRFFVAAYLADRHLAPRPKRTFPFDVWYGYHFDAVLLGEYLHRKAVERGVRYRKCHVNGAQLNESGDIASVSIQDGEPVAADIFVDCTGFGGLLIQKALGTPFISFSNNLFNDAAVALPTPLGDDIPSQTISTALKHGWRWKIPLTSRFGNGYVYSSAFCSADEAERELRESLGMLDSETAARHLKMRIGRVTRHWNKNCLAVGLAQGFIEPLEATALLFIQRTATHFLEFLEAGDLSESAHDRFNQRINDHFEGTRDYIVTHFKTNTRHDTEYWRANAENRNLSDSLRHLYGLWMSGKSIAPDVGRQTIGKGYPVFSWYCIMSGMGIFPDQKDLRPPTAAENRYSMDEIDNLLGRSAQNFSGQRETLNNIPAKIRERSLQIYFW

SEQ ID NO: 89759 - protein, 516 aa, Nocardiopsis sp.
  misc_feature (1)..(516): tr|A0A141R7F5|A0A141R7F5_9ACTN Halogenase OS=Nocardiops is sp. 531F OX=1517244 PE=4 SV=1
MLSEPSMTDAHPNPPLKTITIVGGGTAGWMAAALLSRLTLGAYTIRLIESEEIGTIGVGEATIPAIRTFNGPAGIDEFEMVRATQATFKLGIELRNWGAPGDSYIHGFGKIGQDLYWLHCHQFWLKERAAGRAKHLDHYALNTLAARMNRFAMPDPSNPQSPIADIDYAYHFDASLFARFLRGRAEAAGVERIEGRIVAANRRGSDGFLDHVVLADGRTVDGDLFIDCSGMRGLLIGEAMGVGYEDWSQWLLCDRALAVPSARGRGPLTPYTRSIAHGAGWQWRIPLQHRTGNGHVYSSRFMSDDEAATTLLANLDTPALGDPRPVRFRPGKRTRAWEKNVVALGLAGGFLEPLESTSIHLIQTGLLRLLALFPGRGFHAADMAEYNRQTDFEYRDVRDFIIAHYKVTLREDTPFWQYCRHMEVPDSLAERIELFRSSARFFMHGKAELFREESWVQVLLGQGLDAQYDPMVDMIPEAQTAAFLSDVEEVIAEVASGLPTHEAFIARHCQAPPLQG

SEQ ID NO: 89760 - protein, 154 aa, Betaproteobacteria bacterium
  misc_feature (1)..(154): tr|A0A536STP5|A0A536STP5_9PROT Tryptophan 7-halogenase (Fragment) OS=Betaproteobacteria bacterium OX=1891241 G N=E6H78_21570 PE=4 SV=1
LAHNKLAPKPQRTFPFDVWYGYHFDSVLLGQYLHKKALERGVKYTKCHVTGVQLNERGDIASVSIKDSEPVKADIFVDCTGFAGILIQQALGTPFVSFSNNLFNDAAIAMPTPIGDEIPSQTISTALKHGWRWKIPLTSRYGNGYVYSSAFCSA

SEQ ID NO: 89761 - protein, 506 aa, Kordiimonadales bacterium; identical to SEQ ID NO: 86432
  misc_feature (1)..(506): tr|A0A5A7MLP5|A0A5A7MLP5_9PROT Tryptophan halogenase OS =Kordiimonadales bacterium JCM 17844 OX=1236966 GN=JCM1 7844_02510 PE=4 SV=1

SEQ ID NO: 89762 - protein, 211 aa, Betaproteobacteria bacterium
  misc_feature (1)..(211): tr|A0A536SSU0|A0A536SSU0_9PROT Tryptophan 7-halogenase OS=Betaproteobacteria bacterium OX=1891241 GN=E6H78_215 75 PE=4 SV=1
MLDSETPARHVKMKIGRVTKHWNKNGLAVGLAQGFIEPLEATALLFIQRTATSFVEFLEAGDLSEAAHDRFNQRINDHFEGTRDYIVTHYKTNTRRDTEYWRANAENTNLSDSLRQLYALWMSGKSIAADVGRQAIGKGYPVFSWYCIMSGMGVFPDQKDLRPATAAENRYSMEEIDNLLQRSAQNFGSQREVLTNIPKKVEERSLQIYFW

SEQ ID NO: 89763 - protein, 460 aa, Betaproteobacteria bacterium
  misc_feature (1)..(460): tr|A0A536U897|A0A536U897_9PROT Tryptophan 7-halogenase (Fragment) OS=Betaproteobacteria bacterium OX=1891241 G N=E6H71_11765 PE=4 SV=1
MTIRTQGPTATVFNYSYTFTQPAKPTSIPPAIKKIVIVGGGSAGWMTAMILADALIKKGIEIEVLESPTVGIIGVGEGSTPWLRGFFDGLGIEESEWMPACNATYKCGITFDGWSTKPGFESYFHPFASMLDNLTMTQFVHNAEARANGTDVCAHPNRFFVAAYLADRHLAPRPKRTFPFDVWYGYHFDAVLLGEYLHRKAVERGVRYRKCHVNGAQLNESGDIASVSIQDGEPVGADIFVDCTGFGGLLIQKALGTPFISFSNNLFNDAAVALPTPLGDDIPSQTISTALKHGWRWKIPLTSRFGNGYVYSSAFCSADEAERELRESLGMLDSETAARHLKMRIGRVTRHWNKNCLAVGLAQGFIEPLEATALLFIQRTATHFVEFLEAGDLSESAHDRFNQRINDHFEGTRDYIVTHFKTNTRHDTEYWRANAENRNLSDSLRHLYGLWMSGKSIAPD

SEQ ID NO: 89764 - protein, 513 aa, Erythrobacter sp.
  misc_feature (1)..(513): tr|A0A5E7ZIV9|A0A5E7ZIV9_9SPHN Tryptophan halogenase OS =Erythrobacter sp. EC-HK427 OX=2038396 GN=ERY430_80196 PE=4 SV=1
MSGARPIREVVIAGGGTAGWMAAAALASYFEDQLSITLVESESIGTVGVGEATIPQIHLFNRLLGLEENDFVRATAATFKLGIEFVDWDVPGESYFHGFGGVGQKIGKLPFHQYWLRYRAEGGKRPLDDFSGNAIAAREGRFGKVALGGTKRGQPAIRRSLPHAFHFDASLYAAFLRRFCEARGVRRIEGKILAVKQDSASGHIRELHLDGARKLAGELFIDCTGFRGLLIGEAMESRYDDWSHLLPCNRAWAVPTRRDTPPEPLTRSTAREAGWQWHIPLQHRSGNGLVFCADYWAEEDARTALLANLGGEPLAEPKLLRFTTGKRERGWVGNCVAMGLAGGFMEPLESTSIHMVQSAVSRLIDCFPRSNFSHATIAEYNAQTDFEYESIRDFLVLHYRLNRREGPFWAYLREMELPDSLQQKMALFVETGAINRFNNELFDVPSWLQVMLGQGLYPAAHHPMVNAVPEDSLARYIATNARDAAAEAEGLPLHQDYIAQHCAIADAAAPVTA

SEQ ID NO: 89765 - protein, 515 aa, Erythrobacter sp.
  misc_feature (1)..(515): tr|A0A5E7Y6D9|A0A5E7Y6D9_9SPHN Tryptophan halogenase OS =Erythrobacter sp. EC-HK427 OX=2038396 GN=ERY430_40633 PE=4 SV=1
MGEANSKAVRIVVLGGGTAGWMSAAALARLLGPKARVELVESEDIGIVGVGEATLPHIRGFVERLGIDEARFMAATHATYKLGIDFRDFGRIGESYIHPFGSFGEELAGVPFHHYWLELHRQGLADDIGAYSLGVMAAKANRFQPPATDQSLAGTYGYAYQFDATLFGPFMRDFARGLGVKRTEGRVTHVERDATSGNVTELVLESGERIGGDLFVDCSGFRSLLLGDALGEGWEDWSHWLPCDRAAALPCEHVTEEIQPYTTATAMPAGWRWRIPLQHRVGNGYVFASDFVSEDEACAAILGAVEGKPLADPRVLRFTAGRRKRSWQNNVIAVGLASGFLEPLESTSIYLAQMAITYLIELFPDAAHGGAIDPRDRDEFNRLVDMEYDRVRDFLILHYHATTRDDSEFWNHVRTYQVPDTLADKLELWKRAGRIAKYADGLFYDASWIAVYIGQGLLPETHDARTQLPDPAQTSRAMDAFHAAVAQEVAAMPGHREYLLREAARLAPVPEGLAA

SEQ ID NO: 89766 - protein, 513 aa, Streptomyces uncialis
  misc_feature (1)..(513): tr|G3K6J6|G3K6J6_9ACTN Halogenase OS=Streptomyces uncia lis OX=1048205 GN=claH PE=4 SV=1
MLESIVVVGGGTSGWMTASYLSAAFGERISVTVVESARVGTIGVGEATFSTVRHFFEYLGLSEETWMPACNATYKLGIRFENWRAPGHHFYHPFERQRVVDGFTLPDWWLADGGATERFDKECFLVGTLCDTMRSPRHMDGALFEGDLTDRPAGRSTLAEQGTQFPYAYHFDAALLADFLRDYAVARGVLHVVDDVVHVARDERGWISHVATRGSGDLAGDLFVDCTGFRGLLINDALDEPFESYQDTLPNDSAVALRVPVDMEREGLRPCTTSTAQAAGWIWTIPLFGRVGTGYVYARDYCTPEEAERTLRRFVGPAADDLEANHIRMRIGRSRRSWVNNCVAVGLSSGFVEPLESTGIFFIQHAIEQLVKHFPDADWDPALRSAYNTLVNRCMDGVREFLVLHYYGAARADNEYWRDTKTRKIPDSLAERVEQWRTKLPHPESVYPHYHGFEAYSYVCMVLGLGGIPLKPSPALRMLDPSAAQREFRLLATQAEDLRRTLPSQYAYFAQFR

SEQ ID NO: 89767 - protein, 516 aa, Colwellia sp.
  misc_feature (1)..(516): tr|A0A2G2DTY2|A0A2G2DTY2_COLSX Tryptophan halogenase OS =Colwellia sp. OX=56799 GN=COA35_13755 PE=4 SV=1
MTKPIKKIVILGGGTAGWLSAGLLAAEHPHLSVTLIESANVPILGVGEGTWPSMRNTLQRIGIKEIDFITQCDATFKQGSKFINWRNLNKGENYYHPFMDPQGYELTNLHANWQRIAPNQKFADVVNMQSFVCQAALAPKQLQTPEYAAVTNYGYHLDAGKFAEFLKSHCVKNLNVTHITDDVTHVINDEHGYIASLKTNKNGDITGDLFLDCSGSRARLIGEHFNSEFIAQDHILFNNSAVAAQVPNAHINQPIASATLSTAQSNGWIWDIALPTRRGTGYVFSSQYQSDESATDTLKSYIAKSTSEQQAAQLNYRVLKFSPGYRQKFWIKNCVAVGMSAGFLEPLEASALAMVELSISMISEQLPQNRTHMSQLETRFNDRFSTRWQRVVEFLKLHYVLSERDDTPYWQNIRDLTTAPERLQNLLKLWQFQPPSRFDFIENEEVFSSSSYQYVLYGMGFNTQTPQAHNAFTSAQAGDYFYQQNREKIAQYLKGLPSNRALLNHLLSNNRQPHND

SEQ ID NO: 89768 - protein, 499 aa, Hyphomonadaceae bacterium; identical to SEQ ID NO: 85275
  misc_feature (1)..(499): tr|A0A2D8ZUI1|A0A2D8ZUI1_9RHOB Tryptophan halogenase OS =Hyphomonadaceae bacterium OX=2026748 GN=CME92_00155 PE =4 SV=1

SEQ ID NO: 89769 - protein, 499 aa, Hyphomonas atlantica
  misc_feature (1)..(499): tr|A0A353L2A6|A0A353L2A6_9RHOB Tryptophan 7-halogenase OS=Hyphomonas atlantica OX=1280948 GN=DCG65_06940 PE=4 SV=1
MSTQQVKRVVIAGGGTAGWIAAAALSRMLGPLLDITLVESDAIGTVGVGEATIPTHRTFHHLLGIDEREFMRATKATFKLGIAFENWGGVGDRYIHSFGQVGKPSWMGEFYNIWMYAQERGIGDALDAYCFELQAAEEDRFYTSEKANINFAYHLDASLYAKFLRTFSEAKGVKRVEGLIDTVEQDGESGFITALKLQSGERIEGDLFIDCTGFRGLLIEQTLKTGYEDWTHWLPTDSALAVQTRSVGPAIPYTRAIAHHAGWQWRIPLQHRVGNGLVFCSENMQPDEAQEFLLNNVDGEPLTEPRLIRYKTGRRRKVWNKNCVALGLSSGFVEPLESTSIHLIQIGATRLVQQFPFSGISEAIANHYNEQAERELEKIRDFIVLHYKLTERDDSDFWRARRDMPVPDTLSQRIALFRENGLVYQASDDLFRVDSWLQVMMGQRLKPKGYHHMGHMMTDDQLTRALGGLKASIAQAVSKLPKHQDFIDTYCAAPETETA

SEQ ID NO: 89770 - protein, 507 aa, Dehalococcoidia bacterium
  misc_feature (1)..(507): tr|A0A2E5LWH1|A0A2E5LWH1_9CHLR Uncharacterized protein OS=Dehalococcoidia bacterium OX=2026734 GN=CL897_01185 PE=4 SV=1
MTQGTSEFKTVGIVGGGTAGYLTALALRKKLPHLQVTLIESPTIPIIGVGEGTTPIMVKFLHAYLERDVQELYRKVQPTWKFGVKFEWGQPGDYYFNYAFHPGPILDSVYYGGNFNEYSLGSMLISEERAPILTGEGGQLTSLIDRIPFAYHLDNNRFVAYLREEAARDGVERLELSVNTFVPAEDGESLDHIITDDGEERRFDLYVDCTGFHSKMIGEALGSPFQSYEDSLFCDRAIVANVPHGGHIKPFTTAETMDAGWCWNTPSIEDDHRGYVFSSRFLSDDAAAAEMRSKNPGMGDHRVIRFKTGRREHFWKGNVVAIGNSYGFVEPLESTGLHMIILEINQLVLNFPRSKKDTAIRGIVNRTLNAHWDDVRWFLAVHYRFNEKLQTPFWKACQNTVDIRGAQERVELFRERAPLTYRQSQFFKTEEVFGDFAYDVLLLGQRVPGRYLEASQSRVEWQKRVDGLRQLTGNALTQERAFEALNGAPPEILGSLVASPNTWVVWP

SEQ ID NO: 89771 - protein, 505 aa, Xanthomonas sacchari
  misc_feature (1)..(505): tr|A0A5D1AJN8|A0A5D1AJN8_9XANT Tryptophan halogenase OS =Xanthomonas sacchari OX=56458 GN=CEK63_11610 PE=4 SV=1
MIAAPLRNLVIVGGGTAGWMAAAALARVLGPDYRITLIESEQIGIVGVGEATVPHIKAFNNLLGINEAEFVRHTQGSFKLGIEFADWQRPGTSYVHGFGTEIGHPLGLLPFQQYWFKQALAGKARPLGAYTLNTVAAKRDRFMTSATDVPPNSPLANIAYAYHFDAALYAGFLRRYAEQRGVNRREGIVEEVQLHPESGDVLSVRLASGEAIAGDLFIDCSGFRGLLIEQALHTGYHDFSHWLPCDRALAVPCAKVGPPTPYTRATARAAGWQWRIPLQHRTGNGYVYCSAHISDDEAAATLLANLDGPALADPRPLRFVTGRRKQVWNRNVIALGLASGFMEPLESTSIHLVQSGISKLLELFPREGISPVLVRRYNERIAFEFDRIRDFLLLHYHATERDDSAFWRHCRSMPITPELEETLALFRDSGRFYRNGDEMFAEISWVQVMVGQGILPRAYHPLVDQVPQADLERFMASVEQTIGHCADAMPPHQAFIDRYCAARPV

SEQ ID NO: 89772 - protein, 509 aa, Xanthomonas sacchari
  misc_feature (1)..(509): tr|A0A5D1A6D9|A0A5D1A6D9_9XANT Tryptophan halogenase OS =Xanthomonas sacchari OX=56458 GN=CEK63_13790 PE=4 SV=1
MNLANTTDGRIRKVVIAGGGTAGWLAGCALAHQFRDRLDITLVESEQIGTVGVGESTVPPIRAFHRFLQIDEQEFLRAVAGTFKLSISFEHWRRPGDRFIHPFGTIGQGTWATPFHHFWLDSLRRGMPSDLGDFCLESVASRADRFSLETQPQVNYAYHFDAALYAKFLRKKAEGYGLCRVEGQIREVRQHAHDGSVAALLLEDGQLIEGDLFIDCTGFRGLLTEQTLHTGYEDWREWLPSDRAVAVQTEAVAPPVPYTRAIAHEAGWRWHIALQHRVGCGLVFSSRHMSDDEAHAKLLRDVDGPPLRDPWLVPFRSGRRLQAWNRNVVALGLASGFIEPLESTSIHLTISAVVRLIQLFPHEGISPALVELYNTVSRQEMEHVRDFIILHYHATQRDEPMWKACREMALPESLAIRLRAWRERAHAWQGPGELFRVDSWTSVLLGQGIQPGPPHPLAAAIGDADLRTLLTRIRQPLQQASAAMPSQAEFIERYCKASPEVWQRSSSLA

SEQ ID NO: 89773 - protein, 379 aa, Bradyrhizobium rifense
  misc_feature (1)..(379): tr|A0A5D3KKU0|A0A5D3KKU0_9BRAD Tryptophan halogenase OS =Bradyrhizobium rifense OX=515499 GN=FXB40_05640 PE=4 S V=1
MSSYDVAILGGGPAGTALALELRRNEPDLKILIAEADIATDWRIGETLAPGAAQLLNGLGCWDDVMRDGLIEGVRSEAAWGSDRLHAHDFIFSTRGSAWHLDRVRFDETLRAAAEAGGVEIWRGARFLSAVAESETWQLSLDRQGRRVDVEARFVADATGRSARFATSQGSRRCFADRLVGVAAAVHLREDAAADHATLVEACEHGWWYSTVLPGNRLVLAWMSDSDIVHHNSSARLGPWLAQLRAAPLTAARADMAETAERVFTWPARSHCLDQPCGRSWVAVGDAVSSWDPLSSAGIMKALRTGKLGAFVLLDAIRGVEGAGAKYRRLIEAEYRRYRRDRRAVYRMERRWSGSAFWQRRHAAEPFDREPAMHSAGEP

SEQ ID NO: 89774 - protein, 521 aa, Xanthomonas campestris; identical to SEQ ID NO: 89044
  misc_feature (1)..(521): tr|A0A556RXV4|A0A556RXV4_XANCG Tryptophan 7-halogenase OS=Xanthomonas campestris pv. glycines OX=473421 GN=C28 59_22360 PE=4 SV=1

SEQ ID NO: 89775 - protein, 495 aa, Pseudoalteromonas sp.
  misc_feature (1)..(495): tr|A0A5B0TYD0|A0A5B0TYD0_9GAMM Tryptophan 7-halogenase OS=Pseudoalteromonas sp. FUC4 OX=2511201 GN=EU510_02360 PE=4 SV=1
MTRTNAVKNVVIAGGGTAGWMAAAALAKLVGNNINITLVESDDIGTVGVGEATIPPIRTFHKLLGINEQAFMKATQASFKLGISFENWGDENTHYIHSFGATGKECWAGEFHHFWLQGKALGINNPFGDYCYELQAAKGGKFAFNQQNPINYAYHMDATRYAQFLREFSEPLGVKRIEGKIQKVVKNTKAGHIESLILNNGEHINGDFFIDCTGFRGLLIEQALHTGYEDWSHLLPCNSAIAVQTKSTSETVLPLTRSIAHKSGWQWRIPLQNRVGNGLVYCSQYMDDEQAKALLLNNMEGEPLTEPRIIKFKTGRRLKGWNKNCLALGLASGFVEPLESTSIHLIMSGIIRFMRLFPFNGITNHAIDEYNKQLKSEIENIRDFIVLHYKVTNRDDSEFWQHCSAMEVPKTLQHKTDLFKQTGRVFLDDGDIFRVDSWVQVMLGQGIEPNQHHLIASMMSDEELTRFLHGIKQQIEQRVRQLPPHHEFLKQYCPA

SEQ ID NO: 89776 - protein, 521 aa, Unknown
  misc_feature (1)..(521): tr|S5UBW7|S5UBW7_9BACT Tryptophan halogenase OS=uncultu red bacterium esnapd4 OX=1366610 PE=4 SV=1
MDNRKVVIVGGGTAGWMTASYLRTAFGAGVDITLIESDKVNTVGVGEATFSDIRHFFQFLGLEEHDWMPACNATYKLAVRFENWRRPGHHFYHPFEQMRSVNGFPLADWWLQNGPTDRFDRDCFVMAAMCDEERNPRHLDGRLIGQGFSEDAEEFAGLTMSEHQGKTQFPYAYHFEAALLAKFLTKFSVDRGVKHLVGNVEDVVLNQQGDIDHVVTVEHGALHGDLFIDCTGFRGLLINKALQEPFISYSDVLPNDSAVALQVPQDMEKRGIRPCTTATAQDAGWIWTIPLYGRIGTGYVYARDYLEPEQAERVLREFVGPAAAEVEANHIRMRIGRTRNSWTRNCVAIGLSSGFVEPLESTGIFFIHHAIEQLVKYFPGPGWQPTMRTMYNDAIRHVMDGVREFLCLHYLAAARDDTQYWKDTKTRELPDGLAERLERWQVQLPDSENVFPYYHGLPPYSYMCILLGMGGIDLKPSAALALADDTAALKEFQYIRDRASELVEALPTQFDYFTHMRLGAR

SEQ ID NO: 89777 - protein, 236 aa, Xanthomonas oryzae
  misc_feature (1)..(236): tr|A0A5C2EMT8|A0A5C2EMT8_9XANT Tryptophan halogenase OS =Xanthomonas oryzae pv. oryzicola OX=129394 GN=XOCgx_06 26 PE=4 SV=1
MSDTLPSDPQQRAVRRVVIAGGGTAGWMAAAAISKLLGRHLQITLVESDEIGTVGVGKATIPSLVTFHRLLEIDEAVFMATTQATIKLGIAFEHWRDVDRHYIHSFGHAGTHHGSAGFQHFWLKGQQRGVARDFGDYCLELRAAQEGRFAHLPNGGMNDAYHLDAGLYARFLRRFSEGFGVTRIEGRIGQVETDAESGFFTALTLQDGTRVAGDLFLRLYRLGRPADRQDAGRGQR

SEQ ID NO: 89778 - protein, 520 aa, Rhodanobacteraceae bacterium
  misc_feature (1)..(520): tr|A0A522RMN2|A0A522RMN2_9GAMM Tryptophan 7-halogenase OS=Rhodanobacteraceae bacterium OX=2052182 GN=EPN36_160 95 PE=4 SV=1
MNEFAIRRVVIVGGGTAGWMAAALLARGLGRACEIRLIESAEIGTVGVGEATIPQIQHINAFLGIDENDLMRFTHGTYKLGVQLNDWGRVGDSYIHAFGDVGLPLGLLPFHHYWLRSRAQGDAHSLWSYSLNAAAAAANRFAKLDKVSDTPLGGIRYAYQFDAARYARYLRERIPEGAVTRIEGKVVEVKLRGEDGFIESLRLESGEIVAGDLFIDCSGFRGLLIEGALKTGYENWQHWLPCDRAIAVASERTTPMRPYTQAFARTAGWQWRIALQHRTGNGHVYCSRFISDDEAAAQLLANLGSEPLEDPRPLRFVTGMRKLSWNRNCLALGLAAGFMEPLESTSIHLVQSGVARFLGMFPDRHCDPLLVDTYNRQTRFEYERVRDFLILHYKATERDDTPFWRQCAAMDVPDALEQRIELFRRTGLIFREADELFTETGWLQVMLGQRIEPERHHPLADELDESRLQGFLSDIRTLVNRTAARLPSHDEFVARVGRLPQASATGLPPMPRHVHERGVS

SEQ ID NO: 89779 - protein, 505 aa, Xanthomonas oryzae; identical to SEQ ID NO: 84193
  misc_feature (1)..(505): tr|A0A5C2EVQ3|A0A5C2EVQ3_9XANT Tryptophan halogenase OS =Xanthomonas oryzae pv. oryzicola OX=129394 GN=XOCgx_35 23 PE=4 SV=1

SEQ ID NO: 89780 - protein, 219 aa, Streptomyces spectabilis
  misc_feature (1)..(219): tr|V9XQZ7|V9XQZ7_STRST Tryptophan 6-halogenase (Fragmen t) OS=Streptomyces spectabilis OX=68270 PE=4 SV=1
GGGTAGWMSACYLGKALGPQVNITLLEAPAIPRIGVGEATIPNLHKVFFDFLGLAEEEWMRECNASFKAGIRFINWRTPGAGESAARPAADGRGDHFDHLFGLLPDHENLPLSHYWTHRRASGATDESFDRACYVQPPVLDHNLAPRHLDGTRWTNYAWHFDANLVADYLRRFATGKLGVTHVKDRYTHAEMDHRGFVTAINTETGNRLEADLFVDCSG

SEQ ID NO: 89781 - protein, 204 aa, Xanthomonas oryzae
  misc_feature (1)..(204): tr|A0A5C2ERQ3|A0A5C2ERQ3_9XANT Tryptophan halogenase OS =Xanthomonas oryzae pv. oryzicola OX=129394 GN=XOCgx_06 27 PE=4 SV=1
MFAASALAVQSEAVGPPVTSTRSRADQAGWMWRIPLQHRVGSGIVYSSRYMDQDSARAVLERNLTGRALTEPRPLRVTPNQRHRVWKKNCVALGLASGFLEPLESTNIHLIQRGIIGLLQTFPQVINAVDIAEYNRQAAQEITHIRDFVILITTPPIAATRRSGATARQWTSPIRCAIGWSGSARAGGSSIRPTGRLPRTRGCR

SEQ ID NO: 89782 - protein, 516 aa, Pseudoalteromonas sp.
  misc_feature (1)..(516): tr|A0A5B0TXM6|A0A5B0TXM6_9GAMM Tryptophan 7-halogenase OS=Pseudoalteromonas sp. FUC4 OX=2511201 GN=EU510_02365 PE=4 SV=1
MTKPITKIVVLGGGTAGWLSAGLLAAEHPHLSVTLVESANVPILGVGEGTWPSMRNTLQRIGIKEIDFITQCDASFKQGSKFINWRNLNEGENYYHPFMNPQGYEHTNLHASWQRIAPDQKFADVVNMQSFVCQAALAPKQLQTPEYAAVTNYGYHLDAGKFAEFLKNHCVKSLNVIHITDDVTEVINDEHGYIAALKTNNNGDITGDLFIDCSGSRARLIGDHLNSEFITQDHILFNNSAVAAQIPNAHINQPIASATLSTAQSNGWIWDIALPTRRGTGYVFSSKYQSDESATNTLKSYIAKSTSEQQAEQLTYRVLKFSPGYRQKFWIKNCVAVGMSAGFLEPLEASALAMVELSISMISEQLPQNRTHMSQLETRFNDRFSTRWQRVIEFLKLHYVLSERDDTPYWQDISNLNTAPERLQNLLKLWQFQPPSRFDFIENEEMFSSSSYQYVLYGMGFNTQTISAQNTFNDPLAGDYYYQQNREKIAQCLNGLPSNRALLNHLLSNNGQPHND

SEQ ID NO: 89783 - protein, 508 aa, Pseudoalteromonas sp.
  misc_feature (1)..(508): tr|A0A5B0TKW0|A0A5B0TKW0_9GAMM Tryptophan 7-halogenase OS=Pseudoalteromonas sp. FUC4 OX=2511201 GN=EU510_16955 PE=4 SV=1
MNKAIKTVAVVGGGTAGWLSAAIIASYHQGKNGDGLKVMLVESSDIPTIGVGEGTWPTMKNTLQQIGLREVDVFKGCNATFKQGGKFVNWTHGHNDFYYHPFTVPLGYGRIDLAPYLDNVEDFAQQTNFQHDICEASLAPRGIAQGEYQGNCNYAYHLDAGAFAEMLKQHCKSKLGVEHIIGTVDQVKLDDDGAINELTLKDQTRTINADLFIDCTGFSSLLLGQALNVPFKKMDHVLFNDSALAMQVPYDENDDSLASHTIATAQNAGWIWDIGLTHRRGVGHVYSSKFLSDKEAEQNLRNYLGDAANGLTARKISFESGYREKFWHKNCVAIGMSAGFVEPLEATAIMLVEISARFVAEHMPADTQVMPIVAKRFNEQMDYRWQRIIDFLKLHYMLTKRPEPYWQAHVQPDTIPQTLQEDLLLWGSRGPLIQDFHGALELFPAASYQYVLYGMGFKPDFTKQAYLYSQDAQAKQIIERNSQLTQQMLQTLPPHRAYIEQWLAANPV

SEQ ID NO: 89784 - protein, 497 aa, Pseudoalteromonas sp.
  misc_feature (1)..(497): tr|A0A5B0TZR9|A0A5B0TZR9_9GAMM Tryptophan 7-halogenase OS=Pseudoalteromonas sp. FUC4 OX=2511201 GN=EU510_04980 PE=4 SV=1
MKPIKHVIIAGGGTAGWIAAALLNKVLGKVIKITLIESSTIGTIGVGEATIPPIIQLNNALGINEQDFINATNASIKLGIEFENWKTPSHSYMHAFGSFGKDFPFCDFYNFWVKGKITGCEDSLWDFSLNYQAAKRHKFAPLNTIPNTQLPGLSYAYHFDATLYAEFLKKLATSSGVEHIDAKIEQVEQCPLSGNIKSLNLDNTQQINGDLFIDATGQRALLIEQTLNTGFVDWSHYLPCDSAVAVQSQGTDSLKPYTRSIAHSAGWQWQIPLQNRVGNGLVYCSRYLSDDAATQLLLNNLPADPITASRVIKFKTGRRLKQWHKNVVSVGLASGFLEPLESTSIHLIQSAVTRLIKLFPHNGISDALVAEFNKQSVIEIEHIRDFIILHYKLTEREDSVFWRQCKQMEIPDSLAHKLNLFKHTGKVVRENDELFAEVAWQQVFIGQGLIPDDYNSIVDSLSSEQLNDLFFTLKTLITSTVEQLPTHKDFLAKIKKA

SEQ ID NO: 89785 - protein, 498 aa, Duganella sp.
  misc_feature (1)..(498): tr|A0A0Q7VSZ3|A0A0Q7VSZ3_9BURK Tryptophan halogenase OS =Duganella sp. Root1480D1 OX=1736471 GN=ASD58_12310 PE= 4 SV=1
MSGKPIRKIVIVGGGTAGWMTAAPLALKLGKSCEIALVESPEIGTVGVGEATLPTIRYYNQALGIDNADFVRKTQATFKLGIEFKDWGHIGNRFFHGFGDFGPAIENRSPVMYWLRLASVYKDMPSYEEWSTATVMARANRFMEPYGDQPAATNAFSYAYHFDASLYAAFLRGYAMERGVQRAEGMINEVEQHPETGFITALKLKDGRRIEGDLFIDCSGFRGLLIEGVYQTGYDDWSAMLPCNSAQAVPCEKVEPLTPYTTSTARSAGWTWRIPLQHRTGNGHVYCNGFTTDEEAGRVLLDGLDGRALDEPRQLRFTTGRRRKSWVKNCVAIGLSSGFLEPLESTSINIIENSVGWLLEFFPDCDFSPELANEFNRLVSQRYEYVRDFIILHYKATRRDDSEFWRYCASMAIPDTLRHQIELFQATGRVAIYDADGFGVASHLSIMMGLGIMPQAYDPLVDLFDLARMKDHFARVHDTIRQAVDAMPQHGDYIAKMR

SEQ ID NO: 89786 - protein, 506 aa, Sphingomonadales bacterium
  misc_feature (1)..(506): tr|A0A1B6Z9I4|A0A1B6Z9I4_9SPHN Tryptophan halogenase OS =Sphingomonadales bacterium EhC05 OX=1849171 GN=A8B75_1 2435 PE=4 SV=1
MTVSSIQHVVIVGGGTAGWLSACLLAAKLPSLSITLVEAPDIPTIGVGEGSWPTLRETLSDIGISEAEFLLECDASFKQGSRFDGWVDGSEEDSYLHPFTAPPPEDMRGFLSAWQEKDGDNCFAAAMTPQAQVCKNHLAPRQKSMPDYAGALNYGYHLDAGKFVTLLTKHGMEHLDVVRVADQVTDVTIGSNGDIEALQLRDNPALTGDFFLDCTGHAAALIGRLCENNWIDRSDVSFNDRALAVQLPVSSNSAIASQTIGTAHEAGWLWDIALPTRRGIGCVYSSRFMDDERAEQVLKGYLGQQFPDANLAEVSPRKLSFSTGHREKFWVRNCVSIGLSAGFIEPLEASAIVLIELSLKALADNFPASCATMDIHAARFNDLFRYKWDRIVDFLKLHYVLSNRMEPYWQAHRAPETIPARLSEQLSLWREQPPSTWDFPQIDEIFSAPSQQYVLYGMGFPLPMATHEDTDEASVSLLEINKRARTLAAALPSNRDYLAAIAAKEA

SEQ ID NO: 89787 - protein, 506 aa, Sphingobium lactosutens
  misc_feature (1)..(506): tr|T0HIG7|T0HIG7_9SPHN Tryptophan halogenase OS=Sphingo bium lactosutens DS20 OX=1331060 GN=RLDS_18685 PE=4 SV= 1
MVVGGGTAGWLTAGVIAARHRTRIGQDFSVTLVESPNTPIIGVGEGTWPTLRATLSRMGISETDLFRQCDAAFKQGAWFARWTDGSASDGYYHPLMLPQNFGQVNLAPHWLAQDGDESFCDAVCAQGRICDDGLAPKTIATAEYDALANYAYHLDAGKFAPFLQRHCCEKLGVRHVLADVEQVVLHDDGDIAAVRTTQAGLVEGDLFVDCTGFKALLIEGAMGVPFRDCNDVLFCDTALAMQVPYAAPDSPIASHTISTAQSAGWIWDIGIQTRRGVGHVFSSSHITDEQAERELRAYVGPASDGLTARKIKIRSGHRETFWKRNCVAVGLAAGFLEPLEASAIVLIELSAKIIAEQMPACREVMDIIASRFNATTHYRWGRIIDFLKLHYVLTQRTDSDFWRDNVRPETMPDRLRELLHLWRYQSPWFHDEFDRAEEVFPAASYQYVLYGMGFRTQIPPAALGRDAHLASRAMRENAAATARLRAGLPRHRDLIDRIVSHGLQPV

SEQ ID NO: 89788 - protein, 519 aa, Citromicrobium sp.
  misc_feature (1)..(519): tr|A0A2E2NFF4|A0A2E2NFF4_9SPHN Tryptophan halogenase OS =Citromicrobium sp. OX=2024827 GN=CL802_05625 PE=4 SV=1
  misc_feature (10)..(10): Xaa can be any naturally occurring amino acid
  misc_feature (46)..(46): Xaa can be any naturally occurring amino acid
  misc_feature (50)..(50): Xaa can be any naturally occurring amino acid
  misc_feature (66)..(66): Xaa can be any naturally occurring amino acid
  misc_feature (72)..(72): Xaa can be any naturally occurring amino acid
  misc_feature (74)..(75): Xaa can be any naturally occurring amino acid
  misc_feature (78)..(78): Xaa can be any naturally occurring amino acid
  misc_feature (84)..(84): Xaa can be any naturally occurring amino acid
  misc_feature (123)..(123): Xaa can be any naturally occurring amino acid
  misc_feature (129)..(129): Xaa can be any naturally occurring amino acid
  misc_feature (153)..(153): Xaa can be any naturally occurring amino acid
  misc_feature (159)..(159): Xaa can be any naturally occurring amino acid
  misc_feature (178)..(178): Xaa can be any naturally occurring amino acid
  misc_feature (185)..(185): Xaa can be any naturally occurring amino acid
  misc_feature (200)..(200): Xaa can be any naturally occurring amino acid
  misc_feature (202)..(203): Xaa can be any naturally occurring amino acid
  misc_feature (209)..(209): Xaa can be any naturally occurring amino acid
  misc_feature (237)..(237): Xaa can be any naturally occurring amino acid
  misc_feature (244)..(244): Xaa can be any naturally occurring amino acid
  misc_feature (256)..(256): Xaa can be any naturally occurring amino acid
  misc_feature (258)..(258): Xaa can be any naturally occurring amino acid
  misc_feature (363)..(363): Xaa can be any naturally occurring amino acid
  misc_feature (366)..(366): Xaa can be any naturally occurring amino acid
  misc_feature (369)..(370): Xaa can be any naturally occurring amino acid
  misc_feature (394)..(395): Xaa can be any naturally occurring amino acid
  misc_feature (404)..(404): Xaa can be any naturally occurring amino acid
  misc_feature (424)..(424): Xaa can be any naturally occurring amino acid
  misc_feature (433)..(433): Xaa can be any naturally occurring amino acid
  misc_feature (460)..(460): Xaa can be any naturally occurring amino acid
  misc_feature (465)..(465): Xaa can be any naturally occurring amino acid
  misc_feature (486)..(487): Xaa can be any naturally occurring amino acid
  misc_feature (495)..(495): Xaa can be any naturally occurring amino acid
  misc_feature (508)..(509): Xaa can be any naturally occurring amino acid
MSVNRTSSSXTEPPAIVIVGGGTAGWMAAAALARLTPCAVTLVESXAIGXVGVGEATIPQIRLFNXALGIDXAXXLRXTKATFXLGIEFAGWSRAGASYMHAFGEIGAGAGLLPFHQLWLRGXELGMAXDLATYSLNERAARALKMQMWRGDXGHSVPXMPWAYHFDASLYAAYLRRXAEARGAXRIEGKVASVERDGAXGXXAAVALXDGRRIAGDFFIDCSGFRSLLLGQELATXFEDWSHXLPCDRAVAVPCXTXGEFTPYTRSTAHSAGWQWRIPLQHRVGNGLVYCSDYLSDDEAEAQLLANLDGAPQATPNRLRFTTGMRAQQWSHNCLALGLAAGFMEPLESTSIHLIQSSIARFXNMXPGXXPAPAMRAEFNRQAEFEWTRIRDFXXLHYWANGRXGEAFWDRCREMALPDTLTAXIEQFKASGXIHREHEELFTIPGWAQVLIGQEVMPQXLHPLXASTDPAALERMLGEIEAGIGXXVDAMPSHXEFLRAYCMPRATXXSPTPVSETAR

SEQ ID NO: 89789 - protein, 531 aa, Streptomyces sp.
  misc_feature (1)..(531): tr|A0A3A9W5H7|A0A3A9W5H7_9ACTN Tryptophan 7-halogenase OS=Streptomyces sp. AZ1-7 OX=2419806 GN=D7319_16000 PE= 4 SV=1
MDQRIKKIVILGGGTAGWMSAAYMARALGDTVRITVLEAPSIPRIGVGEATIPNLQRVFFDHLGLSEEEWMPECNAAYKVAVKFVNWRTPGEGQAAARTIDGWPDHFYHPFGLLPEHDGVPLSHYWVHNRHSGVTDEPFDYACFPGVALMDALKAPRDREGRPVTWYAWHFDAHLVADFLRRHATSKLGVVHVEDEMTEPRLDARGFVTALATKSGALLDADLFIDCSGFRGLLINKALREPFIDMNDHLLCNSAVAYALPHDDEAHGVEPYTSAIAMRAGWTWKIPMLGRFGTGYVYSDAFSTRDRATEDFCRLWGLDPDAYADKLNHVRFRVGRNRRAWVNNVVGIGLASCFLEPLESSGIYFIYAALYNLVKHFPDKNFDQVFTDRFNAEIEWMFDDTRDFIQAHFALAPRDDTPFWRANKELRLPDQIREKIAMYRAGLPINRPFSTEGEYYGNFDVEFRNFWTNGSYYSIFAGLGLVPDHPLPTLTHRQDSVEGAQYLFERVKEEQRELVASLPSNHAHLRRLHGK

SEQ ID NO: 89790 - protein, 505 aa, Xanthomonas campestris
  misc_feature (1)..(505): tr|A0A221LYM6|A0A221LYM6_XANCM Tryptophan halogenase OS =Xanthomonas campestris pv. malvacearum OX=86040 GN=APY 30_15130 PE=4 SV=1
MTQAQIRRVVIAGGGTAGWIAACALSHQFRNLLDITLVESEQIGTVGVGESTVPPIRTFHRFLQIDEQEFLRAVAGTFKLSISFEHWRRHGERYIHPFGITGQSTLVCAFHHLWLESQRRGMPGSFGDYCLETVASRVDRFALHGEPAVNYAYHLDAALYAKFLRARSEACGVKRVEGRIQQVTVQPHSGDVASLVLEDGQTIEGDLFIDCSGFRGLLIEQTLHTGYEDWSHWLPCDRVVAVQTEALGPPVPYTRAIAHEAGWRWHIPLQHRVGNGLVFSSKHLSDDQAHAKLLRDVAAPAVKEPWMVPFRTGRRLKAWNKNVVSLGLASGFIEPLESTSIHLTISAVVRLLALFPAEGIAPSQVQLFNDVSRAEMEHVRDFVTLHYHATQRDEPLWQQCRQMELPESLALRLRAWRERAHAWQGADELFRVDSWTHVLMGQGIAPEQHHPLTRAFSDHDLRRLLDGIAQLIQHAVQQMPSQQDFIERYCKAGEQVWGMRSPVPA

SEQ ID NO: 89791 - protein, 504 aa, Sphingomonas sp.
  misc_feature (1)..(504): tr|A0A4Q7SZP1|A0A4Q7SZP1_9SPHN Tryptophan halogenase OS =Sphingomonas sp. BK036 OX=2512122 GN=EV283_2462 PE=4 S V=1
MRKTRVVVVGGGTAGWMTAAALVRLLPVACSVHLVESADIGIVGVGEATLPHIRAFVDRLGLDEADFMRATHATFKLGIDFRDFGAIGDSYIHPFGSFGRPLDDVGFHHYWLRLAAAGRAGPIGDYSVAVAAAKRHRFAIPDGAPDDLAASFGYAYQFDATLFGPYLRHFAEAHGARRTEARIVSVDRDPLNGDVRALRLDSGEAVEGDLFVDCSGFRSLLLGDAMAEPWEDWSRWLPCDRAVAMPCTSPDGPIEPYTRATAKPAGWQWRIPLQHRVGNGYVYSSAHIADQAAADALVASVEGTPLADPRVLKFRAGRRRNSWVGNVVAIGLASGFLEPLESTSIYLAQMAITQLIELFPQNLRADGIAAADRTEFNRMVDMEYDRIRDFLILHYHATTRDDSDFWNHVRTMDVPVTLADKIELFRRAGRVTQYSEGLFLEPSWIAVYLGQGIMPQAWDQRADRPGLDGLDRAIASLRDHVAATATAMPDHGTFIARRNATIAA

SEQ ID NO: 89792 - protein, 521 aa, Xanthomonas nasturtii
  misc_feature (1)..(521): tr|A0A3E1KSJ4|A0A3E1KSJ4_9XANT Tryptophan 7-halogenase OS=Xanthomonas nasturtii OX=1843581 GN=DZD52_01620 PE=4 SV=1
MPDTTPLDPQQRPVRRVVIAGGGTAGWMAAAAMSKLLGRHLQITLVESDEIGTVGVGEATIPSLVTFHRLLEIDEAAFMAATQATIKLGIAFEHWRDVDRHYIHSFGHAGTDHWSAGFQHFWLKGQQRGVARDFGDYCLELRAAQEGRFAHLPNGGMNYAYHLDAGLYARFLRRFSEGFGVQRIEGRIGQVETDAESGFLTALTLQDGTRVEGDLFLDCTGFAGLLIGKTLSVGSDDWSRWLFADSALAVQTESVGPPVTYTRSRADQAGWMWRIPLQHRVGNGIVYSSRYMDQDSARAVLERNLTGRALTEPRPLRFTPNQRHRVWEKNCVALGLASGFLEPLESTNIHLIQRGIIRLLQTFPQVINAVDIAEYNRQAAEEITHIRDFVILHYHATDRRDTPFWRDCAAMDIPESLGHRVELFRQSGRVFHQANELFAENSWVQVMLGQGIVPQQHHPVADLMGDAELRHFLDNIRTRVETALGRLPAHADFLRHYCPAPPPPEPAARVPAAAAVATPAG

SEQ ID NO: 89793 - protein, 496 aa, Colwellia demingiae
  misc_feature (1)..(496): tr|A0A5C6QCR6|A0A5C6QCR6_9GAMM Tryptophan 7-halogenase OS=Colwellia demingiae OX=89401 GN=ESZ36_14755 PE=4 SV= 1
MNSPIKKVVVLGGGTSGWISAALLKKILGSAIQLELVESDDIGTIGVGEATIPPIKHLNNVLGINEAEFLRETKATIKLGINFENWKSQGHSYLHSFGAAGKSLAFCHFHHLLKRANQLEDDSHLWQYDLNYLCAKAGKFAQIKSKDPIIELPYAYHFDAGLYAKFLRKFSEKLGVIRTEGLVEHVEQCPNSGHIKSLKLKNGQTVTGDLFIDCSGFRGLLIQEKLRTGYEDWSHLLQCDRAIAVPSERLEKTLPYTRSIAHAAGWQWRIPLQHRNGNGIVYSSSHCSEQQAMDTLMGNLDSKAIADPKVIKFQTGRRYKQWNKNVIAIGLSSGFLEPLESTSIHLVQSAVVRLAHLFPHQGIDSSLVDEFNKQSATEFEQIRDFLVLHYHATERTDSDFWQDMRHMKIPDSLAHKIEIFKQSGRLFREQNDLFTDSSWLQVMLGQGIVPQDYHPIANTMSDEKLAEMLRKVKEIKQAPIDKLPSHDEFLKIFCRQ

SEQ ID NO: 89794 - protein, 508 aa, Sphingomonas sp.
  misc_feature (1)..(508): tr|A0A4Q7T0G1|A0A4Q7T0G1_9SPHN Tryptophan halogenase OS =Sphingomonas sp. BK036 OX=2512122 GN=EV283_2464 PE=4 S V=1
MTDPNPGPIRKVVIVGGGTAGWMTAAAAARYLDDGQRQIILIESDAIGTVGVGEATIPPILGFNALIGVDEREFLRATGATYKLGIEFVGWDTGDDRYMHAFGGHGRDIQGLAFHQLWLKLRDRPGIGGIDAYAPSAVAAYLNRFGLPTGPQTAPLAYAYHFDAGLYAAFLRRRAEAGGVTRIEGRITRADRDPDTGHVRAVRLDDGRSVDGDLFIDCSGFRSLLLGDTMGVPFEDWSHWLPCDRAVAVPTEPTAPLLPYTRATARTAGWQWRIPLQHRTGNGHVYSSAYISDDEATAVLLANLDSRPTAEPRQIRFKAGRRTSMWKGNVIALGLAGGFLEPLESTSIHLIQTGISKLFALFPDRGFSDVERDEYNRLMGDAYTSVRDFIILHYHATRRDDSAFWRHVRTMPIPDSLTRKIALFRQKGRVFRYDDELFGISSWVQVLLGQNVIPAGYDPIVDALDADRVADAIRQIRAATIRSAQTLPNHADFVAHHGPFDRKNEFAK

SEQ ID NO: 89795 - protein, 546 aa, Duganella sp.
  misc_feature (1)..(546): tr|A0A0Q7WXH3|A0A0Q7WXH3_9BURK Tryptophan halogenase OS =Duganella sp. Root1480D1 OX=1736471 GN=ASD58_27745 PE= 4 SV=1
MENLIKKVVILGGGTAGWMTASYLSKTFGANVAITLMEADTIPKIGVGEATVPNLQRAFFDFLGIPENEWMKECNASFKGAVKFVNWRKHPDAHGRNHFYHHFGLIPNCDNVPLSQYWTLRRHADPTYHEAMDYACYMQSSILDDKLSPRMLDGTRTMAYAWHFDANLVAAYLRKLAIGWGVQHVVDELENVEHHADGRIAALLSKRGERLEGDLFIDCSGFRGLLINKAMGEPFIDMKNHLFCDSAVAAQVPHDDAANGIEPYTSSIGMKHGWTWKIPMLGRFGSGYVYAGDFVSQDEATDEFLKLWNLNPNDVKLNHIRFRTGRNRRAWVKNCVSIGLASCFLEPLESTGIYFIYAAIYQLTKHFPDKSFNQTLIDRFNQEIETMFDDCRDFVQAHYFTTTRDDTPFWRANKNDIYLSDNIKHKLATYKAGLPVNMPITDEGNYYANFEAEFRNFWTNSSYYCIFAGMGVIPDAPMPQIRYKPQAIARADEMFSALRQHAAELKAKLPTCHDYLRHLHSKPDAMRNISEAPAPTLAMAADGTQG

SEQ ID NO: 89796 - protein, 494 aa, Duganella sp.
  misc_feature (1)..(494): tr|A0A0Q7VT97|A0A0Q7VT97_9BURK Uncharacterized protein OS=Duganella sp. Root1480D1 OX=1736471 GN=ASD58_12330 P E=4 SV=1
MKTAYKRIVVVGGGSAGWMASAAFATAFPASSVELVESEEIGIVGVGEATFPSIRHFHRLLGIDEAQFLRATNGTFKLGIEFRDWRELGERYFHTFGDIGALSGPRSLWGQHRRVGDAGLGPLDAQCLPSVMAREGRFMCAASEEEQQFNYAYHFDAVLYAAFLRKLAEGRGVRRTEGRIVHAPRRADGGISQLSLADGRVVEGDLFVDCSGFASLLLGRALEERFVDFGRWLPVDRAWACPSERSGPELAPATRCTALEAGWAWRIPLSNRSGHGHVFASRYIDEEKAREQLMQQLDGAPIAEPRLLRFEAGHRERFWVHNVVALGLSSGFLEPLESTSIFLVQSGLGRLIELLLPGERPAQEAVDAYNTGMRRQFERIRDFIILHYCLTARRDGQLWRDMASMELPETLAFKLHAWREAGALHQYDEEGFDATSWLAIHAGMGHWPQRSDPSLWDVPHEDVMRALCFRRDSIAASVAAMPTHEAYLNSVLSR

SEQ ID NO: 89797 - protein, 505 aa, Sphingomonas sp.
  misc_feature (1)..(505): tr|A0A1Y2QN84|A0A1Y2QN84_9SPHN Tryptophan halogenase OS =Sphingomonas sp. IBVSS2 OX=1985172 GN=CAP40_00285 PE=4 SV=1
MTAPAPIRRIVIVGGGTAGWMAAAALARLIPAGVSVTLVESEEIGTIGVGEATIPPIRNFNALLGLDEHDFLSRTQGTIKLGIEFVDWTREGHRYVHPFGEFGFDVEGVKFHQIWRKLHAEGRAREIDAYNVCALAMAAGRYQPPVADPGSILSRMAYAYQFDASLYARYLRDHAEARGVVRVEGKVARIPLRAEDGFIEAVVLEGDRRVEGELFVDCTGFRALLIERALGAGWESWAHWLQCDRAVAVPSASPGPEITPFTRSTAHRAGWQWRIPLQHRVGNGHVYCSADISDDAARETLLANLDGVPLRDPFILRFEAGRRKRAWHRNCVALGLSSGFLEPLESTSIHLIQSGIHRLMALLPDTGFSPVERDEYNRLTDVQMEQVRDFVILHYHANARREGDLWRRVREMAIPETLARKLALFRNRGRFFRTEDELFAESSWIAVLLGQGVIPVGWDPLADGLDEGKLALSFERFHEMFARAARAMPRHEDWLARNAPAGIPA

SEQ ID NO: 89798 - protein, 495 aa, Sphingomonas sp.
  misc_feature (1)..(495): tr|A0A4P7QX91|A0A4P7QX91_9SPHN Tryptophan 7-halogenase OS=Sphingomonas sp. PAMC26645 OX=2565555 GN=E5673_07435 PE=4 SV=1
MTDALRSVTIVGGGTAGWMAAVAFGRLLGPAGTRVTLIESDDIPTVGVGEATIPPIRTFHAMLGIDEDAFLRATGGSYKLGIRFEGWTRPGESYVHPFGQIGTDIAGVPFAAQWLRVRQAGAAEPLGAYSLEACAAEAGRFSRPIANGNSPLSRIGYAYHFDAGRYAAFLRVQAEAYGVVRHEGLVKRVERGPAGIAAVHLADGSRIAGDLFLDCSGFRALLIEGAMEAGWTDWSEWLPCDRAVAVASVADAAPLPLTRAIAERAGWRWRIPLQHRTGNGHVFSSRNMSEDEATATLLAGVEGETLAEPRVIRFATGHRNCFWVGNCIALGLAAGFMEPLESTSIHLVQSGLQHLLRMLPTGAPPAPAVVERYNRIMTAEYTRIRDFLVAHYHLNARAEPFWRDRAAAAIPEGLAEKLALFRAGGRIFREADELFNETSWLAVLTGQNAPVSGYDPICDGIPIETAANRLAQVERVVATSLTHMPSHAHALARLA

SEQ ID NO: 89799 - protein, 513 aa, Pseudoalteromonas rubra
  misc_feature (1)..(513): tr|U1KY18|U1KY18_9GAMM Tryptophan halogenase OS=Pseudoa lteromonas rubra DSM 6842 OX=1117318 GN=PRUB_01864 PE=4 SV=1
MQNAETKIKRIVIVGGGTAGWLAANHLAADASEDVSITLVESPDIPTIGVGEGTVPVIVDSLKKFGIRESDMFRLCDATFKNGIHFVGWNKPVNGQPHCYFHPFDDPNVNGVNLLPYWLHQLPEARARFDQSVSIQAHIALENKAPKLITNAEYERMINYAFHLDAGKFSALLSEHAIKNRQVNHVLDEVESVKLALDGSISGLQLKQGGLLEGDLFVDCSGFQSLLLGKALNTPFIDKSDVLFANHAVVTQVPYANEHEVPPYTISTAQQAGWIWDIGLQTRKGVGHVYSDQFTSHEQAHRDLSAYLGKPEDTVESRLIKMQVGYRAQAWVKNCIGIGLSQGFVEPLEATGLLVFDLAARMLSKRLPGERQEIPAIAQQFNQHMTHVWQSIVDFIKLHYCISNRDDSEFWRMNRLPETIPESLQHKLVLWRNDIPNEYDFVSSLDVFRLENHLYVLYGMNYPSQCNFPSPHKLSQQEAMLKLVAQQQQKAGAMLETHSNLVAKAARYGFQRI

SEQ ID NO: 89800 - protein, 501 aa, Mycobacterium europaeum
  misc_feature (1)..(501): tr|A0A1X1ULH7|A0A1X1ULH7_9MYCO Uncharacterized protein OS=Mycobacterium europaeum OX=761804 GN=AWC03_16005 PE= 4 SV=1
MIESVLVVGGGSAGLLTALALKQHAPQLQVRVVRSKNIGVIGVGESTTPQLISLLFDYLKLPQKEFYSIVRPTWKMGIHFLWGPRESFDYGFQFQLDAFYTDLTRYNGFYCGDEFDSVNMNSALMAQGKAFEKHPSGQGPMITADTALHLFNPALVEALEKASVERGIELIDARITGVPVDEQGVQSVILEDGRTFSADLYVDASGFRSELLGRALGTPFVPYDSSLFCDRAIVGSWDRTDEFIYPYTVAETMEAGWCWQIDHENSINRGYVYSSQFLSDDQARDELLKKNPKATAWDHVIKFRSGRYEKGWVKNVFAIGNACGFVEPLEATSLMVSSSQIKAMVEMLVESHLEPTPSLQELYNTLFVDWWDGIKDFLSVHYRFNTRLDNEFWTACRNEVDVTAVQPLLDFYRENGPTGFLRHFVTSTIGQDNQFGLEGYLVMLVGQKVPYRDPHPPGQAEMATFQRHCAQNRARAMSGLTVAEALQYVHLPDWRWNSDSQ

SEQ ID NO: 89801 - protein, 513 aa, Sphingomonas sp.
  misc_feature (1)..(513): tr|A0A1Y2QHM5|A0A1Y2QHM5_9SPHN Tryptophan halogenase OS =Sphingomonas sp. IBVSS2 OX=1985172 GN=CAP40_13655 PE=4 SV=1
MNNPDALRKVCIVGGGTAGWIAAAVMAHHMKGRLFEIELVESDDIGTIGVGESTIPPFMELIAKLDIDEQDFVRQVQASFKLGIEFKDWFRKGESYFHPFGDVGQRVELSDFYQCWRKATLAGHDFPLQDFAPATVMAHAGRFMLPFKARNTPIAGASYALHVDAKRVAQFLRGHAEARGVKRTEGIVTDVALDARGFVSTLTLKDGRTIDADFFIDCSGFRALLIEKALGSGFTDWSNYLFCDRAIAAQTENVGPPRPYTLAEAQDAGWRWRIPLQHRTGNGHVYSSEFMSDEEATRILLDKVEGDVVAGPMVVPFRTGVREKIWHKNVLAIGLSSGFIEPLESTAIHLIYRGMDFFFRFLPDRHCDPALADEYNRRMVADYTEIRDFIVLHYCTTARDDTPFWRKCRDMEWPDSLKERVELFRSNGSLREGLDELFRSVSWFSVLEGMGIRPRTYHPLVDRIDEAMLYAGLEKAREQLGGFVRQLPTQQQFIDAHCRAEKVDLGRPVMAGA

SEQ ID NO: 89802 - protein, 500 aa, Citromicrobium sp.
  misc_feature (1)..(500): tr|A0A326GG48|A0A326GG48_9SPHN Tryptophan halogenase OS =Citromicrobium sp. OX=2024827 GN=DI637_03535 PE=4 SV=1
MSRSYIPRKIVVAGGGTAGWMAACALARTMGSTIDLTLVESDMIGTIGVGESTIPPIVKFNEIVGIDEAEFMRETQATFKLGIEFENWRAEGEKYFHSFGATGRDHWSAGFQHFWLHAREQGYEHSYDEYCLELKAAYASKFAHLPDSRMNYAYQLDATRYAAFLRRKAEASGAKRVEGKIAHVHLHAASGDIASLELESGERLDGDLFIDCTGFRALLIEGALHVGYDDWTHFLPCDRAIAVQTESVRSAIPYTRAIAHDAGWQWRIPLQHRQGNGIVYCSRYLSDDEARERLLSSVEGETVSNPNALRFTTGARRKQWHRNCIAVGLSSGFMEPLESTSIHLIQRAVLRIIRMLPFGKISERDVDEFNDQQFVDMEQIRDFLILHYKATDRRDSAFWRHCAAMDIPDSLTRKMELFRETGRVFRRNEELFAENSWIQVMMGQGIMPQSYHPVATKLGPDELDRFLANQREFVARTVAGLPDHHAYIARYCGARDAEAA

SEQ ID NO: 89803 - protein, 498 aa, Sphingomonas sp.
  misc_feature (1)..(498): tr|A0A1Y2QRX7|A0A1Y2QRX7_9SPHN Tryptophan halogenase OS =Sphingomonas sp. IBVSS2 OX=1985172 GN=CAP40_05615 PE=4 SV=1
MQQIKRILIVGGGTAGWMTAALLGKLFQGLYEITLIESEEIGTVGVGEATIPAIKKYNELLELDENDFVRRTQGSFKLGIEFVDWAHKGDAYFHSFGVIGQDLGWLRCHQYWLKMRAMGRAADFSAYSINSAAARANKFMRADPKMAESPIGHIAHAFQFDAGLYAKFLRAYAEARGVRRREGKVADVTLGGEDGFVQSVTMEDGETIAADLFIDCSGFRGLIIEQAMKTGYEDWTHWLPCDRAIAVPCARTEPFTPYTRATARTAGWQWRIPLQHRTGNGHVYSSAHISDEEAEAQLLANLDGAQLAEPNKLRFTTGKRRQIWNRNCVALGLASGFLEPLESTSIHLIQAMVIRLVRLLPDRGFDPATIAEFNRQADFEYARIRDFIILHYKATSRDDTAFWRQCRDMEVPDTLQRKIDLFAANGRVFREDDELFTEESWIQVFLGQGVIPRGYDPLVDIKPEAQVEEYLGNIQRVIARCVGLMPDHAEFVAKTCAA

SEQ ID NO: 89804 - protein, 515 aa, Colwellia demingiae
  misc_feature (1)..(515): tr|A0A5C6QE42|A0A5C6QE42_9GAMM Tryptophan 7-halogenase OS=Colwellia demingiae OX=89401 GN=ESZ36_13175 PE=4 SV= 1
MDKAIKKIVIVGGGSAGWITAGSLAAEHCVNAASSIEVVLIESPEVNSIGVGEGTWPSMRNTLEKIGIDEKEFLQQCDASFKQGSKFVGWTTGDDRDSYYHPFMTPDGYGHVDLHAAWQANHSEQAFADAVNIQSHVCQAGLAPKQLATPNYAAVTNYGYHLDAKKFASLLRKHCTSKLNVQHIVAHMDGIISADNGDISAISTKEHGHIDGDLFIDCTGSASLLLGKHFNIGFINKQHILFNDSALAVQVPYPDQATPINSATLSTAQSAGWIWDIGLQTRRGVGYTYSSKYMSDVEAEKSLRQYLVDSVGEEKANLLKPKKLIFEPGHREKFWHKNCVAIGMSAGFLEPLEASALAMVELSSTMISEELPVTRVHMDIIAKRFNDRFNYRWQRIIDFLKLHYILSKRTDSQYWRDNQQPESISKELQELIKLWQYQPPSRYDFVQNEEVFPSASYQYVLYGMGFKTEQRANPRKFEANPLAKKTIAETQNKIDRYLTGLPSNRELLDKLKVKQ

SEQ ID NO: 89805 - protein, 490 aa, Sphingomonas sp.
  misc_feature (1)..(490): tr|A0A4Q7T4I8|A0A4Q7T4I8_9SPHN Tryptophan halogenase OS =Sphingomonas sp. BK036 OX=2512122 GN=EV283_2463 PE=4 S V=1
MTARPPIRSIAVLGAGIVGLSAAIAFTRALPGLAVTVIETPDDPAALTDRLAGTLPSIADFHDRIGLRERDLLAAGATHRLGTRLSDWRADGVPFVLAHGERGGAIAPGTFHQHWLNARRSGKTAAFDAFSVPATLAAADRFVHPSDDPRSPISGFGYAWRLDPPRYRDLLRALARHIGIIPVPGVYAGVERGSDGHIATLLLADGRRVAADLYLDCSGPAAPLRSALDTQWDDWRRWLPVDRLLLGAASAQIATPTDDRIAVPAGWRFVQPLRDRTLVGLGYAADQTSDSSARRILPAGDTVVPLALGVRAEPWRHNVLALGDAAAVLDPLADANLHLVHSTILRAIDLLPGRDCAPTELAEFNQRSHRQAARVRDFQAAHYLPTGRTRGPFWKRVARLPRPDSLAHTLEQFAHRGRLPFYEDESFDKDDWHGLLLGIGMIPRIADPIASASPSEAIAATLQQLADATAALPARLPPYPAYLARLERGR

SEQ ID NO: 89806 - protein, 521 aa, Xanthomonas gardneri; identical to SEQ ID NO: 85591
  misc_feature (1)..(521): tr|A0A1L5XY61|A0A1L5XY61_9XANT Tryptophan halogenase OS =Xanthomonas gardneri OX=90270 GN=BI317_02405 PE=4 SV=1

SEQ ID NO: 89807 - protein, 506 aa, Sphingomonas sp.
  misc_feature (1)..(506): tr|A0A4Q7SH15|A0A4Q7SH15_9SPHN Tryptophan halogenase OS =Sphingomonas sp. BK036 OX=2512122 GN=EV283_3281 PE=4 S V=1
MIVGGGTAGWMAATLLARRLDRQSVTITVVESSDIRTVGVGEATVPGIRDFFREIGVTEQDVMAAAQGTVKLGIEFVDWKREGERFFHPFGLYGMRSRGVAFHHYWRKLNAAGRPTPLSEFCLATALAERNLFMRPTDSPVHDLLFFDWAVHFDAGLFAKFLAKKAGEWGVKHIDATITDVLVDQSTGFISSVDTECGKTIAGDFFIDCSGFRSLLLGDALGVPYEDWTNLLPCDRAVAMPCERAEPLTPYTRSTALTAGWQWRIPLQHRVGNGYVYASRHISDDEAVATLKGRLEGEALAEPNMIRFRTGRRTAFWQGNCVALGLAAGFMEPLESTSITLIQTGLEKLLALLPDRSFDPALANEYNRTTGLEYARIRDFLVLHYFANGRQGEPMWDRCRGTALPEQLERKLKLFKARGHLVRYEWESFQDPSWLSMYAGFGIDAAAHDPLADHFSLSDLEAAFERMKGSIRDAVALAEPHETFLKSFAPASAPPASRSMNFAANG

SEQ ID NO: 89808 - protein, 510 aa, Sphingomonas sp.
  misc_feature (1)..(510): tr|A0A4P7R109|A0A4P7R109_9SPHN Tryptophan 7-halogenase OS=Sphingomonas sp. PAMC26645 OX=2565555 GN=E5673_11135 PE=4 SV=1
MIDGLGQHIVILGGGTAGWMTACLIAHRWRDRGVRVTLVESPEIGIVGVGEGSTPQLKHFFDTLGIAEAEWMPACDATYKLGIGFEGWSDREGYERYFHPFPTALDGHTAPQFFYNTRARRTGRDVDAHPDQFLLPARLAAANSAPQPAANFPFEVSYGYHFDAYKVGAFLAAHATETLGVVHLQRRIVSVETASTGDITALIDTDGERIAGDFFVDASGFRSTIFSALEMPFVSYANALFNDRAVVMPTAHAPGAPIPSQTRATALSAGWAWHIPLTSRIGNGYVYSSRHLTETQAEAELRAHIGAEAGEARHLRMRVGRVRDSWSHNALAVGLAQGFLEPLEATALHLVIATVEAFLDMVDQDGAADAVRTAFNTRIAARYDGVRDYIVAHYRLNQRHDDPTGYWAEARGVDALSGDLKMLMSTWFTGADMVAAIDRAGLGRYYSAISWHCLFAGYGTFPDAARLIPPGADIDPIDLPKIDDFLTRCASNFGSHASRLRAAADHKDHV

SEQ ID NO: 89809 - protein, 503 aa, Sphingomonas sp.
  misc_feature (1)..(503): tr|A0A4Q7T389|A0A4Q7T389_9SPHN Tryptophan halogenase OS =Sphingomonas sp. BK036 OX=2512122 GN=EV283_1433 PE=4 S V=1
MTEHPIRRVVIAGGGTAGWMAAAAIARTMGSTIDLTLVESDAIGTVGVGESTIPPMITFNRLLGINEAEFMRETQATFKLGILFDDWKDRGESYFHSFGITGKDHWSAGFQHFWLHGLTKGHEQPYDDYCLELRAALQGKFAHLPDDRMNYAYQLDSTRYARFLRKMAEADGTRRIEGKIAQVELNGESGDIAALVLESGARIEGDLFLDCTGFRALLIEGALHAGFDDWTHYLPCDSAIAIQTESVRPALPYTRAMAHDAGWQWRIPLQHRTGNGLVYCSRYLDRDAALDRLLGNIEGKTLTEPNMIRFVTGARRQQWHRNCIAIGLSGGFMEPLESTSIHLIQRAVLRLLRLFPAGAVSPRDVAEFNDQQHTDMLQIRDFLILHYKATNRRDSAFWRQCATMPIPESLEQKIELFRETGRVFRKNEELFAENSWVQVMLGQGIVPQSYHPIATKLRDEELARLLAGLRDGTNTTVAGLPEHAAYVARYCGAAPARPSTVAA

SEQ ID NO: 89810 - protein, 532 aa, Sphingomonas sp.
  misc_feature (1)..(532): tr|A0A4Q7T8G4|A0A4Q7T8G4_9SPHN Tryptophan halogenase OS =Sphingomonas sp. BK036 OX=2512122 GN=EV283_0305 PE=4 S V=1
MPIAGRLMPPRACSAVAAPDGFEAGTQTMANHPLRIVIAGGGTAGWMAAATFARFLETGYEIDLIESDAIGTVGVGEATIPQIHLFNDALGLDEDAFLRATGGTFKLGIEFVDWFKPGHRYMHAFGDVGRDVGLLPFHQYWLRARSLGLAGDLGAYSLNTHAAMAGRMQRGPARTSRALASMPYAYHFDAALYARYLRRYAETRGVNRIEGKIVRVTRDGESGDVSGLVLENGTTVAADLYIDCTGFRGLLIEEALRTGYEDWTHWLPCDRAIAVPSARSEAVTPYTRSTAHAAGWQWRIPLQHRTGNGVVFSSAHMSEDEATATLLSGLDTPAMADPRTITFRTGRRKRMWNHNVVALGLAAGFMEPLESTSIHLIQSAIARLLKLLPGRVIAEADRTEFNRQSDFEYERIRDFIILHYKATTRDDTPFWRQCRDMAVPDTLAAKIALWRGNGHIVREHEELFTEVGWLQVLAGQGIVPDGHHPLADAISTADLGEFMDTIDKLNAREANQMQDHAAFVAQHCAAAPSLAA

SEQ ID NO: 89811 - protein, 502 aa, Thalassotalea sp.
  misc_feature (1)..(502): tr|A0A1Q6CI15|A0A1Q6CI15_9GAMM Tryptophan halogenase OS =Thalassotalea sp. PP2-459 OX=1742724 GN=BI291_14310 PE =4 SV=1
MSEPIKKVVIVGGGTAGWMSAASLGRFLEGKNVDVTIIESSALETVGVGEATIPNIVSYNKNLGINELDLIKATQATFKLGIQFENWHQQGENFFHPFSDYGMPINNIEFHQYINQANHQGAALNIEDYCFPAVLAKKGKFAQPHPNPPSPLADYQYAFHFDAGLYANFLKDFAMNLGVKHIDALINSVELNQNNGFISAVTLDNGEIVEGDLFIDCSGFKGLLIEEALQTGYEDWSQWLICDRAMAVQTELVGEPTPYTRSIAKSSGWQWRIPLQHRMGNGYIYASQFQTDDDAERTLLDSVQGATINQVRKFRFTPGRRKQVWNKNCVAIGLSSGFLEPLESTSISLIQSVIDKLLTFFPDQSFNQHDIDEVNRLHNDEVEHIRDFLILHYKATKRDDSAFWRHCQKMDIPETLAHKIAVFESRGHIIMRESESFEAASWLTMYNAFDIKQKRFDERIANMPFDVMSKNLAQMKQSIENAAQQAMQHQDFINTHCRANPE

SEQ ID NO: 89812 - protein, 500 aa, Sphingobium xenophagum
  misc_feature (1)..(500): tr|A0A401IWT2|A0A401IWT2_SPHXE Tryptophan halogenase OS =Sphingobium xenophagum OX=121428 GN=MBESOW_P0103 PE=4 SV=1
MFMNSGHLRDIVILGGGAAGWIAAALLAKKINCQQTRITLVESEQIGTIGVGEATVPILAQYNAMVGIDEFDFVRSTQGTFKLGIEFCDWGTAGNRHFHAFSDFGHPVEGISTHHYWLRLRQSGEDYPIEDYSFAYAVGKNNNFAPHNERYHYAYHFDAGLYARYLRDVATELGVQRIEGKMTHFDLDPESGNISAIHLADGQTIPGDFFLDCTGFASELLGKALDTPFVDWSHWLLCNSAIAVPSPRIDTPMPFTRSTAHAGGWRWTIPLQHRNGNGMVYSSDYWSDDAARDDLLGSISGEPLAEPRLFRFTSGHRKQFWNRNCVGIGFASSFLEPLESTGIQLIVMGVLKLLRYFPQRVIDPVLRNEYNRLSTIEIERIRDFIIAHYYLSRRPEPLWAACRNIEIPDSLRHKIEIWKASGQIPLGDLESYMEPSWVAILLGNNLVPSRYSVSADKHPLDQIRNGMKLRREEIVRSARAVTSHRDFIDGHCKAAQLEFD

SEQ ID NO: 89813 - protein, 516 aa, Streptomyces olivochromogenes
  misc_feature (1)..(516): tr|A0A250VCG6|A0A250VCG6_STROL Tryptophan halogenase OS =Streptomyces olivochromogenes OX=1963 GN=SO3561_03296 PE=4 SV=1
MLNRIVIVGGGTAGWMTASYFKAAFGDRIDITLVESGNVGTVGVGEATFSDIRHFFDFLGLKEEDWMPACNATYKLAVRFENWREKGHHFYHPFEQMRSVNGFPLTDWWLRGGPTDRFDKDCFVMPSVIDAGLSPRYMDGSLIDQPFVEGADEMQGLTMSEHQGKTQFPYAYQFEAALLAKYLTAYSVERGVKHITDDVQRVNLDERGWISGVTTAEHGDITGDLFVDCTGFRGLLLNKALEVPFLSYQDTLPNDSAVALQVPLDMERRGVLPCTTATAQDAGWIWTIPLMSRIGTGYVYAKDYLSPEEAERTLREFVGPAAADVPANHIRMRIGRSENSWVNNCVAIGLSSGFVEPLESTGIFFIHHAIEQLAKNFPGEDWNPVHRDLYNDAISHVMDGVREFLVLHYVAAKRDDTQYWRDTKTRRIPDGLAERIEKWRTQLPDSETVFPYYHGLPPYSYMCILLGMGGIELKPSPALALADPDAAEREFLDIQEKTRRLTESLPKAYDYFARLH

SEQ ID NO: 89814 - protein, 497 aa, Thalassotalea sp.
  misc_feature (1)..(497): tr|A0A1Q6CHY9|A0A1Q6CHY9_9GAMM Tryptophan halogenase OS =Thalassotalea sp. PP2-459 OX=1742724 GN=BI291_14030 PE =4 SV=1
MKNKVNKVVILGGGTAGWMSAALLVKTFGNKLDITLIESDQIGTIGVGEATIPPIMHFNEELGINPKAFIKATKATIKLGIEFENWGTVGNRYMHAFGDIGKSFPLCDFNHFFTKAHYAGLNYDFWDFSLNYQVAKRNAFALLDKIPGLNLNGLAHAYHFDAGLYAKFLAQYCQAKGVKRIEGKVSQVEQCEKTGNILSLTLENSTQVAGDLFIDCSGMKGLLIEQRLNTGFEDWSHWLPADSAIAVPSESVSPIKPFTQSIAHEAGWQWRIPLQHRTGNGFVYSSKYLTDEQAQQCLLANLDGKALAEPKVIKFKTGRRLKQWHKNVVAIGLSSGFLEPLESTSIHMIQSAIVRLVKLFPHQGIDEVMIEEFNRQSTLEYERIRDFIILHYKLNQRDDSQFWRDCQRAEVPQSLKHKMALFKSSGLVFRENDELFTKIAWQQVFLGQGLIPDDYHRSADQLNTDELNEMLYSIKQIMTKTAEKVPPHHQFIDACIR

SEQ ID NO: 89815 - protein, 496 aa, Sphingobium lactosutens
  misc_feature (1)..(496): tr|T0HL17|T0HL17_9SPHN Uncharacterized protein OS=Sphin gobium lactosutens DS20 OX=1331060 GN=RLDS_18815 PE=4 S V=1
MGHNQVRDIVIVGGGTAAWMAAAVLATGLPQGRGTITLVESSAIGTVGVGEATIPPILQLNRLLQLDEGELIRRTQATYKLGIEFRDWRELGASYFHPFGAYGADLGGVHFHHYWLKTQQGALSDYSLPAAAAYAGRFAAPVEDPRNVLSRLSYALHFDATLYAAYLRDVATGRGVTALDGRIVDVALDGESGWVRSILLEDGREIAGDLFIDCSGFRGLLIEEALNTGYENWSHWLPMDRALAVPSQCSGPPVPFTRSTAQDAGWIWRIPLQHRTGNGHVYCSSFVDDQQAADRLLDQLDAPAIADPRPLRFQTGRRPKAWNRNVVALGLACGFVEPLESTSIHLIQQGVTTLLSLFPRDGINKAEVAEYNRLMQRDFERVRDFVILHYKQTLRRDTDFWREMAAMPVPDSLSHRMELFAANGRVMIEPGELFTETSWVAVMLGQGLTPNGYDLQADLLPEAEVREKLDRMRTTIARGVQALPTHKSYIDRLCAG

SEQ ID NO: 89816 - protein, 506 aa, Xanthomonas gardneri; identical to SEQ ID NO: 84875
  misc_feature (1)..(506): tr|A0A1L5XXR3|A0A1L5XXR3_9XANT Tryptophan halogenase OS =Xanthomonas gardneri OX=90270 GN=BI317_01410 PE=4 SV=1

SEQ ID NO: 89817 - protein, 505 aa, Pseudoalteromonas rubra
  misc_feature (1)..(505): tr|U1LNM7|U1LNM7_9GAMM Tryptophan halogenase OS=Pseudoa lteromonas rubra DSM 6842 OX=1117318 GN=PRUB_18262 PE=4 SV=1
MQKKGVRELIILGGGTAGWMTAAMLSRIFRDKLSITLVESDEIATIGVGEASIPPLVDFNRGLGLDEREFITRTQATIKLGIEFTGWGDSNSQYMHAFGNIGKRFPFCDFHHVWQHAQQLAQQHGTAKSALWDYSLNYRAAKAGRFAHLPVIPNTRLPGLEYAYHFDAGLYAKLLKEVAQKQGVIRKEGKVTEVKLSQQTGEVSELVLHDGARLSADMFIDCSGLNALLIDKTLNVGFDDWSHWLACDSAFAIPTEHGDGPLLPYTQSIAHGAGWQWRIPLQHRVGNGLVFSSRFWDEAQARKALLSNLEGAPLDEPRLIRFKTGMRRKQWHKNVFAIGLSSGFLEPLESTSIHLIQSAILRLIRHFPASNQADTQRAACNSEFSHEMRQVRDFIILHYKAIKRNDTAFWRWCKDMEVPESLEQTLALFKDSGAVLRDEGNLFSDLAWQQVMMGQGIEPDAPHPLAAQFSHEQAKGLLESLNTLLQHTVDQLPTHQAFLKNMTQA

SEQ ID NO: 89818 - protein, 521 aa, Xanthomonas campestris; identical to SEQ ID NO: 83608
  misc_feature (1)..(521): tr|A0A221MJH4|A0A221MJH4_XANCM Tryptophan halogenase OS =Xanthomonas campestris pv. malvacearum OX=86040 GN=APY 30_01615 PE=4 SV=1

SEQ ID NO: 89819 - protein, 505 aa, Xanthomonas translucens
  misc_feature (1)..(505): tr|A0A0G3LSY9|A0A0G3LSY9_XANCT Tryptophan halogenase OS =Xanthomonas translucens pv. undulosa OX=487909 GN=NZ30 _19470 PE=4 SV=1
MIAAPLRNLVVVGGGTAGWMAAAALARVLGPDYRITLIESEQIGIVGVGEATVPHIKAFNNLLGINEAEFVRQTQGSFKLGIEFVDWQRPGTTYIHGFGTEIGHSLGLLPFQQYWFKQALAGKAKPLGAYTLNTVAARRGKFMTSASDAPPNSPLGNIAYAYHFDASLYAAFLRRFSEQRGVTRREGIVEQVQLHPESGHVLSVRLASGDTIAGDLFIDCSGFRGLLIEQALHTGYHDFTHWLPCDRALAVPCAKVGPPTPYTRATARAAGWQWRIPLQHRTGNGYVYSSAHISDDEAAATLLANLDGAALADPRPLRFVTGRRKQVWNRNVVALGLASGFMEPLESTSIHLIQSGISKLLELFPREGISPVLVQRYNDRIAFEFDRIRDFLVLHYTATERDDSDFWRQCRAMAITPELQATLDLFGDSGRFYRNGDEMFAEISWVQVMVGQGILPRAYHPLVDQVPAADIERFVASIEQTIGHCVDAMPPHQAFIDRYCAAAPR

SEQ ID NO: 89820 - protein, 531 aa, Shewanella sp.
  misc_feature (1)..(531): tr|A0A2M7LYF8|A0A2M7LYF8_9GAMM Tryptophan halogenase OS =Shewanella sp. CG_4_10_14_3_um_filter_42_91 OX=1975535 GN=COZ42_03440 PE=4 SV=1
MHKPITQIVIVGGGTAGWITAGLLAAEHNVDKGVLAHSPKLNITLIESPDVATIGVGEGTWPSMRSTLSKIGIDENQFIRCCDASFKQGSRFIDWRNDPSKDADSKTPTQSNSYLHPFSLPHGNQELDLCPFWLPHADQVSFAEAVSSQAVLTQLGLAPKTIASAQYHFQNNYGYHLNAGKFSQMLSEHCTQKLGVTHIRDHVSHIINHDNGDIAKVITAAHGEIHGQLFIDCTGTKSLLLGEHLQVPFLSQKSVLFNDSALAVQVPYEQADSPIASCTHSTAKQNGWIWDIGLPTRKGVGYVYSSSHTNDADAEQSLLTYLGLDSATADKLTPRKLSFNPGYRAKCWQNNCIAIGMAAGFIEPLEASALALIEWTAATLAQQLPSNRQVMDTIAARVNQRYQLHWQQIIDFLKLHYVISQREVDRYWRDHRDKQSIPDSLQAQLELWRYQVPNQHDISYKEALFPAASFQYVLYGMGFNTQLPSHVKPSMQQQAQQLFNDNQQRTQVLSKSLLSNRDLLAKVVQYGFAKL

SEQ ID NO: 89821 - protein, 506 aa, Xanthomonas campestris
  misc_feature (1)..(506): tr|A0A221MVC4|A0A221MVC4_XANCM Tryptophan halogenase OS =Xanthomonas campestris pv. malvacearum OX=86040 GN=APY 30_21820 PE=4 SV=1
MIPAPLRNIVIVGGGTAGWMAAAAFARVLGPTFKVQLIESEQLGTVGVGEATVPHIKAFNNLLGIDEAEFVRQTQGSFKLGIEFVDWQRPGSTYMHGFGTQIGHPLGLLPFHQYWIKQHARGKAQPLGAYTLNTVAAARGKFMTSAGDVPANSPLANIAYAYHFDATQYAHFLRRYSQQRGVTRIEGLVEQVQLHPESGHVQSLQLASGQVVHGDLFIDCSGFGGLLIEQALHTGYHDFTHWLPCDRALAVPCEQVGPPAPYTRSTARAAGWQWRIPLQHRTGNGYVYCSAHISDDEAAATLLANLDGKPLADPRPLRFTTGRRKQCWNRNVVALGLASGFLEPLESTSIHLIQSGISKLLELFPREGISPVLVQRYNDRLAFEFDRIRDFLLLHYHATERDDSAFWRHCRHMPITPELQATLDLFRDSGRFYRNAEEMFAEISWVQVLVGQGILPQGYHPLVDQVPDRDAEGFLASVAQTISHCVDVMPSHQQFIDRYCKAATLP

SEQ ID NO: 89822 - protein, 503 aa, Sphingomonas sp.
  misc_feature (1)..(503): tr|A0A0Q4HVE8|A0A0Q4HVE8_9SPHN Tryptophan halogenase OS =Sphingomonas sp. Leaf226 OX=1735691 GN=ASE77_16735 PE= 4 SV=1
MTQAPLGSIVIVGGGSAGWMTAAALSSLVESKDVSITVIESDAIGTVGVGEATIPDMLVFNQMLGISEAEFMRATEATFKLGIEFVDWGHKGDRYIHPFGQHGVDMEGIDFHQYWLRLNRDGGTAPIEDYSLSAVAAGAGRFALPDPNPRSVFSHLRYAYHFDATLYARFLRGYAEKRGVKRIEGVVNAVHRTAQGDGIAAVTMDSGAQIKGDFFFDCTGFRALLIGQTLDIDFVDWSAWLPCDSALAVPSAHVGPPPPYTRSTARPAGWQWRIPTQRRVGNGHIYSRSFMDDDEAERVLRKGVEGALLAVPRSIRFKAGHRRQFWRGNCIAIGLAAGFLEPLESTSLYLIQEGISRFISLFPNGDMPDILRVEYNRYMQKKFEQVRDFIVLHYVATNRDDTPFWRYCRSMSVPDSLQHKMELFRETGRIFRYDDELFARPSWVAVMLGQGIMPKRCDPIVAALPARDVANSLQSMASAMKDAASRMPTHASFIASYCAATEG

SEQ ID NO: 89823 - protein, 500 aa, Sphingomonas sp.
  misc_feature (1)..(500): tr|A0A0Q4I341|A0A0Q4I341_9SPHN Tryptophan halogenase OS =Sphingomonas sp. Leaf226 OX=1735691 GN=ASE77_11425 PE= 4 SV=1
MDTPPKTRVIIAGGGTAGWLAAALLTRQLGALIDVTLIESDEIGTVGVGEATIPTVQAFHALLGLDERAFMAATGATFKLGIAFEGWARPDDRYVHSFGDVGRSTWMGDFQHFWLEARANGLAGDFGDYCLELQAAEARRFTIGQQGPQLNYAYHFDAGRYARFLRERCETAGLTRIEGRIAGIDRSAETGHIDAVVLADGSRVAGDLFLDCSGFRGLLIGDALGVGYEDWSHWLPANRALAVQTTSVEPARPYTRAIAHDAGWQWRIPLQHRVGNGIVYSSEYLSDDAAQDRLLASVQGRPLTDPRLLRFTTGRRLCAWEGNCIALSLAGGFVEPLESTSIHLVMTALTRLLRAFPFDGISPAVVAQFNAQTRREIEGVRDFVILHYHLNQRSEPFWKACAAMPIPDTLAERIALFADAAQAYQSPDDLFRVSSWTQVMLGQRLEPRDWHRLARMMPPERLGSSLAELKAGIAQQVERLPAHQAFVDRYCAQAATTVAA

SEQ ID NO: 89824 - protein, 509 aa, Citromicrobium sp.
  misc_feature (1)..(509): tr|A0A326GCN3|A0A326GCN3_9SPHN Tryptophan halogenase OS =Citromicrobium sp. OX=2024827 GN=DI637_09855 PE=4 SV=1
MSDRRIRDVVIVGGGTAGWMAAAALSATMGEQLQIRLVESDAIGTVGVGEATIPAIRLFNGLVGIDENEFVRATQGSFKLGIEFIDWGRKGDSYLHAFGQIGQSLDLIEFWQYWLRARAEGVAEPVGHYSLNECAARDHRFARMPRIPNSELDGISYAFHFDAALYAQFLRRIAERNGVMRTEGRIVSVSRHSNNGYIRSVILQSGEEIGGELFIDCSGFGGVLIEQELESGFDDWSHWLPCDRAVALPTENNGQPRPYTQSIAHRAGWQWRIPLQHRSGNGHVFCSEFISEDEAVATLLGNLEGKPIAEPRIIPFKTGMRRAAWSANVVALGLSSGFLEPLESTSIHLIQAGIAKLISHFPDRTFRPANTAAYNRRMAYEYERIRDFIILHYHANQRDEPFWKRCRDMEIPESLREKIELFRATGRIFREQEELFVEIGWFQVLTGQNIVPETWHPLADVLTKDELEQFLSDIRTIVSSNAARLPLHSEFIAKTCASPAPPVSIGAST

SEQ ID NO: 89825 - protein, 507 aa, Sphingomonas sp.
  misc_feature (1)..(507): tr|A0A1Y2QF06|A0A1Y2QF06_9SPHN Tryptophan halogenase OS =Sphingomonas sp. IBVSS2 OX=1985172 GN=CAP40_13650 PE=4 SV=1
MASGAIERVVIVGGGTAGWMAAAALGAYLAGTGTRITLIESSEIGTIGVGEATIPTIRRFYAALGMTDAEVMRACEATAKLGIRFVDWKPGTSFVHPFGRFGQDLRGIDFHHYWQKARQAGQAAPLEEYSLGAMLAREGHASVPLPNPPSQLSVFDWALHFDAARFAAHMRAYAEHAGVTRIDARITDVALHGETGFIEAVTLDSGERVAGDLFVDCSGFRGLLIGEALGIPYRDWSHWLLCDGAFAVQSERVGEPPSCTTVTARTAGWQWRIPLRSREGNGIVFASDFQGDDDARAELLANIPGAPTMEPRRLRFTPGRRDVAWAKNCVSLGLSSGFLEPLESTSIALIETGIERLKQLFPDKGFDPAVIAEYNSQSAEEMERVRDFILLHYRLSTREGAFWQACRQMTLPDSLAAKLELWRARGAFLRYRWEMFSPASWLAIYGGFEHLPERIDPGVAAVDAGELAQGLEQMRAAIARTVADTPTHSEFLATVDGAAAEPMRTPA

SEQ ID NO: 89826 - protein, 505 aa, Citromicrobium sp.
  misc_feature (1)..(505): tr|A0A2D9IBB9|A0A2D9IBB9_9SPHN Tryptophan halogenase OS =Citromicrobium sp. OX=2024827 GN=CL805_07445 PE=4 SV=1
MDRPAPLKVVVLGGGTAGWMTAASLAKLLPDRASVDLIESEDIGIIGVGEATLPHIRGFVERLGIREAEFMKATHATYKLGIDFRDFGRIGESYIHPFGSFGEELAGVGFHHYWLELQRRGQAAPLGEYSLCVAAALANRFQPPSRDLSLSSTYGYAYQFDATLFGPFMREFGQSVGVTRHEGLVTNVERNGDTGDVTALVLKDGRRIEGDLFVDCSGFRSLLLGQELGEEWEDWSHWLPCDRAAAMPCTHATEDIRPYTTATAMPAGWRWQIPLQHRMGNGYVFSSAFLDEETACEAIRDAAEGEPLADPRVLRFRPGRRRRSWSHNVVGVGLASGFLEPLESTSIYLAQMAITYLIELFPEAGGIEPADRDAFNRLVDMEYDRVRDFLILHYHATTRDDSEFWNHVRTMRVPDSLSDKLQLWRETGRIEKYSDGLFFDASWIAVYVGQGWLPQRHDSRTGMVDPERLKAAADRLRREIASEVSRMPGHREYLERETSRLAEAS

SEQ ID NO: 89827 - protein, 494 aa, Colwellia demingiae
  misc_feature (1)..(494): tr|A0A5C6QDY4|A0A5C6QDY4_9GAMM Tryptophan 7-halogenase OS=Colwellia demingiae OX=89401 GN=ESZ36_13180 PE=4 SV= 1
MKDKIQNIVIAGGGTAGWMAAAAFSKLLGKNLNITLVESDEIASIGVGEATIPPIKTFHKLLGINEQEVMRATHATFKLGIGFENWGQQGDHYIHSFGVTGKECWAGEFHHFWLHGLRKGIKDDFGDYCYELQAAKANKFALSKNTPINYAYHLDATRYAQYLQEFSKKLGVTRVEGKIQQVNKDNKSGEISSLTLASGQIVEGDFFIDCTGFQGLLIEQALHTGFDDWSHWLPCDRAVAVQTKAVAAPLPYTRSIARESGWQWRIPLQNRVGNGLVFCSKYCSDEEAINTLTANIEGDLLTEPRIIKFNTGRRRKGWNKNCVALGLSSGFIEPLESTSIHLIMSGIIRLLRLFPFDGIHQSAIDEYNNKLNSELNAVRDFIILHYKATQREDSNFWLHCKNMEIPPSLVHKMQLFKDTGRVFLDDGDIFRVDSWTQVMLGQGIKPTQYHKIAEIMNDKELENFMSSLKASITNAVEQLPSHAEFIQSYCKSDY

SEQ ID NO: 89828 - protein, 479 aa, Sphingomonas sp.
  misc_feature (1)..(479): tr|A0A0Q4HXS5|A0A0Q4HXS5_9SPHN Tryptophan halogenase OS =Sphingomonas sp. Leaf226 OX=1735691 GN=ASE77_16035 PE= 4 SV=1
MTAAALAAVAGRSVAEVQLVESEEIGIVGVGEATLPHIRAFNTRLGIDEAEFMRATAATFKLGIEFSDWARIGDSYIHPFGAFGHDVDGVGFHHYLSRAGHIATLPDYSLPVVAARHAKFAPPLDDPRSLLSTYGYAYQFDATRYAPFLRARAERHGVTRTEGRVVDVERSGTGDVVAVVLDDGRRMTGDLFVDCSGFRSLLLGQAMGEPFEDWSHWLPCDRAVAVPCADAGTLKPYTTATAMPAGWRWRIPLQHRVGNGYVYASAHIDDGAAQDALLRSIESTPLADPRMLRFKAGRRARSWVGNVVGVGLAGGFLEPLESTSIYLIQLAITQLLELFPATPISPVDRDTFNRVVDLEYDRIRDFLILHYHATTRDDSPFWDHVRTMAVPDTLAEKLALFRKRGRVMTYREGVFLEPSWIAVYLGQGVVPEGYDQRADRPSDAALAQALARLRTETRDAVMTMPDHAAYIAQSGAASA

SEQ ID NO: 89829 - protein, 500 aa, Sphingobium lactosutens
  misc_feature (1)..(500): tr|T0ISU1|T0ISU1_9SPHN Tryptophan halogenase OS=Sphingo bium lactosutens DS20 OX=1331060 GN=RLDS_18370 PE=4 SV= 1
MTQPSLPRRIIVAGGGTAGWMTAAALARTLGPVAQVTLIESEQIGTIGVGESTIPPLVAYNRILGIDEADFMRATQATFKLGIQFENWRVPGESYFHSFGGTGKDHWSAGFQHFWMHGAAHGHDAPYDEYCLELKAAMAGRFAHLPDDRMNYAYHLDSGLYARFLRSMAEGDGATRIEGRIVAVDLDGASGDIAALRLDGDRRIEGDLFIDCTGFRALLIEGALHAGYDDWTHWLPCDGAVAVQTASVRAPVPYTRAIAHDAGWQWRIPLQHRQGNGIVYCSAFMEPQAAQDQLLATVEGDRLVQPNPIRFRTGARRRQWHRNCVAVGLSGGFMEPLESTSIHLIQRAVLRILRMLPAGAISPRDIAEFNDQQMADMEQIRDFLILHYKATDRRDTPFWRHCASMAVPDSLTHKMELFRETGRVFRKNEELFAENSWVQVMMGQGIRPQSYHPVAAKLRPQELEHLLTTLRDQVSRTVAALPDHGAYVARYCGAQDVAAA

SEQ ID NO: 89830 - protein, 502 aa, Sphingomonas sp.
  misc_feature (1)..(502): tr|A0A0Q4HGX5|A0A0Q4HGX5_9SPHN Tryptophan halogenase OS =Sphingomonas sp. Leaf226 OX=1735691 GN=ASE77_16730 PE= 4 SV=1
MDELAIRRIVVVGGGTAGWMAAAALSRVLGHAVEIELIESEAIGTVGVGEATIPHLQYFNRLLGIDEDDFVRRTAATFKLGIEFVDWGRIGDRYFHPFGTYGQEMEGLHFHHFWLRQAQLGGTLELDRFSIGADAARAQRFQRPDHSRAGSPLGTISYAFQFDASLYARYLRERAEAGGVRRTEGRIVDVALDSGNGHVQAVTLEDGSRVAGDLFIDCSGFRGLLISKALGAGFEDWSHWLPCDRAVARACRRTTDPLPYTRATAKAAGWQWRIPLQSRTGNGYVYCSDHLSDDEALAGLNAALDGDPLSEPNFLKFKAGVRHKAWDRNVVALGLANGFLEPLESTSIHLIQSAIARLLTNFPDRRFNQHDIDYYNRRTRVEYEQVRDFIILHYATTTRDDSPLWRYCRSMALPTSLEERIAIFRENGRLYRHDNELFSETSWLAVMHGQGLVPRRYHPLADLLPEGDLDKRMAHIANAMRLAVDRMPSHQQFLDQIGRPAV

SEQ ID NO: 89831 - protein, 517 aa, Sphingomonas sp.
  misc_feature (1)..(517): tr|A0A0Q4HNG1|A0A0Q4HNG1_9SPHN Tryptophan halogenase OS =Sphingomonas sp. Leaf226 OX=1735691 GN=ASE77_11340 PE= 4 SV=1
MDRAITSIVIVGGGTAGWLAACLIAARADRDAEHPLQVTLIESPDVATIGVGEGTWPTMRRTLERIGISETEFLLACDAAFKQGSRFDGWRTGAPDDRYLHPFTTPAEAAPRDLASAWSDSGLAFAEALCTQHAVCSQDLAPRQRAMPDYAGTLNYAYHLDAGKFAALLARHATERLGVRHLRDHVVGVDGAADRDITAVRTRASGRIEGDLFLDCTGHAALLIGEHYGVGTIDRGRELFNDRALAVQLPVAADSVIASQTNATAHAAGWIWDIGLPARRGIGCVYSSAHLDDDAAADTLTRYLRATAPDAPLPDFRPLRFQSRHRDRFWHRNCLAIGLSAGFLEPLEASAIVLVELSVDALLDNFPATRRTMDLHAARFNTLFRYRWDRIVEFLKLHYVLSQRDEPYWRHHRDPGSIPPRLADLLQLWADQPPSHADFPMVDEIFPAASYQYVLYGMGFSAPRRTPVRTGARGAADMLVQQVDRHGRMLAAALPTNRAYLDALRHAMTSATMETRA

SEQ ID NO: 89832 - protein, 487 aa, Sphingomonas sp.
  misc_feature (1)..(487): tr|A0A0Q4HS34|A0A0Q4HS34_9SPHN Tryptophan halogenase OS =Sphingomonas sp. Leaf226 OX=1735691 GN=ASE77_09865 PE= 4 SV=1
MTAATLGLTTGTPSAARLADITLVESEEIGTVGVGEATVPHIRFFNQRLGIDEADFVRRTKATFKLGIEFCDWGRIGDSYIHPFGDFGHDIDGLPFHQHWLHATRGKPDETPALAACSLPIVAARAERFTPPLDDPRSVGSTYSYAYQFDAGLYAAYLRDYAEARGVTRIEGRVEHVERGPSGIAALRLADGQRIEGDLFVDCSGFRALLIEGALRAGHEDWAHWLPCDAAWAVPTANAGPLVPYTRATARDAGWQWRIPLQHRTGNGHVFSTRFTDPERARAVLLDTLEGEVLAEPRMLRFRTGRRHRQWIDNCVAIGLSAGFLEPLESTSIHLIQLAIGKLIELFPNDAVLDPADAAEFNRAMALEYDRVRDFLVLHYCATERDDTPFWRHMRTMDLPPSLAGKIAAFRDRGIVEQYREGMFLPASWLAVYYGQRIMPERIHPLVAALPVADSRARVAAVADACRRTAEGMPTHVDYLARIGAAA

SEQ ID NO: 89833 - protein, 507 aa, Xanthomonadales bacterium
  misc_feature (1)..(507): tr|A0A1G4AL05|A0A1G4AL05_9GAMM Tryptophan halogenase OS =Xanthomonadales bacterium RIFOXYA1_FULL_68_6 OX=180265 5 GN=A2213_11840 PE=4 SV=1
MTATGNPIGSIVVVGGGSAGWMAATALATYLGRQASIRLVESEEIGIVGVGEASVPYMKQFNAGLLGIDEFDFVARTQGTFKLGIQFDDWGRIGDSYVHGFGRIGQGIGPLPFHQFWLKLFHAGRARPIGEYSLPTLAAPLGKFMSSPGNVPPDSPLADIAYAYHFDAGLYAGYLRELAERRGVQRIEGKITHALQRSEDGFIEAVVLESGEQVAGDLFIDCSGFRGLLIEQTLQTGYIDWTHWLPCNRAMAVPCATAGPPTPYTRSTARAAGWQWRIPLQSRIGNGYVYSSQHISDDEAAATLLANLDGRALADPRPLRFTTGMRRKLWNRNVVALGLASGFMEPLESTSIYLVQSGIQRLLGLFPDRGFDPLLERQFNEESAFEYESTRDFLILHYCATRRNDSAFWDYCRTMSIPDTLQRKIDMFRSGGRYFRTGDEFFALPSWVQVMLGQGIVPAGYHPIVDDMPEQALVEHVARVHRSIADSVAAMPRHQDFIDRHCRAPAG

SEQ ID NO: 89834 - protein, 506 aa, Duganella sp.
  misc_feature (1)..(506): tr|A0A0Q7WSH1|A0A0Q7WSH1_9BURK Tryptophan halogenase OS =Duganella sp. Root1480D1 OX=1736471 GN=ASD58_05215 PE= 4 SV=1
MNQHNRISKITIVGGGSAGWMAAAALATYLGKGASVRLIESEEIGIVGVGEASVPHIRLFNGQMLGIDEAEFIKRTQGTIKLGIEFKDWSRLGDSYIHGFGTIGRSVGPLPFHQFWLKLYQSGRAAPIGEYSPQTVMAPQGKFAPCDRNASPGSPLADIAYAYHFDASLYARFLRELGEQRGVQRIEGKIVGVNQRADDGFIESVTLESGQVVDGELFIDCSGFRGLLIEQTLKTGYVDWSHWLPCDRAMAVPCEGVTPIAPYTRSTARTAGWQWRIPLQHRTGNGYVYSSRHISDDEAAATLLANLDGKALAEPRALRFTTGMRKKFWNKNVVALGLASGFLEPLESTSIYLAQSGITRLLGLFPKRDFNPLLAERFNRESVFEYERVRDFLILHYNATERNDSPFWDYCRTMPIPESLHEAIELFRYDGRYFRNGEDFFALPSWVQVMLGQRIVPQSYHPIVDDMPEEKLVDVVESMRAMLASAVAAMPTHQEWIERHWKASAP

SEQ ID NO: 89835 - protein, 355 aa, Xanthomonadales bacterium
  misc_feature (1)..(355): tr|A0A1G4AJ44|A0A1G4AJ44_9GAMM Tryptophan halogenase (F ragment) OS=Xanthomonadales bacterium RIFOXYA1_FULL_68_ 6 OX=1802655 GN=A2213_03955 PE=4 SV=1
MDPADKPEGHIRKVVIAGGGTAGWLAGCALSHQFRDRLDITLVESEQIGTVGVGESTVPPIRTFHRFLQIDEQEFLRAVAGTFKLSISFENWRRPGERYIHPFGITGQGTWAAAFHHFWLDSLRRGMSSELGDFCLETLASRGDQFSLQTQPQVNYAYHFDAGLYAKFLRRIAEGHGLRRVEGKIREVRQHPTDGAVQALVLEDGQVIEGDLFIDCTGFRGLLIEQTLHTGYEDWNQWLPSDRAVAVQTESVGPPVPYTRAIAHEAGWRWHIPLQHRVGCGLVFSSRHMSDDEARAKLLRDVGAPPIRDPWLVPFRTGRRLKAWNRNVVALGLASGFIEPLESTSIHLAISAVVR

SEQ ID NO: 89836 - protein, 495 aa, Acinetobacter venetianus
  misc_feature (1)..(495): tr|A0A150HW70|A0A150HW70_9GAMM Flavin-dependent tryptop han halogenase RebH OS=Acinetobacter venetianus OX=5213 3 GN=rebH PE=4 SV=1
MINLRGMNRVVVVGGGTAGWFAALQLRQLFSPSVEVMVISAPEIPIVGVGEGGVLNLLTVLHDLNIDLKTFIDKTGSTLKLGFRYERWRTGKEDDYYYHLFPLPTPDFAWNEFGFNPYLSGLFNHGIDISRYMASYQFSEDRKSFHEVLQILLDGKNNFGASLHFDTFRVGQYLKEIALSRGIIHVEQRIHDFELNPQTEYISAIQLLDQKIQCDFVVDASGFSRLLIGKKYKSCWHSFADTLPMNRALPFHLQHQDKIELVTRATAMSSGWVWQIPLQERIGAGYVYHDQFITDEQAQQEVEQWLGVKISPAQPIAFEAGFYEKVWMKNVVAIGLASGFIEPLEATSIGQMLSQLQLMISFIQENHGVISQQNIDFYNRQNSQYWQGICDFIRMHYDTGRKDTPFWQYMLTVPQSQSYQELKKCWEHRTPRDIDFVEHSMGGMSMFSAASWFAVGAGVGVIKPEATSAELYALSTEKKQKLAKYLQQIKQQLFL

SEQ ID NO: 89837 - protein, 483 aa, Sphingomonas sp.
  misc_feature (1)..(483): tr|A0A1Y2QLT0|A0A1Y2QLT0_9SPHN Tryptophan halogenase OS =Sphingomonas sp. IBVSS2 OX=1985172 GN=CAP40_00275 PE=4 SV=1
MLAGRILVVGGGTAGWMTAAALAHKLAGMPARITLVESAEIGTVGVGEATIPHIRHFNATLGIDEADFLAATKGTYKLGIEFVDWGRKGDSYIHPFAEFGAPIGGVPFHQQWCSARDAGAFEAYSLPIQAARRGRFRRPDGDPYNYAYQFDAGLYAKFLRGYSEARGVTRREGKVIDVARDGESGFVRSVALEGGETLEADLFIDCSGFRGLLIEQALHAGYEEWTHWLPCDRAIALPCANIGPIPPLTRATAQDAGWTWRIPLQHRTGNGHVYASGFTSDEEALRVLLGAIAAEPMADPNRLRFVAGRRRRQWVGNVVAIGLSSGFLEPLESTSIHLIQLAIGRLLDLFPTRDWDPLDAAEFNRLMALEYERVRDFLILHYHCTERDDSEFWRHCRAMRLPDSLEYKLALFRERGVVVQYREGTFLEPSWLAVYLGQHVTPRHCDPRAGGAAAVAAMAAMRAGIAATAEAMPAHEAALGISA

SEQ ID NO: 89838 - protein, 482 aa, Sphingomonas sp.
  misc_feature (1)..(482): tr|A0A0Q4HSM8|A0A0Q4HSM8_9SPHN Tryptophan halogenase OS =Sphingomonas sp. Leaf226 OX=1735691 GN=ASE77_09850 PE= 4 SV=1
MAAVAFGRLLGPAGTRVTLVESDDIATIGVGEATIPPIRTFHAMLGIDEDAFLRATGGSYKLGIRFEGWTRPGESYVHPFGQIGTDIAGVPFAAQWLRARQAGAADALGAYSLEARAAEAGRFSRPIANGDSPLSRIGYAYHFDAGRYAAFLRAQAEAHGVIRREGRVDRVERGPAGIAAIHLADGSRIEGDLFLDCTGFRALLIEGALQAGWTDWSQWLPCDRAVAVPSAADAAPLALTRAIAEPAGWRWRIPLQHRTGNGHVFSSRHTSEDEATATLLAGLDGEALADPRVIRFATGHRTRFWSGNCIALGLAAGFMEPLESTSIHLVQSGLQHLLRMLPAGGPPAPAIVDRYNRTMTSEFVRIRDFLVAHYHLNSRPEPFWRERAAAPIPDGLAEKLALFRAGGRIFREADELFNEVSWLALLTGQDAPVTGHDPICDALPIAIAAKRLAQIERVVATSLTHMPPHADALARLGQDRTI

SEQ ID NO: 89839 - protein, 497 aa, Duganella sp.
  misc_feature (1)..(497): tr|A0A0Q7WMN2|A0A0Q7WMN2_9BURK Tryptophan halogenase OS =Duganella sp. Root1480D1 OX=1736471 GN=ASD58_29590 PE= 4 SV=1
MRRIVIAGGGTAGWMVAAAISRSLGKVLDIKLVESDEIGTVGVGEATIPSLLNFHRLLEINEQEFMAATKATFKLGISFENWRNVNEDYIHSFGMTGTDHWTAGFNHFWHKGRERKLASDYGDYCLELKAAQLNRFGHLPHDGINYAYHLDASAYARYLRKYSERYGVQRIEGKIAKVLTDASSGHITALQLDSGAKLEGDLFVDCTGFRALLIGETLGEGFEDWSQWLHNDSAIAVQTSSTGPAVPYTRAIAHEWGWQWRIPLQHRVGNGIVFSSKFVDDDTARARLMSNITGEQLVQPRVIRFKPGQRRKVWSKNCIAIGLASGFLEPIESTSIHLIQRGIIRLMQMFPSAGIFQSEIDEYNRQAWTEIEHIRDFIILHYKATNRRDAAFWRHCAEMEVPASLSRRLDLFRETGRVFRLSNELFAENSWVQVMLGQGITPLQHHPSADLMGDAELSCFLDSIRNNVARTVAQLPPHQQYVENYCAAYMEEYLAPK

SEQ ID NO: 89840 - protein, 495 aa, Acinetobacter venetianus
  misc_feature (1)..(495): tr|A0A137XM75|A0A137XM75_9GAMM Uncharacterized protein OS=Acinetobacter venetianus OX=52133 GN=AYL20_11270 PE= 4 SV=1
MLNLRGMNRVVIVGGGTAGWFSALQLRSIFSNSVEIMVVSSPEVPIVGVGEGGILNLLSTLHHLKIDLKTFISETGSILKLGFRYEGWRTGHSDDYYYHLFSAKTEEFMWVEDGFHPYLSGLFNHGIDINRYLTSYQFCEDRKPSDEVLALLARRNNNFGASLHFDTFRVGQYLKKIALARGIIHVEGRVQDVILHPETGDVTAIQLADRDILCDFVIDASGFSRLLVGQKYKSQWCSFADMLPMNRALPFHLMHEDKIELVTRATAMGSGWIWQIPLQHRIGAGYVYSDQFITDQQAQQEIEQWLGRRISPVQPISFEAGYYKQVWKNNVVAIGLAGGFVEPLEATSIGQMLEQLSLLSSLIKGCHGVIPQHSLNYYNQQNEQGWLGIRDFIRMHYDTGRSDTPFWKYMQTVPISENYRELKECWQHRTPRYMDFTQYQMNNFQMFGISSWFSVGAGIGLIKPESTAAELYSLSPEKKQKLAKYLQDTKQRLFL

SEQ ID NO: 89841 - protein, 521 aa, Sphingomonas sp.
  misc_feature (1)..(521): tr|A0A1Y2QM14|A0A1Y2QM14_9SPHN Tryptophan halogenase OS =Sphingomonas sp. IBVSS2 OX=1985172 GN=CAP40_07445 PE=4 SV=1
MQPRSNPSPAPLRVVIVGGGTAGWMCAAGLARLLPQTDYALTLIESDEIGTVGVGEATLPHIREFNTMLGLDEAEFMRATQGSFKLGIEFVGWDRPGGRYVHPFGSFGERWGGIDFQHHWLRARAAGHDVGDWFDHSFAVAMCREGVFDLPNEDPRSIRSTFSYAYHFDAGLYAEYLRGWATRRGVRRIEGRIVDVARNAESGLVESVALQSGARIEGDLFIDCSGFRSLLLGQAMGVAWHDWSAWLPCDRAMAVPCASVAGITPFTRSTAQTGGWTWRIPLQHRIGNGYVFSSSFCSEEQARETVLGAIDGAPLADPRLLRFQAGRRARGWEGNVVAIGLSSGFLEPLESTSIFLIQAAVTDLANLMPAPGGGPPDPRLAAEFNRLFAIHYDRTRDFLVLHYTANARHGEPLWDHVRNMALPDSLAHKIALFRSSGRAPDYKLGLFSRDSWLAVLMGQGILPQAHDRLADRAPLDEVVERLADLRERIATNAAALPAHAEFIAGYCSAARGTADDRAVVA

SEQ ID NO: 89842 - protein, 501 aa, Mycobacterium europaeum
  misc_feature (1)..(501): tr|A0A0U1DQ82|A0A0U1DQ82_9MYCO Tryptophan halogenase OS =Mycobacterium europaeum OX=761804 GN=BN000_04998 PE=4 SV=1
MIESVLVVGGGSAGLLTALALKQHAPQLQVRVVRSKNIGVIGVGESTTPQLISLLFDYLKLPQKEFYSIVRPTWKMGIHFLWGPRESFDYGFQFQLDAFYTDLTRYNGFYCGDEFDSVNMNSALMAQGKAFEKHPSGQGPMITADTALHLFNPALVEALEKASVERGIELIDARITGVPVDEQGVQSVILEDGRTFSADLYVDASGFRSELLGRALGTPFVPYDSSLFCDRAIVGSWDRTDEFIYPYTVAETMEAGWCWQIDHENSINRGYVYSSQFLSDDQARDELLKKNPKATAWDHVIKFRSGRYEKGWVKNVFAIGNACGFVEPLEATSLMVSSSQIKAMVEMLVESHLEPTPSLQELYNTLFVDWWDGIKDFLSIHYRFNTRLDNEFWTACRNEVDVTPVQPLLDFYHENGPTGFLRHFVTSTIGQDNQFGLEGYLVMLVGQKVPYRDPHPPSQAEMATFQRHCAQNRARAMSGLTVAEALEYVHLPDWRWNSDSQ

SEQ ID NO: 89843 - protein, 499 aa, Marinicella litoralis
  misc_feature (1)..(499): tr|A0A4R6XE24|A0A4R6XE24_9GAMM Tryptophan halogenase OS =Marinicella litoralis OX=644220 GN=C8D91_2635 PE=4 SV= 1
MSVPIQKVVIVGANLTGFCAAAYVTSQLKGSGLQVEIIDDGSGEYSPIVSTQASVNSVFQSMGLDLRQLMAATDAAFNLGQAYEGWLGAGSWAFNSFTAPPNMAGFFEFQHFWLKSMQSGNVGDYHQYSLAAMAARQGKFAFPSPANPNPLTQLSFGLNFNSAKLMAFMRSLSINAGVKVADGTLQAVESDENGTVSAVLMSTGLKVQGDFFIDCSLLAKSVLDSHFNLSFHSRYETSPVNRTACIVLNNQDEPLLPQTSVRALPNGWLKQCSDQNRTATTFVYNSNQLTDQEVAIGLLQHMVNQDSDEQPPADVVFSELTPGNKVASWVDNCLFIGAGTFQSCQLDYCDFSYVFKALESFVKLFPHNKNSYNSHEYNRWTQADYNQLLDYECLAMSLAANNETEFWISLKKLELSEAMQHQLALFKSHGRLIDQRQALIAKHQWAAMLISRGVIPVRNHPLMSVLDQADGLPELQSQIGSLVAGMPSHRQFLLRFCQQ

SEQ ID NO: 89844 - protein, 502 aa, Sphingomonas sp.
  misc_feature (1)..(502): tr|A0A4Q7SHF7|A0A4Q7SHF7_9SPHN Tryptophan halogenase OS =Sphingomonas sp. BK036 OX=2512122 GN=EV283_3415 PE=4 S V=1
MKRVQRLVILGGGTAGWMTAAAMSATFGDLVEISILESDAIGTIGVGEATIPTIHWFNQLIGLDEAAFVAATKASFKLGIEFVDWARPGTRYFHPFGRYGVDLGPVPFHQHWLRAKGDGLDRPLSTYSLAAQLAAAGRFAKPVDDPRSILSTLGYAYHFDASLYARHLRQLAEKRGVVRHEGLLRDIKRDPDTGFVTALTSDRDERLEGDLFIDCSGFRALLIGETMGAQFEDWSHWLPCDRAVAVPCARIAATTPFTRSTLRPAGWQWRIPLQHRTGNGYVYASSFVSDDEAVATLLSNLDGEALADPRMLRFTAGFRREAWRGNVVAIGLASGFLEPLESTSIHLIQSGIAKLITLFPDADCDPVLARQFNTLFARDMDGIRDFLILHYHATQGHDAPLWQHTRHMTPPPTLVDKMAQYTRAGRLMLSADELFREASWLAVLEGQGVGALGHAPLADTLDAATNRRQLDQIEAVIARAAPTLPLHDAAIAALVAPQVAAR

SEQ ID NO: 89845 - protein, 500 aa, Sphingomonas sp.
  misc_feature (1)..(500): tr|A0A4P7QX94|A0A4P7QX94_9SPHN Tryptophan 7-halogenase OS=Sphingomonas sp. PAMC26645 OX=2565555 GN=E5673_07450 PE=4 SV=1
MGAGMQVVVVGGGTAGWMTAATLAMSFAGRLADVTLIESEEIGTVGVGEATVPHIRFFNQRLGIDEADFIRRTNATFKLGIEFRDWGRVGDSYIHPFGDFGHDVDGLPFHQHWAHATRGGTDGLPALEDCSLPIVAARENRFTPPLEDPRSIGSTYSYAYQFDATLYAAYLRDYAEARGVVRIEGRVDAVEQSAGGIDAVRLADGRRIAGDLFIDCSGFRALLIDGALKIKSEDWSHWLPCDAAWAVPTANAGALTPYTRATAREAGWQWRIPLQHRTGNGHVFSTRFTDPETARAVLMNNLEGEALAEPRMLRFRTGRRDRQWVGNCVAIGLSAGFLEPLESTSIHLIQLAIGKLIELFPSGGVFDPADAAEFNRAMALEYDRVRDFLVLHYCATERDDTPFWRYMRTMTLPSSLTEKIAEFRERGIVASYREGMFLPASWLAVYYGQRIMPDRVNPLIADIPSATSRAHVTRVAAACASAAKTMPLHEDYIARIKAAA

SEQ ID NO: 89846 - protein, 501 aa, Citromicrobium sp.; identical to SEQ ID NO: 87671
  misc_feature (1)..(501): tr|A0A2D8AXU8|A0A2D8AXU8_9SPHN Tryptophan halogenase OS =Citromicrobium sp. OX=2024827 GN=CL805_06465 PE=4 SV=1

SEQ ID NO: 89847 - protein, 513 aa, Citromicrobium sp.; identical to SEQ ID NO: 87676
  misc_feature (1)..(513): tr|A0A2D8AXU6|A0A2D8AXU6_9SPHN Tryptophan halogenase OS =Citromicrobium sp. OX=2024827 GN=CL805_06455 PE=4 SV=1

SEQ ID NO: 89848 - protein, 513 aa, Sphingomonas sp.
  misc_feature (1)..(513): tr|A0A4P7QWK9|A0A4P7QWK9_9SPHN Tryptophan 7-halogenase OS=Sphingomonas sp. PAMC26645 OX=2565555 GN=E5673_05955 PE=4 SV=1
MHEIQNIVIVGGGTAGWLTAGVIAAKHQARRQHGFTVTLVESPNVPTIGVGEGTWPTLRSTLKKMGVSETELFRQCDASFKQGARFNRWTTGAPDDGYYHPLMLPQHFGQLNLAPHWLADEGSATFCDTVTPQGRICDEGLGPKTIATPEYDGHANYAYHLDAGKFSHFLQRHCCDTLGVRHVKADVTEVHLDESGDIASLDTEQGISIAGDLFIDCTGFAALLIGGAMNVPFRSCTDILFCDTALAMQVPYDVPDAPIASHTISTAQSAGWIWDIGLPTRRGVGHVFSSGHISADAAEQELRDYIGPAARDLTARRLAIRAGHREQFWVRNCVAVGLAAGFLEPLEASAIVLIELSAKMIAEQMPACREVMDVVAHRFNDTAHYRWGRIIDFLKLHYALTKRTDTAFWRDNVRPESIPDRLAGLMELWRFQSPWVHDEFDRAEEVFPSASYQYVLYGMGARTAVMPGSIDDDVRLARRARHDNQVQTQRLVSSLPGHRDLIDRIKRHGLQPI

SEQ ID NO: 89849 - protein, 507 aa, Thalassotalea sp.
  misc_feature (1)..(507): tr|A0A1Q6CI28|A0A1Q6CI28_9GAMM Tryptophan halogenase OS =Thalassotalea sp. PP2-459 OX=1742724 GN=BI291_14315 PE =4 SV=1
MKKTENPLNKIVIVGGGTSGWIAAATLAHGFRNANINIELVESEQIGTIGVGEATIPSLMVVLNSLGISLDEFVKETQGSFKLGIQFEDWHSQGENYFHPFGGLGKTIAGFDFFQCWLKCKAEGDLTPLMAHSPEAVLAERDKFFLPFNVQNTPLERAFYALHLDSTLAGKYFRNFAEKLGVKRTEGLIESVTQYQNGNIQSVTLESGNEVKGDFFIDCSGFRGLLIEQTLHSGYEDWSEYLPCNRAVTVQTKNIGSTKPYTVSKARDAGWTWRIPLQHRTGNGYVFCDKYISDDEAIKTLLSAVEGEPLSEPRVIPFTTGIRKKAWQKNCLALGLAQGFIEPLESTAIHLVTRTLAYFIRMFPDTSCQQELQDEFNRRVRVDYEEIRDFLVLHYCTTSREDTEFWRWCKQMPIPESLQQKIDFFKASGGLIPGVESLFQPSSWYAIFNGMKVMPTRYNPALDTLAPEKLKTILAKGANGLIEIAEKQPSHDQFLEQYCQAPLPGNK

SEQ ID NO: 89850 - protein, 532 aa, Chitinophaga skermanii
  misc_feature (1)..(532): tr|A0A327QY37|A0A327QY37_9BACT Tryptophan halogenase OS =Chitinophaga skermanii OX=331697 GN=LX64_00971 PE=4 SV =1
MQNDYLQLVEQFKATKEVLMNPQPYYMDLALPQDDFYNSVCIVGGGLAGYLSAIAFRKFFNIPVTVIEPSHIPPIGVGEATTPLMADYLFGVLELDKQEFFRMVEPTWKLGIKFFWGKPGDYYFNYPFDTKDILSAYLHSGDVNECSLNSLLMRQDASFIARYEEDGTEKYHSLSKNLKYAYHLDNRKFIDYLKFAAARAGVIFLDEEIKDAVLNEEGEVAALINVNGDKFVYDLYVDCSGFKSMLLEKKMNVPYVSFQDSLFNDRAVTGILPNNGHIKCYTTAETMDNGWCWNIPLRHEDHRGYVYSSAHCTEEQAIEEMLRKNPGMSASSIKHVRFRSGRHERFVEGNVVAIGNAYSFVEPLESTGVHMIIDQIILLMNHFVLLKKNPALRNLLNDTMKEHWEYIRWFLSIHFKYNKKFDTPYWKDCRANGNTSGFEKFLSLYKEIGLLSRQDTTTRNMIQPWLKDTIFDVYGIDHILFCQGVLPGNIQQLSPENKADWNAMLHVWKNIAAKTIPLREDLDIMLKHPQLL

SEQ ID NO: 89851 - protein, 479 aa, Sphingomonas sp.
  misc_feature (1)..(479): tr|A0A4P7R4C5|A0A4P7R4C5_9SPHN Tryptophan 7-halogenase OS=Sphingomonas sp. PAMC26645 OX=2565555 GN=E5673_04045 PE=4 SV=1
MTAAALAAVAGRSVAEVHLVESEEIGIVGVGEATLPHIRAFNTRLGIDEAEFMRATGATFKLGIEFCDWARIGDSYIHPFGAFGHDVDGVGFHHYLSRAGQIATLPDYSLPVVAARHAKFAPPLEDPRSLLSTFGYAYQFDATRYAPFLRARAERQGVTRTEGRVVDVERSATGDVVAVVLDDGQRITGDLFIDCSGFRSLLLGQAMGEPFEDWSHWLPCDRAVAVPCADAGTLKPYTTATAMPAGWRWRIPLQHRVGNGYVYSSAHIDDGVAQDALLRSIESTPLADPRMLRFKAGRRARSWVGNVIGVGLAGGFLEPLESTSIYLIQLAITQLLELFPATPISPIDRDAFNRVVDLEYDRIRDFLILHYHATTRDDSPFWDHVRTMDVPDTLAEKMTLFRQRGRVMTYREGVFLEPSWIAVYLGQGVVPKGYDQRADRPSDAALVQALARLRTKTRDAVMTMPDHAAYIAQSGAAAA

SEQ ID NO: 89852 - protein, 664 aa, Thalassotalea sp.
  misc_feature (1)..(664): tr|A0A1Q6CJ43|A0A1Q6CJ43_9GAMM Tryptophan halogenase OS =Thalassotalea sp. PP2-459 OX=1742724 GN=BI291_11500 PE =4 SV=1
MIKSIVVLGGGSAGWLTACLIAAKHVNKNSPFSVTLIESPNIPTIGVGEGTWPTMVNTLQQIGISELTFMQRCDASFKQASKFVNWVNNKQGDEYYHPFTPPQSFDQISLASTWQQQYADKPFAETVCLQTLLCQQKRAPKQLKLGDFKTIENYGYHLNAGKFSQLLTEHGTEKLGVKHILDDVIAVKSKSNGDIASLTTKEHGDINGDLFIDCSGQAAALIGKHFQVPFISKKDVLFIDKAIAVQVPYSCENSPVESATLSTAQTAGWIWDIGLPTRRGVGHVFSTKYTSIETATKQLKSYLGQSVDNIEQLTFRTLDINPGHRETFWHKNCVAVGMSSGFLEPLEASALVMVELAAKTIALQMPASREAMDVIARQYNKNMTFRWQRIIDFLKLHYVLSKRDDSRFWRDNRDPATIPDSLKELLTLWQYQPPENNGFLSPYDLFPAASYQYILYGMGFNTQANCLGNETELTKQSNEAINKVKSRQHKMPSLLPTNREILTEIRQQNREIHIDINQDNRQNNQPWQFLSSDNLSKVSQQYPIFFKKIASGYTPIYLTHLTDQGSIHQTNQHNKKFPYEENSAHTLFPFNDDALLEPVKLDITLNDDTEVKMSGLYVVQQNKWQQIKSSSQYSSTLTKQLDLMMSSLQHVPALIAVENKKRGV

SEQ ID NO: 89853 - protein, 413 aa, Caballeronia choica
  misc_feature (1)..(413): tr|A0A158KBA2|A0A158KBA2_9BURK Tryptophan halogenase OS =Caballeronia choica OX=326476 GN=AWB68_05406 PE=4 SV=1
MSDHRAVDVDVAIIGAGPSGAVAAALLRKAGHSVRVLERQQFPRFSIGESLLPQSMAYLDEAGMLQAVVEAGFQYKNGARFVRRGESSSYDFRDKHTPGWGTTYQVERATFDDLLIRCAAEQGADVRFGHTVNAIETGERPALDVTDEAGTQYRVQARFVLDASGFGRVLPRLLQLETPTRMPTRAALFTHVRDDMPLRAIDREKICVAVHPEHGNVWYWMIPLAGGRASVGCVAESDFLQCTESERESRLRSLIRQEPTLGAWFGDAPFLMPVRTIGGYAANVARLHGPGFALLGNAGEFLDPVFSSGVTIALRSAHLAACVLVRQLSGAAVDWQIEYDDELRRGIDVFRAFVERWYSGELQDILFHAEQAPQIRRMISAVLAGYAWDETNPFVKDAGRRLDTLHEICKATR

SEQ ID NO: 89854 - protein, 511 aa, Citromicrobium sp.
  misc_feature (1)..(511): tr|A0A2D9IBB3|A0A2D9IBB3_9SPHN Tryptophan halogenase OS =Citromicrobium sp. OX=2024827 GN=CL805_07460 PE=4 SV=1
MTAKPISKIVIVGGGTAGWMAAAALSRVLAGPRGPSITLVESEAIGTVGVGEATIPQIIGFNKLLGLDENEFVRETHAAYKLGIEFVDWLRPGHSYIHPFGTYGLDMLGIEFHHFWLRGRELGDPTQLDAYSTAAAAGAAGKFFWPQSGNPKSPLSKLAYAFQFDASRYARFLRKRAEQQGVVRQEGKVIEVVQDADSGFVTGVRLEDKRVIEGELFLDCSGFRSLLLGQALEVPFEDWSKWLPCDRAVAVPCTLAGEHQPLTRSTARPAGWQWRIPLQHRIGNGHVFSSAHMDQDAATDLLLANLDGDPLAEPNHLRFTAGHRERFWDKNVIGIGLAGGFLEPLESTAIHLVQSSVARLLAYFPTAAFGGAEIDRFNSETAREYRDIRDFLVLHYKATERDDSEFWRYCRDLEPPEGLAEKIELFRSSGRVIREHEELFTEASWLAVMAGQGIEPQSYHPVAALLDDAETLQRLEHIRQVVAHAVSKMPTQDQFLAQQGSAIDASERLTR

SEQ ID NO: 89855 - protein, 499 aa, Sphingomonas sp.
  misc_feature (1)..(499): tr|A0A4Q7SHB6|A0A4Q7SHB6_9SPHN Tryptophan halogenase OS =Sphingomonas sp. BK036 OX=2512122 GN=EV283_3239 PE=4 S V=1
MNDTSEPPRTRVVVAGGGTAGWIAAAAIVRQLGSLVDVTLVESDEIGTVGVGESTIPTARGFHAFLGIDEAAFMRATQATFKLGIAFENWRQVGDRYFHPFGSVGRSVAIADFQHFWLEARARGFGGAYGDYSLEQQAAGADLFGHDEQHSLAYAYHLDATAYARFLRTLAEPWGVRRVEGCIERVERDGEGGDIAALVLASGERIAGDLFVDCTGFRALLTEGTLDTGFEDWSEWLATDRALAVQTETVGPPVPYTRAIAHGAGWRWQIPLQTRTGNGLVYSSAHMSDDQAHETLISALDGRPLFEPRPLRFRSGMRRQAWNRNCIALGLAAGFIEPLESTSIHLNMNAVIRLIQLFPFRGDDHGALASRFNAQSRHEWEHVRDFIILHYHVTQRDDSAFWRDCARMTIPDSLAERIALFAKTAGAWQGQDDLFRIDSWVSVMLGQGVVPRAHHRIASIIKGQELRTSFEDLSRGIASTVRLLPRHCDFLARYCPADG

SEQ ID NO: 89856 - protein, 500 aa, Duganella phyllosphaerae
  misc_feature (1)..(500): tr|A0A1E7X035|A0A1E7X035_9BURK Flavin-dependent tryptop han halogenase RebH OS=Duganella phyllosphaerae OX=7628 36 GN=rebH PE=4 SV=1
MPHQQQSRPVRRLIIAGGGTAGWMAAAALSRTLGKVLDIKLVESDDIGTVGVGEATIPSLAQFHRLIDIDERDFMAATQATFKLGISFENWRARGHDYIHAFGSTGTDHWTAGFHHFWQKGREAGIAADYGDYCLEHKAARALRFGHLPDDGLVYAYHLDASRYARYLRRYAEHFGIERIEGKIADVQRDPANGNVAALVLDSGRRLEGDLFLDCTGFRSLLLGQTMGVPYDDWSQWLFNDSAIAVQTESVGPAVPYTRAIAHDWGWQWRIPLQHRTGNGMVFSSRFVDDDTARAALLANLEGKPLTEPRVIRFTPGQRQQVWAGNVIGLGLASGFLEPIESTSIHLIQRSIVRLLQLFPTEGIEPADVAEFNTQAADDIRTIRDFIILHYKVTERDDTPYWRAARDMAVPPSLQHRLDLFGGSGRVFRSQNELFSENSWVQVMLGQGLIPRTQHHTAHVMPERELAAFLDGIRTGIDRTVAQMPGHQAYVERYCPGGKP

SEQ ID NO: 89857 - protein, 490 aa, Citromicrobium sp.
  misc_feature (1)..(490): tr|A0A2D8AYR3|A0A2D8AYR3_9SPHN Tryptophan halogenase OS =Citromicrobium sp. OX=2024827 GN=CL805_08100 PE=4 SV=1
MAAAALARLTSARVTLVESDAIGTVGVGEATIPQIRLFNRGLGIDEAEFLRETKATFKLGIEFDGWLREGEAYMHAFGTIGHGAGLLPFHQYWLRARAEGKAAPLGRYSLNERAARALKMQMWPAKPGQPVPDMPWAYHFDASLYAAYLRRHAEHHGATRIEGKVGAVERDNQTGDIASITLESGETIAGDFFIDCTGFRALLIEQELGAGFEDWSQWLPCNRAVAVPCATKGDFTPYTRATARRAGWQWRIPLQHRIGNGLVYCSDYLSDEDAEAMLLANLDGDPLAEPNRVRFTTGMRQRQWVGNCLALGLAAGFMEPLESTSIHLIQSSIARFLQMLPSGRPAPALVDEFNRQAQFEWRSIRDFLILHYRANGREGEPFWDRCREMALPDTLAAKIEQFRASAYMHREREELFTEPGWLQVFVGQGVLPEGHHPLADAMPDVDLERMLGDIEGGIGGIVDSMPGHAQFLRAYCMPRSEPAAEMRKTA

SEQ ID NO: 89858 - protein, 500 aa, Xanthomonas gardneri; identical to SEQ ID NO: 85589
  misc_feature (1)..(500): tr|A0A1L5Y280|A0A1L5Y280_9XANT Tryptophan halogenase OS =Xanthomonas gardneri OX=90270 GN=BI317_11020 PE=4 SV=1

SEQ ID NO: 89859 - protein, 378 aa, Corallococcus sp.
  misc_feature (1)..(378): tr|A0A3A8TKD3|A0A3A8TKD3_9DELT Tryptophan halogenase OS =Corallococcus sp. AB038B OX=2316718 GN=D7Y04_08020 PE= 4 SV=1
MDTIRYDVAVLGGGPAGAALALALCRHSGLRVVLFERSTYAQPHLGETLPPDSRRLLARLGVWEAFARQGHLRSMGSCSRWGDSALGDNDHLRSPWGTGWHLDRSRFDRMLADEALRFGVDVRIGSAVTDWTPLETGGHRLFVPTEGDAPRDFVDARFVVDATGRSAVFATSQGARRHTVDRAFGLCGTFALQPGRTVDALTLVESCEDGWWYSARMPGDQVVFGLMGDKDSLQGLMPEDAEAWRARMERAPETRRRLEACVFTGEPLRVVSANVACLDRLHGEDWLAVGDAACMLDPLSSQGTSQALRTANQAADVVSRYLRGDSAALRLHEVRTRHEFQEHLRIREGYYRLERRWPGAPYWRNRQQSCAPVLSSLP

SEQ ID NO: 89860 - protein, 504 aa, Caulobacter sp.
  misc_feature (1)..(504): tr|A0A0Q7T9X7|A0A0Q7T9X7_9CAUL Tryptophan halogenase OS =Caulobacter sp. Root1455 OX=1736465 GN=ASD21_16165 PE= 4 SV=1
MAHLNKIVIVGGGSAGWICAAMLSHYFQNGPTQVELVESEEIGTIGVGESTIPPFLQLIRTLGINEQEFIQETQAAFKLGIRFEDWLEKGDVYYHPFGQIGGPLEVNEFYQCWLRAKQNGHPSDLQDFAPATVMAKAGKFMLPAKAQRTMIANANYALHVDAKLVALYLRKFAEARGVKRTEGIVTDVATRPDGGVAKVIMKDGREVAGDFFIDCSGFRALLIGKTLGEPFRDWGDVLLCDRAIAAQTENVGAPHPYTLVQAQDFGWRWRIPLQHRSGNGYVYASKYLSDDEATATLLGQIKGEVVLGPTVIPFKTGVRERPWVKNVVSIGLSCGFIEPLESTALHLIYKGMDYLLRFMPDMDADQTLAAEYNRRMVADYEEIRDFIVLHYVTTRRDDTPFWRDYQKVDPPESLRERIALFKAAGVLRDGVDDMFRAPSWQSVMEGMGVRPDRYQQLVDRIPLSVIMNLMDKSAPMLADFVATLPSHEEFLRTHCPATPFKRSA

SEQ ID NO: 89861 - protein, 505 aa, Xanthomonas translucens
  misc_feature (1)..(505): tr|A0A2S0NW10|A0A2S0NW10_XANCT Tryptophan halogenase OS =Xanthomonas translucens pv. undulosa OX=487909 GN=NZ30 _00425 PE=4 SV=1
MAQIRKVVIAGGGTAGWIAACALAHQFRDLLDITLIESEQIGTVGVGESTVPPIRSFHRFLQIDEQEFLRAVAGTFKLSISFENWRRPGERYIHPFGLTGQSTLVCAFHHFWLEAQRRGMLSELGDYCLETVASRLDRFALQQSPPVNYAYHLDAGLYARLLRRHAERYGLKRVEGRIQQVRQHAESGCVEALLLENGTLVEGDLFIDCTGFRGLLIEQTLHTGYEDWKQWLPCDRAVAVQTEAVAAPVPYTRAIAHAAGWRWHIPLQHRVGCGLVFSSAHLSDDEARAKLLHDAAAPPIKEPWLVPFRTGRRRKAWNKNVVALGLASGFIEPLESTSIHLTIAAVMRLLTLFPSEGIAPAMVDLYNAVSRAEMEHVRDFIILHYHANQRDEPMWQACREMALPDSLQQRLRAWHERAHAWQGADELFRVDSWIHVLLGQGIVPAQHHTLARALPDQQLQQFLDAIRQPIDRAVAQMPSQQDFIARYCKAGPEVWAGRAPVAAPA

SEQ ID NO: 89862 - protein, 534 aa, Sphingomonas sp.
  misc_feature (1)..(534): tr|A0A4Q7SJM9|A0A4Q7SJM9_9SPHN Glycine/D-amino acid oxi dase-like deaminating enzyme OS=Sphingomonas sp. BK036 OX=2512122 GN=EV283_3464 PE=4 SV=1
MSHADVNEEAIRTVIVVGGGSAGWLTACRLAARSVSSGSKVKVLLVESATVPSVGVGEGTWPTMRNTLRKIGIDETDFIRSCDAALKQGAQFVGWTDGSAGDAYYHPLNPPAGAGDIDLSPYWLHASATETGMGTDAPAQVGASRASFADWVDYQSALCDAGLAPKTITAPEYGGQANYAYHLDAGKFATLLCNHATTSLGVEHVVGDVVRANLKGNGDIRNVELADGRILAGDLFVDCSGFAALLIGGVYDVPFRSCRDILFADRALAMQVPYQGEDDPIACHTISTAQDAGWIWNIGLWTRRGVGHVYSSAHTSDDEAEAALRRYVGPASDALPVRRISFEAGHRERFWQNNCVAIGLSAGFLEPLEASALMLIETSLDSLVDRLPQTRSTMDAIARQFNATFSHHWQRIIEFLKLHYAITHRRDTAFWRDNAAPTSMPEGLRERLALWKHHAPAAQDFAHAREVFSWPSYQYVLHGMRFASSYRGEPATADGKLVDSLVARNARVRAELVRKMPRHRDLLRAVREHGLQRV

SEQ ID NO: 89863 - protein, 506 aa, Pseudoalteromonas denitrificans
  misc_feature (1)..(506): tr|A0A1I1KVT2|A0A1I1KVT2_9GAMM Tryptophan halogenase OS =Pseudoalteromonas denitrificans DSM 6059 OX=1123010 GN =SAMN02745724_02186 PE=4 SV=1
MKIKRIAIIGGGTAGWLAANHLGVELNADPEIEITVLESKDVPSIGVGEGTVPYLMKGLKRFGISEAQLLLSCDATFKQGIKFVNWLDPESHGENYYYHPFDTPYPGGFDISPFWVSQGEGRPFDDVGIQARICELGLSPKRKNSGEYLGDLAYAYHFNATKFATLLAENAQKRFNVVHEFATIVGVKKDDKANISHLLTDTGSELPFDFYVDCSGFSSILIDKELKVPFVSKAKELLTDTVLVQQMPLVDDENINPYTTATAHKAGWIWDIPLINRRGTGFVYSSQHMSDTEALSLYAEYLNVPKDSISPRKISMDIGYRKEFWSKNCVALGLAQGFLEPLEATSILISDFSAELLARNFPRYASDIDISIPYYNKVVTYVWEKVVDFIKLHYCISDRRDSQFWLDNQKPDTISEELKARLQKFKLQPPQQSDFFSRFDLFDDKNFLYVLYGMKFDTKSTKLTQMEIEQSYSLIKSNDVLVNKADKYLMPHKDWLMGLKAAVAKN

SEQ ID NO: 89864 - protein, 537 aa, Burkholderia sp.; identical to SEQ ID NO: 89671
  misc_feature (1)..(537): tr|A0A4R4C5I0|A0A4R4C5I0_9BURK Tryptophan 7-halogenase OS=Burkholderia sp. SRS-25 OX=2094190 GN=C5O79_14150 PE =4 SV=1

SEQ ID NO: 89865 - protein, 506 aa, Xanthomonas nasturtii
  misc_feature (1)..(506): tr|A0A3E1KFS2|A0A3E1KFS2_9XANT Tryptophan 7-halogenase OS=Xanthomonas nasturtii OX=1843581 GN=DZD52_16910 PE=4 SV=1
MSPAPLRNIVIVGGGTAGWMAAAAFARVLGPSFNVHLIESEQLGTVGVGEATVPHIKAFNNLLGIDEAEFVRQTQGSFKLGIAFVDWQRPGTSYIHGFGTQIGHPLGLLPFHQYWIKQHARGKAQPLGAYTLNTVAAARGKFMTSAGDVPATSPLANIAYAYHFDATQYARFLRKYSEQRGVTRIEGLVEQVQLHPETGHVQSLQLASGQLVHGDLFIDCSGFRGLLIEAALHTGYHDFTHWLPCDRAFAVPCENVGPPTPYTRSTARAAGWQWRIPLQHRTGNGYVYCSAHISDDEAAATLLANLDGKPLADPRPLRFTTGRRKQVWNRNVVALGLASGFLEPLESTSIHLIQSGISKLLELFPREGISPVLVQRYNDRLAFEFDRIRDFLLLHYHATERDDSAFWRHCRSMPITPELQTALDLFRDSGRFYRNAEEMFAEISWVQVLVGQGILPQGYHPLVDQVPDRDAEGFLASVAQTISHCVDVMPTHQQFIDRYCKAPAVP

SEQ ID NO: 89866 - protein, 501 aa, Caulobacter sp.
  misc_feature (1)..(501): tr|A0A0Q7T878|A0A0Q7T878_9CAUL Tryptophan halogenase OS =Caulobacter sp. Root1455 OX=1736465 GN=ASD21_17385 PE= 4 SV=1
MTDQRLRKIVIVGGGTAGWMTAAALGRFLKDGHTQVTLVESEEIGTIGVGESTIPQINIFNRMLGLDENEFVRRTKATFKLAIDFVDWKQIGHRYYHPFGPYGVDMEGVSFHAYWLRLKAMGEAADLTDYSLQALAADQGKFMRANGQTNSPLGTIAHAYHIDAGLYAQYLRGYAEDRGVRRQEGKIVQVHQRAEDGFVEAVTLEGGQRVEGDLFIDCSGFRGLLIEQTLKTGFEDWSHWLLNDRAVAVPCELAGSRQPVTRATARPAGWQWRIPLQHRLGNGYAYSSEHIGEDEATTYLLANLDGAPLRDPFTLRFKAGRRLKSWNKNVVAIGLSAGFMEPLESQSIHLIQVGISRLLAMFPDKRFETPDIDRYNRVMRFEYEKIRDFIILHFHATQRSDTPYWDYLREMPIPDYLADKMAVFKSYGRVFRENEELFNDTSWFAVMIGQGIEPRGHDPMADVMSEEDLRAKMGNIRAVIAKSAEVMPDHLKFIADNCAAI

SEQ ID NO: 89867 - protein, 504 aa, Sphingomonas sp.
  misc_feature (1)..(504): tr|A0A4P7R4Q3|A0A4P7R4Q3_9SPHN Tryptophan 7-halogenase OS=Sphingomonas sp. PAMC26645 OX=2565555 GN=E5673_11150 PE=4 SV=1
MANHPLRIVIAGGGTAGWMAAATFARFLETGYEIDLIESDEIGTVGVGEATIPQIHLFNDALGLDEDAFLRATGGTFKLGIEFVDWFKPGHRYMHAFGDVGRDVGLLPFHQYWLRARSLGLAGELGAYSLNTHAALAERMQRGPARTARTLPSMPYAYHFDAGLYARYLRRYSETRGVNRIEGKIVRVTRDGESGDVSGLVLENGTTVDADLYIDCTGFRGLLIEEALGTGYEDWTRWLPCDRAIAVPSARSNKFTPYTRSTAHPAGWQWRIPLQHRTGNGVVFSSAHMSEDEATATLLAGLDTPAMADPRTIAFRTGRRKRMWNRNVVGLGLAAGFMEPLESTSIHLIQSAISRLLKLLPGRVIADADRTEFNRQSDFEYERIRDFIILHYKATARDDTPFWRECRDMAVPDTLAAKIDLWRGNGHIVREHEELFTEVGWLQVLAGQGIMPAGHHPLADAISTSDLGEFMDTIDKLNAREAGQMQDHAAFVAQHCASPAGLGA

SEQ ID NO: 89868 - protein, 501 aa, Thalassotalea sp.
  misc_feature (1)..(501): tr|A0A1Q6CII5|A0A1Q6CII5_9GAMM Tryptophan halogenase OS =Thalassotalea sp. PP2-459 OX=1742724 GN=BI291_12965 PE =4 SV=1
MQKGINSICIVGGGTAGWMAASLLSNLLKGCQIKTTVVESPDISTIGVGESTVPSIIDFLNASQIDLKEFIKATSATFKLGIRFDDWYAVNEHYFHPFGHIGRSLNGFDFYQVWLKSLSEGNKASLMDYSVNAEMAKHNRFVLKPKQTKDWVIANSSSALHLDASQVTRFLRELCLQRGVERIEATVSDVVLNEQGFIDQLHTDCKKQITSDFFIDCTGFKALLIEKALGIPVEEWSKYLPCDRAVTIQTQTDQPPVPYTIAKAQAAGWSWTIPLQHRTGNGYVFSSKYCTDEQAIKTLTNNVQGKILTEPNVIPFTTGKREKVWHKNCLALGLAGGFLEPLESTAIHLVYKTLVNFSQHFPDTDFDEQNEQMFNQKMDLDYLEIRDFIILHYATAQRADTDFWQMCQQMPIPESLNETLSIFKKRGELKSVYGDFFTKNSWCAVLEGMHIRPNKYYPLIDGFDPQKLANMLMKNAQLIKDTVSTMPLHSDFIHQHCRANK

SEQ ID NO: 89869 - protein, 484 aa, Streptomyces scabiei
  misc_feature (1)..(484): tr|A0A086GI43|A0A086GI43_STRSC Tryptophan halogenase OS =Streptomyces scabiei OX=1930 GN=IQ62_44000 PE=4 SV=1
MIVVGGGPAGSTAATAVALRGHRVLLLEQQTFPRYQIGESLLPSTVHGVCRILGVEEEVARAGFKTKRGGTFRWGRNPDPWQFSFALSPRLADPTSFAYQVERSRFDAILLDNARRVGVDVREGCRVKGVLGDEERVRGVGWTGPAGETREARARYVVDASGNGSKIHGEVGGRRTYSDFFRNLAVFGYFAGGKRLPKPNDGNIFCAAFDEGWLWYIPLRDDLTSVGAVVGRGNAAAIQRDPVTAWRGLIDSCPEVRGLLGGVAQATEAPYDQVRVRKDWSYWKSQLWRPGMVLVGDAACFVDPVLSSGVHLATYGALLAARSINSGLAGTLDEDRLFDEFEARYRHEYGLFHEFLVSFYDMHQDERSYFWKARKVTHVDATEMEAFVELVGGLASGDTSLAGPGQAGTRLTATASELDHAVGRLPDSDGLRNPLFESASIRQVFQEGTILQERGVFGGPLEKETPLHPGGLMASEDGLTWVTE

SEQ ID NO: 89870 - protein, 500 aa, Marisediminitalea aggregata
  misc_feature (1)..(500): tr|A0A1M5E756|A0A1M5E756_9ALTE Glycine/D-amino acid oxi dase OS=Marisediminitalea aggregata OX=634436 GN=SAMN05 216361_0280 PE=4 SV=1
MKQTHPASVIIVGGGTAGWMCAAYLAKQWGAKSHITLIESSQIGTVGVGEGSTPFLKQFFTDLGWQEQDWMPHCDATYKTGIEFANWTNSQRFSQYFHPFFTPLDQQTGELFFDSCQTLRSSRGNADVKPEHYFCAAEMVRKRVTPQSTKLPGDIDYAYHFDASKLALSLKSFSTQLGVQHKEGKVAEVYTEEGNIRGLRMEQGETLSADLYVDCSGFVGLLMKKALNAPFRSYRETLFNDAAVALPTQHNSNEPIAPQTRSVGMDNGWMWQIPLTSRIGNGYVYSSDFCSADEAEGALRKALNVDDLVPARHLKMQVGRLDEHWQGNCVAIGLAQGFIEPLEATALMLVQYALYQLVDGVDSAKPLASAQQAYNREMNRMFDGIRDYIAAHYYLNTRTDSAYWQACRHEMCVPENLQYLLDKWDSGACFETALDHLDSELVYLRPSWYCILAGMGRFNSPEAHQKAPVHQASLAHLAKLTAHYFSQQQRPRSGELTCGM

SEQ ID NO: 89871 - protein, 477 aa, Sphingomonas sp.
  misc_feature (1)..(477): tr|A0A4P7QXN5|A0A4P7QXN5_9SPHN Tryptophan 7-halogenase OS=Sphingomonas sp. PAMC26645 OX=2565555 GN=E5673_04050 PE=4 SV=1
MSDTRIRTIAVVGDGVAGWSAAAALKARVPGISVALIPVAELRPGFVDLFGGASPSIGEFHTDIGLDERDVLTRTGASIRLGTRFVRWSGADYTHAYGPAGMPVDGVPFATLWEGLGGTEPFDSFAPAAALAAAGRFVPPRAGLLGGYANGLQLDPPVYRRFIEAYARHLGVVVTASGLRQAETDGDRVTALHLDDGGRLEADLYIDATNADAHLITQFGDDWQDWSPWLPGDSFVQRRGTSDAEPGDRFLSPLEQVEAIDGGWRLTSCLPGRTDTAIVYASGVRAEPGDVRRFRSGRRSRAWIGNVVAIGEADCVVEPLEAAPLHVLHTQIDRLVASLPDRDFDEVELAYYNRETGQEADRLRDFLILHYATSDRPEPFWQAARDATLPPELAETLTLFRERGRLPIRDGESFDRDSWHAVLLGQGILPRRGDVLAAAIDPKRARAAMADFRTRLSKAVAAAPTHRAYLASLRTNA

SEQ ID NO: 89872 - protein, 532 aa, Caulobacter sp.
  misc_feature (1)..(532): tr|A0A0Q7TLJ1|A0A0Q7TLJ1_9CAUL Tryptophan halogenase OS =Caulobacter sp. Root1455 OX=1736465 GN=ASD21_05230 PE= 4 SV=1
MSDAPSIDHILIVGGGTAGWMTAAYLARRLGAMRPDGVRITLIESSEIGIIGVGEGTFPTIQNTMRTIGVDEARFMREAGAAFKQGIKFVDWKTAPQDGVHSHYYHPFAQPRLLNGGLDLAPYWLMGEAGNIPFSDAVTLQDKVCDAMRGPKRLDDPQYGGPMTYAYHFDAGKLAGLLRDVGKATGVKHVLGNVLSVNKTDDGSIASVTTREHGDLVADLYIDCTGFAGALIGEAMGSAWIDKGDTLFVDRALALQVPYDRPDAPVAATTISTAHEAGWTWDIGLPERRGTGYVYSSRHTTDDRAEQILRGYVGKAGEGLNPRLLKLKVGHRDRHWIKNCVAVGLSGGFLEPLESTGIVLIEAAAYMLARNLPRRGGMEAAARQFNTAMTDRYLRAIDFIKLHYCLSQRTDNGFWTDNADPASIPESLQDHLAMWKHRPPNVFDFPNLHESFKYFNYQYILYGMGFETTVDPAAHVHGDLARADFGRVREAGLRAAASLPDHRALLTDVYTKGFSTKAPDLAAAEAGEAPRR

SEQ ID NO: 89873 - protein, 497 aa, Marisediminitalea aggregata
  misc_feature (1)..(497): tr|A0A1M5Q7R3|A0A1M5Q7R3_9ALTE Tryptophan halogenase OS =Marisediminitalea aggregata OX=634436 GN=SAMN05216361_ 3766 PE=4 SV=1
MTQNKTRVVIAGGGTAGWLSAFSLVTRLGALLDITLVESDQIGTVGVGEATIPTMCNFHRLMGLDEREFMAATQATFKLGIQFDNWGNQGDSYVHSFGEIGQRSWMAEFHEFWMEAVANGQQDTLEDYCLELKAAKQNKFALKVGNRPLNFAYHLDATAYAAYLRNKAEQAGVTRIEGKITTVNKHPDSGNLRELVLDNDARIEGDVFIDCTGFRALLIGEALGVGYDDWSHLLAADRAIAVQTTAVEPPRPYTIATAHNAGWQWRIPLQSRVGNGIVYSSRFSDDETALATLMSNVTGEAVTEPRYLKFKTGMRQQAWAKNCVAIGLSSGFLEPLESTSIHLVTTALIRLMKLFPFEGECGLLAERYNRETQKEMETIRDFIVLHYHLTQRDDSAFWDFYRNMEIPESLQHRMAMFAEHGYVWPDDVALFRVDSWVQVMMGQGLMPKRHHGASRMLPTASLTQQLTAFKQSVNNALAQLPEHDAFIKQYCPADKSA

SEQ ID NO: 89874 - protein, 503 aa, Massilia sp.
  misc_feature (1)..(503): tr|A0A0Q6SHN6|A0A0Q6SHN6_9BURK Tryptophan halogenase OS =Massilia sp. Root335 OX=1736517 GN=ASC93_19425 PE=4 SV =1
MDNNNQQGRGRPIRRVVIAGGGTAGWMAAAALSRTLGKVIDIKLVESDEIGTVGVGEATIPSLVHFHRLLDIGEQEFMAATQATFKLGISFEGWRARGEDYIHSFGMTGTDHWTAGFQHFWLKGRERGLAGDYGDYCLELVAAQEKRFGHLPNQGINYAYHLDATRYARYLRRFSEHFGAERIEAKITGVDTDPATGHITALVLDSGTRVEGDLFIDCTGFRALLLGQTMGEAYEDWSQWLFNDSAIAVQTESTGPAVPLTRSMAHDWGWQWRIPLQHRTGNGIVFSSRYIDEDTARATLLGNIEGKALTEPRVIRFKPGQRKRVWIGNCIGLGLAAGFLEPIESTSIHLIQRGIVRLLQTFPSHGIQQSDIDEFNAQSEDDIRTIRDFIILHYKVTNRHDSPYWHDAATMAVPDSLQHRIDLFRDGGRVFRYANELFAENSWVQVMLGQGLSPQRWHPSADLMGDDELRGFLDGIRSNVRRTASQLPPHQHYVERYCPAGKP

SEQ ID NO: 89875 - protein, 520 aa, Streptomyces rimosus; identical to SEQ ID NO: 83908
  misc_feature (1)..(520): tr|L8ERE6|L8ERE6_STRR1 Tryptophan halogenase PrnA OS=St reptomyces rimosus subsp. rimosus (strain ATCC 10970 / DSM 40260 / JCM 4667 / NRRL 2234) OX=1265868 GN=SRIM_24 346 PE=4 SV=1

SEQ ID NO: 89876 - protein, 500 aa, Massilia sp.
  misc_feature (1)..(500): tr|A0A0Q6S2A0|A0A0Q6S2A0_9BURK Tryptophan halogenase OS =Massilia sp. Root335 OX=1736517 GN=ASC93_23205 PE=4 SV =1
MQQHPIRKVVIVGGGTAGWMTAAPLAQRLGKRCEIVLVESPDIGTIGVGEATLPTIRFYNAALQLDHADFIKKTQATFKLGIEFKDWGHVGNRFFHGFGDFGPPLNGVAPHHHWLRLARTFDHMPAMENWSMASVMARENKFAMPADTQPGVTDAFSFGFQFDASLYANYLRDYATARGATRVEGTITGVDQHPETGFVTAVRLADGRAIDGDLFIDCSGFRGLLIEGTLKAGYEDWSEHLPCNSALAVPCARVEPLTPYTRSTAKGAGWIWRIPLQHRTGNGHVYSNAFTTDEKARQDLLDGLDGAALDEPRQLRFTTGKRKKSWVKNVVAIGLSAGFVEPLESTSISLIETAVGTLIELWPDRDFRPELAAEFNRLIGSRYESIRDFIIMHYKLTRRDDTEFWRYCANMTIPDSLAHQIELFRETGRVTILDRDSFGAPSFVSMLMGLGVVPARYDPFVDDVDMRQLHGHFAGMRDLIAQTVAKMPGHGAYLEKNAKA

SEQ ID NO: 89877 - protein, 498 aa, Marisediminitalea aggregata
  misc_feature (1)..(498): tr|A0A1M5FKN4|A0A1M5FKN4_9ALTE Tryptophan halogenase OS =Marisediminitalea aggregata OX=634436 GN=SAMN05216361_ 0886 PE=4 SV=1
MNKPGNSSNNVNNVIIAGGGTAGWMAAAALSRLIGKSVNVTLVESKDIGIVGVGEATIPPIRTFHKLLGIDEKAFMRATNATFKLGIEFANWREPDYAYIHSFGVTGRECWAGEFHHFWMRAQQEGLGSAFGDYCFELKAAQQYKFGMSERMPINFAYHFDAVAYGKFLRQFAEKLGVTHVEGDIDKVNVNVTSGDIESLTLKDGRNLAGDLFIDCTGFKGLLIEQALHTGYENWSHWLPCDRAVAMQTESVEAPAPFTRSVAHEAGWRWQIPLQNRVGNGLVYCSRYMSDEQAKQTLMDQVTGNPINDPRVIQFTPGKRRLGWNKNCVALGLASGFIEPLESTSIHLIMTGIIRLLRLFPFDGVTQSAIDEYNNKYNSEMAAILDFIVMHYKVTNRDDSLFWQHCQRMAIPDSLTHKINLFKETGRVFLDDGDIFRVDSWTQVMLGQGLMPEQYHRVADEMSIEELTRFINGLHQHVSQQVQALPAHGDFLKQYLGM

SEQ ID NO: 89878 - protein, 525 aa, Marisediminitalea aggregata
  misc_feature (1)..(525): tr|A0A1M5FKH6|A0A1M5FKH6_9ALTE Tryptophan halogenase OS =Marisediminitalea aggregata OX=634436 GN=SAMN05216361_ 0887 PE=4 SV=1
MNAPIQQVVIVGGGTAGWLCAGMLAAKLGKQGERHRGVEITLIESPDVSTIGVGEGSWPSLRDTLREIGLSESAFITHCQASFKQGSTFVGWRDGSEHDRYHHPFTNPAGYTEIDVHACWQALHSNKPYDRAFSVQPELCEQHKAPKQLATPDYAYVLNYGYHFDATRLAEMVSDHCVNQLGVRHVQAHIDQVVSHHNGDIKALTTQCGQILEGDLFIDCSGQSALLAGKHYNVPWHSVKDILLNDSAMAVQVPYHEQDNTIASTTLATAHPQGWSWDIGLQHRRGVGMVYSSDFASAEDIEQSLKQYLTKRLPHDVVEQATCRQLKFSPGYRSEFWTHNCLSLGMASGFIEPLEASAVAMVELGVRMLCEQFPQNRDHMRILAARYNERFAYRWARVIDFVKLHYAINQRTNDAYWNAHRDPATWPDSLKSLLSLWQYQPPSRYDVVQNEEIFPSASYQFVLYGMGFKTESPALADSSDMLKRAGAISQKLQATLMQFGQGLPDNRALLNAIRERHKHSSGATL

SEQ ID NO: 89879 - protein, 505 aa, Sphingomonas sp.
  misc_feature (1)..(505): tr|A0A4P7QYY9|A0A4P7QYY9_9SPHN Tryptophan 7-halogenase OS=Sphingomonas sp. PAMC26645 OX=2565555 GN=E5673_07440 PE=4 SV=1
MTLGSPVRRIVIVGGGTAGWMAAAALARLIPTGASVTLIESDTIGTVGVGEATIPPIRAFNAMLGIDEAAFLAATAGSFKLGIEFVDWGAIGERYLHPFGGFGFDIEGVRFHQHWRRRRAAGVVEDIDAYSLCAVAARAGRFAPPSPDPASILSQMAHAYHFDAGLYARFLRGRAERDGVTRIGGEIGDVALDGDTGHVRYVTLAGDRRIEGDLFLDCSGFRGLLIEQALGAGYEDWTRWLPCDRAVAMPTANIGTAIAPYTRSTAQASGWQWRIPLQHRTGNGYVYSSAHCSDDEAAATLLDGVDGPPLADPRVLRFTAGRRRKQWIGNVVALGLASGFTEPLESTSIHMVQTGISKLLALFPDQGFSPVEIDTYNRLAETQFDQVRDFLVLHYHATRRTDSPFWREAGARAIPDSIAEKIALWRRRGRLFRWEDDLFAEASWVAVLLGQGIVPEGWDRLADAVDARDVDARFDRLRAMFADAAARMPRHEDYLARTSPTRVRA

SEQ ID NO: 89880 - protein, 537 aa, Burkholderia contaminans
  misc_feature (1)..(537): tr|A0A2S9P776|A0A2S9P776_9BURK Tryptophan halogenase OS =Burkholderia contaminans OX=488447 GN=C6Q17_05530 PE=4 SV=1
MSHPIKNIVIVGGGTAGWMSASYLVRALQQQANITLIESEAIPRIGVGEATIPNLQKVFFDFLGIPEREWMPQVNGAFKSAIKFVNWRKSPDRSRDDHFYHLFGSVPNCDGVPLTHYWLRKREQGFQQPMEYACYAQPEALDARLAPCLLDGTRQMPHAWHFDAHLVADFLKRWAVARGVTRVVDEVVEVHLNERGDIASLSTKEGRTLEADLFIDCSGMRGLLINQALKEPFIDMSDYLLCDSAVASAVPNDDARVGIEPYTSAIAMNAGWTWKIPMLGRFGSGYVFSSKFTSRDQATADFLNLWGLSDKQPLNQIKFRVGRNGRAWVNNCVAIGLSSCFLEPLESTGIYFIYAALYQLVKHFPDTGFDPRLRDAFNAEIVYMFDDCRDFVQAHYFTASRDDTPFWRANRHDLRLSDAIKDKVERYKAGLPLTTTSFDDATYYETFDYEFKNFWLNGNYYCIFAGLGLLPDRSLPLLQHRPASVDKAEAMFARIRREAERLRASLPTNYDYLRSLRDGEAGRARSQPGPVAAPETL

SEQ ID NO: 89881 - protein, 505 aa, Poribacteria bacterium
  misc_feature (1)..(505): tr|A0A3D2S321|A0A3D2S321_9BACT Tryptophan halogenase (F ragment) OS=Candidatus Poribacteria bacterium OX=202678 1 GN=DHW51_20575 PE=4 SV=1
MNDKVIKDIVIIGGGSAGWLAAGIIAAEHNNPKHDVHFINVTLIESPNISSIGVGEGTWPSMRTTLKKIGISETAFIKDCDVSLKQGTLFAGWKNESDVYTHPFTVPHGYAEHNLVNEWQKSSSHIPFAEAVCSQNTLMLRNQAPKNITTPEYSFNLNYGYHLDAGKFAEKLNTHCTEILGVIHKRAEVININAHENGDLKSLQLDSGEIIQGDLFIDCSGSRSLLLGKHFGIPFSSKQKYLFNDSAIASQVPYSSDDDPIASSTLSTAQSSGWIWDIGLPSRRGIGHVFSSSYTDANVAETELRNHIKNLVGDEVAEQVSTRKIEFSPGHREKFWHKNCVAIGMAAGFIEPLEASALVLVELSANMIAEQLPQNRKIMDIVSKRFNEKFLYRWNTIIDFLKLHYILTERDNSEYWRDNVSRESIPASLQEKIDLWKWQSPYHKDTLHIDEMFPSASYQYILYGMGFKTNPGNFRRSNQETSAVALDLFDENAMRTKQLVSSMPT

SEQ ID NO: 89882 - protein, 494 aa, Sphingomonas aquatilis
  misc_feature (1)..(494): tr|A0A511Q4M9|A0A511Q4M9_9SPHN Tryptophan halogenase OS =Sphingomonas aquatilis NBRC 16722 OX=1219039 GN=SAQ01S _20150 PE=4 SV=1
MPDGGGGVTQDRAIRSILVAGGGIVGWLAAAALKRRAPFLAVTLLDSAPSPNALADRIACTLPSLAGFHADLGIGDEDAVVRTGAGYRLGTRFIGWGREDADYVHAYDHYGQAFGATAFHLHWLRAEWEGAVPRFDAFAPAAALGRAGRYAPPTPGTIFARHQAGLTLDLPRYTRMIRAFAAHVGVDVVAGGIGDIARDDRGGIAAVALADGRRLTADLYVDASGPEARLRDAIDTARDDWSAWLPCDRVMLADGPPAEPPLLTLVTAHAAGWSWDGGTQRGIVYAADRLADDDAAALLGAAGAARVTIRPGTRREPWRANCVAIGDAATAIDPLEWCNLHLALSAIDRLITMLPDRDMAPVEATDFNRQTLAEAERVRDMLALHYRATARPEPMSRAVASAAAPDSLAHTLRQFEERGRLPFYEEETFTRDGWAAVMIGQGIRPRRIDPLADAVPLADAHAAMHGITDAIAAALPHAPTHAAWLAAQARPLAR

SEQ ID NO: 89883 - protein, 497 aa, Sphingomonas aquatilis
  misc_feature (1)..(497): tr|A0A511Q0M0|A0A511Q0M0_9SPHN Tryptophan halogenase OS =Sphingomonas aquatilis NBRC 16722 OX=1219039 GN=prnA P E=4 SV=1
MNAVISRRIVIAGGGTAGWMAAAALTRTLGRTATVTLVESDAIGTVGVGESTIPPLITFNRLLGINEAEFMAATQATFKLGIQFDGWKGPDDSYFHAFGLTGKDHWAAGFQHFWLDGQARGHTESYDDYCLELMAARAGKFAHLPDDRMSYAYQLDSTLYGRFLRRMAEGDGATRIEGKIARVDLDGESGDIAALVLDDGTRVEGDLFLDCTGFRALLIEQALHVGYDDWTHWLPCDAAIAVQTESVRPPVPFTRAMAHDAGWQWRIPLQHRVGNGIVYCSRYLPQDAALDRLLGNVEGAVLTEPNRLRFVTGARRKQWHRNCIAIGLAGGFMEPLESTSIHLIQRAILRLIRLLPPAGAISAHDIAEFNDQQLTDMDQIRDFLILHYKVTERRDSPFWRQCAAMDIPDSLAQKIGLFRETGRVFRRNDELFAENSWIQVMLGQGIVPQTHHPIAAKLPDDELARFLGGLRQGVATTVRGLPAHADYVARYCGAAPA

SEQ ID NO: 89884 - protein, 520 aa, Caulobacter sp.
  misc_feature (1)..(520): tr|A0A0Q7U0P0|A0A0Q7U0P0_9CAUL Tryptophan halogenase OS =Caulobacter sp. Root1455 OX=1736465 GN=ASD21_00135 PE= 4 SV=1
MQTDKAQALKVVIVGGGTAGWMCAAGLARLLDLKAYDVTLIESDEIGAVGVGEATLPHIKTFNDMLGINEARFLAETQGTLKLGIEFRDWNRPGDRYIHPFGTFGEPWNGVDFQHHWVRAKLAGREVAPLQAYSYAAAACRANAFEFPNQDDKSIRSTYAYAYHFDASLYAGFLRRWATARGVKRIEGLVADIARDGANGHVASLTLKSGAIIQGDLFIDCTGFRSLLLGGQMDVAWQDWAPWLPCDRALAVPCKTGGDGLTPYTRASADLGGWRWRIPLQHRTGNGYVFSSAFLDENQARETLLAKLDGEALDEPRLLRFKAGRRVRGWSGNVVAMGLASGFLEPLESTSIFLIQAAVIDLVNLMPTPGEGDRMDPRLVAEFNRLFEIQYDRVRDFLILHYRANSRFGEPLWDHVRTMAIPDSLAAKMELFEARAALPDYKYGLFSRDSWLSVFEGQGLTPRAHDRLAESLTLDDLEARLADLKTRIDSNVATMTSHADFLARYAPGDVAAAALTPAVA

SEQ ID NO: 89885 - protein, 511 aa, Marinicella litoralis
  misc_feature (1)..(511): tr|A0A4R6XU19|A0A4R6XU19_9GAMM Tryptophan halogenase OS =Marinicella litoralis OX=644220 GN=C8D91_0333 PE=4 SV= 1
MIKNIVIVGGGTAGWMTAAALSRHLPEQCNVRLIESDQIATVGVGEATIPVIRTFNAGLGIDEQEFMRETNASFKLAIRFQNWGEIGEDYYHAFGYYGFPINDVSFHHYWMKMQQDPDIGGIHEYNMPYMACVDDKFEHKQFDNESIGSRYFYAYQFDATLYARYLRKWSEAKGVTRIEGKVTEVTQNNETGFVESVTLESGECIEGELFIDCSGFRALLLEKTHKIGYKDWSHWLPVNRAWAVSTAYENEDTPIPPYTRARALTAGWQWRIPLQNRTGDGNVFCDQYLSEDKALDQLLENIEGEPINEPRLLKFTTGKREKLWHKNCVGVGLSGGFLEPLESTSIALIQAAILLLIRNFPSKDFAPATENEFNRRMDIKYEESRNFIMLHYHMTRRNDSEFWNYCRTMKIPDELQHRIDVFRHSGHTAHKNSDLFIEHNWLQVMLGQGIKPDSYDPRVDVVDPQEVKRLMAQMRTDVAKAAKAMPTHNETLARYCAGELISNPLSKSSKQ

SEQ ID NO: 89886 - protein, 537 aa, Burkholderia contaminans
  misc_feature (1)..(537): tr|A0A3N8NYH3|A0A3N8NYH3_9BURK Tryptophan 7-halogenase OS=Burkholderia contaminans OX=488447 GN=DF037_01195 PE =4 SV=1
MSHPIKNIVIVGGGTAGWMSASYLVRALQQQANITLIESEAIPRIGVGEATIPNLQKVFFDFLGIPEREWMPQVNGAFKSAIKFVNWRKSPDRSRDDHFYHLFGSVPNCDGVPLTHYWLRKREQGFQQPMEYACYPQPEALDARLAPCLLDGTRQMPHAWHFDAHLVADFLKRWAVGRGVTRVVDEVVEVHLNERGDIASLSTKEGRTLEADLFIDCSGMRGLLINQALKEPFIDMSDYLLCDSAVASAVPNDDARVGIEPYTSAIAMNSGWTWKIPMLGRFGSGYVFSSKFTSRDQATADFLNLWGLSDKQPLNQIKFRVGRNGRAWVNNCVAIGLSSCFLEPLESTGIYFIYAALYQLVKHFPDTGFDPRLRDAFNAEIVYMFDDCRDFVQAHYFTASRDDTPFWLANRHDLRLSDAIKDKVERYKAGLPLTTTSFDDATYYETFDYEFKNFWLNGNYYCIFAGLGLLPDRSLPLLRHRPASADKAEAMFARIRREAERLRASLPTNYDYLRSLRDGEAGRARSRPGPVAAPETL

SEQ ID NO: 89887 - protein, 493 aa, Paraglaciecola sp.
  misc_feature (1)..(493): tr|A0A2N1D903|A0A2N1D903_9ALTE Tryptophan halogenase OS =Paraglaciecola sp. MB-3u-78 OX=2058332 GN=CXF95_16805 PE=4 SV=1
MNAKTKVVVAGGGTSGWLTAYSLNARLGALLDITLIESDQIGTVGVGEATIPTMRTFHRLVGIDEQEFMAATQATFKLGIMFDNWGQQGDSYIHSFGEIGQRSWMAEFHEFWLEAKAQGFGGSLEDYCLELKAAKANKFATHVGKKPLNFAYHMNATAYAAYLRKKSEAAGVKRIEGRITEVQNDQSGNISSLILEGGEHLSGDVFIDCTGFRALLIGDNLDVEYEDWTHLLAADSAIAVQTQAVEAPRPYTRAIAHPAAWQWRIPLQNRVGNGIVYSSQFLSDDEARSTLLANLSGETITEPRQLRFKTGRRKKAWHLNCIAIGLSSGFLEPLESTSIHLVTTSILRLMKLFPFGGNSALLAEQFNRETQLELETARDFVILHYHLTQRHDSPFWDHYRTMQIPDSLVHRMAMFRENGYAWPDDVSLFRVDSWVQVMMGQGLIPEQHHGAGRVLPVEGLKAQMLALSKMIDNSVAQLPEHGDFIQTYCPAQE

SEQ ID NO: 89888 - protein, 505 aa, Xanthomonas bromi
  misc_feature (1)..(505): tr|A0A1C3NR68|A0A1C3NR68_9XANT Tryptophan halogenase OS =Xanthomonas bromi OX=56449 GN=XBLMG947_3708 PE=4 SV=1
MTQAQIRKVVIAGGGTAGWIAACALSHQFRALLDITLIESEQIGTVGVGESTVPPIRAFHRFLQIDEQEFLRAVAGTFKLSISFEHWRRKGERYIHPFGITGQSTLVCAFHHLWLESQRRGMPGSFGDYCLETVASRVDRFALHGEPAVNYAYHLDAALYARFLRARSEAYGVKRVEGKIQQVTLQPHSGDVASLVLEDGQVIEGDLFIDCSGFRGLLIEQTLRTGYEDWSHWLPCDRAVAVQTEAVGPPVPYTRAIAHEAGWRWHIPLQHRVGNGLVFSSKHLSDDEAHAKLLRDVAAPAIKDPWMVPFRTGRRRKAWNKNVVSLGLSSGFIEPLESTSIHLTISAVVRLLALFPAAGIAPSQVQLFNDISRAEMEHVRDFVTLHYHATQRDEPLWQQCREMELPESLALRLRAWRERAHAWQGADELFRVDSWTHVLMGQGIAPEQHHPLTRAFSDQDLRRLLDAIAQPIQHAVQQMPSQQAFIERYCKAGAQVWGVRNPVPA

SEQ ID NO: 89889 - protein, 490 aa, Citromicrobium sp.; identical to SEQ ID NO: 87690
  misc_feature (1)..(490): tr|A0A2E4E4C3|A0A2E4E4C3_9SPHN Tryptophan halogenase OS =Citromicrobium sp. OX=2024827 GN=CL805_08120 PE=4 SV=1

SEQ ID NO: 89890 - protein, 505 aa, Xanthomonas nasturtii
  misc_feature (1)..(505): tr|A0A3E1KLK7|A0A3E1KLK7_9XANT Tryptophan 7-halogenase OS=Xanthomonas nasturtii OX=1843581 GN=DZD52_10290 PE=4 SV=1
MTQAQIRKVVIAGGGTAGWIAACALSHQFRDLLDITLVESEQIGTVGVGESTVPPIRTFHRFLQIDEQEFLRAVAGTFKLSISFEHWRRQGERYIHPFGITGQGTLVCAFHHLWLESQRRGMPGSFGDYCLETVASRVDRFALQGEPAVNYAYHLDAALYARFLRARSEACGVKRIEGKIQQVTVQPHSGDVASLVLEDGQVIEGDLFIDCSGFRGLLIEQTLHTGYEDWSHWLPCDRAVAVQTEAVGPPVPYTRAIAHAAGWRWHIPLQHRVGNGLVFSSKHLSDDEAHAKLLHDAAAPAVKDPWMVPFRTGRRLKAWNKNVVSLGLASGFIEPLESTSIHLTISAVVRLLALFPAEGIAPSQVQLFNDVSRAEMEHVRDFVTLHYHATQREEPLWQQCREMELPESLALRLRAWRECAHAWQGADELFRVDSWTHVLMGQGLMPEQHHPLTRAFSDHDLRRLLDGIAQPIQHAVQQMPSQQAFIERYCKTGEQVWGGRNPLPA

SEQ ID NO: 89891 - protein, 545 aa, Marinicella litoralis
  misc_feature (1)..(545): tr|A0A4R6XYK9|A0A4R6XYK9_9GAMM Tryptophan halogenase OS =Marinicella litoralis OX=644220 GN=C8D91_0474 PE=4 SV= 1
MKNQIRKVLIVGGGSAGWMTAAYLHQALNREGMPPRVEVTLVESPDIPRISVGEATIPSMRHLLAVIGIDELDFMKATDATFKQSIKYVNWEHNNNTFYHHPFGRNRRQPIDYAGLEWLASDRKIPFMETCSPQPIICEMGKSPLMMGKWDMGAPINYAYHMNAQKFADYLRDFIVPKGVNHIYANVTDIDMRDNGWIKTVHTDQAHQLEADLFVDCTGFRAKLIEEKMGVGFEDCSQWLLCDRAIAMHVPYDEHYPGMVRPYTTATALSNGWVWDIPMQSRRSLGYVHSSQYISEEDALKELLAYQGPGSEALEARTVHFKVGRREANWKGNCIAIGLSGGFIEPLESTGLYLSDLGAVMLAEHFPQTDEYMDAMAFRYNRILSNRFYEVLDFINLHYCLTKRTDTAFWREVQKPERITERLKAKFEYWKMKPPSQTDFEDQLYPGQNQQNSNPSVHMGDKRVPIDTAGLWNHESYECIMYGMHFDCQAYQDRFGEDRPKLNVHPQILHRLQQAHAKLPPHHVWLQQFVGMKNYPGNKTPKGWV

SEQ ID NO: 89892 - protein, 521 aa, Xanthomonas bromi
  misc_feature (1)..(521): tr|A0A1C3NIW4|A0A1C3NIW4_9XANT Tryptophan halogenase OS =Xanthomonas bromi OX=56449 GN=XBLMG947_1117 PE=4 SV=1
MPDTTPSDPQPRPVRRVVIAGGGTAGWMAAAAMSKLLGRHLQITLVESDEIGTVGVGEATIPSLVTFHRLLEIDEAAFMATTQATIKLGIAFEHWRDVDRHYIHSFGHAGTDHWSAGFQHFWLKGQQRGVARDFGDYCLELRAAQEGRFAHLPNGGMNYAYHLDAGLYARFLRRFSEGFGVQRIEGRIGQVETDAESGFLTALTLQDGTRVEGDLFLDCTGFAGLLIGKTLGVGSEDWSQWLFADSALAVQTESVGPPATYTRSRADQAGWMWRIPLQHRVGNGIVYSSRYMDQDGARAVLERNLTGRALSEPRPLRFTPNQRHRVWEKNCVALGLASGFLEPLESTNIHLIQRGIIRLLQTFPQVINAADIAEYNRQAAQEITHIRDFVILHYHATDRRDTPFWRDCTAMDIPDSLRHRVELFRQSGRVFHQANELFAENSWVQVMLGQGVVPQQHHPVADLMGDAELRRFLDTIRTRVEAALVRLPAHADFLRHYCPAPPPPEPAARVPAPTVVATPAG

SEQ ID NO: 89893 - protein, 496 aa, Sphingomonas sp.
  misc_feature (1)..(496): tr|A0A1H7MAD6|A0A1H7MAD6_9SPHN Tryptophan halogenase OS =Sphingomonas sp. JS21-1 OX=1855283 GN=SAMN05216382_142 0 PE=4 SV=1
MTDTDKPKPTRVVIAGGGTAGWIAAAALTRQLGKLIELTLVESDEIGTVGVGESTIPTARGFHAFIGVDEAAFMRETQATFKLGISFENWRRQGDAYFHPFGQVGRSVAIADFQHFWLQARAHGIAGGYGDYSLEQQAAAAGRFGLDAQGSLAYAYHLNATDYARFLRGVAEGAGATRVEGRIERVELGENGDIDALVLASGTRIEGDLFIDCTGFRALLIEGALKTGYDDWSEWLATDRALAVQTETVRAPVPYTRAVAHGAGWRWQIPLQSRVGNGIVYSSAHMSDDEARATLLAGLDGAPLFEPRPLRFTAGMRRRSWNRNCVALGLAGGFIEPLESTSIHLIMNAATRLIQLFPFRGDDRSALAARFNAQSRHEWEHVRDFIILHYVVTERDDTPFWRERRAMNIPDTLAERIALFTESAGAWQGQDDLFRIDSWIAVMLGQGITPTAHHRVASLLGAEALKGSLSDLTRLIAATVQMLPTHARFLQHYCPA

SEQ ID NO: 89894 - protein, 410 aa, Erythrobacter sp.
  misc_feature (1)..(410): tr|A0A357H7V4|A0A357H7V4_9SPHN Tryptophan halogenase (F ragment) OS=Erythrobacter sp. OX=1042 GN=DD861_08410 PE =4 SV=1
MSSEFNRLVIVGGGTAGWLSACLLAARRPELDVTLVEAPDIPTIGVGEGSWPTLRETLAAIGIDEARFLSACDASFKQGSRFDGWVDGSADDSYYHPFTPPASGQMADILSAWSAQPRKTASFAGAVTPQIAVCDRDLAPRQRAMSAFTGALNYGYHLDAAKLGALLAEHGTAHLGVKHVRAHVTGVERGEDGLLAKLMLRGSDTVEGDFFIDCTGMAARLIGDELGVGWRDRSDVSFNDRALAMQVPVAPGSAIASQTVGTAHKAGWLWDIGLPTRRGIGCVYSSRFLSDEDAETILADYITAKVPGADPGALASRKLQFATGHREQFWRGNCLAVGLSAGFIEPLEASAIVLIELSIKALADAYPHSRSALPRLADRFNALFRYRWDRIVDFLKLHYVLSKRGEPYWR

SEQ ID NO: 89895 - protein, 517 aa, Erythrobacter sp.
  misc_feature (1)..(517): tr|A0A3D4LXY2|A0A3D4LXY2_9SPHN Tryptophan halogenase OS =Erythrobacter sp. OX=1042 GN=DIW45_06995 PE=4 SV=1
MADHTQPNRARRPRPGRRIVIVGGGTAGWMTAAALSRFCGRDWGITLVESDAIGTVGVGEATIPMIRNFNAALGIDEAEFIAATNGTYKLGIEFVGWGAPDSRYLHAFGLVGRGLGLLPFQHYWLRARAEGFGGPIGDYVFNAIACREERFAHVERQPGSALPPLPFAYHFDAGLYAAFLRRYAETRGVLREEGRIDHVETRAEGGDITSVRIDGGRVVEGDLFIDCSGFRGLLIEDTLQTGWTDWSHWLPCDRAIAVPCEPSEPWLPYTRSTAREAGWQWRIPLQNRIGNGHVFSSAHMSEDTAQEALLANLDGEPTAEPRLLRFTTGMRKQAWNRNVVAIGLSSGFLEPLESTSIHLIQTGINRLLDYLPVSGFGPRDRENFNRRTAYEMERIRDFIILHYHANGREGQPFWDMLRTMAVPDTLAEKIEMFRAGGKIVRVQDELFDVPGWVQVMLGQGVEPQGWHPLADELPRDQLEQFLATVKSAYERDVARMPSHQDYVRRLARQGRSKLETA

SEQ ID NO: 89896 - protein, 497 aa, Alteromonadaceae bacterium
  misc_feature (1)..(497): tr|A0A2E6SP01|A0A2E6SP01_9ALTE Tryptophan halogenase OS =Alteromonadaceae bacterium OX=1916082 GN=CL590_08780 P E=4 SV=1
MHTSAIHHYVIAGGGTAGWMTAALLGKLLNGTGARITLVESPEQPGVGVGEATVPSFVDFIKLLGIDEQTFVKATQATFKLGIQFTHWQTPGHSYWHPFGHVGARIDGKPFFQQWLHAHRSGLAHTYTDFSASARMAQENKFYIPNPQQPNNLSQMGYAYHFDAQRVAVFLRDFAVSKGVVHKQAHIEHVQMCPDNSAIQRFITRTGEHIDGDFFIDCTGTQARLMGQALNTGFTDWQRYLPVDRAWVVQTENTEEPVPYTKAIAEPMGWRWQIPLQHRTGNGLVFCSQYTSPFEAKRYLQTQLTTPLLNEPRLLTFKTGHLEQFWRSNCVAIGLSAGFLEPLESTGIYLIMRGILNLTKLLPSSPPCQATIHEYNQLMLAEYQHIRDFIVLHYCVSQRNDTRFWQSWQQREIPTTLAHKLALYRTRGVVSHGQSDLFADHSWHAVATGMNVLPRDVDPVVATTDVKALQDLLARIDHALAHSVGQLMPHGEYLKAW

SEQ ID NO: 89897 - protein, 521 aa, Erythrobacter sp.
  misc_feature (1)..(521): tr|A0A354VVE8|A0A354VVE8_9SPHN Tryptophan halogenase OS =Erythrobacter sp. OX=1042 GN=DDZ54_12735 PE=4 SV=1
MRPDDGQAQAIGSICIVGGGTAGWSAAALLSQVLRGSGCRITLIESSAIPTVGVGEATIPPIFDFLRNIGADEVEFIRRCRATFKLGIQFRDWLHHNHAYWHPFGNLGVTINQRPFHHYYCMNRAAGYGETLADLCPSVALAEDGKFAFPSPDGQWPGGAVAYALHFDAGLVAAFLRDHAVAAGVERLDRRIVGATRGEGERIARVQFDDGESLEADFYIDCSGFRGLLIEETLGAGFEDWKHWLPCDSAVAAPTAAQEQRAPYTVATARSAGWQWRIPLQHRTGNGLVYASDFISDADAQAQLLAGLDGEAQADPRVLRFTAGLRKRAWVGNCLAIGLSAGFLEPLESTSIHLIHTGLNRLLDLFPDRRFDPALIAAYNRDVHREYAHIRDFLLLHYVPNRREGEPFWDHMRGLDLPDTLAEKIELFTRTGRIMSRQRELFSDISWFYVMHGMGLTPAALDPLAEAAPFGEVRKVIDQLRGAMQAFRSAAPTHDAILDRLLDPAETRRPQFGTGGGWTTR

SEQ ID NO: 89898 - protein, 506 aa, Erythrobacter sp.
  misc_feature (1)..(506): tr|A0A2D9U794|A0A2D9U794_9SPHN Tryptophan halogenase OS =Erythrobacter sp. OX=1042 GN=CL950_02335 PE=4 SV=1
MTERAQAIRNVVIVGGGTAGWMTAAALARLLGGTGLAITLVESAAIGTVGVGEATLPQIRRFNSLLGIDEREMMARTAATIKLGIEFRDWGRVGDSYIHPFGRFGQEIGPASFVDYWARAHARGMVAPIGQYCLPIMAALQGRFEPPDASGTRQPYDYAFQFDAGLYAAWLSELAQSAGVVRREGRIVDVARDSEGGAISAVSLEDGAAIRGDLFIDCSGFRALLIGETLETSFEDWSNWLPCNRAFAVPCANGGDYGPYTRATARAAGWQWRIPLQHRVGNGLVYCDAFWDDADAAEALMADLEGEPGAEPRPLRFTTGRRSALWRSNCVAIGLAGGFLEPLESTSIDLIQSGILNLVELFPHTAIEETDRREYNRLMDLEFERIRDFLVLHYVANQREEEFWQAMRAMPLPDSLSARIEDFRERAILPDYADGLFQPVSWISVFLGQNVVPRRWDPRADAMNADELGKRLAAIHGKIADDAAAMPLHLDFLERSGARYIGEAGQ

SEQ ID NO: 89899 - protein, 428 aa, Sphingomonadales bacterium
  misc_feature (1)..(428): tr|A0A4Q5SVS8|A0A4Q5SVS8_9SPHN Tryptophan 7-halogenase (Fragment) OS=Sphingomonadales bacterium OX=1978525 GN= EOP59_11810 PE=4 SV=1
RATKASFKLGIEFVGWGREDQRYFHPFGGYGIGFDVVAPWQYWLRDHLAGDATPLDDYSMAWGAARLGRFARPNDDPRMVQSTFDYAYHFDASLFARFLRSYAEERGVIRTEGKVADVVRNGETGFIEKVVLSDGRRIAGDFFIDCSGFTSLLLGQALEVPYEDWRRWLPCDRAMAVACKSGAERPPFTRSTAREAGWQWRIPLQHRTGNGYVYCSEHITDDAAADALLGALEGEAIGEPRPLRFVTGRRRSFWTGNCLALGLAAGFMEPLESTSLHLVHSGITRFLALFPDRDCSPLAAAEYDRVTAEEYARIRDFLVLHYHANAREQGTLWRACRAMKIPDTLAWRLDHFRSHGRVVSQGPELFQNPSWIAVLIGQGIVPRDYDPLIDQRQLTEARARLATLRTAIAAAAEQMPRHEAWLDALTAR

SEQ ID NO: 89900 - protein, 496 aa, Sphingomonadales bacterium
  misc_feature (1)..(496): tr|A0A4Q3AAF4|A0A4Q3AAF4_9SPHN Tryptophan 7-halogenase (Fragment) OS=Sphingomonadales bacterium OX=1978525 GN= EOP58_13475 PE=4 SV=1
KIRSIVIVGGGTAGWMSAATLARILTTDYASITLIESDEIGIVGVGEATIPQMATFNRMLGIDEDQFLRETQGSFKLGIQFRNWGRQGHQYYHPFGKYGLDMQGVSFHAFFLRLHQRGEAPNIDEWSLQAMASRANKFMRPIDAGNSPLSEIPYAFHFDAGLYAKFLRRFAEGKGVVRREGKIVDVKLRGEDGFVESVVMENGDAIEADLFVDCSGFRGLIIEQALQAGFTDWSHWLPCDRAVAVPCESVEEWTPYTRSTAHGAGWQWRIPLQHRIGNGHVFSSKFMSEDEATGILLANLDGKPLADPRIVRFTTGHRNQLWIKNCVSMGLAGGFIEPLESTAIWLIQSGLSRFLTMFPDRDFNQADIDRYNRIMTTDYEEIRDFIILHYHATERDDTPFWNTCRTMDVPERLAEKMRVFRSHGRCFRENEELFNDTSWFAVMHGQLMQAQSYDPVADIMSLDETRARLAHIRDTIANSADYMPKHRDFIREHCAA

SEQ ID NO: 89901 - protein, 521 aa, Erythrobacter sp.
  misc_feature (1)..(521): tr|A0A352H7G8|A0A352H7G8_9SPHN Tryptophan halogenase OS =Erythrobacter sp. OX=1042 GN=DC026_05570 PE=4 SV=1
MRPDDGQAQAIGSICIVGGGTAGWSAAALLSQVLRGSGCRITLVESSAIPTVGVGEATIPPIFDFLRNIGADEIEFIRRCQATFKLGIQFRDWLHHGHAYWHPFGNLGVTINQRPFHHYYCMNRAAGHGETLADLCPSVALAEDGKFAFPSPDGQWPGGAVAYALHFDAGLVAAFLRDHAVAAGVERLDRRIVGATRGEGERIAAVQFDDGESLEADFYIDCSGFRGLLIEETLGAGFEDWKHWLPCDSAVAAPTAAQEQRAPYTVATARSAGWQWRIPLQHRTGNGLVYASDFISDADAQAQLLAGLDGEPQADPRVLRFTAGLRKRAWVGNCLAIGLSAGFLEPLESTSIHLIHTGLNRLLDLFPDRRFDPALIAAYNRDVHREYAHIRDFLLLHYVPNRREGEPFWDHMRGLDLPDTLAEKIELFTRTGRIMSRQRELFSDISWFYVMHGMGLTPAALDPLAEAAPFGEVRKVIDQLRGAMQAFRSAAPTHDAILDRLLDPAETRRPQFGTGGGWTTR

SEQ ID NO: 89902 - protein, 500 aa, Sphingomonas sp.; identical to SEQ ID NO: 82655
  misc_feature (1)..(500): tr|A0A430E6J0|A0A430E6J0_9SPHN Tryptophan 7-halogenase OS=Sphingomonas sp. ABOLH OX=1985881 GN=CA237_09955 PE= 4 SV=1

SEQ ID NO: 89903 - protein, 506 aa, Rheinheimera sp.
  misc_feature (1)..(506): tr|A0A1B7UML6|A0A1B7UML6_9GAMM Tryptophan halogenase OS =Rheinheimera sp. SA_1 OX=1827365 GN=A5320_10455 PE=4 S V=1
MQQVNFSAAASDTQRPIKKVVIAGGGTAGWMTGAAISKLLGKNLEVVLVESDEIGTVGVGEATIPTLHIFHRLLGINEQEFMAATNATFKLGIMFENWLQRDQKYLHSFGFLGKDCWACGFQHFWSKAQQRGIAREIGDYCVEHLAARQGRFAVLPNQDLNHAYHMDATIYAKYLRKLAEQHGLKRVEGKISEVQQHADGHISALKLMSGELIEGDLFIDCTGFRALLIEQTLNTGFEDWSHFLPCDSAIAVQTKTTESPVAYTRAIAHPSGWQWKIPLQSRVGNGMVFCSKFMSDDEAKALLLANIEGERLIEPRVIKFRTGTRHQHWNKNCIAIGLSSGFLEPLESTSIHLIQRSIVRLLQMFPSNGIQTAEVDEFNKQTQIEMHNIRDFIILHYKATQRDDSKFWRYCRDMAVPESLTHRMDLFAQSGKVYKFAQELFGESSWIQVMMGQGILPAQYHPIVDAMSDGELTDFLGTIAANVQKTVQNFPTHQEFLQYYCKSAIV

SEQ ID NO: 89904 - protein, 462 aa, Sphingomonadales bacterium
  misc_feature (1)..(462): tr|A0A4Q5T271|A0A4Q5T271_9SPHN Tryptophan halogenase (F ragment) OS=Sphingomonadales bacterium OX=1978525 GN=EO P59_08150 PE=4 SV=1
MSVPSHVIVVGEDAPLWLAASALHAALRRSGVTVEVVELPSRIAAAHVYVTQPSLEALHNRLGIQEGKVLRATRGSFALGQKFVDALGEQPPFFHAYGACGVPIEGQQFLAFWLKAHRHGLPAGFEDFSLTAAAALQGRMLLPDADTEIFGRTDYGYHLPAAAYARSLKALVRQDGVPVHEADAVQVERDGDGAILALALGDGRRVTGDLFVDASASALLAADAGWEDWTFAADRVLHARGPRMQALPAYGQVAAVDWGWASLHPCQDATHVIAAFAAADEARVLQSLPVLCGFAPTEVTIATSRPGRQANAWVRNCVAIGGAAARFDPLHGVDLLAVQLGLVHLLSRFPVDADFAAERHDYNQAMAGLFGRLRDFQSAHYRLARYAGGFWDAARAREISPELAHKIQTFAARGELAMLEEESFLLDSWQALFLGHGLIPDSWAPAIDRTSPDTMRAEFRRV

SEQ ID NO: 89905 - protein, 501 aa, Alteromonadaceae bacterium
  misc_feature (1)..(501): tr|A0A2A5HEE2|A0A2A5HEE2_9ALTE Tryptophan halogenase OS =Alteromonadaceae bacterium OX=1916082 GN=COA42_21750 P E=4 SV=1
MNEKIKKIVIVGGGTAGWMTAARLSKAFTKELCEIHLIESPDIPTVGVGEATIPHVRHFNTALEIDDDEFVKHTQGTFKLGIEFVGWGKPGERYMHAFGDLGRDMLNLHFHHFWQKMHAQGKAEPFGAYSYNTAAAYQNRFMRSIEAGNSPLSNITYAYQFDANLYADFLRDYALKRGVTRTEATVAQVNLNANDGFISGVSLNSGEQITGDFFVDCSGFKALLIDKALGVDFVDWSEYLPCDRAWAVACENKGELKPYTQSIAQPAGWQWRIPLQHRTGNGHVFSSKFMAEDEAREILLNNLDGKALAEPRLLKFKAGKREKFWHKNCVAIGLSSGFLEPLESTSIHLIQTAIDRLLAHFPDRNCDPTVTAHYNENTHREYDSVRDFLILHYHVNQRDDSDFWRYCRNMKIPDTLKARIDLFRASGQIYCSKDDLFSAVSWVEVLLGQNITPQSYHPLVDSMAESDIALRLERIKGVVDASVEHTSKHAEYIQRTCAAKN

SEQ ID NO: 89906 - protein, 496 aa, Pragia sp.
  misc_feature (1)..(496): tr|A0A411WNV9|A0A411WNV9_9GAMM Tryptophan 7-halogenase OS=Pragia sp. CF-458 OX=2498113 GN=EKN56_16625 PE=4 SV= 1
MLNLRTPKRIVILGGGTAGWFAALTLRRIFSANVEVRVIESSQIGIVGVGEGGLLNIYDALQRNQIDIKEFMAETDATFKWGFSYEGWRTGKADDKFYHLFTSARGEGAQWVEGGFLPYYSALINQGVPLESWIRGFQLIKNNASMEEAIKAVDEDRTDLVTSFHFDSYKIAKYMKKVALSRGVVHEDVLVKDFVRNEEGLVTKLITEKGEVELDFLIDSSGLTRQVMAKMPGARWQTFKDYLLMDSAIPFYMPHPNKNPMLITRAITMDAGWMWQIPLSTRVGAGYVFSSKHKSEADAIDEIQKYLGFEIEPHKTIRFDPGCYEQVWIKNVMSLGLSSGFVEPLEATSIGQMIEQLRNFERVLVSSQGIISENSIREYNEANLASWHGIRDFLRMHYDCTRNDTPLWQEVNKSPMTERYAEFRKCIKERTPHMIDVENYAINGWGGIFHPVNWMSVAVPLGLVPVSAAGMDLLWLSKDKQQKALDFVKKVKEKGW

SEQ ID NO: 89907 - protein, 501 aa, Sphingomonas sp.
  misc_feature (1)..(501): tr|A0A0Q4R1J3|A0A0Q4R1J3_9SPHN Tryptophan halogenase OS =Sphingomonas sp. Leaf242 OX=1736304 GN=ASF09_04905 PE= 4 SV=1
MVEQRIRKVVIAGGGTAGWLAAAALTRQLGQLLDITLIESEEIGTIGVGEATIPTMRAFHTILGLDEREFMRATQATFKLGISFENWARDGDRYIHSFGDIGKSTWMGDFHHFWLAAKAAGDSSEIGDYCLELQAAKAERFALPSEGQINYAYHLDAGLYARFLRARSEANGLKRIEGRIASVDRDGETGFIRALVLDSGERVEGDLFLDCTGFRGLLIEGTYGAGYEDWSHWLPTNSALAVQSAATGPAHPYTRAIAHDAGWRWRIPLQHRVGNGLVYASDHLSDDEAHARLLGTIGGAPLTEPRLIRFRTGRRRQVWMGNCVALSLAGGFVEPLESTSIHLVMTGLMRLMQTFPFGGIAPSLVTRFNDQAQAELERVRDFIILHYHLNERPEPFWAARRDMPIPDTLVERIALFTEGAQAYQGGEDLFRVASWVQVMLGQRLTPRDYHRLGSIMSGSQLASVLTNIRSTIADAVAGMPTHQQFLDRYLATPTAAASGIR

SEQ ID NO: 89908 - protein, 494 aa, Erythrobacter sp.
  misc_feature (1)..(494): tr|A0A2D8MC87|A0A2D8MC87_9SPHN Tryptophan halogenase OS =Erythrobacter sp. OX=1042 GN=CL949_08510 PE=4 SV=1
MSGGQPVKVVIAGGGTAGWISACALARQLGRLVQVTLVESDAIPTIGVGEATIPTARSFHEYLRIDERAFMAATGATFKLGIRFDDWGALGDSYMHSFGTFEMRNWVAEFQHFWLEGRASGLADGIGAFCLEHEAALAGKFTTEGAPPLNYAYHLDAGRYASFLRAIAERDGVRRVEGRISKVEQHVETGEITALTLDSGERIEGDLFIDCTGFRALLLGQTLEVGYENWSNWLPTNGAWAVQTEETNAPPPYTLAAAHEAGWRWRIPLQHRTGNGLVFASDYLDAEDAREKLLGAIEGRAVSDPRLIRFETGRRRKMWAKNCVALGLSSGFIEPLESTSIHLIMSGVTRLIQLFPFNGEMDALRDRWNALADRELEHVRDFIILHYHLTQRDDSEFWRSRAEMDIPDSLKARIENFSAQGQAWQDALELFRTESWIYVMLGQGLMPQQWHRLASLVDSERLMGTLARQKEAIAARVAGMPGHGEFITSYAADR

SEQ ID NO: 89909 - protein, 499 aa, Sphingomonadales bacterium
  misc_feature (1)..(499): tr|A0A4Q5TD69|A0A4Q5TD69_9SPHN Tryptophan 7-halogenase OS=Sphingomonadales bacterium OX=1978525 GN=EOP59_00315 PE=4 SV=1
MNEKHVRRVVIAGGGTAGWMAAAAIARTMGRAVDLTLVESEAIGTIGVGESTIPPIVAYNRLLGINEADFMAATQATFKLGILFDNWKEPGHRYFHSFGLTGKDHWSAGFQHFWLQARARGLAQSYDDYCLELVAALQSKFAHLPDESMNYAYQFDSALYAKFLRTMAEGDGTRRIEGKIARVELDGESGDIAALTLESGERVEGDLFLDCTGFRAVLIEQALHAGFDDWTHWLPCDSAIAIQTESVGPAVPYTRAMAHDAGWQWRIPLQHRVGNGIVYCSRYLGKDAALERLLGNIEGKAVVQPNFLRFTSGVRRKQWHRNCVAVGLSGGFMEPLESTSIHLIQRAVLRILRMMPQGKVSARDVAEFNDQQQQDMEQIRDFLILHYKATDRRDSGFWRQCASMTVPDTLTQKIELFRETGRVFRRNEELFAENSWVQVMMGQGIIPQSWHPIAEKLRDDELAKLMTMLRDNVARTVASLPSHEAYVAQFCGAQRPAAN

SEQ ID NO: 89910 - protein, 450 aa, Erythrobacter sp.
  misc_feature (1)..(450): tr|A0A3D2E7S9|A0A3D2E7S9_9SPHN Tryptophan halogenase (F ragment) OS=Erythrobacter sp. OX=1042 GN=DFK13_08255 PE =4 SV=1
DEIEFIRRCQATFKLGIQFRDWLHHGHAYWHPFGNLGVTINQRPFHHYYCMNRAAGHGETLADLCPSVALAEAGKFAFPSPDGQWPGGAVAYALHFDAGLVAAFLRDHAVAAGVERLDRRIVGATRGEGERIAGVQFDDGESLEADFYIDCSGFRGLLIEETLGAGFEDWKHWLPCDSAVAAPTAAQEQRAPYTVATARSAGWQWRIPLQHRTGNGLVYASDFISDADAQAQLLAGLDGEAQADPRVLRFTAGLRKRAWVGNCLAIGLSAGFLEPLESTSIHLIHTGLNRLLDLFPDRRFDPALIAAYNHDVHREYAHIRDFLLLHYVPNRREGEPFWDHMRGLDLPDTLAEKIELFTRTGRIMSRQRELFSDISWFYVMHGMGLTPAALDPLAEAAPFGEVRKVIDQLRGAMQAFRSAAPTHDAILDRLLDPAETRRPQFGTGGGWTTR

SEQ ID NO: 89911 - protein, 441 aa, Hydrogenophaga intermedia
  misc_feature (1)..(441): tr|A0A1L1PSX9|A0A1L1PSX9_HYDIT Tryptophan halogenase OS =Hydrogenophaga intermedia OX=65786 GN=BN948_03593 PE=4 SV=1
MQPEENCDVLVVGGGPAGSTIAALLAREGRQVVLLEKEHHPRFHIGESLLPGNVALFDQLGVRDEVEKIGMPKYGIEFVPPDLDYCSYVDFAEGWDPSKSSAWQVRRSELDELLFRHAARSGAQALEGAKVTQVAFDKEGANVEARLDSGEARRWRARFVVDATGRDTLLANQFKCKQKNKAHNSTALFGHFRGARRLQGKREGNISICWFEHGWFWFIPLADGTTSVGAVCWAYYLKARDKPLKDYFFDTIALCPELHDRLKHATLVDDQVHATGNFSYSSTHATGERYLMVGDAFTFIDPMFSSGVFLAMQSAFDGAQLVATALDEPKRLPAARAAFEKRVRVGPRDYSWFIYRVTNPTIRDMFMHPQNVFKVKQGLMSLLAADIHHGPAYRASLTMFKFLYYVVSVTNWRRTYAGWKRHRFNIRDMGPLKGETVMKAE

SEQ ID NO: 89912 - protein, 503 aa, Sphingomonas sp.
  misc_feature (1)..(503): tr|A0A0Q4R242|A0A0Q4R242_9SPHN Tryptophan halogenase OS =Sphingomonas sp. Leaf242 OX=1736304 GN=ASF09_15480 PE= 4 SV=1
MAKPKTRVVVVGGGTAGWMTAAALSRLLPGQCSVHLIESEAIGVVGVGEATLPHIRAFNERLGIDEADFMARTRATFKLGIEFRDWNRLGDSYIHPFGTFGRGTGGVDFQHYWARLLREGAPLPSLDTVSYACALARAGKFDRPETDPNRLAGTFGYAYQFDALLFAPYLREIAEGMGARRTEGVVVRVERDGDNGDIAAIVLDTGERIEGDLFVDCSGFRALLLGEAMAEPFVDWSHWLPTDRAVAMPCRTRTAVTPYTSAIAMPAGWRWRIPLQHRTGNGYVYASGFVADDDARRALEDAVEGEALAAPRVLRFKAGRRRRSWVGNCVAIGLASGFLEPLESTSIYLVQQAITTLIELFPEPRIAATDRDEFNRVIDLEYDRIRDFLILHYHATTRSDSPFWDYVRTMPIPDTLSEKLDLWRTRARIVKYREGVFLDPSWVAVYLGQGIVPDGWDPRADPVASDALARSLDALRSEIASDVARRPDHRSFIERYCAMAQAA

SEQ ID NO: 89913 - protein, 516 aa, Streptomyces zhaozhouensis
  misc_feature (1)..(516): tr|A0A286DPJ9|A0A286DPJ9_9ACTN Tryptophan halogenase OS =Streptomyces zhaozhouensis OX=1300267 GN=SAMN06297387_ 102139 PE=4 SV=1
MVNKVVIVGGGTAGWMTASYLKAAFADRIDITLVESDRVSTIGVGEATFSDIRHFFAFLGLKESDWMPACNATYKLAVRFENWREPGHHFYHPFEQMRSVNGFPLTDWWLKEKPSARFDTDCFVMPSIIDAGLSPRHTDGRLIDQPFDEEAEEMQGLTMSEHQGKTQFPYAYQFEAALLAKFLTRYSTDRGVRHIVDDVNHVELDERGWISGVRTAEHGELTGDLYIDCTGFRAMLLNKALDVPFISFQDTLPNDSAVALQVPMDMERRGILPCTTSTAQDAGWIWTIPLTGRVGTGYVYARDYLSPEEAERTLREFVGPAAADAEANHIRMRIGRSERSWERNCVAIGLSSGFVEPLESTGIFFIHHAIEQLVKNFPGDEWSDVHRDLYNRSVEHVMEGVREFLVLHYVAAKRNDTPYWKDTNTRVIPDALAERIENWKRVLPDSENVFPYYHGLPPYSYMCILLGMGGIDLHHSPGLDLSDTAAARREFAAIQEKASGLTKVLPKAYDYFTRLD

SEQ ID NO: 89914 - protein, 434 aa, Sphingomonadales bacterium
  misc_feature (1)..(434): tr|A0A4Q2ZD56|A0A4Q2ZD56_9SPHN Tryptophan halogenase (F ragment) OS=Sphingomonadales bacterium OX=1978525 GN=EO P60_15025 PE=4 SV=1
FDGWRTGAADDSYYHPFVPPVDGDPRALVSAWRDLPDDKAFAEAMGPQPRICALELAPRQRGMPDYAGALNYAYHLDAAKLANLLSEHAVRRLDVKHVRDHVTSVDLAVNGDVAAVHTRDSGAIAGDLFLDCTGHAALLIGEQFGVPFIDRSDVLFNDRALAVQVPVAPGSPIGSQTTATAHSAGWIWDIALPGRRGVGCVYSSKFASDEEAAATLATYLRATTPGGEAEDLSFRRLTFRSGHRERFWERNCLAVGLSAGFLEPLEASAIVLIELSLEALLENFPATRGSMEAHARRFNERFRYRWDRIVEFLKLHYVPSQRDEPYWRAHRDTASIPPRLAELLEVWRDQPPSLADLPMADEVFPAASYQYVLYGMGFPPPAAGAIQTGAVDAVLGQMRQAEQRGRSLAASLPTNRFYLDALRAERSSDKRMAE

SEQ ID NO: 89915 - protein, 502 aa, Sphingomonas sp.; identical to SEQ ID NO: 82622
  misc_feature (1)..(502): tr|A0A430E3V4|A0A430E3V4_9SPHN Tryptophan 7-halogenase OS=Sphingomonas sp. ABOLH OX=1985881 GN=CA237_14275 PE= 4 SV=1

SEQ ID NO: 89916 - protein, 365 aa, Erythrobacter sp.
  misc_feature (1)..(365): tr|A0A3B9AUX2|A0A3B9AUX2_9SPHN Tryptophan halogenase (F ragment) OS=Erythrobacter sp. OX=1042 GN=DCF81_01195 PE =4 SV=1
MTERKPPHVVVLGGGSAGWITACLLHHRWHSRGGQVTVVESPEIGIIGVGEGSTPQLKAFFDHLGIDEADWMAACDATYKLGIRFTGWSERPGFESYFHSFPGPVDLHTEPGFVHNCALRRRGFDVPAHPDDWFLAEVLAREHRGPHPRDNFPFMPSYGYHFDAHKLGKFLRDWATERGVLHRPLRVTDVEQGAQTEIAALLCEDGTRIEGDIFVDCSGFRSVLAQQTLGAQFIPFGNNLFSDRAVVLPSAHSTRFKPQTDSIAMRAGWRWSIPLTTRVGNGYVYSSKYVSDEDAEAELREAIGMQDEGEARILEMRVGRIAETWTGNCLAVGLSQGFIEPLEATALHIVIATALDFADAYEKGG

SEQ ID NO: 89917 - protein, 283 aa, Pseudomonas sp.
  misc_feature (1)..(283): tr|A0A1I3EHG9|A0A1I3EHG9_9PSED Tryptophan halogenase OS =Pseudomonas sp. NFPP04 OX=1566215 GN=SAMN03159342_0135 0 PE=4 SV=1
MNQVQAGKFIRPFGNWVTWDKERNFTPFGNDADGAWSGFQIPRSILDGFLLAKAIALGVHALQPCHAKKVLLENGRVMGVQTLTGTLSCRQLVDASGAHGWLTRQLGLGSRCYSPPLTALYGYTSGTIDESALGIFADRLGWYWTAQVGRKLYHWTRLYFEHDQICKASAVPSSFEHLTRVGKMQGADVTWRICDQSAGSGYFIVGDASAVIDPGASHGVLKALMSGMMAAQAVVEGCANPTNQQVISLQYQRWIRDWFESDVKRMRELYRAHPFPPPWLEKP

SEQ ID NO: 89918 - protein, 519 aa, Alteromonadaceae bacterium
  misc_feature (1)..(519): tr|A0A2D9S2N8|A0A2D9S2N8_9ALTE Tryptophan halogenase OS =Alteromonadaceae bacterium OX=1916082 GN=CL586_11550 P E=4 SV=1
MRKSVLIVGGGTAGWITAAYMARMLAADTPGGVSITLVESEEIGILGVGEGTFPIIRKTMGRIGLDESDLIKHADATFKQGIRFNNWKKNPADDPDDSYFHPFQVASQHTDMDLLPYWLLGVAGDVPWSECCTVQERAVEAKLAPKLISHPNYEAPLNYAYHFDATKLAALVRSRAMEMGVKRLIDTIDDVKLGEDGAIAAVTARQHGDLTADLFIDCTGFRARLIGETMGSEFTSYKNELFCDRAVALQVPYEQAGGPIPSCTYTTAKDYGWIWDIGLHERRGLGYVYSSKYCDEETAVATLKAHIGPAADTLQHRLLKFEPGYRKTQWHKNCVGIGLSVGFIEPLEATGISFAEVAALMLCNLFPWSGDYERSATQFNNAMSKRFEHVKDFIKLHYYLTERDDTAFWRDNQDPASASEYLKGKLEQWRHRPPSFLDIDASHDIFDENSWQYILYGMGFKTDISAREGALRFFDDARNEFTSIRQQSENAKRAVPTHRDLVTEVCQSGFKPQPRRARR

SEQ ID NO: 89919 - protein, 513 aa, Pseudoxanthomonas sp.
  misc_feature (1)..(513): tr|A0A3R8NWE0|A0A3R8NWE0_9GAMM Tryptophan 7-halogenase OS=Pseudoxanthomonas sp. SGD-10 OX=2493089 GN=EIM50_121 15 PE=4 SV=1
MDDARLPSTPIRRVVIAGGGTAGWMAAAALARTLGRVLDITLVESEQIGTVGVGEATIPPLRTFHRLLGIGEQDYLAATQGTIKLGISFENWRAQGHRYIHSFGSSGRDHWSAGFQHFWLRGRQEGLAGDYADYCIELQAAHQDRFSHLPDYHVNYAYHMDAALYARFLRALAQRHGCRRVEGKIAEVETDPGSGCIGALKLESGDVLEGDFFIDCTGFRALLIGQALGVGFSDWSQWLLNDRALAAQTTAVRDAVPYTRAIAGTAGWQWRIPLQHRVGNGIVYSSRFMDDDQAREAFLSSLEGEVIRAPWPVRFRPGQRQRCWEKNCVALGLAGSFIEPLESTTIHLIQRGIVRLLQSFPGVLSQAAIDDYNAQLDAELQHVRDFVVLHYHATERRDSPYWEEVASMRLPPSLQHRIDLFRETGLVFHQPGELFAENSWVQVMLGQGIVPRHYHPSADVMSREDLQRFLGDVRGNVLGTVARMPGHMDYLRGYAPAPVPPDLRQEQPSPAGA

SEQ ID NO: 89920 - protein, 495 aa, Sphingomonadales bacterium
  misc_feature (1)..(495): tr|A0A4Q3DDH5|A0A4Q3DDH5_9SPHN Tryptophan 7-halogenase OS=Sphingomonadales bacterium OX=1978525 GN=EOP61_03630 PE=4 SV=1
MLVKRVLVVGGGTAGWMTAAALSNKFHGSPLEIRLIESAEIGTVGVGEATVPHIRHYNATLGFDEAEFLAATRGTFKLGIEFRNWGRLGDSYIHPFGAFGRDFAGVPFHQHWLRMRDKPGVAAFEAFSLPIQAARRGRFHHPNDDPSSLLNTFNYAYQFDAGLYAKFLRQYSEARGVVRQEGKVVHVSQHGETGFIEAVTLDSGERIEADLFVDCSGFRGLLIEQTLGAGYEEWTHWLPCDRAIAIPCPNDGPPMPLTRSTAQKSGWVWKIPLQHRCGNGHVYSSNFISDDEALETLLGAIAAPPLADPNKLRFVTGKRKKQWVGNTVAIGLSSGFLEPLESTSIHLIQLAIGRLLDFFPTGEWDPLDAQEFNRVMVLEYERVRDFLILHYNATQRDDSDFWNYCRTMELPDSLRYKMELFRERGVVVNYRDGMFLEPSWLAVYLGQNVLPGAHDPLSERLSDDDLMSAMADLRTRYATAAEAMPEHLAALAAAA

SEQ ID NO: 89921 - protein, 509 aa, Sphingomonadales bacterium
  misc_feature (1)..(509): tr|A0A4Q5RPY7|A0A4Q5RPY7_9SPHN Tryptophan 7-halogenase OS=Sphingomonadales bacterium OX=1978525 GN=EOP62_20130 PE=4 SV=1
MRKRSILIVGGGTAGWLAAAYLARALELSDHGRLEITLLESPDIGIIGVGEGTFPTIRETLKFLGIDESRFIRETSATFKQGIRFTDWVHTPERGQHSHFFHPFEAPFYADGANLVPYWLLQDEKTRPPFAEAVTIQNRVADARRAPKRPHEGDFDGPLNYAYHFDAASLALVLAQRARELGVRHLQGVLTDVKLDDSGAIAEVGTAEHGTLSADLYIDCTGFRAELIGKALQVPFKSVRNHLFANAAVTCKLPYDRPDAPLESFTIATAHEAGWTWDIGLAGARGIGCVYSSDHISADRAEEILRAHVGPRDAEYRTRQIPFEAGYRDKQWVRNCVAVGLSGGFLEPLESTGVLLIEAAIGMIAELFPHNGPIDAPARRFNQLIAARYDNIVNFLKLHYCLSQRSEPFWRENADPASMPERLQELLEEWRYRPPSRYDFTLDVESFAFFNYQYILYGMEFRTDLSAGREDFPNVAGAEKLFQRIRNFGERATQDLPAHRALIAQINAG

SEQ ID NO: 89922 - protein, 506 aa, Alteromonas mediterranea
  misc_feature (1)..(506): tr|F2GC26|F2GC26_ALTMD Tryptophan halogenase OS=Alterom onas mediterranea (strain DSM 17117 / CIP 110805 / LMG 28347 / Deep ecotype) OX=1774373 GN=MADE_1009520 PE=4 S V=1
MQDPHNKPIKRVVIAGGGTAGWLAASLMKKVLGKAVDITLVESEAIGTVGVGEATIPPIRLVNQVLGIDEAQFLHDTKATIKLAIRFENWKTKGESYYHTFGAPGKSMAFCHFHHYWVKARQQGLKADLWDFDLNYHAAEAGRFAQINAKDPVVELPFAYHFDASLYAQYLRKLSENMGVVRKEGKISRVQRFTDSGFIQALHLESGDVVEGDLFVDCTGFKGLLIEEALGAGYDDWSHLLPCDSAIAVPSERHEKTAPYTRSIAHDAGWQWRIPLQHRNGNGHVYSSRYISDDQACDTLLSNLDTKPLGDPKLIKFTTGRRRKQWYKNVVAVGLSSGFLEPLESTSIHLIQSAIVRLIQLFPHNGFAPSLESEYNKQSELEFEQIRDFLVLHYTVNERTDSAFFNDMRNITLPDSLAHKIALFKESGNLLREQNDLFLESSWLQVLYGQGITPKDYHGLVNSVPEVQLNQMLTRLLEIKKEPIAKLPTHDEYINGMVAKYKRAMS

SEQ ID NO: 89923 - protein, 507 aa, Rheinheimera sp.
  misc_feature (1)..(507): tr|A0A1B7UGT4|A0A1B7UGT4_9GAMM Tryptophan halogenase OS =Rheinheimera sp. SA_1 OX=1827365 GN=A5320_17355 PE=4 S V=1
MHPQTKQIVIVGGGTAGWMAANLMAKSWQDQPVAITVIESPEIGIIGVGEGSTPQLKGLMDFLGLAEADWMPACYATYKTGIRFDGWSTKPGFTSYFHPFAAQPDDYTAPAFFYNSYVRRQGIDVEGHPDPFFLATYLAQQQLAPIANENFPFEINYGYHFDSSLLGKFLAKNATKLGVVHLQDTIEHVELTAGGDIAALVTRDGLTVAADIFVDCSGFRGLLIQQALQVPFISFDDNLFNDSAVVVQTPGQTKLDCQTISTAMQHGWRWTIPLTHRNGNGYVFSSAFCSADQAETEFRQSLGLLDSDLQCRHLKMKVGQLSKHWVKNCVAVGLSQGFIEPLEATALHLVQETVQGFIEHYQAGNFSNERSEQFNASVHQRFEAIRSYIVAHYRVNSRQDTEYWRANANNPRIPPSLYQILKVWLSGQNLSDELLRQQIDQYYPSMSWHCLLAGYGIYPDPKQLKVGNAAAQKYDLATIEQFIRRCGLNFIDHRRFVELQAAAHVAG

SEQ ID NO: 89924 - protein, 511 aa, Sphingomonadales bacterium
  misc_feature (1)..(511): tr|A0A4Q5SYJ8|A0A4Q5SYJ8_9SPHN Tryptophan 7-halogenase (Fragment) OS=Sphingomonadales bacterium OX=1978525 GN= EOP59_10860 PE=4 SV=1
MATATSRIVIVGGGTAGWLAACLIAARADREAAAPLEITLVESPDIPTIGVGEGTWPTMRGTLERIGLREADFLLACDASFKQGSRFDGWRTGAPGEHYYHPFTAPADGDARALVAAWQDVGGERPFAEVAGAQARIAGLDLAPRQRAMPDYAGALNYAYHLDAAKLAGLLSRHAVQRLGVTHVRDHVTAVERSADGDIAAVQTRENGAIAGDLFIDCTGHAALLIGDQLGVPFIDRSDVLFNDRALAVQVPVAPGSAIASQTTATAHAAGWIWDIGLPERRGVGCVYASAFMSDEEAAETLGGYLRATTPGGDAAAPSFRRLTFKSGHRARFWERNCLAVGLSAGFLEPLEASAIVLIELSLEALLDNFPATRASMDIHAARFNARFRYRWDRIVEFLKLHYVPSERDEPYWRAHRDPASIPPRLAELLALWRDQPPSLADLPMAGEIFPAASYQYVLYGMGFAPPAPGAIRSGGTAAVIAQMRQAEQRGRALAASLPSNRAYLDALRAE

SEQ ID NO: 89925 - protein, 497 aa, Sphingomonas sp.
  misc_feature (1)..(497): tr|A0A345WPI7|A0A345WPI7_9SPHN Tryptophan halogenase OS =Sphingomonas sp. FARSPH OX=2219696 GN=DM480_08740 PE=4 SV=1
MTLNTIVIAGGGTAGWMAAAALGHLLGEHVAIRLVESEEIGTVGVGEATIPQIRLFNQALGLDEDAFLRATGGTFKLGIAFDGWTAPGHSYMHAFGDVGRDVGPVPFQHYWLRARAAGVAGPLGDYCMNDVAARAGRMHRGAPLTARTIPAIPYAFHFDANLYAAYLRRFAQNRGVVRTEGRIAHVERDGESGDVAALVLDGGERVAGDLFLDCTGFRALLSEGALATGYEDWSRWLPCDRAVAQPSAGAGAPLPYTRAIARQAGWQWRIPLQHRTGNGHVYCSAFTSDDEAAATLAANLDGAATGDPRPLRFVTGRRRRAWNHNVVALGLASGFLEPLESTSIHLIQSAIARLVKLLPAMPVAPALRAEYNRQADFEMERIRDFLILHYWANGRDEPFWQACRDMALPDTLQAKIDLWREAGVITREHEELFTEDGWLQVLVGQGVAAQAYHPLADAISDGDLAEYMEMLPLLYRREAGALAEHGAFVAKHCAMRR

SEQ ID NO: 89926 - protein, 126 aa, Sphingomonadales bacterium
  misc_feature (1)..(126): tr|A0A4Q5SJD5|A0A4Q5SJD5_9SPHN Tryptophan halogenase (F ragment) OS=Sphingomonadales bacterium OX=1978525 GN=EO P59_14830 PE=4 SV=1
MKRIVVAGGGTAGWMAAAAIARTMARTVEVTLVESDAIGTIGVGESTIPPLVTYNRLLGINEAEFMRATQATFKLGILFDNWKVDGDRYFHSFGFTGKDHWSAGFQHFWLAGRSKGHQQPYDDYCL

SEQ ID NO: 89927 - protein, 492 aa, Alteromonadaceae bacterium; identical to SEQ ID NO: 86093
  misc_feature (1)..(492): tr|A0A2D5M1S6|A0A2D5M1S6_9ALTE Tryptophan halogenase OS =Alteromonadaceae bacterium OX=1916082 GN=CL579_08680 P E=4 SV=1

SEQ ID NO: 89928 - protein, 498 aa, Sphingomonas sp.
  misc_feature (1)..(498): tr|A0A0Q4QR50|A0A0Q4QR50_9SPHN Tryptophan halogenase OS =Sphingomonas sp. Leaf242 OX=1736304 GN=ASF09_15485 PE= 4 SV=1
MRDGAGGLMPGERLRSVLVAGGGITAWCAAAALKRRAPFLDVTILRCTPSREALVDRIACTLPSLLGFHDDLGIGAADGIARTASGYRLGTLFSGWATGLPDYVHAYGRYGRSLGPTAFHLHWVRSVLEGARAAPFDSHSPAAALARAGRFAPPMPETPFADHEYGLTLDLPRYRTMMRAFALHVGVREIVGEIADVVRDTGDGIAAVALAGGSRIVADLFVDATGPDATLRGALDDVRDDWSAWLPCDRVLLAEGSAEPLVLTTAVAHPAGWRWSSGAQSGFAYASGEISDAKAARVLRNAAGTAPGEPIRVRPGTRPHPWLGNCIAIGDAATEVEPLEWCNLHLALSAIDRLIAMLPGRVSTPGEAAEFNRQTLAEAERVRDFLALHYHVAQRDDPLWQAVAAAVPPASLSHTLAQFTERGRLPFYEEETFARDSWAAVLIGQGVLPRRIDPLVAAVPAAAAQTAMARLTTEIAAALPHIPTHAAYRAAQTRHLLS

SEQ ID NO: 89929 - protein, 509 aa, Sphingomonadales bacterium
  misc_feature (1)..(509): tr|A0A4Q3APG0|A0A4Q3APG0_9SPHN Tryptophan 7-halogenase OS=Sphingomonadales bacterium OX=1978525 GN=EOP58_04825 PE=4 SV=1
MSDMLRSIVIAGGGTAGWMTAAALARFCGKGWRITLVESEEIGTVGVGEATIPMIRNFNQALGIDEAQFLRETHGTYKLGIEFAGWGGLTDRYIHAFGLVGRGLGLLPFHHYWLRGRAAGSAGPLGDYVLNAVAAYGNRFAHVQRAADSALPPMPYAYHFDAGLYAAFLRRYAEARGVVRVEGRIGAVERDGKTGDVAALTLTGGERIDGALFVDCTGFRGLLIEGALATGYEDWSHWLPCDRAVAVPCAGVRPLTPYTRSTARKAGWQWRIPLQHRTGNGHVFASRHISEDEATATLLANLDGEALAEPRMLRFTTGKRKQFWNRNVVAIGLSSGFIEPLESTSIHLIQTGINRLLDFLPSGPVASADRDAFNRIADVEIERIRDFVILHYTANGRTGEPFWDALRTMELPEPLANRIAMFRSDGRIMREHDELFDVPGWLQVMVGQGIVPERWHPLADQLDDAQLDQFLSTVATAFARDAARMPDHEDFVARFVATPQTQPQEVTRV

SEQ ID NO: 89930 - protein, 521 aa, Erythrobacter sp.
  misc_feature (1)..(521): tr|A0A3D5XHT1|A0A3D5XHT1_9SPHN Tryptophan halogenase OS =Erythrobacter sp. OX=1042 GN=DHU71_13545 PE=4 SV=1
MRPDDGQAQAIGSICIVGGGTAGWSAAALLSQVLRGSGCRITLVESSAIPTVGVGEATIPPIFDFLRNIGADEVEFIRRCRATFKLGIQFRDWLHHGHAYWHPFGNLGVTINQRPFHHYYCMNRAAGHGETLADLCPSVALAEAGKFAFPSPDGQWPGGAVAYALHFDAGLVAAFLRDHAVAAGVERLDRRIVGATRGEGERIAAVQFDDGESLEADFYIDCSGFRGLLIEETLGAGFEDWKHWLPCDSAVAAPTAAQEQRAPYTVATARSAGWQWRIPLQHRTGNGLVYASDFISDADAQAQLLAGLDGEPQADPRVLRFTAGLRKRAWVGNCLAIGLSAGFLEPLESTSIHLIHTGLNRLLDLFPDRRFDPALIAAYNHDVHREYAHIRDFLLLHYVPNQREGEPFWDHMRGLDLPDTLAEKIELFTRTGRIMSRQRELFSDISWFYVMHGMGLTPAALDPLAEAAPFGEVRKVIDQLRGAMQAFRSAAPTHDAILDRLLDPAETRRPQFGTGGGWTTR

SEQ ID NO: 89931 - protein, 507 aa, Sphingomonas sp.
  misc_feature (1)..(507): tr|A0A0Q4RBF4|A0A0Q4RBF4_9SPHN Tryptophan halogenase OS =Sphingomonas sp. Leaf242 OX=1736304 GN=ASF09_05575 PE= 4 SV=1
MSDRALRSIAIIGGGTAGWMAAAALARVLGTHNVAITLVESEEIGTVGVGEATIPPIQAFNALLGIDEDAFVKATMGSFKLGIEFVDWLRPGTRYFHPFGVYGTDIGAVPFEGLWHRLRTQGLADPLEAYSICAQAAKDGRFMRPLADGGNTPLHRIGYAFHFDASLYARFLRTHAEAAGVVRREGRVVDVALRAADGFVEAVTLASGARIEADLFVDCSGFRSLLLGETLGTGFEDWSHWLPNDRAIAVPTVSNGPPTPFTRSTARAAGWQWRIPLQHRTGNGYVFSSAHLSEDEATATLLANLDGEPLADPRTLRFRTGRRDAFWVRNCVGLGLSSGFLEPLESTSIHLIQAGIARLLEMLPNRDFEAADIRRYNRLMTAEYDSIRDFIILHFHATERADTPYWDHVRTMAVPETLAERIRIYQATGRVFRESDDLFSKTSWLAVMDGQGLRAEGFDPLAASLSVDDARTRLARIAAVTAAAAARMPPHAEFIARHCAGAIASRT

SEQ ID NO: 89932 - protein, 507 aa, Sphingomonas sp.
  misc_feature (1)..(507): tr|A0A0Q4R828|A0A0Q4R828_9SPHN Tryptophan halogenase OS =Sphingomonas sp. Leaf242 OX=1736304 GN=ASF09_06915 PE= 4 SV=1
MTDTPAARITKVVIVGGGTAGWMTAAALSRLVATGVAVTLVESEDIGTVGVGEATIPSLRDYNRMLGIDEDALVRATGGTFKLGIEFRDWRWLGDSYLHPFGTHGRDIEGVSFHQLWLRQANLGGDPGPIGDYCLSAVAARKGRFTRPASNPQSVLSTLSYAFHFDAALYAKFLRGMAEEAGVVRVEGRVAAVDRDAESGFITGLRLDGDRRIDGELFIDCSGFRSLLLGDALGVPFTSWQHWLPCDRAWAVPSERQGTLTPYTRATAETAGWRWRIPLQHRVGNGHVYASDHVDDDDALRALLAGLDGKPLAEPRQLRFIAGRRERLWEKNCVAIGLSGGFLEPLESTSIHLIQSGITRLMALFPDRGFGGVEIAEYNRVMLREYAQIRDFIILHYHATERSDSTFWNHCRTMTIPDTLQAKLDLWSGKARTFREQGELFTPDGWIAVLLGQGVRPVSTDPLVAALPPEESARFMDHVRDMIGKTADAMPTHEQFIAQHCAAAIAP

SEQ ID NO: 89933 - protein, 491 aa, Sphingomonas sp.; identical to SEQ ID NO: 82623
  misc_feature (1)..(491): tr|A0A430E7D4|A0A430E7D4_9SPHN Tryptophan 7-halogenase OS=Sphingomonas sp. ABOLH OX=1985881 GN=CA237_08200 PE= 4 SV=1

SEQ ID NO: 89934 - protein, 535 aa, Rheinheimera sp.
  misc_feature (1)..(535): tr|A0A1B7UQX2|A0A1B7UQX2_9GAMM Tryptophan halogenase OS =Rheinheimera sp. SA_1 OX=1827365 GN=A5320_05545 PE=4 S V=1
MTTAQAPINSVAIKTVVIVGGGNAGWLTAGRIAAKHKTKQGGVKVILVESPTIAPIGVGEGTWPTMRSTLIALGISETDFIRHCDATFKQGAKFARWVDGSKDDFYYHPLVLPQGFGKADMAAYWQAQHATAGMPSFSPASSFSNALCYQETICEQGLAPKTIRTAEFSAVANYAYHLDSGKFGQFLQQHCTEKLGVTHILDDVIAIHSVADGNHAANGDIAAVETKNHGAISGDLFVDCTGFSSLLLGKHYQVPFKACDDILFIDTALAVQVPYENADSPIASHTISTAQEAGWIWDIGLQHRRGVGYVYASKYCTEEDARATLAQYVGPAIEGLTVRKIPIVSGHRTKFWQNNCVAVGLSAGFLEPLEASALVLVELSAQMISEQLPANRALMDIVAKRFNDTFLYRWDKIIDFLKLHYLLSQRDEPFWRDNRDPATIPQSLLDLLQLWRYRAPGDLDFTSNNEVFPAASYQYVLYGMGFKTDYSHSGYLLDNWDFATQQFAQNQKMINQALSMLPTNRELITKIRDYGLNAL

SEQ ID NO: 89935 - protein, 500 aa, Alteromonadaceae bacterium; identical to SEQ ID NO: 86823
  misc_feature (1)..(500): tr|A0A2D9KF50|A0A2D9KF50_9ALTE Tryptophan halogenase OS =Alteromonadaceae bacterium OX=1916082 GN=CL582_10160 P E=4 SV=1

SEQ ID NO: 89936 - protein, 264 aa, Alteromonadaceae bacterium; identical to SEQ ID NO: 86969
  misc_feature (1)..(264): tr|A0A2D9KL26|A0A2D9KL26_9ALTE Tryptophan halogenase (F ragment) OS=Alteromonadaceae bacterium OX=1916082 GN=CL 582_20915 PE=4 SV=1

SEQ ID NO: 89937 - protein, 480 aa, Simiduia agarivorans
  misc_feature (1)..(480): tr|K4KXS8|K4KXS8_SIMAS NAD(FAD)-dependent dehydrogenase OS=Simiduia agarivorans (strain DSM 21679 / JCM 13881 / BCRC 17597 / SA1) OX=1117647 GN=M5M_07630 PE=4 SV=1
MKPPRSLAIVGGGTAGWMAACLLQAAWGDACTITLIEDPDTPTIGVGEGSTPLLKRFFSRLGLCESDWMPACDATYKAGILFDGWSASEPDYFHPFFSALDLNTGDAFFHQADRRRRGAAVDARPADYFVAAQVAELGLAAAPANALPFEVDYGYHFDAGKLSALLRRHACGRGVRYRPVKLAAVHTDDQRITGLALADGTECKADFYLDCTGFRSLLLQQGLGVGFHPYTDALLNDAAVVLQDSVPLPGLPARTRSTALTAGWAWQIPLQQRTGYGYVYSRRFCAPDQAAAELRAHAGVGADHPVRHLQFPVGRVHQHWQGNCLAVGLSQGFVEPLEATALMLVQSTIELFIQAREVASFNAHINRLFDGVRDYIVGHYLLAGRNEPYWQAARDTRCASEALRALLTRWDQGQDLHSLLAGPLGSVYMRPSWYVLLAGLGRFPRVQCADNSVGDSARHQCEQLARAHFSDHRRWLAAQR

SEQ ID NO: 89938 - protein, 498 aa, Sphingomonas sp.
  misc_feature (1)..(498): tr|A0A369VY03|A0A369VY03_9SPHN Tryptophan 7-halogenase OS=Sphingomonas sp. WZY 27 OX=2283317 GN=DVW87_06460 PE =4 SV=1
MKRLNRIVVAGGGTAGWMAAAAIARTLGKAVSVSLVESEAIGTVGVGESTIPPLVAYNRLLGINEAEFMRATQATFKLGILFDGWRDGTDRYFHSFGLTGKDHWSAGFQHFWRYGLERGFDRSYDDYCLELVAAMSAKFAHLPDDRMNYAYQLDSGLYAKFLRAMAEKDGTRRVEGRIARVELDGETGHIAALHLDSGEAIEGDLFLDCTGFRALLIEGALHAGHDDWTHWLPCDAAIAIQTESVAPPVPYTRAIAHEAGWQWRIPLQHRRGNGIVYCSRYMDKDAALDRLLSTIEGKTLVEPNFLRFGAGARRRQWHRNCIAVGLSGGFMEPLESTSIHLIQRAVLRLIRMLPLGEISERDVAEFNDQQMADMLQIRDFLVLHYKVTNRGDSPFWRYCRDMEVPDTLAQKIELFRETGRVFRRNEELFAENSWVQVMMGQGITPAAWHPIAEKLPDEELGRLFAGLADQVSRTVAGLPEHAAYVAHYCGTPDSVKAA

SEQ ID NO: 89939 - protein, 495 aa, Sphingomonadales bacterium
  misc_feature (1)..(495): tr|A0A4Q2YXS0|A0A4Q2YXS0_9SPHN Tryptophan 7-halogenase OS=Sphingomonadales bacterium OX=1978525 GN=EOP63_09165 PE=4 SV=1
MSARENLVRRIVIVGGGTAGWMTAAALGRALAGQPHVISLIESEAIGTVGVGEATVPPIHEFNRYLRIDQAEFLRATHGTIKLGIQFEGWGGEGHRYFHPFGYFGVEMSGIHFHHYWLRHLAAGGDADHTPYNLETVAARDARFAPMTRHGPVHHAVQFDAAAYARFLRSYAEDKGVVRIEGKVADVHLDPEDGFINAIAMDDDRIIEGDLFVDCSGFRGLLIEGALRTGYTEWSHWLPCDSAVAMPCENEGDPSPFTQSTVREAGWQWRIPLQHRTGNGYVYSSAHLGHDEAEALLRARLPGAPLADANRLRFTAGHRKAIWNRNCVAIGLAGGFLEPLESTSIHLIQTTIIRLLALLPRDAINPNVVARFNRDALREYEVIRDFVIAHYALAGRDDTQFWRDVAAAGMPDSLAERIEAFRATGNILFEPGDLFGPTNWYAVLTGQGVRPQGWHPIADGLSDAELASRFATLRGRVAEQLAELPPHIAFLRGLG

SEQ ID NO: 89940 - protein, 498 aa, Simiduia agarivorans
  misc_feature (1)..(498): tr|K4KJJ4|K4KJJ4_SIMAS Tryptophan halogenase OS=Simidui a agarivorans (strain DSM 21679 / JCM 13881 / BCRC 1759 7 / SA1) OX=1117647 GN=M5M_10725 PE=4 SV=1
MPVKTKVSKVVVLGGGTAGWMSAALLKKVLGDTVSIELVESEQIGAVGVGEATIPPIQLVNSVLGLNEAEFLRETNATIKLAIKFENWKQQGHSYFHTFGAPGKSTAFCHFHHYWTRANQAGHPSDLWDYDLNYQCAINGRFAHIKSQDPVFELPYAYHFDASLYAKFLRKISEAMGVSRTEGIVKDATLNSETGMVESLLLDDGRQVAGDFFIDCSGFRGLLIQSKCGAGYDDWSHLLPCNSAVAMPSERLPETLPYTRSIAHQAGWQWRIPLQHRNGNGMVYCSHYISDDEAIATLSANLDTAPLADPKIIRFTTGRTRKPWSRNVVAVGLSSGFLEPLESTSIHLIQSAVVRLIKLFPHNGIDAANVAEYNKQSEIEYLQVRDFLILHYFVNERQDSPFWRDMQQLDIPASLRHKIDLFESTGKLFREQEDLFAESSWLQVMLGQGITPRDYHPLANAPSEHKLLEMLANLRAVKAKPAAELPTHDEFLKSFCGR

SEQ ID NO: 89941 - protein, 497 aa, Sphingomonas sp.; identical to SEQ ID NO: 82614
  misc_feature (1)..(497): tr|A0A430E9S3|A0A430E9S3_9SPHN Tryptophan 7-halogenase OS=Sphingomonas sp. ABOLH OX=1985881 GN=CA237_04335 PE= 4 SV=1

SEQ ID NO: 89942 - protein, 492 aa, Sphingomonas sp.
  misc_feature (1)..(492): tr|A0A0Q4R9B5|A0A0Q4R9B5_9SPHN Tryptophan halogenase OS =Sphingomonas sp. Leaf242 OX=1736304 GN=ASF09_04255 PE= 4 SV=1
MTITPRRIVVAGGGTAGWMAAAAIARTMGGTAAVTLIESDAIGTVGVGESTIPPLVTYNRLLGIGEADFMRATQATFKLGILFDGWKNGSDRYFHSFGTTGKDHWSAGFQHFWLNGRTRGHDQSYDAYCLELAAAMDGKFAHLPDEGMNYAYQLDSTLYGKFLRGMAEADGTTRIEGRIARVELNAESGDVAALHLESGAVVEGDLFLDCTGFRALLIEQALHAGFDDWTHWLPCDSAIAVQTENVRPPVPYTRAMAHDAGWQWRIPLQHRTGNGIVWCSRYLDRDAALERLLGNLEGEVLTEPNHIRFVTGARRRQWHRNVIAIGLSGGFMEPLESTSIHLIQRAILRLIRMMPQGAISPRDVAEFNDQQFADMEQIRDFLILHYKATDRRGSPFWRQCAAMPIPDSLAQKIELFRETGRVFRRNEELFAENSWVQVMMGQGIVPRAHHPIADKLGDEELTRFLSTLRENVLRTVAGLPRHADYVAHYCGG

SEQ ID NO: 89943 - protein, 493 aa, Alteromonadaceae bacterium
  misc_feature (1)..(493): tr|A0A2E9KB39|A0A2E9KB39_9ALTE Tryptophan halogenase OS =Alteromonadaceae bacterium OX=1916082 GN=CL587_18850 P E=4 SV=1
MCAAALARTAQPETQVTLLESDQIGTIGVGEATIPLLAEFNAFLGIDEHDMLKECAGTFKLGIEFIDWYRKGHAYFHPFGFFGKDTPEFPFHQLWLKLNSLVRNGELPEELCGNICEYNLCTVAAKSGRFSQAQGGANTILSTMRHAWHFDSGAYGKLLRRYAEQRDVQRIEGKIVDVSVEPKSGDITSVRLENGLVVAGDLFIDCSGFRGLLINEHLQSEFNDWTHYLPCDRAIAIQTYENIHAPPYTRAYAKEAGWRWQIPLQSRFGNGYVYSGQFQEQQEALTSLLSDLHGEPVTGPNFLRFRTGHRRTFWKNNCIAIGLAGGFIEPLESTSIHLVQTGIQLLISLWSASGSNDELRSRYNKMMTDEYEDIRDFIILHYKATLRDDTAFWRFVRDMSVPDSLSEKMEQFARNGNIATRPDALFTSHSWLAVMLGQGIVPMHYDSRVDRIPGDILIQNMHGLREAVKRTAASLPSHQQYINKHCAFYNTHG

SEQ ID NO: 89944 - protein, 498 aa, Alteromonadaceae bacterium; identical to SEQ ID NO: 86805
  misc_feature (1)..(498): tr|A0A2D9KM72|A0A2D9KM72_9ALTE Tryptophan halogenase OS =Alteromonadaceae bacterium OX=1916082 GN=CL582_22810 P E=4 SV=1

SEQ ID NO: 89945 - protein, 496 aa, Alteromonadaceae bacterium
  misc_feature (1)..(496): tr|A0A2E7GN83|A0A2E7GN83_9ALTE Tryptophan halogenase OS =Alteromonadaceae bacterium OX=1916082 GN=CL578_09090 P E=4 SV=1
MNTAIKKVVIVGGGTAGWLTAALLQKVVGASINITLVESEAIGTVGVGEATIPPIRLVNQVLGINEAEFLRETKATIKLAIKFENWRRPNESYFHTFGSPGKSMAFCHFHHFVNRAKAFGAKASIWDYDLNYLCATQGKFAHIKAQDTVLDLPYAYHFDASLYAQFLRRYCTKLGVTRIEGMIESVQQHSSGNIAAVTLQDGQRIDGDLFIDCSGFRGLLIQQTLGVGYDDWTHLLPCNRAVAVPSERFETTVPYTRAIAHTAGWQWRIPLQHRNGNGLVYCSSHMSDDEATQTLLNNLDSAPLGDPKVIHFTTGRRRKQWYKNVVAVGLASGFLEPLESTSIHLIQSAIVRLIHLFPHAGIDSAAVDEYNQQSELEYLQIRDFLVLHYHLTERDDSQFWRNMQHMDIPASLRHKMTLFKQNGKLFREQNDLFLESSWLQVMTGQGIEPEDYHPIANTLSEQQLMNMLEQMRSVKHEPLANLPSHDAFLSHYCQTK

SEQ ID NO: 89946 - protein, 500 aa, Sphingomonas sp.
  misc_feature (1)..(500): tr|A0A430E6F7|A0A430E6F7_9SPHN Tryptophan 7-halogenase OS=Sphingomonas sp. ABOLH OX=1985881 GN=CA237_09655 PE= 4 SV=1
MPHEPVRSIVIVGGGTAGWMAATYLARRLAHLNLSITVVDSAAIGTVGVGEATVPAIRDFLSAIELGEADVLRETGGTIKYGIRFDGWGGEGHRFFHPFGLYGVGAEGVAFHQYWLRLNALGKAGPLADYCLATQLARNGLFLPPVDRPANDIGVFNFALHFDAAAFAALLRRPALANRVAHVDGRIVSVATDQPRGLVTQVTLEDGRTIAGDLWIDASGFRSLLLGEALGVPYVDWRHWLPCDRAVAIPCRAAPGDPTPYTVATARKAGWQWRIPLRHRIGNGSVYCSSFQSDADAEDALLATLEGAPLADPNRLRFVTGHRARFWSGNVVGLGLASGFLEPLESTSISLIQSGLERFVALFPDRDCDPRLAATYNRQSVLEFERLRDFLFLHYLANGRDEPFWQAIRAVEPPAPLQIKLDAWRSGGEFVRNEWDTFQDPSWLSLYAGFGDLPDRHSPLADAIGEDALLESFGRMRAAIARTLSHAEPHGAFLARVAGA

SEQ ID NO: 89947 - protein, 493 aa, Rheinheimera sp.
  misc_feature (1)..(493): tr|A0A1B7UQL5|A0A1B7UQL5_9GAMM Tryptophan halogenase OS =Rheinheimera sp. SA_1 OX=1827365 GN=A5320_05220 PE=4 S V=1
MIKKVVIAGGGTAGWMAAALLKKVLQQQIDVELVESDDIGIIGVGEATIPPIQVFNQYLGLDEAEFLRETKATIKLAIKFENWRTQGESYYHTFGAPGAQLGFCPFQHYWLQAKKAGLTQSLWDFDLNFLCAEQGKFNIIKTPNPLYEMPYAYHFDSGLYGRYLRKIAEKSGVVRTEGLIELVQQDAISGHIRSLHLKDGRQIHGDLFIDCTGLRALLVRKTLGVAFEDWSHYLPANSAIAVPSERFAQTLPYTRSIAHKAGWQWRIPLTHRNGNGLVYCSDYLSDDEAHHTLMGNLDANALAEPRKISFQTGRTTEQWCKNVVSIGLSSGFLEPLESTSIHLIQSGIVRLLKMFPHQQISQTVIDYYNADSKQEFETIRDFIVLHYHVNQRDDSKFWRDMRHMAIPPRLAEKIALFQQTAAIFNDQNDIFRDASWLQVMLGQGIQPLEHHPAAKAVPDAQLLQTLQKIRDAKQQPLAQMLSHDEFLLRYTKQ

SEQ ID NO: 89948 - protein, 415 aa, Pseudomonas fluorescens
  misc_feature (1)..(415): tr|L7H431|L7H431_PSEFL Tryptophan halogenase, putative OS=Pseudomonas fluorescens BRIP34879 OX=1205750 GN=A986 _20156 PE=4 SV=1
MPTVEMERRQVVVIGAGPSGAIAAALLKRKGHDVVIIEREHFPRFSIGESLLSHCIDFIEEAGMLEAVQAAGFQVKTGAAFAWGERYSAFDFGDTFSNGKPTTYQVQRGEFDKLLADQAALQGVDIRYGQTIVGADFSGDCRYLQVLRQNGSKYHLKAKFVLDASGYGRVLSRLLDLEAPSNFPLRRAVFTHVEDRIEHPGFDRSKILITTHPVKRDIWFWTIPFSNGRCSVGVVAAQTHFDGRDSDLDACLRGFIDETPSLSGVLQNAVWDTPARSIGGYAANVKTLHGPGFALLGNAAEFLDPVFSSGVTIAMRSASMAAGLLHRQLTGETVNWQTDFAEPLKRGVDTFRCYVEGWYAGTFQDVIFHPASSPEIRRMISAILAGYAWDERNPFVSEPKRRLRMLSEICASDAV

SEQ ID NO: 89949 - protein, 498 aa, Alteromonadaceae bacterium; identical to SEQ ID NO: 86951
  misc_feature (1)..(498): tr|A0A2D9KF22|A0A2D9KF22_9ALTE Tryptophan halogenase OS =Alteromonadaceae bacterium OX=1916082 GN=CL582_10180 P E=4 SV=1

SEQ ID NO: 89950 - protein, 489 aa, Alteromonadaceae bacterium; identical to SEQ ID NO: 83476
  misc_feature (1)..(489): tr|A0A2D9KE51|A0A2D9KE51_9ALTE Tryptophan halogenase OS =Alteromonadaceae bacterium OX=1916082 GN=CL582_08460 P E=4 SV=1

SEQ ID NO: 89951 - protein, 495 aa, Alteromonadaceae bacterium
  misc_feature (1)..(495): tr|A0A2D9KDK3|A0A2D9KDK3_9ALTE Tryptophan halogenase OS =Alteromonadaceae bacterium OX=1916082 GN=CL582_07465 P E=4 SV=1
MPQTIQNVVIAGGGTAGWMTAALLRRVLSPTIRIELVESEQIGIVGVGEATIPPIQTFNQFLGIDEKAFLRETHATIKLAIKFENWKTHGDSYYHTFGAPGTTMGFCSFHHYWLKAKQAGLAQSLWDFDLNYLSCLQGKFNKINTPNPLYEMQYAYHFDSALYGQFLRKTAEQAGVVRTEGIIEHVQQDPDSGFITALQLTNGKQIQGDLFIDCTGLRGLLIQQALGVSYEDWSHWLPADSAQAVPSERFDKTLPYTRSIAHRVGWQWRIPLTHRNGNGIVYSSQYLSDDEAGQTLLNNLDTKALDTPRTIRFKTGRTDQQWCKNVVAIGLSSGFLEPLESTSIHLIQSGIVRLMKMFPNQGISQAMVDLYNAESKDEFETIRDFIILHYHVNQRDDSDFWRDMRNMAIPDRLAQKIAAFEDTAAIFNEQSDIFRDASWVQVMMGQGLDPKDYHPAADAMDNAQLMDAMQQIYKAKQQPLDKLMSHDEFIKRYTA

SEQ ID NO: 89952 - protein, 497 aa, Alteromonadaceae bacterium
  misc_feature (1)..(497): tr|A0A2D9KHW5|A0A2D9KHW5_9ALTE Tryptophan halogenase OS =Alteromonadaceae bacterium OX=1916082 GN=CL582_15015 P E=4 SV=1
MHTSAIHHYVIAGGGTAGWMTAALLGKLLNGTGARITLVESPDQPGVGVGEATVPSFVDFIKLLGIDEQTFVKATQATFKLGIQFSHWQTLGHSYWHPFGHVGARIDGKPFFQQWLHAHRSGLTQTYTDFSASARMAQENKFYIPNPQQPNNLSQMGYAYHFDAQQVAVFLRDFAVSKGVVHKKALIEHVQMCPDNSVIQRLITRTGEHIDGDFFIDCTGTQARLMGQALNTGFTDWQRYLPVDHAWVVQTQNTDEPVPYTKAIAEPMGWRWQIPLQHRTGNGLVFCSQYTSPVEAKRYLQTQLTTPLLNEPRLLTFKTGHLEQFWRSNCVAIGLSAGFLEPLESTGIYLIMRGILNLTKLLPSSPPCQATIHEYNQLMLSEYQHIRDFIVLHYCVSQRNDTSFWQSWQQREIPTTLAHKLALYRTRGVVSHGQSDLFADHSWHAVATGMNVLPRDVDPVVATTDVKALQDLLARIDHALAHSVGQLMPHGEYLKAW

SEQ ID NO: 89953 - protein, 533 aa, Streptomyces collinus
  misc_feature (1)..(533): tr|S5V8T9|S5V8T9_STRC3 Tryptophan halogenase OS=Strepto myces collinus (strain DSM 40733 / Tu 365) OX=1214242 G N=B446_23735 PE=4 SV=1
MTDNDSRIRKVVILGGGTAGWMTAAYLGKALQGTVDIQVLEAPAIPRIGVGEATVPNLHRVLFDYLGIPEEEWMRECNASFKMAVRFVNWRTPGRGEAGARTLEDGRPDHFYHPFGILPDHDNTPLSHYWFKNKYEGSTDQPFDYAVFREPPVMDAKLSPKWLDGTPSTRYAWHFDAALVADFLRRFAVEKQGVEHVQDEMVRVEQDERGHVTALHCKSGRVMDADLFVDCSGFRGLLINQALGEPFLDMSDHLMCDRAVATAVPHDDEANGVEPYTSAIAMSSGWSWKIPMLGRFGSGYVYSSKFTTQEEATAEFCEMWGLDPNETQFNHVRFRVGRNRRAWVNNVVSIGLASCFLEPLESTGIYFITAAIYQLAKHFPDRSFNPALVDSFNHEIEEMFDDTRDFIQAHFYYAPRNDSPFWRAQKELVLPENIQKKIEAYKAGLPINSPIADESTYYGNFEAEFRNFWTNGSYYCIFAGLGLEPDAPLPALAHKPESVAGAQPLFEQVRQQQEHLLQTLPSAHDYLRRLHGK

SEQ ID NO: 89954 - protein, 506 aa, Sphingomonas sp.
  misc_feature (1)..(506): tr|A0A430E5L9|A0A430E5L9_9SPHN Tryptophan 7-halogenase OS=Sphingomonas sp. ABOLH OX=1985881 GN=CA237_11540 PE= 4 SV=1
MAIDQEPVRTVAIIGGGSAGWMAAAALARFLPAGTVITLVESDAIGTVGVGEATIPQLRLFNQHLGIDEDDFVARTGGSFKLGIEFAGWNGADSRYLHAFGTIGRAVGLVPFHYYWLAAGGGDRPQSLWSHSACAVAAAANRFDRDPGNPQAPSGIAWAYHFDAARYAAYLRERAERAGVVRVEGRVVDVSQDGETGLIAGVTLYDGRRVEADFFIDCSGFAALLIGRMAGDRWDDWSALLPCDRALAVPCASVEPITPYTRATARTVGWQWRIPLQERTGNGLVYSSAHLSDDEAATTLLDNLDRAALGDPRPLRFTTGRRQAPWIGNCVALGLAAGFMEPLESTSIHLVQSGIARLLSLWPSAKPRTADIAEFNRQSAREWLSIRDFLIAHYALNGRDEPFWQERRATPLPDSLIERIALFEQSGRIVRDEHELFAEVAWLQLLVGQGVVAKGYHPLADALPAARRDQFLDISAQHVAATVARMPTHDQFLRAHCPAPDAKVAA

SEQ ID NO: 89955 - protein, 492 aa, Simiduia agarivorans
  misc_feature (1)..(492): tr|K4KIY7|K4KIY7_SIMAS Tryptophan halogenase OS=Simidui a agarivorans (strain DSM 21679 / JCM 13881 / BCRC 1759 7 / SA1) OX=1117647 GN=M5M_09655 PE=4 SV=1
MKHIAIVGGGTAGWMAAVLFAHIWRDFSVTLVEAPDIPTVGVGEGSTPALKKYFDFLGIAESEWMAATGATYKTGIRFAGWSGRADYPDYFHAFDSALDLHTEPAFLYNCDMRRLGIAVQAHPDDYFINARLAAENRVPVPDRQFPFATGYGYHFDAGRLAGYLSQQAAARGVLHSRARVTGVPVDASGIARLQLDSGETLVADLYVDCTGFSAHLLQGALAEPFVSYEDQLLNDRAVVIGLAPESPAPVYTRAEAADCGWIWKIPLAHRTGYGYVYSSRFCSPAQAEQSLRRHLGVTDAVPARHLTMRVGRRARHWVKNCLALGLSQGFIEPLEATALNLVQTTIEQFADSWELSDFTDTQRQAFNQRVNDHFDGVRDYIVAHYLASARRDTPYWQAATAVPASDPLAPLLQAWHQAGDLRLLLKQPQYDRFYAPMSWYSLLSGYGCFLPGDQLRPGSDKANRFPVQTIRQFLSACATHYPGVGSDSTIHQ

SEQ ID NO: 89956 - protein, 494 aa, Stakelama pacifica
  misc_feature (1)..(494): tr|A0A4R6FYL0|A0A4R6FYL0_9SPHN Tryptophan halogenase OS =Stakelama pacifica OX=517720 GN=EV664_101505 PE=4 SV=1
MVEQRVKRVVIAGGGTAGWCAAAALSRQLGALIEVVLVESDAIGTVGVGEATIPTIRTFHQLLGIDEREFLRATSATFKLGIAFENWGQVGDRYIHSFGEVGHGTWMGGFQHFWLQAREAGFAEPIGAYSLEHEAAEARRFATGDQSAISYAYHLDATGYARFLRAIAESSGAVRKEGRIARVERDGQSGDLTALVLESGERVAGDLFVDCTGFRALLIEEALETGFDDWSHWLPTDRALAVQTEATGPAVPYTRAIAHEAGWRWRIPLQHRIGNGLVYSSAHLSDDAAHDALIAGIEGDRRTDPRLIRYRTGQRRKAWNANCIALGLSSGFVEPLESTSIHLIMIGVTRLMQLFPFGGVSDALRDRYNDLAEREIEGVRDFIILHYHLTQRGDSEFWKSRRTMAIPDSLARRIALFRESAQAFQASDELFRVDSWLQVMLGQGLEPQGYHHMGKIMPPDRLKAALESMRSNIADAVGAMPTHQAFLDRYCNGR

SEQ ID NO: 89957 - protein, 497 aa, Alteromonadaceae bacterium
  misc_feature (1)..(497): tr|A0A2E6SNQ7|A0A2E6SNQ7_9ALTE Tryptophan halogenase OS =Alteromonadaceae bacterium OX=1916082 GN=CL590_08390 P E=4 SV=1
  misc_feature (4)..(4): Xaa can be any naturally occurring amino acid
  misc_feature (40)..(40): Xaa can be any naturally occurring amino acid
  misc_feature (56)..(56): Xaa can be any naturally occurring amino acid
  misc_feature (111)..(112): Xaa can be any naturally occurring amino acid
  misc_feature (137)..(137): Xaa can be any naturally occurring amino acid
  misc_feature (259)..(260): Xaa can be any naturally occurring amino acid
  misc_feature (264)..(264): Xaa can be any naturally occurring amino acid
  misc_feature (283)..(283): Xaa can be any naturally occurring amino acid
  misc_feature (337)..(337): Xaa can be any naturally occurring amino acid
  misc_feature (354)..(354): Xaa can be any naturally occurring amino acid
  misc_feature (361)..(361): Xaa can be any naturally occurring amino acid
MTQXKTRVVIAGGGTAGWLSAFSLVTRLGALLDITLVESXQIGTVGVGEATIPTMXNFHRLMGLDEREFMAATQATFKLGIQFDNWGNQGDSYVHSFGEIGQRSWMAEFHXXWMEAVANGQQDTLEDYCLELKAAKXNKFALKVGNRPLNFAYHLDATAYAAYLRNKAEQAGVTRIEGKITTVNKHPDSGNLRELVLDNDARIEGDVFIDCTGFRALLIGEALGVGYDDWSHLLAADRAIAVQTTAVEPPRPYTIATAXXAGWXWRIPLQSRVGNGIVYSSRXSDDETALATLMSNVTGEAVTEPRYLKFKTGMRQQAWAKNCVAIGLSSGFLEPLXSTSIHLVTTALIRLMKXFPFEGEXGLLAERYNRETQKEMETIRDFIVLHYHLTQRDDSAFWDFYRNMEIPESLQHRMAMFAEHGYVWPDDVALFRVDSWVQVMMGQGLMPKRHHGASRMLPTASLTQQLTAFKQSVNNALAQLPEHEAFIKQYCPADKSA

SEQ ID NO: 89958 - protein, 490 aa, Alteromonadaceae bacterium
  misc_feature (1)..(490): tr|A0A3R8BVI5|A0A3R8BVI5_9ALTE Tryptophan 7-halogenase OS=Alteromonadaceae bacterium TMED7 OX=1986650 GN=CBB67 _010280 PE=4 SV=1
MSTKPLHVVIAGGGTAGWMTANLLAKRWLNQPVTITLVESPDIGIIGVGEGSTPTLKRFFSDMGIAEQDWMPACNATYKVSIRFEGWSPGANVPAYSHPFISQLDTFSERAFYVNCFHRRMGQDVITRPDDFLFNGWLARHQRSPLTPSNFPFRIEYGYHFDSGLVGEFLKCHAQGLGVVHKALNITDVECHPNGEIAALHSKEGERIEGDFFIDCTGFRSLLLQKTLGVNFKSFKDNLFNDSAVVCPTPAQTTLPVETRATALSAGWAWQIPLTNRTGNGYVYSSDFISDEQAASELCRHLGVDEESAALRKLTMNVGQVERHWANNCLAVGLSQGFIEPLEATALHLVQTSVEIFLDHVDEGGFSDTQCNAYNQLITERFERVRDYIVAHYRLNTRSDSEYWLANQHNENLSDSLLHLFNVWYRRGDLGQEIQRQQLDSHFGNTSWHCLLAGYGAFPPLEKGATTTDLYKQNQLAAFFEGCLLNFKPQ

SEQ ID NO: 89959 - protein, 463 aa, Alteromonadaceae bacterium
  misc_feature (1)..(463): tr|A0A2A5HTW2|A0A2A5HTW2_9ALTE Tryptophan halogenase (F ragment) OS=Alteromonadaceae bacterium OX=1916082 GN=CO A42_10120 PE=4 SV=1
MQERKIQKVVIAGGGTSGWIAAAALSKLIGKNLEICLIESDEIGRIGVGEATIPTLRTFHKLLGIDEQDLMRSVQATFKLGIEFINWGEKEDNYFHSFGMNGKDCWACDFQHFWLSGKKRNMAGEFSEYNVEQQVAKARKIAVSEKSNLQYAYHLDAGLYAEYLKKFSFKHGVKYIEGKIKHVHIAPDTGYIESLELENTEKITGDLFLDCTGFGARLIEGALNTRYEPYGEFLPCDSALAIQTEKVPDPRPYTQAIAHDYGWQWRIPLQHRVGNGLVYSGRYASDEQATDLLMSQLESPAVTDLRSFKYNTGRRLKAWNKNCIAVGLSAGFLEPVESTSIHLAMSSVLRLLRLFPGSEGINDANVNEFNQQAKEEMEVVRDFIVLHYHATERADSPFWRYCKDMKVPDTLAHRMELFKRSGSVPLNPSELFKIDSWTQVLFGQRIMPTDHHPIVDEMRDEEL

SEQ ID NO: 89960 - protein, 499 aa, Simiduia agarivorans
  misc_feature (1)..(499): tr|K4KWI6|K4KWI6_SIMAS Tryptophan halogenase OS=Simidui a agarivorans (strain DSM 21679 / JCM 13881 / BCRC 1759 7 / SA1) OX=1117647 GN=M5M_05410 PE=4 SV=1
MQQPLNRLIILGGGTAGWMAAAAMSHQLRGTQVRIQLVESSAVGTVGVGEATLPGLRNFNASLGIDERAFIRATNATFKLGIRFEGWAGQSSDIFHPFSDYGAPIAGTPFHQWFYRARALGLDVGALHEYSFSAMLAGQQRFAQPHAEPGNPLADYKYAFHFDATAYAAFLRHYAEARGVERVDDRLTSVVKDPANGHIQALKLESGLELAGDFFIDCSGFRSLLLGEALSVPFEDWSHWLPVDGAYAVAAEPAPVLRPYTRAIARDGGWQWQIPLQHRTGNGSVFASRFIDESRVVEDLMAGLEGAATGSPNRIRFVTGRRQKFWEKNCVALGLASGFLEPLESTSIALIQTGLSRLLMFLPLAGIDAAEVEEANRTARIEMERIRDFLILHYCRNGRQGDLWEYCRNMPLPDSLAQKIALFESRGHLQQRELESFEPASWLTFYEGFGVAPCQPDPAVLNASPDDIARALASMRSQIASAANQPLSHAAFIARHCAA

SEQ ID NO: 89961 - protein, 495 aa, Pseudoalteromonas fuliginea
  misc_feature (1)..(495): tr|A0A5B0V4X7|A0A5B0V4X7_9GAMM Tryptophan 7-halogenase OS=Pseudoalteromonas fuliginea OX=1872678 GN=EU509_0094 5 PE=4 SV=1
MTKTNAVKNVVIAGGGTAGWMAAAALAKLVGNNINITLVESDDIGTVGVGEATIPPIRTFHKLLGINEQAFMKATQASFKLGISFENWGDENTHYIHSFGATGKECWAGEFHHFWLQGKTLGINNPFGDYCYELQAAKGGKFAFNQQNPINYAYHMDATRYAQFLREFSEPLGVKRIEGKIQKVVKNTKTGHIESLTLNNGEHINGDFFIDCTGFRGLLIEQALHTGYEDWSHLLPCNSAIAVQTKSTSETVLPLTRSIAHKSGWQWRIPLQNRVGNGLVYCSQYMDDEQAKALLLNNIEGEALTEPRIIKFKTGRRLKGWNKNCLALGLASGFVEPLESTSIHLIMSGIIRFMRLFPFNGITNHAIDEYNKQLKSEIENIRDFIVLHYKVTNRDDSEFWQHCNAMGVPKTLQHKIDLFKQTGRVFLDDGDIFRVDSWVQVMLGQGIEPNQHHLIASMMSDEELTRFLHGIKQQIEQRVSQLPPHHEFLKQYCPA

SEQ ID NO: 89962 - protein, 512 aa, Pseudomonas chlororaphis
  misc_feature (1)..(512): tr|F1JTQ1|F1JTQ1_9PSED Tryptophan halogenase (Fragment) OS=Pseudomonas chlororaphis OX=587753 GN=prnA PE=4 SV= 1
PIKNIVIVGGGTAGWMAASYLVRALQQQVNITLIESAAIPRIGVGEATIPSLQKVFFDFLGIPEREWMPQVNGAFKAAIKFVNWRKSPDHSRDDHFYHLFGNVPNCDGVPLTHYWLRKREQGFRQPMEYACYPQPGALDGKLAPCLADGTRQMSHAWHFDAHLVADFLKRWAVERGVNRVVDEVVEVRLNDRGYISTLLTKEGRTLEGDLFIDCSGMRGLLINQALKEPFIDMSDYLLCDSAVASAVPNDDAREGVEPYTSAIAMNSGWTWKIPMLGRFGSGYVFSSKFTSRDQATADFLNLWGLSDNQPLNQIKFRVGRNKRAWVNNCVSIGLSSCFLEPLESTGIYFIYAALYQLVKHFPDTSFDPRLSDAFNAEIVHMFDDCRDFVQAHYFTASREDTPFWLANRHELRLSDAIKEKVQRYKAGLPLTTTSFDDSTYYETFDYEFKNFWLNGNYYCIFAGLGMLPDRSLPLLQHRPESIEKAEAMFASIQREAERLRTSLPTNYDYLRS

SEQ ID NO: 89963 - protein, 516 aa, Pseudoalteromonas fuliginea
  misc_feature (1)..(516): tr|A0A5B0UV06|A0A5B0UV06_9GAMM Tryptophan 7-halogenase OS=Pseudoalteromonas fuliginea OX=1872678 GN=EU509_0095 0 PE=4 SV=1
MTKPITKIVVLGGGTAGWLSAGLLAAEHPHLNVTLVESANVPILGVGEGTWPSMRNTLQRIGIKESDFITQCDASFKQGSKFINWRNLNEGENYYHPFMNPQGYEHTNLHASWQRIAPNQKFADVVNMQSFVCQAALAPKQLQTPEYAAVTNYGYHLDAGKFAEFLKNHCVKNLNVTHIIDDVTEVINDEHGYIASLKTNNNGDITGDLFIDCSGSCARLIGEHFNSEFIAQDHILFNNSAVAAQIPNAHINQPIASATLSTAQSNGWIWDIALPTRRGTGYVFSSKYQSDESATNTLKSYIAKSTSEQQAEQLTYRVLKFSPGYRQKFWIKNCVAVGMSAGFLEPLEASALAMVELSISMISEQLPQTRTHMSQLETRFNDRFSTRWQRVIEFLKLHYVLSERDDTPYWQNISNLNTAPERLQNLLKLWQFQPPSRFDFIENEEVFSSSSYQYVLYGMGFNTQTVSAQNTFNDPRAGDYYYQQNREEIAQCLNGLPSNRALLNHLLSNNGQPHND

SEQ ID NO: 89964 - protein, 383 aa, Streptomyces albogriseolus
  misc_feature (1)..(383): tr|M1M1P4|M1M1P4_STRAO Aminotransferase OS=Streptomyces albogriseolus OX=1887 GN=thdN PE=3 SV=1
MTARQVTQPSFRTSELDRFSAYRATEGTEATEATQGTEATQGTEATEATEPGRAEDILDLSNNELMLPPLPAVVDSLRRSSLQVNLYPDPTARVLKTTLARHFGAETEETVVGPGSGGVLQQLLLVLAGRGDEVLHAWPGFDAYPLLIAVSGAKGVPVPLTTTGEHDLAGLLERVNPRTRAVILCSPHNPTGRRIPTGDLLGFLDSLPSHVVAILDQAYMEFDEEEDPHDLGLIREYPNVVLLRTFSKAYGLAGLRVGYAFASSEIAVRARKTVIPFSVTRSGERAAVISLAQESDLAERLATVRRMRADLRSDLGAQGLVPLPSSANFVWLPLGPDSDRFAAAALRAGVRVRSYSGDGVRISVGTEEAHRRVLIAAKDFLSV

SEQ ID NO: 89965 - protein, 500 aa, Rhodanobacter sp.
  misc_feature (1)..(500): tr|A0A522NB55|A0A522NB55_9GAMM Tryptophan 7-halogenase OS=Rhodanobacter sp. OX=1883446 GN=EPN49_05630 PE=4 SV= 1
MTDRRIRRIVIVGGGTAGWMTAAALANALQGNCRIELVESQEIGSIGVGEATIPPIKLFNHSLGIDENAFLAATQGTFKLGIEFVDWTRGGQRYFHPFGQFGTEFDAVPLHHYWLRERERGDDTPLQDYALAWVAARAGKFDLPVADRRQVLSSLDYAYHFDASLYAHFLRNYAEQRGVRRTEGKVVDVALRGDDGLIQSVTLDGGTAIEGDLFIDCSGFRGLLIEGALKAGYDDWTHWLPCDRAVAVACTHRKEVTPYTRSTAHAAGWQWRIPLQHRMGNGHVYCSRFISDDEAAATLLDNLEGEPLGSPRQLRFTAGMRRQSWSRNCVAIGLSAGFMEPLESTSIHLIQTAINRLLALFPDRDFDPVGAQEYNRLTHTEYERIRDFLILHYHAVQRDEPLWRQTAAMSIPDTLQYKIEHFRRYGRLVAESMELFQNSNWLAVLVGQEVWPQRYHPLADMRSQVDAAGRLRGLRQVIDQAVQAMPTHRQYIDRHCRAPS

SEQ ID NO: 89966 - protein, 151 aa, Actinobacteria bacterium
  misc_feature (1)..(151): tr|A0A537X7C2|A0A537X7C2_9ACTN Tryptophan 7-halogenase (Fragment) OS=Actinobacteria bacterium OX=1883427 GN=E6 G66_18350 PE=4 SV=1
MDGTWDVVVVGGGPAGATVSGLLARSGHRVLVLEREKFPRYHIGESLVPGVLPVLKELGLEERIREFGFVKKYGITLGWGKQPEPWSVYFGEGGPIEHAFQVVRSEFDYILLQNARRLGAMVVEEAEVVDFNFEDGRCSGVEYRVGGRTQS

SEQ ID NO: 89967 - protein, 514 aa, Rhodanobacter sp.
  misc_feature (1)..(514): tr|A0A522ST17|A0A522ST17_9GAMM Tryptophan 7-halogenase OS=Rhodanobacter sp. OX=1883446 GN=EPN35_09335 PE=4 SV= 1
MNDPRIRRLVIVGGGTAGWLAAALLAQALGPQVQIRLVESAEIGTVGVGEATIPQIRHINRFLDIDEDAMLRFAHGTYKLGVQLNGFTRLGDSYLHAFGDLGLPLGLTPFHHYWLRAVQERGGTDTPDLWAYSLNAAAAAENRFAPLEKIPDSPLGGTRYAYHFDASRYAQYLRERIAPGAVQRTEGKVVDVRLREGDGFIESLQLDSGELVEGDFFIDCSGFRGLLIEGALNTGYENWQQWLPCDRALAVGSAPGGPMRPYTQASARTAGWQWRIPLRHRTGNGHVYCSRFISDDEAAAQLLANLETEPLGDPRPLRFVTGMRKLAWNRNCLALGLAAGFMEPLESTSIHLVQSGVSRLLAMFPDRRCDSALVDEYNRQTRFEYEHVRDFLILHYKATERTDTPFWQQCGAMEIPPSLARRIELFRRTGMVFREGEELFAETGWVQVLLGQRIVPQRHHPLADALTDAQLDGFLADIRTLIGRAKNTLPLHHEFVARAGCATDVAQRTAVAAP

SEQ ID NO: 89968 - protein, 441 aa, Rhodanobacter sp.
  misc_feature (1)..(441): tr|A0A522KBB1|A0A522KBB1_9GAMM Tryptophan 7-halogenase (Fragment) OS=Rhodanobacter sp. OX=1883446 GN=EPN68_083 20 PE=4 SV=1
AFLGIDEDDMLRATHGTFKLGVQLNNFGRLGDSYLHAFSDIGLPLGLIGFHHYWLRKRASDPANDLWSYSLNTQTANEHRFGRMDKVGSSPLGGIKYAYHFDAGLYGQYLRQRCDPQVVQRIEGKVVDVQLREVDGFIESVRLESGERIAGDLFIDCSGFRGLLIEGALHTGYESWQHWLPCDRAMAVASARTEPLWPYTRATARTAGWQWRVPLQHRTGNGLVYASQHLSDDEASAMLLANLDGEALGTPRPLRFTTGMRRKAWQRNCVALGLAAGFMEPLESTSIHLIQSGISRLLAMFPDRHCDPVLVDEYNRQTRFEYESIRDFLILHYKATERDDTPFWRQCASMDIPPTLARKIELFRGHGQIFREHEELFTEVAWLQAMIGQHIEPQAYHPLADALDETQLDAFLGDIRTLVGRAAGSLPDHARFVADHCLTRT

SEQ ID NO: 89969 - protein, 497 aa, Massilia sp.
  misc_feature (1)..(497): tr|A0A519PDU9|A0A519PDU9_9BURK Tryptophan 7-halogenase OS=Massilia sp. OX=1882437 GN=EOO64_04320 PE=4 SV=1
MHERIAKVVVVGGGTAGWMSAALIRRVLGTQVAVEVVESETIGTVGVGEATIPPIHHLNAVLGISESEFLRETNGSIKLAIRFEGWRVPGESYFHTFGVPGRNHAFCDFQHFWTRGLRLGQTRSLWDYDLNYLACKTGQFGRPRTQDPFLDVPYAYHFDSGLYGQYLRRICVANGVQRTEGLIEQVLLAPESGHVRTLTLQDGREVHGDLFVDCSGMRGLLIQQKLGVPYEDWSHWLPCDRALAVPSERLPHTLPYTRSIAHRAGWQWQIPLQHRIGNGLVYSSRHISDDEATATLMASLPAPALAEPKLIRFRTGRVRDIWAKNVCAIGLSGGFLEPLESTSMYLIQSAIVPLLKLFPHQGITPALVDEYNAQSTLEYETIRDFIILHYHVNERPDTGFWQDVRHMAVPQRLRDKIALFRATGRLFQDPHDIFKDASWLQVLVGQGVMPADHHPIAEAFAPDELARTLAEMAAAKAKGLEGFMSHDDYLAAATRAR

SEQ ID NO: 89970 - protein, 502 aa, Xanthomonas sp.
  misc_feature (1)..(502): tr|A0A0P7HFS4|A0A0P7HFS4_9XANT Tryptophan halogenase OS =Xanthomonas sp. Mitacek01 OX=1732019 GN=AO715_04350 PE =4 SV=1
MQNESDIAARPVKRVVIAGGGTAGWMAAAAISRTLGKVLDITLIESEEIGTVGVGEATIPTLMTFHRLLDIKEQDFMAATQGTIKLGISFEDWLDQGVDYIHSFGLTGTDHWTAGFQHFWMKGRERGLAGDYGDYCVELKAAEQQRFAHLPKRRLNYAYHMDASLYARFLRTFSEGNGAKRVEGKITEVKTDAASGFITSLVLANGDEIEGDFFIDCTGFRALLIEKTLGVGFTDWSHWLFNDSALATQTTAVRDAVPYTRAIADTAGWQWRIPLQHRVGNGIVYSSRYISDDEAKSRFLSSIEGKVIKDPWPVRFRPGQREQCWHKNCVALGLAGSFIEPLESTTIHLIQRGIIHLMQTFPRVVSQPDIDQYNARLSEEIQHTRDFVILHFHLNNRTDTQYWIDYREMTIPATLKHRIDLFRETGRVFHVPTELFAENSWIQVMMGQGIYPRTFHPSADLMGDAELSQFLGQISTDVERTVRQLPAHMDYMRSYAPGAPPA

SEQ ID NO: 89971 - protein, 331 aa, Sphingomonadaceae bacterium
  misc_feature (1)..(331): tr|A0A520YIN0|A0A520YIN0_9SPHN Tryptophan 7-halogenase (Fragment) OS=Sphingomonadaceae bacterium OX=1930536 GN =EX258_01470 PE=4 SV=1
MGIKKIIIVGGGTAGWMTAAALSRLTTSTPVSITLVESEAIGTVGVGEATIPPFVDFNRLLGLDESELLSAVQGTFKLGIHFVNWESRGASYFHPFGNYGYEIDGFDFHHLWIKQRMAGDDRPLHAFSPETMAAMNRKFAKTDANQREDLPPINYAYHLDAGAYAQYLRKFAEGRGVKRQEGRIADVHLHGESGFVRAVQLESGEELAGDLFVDCSGFRGLLIEQALESGYEEWTHWLPCDRAVALPSAGDGTVLPYTRATAHEAGWQWRVPLQKRNGNGHVYCSSFMEADEATDILLANVDGEVQADPNHLRFVTGRRKKFWNKNVVALG

SEQ ID NO: 89972 - protein, 538 aa, Pseudomonas chlororaphis
  misc_feature (1)..(538): tr|A0A1W5X9Y5|A0A1W5X9Y5_9PSED PrnA OS=Pseudomonas chlo roraphis OX=587753 GN=prnA PE=4 SV=1
MNKPLKNIVIVGGGTAGWMAASYLVRALQQQANITLIESAAIPRIGVGEATIPSLQKVFFDFLGIPEREWMPQVNGAFKAAIKFVNWRKSPDHSRDDHFYHLFGNVPNCDGVPLTHYWLRKREQGFRQPMEYACYPQPGALDGKLAPCLADGTRQMSHAWHFDAHLVADFLKRWAVERGVNRVVDEVVEVRLNDRGYISTLLTKEGRTLEADLFIDCSGMRGLLINQALKEPFIDMSDYLLCDSAVASAVPNDDAREGVEPYTSAIAMNSGWTWKIPMLGRFGSGYVFSSKFTSRDQATADFLNLWGLSDNQPLNQIKFRVGRNKRAWVNNCVSIGLSSCFLEPLESTGIYFIYAALYQLVKHFPDTSFDPRLSDAFNAEIVHMFDDCRDFVQAHYFTASREDTPFWLANRHELRLSDAIKEKVQRYKAGLPLTTTSFDDSTYYETFDYEFKNFWLNGNYYCIFAGLGMLPDRSLPLLQHRPESIEKAEAMFASIQREAERLRTSLPTNYDYLRSLRDGDAGLSRSQPGPTLAARDIL

SEQ ID NO: 89973 - protein, 506 aa, Acidimicrobiales bacterium
  misc_feature (1)..(506): tr|A0A520XPE4|A0A520XPE4_9ACTN Tryptophan 7-halogenase OS=Acidimicrobiales bacterium OX=2201156 GN=EX271_04735 PE=4 SV=1
MDKNQDQSSSRQVKKIVIVGGGSSGWMTACLLNARLNSDAKNPIKISLIEAPDIPVIGVGEATVPSIRRTLQAIGISEQDFMRGADATFKSLIRFENWNAGEHFDHPFDRRERPQTDAAALSWLAGSKGGGNSFSTKFSVLSNTSSRMLAPKAIGWPEYQSTFPYAYHLDAVKLGQLLTRFGTERGIEHILARIEKVEMTEAGDIAALISESGEQFTADLFIDCTGFSAHLAGQTMAETRDYSKHLLCDRAVTLSIPYDVYRPDHILPYTSANARSAGWLWDINLQSRRSLGYVHSSSHISAEAAETEMRRHEGPHTEGLEAKHIRFKTYKRIKSWHRNCIAIGLSDGFVEPLESTGLYMMQFAAQSVADILRLNPVFTPATTSQFNRLMQSLFDEIFGYVALHYLTSNRRDSIFWRDATDPSRVPDGLKFLMGEWKGRPPHDMDLLSTHRLFSLESYEYLLFGMGYVSDCAAQSQSAHFSLQETLDKCYAKLPLHENWLAKTLAQ

SEQ ID NO: 89974 - protein, 506 aa, Xanthomonas campestris; identical to SEQ ID NO: 89007
  misc_feature (1)..(506): tr|A0A556SE14|A0A556SE14_XANCG Tryptophan 7-halogenase OS=Xanthomonas campestris pv. glycines OX=473421 GN=C28 59_23565 PE=4 SV=1

SEQ ID NO: 89975 - protein, 502 aa, Rhodanobacteraceae bacterium
  misc_feature (1)..(502): tr|A0A522RMM2|A0A522RMM2_9GAMM Tryptophan 7-halogenase OS=Rhodanobacteraceae bacterium OX=2052182 GN=EPN36_161 30 PE=4 SV=1
MTDPAIGGIVVVGGGTAGWMAAAGLARILGPACSIRLVESEQIGTIGVGESTVPHLKLFNDLLGIDDVSFVRHTHGTFKLGTQFVDWARIGDCYMHGFGTIGHDISLLPFHQFWLKARRLGIADELGAYSLHTVAGPQGKFTPSVTNAPQNSPLADIAYAYHFDAGLYGRFLRDYAEKLGVLRTEGKVVAARRRGEDGFVEAVVLESGEHIEGDLFLDCSGFRGLLIEQTLHAGYEDWSHWLPCNRAVALSCETAGPPTPYVRCTARAAGWQWRIALQNRIGNGYVYSSGHLSDDEAMGTLLKHLDGRPIGEPRVLRFTAGRRRKPWDRNVVAIGLAAGFIEPLESTTIYMVQSAITRLTKLWPRRDCSDALRDRYNAETAFEIERIRDFIILHFCATERDDTPFWNDCRTMAIPELLAENIRLFRDSGRFYRNAEELFALPSWVEVMIGQRILPRSWHPVVDQLPDADLQKLMEGVRQVVATCVEAMPPHQAFIDRHCRAA

SEQ ID NO: 89976 - protein, 506 aa, Rhodanobacter sp.
  misc_feature (1)..(506): tr|A0A522SLW0|A0A522SLW0_9GAMM Tryptophan 7-halogenase OS=Rhodanobacter sp. OX=1883446 GN=EPN35_15255 PE=4 SV= 1
MTDPRIRNIVIVGGGTAGWMAAAAFAKVLDTGCSIRLVESEEIGTVGVGEGTVPHLKLFNNLLGIDDVEFVRNTQGTFKLGVQFNDWGRLGDSYVHGFGTIGHDVGLLPFHQYWIKARQAGKADEIGAYSLNTVAAPRGRFMPSASDAPPGSPLANVAYAYHFDAGRYARFLRGYAEQRGVRRTEGKVAQTVLRADDGFVEAIVLENGERIEGELFIDCSGFRGLLIEQALHTGYLDFSHWLPCDRALAVACEKVGPPTPYTRASARPAGWQWRIPLQHRTGNGYVYSSAHISDDEAAATLLGHLDGVPMGEPRLLRFTTGVRRQAWNRNVVALGLAGGFLEPLESTSIYMIQSGIARLLNLLPRRDFSPLLIERYNAQSRFEYEHIRDFLILHYHATERDDTPFWNQCRTMSIPPQLADNIRLFRDSGRFFRDGEEMFATPSWVQVMLGQRIAPQSYHPLVDQMPDAELAGFMASVSHVVASCVEVMPAHQAFIDRCCTAPAMVA

SEQ ID NO: 89977 - protein, 510 aa, Rhodanobacter sp.
  misc_feature (1)..(510): tr|A0A522GZL2|A0A522GZL2_9GAMM Tryptophan 7-halogenase OS=Rhodanobacter sp. OX=1883446 GN=EPN74_11570 PE=4 SV= 1
MTDRRIRRIVIVGGGTAGWMTAAALANALQGNCRIELVESEQIGSIGVGEATIPPIKYFNRTLGIDENAFLAATQGTFKLGIEFVDWTRGGQRYFHPFGQFGAEFDAVPLHHYWLRERERGDDTPLQDYALAWVAARAGKFDLPVADQRQVLSSHDYAYHFDASLYARFLRTYAEQRGVRRTEGKVVDVSLRGEDGFIESVTLDGGTVIEGDLFIDCSGFRGLLIDGALKTGYDDWTHWLPCDRAVAVACTHRRELTPHTRSTAHAAGWQWRIPLQHRMGNGHVYCSQFISDDEAAATLLGNLEGELLGSPRQLRFTAGRRKQSWNRNCVAIGLSAGFMEPLESTSIHLIQTAVTRLLALFPDRDFDPVAVQEYNRLTHTEYERIRDFLILHYHAVQREEPLWRQTATMSIPDTLRYKIEQFRRGGRLVAESMELFQNANWLAVLVGQEVWPERYHPLADMRSQVDATGRLQGMRQVIEEAVRSMPTHQQYIERHCRAQPDALPANGPRA

SEQ ID NO: 89978 - protein, 522 aa, Pseudoalteromonas sp.
  misc_feature (1)..(522): tr|A0A5B0TZH7|A0A5B0TZH7_9GAMM Tryptophan 7-halogenase OS=Pseudoalteromonas sp. FUC4 OX=2511201 GN=EU510_04590 PE=4 SV=1
MNDTLKSIVIVGGGTAGWLSAGIIAAYLQKHHSLNYKITLVESSDIATVGVGEGTWPTMRRTLQNMGVDEAQFINQCNVTFKQGAKFANWHSTKENDFYYHPLMMPQGFVDNALAAAWLTQNTDSAEPYNHFANFVCPQHALCEHNLAPKALTTAQYSGVANYAYHLDAGLFATFLKDHCINKLNVTHVIASVLSVNNNVHGDIHSLSLDNNTTICGDLFIDCSGFKSLLLGENLKVGFKSCKDILFADSALAVHMPYEDDTQAISSHTISTAQTAGWIWDIGLQTRRGVGHVYSSRHISEEEAKEQLFDYLNISPTKRADFNVKKISFEPGHREKFWHKNCVAIGLSAGFLEPLEASALLLVEISANFIAEQLPANRQVMDITAARFNRTFNYRWQRIIDFLKLHYMLSERTDSLFWQQHCAEQSIPQSLQDDLALWRTHIPNDNHFDYSVEVFPAASYQYVLYGMGFKTATTHYGNHPSAIKKAQNLATKNTKDTAELVNKLPDNRTLLKQIKQYGLQKI

SEQ ID NO: 89979 - protein, 497 aa, Kitasatospora sp.
  misc_feature (1)..(497): tr|A0A0U2JMC9|A0A0U2JMC9_9ACTN Tryptophan halogenase OS =Kitasatospora sp. 152608 OX=1769566 GN=smcD4 PE=4 SV=1
MTQVIVVGGGPAGSTAAALLARAGISVTLLERATFPRYHIGESFSTSCRVVLDYLGALEKVDARGYTSKTGLLVRWGQEKDWSIDWTAQFGPDVRSWQVDRDDFDTVLLDHASESGVQVVQGAHVHRVLFDGDRATGVEWTAPGETAKQISRADFVLDASGRAGLISAQHFNNRRPQEIFRNVAIWGYWEGGELLPGSPSGGINVISSDDGWYWVIPLRDNRFSVGFVTHKSLFVERRKEFDSIEDMLLKVVDESPAVREILAKGTFQPGTRVEQDFSYAADSFCGPGHFLLGDAACFLDPLLSTGVHLGMYSGLLAAASVVAITDGDVSEHEALAFYESLFRNAYQRLFTLVAGFYQKHAGKDRYFALAETLARQEPEHWHSSEQSFGEITAGLTDMREAADAAARGRKPIQEIIEKAATGEPSPVQQLLIAAAVAQARAQGDTEPGARLTAAPGVIDANDLYDAVSGLHLVMQPRLGIRSVASQKQGHDAAPVLP

SEQ ID NO: 89980 - protein, 572 aa, Rheinheimera sp.
  misc_feature (1)..(572): tr|A0A486XMT6|A0A486XMT6_9GAMM Tryptophan halogenase, p utative OS=Rheinheimera sp. BAL341 OX=1708203 GN=BAL341 _1050 PE=4 SV=1
MHRSVFLPEQTADGQGLRFAASPVFSCIDMVTNVIKQPPQHDQATPITQQTATAPIRTVVIVGGGNAGWLTAGRIAAKHKSNQPDGVNVILIESPTLPPIGVGEGTWPTMRSTLIALGISETDFIRQCDVTFKQGAKFAQWVDGSSSDFYYHPLVLPQGFGKAEMAGYWQQSTATANNTSRNTSSFSNALCYQEALCEHGLAPKTIRHAEFGAVANYAYHLDSGKFGPFLRQHCIEKLGVTHILDDVVAVQSSSNGDIAAVNTKQSGVIAGDLFVDCSGFSSLLLGKHYQVPFKACDDILFIDTALAVQVPYEHPDTPIASHTISTAQDAGWIWDIGLQHRRGVGYVYASKYCTEKQARATLARYVGPAIADLSVRKIPIVSGHRTRFWQNNCVAVGLAAGFLEPLEASALVLVELSAQMISEQLPANRALMDIVAKRFNETFLYRWDKIIDFLKLHYLLSQREEPFWRDNRNPATIPQSLQDLLQLWRYRAPGDLDFTSNNEVFPAASYQYVLYGMGFKTDYSQSHYLLDNPEFAAQQFAQNQKMIAQALSILPSNRELISKIREFGLSQL

SEQ ID NO: 89981 - protein, 502 aa, Alphaproteobacteria bacterium
  misc_feature (1)..(502): tr|A0A1V5FTR5|A0A1V5FTR5_9PROT Flavin-dependent tryptop han halogenase RebH OS=Alphaproteobacteria bacterium AD urb.BinA280 OX=1852793 GN=rebH PE=4 SV=1
MNLHPDAIRKVVIVGGGTSGWMTATALIEMLAGRVDVTLIESDEIGIVGVGEATIPPIRRFNAGMGIDEDEFLRATQGTFKLGIEFKDWTRIGHAYHHAFGSVGGRDLGMVQFYNYWLKLRTLGEVGPLDDYTFNAIAARQNKFMRSAKIENSPLANITHAFHFDASLYSQFLRKRAEAKGVRRIEGKIVDVQLCAEDGFIESVQLQNGPRIEGELFVDCSGFRGLLIERALHTGYVDWSHWLPANRALAVPCESVAPLTPYTRSTAHHVGWQWRIPLQHRIGNGLVYCSDYISDDEASALLLSKLDGKALADPRPIRFVTGMRRKFWQRNCVAIGLASGFLEPLESTSIHFIQTSISKLLAYFPDRRFNPVDIDAYNRQTQFEFERSRDFIILHYLATERTEPFWQDRRRIDVPDTLQQKIDLFRSAGRIIREQEELFTESSWLQVFAGQNVLPEQYHPIVDVMPLDDIRKMARSVAGVLDRSAQAMPAHASYIEKHCKAI

SEQ ID NO: 89982 - protein, 530 aa, Rhodanobacteraceae bacterium
  misc_feature (1)..(530): tr|A0A522S3P1|A0A522S3P1_9GAMM Tryptophan 7-halogenase OS=Rhodanobacteraceae bacterium OX=2052182 GN=EPN38_036 60 PE=4 SV=1
MQLTGVPPRNGDTAAIRRVVVVGGGTTGWLTAALLARALGPAHEIQLVESAQIGTIGVGEATIPQILHINTFLGLDEGDLLRHIHGTYKLGVQLNNWGRLGDSYLHGFGDVGLPLGLLPFHHYWLRSRAGGDTHSLWDYSLNGVAARQDRFARVDKVPGSPLGGIRYAYQFDAARYVGYLHERIPAGRVRRIEGKVVAVNLRGADGFIESLTLDNGQVITGDFFFDCSGFRGVLIEGALETGYENWQHWLPCDRALAVGSVRTKPMRPYTQATARSAGWQWRIALQHRTGNGHVYCSRFISDDEATAQLLAGLESERLEEPRPLRFVSGMRRLSWNRNCLALGLAAGFMEPLESTTIHLVQSGVARFLGMFPDRHCDPVLVDAYNRQTRFEYEHVRDFLVLHYKATERDDTPFWRHCGAMDVPESLARRVALFRRTGLIFREADELFTEVAWLQLLIGQRIEPAQYHPLADDLEAAKLAGFLSDIRTLVERAVAGLPTHDDFVARVCAAPATAPDARSTMSPGVLAGSAS

SEQ ID NO: 89983 - protein, 78 aa, Xanthomonas oryzae
  misc_feature (1)..(78): tr|A0A5C2EMH0|A0A5C2EMH0_9XANT Tryptophan halogenase OS =Xanthomonas oryzae pv. oryzicola OX=129394 GN=XOCgx_06 28 PE=4 SV=1
MQVMLGQGIVPQQHHPVADLMGDAELSRFLDTIRARVEAALVRLPAHADFLQRYCPAPPPPEPAARLPAPPVMATPAR

SEQ ID NO: 89984 - protein, 481 aa, Sphingomonadaceae bacterium
  misc_feature (1)..(481): tr|A0A520YCB7|A0A520YCB7_9SPHN Tryptophan 7-halogenase OS=Sphingomonadaceae bacterium OX=1930536 GN=EX258_0426 0 PE=4 SV=1
MAACLLQHHWPGTMIRLIEGSEIGIVGVGEGSTPQLKVFFDTIGVSEAEWMPAANATYKVGIQFEHWSQKPGYERYFHPFPTALDGHSAGQLFRAARLRRSGLDVQAHPDDFLFPGLLAERKLAPLNPENFPLEVSYGYHFDAHKVGEVLKGIATKRGVEWVDTRIASVEMTDDGEVAALIGEDGGRHEADFFIDASGFRALIAEQALGGAHVSFADNLFADSAVVLPTDVAQGGPECATRAIAMDAGWRWSIPLTNRTGNGYVYSSKYIEADAAETELRAALGVGKDVEARHLKMRCGRLDKSWNANCLAIGLAQGFLEPLEATALHIVLVTVEQFIKAVDTDGLGPEARGPFNDSIAARYEGIRDYIVAHYRCQLRRDTDYWRDNAAHENLSPSLKGIMTAWFTRQDLTLEVQRQDIARYYNAVSWHCLLGGYGNFPQKLEKPGEDVHLPDMYRIDDFLERCAMNFPSHNEALKAREAR

SEQ ID NO: 89985 - protein, 503 aa, Rhodanobacter sp.
  misc_feature (1)..(503): tr|A0A522GZK7|A0A522GZK7_9GAMM Tryptophan 7-halogenase OS=Rhodanobacter sp. OX=1883446 GN=EPN74_11560 PE=4 SV= 1
MPANPIQRVVIVGGGTAGWMTAALLSRAMGPQLDIRLIESDQIGIVGVGEATIPQIRHVNQFLGLDEDDVLKATQGTFKLGIQFNDWRRIGDSYLHAFGDIGLPLGLLGFHQYWLRKRQQDPAADLWAYSLNAQAAGANRFARMETVGSSPLTGIKHAYHLDAGLYSKYLSQHCDSRIVRRTEGKVVDVQLRADDGFIESLKLESGEIVDGDLFIDCSGFRGLLIEGALETGYEDWRQWLPCDRAIAVASERIEPMRPYTQASARPAGWQWRIPLQHRNGNGHVYCSQFMGDDEATALLLGNLEGDAIAEPRPLRFTTGMRRQFWNRNCVSLGLAAGFMEPLESTSIHLIQTGVSRLLTLFPDRHFDPGLSAEYNRQTRFEYERVRDFLILHYRATERDDSPFWRHCAHIDMPESLLRKLELFRSSGQVFREGEELFTEVAWLQVMLGQGIEPTRHHPLADALAPTQLDEFLGNIRTLIGRAVNTMPQHTRFVTEHCRATMPG

SEQ ID NO: 89986 - protein, 423 aa, Rhodanobacter sp.
  misc_feature (1)..(423): tr|A0A522MXM1|A0A522MXM1_9GAMM Tryptophan 7-halogenase (Fragment) OS=Rhodanobacter sp. OX=1883446 GN=EPN49_157 40 PE=4 SV=1
PGRQHYFHPFSVPSQRSGSLELLPYWLLGAAPEGVSFADAVTMQSPLVEHGRAPKRIGDPDYQGPLNHAFHFDAACFAAVLAEHGQSLGIIRHLATVERAELDEHGAIARIVTAELGALSADLYVDCTGLRGSLIGGAMQSPFRSRRDVLFADRAVALQVPYPRADTPIPSCTIATAQEAGWIWDIGLHQRRGIGYVYSSRHAGATRAEEVIRSYVGDAAAGLEALHIRFETGYRPEHWRKNCVAVGLAGGFVEPLESTGIALIELAAYMLTHQLPGDVDDMERTARHYNAMMVARYERIIDFIKMHYCLSQRRDSGFWIDNTDPASIPDTLQDRLALWRHRPPHRLDFVTDLEMFLPASWQYVLYGMEFHTDLEPMRSAYPHMDAARREFAMIRQAASRALDDLPEHRVLVEHMCRQPAQRK

SEQ ID NO: 89987 - protein, 97 aa, Rhodanobacter sp.
  misc_feature (1)..(97): tr|A0A522KA93|A0A522KA93_9GAMM Tryptophan 7-halogenase (Fragment) OS=Rhodanobacter sp. OX=1883446 GN=EPN68_088 25 PE=4 SV=1
DRLALWKHRPPHRLDFVGDLEMFLVSSWQYVLYGMEFKTDLEPMRSVYTRVDDARREFAMIQQMAGHALGDLPGHRELVEQMVREYRQRNEAAEAVA

SEQ ID NO: 89988 - protein, 468 aa, Rhodanobacter sp.
  misc_feature (1)..(468): tr|A0A522KHJ4|A0A522KHJ4_9GAMM Tryptophan 7-halogenase (Fragment) OS=Rhodanobacter sp. OX=1883446 GN=EPN68_060 50 PE=4 SV=1
MARLQKILVVGGGTAGWLTACYLAKSLNSVAPGSIKVELVESPRIGLLGVGEATFPSIRGTLSAIGLDERRFLAGSTGTFKQGIRYRHWVRPQGAPGASDFFHPFSMPSQRTGGPELLPYWLLGAAPAGVPFADAVSMQKRLVDGNRAPKRAKDADFHGPMNYAYHFDAARVAEVLAEHGQTELGVVRHLATVERAELDAQGAIARIVTREAGELSADLYVDCTGLRGYLIDGAMKSPFRSRRDVLFVDRAVAMQVPYPQPDSPIPCYTMATAQEAGWIWDIGLQQRRGCGYVYSSQHSDATRAEAVFRQYLGAAAEGVTAQHIRFETGYRPEHWRKNCVAVGLAGGFVEPLESTGIALVELGAYLLTHLLPGDVDDMERTARHYNEMVVARYDRIIDFIKMHYCLSQRRDTAFWLDNANPDSIPDTLKDRLALWKHRPPHRLDFVGDLEMFLVSSWQYVLYGMEFKT

SEQ ID NO: 89989 - protein, 505 aa, Rhodanobacter sp.
  misc_feature (1)..(505): tr|A0A522GX69|A0A522GX69_9GAMM Tryptophan 7-halogenase OS=Rhodanobacter sp. OX=1883446 GN=EPN74_13755 PE=4 SV= 1
MTDPRIRNIVIVGGGTAGWMAAAAFAKVLGPAYSIRLIESEEIGTVGVGEATVPHLKLFNNLLEIDEIEFIKHVQGTFKLGIQFNDWGRLGDSYIHGFGTIGHDVSLLPFHQFWIKARQQGFAADIGAYSLNTMAAPRGKFMPSATDVPESSPLANIAYAYHFDAGLYAKYLRGYAERRGVRRTEGKIAQTLLKPDDGFVEAVVLENGERVDGELFIDCSGFRGLLIEQALHTGYNDFTHWLPCDRAMVVPSEIVGPPTPYTRSSAQAAGWQWRIPLQNRIGNGHVYSSAYLSDDEAATTLLENLDGPALDDPRVLRFTTGMRKKFWNKNVVALGLASGFLEPLESTSIYMIQSGIARLLNLFPQRDFSEVVIDRYNAQARFEYERIRDFLILHYHATGRNDTEFWNQCRTMSIPAQLQDNVRLFRDSGRFFRDAEEMFALVSWVQVMIGQGIAPHSYHPIVDQMPEQDLRQFIDGVGKVVASCVESMPPHAAFIERYCTARAGS

SEQ ID NO: 89990 - protein, 522 aa, Massilia sp.
  misc_feature (1)..(522): tr|A0A519PG08|A0A519PG08_9BURK Tryptophan 7-halogenase OS=Massilia sp. OX=1882437 GN=EOO64_02110 PE=4 SV=1
MSACMDRRRQWLIVPMSDVDAALQSNEATGGRMRQKFDHIVVVGGGSAGWMTAAALATGLKGRATVEVVESEDIGIVGVGEATFPSIRNYNQLIGIDERDFLRATNGTYKLGIRFCDWLTPGHDYFHTFGHFGDLCGSQTLWAQHRSAGSTEPLGTQCLPTVMAMQGRFVLPSEQAQFNYAYHFDAVQYAAFLRKLALQRGARHTQGRIAEVSRRMDGGVAALHLEDGRRIDGDVFVDCSGFRSLLLGQTLQEPFVDFSHWLPVDGAWACPTERVGEELAPYTQATALEGGWAWRIPLQNRTGHGHVFASRFIDADRARAQLLARLDGKPLVEPRLLRFTTGHRERFWVHNVVAIGLSSGFLEPLESTSIYLIQDGIARLMTLLTAGRALDENDRALFNDGAVRRFTRIRDFIILHYCLTRRRDSGLWRHVATMELPETLAFRMELWRRYGVLHEYDDEGFDATSWLAIYAGMDHWPERTDPVFAEIAPERALQALQGRREAISASVDRMPMHHRMLSQRLG

SEQ ID NO: 89991 - protein, 507 aa, Rhodanobacter sp.
  misc_feature (1)..(507): tr|A0A522NGI2|A0A522NGI2_9GAMM Tryptophan 7-halogenase OS=Rhodanobacter sp. OX=1883446 GN=EPN49_01300 PE=4 SV= 1
MTDQRIRNIVIVGGGSAGWMTAAALAKTLGRECSIRLVESEEIGIIRVGEATVPHLSVFNKVLGIDEADFVRQTMGTFKLGVQFVDWQKPGKSYVHGFGTMIGLDVGMLPFHHYWLRARQAGQAGDIGDYSLNTLAAPRGKFMVSAIDAPANTPLANIAYAYHFDTGLYGRYLRRQAESMGVQRTEGKVCDTVLRPHDGFVDAIVMESGEVIQADLFIDCSGLRGLLIEQALHTGYEDWGHWLPTDRAVTVGCEAVGPPTPYTRATAQAAGWQWRIALQHRVGNGHVYAGRYLSDDEAAATLLHNLDGRATGDPRLIRFRAGTRKQAWNRNVVAIGLSSGFLEPLESTGIFLIQSAVMRLLNLFPQKDFSQALIDRYNAQSRFEIERIRDFLILHFHATERDDTPFWRYCRTMDIPDSLRSVMALFRESGQFIRNADELFGLVSWVQVMLGQGVIPQHYHPIADQMPEPELRHLMDHVKQVIGACVDAMPPHQAFIDRYCAAPALAS

SEQ ID NO: 89992 - protein, 504 aa, Xanthomonas sp.
  misc_feature (1)..(504): tr|A0A0P7GGD7|A0A0P7GGD7_9XANT Tryptophan halogenase OS =Xanthomonas sp. Mitacek01 OX=1732019 GN=AO715_15845 PE =4 SV=1
MDHLQRIVIVGGGTAGWMTAAALSRVLGPAYDIALVESEQIGTVGVGEATVPHIKAFNQLLRIDEADFVRSTQGSFKLGIEFVDWLDVGERYIHGFGTEIGHPLGLLPFHQYWLKARAQGRAGPLGDYTLNTLAAQRGRFMVSATDVPAGSPLSNIAYAYHFDAGLYARYLRRYAEQRGVRRHEGMIDHVAQHPESGFVSAVRLQDGTVLEGDLFVDCSGFRGLLIEQTLQTGYHDFTQWLPCDRALAVPTANVGPPAPFTRATARPAGWQWRIPLQHRTGNGYVYSSAHVSDDEAAATLLANLEGEALGDPRPLRFVTGRRKQCWNRNVVAIGLSSGFLEPLESTSIHLIQSGISKLLELLPREGFNPVLAERYNAQLAFEFDRIRDFIVLHYNATRRDDTPFWRHCRTMEVPAELCTAVDLFRDSGRFFRNASEMFDTISWVQVMIGQGIVPQGWHPLVDNLPDEEIARFVDSVGRTLNACVDAMPPHQAFIDRHCKASPPT

SEQ ID NO: 89993 - protein, 494 aa, Rheinheimera sp.
  misc_feature (1)..(494): tr|A0A486XV79|A0A486XV79_9GAMM Tryptophan halogenase OS =Rheinheimera sp. BAL341 OX=1708203 GN=BAL341_2897 PE=4 SV=1
MQTVRDVVVLGGGTSGWIAAALLKKVLGNVVNVQLVESEDIGTVGVGEATIPPIRLLNNVLGINEAEFLRETKATIKLAIKFENWRVPGEGYFHTFGAPGKSLAFCHFHHLWRRAQMLGDTTSLWQYDLNYLCAEAGKFAPINSKDPVLELPYAYHFDAGLYARFLRKFSEQMGVVRHEGKVSSVTQHNNGDIQHLVLEDGRVLAGDLFIDCSGFRGLLIQQKLNTGYEDWSHWLPCDRAIAVPSERFEHTLPYTRSIAHSSGWQWRIPLQHRNGNGLVYSSAHYTEQQAADILLSNLDSKALADPKVIQFKTGRRRKQWHRNVVSVGLASGFLEPLESTSIHLIQSAVVRLLQLFPHQGITDALVNEYNRQSQIEFEQIRDFIILHYHVNERTDSLFWRDVRQMEIPATLARKIQLFAENGSLFREQNDLFLESSWLQVMLGQGIVPKDYHPLANSFAEPQLKQMLQTMLAIKRDPLAKLPSHDEYLRRVCAG

SEQ ID NO: 89994 - protein, 495 aa, Rheinheimera sp.
  misc_feature (1)..(495): tr|A0A486XVS6|A0A486XVS6_9GAMM Tryptophan halogenase OS =Rheinheimera sp. BAL341 OX=1708203 GN=BAL341_2898 PE=4 SV=1
MHNILIVGGGTAGWMTALLMAHSWRNKPVKIALVESSDIGIIGVGEGSTPSMKRFFATLGITDNEWMPACEATYKVNIRFDGWSPATGVNSYCHPFISQLDRHSEAAFIENCLKRRQGLAVVTAPEQFLFNGYLAERYLQPLASDNFPFRIEYGYHFDSILLGRYLRDHAISLGVTHHTATIKQVEQAVNGDIRAVIADDGRSFAADLFVDCSGFNSLLLQQTLQVPFESFNTHLLNDAAIALPSAALAPLPTQTQATAMQAGWAWQIPLRHRTGNGYVYSSAFLSKDQAETELRAALGLLDTDVNVRHLNMQVGQVRQHWFRNCVAVGLSQGFIEPLEATALHLVQTAVETFIEDYDAGQWSAQFQSRFNASIRQRFEATRDYILAHYVFNTRNDSDYWLAARQRPELPDTFEAIQQAWFAVRDLTPVLQKQNRETMFGPLSWYCLFAGYGVFPPLSPNQPPAAFLQQQDAWLTHGIGSLFAGCVKNFSRANSL

SEQ ID NO: 89995 - protein, 501 aa, Rhodanobacter sp.
  misc_feature (1)..(501): tr|A0A522N3W4|A0A522N3W4_9GAMM Tryptophan 7-halogenase OS=Rhodanobacter sp. OX=1883446 GN=EPN49_11405 PE=4 SV= 1
MQANPIQRVVIVGGGTAGWMAAALLARALGPQVQIRLVESDEIGVVGVGEATIPSIRLVNQFLGLDEDDLLRATHGTFKLGIEFNDWRRLGDSYLHAFGDLGLPLGLIGFHHYWLRDRQRAGAADLWAYSLNATAARAHRFGRMERVGSSPLTGIKYAYQLDAIAYGQYLRRHIDPAIVQRIEGRIVDVQLRAGDGFIESVQLASGERVAGDLFIDCSGFRGLLIEGALKTGYDNWQQWLPCDRALAVASARVAPMRPYTQAGARTAGWQWRIPLQHRSGNGHVYCSRFISDDEAAATLLANLEGEPLADPRPLRFIAGMRRQSWNRNCVALGLAAGFMEPLESTSIHLIQSGVSRLLAMFPDRHCDVALSTEYNRQTRFEYERIRDFLILHYKATERDDSPFWRHCAQMEIPESLARRIALFRGNGSIFRDADELFTEVGWLQVLLGQGIEPQRHHPLADTLDQGQLDEFLGNIRTLVDRAAGTLPPHERFVAEHCKAQT

SEQ ID NO: 89996 - protein, 537 aa, Rhodanobacteraceae bacterium
  misc_feature (1)..(537): tr|A0A522S388|A0A522S388_9GAMM Tryptophan 7-halogenase OS=Rhodanobacteraceae bacterium OX=2052182 GN=EPN36_012 70 PE=4 SV=1
MSYATATVFNYNVTATRPGARTDAEPPVKHIVIVGGGTAGWMTALTLSRSAYGPRLKITLLESPRVGAIGVGEGSTPWLRGFFESMGIEEREWMPACNATYKAGITFDGWSTRRGHEGYFHAFASMLDNITIGPFIDNVHARLDGADVYAHPNRFFIASRLASHCQAPRAPRSFPFDVWYGFHFDSVLLGQFLQKKAIESGVNHVVGHVTNVQLGESGNITSLQLEGDATLAGDFFVDCTGFASLLTGKAMGTPFVPFKENLFNDAAVVINRPNAGPIMSQTISTALRNGWVWKIPLTNRYGYGYVYSTDFCSPDNAELELREHLGIAGASDAPARHLRFHPGRVARSWTRNCVANGLAQGFIEPLEATTLLFAQRTASMLVTALEKGDLGEEVRAQFNDTLNAQIEGTRDYIVTHYKTNTRTDTDYWRANAANTNLSAPLQQLLRTWLGRHSIAGGITDGTFGRGYPVMSWYSLLAGVGLFPDDNETRPPTAQEAKYSLAEIDNLINRSAMNFPDHRAFLQAIEPKPEKSLQVYFY

SEQ ID NO: 89997 - protein, 505 aa, Xanthomonas campestris; identical to SEQ ID NO: 89083
  misc_feature (1)..(505): tr|A0A556SH67|A0A556SH67_XANCG Tryptophan 7-halogenase OS=Xanthomonas campestris pv. glycines OX=473421 GN=C28 59_16680 PE=4 SV=1

SEQ ID NO: 89998 - protein, 517 aa, Xanthomonas sp.
  misc_feature (1)..(517): tr|A0A0P7G699|A0A0P7G699_9XANT Tryptophan halogenase OS =Xanthomonas sp. Mitacek01 OX=1732019 GN=AO715_04365 PE =4 SV=1
MNADLRHVVILGGGSAGWLTAALLAADHDGALPSGLRVTLIESPDVPTIGVGEGTWPTMRDTLRRIGVSETDFVRACDATFKQGSQFVRWTRDRADDRYHHPFVLPQGYHDADLVAGWMRHGDVPFDRLVSFQPQLCDAGRAPKQFGTPEYAAVANYAYHLDAAKLGLFLRAHCTQRLGVRLVSDHVEGVDVRDNGDIAALRTRAHGAIDGDLFVDCTGMRALLIGQHYGIDRTPCGDVLFNDRALALQVRYPDADTPIACQTISTAQANGWIWDIGLSARRGVGHVYSSAHTDADAVEAALQRYIADTGGADCEIIARQSLSFEPGYRRRSWHRNCVAIGLSSGFVEPLEASSLVLVELAATMLSDQLPATRETMDTVAARFNETFAYRWERVVEFLKLHYVLSHRDDSAYWRDHRDPEHMPAHLAELLALWRHQSPSRYDLPRVDEVFPSASWQYILYGMGFRPDTRATTRRAADTARAEAAFREASDLARRMIPALPSHRELIDHIHTRGLSPV

SEQ ID NO: 89999 - protein, 508 aa, Pseudoalteromonas fuliginea
  misc_feature (1)..(508): tr|A0A5B0V0M7|A0A5B0V0M7_9GAMM Tryptophan 7-halogenase OS=Pseudoalteromonas fuliginea OX=1872678 GN=EU509_0782 0 PE=4 SV=1
MNKTIKTIAVIGGGTAGWLSAAIIASYHQGKNSDGLKVMLVESSDIPTIGVGEGTWPTMKNTLQQIGLREVDVFKACNATFKQGGKFVNWTHGNNDFYYHPFTVPLGYGRIDLAPYLDNVEDFAQQTNFQHDICEASLAPRGIAQGEYQGNCNYAYHLDAGAFAQMLKQHCKSKLGIEHIIGTVDQVKLDDDGAINELTLKDQTRTISADLFIDCTGFSSLLLGQALNVPFKKMDHVLFNDSALAMQVPYDENDDSLASHTIATAQSAGWIWDIGLTHRRGVGHVYSSKFLSDDEAEQNLRNYLGDAANGLTARKISFESGYREKFWHKNCVAIGMSAGFVEPLEATAIMLVEISARFVAEHMPADTQVMPIVAKRFNEQMDYRWQRIIDFLKLHYMLTKRPEPYWQAHVQPDTIPQTLQEDLLLWGSRGPLIQDFHGALELFPAASYQYVLYGMGFKPDFTKQAYLYSQHVQAKQIIERNSQLTQQMLQTLPPHRAFIEQWLAANPV

SEQ ID NO: 90000 - protein, 497 aa, Pseudoalteromonas fuliginea
  misc_feature (1)..(497): tr|A0A5B0U157|A0A5B0U157_9GAMM Tryptophan 7-halogenase OS=Pseudoalteromonas fuliginea OX=1872678 GN=EU509_1106 0 PE=4 SV=1
MKSIKHVVIAGGGTAGWITAALLNKVLGKVINITLIESSSIGTVGVGEATIPPIISLNNALGINEKEFINETNATIKLGIEFENWKKPTHSYMHAFGPIGKDFPFCDFYNFWLKGRITGCEDDLWDFSLNYQAAKQHKFAPLNTIPNTQLPGLSYAYHFDATLYAEYLKKLAISRGVKHIDAKISEVTQCLATGNVETLILDDNKQINGDLFIDCTGLRALLIEKTLNTGFVDWSHYLPCDSAIAVQTKSNDELKPYTQSIAHSAGWQWQIPLQSRIGNGLVYCSRYLSDEDAKALLLNNLPADPITEPRFIKFKTGRRVKQWHKNVVAVGLSSGFLEPLESTSIHLIQSAVTRLIKLFPHHGISDALASEFNKQSVTEIEHMRDFIILHYKLTERGDSAFWRQCKQMEIPDSLAHKLSLFKHTGKVVRENDELFAEVAWQQVFIGQGLIPDDYNSIVDSLSSEQLNDLFSTLKTLITSTVEQLPTHKDFLKEIKKA

SEQ ID NO: 90001 - protein, 517 aa, Pseudoalteromonas fuliginea
  misc_feature (1)..(517): tr|A0A5B0UKH8|A0A5B0UKH8_9GAMM Tryptophan 7-halogenase OS=Pseudoalteromonas fuliginea OX=1872678 GN=EU509_0469 5 PE=4 SV=1
MNDDIKSIVIVGGGTAGWLSAGIIAAYLQKHHSKKINITLLESSDIPTVGVGEGTWPTMRRTLKDMGIRETEFIQQCNVSFKQGAKFTKWITGEEDDYYYHPLELPTGMYEHNLATSWLTKNEPKPPFAQYVSAQQSICESGLAPKQITTPEFSAIANYAYHLDAGLFATFLKNHCIDNLNVKHIVGTVVGVNNCTNGDIKSVSLNNKIEIAGDLFIDCSGFKSLLLGENLGVGFKSCKDVLFADSALAIHMPYKDDEPICSHTLSTAQTSGWIWDIGLQTRRGIGHVYSSKHISDEDAKQQLFDYLNINKDQQSEYKVKKLSFEPGHREKFWHKNCVAVGLSAGFLEPLEASALLLVEISANFVAQQFPANRHVMNITAQRFNRTFSYRWERIIDFLKLHYMLSKRTDSPFWQAHCHQNTIPQSLKDNLSLWEFHTPSDNHFDHSQEVFPAASYQYVMYGMGFTGSSELYGNSESYFKKAIALVNNNQQYTQKLLNKLPTNKALLAQINQFGMQQI

SEQ ID NO: 90002 - protein, 538 aa, Burkholderia sp.
  misc_feature (1)..(538): tr|A0A1B4SHR3|A0A1B4SHR3_9BURK Tryptophan halogenase OS =Burkholderia sp. MSMB617WGS OX=1637831 GN=WT60_26090 P E=4 SV=1
MSNPIKHIVIVGGGTAGWMAASYLVRALQQQANITLIESAAIPRIGVGEATIPSLQKVFFDFLGIPEREWMPQVNGAFKAAIKFVNWRKSPDRSRGDHFYHLFGSVPNCDGVPLTHYWLRKREQGFQQPMEYACYPQPGALDDKLAPCLPDGTRQMSHAWHFDAHLVADFLKRWAIERGVKQMVDEVVEVRLNDRGYISSLSTKEGRTLEADLFIDCSGMRGLLINQALKEPFIDMSDYLLCDSAVASAVPNADARVGVEPYTSAIAMNSGWTWKIPMLGRFGSGYVFSSKFTSRDQATADFLNLWGLSDKQPLNQIKFRVGRNGRAWVNNCVAIGLSSCFLEPLESTGIYFIYAALYQLVKHFPDTSFDPRLADAFNAEIVHMFDDCRDFVQAHYFTTSRDDTPFWLANRHDLRLSDAIKEKVQRYKAGLPLTTTSFDDSTYYETFDYEFKNFWLNGNYYCIFAGLGMLPDRSLPLLRHRPESIDKAEAMFARIRREAERLRTSLPTNYDYLRSLREGDAGRSRSQPGPTLAAPEIL

SEQ ID NO: 90003 - protein, 500 aa, Massilia lutea
  misc_feature (1)..(500): tr|A0A4P6KXQ8|A0A4P6KXQ8_9BURK Tryptophan 7-halogenase OS=Massilia lutea OX=321985 GN=EWM63_13225 PE=4 SV=1
MEQQRLTKPVRRVVIAGGGTAGWMVAAGLSKSLGRLLDIKLIESDEIGTVGVGEATIPTLMNFHHLLEINEQEFMAETMATFKLGISFENWRDVNEDYIHSFGTTGTDHWTAGFQHFWHKGRERGIAGDYGDYCLELKAGLQNRFAHLPNNGMNYAYHMDAGRYAKFLRRFSERFGVQRVEGKIAEVRKNLVSGDIIALRLDSGAELEGDLFIDCTGFRALLIGQTMGVDYDDWSHWLFNDSAVALQTKSVRDAVPYTRSIARDAGWQWQIPLQHRVGNGMVYSSRYTDDESALRTLQAAVDGEALTTPRVIRFTPGQRKQTWKGNCVAIGLASGFLEPIESTSIHLIQRGIIRLMQMFPQDGISQADIDEYNQQADYEIKHIRDFIILHYTVTNRRDTPYWRDAATMKLPPSLQHRIDLFRDTGRVFRVPNELFAENSWIQVMLGQGILPASHHQTADLMGDKELAHFLGNISGTIDRTVAQLPSHQKYVEQYCSGTGW

SEQ ID NO: 90004 - protein, 522 aa, Roseateles aquatilis
  misc_feature (1)..(522): tr|A0A2D0AM45|A0A2D0AM45_9BURK Tryptophan halogenase OS =Roseateles aquatilis OX=431061 GN=CDN99_22460 PE=4 SV= 1
MNPIQDVLIVGGGTAGWLTAAFLAKQLGTARGGVRITLVESSDIGIIGVGEGTFPSIRGTLSAIGIGEARFLEACSATFKQGIRFDHWVRPEGTPGHDHYFHPFSQPSQRPGAPELLPYWLRGEAGAGRAFADAVTLQKAVVDARHGPKRAVDGDFVGPLNYAYHFDAGRFAALLAEHGQSLGVKRVLATVDRVDLDERGAIATVHTREAGALTADLYIDCSGFRARLIGEAMGSPFKPLNDVLFVDRALAMQVPYGRPDAPIASCTIASARQHGWIWDIGLQERRGIGHVYSSRHCDDDDAERVLRRYVGPAGDALTPRKLTLNVGYRETQWTHNCVAVGLSGGFLEPLESSGIGLIETAAYLIGQLFPFNGDMGPAARHFNAFMRERYVRIVDFIKMHYALTQRRDSAFWRDNADPSSWTGTLTDKLAMWRARPPQRLDFITDVEMYLPASWQYVLYGMEFKTDLGAATAALTRADEARREFQAIAQLGAHALRDLPPHRALIEQMLARAGMKSAATQAA

SEQ ID NO: 90005 - protein, 497 aa, Xanthomonas axonopodis
  misc_feature (1)..(497): tr|M4TWK1|M4TWK1_9XANT Tryptophan halogenase OS=Xanthom onas axonopodis Xac29-1 OX=1304892 GN=XAC29_15230 PE=4 SV=1
MVIAGGGTAGWIAACALSHQFRNLLDITLVESEQIGTVGVGESTVPPIRTFHRFLQIDEQEFLRAVAGTFKLSISFEHWRRHGERYIHPFGITGQSTLVCAFHHLWLESQRRGMPGSFGDYCLETVASRVDRFALHGEPAVNYAYHLDAALYAKFLRARSEACGVKRVEGRIQQVTVQPHSGDVASLVLEDGQTIEGDLFIDCSGFRGLLIEQTLHTGYEDWSHWLPCDRAVAVQTEALGPPVPYTRAIAHEAGWRWHIPLQHRVGNGLVFSSKHLSDDQAHAKLLRDVAAPAVREPWMVPFRTGRRLKAWNKNVVSLGLASGFIEPLESTSIHLTISAVVRLLALFPAEGIAPSQVQLFNDVSRAEMEHVRDFVTLHYHATQRDEPLWQQCRQMELPESLALRLRAWRERAHAWQGADELFRVDSWTHVLMGQGIAPEQHHPLTRAFSDHDLRRLLDGIAQPIQHAVQQMPSQQDFIERYCKAGEQVWGMRSPVPA

SEQ ID NO: 90006 - protein, 522 aa, Alteromonas macleodii
  misc_feature (1)..(522): tr|A0A2K9IGP5|A0A2K9IGP5_ALTMA Tryptophan halogenase OS =Alteromonas macleodii OX=28108 GN=TE101_18995 PE=4 SV= 1
MTTATPITHIVVVGGGSAGWLTAGRIAAQHQCATRKDIKVTLIESPNVPIIGVGEGTWPTMRSTLIALGISETTFIKECDATFKQGAKFAKWTTGEEHDFYYHPLMLPQGFSQTNLGPYWQTVALELNESFSHAVCVQEAICEAGCAPKSIRHAEFAGTANYAYHLDAGKFTAFLTKHCTEKLGVHHVLADVNRVESSNNGDIKALHTEQGVTVEGDLFVDCTGFKSMLLGEHYKVPFIPCDDVLFIDRALAVHVPYDTPQSPIASHTISTAQDAGWIWDIGLQSRRGVGHVYSSRHQSKDDAYARLDTYVRQTSTLNGIDGINVKDITIQSGHRQRFWQNNCVAVGLAAGFLEPLEASALVLVELSASMIAEQLPANRAVMDIVAKRFNDTFSYRWQRIIDFLKLHYMLSKREDSAFWRDNRDSHTIPDSLKELLALWQYHPPSDKDFTSNNEVFPAASYQYVLYGMGFTSDLGAHQQWVNADFAKQQLMQNRKARGMAVEKLPKHRELINKIHQFGLQAV

SEQ ID NO: 90007 - protein, 498 aa, Novosphingobium sp.
  misc_feature (1)..(498): tr|A0A437NC78|A0A437NC78_9SPHN Tryptophan 7-halogenase OS=Novosphingobium sp. FSY-9 OX=1908524 GN=EOE18_00150 PE=4 SV=1
MEERVKSVVVVGGGTAGWMAAALIAKVIGKGARVELVESDAIGIIGVGEATIPPIQTLNSVLGIDEATFLRETKATVKLAIRFENWGQQGESYYHTFGAAGRNMAFCSFHHFWTRARQRGHETSYWDYDLNYLCCEAGQFAPTTGNDPIWDMPYAYHFDSALYGQFLRRLSEQMGVRRTEGMIGEVRRCATTGDVTSVVLQDGREIAGDLFIDCSGQRGLLIQQALRTGYEDWDHWLPCDRAMAVPSEPFATTAPYTRSIAHGAGWQWRIPLQHRNGNGLVYSSRHYSDDQAAQLLLGNLDSKALDEPRVIPFRTGRARQQWNRNVVAVGLSSGFLEPLESTSIYLIQSAIVRLLHLFPHGPDVAALRAEYNRQSAREYELIRDFIILHYHANRRDDSAFWRDLREMAVPDRLAQKIELFRASGALVQDQLDIFMEASWVQVLMGQGILLQDYHPLANGPSDAELRQQLSQLRQVKAQPLSQLPAHDAWLAAKMGAHA

SEQ ID NO: 90008 - protein, 503 aa, Comamonadaceae bacterium
  misc_feature (1)..(503): tr|A0A257EAC4|A0A257EAC4_9BURK Tryptophan halogenase OS =Comamonadaceae bacterium PBBC1 OX=2015580 GN=CFE38_193 10 PE=4 SV=1
MQQANLIRSIVIVGGGTAGWMTAAALATMLKGRYPIQLIESDEIGIVGVGEATIPMIQRFNKVLGIDEAEFMRETMGSFKLGIEFVNWGRQGERYMHGFGKIGQDLWTTRFDQYWRKMRQLGKAAPLENYSITRMAALANKFMPTPDGVQNSPFNDIAYAYHFDASLYAKYLRKLAEQRGVVRTEGKINQVSQRPIDEHVDAVVLENGKRIEGDLFIDCSGFRGLLIEQTLHTGFEDWTHWLPCDRALAVPCASAFTFTPYTRSTAHQAGWQWRIPLQHRTGNGHVYCSQYISDDEAAAVLLAHLDGKALADPRPIRFTTGMRQKAWNKNVVAIGLSSGFLEPLESTSIHLIQNTISQLVEFFPNQSFNPTQIAEFNRQNRFQMERLRDFIILHYHINQRDDSAFWQACAHMAIPDTLQHKIDLYKTTGRLLRVDNELFAEDGWLQVMEGQNLPTESYHPLVDLQSENSIHEYLESVREVIAKCVSVMPDHADFIAQHCATPK

SEQ ID NO: 90009 - protein, 504 aa, Sphingomonas sp.
  misc_feature (1)..(504): tr|A0A430DUF9|A0A430DUF9_9SPHN Tryptophan 7-halogenase OS=Sphingomonas sp. ABOLF OX=1985879 GN=CA235_02400 PE= 4 SV=1
MTGPDRQRVVVVGGGTSGWMTAAALVKLLPDRCQVHLVESEAIGIIGVGEATLPHIRAFNERLGIPEAEFMATTRATFKLGIEFRNWARIGDSYIHPFGTFGRGAGDVQFHHYYARLLHAGVQLPPIEAFSMACTLARANRFAPPAQDPCQVASTFGYAYQFDAVAFAPYLRRLAEGLGAERTEGRIVHVERDGESGDVTAVLLEGGRRIEGDLFVDCSGFASLLIGKALGEPFQDWSRWLPADRAVALPCRTVTEVTPYTSAVAMPAGWRWRIPLQHRTGNGYVYSSAFLSDEHAADALTAAVEGMPMASPRVLRFTAGRRERSWAHNVVAIGLSGGFLEPLESTSIYLVQQAITALLELFPERRISPVDRDEFNRVVDMEYDRVRDFLILHYHATHRDDSEFWNYVRTMAIPDSLAEKMELFRRRGRIVKYREGAFLDASWVSVYLGQRVIPAGFDPRASGPTLESLVAGMKQMRAEIQAAASAMPDHLSYLGRYCPMAAAA

SEQ ID NO: 90010 - protein, 480 aa, Burkholderia pseudomallei; identical to SEQ ID NO: 82377
  misc_feature (1)..(480): tr|A8EDE5|A8EDE5_BURPE Putative tryptophan halogenase O S=Burkholderia pseudomallei 406e OX=360118 GN=BURPS406E _H0871 PE=4 SV=1

SEQ ID NO: 90011 - protein, 499 aa, Histidinibacterium lentulum
  misc_feature (1)..(499): tr|A0A3N2R7X7|A0A3N2R7X7_9RHOB Tryptophan 7-halogenase OS=Histidinibacterium lentulum OX=2480588 GN=EAT49_0407 0 PE=4 SV=1
MTSWPGHIVVVGGGTAGWLAAMMLTDAARRAGQASRVTVIESSRLGTIGVGEGTTAVFRQMLKHFGIDELEFLRETGATIKYGIRHRDWRRLGHHYDGPIDDPHLLTPGLPLHTYAVAAGRPVGEAHLFQALIDARRAPFASREGRLIPAGPFHHAYHFDQALAGAFLKRRARGVTLIDDQVAGVETGEAGIAALTLESGQRIEGDFFLDCTGFRRALVGALGADWISYADVLPVNRAMPFWLDLAEGEEIDPVTLAWAQGAGWMWRIPTQGRLGCGYVYSDAHTTPEAAQREIEAALGRPIEPRRDIRIDAGRLRDAWRGNCVALGLSSSFLEPLEATSIHGTVVQLMMLTDWLGDPAAPARYNAAVARQVDDFRDFIRLHYVSERRDTPFWRDVAASHPPEVTDRLALWQTRLPERADFAPFPLGLAHVEEQLYRPVLDGLGLLDRKVAQAAMASDTARRDRTRAAHGTLVRDYRQAAARCLPHRHFLKSLTTETAA

SEQ ID NO: 90012 - protein, 509 aa, Sphingopyxis sp.
  misc_feature (1)..(509): tr|A0A0Q8RWQ5|A0A0Q8RWQ5_9SPHN Tryptophan halogenase OS =Sphingopyxis sp. Root214 OX=1736491 GN=ASE06_18670 PE= 4 SV=1
MNSAIERVVIVGGGTAGWLAACLLASARRAVKLDVTLIEAPDIPTIGVGEGTWPTMRATLSAIGIAEAEFLSACDGSFKQGSRFDGWVTGAEGDRYLHPFTSPPAAPTAELLAAWRAGAPDLPFAAAMTAQAHVCASDLAPRQRAMPDYQGAANYAYHLDAGKFAALLAMHAVRRLGVRHISDHVVDVVRDDEGGIASVATRQNGDIAGDLFIDCSGHASLLIGEHLGVEWIDRGDVLFNDRALAAQVPVAPGSPIASQTVSTAHAAGWIWDIGLPGRRGIGCVYASRFMDDDTAEATLRAYIARALPDAPDVPARRLSFPTGHRARFWQGNCVAVGLSAGFIEPLEASAIVMIELSLKALIDNFPARRAAMPIHADRFNELFRYRWDRIVEFLKLHYALSRREEPYWLAQRDPAHMPPRLTEMLQLWRDQPPSAWDFPRVDEIFSAESHQYILYGMGYPVPADLPSGEKAAALLAENRQRARALAAALPANRDYLDALAPGAHSAAAR

SEQ ID NO: 90013 - protein, 503 aa, Sphingomonas sp.
  misc_feature (1)..(503): tr|A0A430DFY7|A0A430DFY7_9SPHN Tryptophan 7-halogenase OS=Sphingomonas sp. ABOLF OX=1985879 GN=CA235_18105 PE= 4 SV=1
MTAKPLDRVVIVGGGTAGWMTAAVLARLTAAGTSVTLVESEEIGTVGVGEATIPPLLDFNRFLGIDEDAFVRATGATFKLGIEFVDWARRGERYLHPFGTFGRDVQGIKFHQLWLRQARVDPPIADTGSLHDYCLASVAARMARFTRPSGDPAAVLSSLRYAFHFDAALYARFLRGIAERGGVVRVEGRVAQVDLAPEDGFIRAVQLADGRRIEGDLFVDCSGFRSLLLGEALGIPFTSWQRWLPCDRALAVPSASVGPLLPYTRATADRAGWRWRIPLQHRTGNGHVYASAFVRDAEAADTLLEGLDGAPAAEPRPLRFVAGMRERLWERNCIAIGLAGGFLEPLESTSIHLIQSGITRLMSLFPDKDHAPVERDAYNRLARSEYEQVRDFLILHYHATERDDSDFWRHCRTTPPPDSLAHKLELWRARGRVLPEAGSLFTEDSWIAVLMGQAGTPASVDPLVATLPVQETRRFLHHLRTIIGQTAAAMPAHDQFIARHCAA

SEQ ID NO: 90014 - protein, 530 aa, Paraglaciecola arctica
  misc_feature (1)..(530): tr|K6YJ88|K6YJ88_9ALTE Tryptophan halogenase OS=Paragla ciecola arctica BSs20135 OX=493475 GN=GARC_1257 PE=4 SV =1
MSQIKTSTMGIPSQVVIVGGGTAGWMAASLLQQAWSQESDASTQITVVESEDIGTIGVGEGSTPTLREFFRKLGIAENEWMPKCSATYKCGIAFPGWLNGNGGSPDGYFHPFFSPLDIQTGEAFMRNACLKRRGVNAAVQPDDFFVGAQLSRQYLSPRLNVSLPFEPEYAYHFDSALLGKFLRERAKKLGVQHIIGTVSDVKRTTTGDIECLYLSRDKRPLKADFFIDCTGFASLLIGKTLETPFYSYSDNLFNDSAVAIASPLDNTQPIPSHTESTALSNGWAWKIPLTTRNGNGYVYSSGYQSAESAEKELRAHMGVSDEVEARHIPMRVGSIRQHWNHNCLAVGLSQGFIEPLEATALMLVQYTLTHFIKAHALALSKGNIEHYRTGFNNNVSQTFAGIRDYIVAHYQCNTRTDSDYWIDNRSHNHISDNLAAILQCWDQGGDFEAELCAQKHQQVYPRPSWYCLLAGSGRFPVSGQRIENAHGIVPTPSAAAREYTAKMSHKFQDHRTLLQTMYGKNFISKGFAPQ

SEQ ID NO: 90015 - protein, 538 aa, Burkholderia ambifaria
  misc_feature (1)..(538): tr|B1T0C0|B1T0C0_9BURK Tryptophan halogenase OS=Burkhol deria ambifaria MEX-5 OX=396597 GN=BamMEX5DRAFT_1236 PE =4 SV=1
MSNPIKNIVIVGGGTAGWMAASYLVRALQQQANITLIESAAIPRIGVGEATIPSLQKVFFDFLGIPEREWMPQVNGAFKAAIKFVNWRKSPDSSRDNHFYHLFGNVPNCDGVPLTHYWLRKREQGFQQPMEYACYPQPGALDGKLAPCLADGTRQMSHAWHFDAHLVADFLKRWAVERGVKRVVDEVVDVRLNERGYISSLSTKEGRTLEADLFIDCSGMRGLLINQALKEPFIDMSDHLLCDSAVASAVPNDDTRDGIEPYTSAIAMNSGWTWKIPMLGRFGSGYVFSSKFTSRDQATADFLNLWGLSDNQPLNQIKFRVGRNRRAWVNNCVSIGLSSCFLEPLESTGIYFIYAALYQLVKHFPDTSFDPRLSDAFNAEIVYMFDDCRDFVQAHYFTTSREDTPFWLANRHDLRLSDAIKEKVQRYKAGLPLTTTSFDDSMYYETFDYEFKNFWLNGNYYCIFAGLGLLPDRSLPLLQHRPDSIEKAEAMFASIRREAERLRTSLPTNYDYLRSLRDGDARLSRSQRGPMRAAQEIL

SEQ ID NO: 90016 - protein, 515 aa, Aestuariibacter sp.
  misc_feature (1)..(515): tr|A0A2D6XVN8|A0A2D6XVN8_9ALTE Tryptophan halogenase OS =Aestuariibacter sp. OX=1872400 GN=CL531_01830 PE=4 SV= 1
  misc_feature (32)..(32): Xaa can be any naturally occurring amino acid
  misc_feature (34)..(34): Xaa can be any naturally occurring amino acid
  misc_feature (114)..(114): Xaa can be any naturally occurring amino acid
  misc_feature (144)..(144): Xaa can be any naturally occurring amino acid
  misc_feature (220)..(220): Xaa can be any naturally occurring amino acid
  misc_feature (257)..(257): Xaa can be any naturally occurring amino acid
MNTASKKTRVVIVGGGTAGWLTAGIIAARHPXLXENSNTELVLLESPDVKNLGVGEGTWPTMRDTLKQIGLSERAFLSCCDASFKQASKFAGWRQDPAQHYYHPFTAPAGYGVXSLADAWIEAGYPQDFESWVSAQGHACERQXSPKLPQLPEYAFTYNYGYHLNAGKFVALLQAHCTEKLGVTYRQGHVAHIVSHDSGAIKALQLEDGNTVEGDLFIDXSGFAAVLMGKHFQIPFVSQRGVLFNDTAIAAQVNHAXPQTPIASATVATAQTSGWIWDIALQHRRGIGHVFASEFCAVEDAEQTLRNYIANDPNLQQDKVSTRIIKFDPGHRKYFWHHNCVAIGVSAGFVEPLEATALVLIEKSAEWVAEQLPRSPSAMPVLAKRFDQLTNERWQEIIDFIKLHYVLSDRTDSAYWRAHQQHESWTDSLSEALQLWQSQPPGLYESSNRQELFSSASKQYVLLGMGFRAEQWQSCGRLALQQPLIERFRRDVQQQVNRVNAQLLTNREYLQKLRK

SEQ ID NO: 90017 - protein, 509 aa, Sphingomonas sp.
  misc_feature (1)..(509): tr|A0A430DKM3|A0A430DKM3_9SPHN Tryptophan 7-halogenase OS=Sphingomonas sp. ABOLF OX=1985879 GN=CA235_12070 PE= 4 SV=1
MDPIRSIVIVGGGTAGWMAAAFLARQLDQLRLSITVVESSAIGTVGVGEATVPAIRDFFAAVGLSDAEVLRETEGTIKYGIRFDGWKAPGHRFFHPFGLYGTPAHGVAFHHYWLKLRQAGDPTPLAAYSLATQLAEQGRFLAPAQTPANDLGVFDFAVHFDASKFATLLRHRSVAAGVVHVDGRIDRVERDGETGHVAAVLLEDGRRIGGDLWIDCSGFRSLLLGEALGVPFVDWRRWLPVDRAIAIPCRPRDAAQEPFTVATARRAGWQWRIPLRHRIGNGHVYCSEFLDDASAEIMLLEQLEGEPLGQPNHLRFTTGHRARFWEHNIVGLGLASGFLEPLESTSISLIQTGLERLVRFFPDRACDPRLAAIYNYQSVLEFERLRDFLLLHYWANGRHGEPFWDQMRAMPPTEGLQLKLDTWRASGEFVRREWETFQDPSWLSLYAGFEDLPEHPSPLADRFSIAELTDTFARMRAAIAATVAQAEPHVAFLARTVDGGDGGRRAAAR

SEQ ID NO: 90018 - protein, 522 aa, Alteromonas macleodii
  misc_feature (1)..(522): tr|A0A1E7DFR4|A0A1E7DFR4_ALTMA Tryptophan halogenase OS =Alteromonas macleodii OX=28108 GN=BFV94_0599 PE=4 SV=1
MHQANSPLRRIVVVGGGAAGWLTASIIAVTHKHDDNISVTLVESPDVSILGVGEGTWPTMRSTLLKIGISEETFLAQCNASFKQGTSFHNWRSDTIEHQYYHPFSLPFRYFESDVAAWWQSYAAEQDFAHAVCSQAALCDHHLAPKQRQTPAYAGIANYGYHLDANKFAALLQKHATTVLGVQHIVDHVDDVVGSSSEPIAAIVGREHGNITGDLFIDCTGFAARLIGQHYGVPLTSCSNVLANDSAIAIQAPYVDSSVDIASTTHSTAQDSGWIWDIGLPSRKGVGYMYSSAHCSEDEARATLETYLKHDKKTADVDVSKARKITFSPGYRKTLWVENCVAIGTSAGFLEPLEASALVMIELSATHIAKQLPRTYKECQAAGRQFNQAFEKKWERIVDFLKLHYVLSEREASAYWRDMRNQESCSTQLQDWLTLWKSRSPISSDFELREELFPAASYLFVLYGMGFRSQYNDVYQANLHTPEQRQAYAKHVQSIQQQLSGLPTNRQFLNQVAQSQGLSMHY

SEQ ID NO: 90019 - protein, 515 aa, Sphingopyxis sp.
  misc_feature (1)..(515): tr|A0A270BKI9|A0A270BKI9_9SPHN Tryptophan halogenase OS =Sphingopyxis sp. GW247-27LB OX=2012632 GN=CD928_01095 PE=4 SV=1
MTDSPYRIVILGGGTAGWMCAAGLSRLLPAADYDITLIESDEIGTVGVGEATLPHIKTFNDMLGLDEAEFMRATMASFKVGIEFVGWAREGERYIHPFGTFGERWAGADFQHHWARARLAGSDRRSLQDYSFAVAVCRAAGFEHPGEDPNSIRSTYAYAYHFDAGLYARYLREWTTTRGVRRLEGKVASVRRDGESGDVAALALESGAEIAGDLFVDCSGFRSLLLGQTMGVPWHDWSEWLPCDRALALPCAGTAPMLPFTRCTAQLGGWTWRIPLQHRIGNGHVFASEFCSEEEAERTLRGAIDGEAQGEPRLLRFQAGRRGAGWAGNAVAIGLSSGFLEPLESTSIFLIQAAVTDLAALMPRRGQRVDPRLRAEFNRLFEVHYDRTRDFIVLHYAANAREGEPLWDHVRHMALPDSLAHKIELFRESAIAPDYALGLFSRDSWLSVFEGQGVVPRAHSPIAERVPLPEVQRRLDDLAERIAVNAAEMTPLAEFLAGTCAAEGVALPGIAASAA

SEQ ID NO: 90020 - protein, 501 aa, Alteromonas macleodii
  misc_feature (1)..(501): tr|A0A1E7D8R9|A0A1E7D8R9_ALTMA Tryptophan halogenase fa mily protein OS=Alteromonas macleodii OX=28108 GN=BFV94 _4203 PE=4 SV=1
MTVSGLDSSKNQTPVKNVVIAGGGTAGWMAATALSRLLGKSINVTLVESKDIGIVGVGEATIPPIRTFHKLLGIDEKAFMRATQATFKLGIEFENWREQGHSYIHSFGITGRECWAGEFHHFWLRAKEYGFGGEFGDYCPELIAAKQSKFATSEAMPLNFAYHFDAVAYGRFLKSLACDAGVTHKEGDIEKVVVCPQSGNIQSLRLASDEVIDGDFFIDCTGFKGLLIEQALHTGYDDWQHYLFCDSAVAMQTELTAPPVPYTKSVAHQAGWRWQIPLQERMGNGLVFCSRFMSDEDAINTLKSQVTGAPINEPRVIRFTPGKRRRGWNKNCVALGLSSGFIEPLESTSIHLIMTGLIRLMRLFPFDGITQSAIDEYNNKFDSEMSAILDFIVMHYKVTQREDSPFWQQCQRMDIPSSLKHKLDLFAESGRVFLDDGDIFRVDSWTQVLMGQGMTPSQYHRVADEMSEQSLKQFMAGLKQQVDNHVAKLPSHEAFLTQYLK

SEQ ID NO: 90021 - protein, 502 aa, Sphingomonadales bacterium
  misc_feature (1)..(502): tr|A0A258EAV6|A0A258EAV6_9SPHN Tryptophan halogenase OS =Sphingomonadales bacterium 32-67-7 OX=1970595 GN=B7Z07 _01385 PE=4 SV=1
MVVVGGGTAGWLSACLLAARVPGATITLVESPDVATIGVGEGTWPTMRRTLQAIGLDEAEFLTACDASFKQGSRFIGWATGAADDSYYHPFTPPADTDARALVRGWHAAAGDQAFAPAVSVQPRICDLDLAPRQRAMSGYAGALNYAYHLDAAKLAALLARHGVEKLGVQHVRAHVTGADADASGDLRAVLTHEQGAIAGDLFIDCTGHAALLIDGHFGVPFVDRGDVLFNDRALAVQIPVDPDSPIKSQTDATAYDAGWIWDIGLPTRRGVGCVYSSAFIDDDAAAATLARYLGRDPADLGARALRFRSGHRAEFWKRNCVAIGLSAGFLEPLEASAIVLIELSLGALIDGFPADRAAMDIQARRFNALFRYRWDRIVEFLKLHYVLSRRDQPYWRAHRDPASIPDRLSELLTLWRHQPPSIADFPAVDEIFPAASYQYVLYGMGHSAPPPGPVAVDAEAAVRAMTQAAQRGRALAASLPTNRAYLDALHAAAPRRALEIL

SEQ ID NO: 90022 - protein, 502 aa, Ferrimonas balearica
  misc_feature (1)..(502): tr|E1ST92|E1ST92_FERBD Tryptophan halogenase OS=Ferrimo nas balearica (strain DSM 9799 / CCM 4581 / PAT) OX=550 540 GN=Fbal_2924 PE=4 SV=1
MTQPLNRITIVGGGSAGWMTALYLNRYYNQGGHKTHITLVESEDIGTIGVGEATVHSIRFFFAAMGLDEAELMRETGATFKTGIRFRNWKKPVDGKMHEYFHPFEEQRTNGPLDLATSWFSSERPAGERYDQLNCLSSALADAGHSPKSHTSAPYQGLVPYGYHLDAVRLGRYLRRKAVEAGVEHRIGTVDKLELDGERIRAVHCGGVRFESDIFIDCTGFRSLLMRQLKSDNWQSFEDALPCNKAVALQLPYGPEAQPRPYTQATALDHGWVWEIDLQERRGNGYVYDGKRLSRGQAEAELRQYLGVPADMGQALHLDMKIGCLKSFWVGNCIAIGLSGGFIEPLESTGLHLINLSVRLLATHLNGADVAQPVKDSYNRLMNGIYDDLKRFIILHYCLTDRDDTEFWRKAAASAEHSPRLRQDLTLWQHKVCEFMDQAGSYATVFTDENYRFVLYGMGHWPQFAPLGSAQQHQQLRQQCEARTRMALDQTLPHPAALRALN

SEQ ID NO: 90023 - protein, 506 aa, Alteromonas macleodii
  misc_feature (1)..(506): tr|A0A1E7DEC7|A0A1E7DEC7_ALTMA Tryptophan halogenase fa mily protein OS=Alteromonas macleodii OX=28108 GN=BFV94 _2010 PE=4 SV=1
MQDPHNKPIKRVVIAGGGTAGWLAASLMKKVLGKAVDITLVESEAIGTVGVGEATIPPIRLVNQVLGIDEAQFLHDTKATIKLAIRFENWKTKGESYYHTFGAPGKSMAFCHFHHYWVKARQQGLKDDLWDFDLNYHAAEAGRFAQINAKDPVVELPFAYHFDASLYAQYLRKLSENMGVVRKEGKISRVQRFTDSGFIQALHLESGDVVEGDLFVDCTGFKGLLIEEALGAGYDDWSHLLPCDSAIAVPSERHEKTAPYTRSIAHDAGWQWRIPLQHRNGNGHVYSSRYITDDQACDTLLSNLDTKPLGDPKLIKFTTGRRRKQWYKNVVAVGLSSGFLEPLESTSIHLIQSAIVRLIQLFPHNGFVPCLETEYNKQSELEFEQIRDFLVLHYTVNERTDSAFFNDMRNITLPDSLAHKITLFKESGNLLREQNDLFLESSWLQVLYGQGITPKDYHGLVNSVPEVQLNQMLTRLLEIKKEPIAKLPTHDEYINGMVAKYKRAMS

SEQ ID NO: 90024 - protein, 522 aa, Alteromonas macleodii
  misc_feature (1)..(522): tr|A0A126Q6I1|A0A126Q6I1_ALTMA Tryptophan halogenase OS =Alteromonas macleodii OX=28108 GN=AVL55_19030 PE=4 SV= 1
MTTATPITHIVVVGGGSAGWLTAGRIAAQHQCATRKDIKVTLIESPNVPIIGVGEGTWPTMRSTLIALGISETTFIKECDTTFKQGAKFAKWTTGEEHDFYYHPLMLPQGFSQTNLGPYWQTVAPELNESFSHAVCVQEAICEAGCAPKSIRHAEFAGTANYAYHLDAGKFTAFLTKHCTEKLGVHHVLADVNRVESSDNGDIKALHTEQGVTIEGDLFVDCTGFKSMLLGEHYKVPFIPCDDVLFIDRALAVHVPYDTPQSPIASHTISTAQDAGWIWDIGLQSRRGVGHVYSSRHQSKDDAYARLDTYIRQTSTLNGIDGINVKDITIQSGHRQRFWQSNCVAVGLAAGFLEPLEASALVLVELSASMIAEQLPANRAVMDIVAKRFNDTFSYRWQRIIDFLKLHYMLSKRKDSAFWRDNRDSHTIPDSLKELLALWQYHPPSDKDFTSNNEVFPAASYQYVLYGMGFTSDLGAHQQWVNADFAEQQLMQNRKARGMAVEKLPKHRELINKIHQFGLQAV

SEQ ID NO: 90025 - protein, 506 aa, Alteromonas macleodii
  misc_feature (1)..(506): tr|A0A351UAF5|A0A351UAF5_ALTMA Tryptophan halogenase OS =Alteromonas macleodii OX=28108 GN=DCZ37_03625 PE=4 SV= 1
MQDPHNKPIKRVVIAGGGTAGWLAASLMKKVLGKAVDITLVESEAIGTVGVGEATIPPIRLVNQVLGIDEAQFLHDTKATIKLAIRFENWKTKGESYYHTFGAPGKSMAFCHFHHYWVKARQQGLKDDLWDFDLNYHAAEAGRFAQINAKDPVVELPFAYHFDASLYAQYLRKLSENMGVVRKEGKISRVQRFTHSGFIQALHLESGDVVEGDLFVDCTGFKGLLIEEALGAGYDDWSHLLPCDSAIAVPSERHEKTAPYTRSIAHDAGWQWRIPLQHRNGNGHVYSSRYISDDQACDTLLSNLDTKPLGDPKLIKFTTGRRRKQWYKNVVAVGLSSGFLEPLESTSIHLIQSAIVRLIQLFPHNGFAPSLETEYNKQSELEFEQIRDFLVLHYTVNERTDSAFFNDMRNITLPDSLAHKIALFKESGNLLREQNDLFLESSWLQVLYGQGITPKDYHGLVNSVPEVQLNQMLTRLLEIKKEPIAKLPTHDEYINGMVAKYKRAMS

SEQ ID NO: 90026 - protein, 506 aa, Alteromonas macleodii
  misc_feature (1)..(506): tr|A0A2K9IJP5|A0A2K9IJP5_ALTMA NAD(FAD)-dependent dehyd rogenase OS=Alteromonas macleodii OX=28108 GN=TE101_145 70 PE=4 SV=1
MNKLPQEIVIVGGGTAGWMTACYLARTAELMANNSNVPACAPKITLLESAVISTVGVGEGSTPYLRHFFEFLGINENEWMLKCSATYKMGISFERWTTTAGTEKTGPAFTDSDSYFHPFFSSLDIPTADMYFSAVNEYRKGASHDINPSHYFTAAHMVEKGITPDAICSSANIDYAYHFDAGLLGDFLKEYALNKGVSHQIGTVANVESHEHTINSLKLDDGNTLSADFFIDCSGFQGLLGKQALSRRFTSYADTLFNDAAVAIASDATASPETALQTRSIALGHGWQWHIPLTSRTGNGYVYSSQFCTEAQAEEELRLVLEPDQSHQQARHLKMTVGRLEEHWKGNCLCIGLSQGFIEPLEATALMLVQYALHHFIDCWQSNNPRREERYNSEINRMFDGIRDYIAAHYYLNTRDDSAYWVACREDLTVPDTLSYLLNAWDKGASFEQALNEVDNKLVYLRPSWYCIFAGMKRFSNNTTPLAQPNTLALRTMQQSVEGAHRVRQP

SEQ ID NO: 90027 - protein, 505 aa, Xanthomonas translucens
  misc_feature (1)..(505): tr|A0A514EGF1|A0A514EGF1_XANCT Tryptophan 7-halogenase OS=Xanthomonas translucens pv. cerealis OX=152263 GN=E4 A48_16710 PE=4 SV=1
MIAAPLRNLVIVGGGTAGWMAAAALARVLGPDYRITLIESEQIGIVGVGEATVPHIKAFNNLLGINEAEFVRQTQGSFKLGIEFVDWQRPGTTYIHGFGTEIGHSLGLLPFQQYWFKQALAGKAKPLGAYTLNTVAARRGKFMTSASDAPPNSPLGNIAYAYHFDASLYAAFLRRFSEQRGVTRREGIVEQVQLHPESGDVRSVRLASGDTIAGDLFIDCSGFCGLLIEQALHTGYHDFTHWLPCDRALAVPCAKVGPPTPYTRATARAAGWQWRIPLQHRTGNGYVYSSAHISDDEAAATLLANLDGAALADPRPLRFVTGRRKQVWNRNVVALGLASGFMEPLESTSIHLIQSGISKLLELFPREGISPVLVQRYNDRIAFEFDRIRDFLALHYTATEREDSDFWRQCRTMAITPELQATLDLFGDSGRFYRNGDEMFAEISWVQVMVGQGILPRAYHPLVDQVPAADIERFVASIEQTIGHCVDAMPPHQAFIDRYCAAAPR

SEQ ID NO: 90028 - protein, 500 aa, Alteromonas macleodii
  misc_feature (1)..(500): tr|A0A351UEY5|A0A351UEY5_ALTMA Tryptophan halogenase OS =Alteromonas macleodii OX=28108 GN=DCZ37_11735 PE=4 SV= 1
MTTPHRIVIAGGGTAGWMAANLLAHRWANQAVSITLIESEDIGTIGVGEGSTPTLKRFFQTLDIPEYDWMEECQATYKVNIKFTGWNGNDSHSYSHPFISQLDVFSERAFHVNALTRRLGLDVETRPDKFLMAGYLAKKNLAPLPSHNFPFDIEYGYHFDSLKLGRFLRERAKSKGVYHVIGNIESVHTSPSGDISHLVCQDGQKLDGDLFIDCTGFSGLLLQKTLGVPFRDFSDNLFNDSAVVLPTPACANLPVETESVAMSNGWRWQIPLRNRTGNGYVYSQQYQEKDAAECELRRALGMENTDVEAKHLSMRVGQCERHWEKNCLALGLSQGFIEPLEATALHLVQTSIELFADNYSFNENSAQQRQAFNQEVSERFERVRDYIVCHYKLNGRNDSDYWRDNRANMKLSESLLSLLDVWYRKGDIVEEIKRQGIGRHFSTTSWHCLLSGYGVYPPPALNQPASLKESGDLFEEKKLAAFFNRCSLNFDKQSTLFNAG

SEQ ID NO: 90029 - protein, 522 aa, Alteromonas macleodii
  misc_feature (1)..(522): tr|A0A2K9I7A8|A0A2K9I7A8_ALTMA Tryptophan halogenase OS =Alteromonas macleodii OX=28108 GN=TE101_02860 PE=4 SV= 1
MHQANSPLRRIVVVGGGAAGWLTASIIAVTHKHDDNISVTLVESPDVSILGVGEGTWPTMRSTLLKIGISEETFLAQCNASFKQGTSFHNWRSDNVEHQYYHPFSLPFRYFESDVAAWWQSYAAEQDFAHAVCSQAALCDHHLAPKQRQTPAYAGIANYGYHLDANKFAALLQKHATTVLGVQHIVDHVDDVVSSPSQPIAAIVGREHGNITGDLFIDCTGFAARLIGQHYGVPLTSCSNVLANDSAIAIQAPYVDSSVDIASTTHSTAQDSGWIWDIGLPSRKGVGYVYSSAHCSEDEARATLETYLKHDKKTADVDVSKARKITFSPGYRKTLWVENCVAIGTSAGFLEPLEASALVMIELSATHIAKQLPRTYKECQAAGRQFNQAFEKKWERIVDFLKLHYVLSEREASAYWRDMRNQESCSTQLQDWLTLWKSRSPISSDFELREELFPAASYLFVLYGMGFRSQYNDVYQANLHTPEQRQAYAKHVQSIQQQLSGLPTNRQFLNQVAQSQGLSMHY

SEQ ID NO: 90030 - protein, 511 aa, Novosphingobium sp.
  misc_feature (1)..(511): tr|A0A437NAF6|A0A437NAF6_9SPHN Tryptophan 7-halogenase OS=Novosphingobium sp. FSY-9 OX=1908524 GN=EOE18_02790 PE=4 SV=1
MGEQAPQGEARTRIIIVGGGTAGWMTAAAFGHFLEAGYEVALVESDAIGTIGVGEATIPHIRLFNQALGIDEDAFLRATQGTFKLGIAFDGWLREGHSYIHAFGDVGRDVGLCAFQHYWSRAARLGWAEGTGAYTLNTQAALAGKMHRGAPYTPQNVPVMPYAYHFDAGLYAAFLRKFAQARGVVRHEGMIQRVERDGQSGDITALHLADGRQIAGDLFVDCSGMRALLIGEALGAEYQDWRHWLPCDSAMAVQSPRVADLVPYTRSIAQDVGWQWRIPLQHRTGNGRVYASDYIADERVREQLLGGIEGKALHDPRVIRFVTGRRREAWKHNVIAVGLSSGFLEPLESTSIHLIQTAIARILKFLPGKQQHQADRDAYNRQFAFEMERIRDFIILHYWANQRDEPFWQACRAMTLPDSLCQKIDLFTASGQIHREGEELFSEVGWFQVMANQGLLPRASHGMAQTISEGDLRDYLDLLKALYAREVAQYATHEAFIARHCAAQMPMMVQA

SEQ ID NO: 90031 - protein, 501 aa, Alteromonas macleodii
  misc_feature (1)..(501): tr|A0A126Q5H0|A0A126Q5H0_ALTMA Tryptophan halogenase OS =Alteromonas macleodii OX=28108 GN=AVL55_19915 PE=4 SV= 1
MTVSGLDSSKNQTPVKNVVIAGGGTAGWMAATALSRLLGKSINVTLVESKDIGIVGVGEATIPPIRTFHKLLGIDEKAFMRATQATFKLGIEFENWREQGHSYIHSFGITGRECWAGEFHHFWLRAKEYGFGGEFGDYCPELIAAKQSKFATSEAMPLNFAYHFDAVAYGRFLKSLACDAGVTHKEGDIEEVVVCPQSGNIQSLRLASDEVIDGDFFIDCTGFKGLLIEQALHTGYDDWRHYLFCDSAVAIQTELTAPPVPYTKSVAHQAGWRWQIPLQERMGNGLVFCSRFMSDEDAINTLKSQVTGAPINEPRVIRFTPGKRRRGWNKNCVALGLSSGFIEPLESTSIHLIMTGLIRLMRLFPFDGITQSAIDEYNNKFDSEMSAILDFIVMHYKVTQREDSPFWQQCQRMDIPSSLKHKLDLFAESGRVFLDDGDIFRVDSWTQVLMGQGMTPSQYHRVADEMSEQSLKQFIEGLKQQLDNHVAKLPSHEAFLTQYLR

SEQ ID NO: 90032 - protein, 507 aa, Paraglaciecola arctica
  misc_feature (1)..(507): tr|K6Z687|K6Z687_9ALTE Tryptophan halogenase OS=Paragla ciecola arctica BSs20135 OX=493475 GN=GARC_1978 PE=4 SV =1
MAAVEQQISSIVIVGGGTAGWMTAAALCQHFLDTPVQITLVESSQLGTIGVGEATIPTLRRFYNKLGFSDIDVIRATNATCKLGIEFQDWHSPGSSFIHPFGLFGLPVKDTPFHHYWLKAQQTGNASDLADYSLGVNLAKQDKFCFPSPKPESALQIFDWALHFDAALFADLMRTHAIKNNITAIDGKIAEVVLDSQNGDIKTLQLEDGRQINGDLFIDCSGFAGLLIEKALHCGFEDWSQWLLCDKAFAVQTESVGAPIPRTIAKAHQAGWQWKIPLQHRSGNGHVYSSQYISDDDALQTLIENLDGKALHSPRQFSFKPGRRKNAWHKNCIAVGLAAGFLEPLESTSIALVETAIDKIIQSFPKAAFSQTEVDKFNQVTATEYERVRDFIILHYKANQRDDSPMWRYCREMSVPDSLNEKMQAFKSVGDLSRSPWEIFGPDSWLAIYSGFNYLPDTYAAEVDNMPTEYLNTNLAKMRSAIKNMVTPVPSHLEFLSRFCAYKANTQ

SEQ ID NO: 90033 - protein, 506 aa, Alteromonas macleodii; identical to SEQ ID NO: 88091
  misc_feature (1)..(506): tr|A0A351UE59|A0A351UE59_ALTMA Tryptophan 7-halogenase OS=Alteromonas macleodii OX=28108 GN=DCZ37_10320 PE=4 S V=1

SEQ ID NO: 90034 - protein, 538 aa, Burkholderia pseudomallei; identical to SEQ ID NO: 84273
  misc_feature (1)..(538): tr|A8EMZ6|A8EMZ6_BURPE Tryptophan halogenase OS=Burkhol deria pseudomallei 406e OX=360118 GN=BURPS406E_D0266 PE =4 SV=1

SEQ ID NO: 90035 - protein, 520 aa, Streptomyces sp.
  misc_feature (1)..(520): tr|A0A0M8THW5|A0A0M8THW5_9ACTN Tryptophan halogenase OS =Streptomyces sp. MMG1533 OX=1415546 GN=ADK57_29550 PE= 4 SV=1
MARLPRPHGRAVGADHRRRAVNPTGEQSEAEEFDVIVVGGGPAGATAASAVALRGHRVLLLEQQTFPRYQIGESLLPSTVHGVCRILGVEEEVARAGFKTKRGGTFRWGRNPDPWQFSFALSPRLADPTSFAYQVERSRFDAILLDNARRVGVDVREGCRVKGVLADEERVRGVGWTGPSGEIREARARYVVDASGNGSRIHGEVGGRRTYSDFFRNIAVFGYFAGGRRLPKPNDGNIFCAAFDEGWLWYIPLRDDLTSVGAVVSRENTAAIQRDPVTAWRRLIDSCPEVRDLLHGVPQATEVPYDQVRVRKDWSYWKSRLWRPGMVLVGDAACFVDPVLSSGVHLATYGALLAARSVNSGLAGALDEGRLFDEFEARYRHEYGLFHEFLVSFYDMHQDERSYFWKARKVTHVDTTELEAFVDLVGGLASGDTSLGGPAEAGARLTAAASELDEAVGRLPDSDGRRNPLFESATIRQVFQEGAVLQERGVFGGPLEDETPLRADGLVASEDGLTWVDPGR

SEQ ID NO: 90036 - protein, 522 aa, Alteromonas macleodii
  misc_feature (1)..(522): tr|A0A1E7D826|A0A1E7D826_ALTMA Tryptophan halogenase OS =Alteromonas macleodii OX=28108 GN=BFV94_4006 PE=4 SV=1
MTTATPITHIVVVGGGSAGWLTAGRIAAQHQCATRKNIKVTLIESPNVPIIGVGEGTWPTMRSTLIALGISETTFIKECDATFKQGAKFAKWTTGEEHDFYYHPLMLPQGFSQTNLGPYWQTVAPELNESFSHAVCVQEAICEAGCAPKSIRHAEFAGTANYAYHLDAGKFTAFLTKYCTEKLGVHHVLADVNRVESSNNGDIKALHTEQGVTVEGDLFVDCTGFKSMLLGEHYKVPFIPCDDVLFIDRALAVHVPYDTPQSPIASHTISTAQDAGWIWDIGLQSRRGVGHVYSSRHQSKDDAYARLDTYVRQTSTLNGIDGIKVKDITIQSGHRQRFWQNNCVAVGLAAGFLEPLEASALVLVELSASMIAEQLPANRAVMDIVAKRFNDTFSYRWQRIIDFLKLHYMLSKREDSAFWRDNRDSHTIPDSLKELLALWQYHPPSDKDFTSNNEVFPAASYQYVLYGMGFTSDLGAHQQWVNADFAKQQLMQNRKARGMAVEKLPKHRELINKIHQFGLQAV

SEQ ID NO: 90037 - protein, 506 aa, Lysobacter silvestris
  misc_feature (1)..(506): tr|A0A2K1PZJ7|A0A2K1PZJ7_9GAMM Tryptophan halogenase OS =Lysobacter silvestris OX=1645665 GN=Lysil_2392 PE=4 SV =1
MDENAIGDIVVVGGGAAGWMAAAALARHLGKNRKIRVVESDEIGIVGVGEATVPHIRTFNAQVLGLDEADFVKATQGTFKLGIQFRDWARIGDTYYHGFGSVGQDLGPVPFHHYWLRARGAGRAQDYCHYGLQSEAAEQGRFMPPASDVPATSPLANIAYAYHFDAASYAKYLRGYAEKLGVVRHEGKIVQVSQRPDDGFIDAVVLESGERIAGDLFIDCSGFRGLLIEQTLKAGYEDWSHWLPCDRALAVPCATTEAPTPYTRCTARPAGWQWRIPLQHRVGNGYVYSSRFVSDDEAAAALLANLDGEALAEPRPLRFITGKRRKFWDKNVVAVGLASGFMEPLESTSIHLIQMSIVRLIDMFPDVGFDPGLVERYNRAVDFDYDRIRDFIVLHYKATERDDTPFWNHCRTMSVPDSLQENIDLFRRSGRFYRDGEEFFAMQSWVQVLLGQRIVPEVCHPIVDQMPEEEVFKFVEHVGKVISACAQAMPPHQAFIDRLCKAPAMT

SEQ ID NO: 90038 - protein, 506 aa, Alteromonas macleodii
  misc_feature (1)..(506): tr|A0A2K9IB21|A0A2K9IB21_ALTMA Tryptophan halogenase OS =Alteromonas macleodii OX=28108 GN=TE101_09550 PE=4 SV= 1
MQDPHNKPIKRVVIAGGGTAGWLAASLMKKVLGKAVDITLVESEAIGTVGVGEATIPPIRLVNQVLGIDEAQFLHDTKATIKLAIRFENWKTKGESYYHTFGAPGKSMAFCHFHHYWVKARQQGLKDDLWDFDLNYHAAEAGRFAQINAKDPVVELPFAYHFDASLYAQYLRKLSENMGVVRKEGKISRVQRFTDSGFIQALHLESGDVVEGDLFVDCTGFKGLLIEEALGAGYDDWSHLLPCDSAIAVPSERHEKTAPYTRSIAHDAGWQWRIPLQHRNGNGHVYSSRYISDDQACDTLLSNLDTKPLGDPKLIKFTTGRRRKQWYKNVVAVGLSSGFLEPLESTSIHLIQSAIVRLIQLFPHNGFAPSLETEYNKQSELEFEQIRDFLVLHYTVNERTDSAFFNDMRNITLPDSLAHKIALFKESGNLLREQNDLFLESSWLQVLYGQGITPKDYHGLVNSVPEVQLNQMLTRLLEIKKEPIAKLPTHDEYINGMVAKYKRAMS

SEQ ID NO: 90039 - protein, 500 aa, Alteromonas macleodii
  misc_feature (1)..(500): tr|A0A2K9IDC8|A0A2K9IDC8_ALTMA Tryptophan halogenase OS =Alteromonas macleodii OX=28108 GN=TE101_13935 PE=4 SV= 1
MTTPHRIVIAGGGTAGWMAANLLAHRWANQAVTITLIESEDIGTIGVGEGSTPTLKRFFQTLDIPEYDWMEECQATYKVNIKFTGWNGNNSHSYSHPFISQLDVFSERAFHVNALTRRLGLDVETRPDKFLMAGYLAKKNLAPLPSHNFPFDIEYGYHFDSLKLGRFLRERAKSRGVYHVVGNIESVHTSPSGDISHLVCQDGQKLDGDLFIDCTGFSGLLLQKTLGVPFRDFSDNLFNDSAVVLPTPACANLPVETESVAMSNGWRWQIPLRNRTGNGYVYSQQYQEKDAAECELRRALGMENTDVEAKHLSMRVGQCERHWEKNCLALGLSQGFIEPLEATALHLVQTSIELFADNYSFNETSAQQRQAFNREVSERFERVRDYIVCHYKLNGRNDSDYWRDNRANMKLSESLFSLLDVWYRKGDIVEEIKRQGIGRHFSTTSWHCLLSGYGVFPPPALNQPASLKESGDLFEEKKLAAFFNRCSLNFDKQSTLFNAG

SEQ ID NO: 90040 - protein, 501 aa, Paraglaciecola arctica
  misc_feature (1)..(501): tr|K6YNM0|K6YNM0_9ALTE Response regulator receiver doma in-containing protein OS=Paraglaciecola arctica BSs2013 5 OX=493475 GN=GARC_1258 PE=4 SV=1
MLDNECKPKKILIVGGGTAGWMAANLLATKWKGTEICLVESKEIGIIGVGEGSTPHLKFFFDAIGVADPQWMPRCNATYKNGITFDKWSTHQGFESYFHPFEAQTDDLFTTPHFFKNIQARKQGYNVDAHPDKYFLETYLSRNNLGPLPEETFPFGVAYGYHFDSALLGQFLAENAESLGVTRTYGNVQDVIVNNQGNLSSVKLGDGTTLEADFFIDCTGFSSLLMQQTLKVNYKSFKDNLFNDSAVVMPSEITQALPVETKSTALTNGWAWKIPLRNRFGNGYVYSSDYIDGDQAETELRQHLGLLESDVQARHLKMKVGRVEKHWHKNCLAVGLSQGFIEPLEATAIALSFNTVTQFMQYFGEGKGTNKFEEAFNKDINSRFDGIRDYVVCHYKANQRTDSQYWLDNAANNNISDTLNRILSLWKNSNDFAADMYKYKLMGSYQPKSWACLLAGYGVFPQKNIDPSIDYSAHQQEIDDLSNFIRRCALNFKNHNDLLTL

SEQ ID NO: 90041 - protein, 500 aa, Novosphingobium sp.
  misc_feature (1)..(500): tr|A0A258V995|A0A258V995_9SPHN Tryptophan halogenase OS =Novosphingobium sp. 28-62-57 OX=1970409 GN=B7Y36_03190 PE=4 SV=1
MSNPDLMIRSIAVIGGGTAGWMTAAALAQALQHNCQITLVESDEIGTVGVGEATIPPIRTFNETLQIDEREFVRKTKGSFKLGIEFVDWGTLGNRYFHPFGPHGRAFDIVNLHHYWLKAREAGENAPLDDHSMAWAMAKENRFSRPSPDQRNVLSTFEYAYHFDAGLYARFLREYSEAKGVTRIEGKVASVQQNGQTGFVTGVTLEDGRAIEAELFVDCSGFRGLLIEGALKAGYEDWTHWLPCDRAVAVPCENVGPLTPYTRSTAREAGWQWRIPLQHRTGNGYVFCSQFLSEQDAADKLVSRLDGKALADPRPLRFVTGRRKTFWEKNVVAVGLSSGFMEPLESTSIHLIQAGISKLLALFPDRTFDPLVIEEYNRIAVSEYERIRDFLILHYKLTDRDDSELWRYCAAMDVPDTLSSKIEHFRRYGRLVQRDADLFGPPSWLAVHIGQGNMPQRTDPLADYRKVDGREWLGKLRAAMHHAALQQPSHEQFIAAHCAA

SEQ ID NO: 90042 - protein, 411 aa, Histophilus somni
  misc_feature (1)..(411): tr|B0UWU1|B0UWU1_HISS2 Tryptophan halogenase OS=Histoph ilus somni (strain 2336) OX=228400 GN=HSM_0395 PE=4 SV= 1
MEKFDVVIIGAGPSGSVSASLLHKQGLKVCVLEKQHFPRFVIGESLLPYCMDILQEADLVEAVHAEKSFQFKNGAAFTWGNRYTYFDFTDKFTAGPGTTYQVRRGIFDKILIDETAKKGVEVRFGHEVSAFDNQGDQAELAVKTEQGEEYRLSAGFVLDASGYGRVLPRLLYLETPSHLPIRIAHFTHIDDNIDDPIFDRNKILITTHPEHRDVWLWLIPFADNRCSIGVVGLPEILAGESETVLKKFALECPMLSKILAKANWENEFPYRHIQGYSANVKTLHGKHFALLGNAAEFLDPVFSSGVTIALHSARLASRLIARGLQGQAVDWQQEFADPLMVGVNAFRTYVNGWYDYSFQDVIYARNPQPEIRQMLSSILAGYAWDEKNPFVTKSSPRLKALAELCGEATQD

SEQ ID NO: 90043 - protein, 499 aa, Ferrimonas balearica
  misc_feature (1)..(499): tr|E1SVG0|E1SVG0_FERBD Tryptophan halogenase OS=Ferrimo nas balearica (strain DSM 9799 / CCM 4581 / PAT) OX=550 540 GN=Fbal_1097 PE=4 SV=1
MQRQQVVILGGGSAGWMTAAMLARVLGSAVSLTLVESEQIGTVGVGEASIPPLALFNQALGIDEAEFMAATAATFKLGIQFEHWGQQGDRYLHAFGAIGRDLGLTPFHHLWLQQQPDEVADLWQYSLNAQAAEQHRFARLDRIDGTPLAGLTHAYHFDAGRYAAYLRQYAEQRGVVRIEGRVEQVEQAANGDIQALRLADGRRIEGQLFIDCSGLAARLIEQTLGSGFEDWSHWLPCDRAWAVPSANTDTLRPYTRAIAREAGWQWQIPLQHRTGNGLVFASRFLDEENARQQLLANLDSEPLAEPRLIRFRVGRRRQQWHRNCIAIGLSSGFLEPLESTSIHLIQSAIMRLVKLFPSAQGEMDALRDSFNRESQREFEQVRDFIILHYHLNQRGDAPLWRHTRTMALPESLAAKLALFGESGRLLRQQDELFTEVAWMQVMLGQGLVPKSVHPLAQSLSPAQLQEFLLNLRTIIGHTAGRLPSHQDFLARYCPMPNTP

SEQ ID NO: 90044 - protein, 536 aa, Roseateles aquatilis
  misc_feature (1)..(536): tr|A0A246J313|A0A246J313_9BURK Tryptophan halogenase OS =Roseateles aquatilis OX=431061 GN=CDN99_19980 PE=4 SV= 1
MPTTPADPMSPRRPVRRVVIAGGGTAGWMVAACLSKTLGRLLDIRLVESDEIGTVGVGEATIPTLLTFHHLLGINEQEFMAATQATFKLGISFEGWRDVGEDYIHSFGVTGTDHWTAGFQHFWLKGRERGLATEYGDYCLELRAAQEHRFAHLPRAGMNYAFHLDATLYGAYLRRLSEGHGVQRVEGRIADVLMHDADGSGADVPPRDRDIRALRLQDGTQIEGDLFIDCTGMRSLLLGQALGVGYQDWSHWLPCDSAIALQTASVRDAVPYTRSIAHPWGWQWQIPLQHRVGNGVVFSSRHTDDDTAQSALLGNIQGEVLTKPRVIRFKPGQRDVVWKRNCVGIGLASGFLEPLESTSIHLIQRSAIRLMQMFPKDGIRSSDVDEYNAQMAHELEHIRDFIILHYHVTNRSDSPMWRDLRAMAVPASLRHRLDLFRETARVFRVPNELFTENSWIQVMLGQGIAPEQFHPTADLMGDEELARFLGDMRERIEHTVRQLPSHEAYVRKYGAGMGSGLPATPPTGAPTVDARQRSAA

SEQ ID NO: 90045 - protein, 483 aa, Lysobacter silvestris
  misc_feature (1)..(483): tr|A0A2K1Q0Z0|A0A2K1Q0Z0_9GAMM Tryptophan halogenase OS =Lysobacter silvestris OX=1645665 GN=Lysil_0216 PE=4 SV =1
MIFSLATPEFRIIACSRYYALGMEASEVRPDGQTKSAGVTADTATMPPRSCDVQACDVLVIGGGPAGSTAATLLARDGWQVVMLEKEAHPRFHIGESLLPQNMPILERLGVHDAVRDCSTLKLGADFPNDNGSYEVFDFSKSFRPQSGYAFQVKRADFDKILWDNARAAGVDARDHNKVDRVDFADDGAITVHARGQQFRPRYLLDASGRDTVLGGKLALKRKNARHASAAIFSHYRGVQRREGRDAGNVSIYRHAHGWIWVIPLSDGVTSVGAVCFPDYLKQRRGDQEAFLMQTLMAVPELDARMRDAERIAPVHVTGNYAYECTRMHGRHWSLLGDAYAFVDPMFSSGVFLAMKSAEGCARMVDGILRTPAREASLQRKFQHQFDRGLDEFKWFIYRFTSPTMKHLFANRRDLFGVERAIVSMLSGDVFDAKPILRRLRIFRVIYALTTLGMSGRAFAAWRNRRRQLDVEVREETLQGDAP

SEQ ID NO: 90046 - protein, 505 aa, Sphingopyxis sp.
  misc_feature (1)..(505): tr|A0A0Q8RYJ2|A0A0Q8RYJ2_9SPHN Tryptophan halogenase OS =Sphingopyxis sp. Root214 OX=1736491 GN=ASE06_01810 PE= 4 SV=1
MNRVGDSRITKVVIVGGGTAGWMAAAALSRTMDNLSIRLVESDEIGTVGVGEATIPAIRLFNALIGIDENEFIRETGGTFKLGIQFHDWGRIGDVYMHAFGQIGRSLGMLPFQQYWLRGRNEGVAGRLGDSSLNETAGRQNRFARLPQIPNTSLDGIAYAFHFDAALYAAYLRKVAEAAGVERTEGKIASVRRNGEGGHVEAVVLDNGKAIEGELFIDCSGFRALLIEDALETGFEDWTHWLPCDRAIAVPSENAGPARPYTQAIAHKAGWQWRIPLQHRTGNGHVFCSDFISEDEATATLLAHVEGRPLAEPRTLRFRTGMRRKAWNANVVALGLASGFLEPLESTSIHLIQNGIAKLLAHFPDRDFDAANIDGYNRRVRFDYERIRDFVILHYHANQRTDAPFWIRCREMGIPDTLARKIELFKSHGQIVREGDELFIEIGWFQVLTGQNVMPAGYHPMVDQLTPDELAGFFADIETIVARTASHLPTHEEFIAQHCAAGVPA

SEQ ID NO: 90047 - protein, 495 aa, Sphingomonadales bacterium
  misc_feature (1)..(495): tr|A0A258E9S2|A0A258E9S2_9SPHN Tryptophan halogenase OS =Sphingomonadales bacterium 32-67-7 OX=1970595 GN=B7Z07 _02160 PE=4 SV=1
MIKRIVVAGGGTAGWMAAAALARTMGHTVAVTLVESEAIGTVGVGESTIPPLVVYNRLLGINEAEFMRATQATFKLGILFDNWKQPGDRYFHSFGYTGKDHWAAGFQHYWLEGRARGHAQPYDDYCLELIAALQSKFAQLPDNKVNYAYQLDSGLYARFLRQMAEADGVTRTEGKIARVELDGESGDIAALELDGGRRVEGDLFLDCTGFRALLIEGALHAGYDDWTHWLPCDSAIALQTPNVRPPVPYTRAMAHDAGWQWRIPLQHRTGNGIVYCSRYLDHDAALERLLGNIEGEPLTPPNKIRFQTGARRRQWHRNCIAIGLSGGFMEPLESTSIHLIQRAILRLIRMMPQGAISPRDIAEFNDQQFQDMEQIRDFLILHYKATDRRDSPFWRQCAAMDVPDSLAQKIELFRETARVFRRNEELFAENSWVQVMLGQGIEPQSWHPIAGKLNDDELDRLLGMIRQDVTRTVAGLPAHADYVARYCGAAEPAAA

SEQ ID NO: 90048 - protein, 524 aa, Sphingomonas sp.
  misc_feature (1)..(524): tr|A0A430DLU5|A0A430DLU5_9SPHN Tryptophan 7-halogenase OS=Sphingomonas sp. ABOLF OX=1985879 GN=CA235_10310 PE= 4 SV=1
MAAASWQASTTSSDLPLGAGRLCGRRRLYPRGPAVRQIVILGGGTAGWMAAAALSRFLPANHRVTLVESATIGTVGVGEATIPQIRLFNASLGIEQDSFLAATQGTIKLGIEFVGWTGPDSRYIHAFGTVGRGLGLVPFHHYWLRGQSGALSEYSVAAAAATAGRFAPDLGRPDLPTGLTWAYQFDAGLYADLLRQHAEGRGVARVEGTVAEVARDPLSGDVTALIMVDGRRIAGDLFIDCSGFRSLLVGGAMGVPFDDWSRWLPCDRALAVPSEVTQPIQLFTRATARTAGWQWRIPLRHRTGNGLVFCSTFMDEAAAAAELMGGLDAPARAEPRLIRFTTGRRTRAWAGNCVALGLASGFMEPLESTSLHLVQSGIARLLQFWPGEHIATADRDAFNRETEREWTAIRDFLVLHYRANTRAEPFWQACRATPLPDQLATKLDLFRASGRIVREGDELFTEVGWLQVLLGQGVHPNAYHPLADAPSAGDLASFLDAQRQHVAAVVGRMPTHDEFLRAATEELQ

SEQ ID NO: 90049 - protein, 501 aa, Paraglaciecola arctica
  misc_feature (1)..(501): tr|K6YQN8|K6YQN8_9ALTE Tryptophan halogenase OS=Paragla ciecola arctica BSs20135 OX=493475 GN=GARC_1976 PE=4 SV =1
MVKPINKIVIVGGGTAGWMAAASLAKYAQGKSLDICLIESSSIQTVGVGEATIPNIVEFNRILGIDEIELIKATKATFKLGIQFEDWHQKGESFFHPFADYGLKIDQLEFHQYLNRLAAGGEKVSIQDYSFSCALAKLGHFAQPHPQPPSPLADYSYAYHFDASLYAQFLQKFAVNLGVTHIDAKVEKVNLHSSNGFINSVTLDDGRDIEGQLFIDCSGFKGLLIEQALHTGYEDWSHWLFCDTAVAVQTESVGVTNPYTRSIAGDAGWQWRIPLQHRTGNGYIYSSQFEKDEDAENKLLETLQGKPINQPRKIAFTPGRRKQIWNKNCFALGLASGFLEPLESTSISLVQTAIAKLLNFFPDTDFNPYDIAEVNRLHNREVENIRDFLILHYKMTGRSDTDFWRRCQAMEIPDLLAHKMGVYQSRGHIVMTDNESFQSASWLTMYQGFNHLSKRFDPRAETVELAVLRQKLAQMRQSIDSAAQQAMSHDSFIDTHCRAQL

SEQ ID NO: 90050 - protein, 509 aa, Stenotrophomonas sp.
  misc_feature (1)..(509): tr|A0A427CGZ1|A0A427CGZ1_9GAMM Tryptophan 7-halogenase OS=Stenotrophomonas sp. 278 OX=2479851 GN=EGJ34_00725 P E=4 SV=1
MNAADTTDVRIRRVVIAGGGTAGWLAGCALAHQFRDQLDITLVESEQIGTVGVGESTVPPIRTFHRFLQIDEQEFLREVAGTFKLSISFENWRRPGERFFHPFGTIGQNTWATPFHHFWLDSLRRGMPSDLGDFCLESLASRGDQFSLDTQPQVSYAYHFDAGLYAKFLRRKAEAQGLKRVEGKIREVRQHPHDGSVQALVLEDGQVIEGDLFIDCSGFRGLLIEQTLKTGYEDWHEWLPSDRAVAVQTEAVAPPVPYTRAIAHEAGWRWHIALQHRVGCGLVFSSRHMSDDEAHAKLLRDVEGEPLRDPWLVPFRSGRRLKAWNRNVVSLGLASGFIEPLESTSIHLTISAVVRLIQLFPFDGISPSLVRLFNEVSQQEMEHVRDFIILHYHATQRDEPMWKACREMALPESLDIRLRAWRERAHAWQDPGELFRVDSWTSVLLGQGIQPGAPHPLARALGDADLRTLLARIQQPLHQAVARMPTQDAFIERYCRAAPEVWPSRVALA

SEQ ID NO: 90051 - protein, 498 aa, Sphingopyxis sp.
  misc_feature (1)..(498): tr|A0A0Q8RTG5|A0A0Q8RTG5_9SPHN Tryptophan halogenase OS =Sphingopyxis sp. Root214 OX=1736491 GN=ASE06_18685 PE= 4 SV=1
MSDKKPVRVVIAGGGTAGWMMAAAIARTMGQTVDLTLVESEQIGTIGVGESTIPPLVNFNRILGIPEPEFMRATQATFKLGILFDNWKHDGDSYFHSFGLSGKDHWSAGFQHFWLNARERGHEQPYSDYCLELVAGMEGKFAHLPEDRMNYAYHVDATLYGRFLRKLAEADGCKRLEGKIARVELDGESGDIAALHLDGDRRVEGDMFVDCTGFRGLLIDGALHAGFEDWSHWLPNDSAIAVQSKHLRAPQPYTQAIAHDAGWQWRIPLQHRMGAGIVYSSGYLSRDAAYDRLMSSVGEPLIEPFDIKFKGGVRRKQWFRNCVAVGLAGGFVEPLEATTVHLIQRAVLRFIRMMPNGRVSERDAAEFNDQQRVDIEQIRDFVVLHYKATNRRDSPFWRHVANMPVPDSLQQKIELFRETGRVFRKYEELFAENSWVQVMMGQGIEPQSYHPIAEKLRDDEVERLFQSIRDNIAQTVATLPEHHAYVARYCGADVPQPA

SEQ ID NO: 90052 - protein, 497 aa, Aestuariibacter sp.
  misc_feature (1)..(497): tr|A0A2D6XX52|A0A2D6XX52_9ALTE Tryptophan halogenase OS =Aestuariibacter sp. OX=1872400 GN=CL531_04525 PE=4 SV= 1
  misc_feature (182)..(182): Xaa can be any naturally occurring amino acid
MHTSAIHHYVIAGGGTAGWMTAALLGKLLNGTGARITLVESPDQPGVGVGEATVPSFVDFIKLLGIDEQTFVKATQATFKLGIQFSHWQTTGHSYWHPFGHVGARIDGKPFFQQWLHAHRSGLTQTYTDFSASARMAQENKFYIPNPQQPNNLSQMGYAYHFDAQQVAVFLRDFAVSKGVVXKQAHIEHVQMCPDNSVIQRLITRTGEHIDGDFFIDCTGTQARLMGQALNTGFTDWQRYLPVDRAWVVQTENTEEPVPYTKAIAEPMGWRWQIPLQHRTGNGLVFCSQYTSPDEAKRYLQTQLTSPLLNEPRLLTFKTGHLEQFWRSNCVAIGLSAGFLEPLESTGIYLIMRGILNLAKLLPSSPPCQATIHEYNQLMLSEYQHIRDFIVLHYCVSQRNDTRFWQSWQQREIPTTLAHKLALYRTRGVVSHGQSDLFADHSWHAVATGMNVLPRDVDPVVATTDVKALQDLLARIDHALAHSVGQLMPHGEYLKAW

SEQ ID NO: 90053 - protein, 497 aa, Aestuariibacter sp.
  misc_feature (1)..(497): tr|A0A2D6XVP1|A0A2D6XVP1_9ALTE Tryptophan halogenase OS =Aestuariibacter sp. OX=1872400 GN=CL531_01835 PE=4 SV= 1
  misc_feature (4)..(4): Xaa can be any naturally occurring amino acid
  misc_feature (137)..(137): Xaa can be any naturally occurring amino acid
  misc_feature (264)..(264): Xaa can be any naturally occurring amino acid
  misc_feature (267)..(267): Xaa can be any naturally occurring amino acid
  misc_feature (475)..(475): Xaa can be any naturally occurring amino acid
  misc_feature (484)..(484): Xaa can be any naturally occurring amino acid
MTQXKTRVVIAGGGTAGWLSAFSLVTRLGALLDITLVESDQIGTVGVGEATIPTMCNFHRLMGLDEREFMAATQATFKLGIQFDNWGNQGDSYVHSFGEIGQRSWMAEFHEFWMEAVANGQQDTLEDYCLELKAAKXNKFALKVGNRPLNFAYHLDATAYAAYLRNKAEQAGVTRIEGKITTVNKHPDSGNLRELVLDNDARIEGDVFIDCTGFRALLIGEALGVGYDDWSHLLAADRAIAVQTTAVEPPRPYTIATAHNAGWXWRXPLQSRVGNGIVYSSRFSDDETALATLMSNVTGEAVTEPRYLKFKTGMRQQAWAKNCVAIGLSSGFLEPLESTSIHLVTTALIRLMKLFPFEGECGLLAERYNRETQKEMETIRDFIVLHYHLTQRDDSAFWDFYRNMEIPESLQHRMAMFAEHGYVWPDDVALFRVDSWVQVMMGQGLMPKRHHGASRMLPTASLTQQLTAFKQSVNXALAQLPEHXAFIKQYCPADKSA

SEQ ID NO: 90054 - protein, 499 aa, Acinetobacter sp.
  misc_feature (1)..(499): tr|A0A3L9M461|A0A3L9M461_9GAMM Tryptophan 7-halogenase OS=Acinetobacter sp. 2JN-4 OX=2479844 GN=EAH57_11265 PE =4 SV=1
MLNLRGQQRVCIVGGGTAGWFAALHLRQLFSPSVEILLISAPEVPIVGVGEGGILNLMEALHRLKIPFGEFMQETEAVHKLGFVYEGWRDHQLNPKDCFYHMFPVKNEEIFWDEQGYFPTLSALLNHDIPISYVADSIQLRENNISQDTLTQMLVSDKSHNFASSFHFDTYKVGQYLRRIALQRGVIHQEGMFKEIIRETETGLVSTILVDDQSIHVDFVVDATGFSRKVLGEKLNVSWQSFQNYLPVNTAIPFHLKHSQKNPDLVTRSTAMNAGWVWQIPLQQRVGAGYVFDRNFITSEQAVEEVEQWLGHEIDPIRTISFEAGCYEEVWKGNVLAIGLASGFVEPLEATSIGQMLYQLGLFCAVVQECHGVVPQHSIDKFNQENLQGWHGIRDFIRMHYDTPRTDSAFWKAMQHRPMSATYTELKQCWRSRTPRELDLSCYEMGGVLQFGVYSWLAIGQALGVVKAEASAAELYALAPEKKQKVAQYLSAIKQRYNI

SEQ ID NO: 90055 - protein, 532 aa, Streptomyces wuyuanensis
  misc_feature (1)..(532): tr|A0A1G9TEQ5|A0A1G9TEQ5_9ACTN Tryptophan halogenase OS =Streptomyces wuyuanensis OX=1196353 GN=SAMN05444921_10 8238 PE=4 SV=1
MTSTDTRLKKVVILGGGTAGWMTAAYLGKALQGTVDITVLEAPTIPRIGVGEATVPNLQRAFFDYLGIPEDEWMRECNASFKMAVRFVNWRTEGRGEATARTLDDGRPDHFYHPFGLLPDYDQTPLSHYWFKRKYEGRTTEPFDYACFREPPIMDAMKAPRWLDGRSATRYAWHFDAQLVADFLRRFAIEKQSVRHVEDEMTEVVQDERGFVTSLRTRGGKDLDADLFVDCSGFRGLLINKAMAEPFVDMSDHLLCDSAVATAVPHDDEAGGVEPYTSAIAMSSGWAWKIPMLGRFGTGYVYSSKFTEQDEATAEFAAMWGLDPEKTAFNHIRFRVGRNRRAWVKNVVSIGLSSCFLEPLESTGIYFITAAIYQLAKHFPDTTFNEGLIDSFNREIEVMFDDTRDFIQAHFFYAPRNDTPFWQANKKLTLPDNIQQKIAAYRAGLPINSPITDESTYYGNFEAEFRNFWTNGSYYCIFAGMGLEPDAPLPALAYKPESVAGAEPLFETVKRQQQNLLETLPSAYEYLKRLHS

SEQ ID NO: 90056 - protein, 504 aa, Idiomarina aquimaris
  misc_feature (1)..(504): tr|A0A432XDU8|A0A432XDU8_9GAMM Tryptophan halogenase OS =Idiomarina aquimaris OX=641841 GN=CWE21_09445 PE=4 SV= 1
MSMSQPYHIVILGGGSAGWMTAAALSKVLDRQHYKITLIESTAIGTVSVGEATIPGIREFNQLLQIDENEFIRETHGSFKLGIAFENWQNIGDEYMHPFGTYGVTLNGVPFHHYYLRHEREQGSDNAIPLPELNLEWSAALAHKFTRPIADKRSPLGHIKYAYHFDAAAYARYLKNYATQRGVVALEDRMLEAKRHANGYVASLLLEKQGEVNGDFFIDCSGFKALLIGDTLGVSYHDWRKWMPCDSAVALPGKHNADDILPYTRSIAHHEGWRWKIPLQHRTGEGWVYSSRFTESDKAEREFRETIGNFDSKANHLRWINGRRDEAWKHNVCSIGLSAGFIEPLESTGLQLTQSGIMRLISLLPGRGNMTERAKAFNRYTAEEITNIRDFVMCHYKLTDRDDSEFWRYCRDMEIPDSLQERLDLYRENASIFRNSNNELFNEISWFSMFHGQGLTPEQVHPIAQQMPAATMQQHLTTIQRVFKQSVAQLPSHADFIRKHCQAS

SEQ ID NO: 90057 - protein, 518 aa, Colwellia sp.
  misc_feature (1)..(518): tr|A0A3D3GYN1|A0A3D3GYN1_COLSX Tryptophan halogenase OS =Colwellia sp. OX=56799 GN=DIS98_02865 PE=4 SV=1
MNKPLKKIVIVGGGSAGWLTAGIIAAEHSNNQGSGIEIILVESTDVPPIGVGEGTWPSMRSTLKKMGISETEFLLECDVSFKQGSKFTNWISNTNEHYYHPFTLPNGFNEINLSSYWQPFSDKISFADAVCEQSHLGAHGLAPKQISTAEYSFVANYGYHLNAGKFGQFLQKHCTVKLGVKHVIDHVSKINSSATGDIASITTKNQGDIFGDLFIDCTGTSSLLLAKHYKIPFISKKHILFNDSALAVHVPYESSDSSIASFTSSTAQTAGWIWDIGLPSRRGVGYTYSSAHISHDDAEQELRNYLIPSMGEDAAHALMIRKIPLNPGYREKFWHKNCVAIGMAAGFIEPLEASALALIELSAKMISEQLPANRQTMDIIAKRFNDKFLHRWENIINFLKLHYVLSQRTDSAYWLDNKNEKSIPKNLQELITLWRYQSPYHYDATHTEEMFPPASFQYILYGMNFVTAPLQHNKRESNKVEADKLFNDNIKKTQQLLSVLPTNRELINKIKKYGLPKI

SEQ ID NO: 90058 - protein, 518 aa, Colwellia sp.
  misc_feature (1)..(518): tr|A0A3D3GW75|A0A3D3GW75_COLSX Tryptophan 7-halogenase OS=Colwellia sp. OX=56799 GN=DIS98_03475 PE=4 SV=1
MSTTIDNLVIVGGGTAGWISACNLAKKLNIKSDESLNITIIESPDIPTIGVGEGTWPTMRKTLSNLGIDESEFMRECNATFKHGTKFVNWRETPIGNQSEYYYNLFTSFINPEEFNLGPYWNMGLAPKDKTYPDSVSMQQQICEAGLSPKKITTPAYEGIVNYAYSIDAGLFVKMLKKLATEKLGVKFIQTNVLKVNQDEDGYISSLDTDTAGCIPGDLFIDCTGFKALLIGETLKVPFNSFADKILTNHAVFIKVPYPDNETEIVPCTVSTAQECGWTWDISLSNRRGVGYVYSDKYSTHERAEEVLRNYIGEKSKGLTAKKIKINVGQRNEAFHKNCLAMGMAAAFIEPLEASAIFLIEAGSNMLANIFPRNRDALKNVANVYNESFNYRWARTIDFVKMHYVLSNRNDSEFWKDNKKLSSIPQSLTDQLNHWKSHPITAYDFPNTFEPFVMESYQFIYYGMMKDIKYHHNGSFPDTEKAKVIFNQIDKMTKQALIELPNHRELINKIYDFGMQKI

SEQ ID NO: 90059 - protein, 391 aa, Oxalobacteraceae bacterium
  misc_feature (1)..(391): tr|A0A4Q3K727|A0A4Q3K727_9BURK Tryptophan 7-halogenase (Fragment) OS=Oxalobacteraceae bacterium OX=1871070 GN= EOO77_39650 PE=4 SV=1
RNGGLADFQHFWLEARERGFGGAYGDYSLEQQAAGAGLFGHDERHSLAYAYHLDATAYAQFLRTLAEPWGVRRVEGRIERVERDGQRGDIAALVLASGERIDGDLFIDCTGFRALLTEATLETGYEDWSEWLTTDRALAVQTETVAPPVPYTRAIAHTAGWRWQIPLQTRTGNGLVYSSRHMSDDEAHATLIGALDSRPLFEPRPLRFRSGMRRQAWNRNCIALGLAAGFIEPLESTSIHLIMNAVIRLIQLFPFRGDDHVALASRYNSQSRHEWEHVRDFIILHYHVNERDDSLFWRDCASMTTPDSLAERLSLFTRTAGAWQGQDDLFRIDSWVSVMLGQGVVPRAHHRIASIIKGQELRTSFEDLSRGIASTVRLLPRHCDFLARYCP

SEQ ID NO: 90060 - protein, 513 aa, Shewanella putrefaciens
  misc_feature (1)..(513): tr|A0A366IQW0|A0A366IQW0_SHEPU Tryptophan halogenase OS =Shewanella putrefaciens OX=24 GN=DET47_11939 PE=4 SV=1
MTSIKNIKSVVIVGGGTAGWISACHLAKKLNARTPKIQVMLLESPNIPTIGVGEGTVPMLRETLKYFGIREDEFIRCCDVTFKQSVKFIDWNKPNSGEYYHHLFDYPYFKDFTSTWLNKSLSDRGRYADLVAVQGHLIDAGFGPKAMTQPQYRGAMHYAYHLDAAKFTKMLTKFGVEQLGVKHLLAEVIDTKIDAQGNILELHTDNAGILTADLYVDCTGFSAQLIGSACNVPFVDKSDILFVDSALVVQLPYEDKYTPIPCFTKSTAQEAGWIWDIGLSERRGVGYVYSSQYSSIEQAKSVLREYLGKATEHVSFRHIPMKVGYREKSWQGNCVAIGLSSGFVEPLEATGLLMFDATARMLAECFPANTDVMPLVANRYNQRVSNAWNRVIDFIKLHYVIAKRMDTPFWVDNKNEISIPDTLKEHLELWRYHIPTAYDFTSTLEFFNLENYLYVLYGSDFESKLERKLNDEEERLFTVMTEKLGKQVTLLKSQLLPHRELIERIKLYGIQLN

SEQ ID NO: 90061 - protein, 504 aa, Pseudoalteromonas ulvae
  misc_feature (1)..(504): tr|A0A244CTY7|A0A244CTY7_9GAMM Tryptophan halogenase OS =Pseudoalteromonas ulvae OX=107327 GN=B1199_01120 PE=4 SV=1
MSAVDNAIKEIVILGGGTAGWMAAAIIGNIFKSSDVSITLVESEQVEIIGVGEATIPPLLAVLESLGIDQADFIQATQASFKWGIEFVDWCEKGQQYFHPFGALGRPIDGHDFYQCWLKSQAEGDHTPLMAHSPEAMLSAHNKFYLPFEAMNTPLAGAHYALHLDAVLVGQYLRRFAENIGVKREVGHVEVANTDSKGFITDLVLQDGQTIAGDFFIDCSGFQGKLIEQTLQTGYDDWSEYLPCNRAVTVQSENINEPTPYTTAKAQDAGWTWRIPLQHRTGNGYVFCDKYISDEEAIATLLANLEGPAVCEPRVIPFLTGIRKQAWNKNCLALGLAQGFLEPLESTAIHLVSKTLALFVRMFPNKDCDSKLQHEFNRRVRVDYEEIRDFLVLHYCATQREDTAFWRWCKTMTVPESLQYKIEFFKTAGGLIPEAETLFQPTSWYAVFEGMQVRPENYNPTLDALDTTKLLQSMEQGRQSLAKAVLKQPSHQSFLSQYCAAKKP

SEQ ID NO: 90062 - protein, 507 aa, Shewanella decolorationis; identical to SEQ ID NO: 87014
  misc_feature (1)..(507): tr|V1DB21|V1DB21_9GAMM Tryptophan halogenase OS=Shewane lla decolorationis S12 OX=1353536 GN=SHD_2638 PE=4 SV=1

SEQ ID NO: 90063 - protein, 521 aa, Microbulbifer donghaiensis
  misc_feature (1)..(521): tr|A0A1M5B552|A0A1M5B552_9GAMM 2-polyprenyl-6-methoxyph enol hydroxylase OS=Microbulbifer donghaiensis OX=49401 6 GN=SAMN04487965_2073 PE=4 SV=1
MNTTDKTIRHVMIVGGGSAGWLTAAVLAAEYIPDTERGIQVTLVESPDVPTVGVGEGTWPSMRGTLKRIGVSETEFLRACDASFKQGSRFIDWIRGDGDEYFHPFTPPVSFQQLNLAPHWQKYRDQVPFADAVCGQAQISREALAPKMISTAEYAFALNYGYHLDAGKFAAFLQRHCTDKLGVRHLQERITDISGDTDGYIESLTTESGEKLTADLFVDCSGSASLLIGKHYGIPLRPQQQVLFNDRALAVQVAYPRPDSPIASCTHSTARAAGWVWDIGLPSRRGVGYTYSSAHTTDAEAEQVLREYIDQDAAVSGALLFEPRQIKFDPGYREKFWHRNCVAIGMAAGFIEPLEASALVMVEKSAQMLAELLPPDRAAMDAVERRFNRRFSGHWQRIIEFLKLHYVISQRSDSDYWLAHRNTESIPQSLKDSLEIWRYQPASLNDARMADELFPAASYQYVLSGMEFIADTTTVQRQGNQAAEAERLFRENARQAQRMSRALPSNRALLQQIGEVALPTI

SEQ ID NO: 90064 - protein, 500 aa, Sphingobium sp.
  misc_feature (1)..(500): tr|A0A1B3MNB0|A0A1B3MNB0_9SPHN FAD dependent oxidoreduc tase family protein OS=Sphingobium sp. RAC03 OX=1843368 GN=BSY17_3569 PE=4 SV=1
MSTLPPPRRIVVAGGGTAGWMTAAALARTLGPVAQVTLVESEQIGTIGVGESTIPPLVAYNRILGINEADFMRATQATFKLGINFENWRVPGESYFHSFGGTGKDHWSAGFQHFWMHGQAQGHDAPYGDYCLELKAAEAGRFAHLPDDRMNYAYQLDSGLYARFLRRMAEADGAQRIEGRITQVELDSESGDIAALLLDGDRRIEGDLFIDCTGFRALLIEGALHVGYDDWTHWLPCDGAVAIQTSSVRPPVPYTRAIAHEAGWQWRIPLQHRQGNGIVYCSGFLDPDAALEKLLASVEGDKLVQPNPIRFRTGARRRQWHRNCVAVGLSGGFMEPLESTSIHLIQRAVLRILRMLPAGTVSPLDIAEFNDQQMTDMEQIRDFLILHYKATDRRDTPFWRHCAAMAVPDSLAHRVELFRQTGRVFRKNEELFAENSWVQVMMGQGITPQSHHPIASKLRPDELTHLLASLKDQVSRTVANLPDHAAYIARYCSAQEPVAA

SEQ ID NO: 90065 - protein, 492 aa, Colwellia sp.
  misc_feature (1)..(492): tr|A0A3D0C663|A0A3D0C663_COLSX Tryptophan halogenase OS =Colwellia sp. OX=56799 GN=DEO86_04780 PE=4 SV=1
MNTNKINKVVIAGGGTAGWMAAAALSKLLGKNLDITLVESDEIATVGVGEATIPTLQYFHQLLNINEADFLKATHGTFKLGISFENWRDKNEDYIHAFGTTGKDCWAAGFQHFWLKGQQKGIAGEYGDYCLEKAAASAEKFAQLPNNGLNYAYHIDATLYGQFLRKISEQHGTIRVEGKIDKVNLNPESGYIDSLTLASGKVIEGDLFLDCTGQRALLIEQALHTGFEDWSHWLPCDSAIAVQTKSVANPIPYTRSIAHDFGWQWRIPLQHRVGNGIVFSSKFVTDDEAKSTLMNNLVGEAITEPRVIKFRTGTRRQHWNKNCVAVGLSSGFLEPLESTSIHLIQQAVVRLMRMFPHTGIQQSDIDEFNKQTKFDTASIRDFIILHYSVTNRQDSNFWRHCSNMPIPDTLATKIKLFKETGRFFRENNELFDDSWMQVMIGQGLLPKNYHPIVDNMSDDELKRFLEHIKANVDGTVNQLPNHAAFIEQFCHT

SEQ ID NO: 90066 - protein, 553 aa, Nostoc carneum
  misc_feature (1)..(553): tr|A0A1Z4HG63|A0A1Z4HG63_9NOSO Tryptophan halogenase OS =Nostoc carneum NIES-2107 OX=1973483 GN=NIES2107_04390 PE=4 SV=1
MMSDNVRQIVIVGGGSAGWMTAAYLSKALDERVKITLIESSNITKIGVGEATFSTIKVFFDFLGLKEQDWMPKCNATYKMAIKFMNWNAKGQHFYHPFQRYEVIDSFDISEWWLKMKRAQEAFDYACFVIPWLCDNQKSPRYLDGKVFDDKVQNEFSQEQIAKKNILDNLKVQYPYAYHFDANLLAKFMKDYAMQRGVQQIVDDVVDVQLTEDGNIDSLNTKKYGLLQGDLFIDCTGFQGLLINKTLNEPFISFSESLLCDRAIAMQIPSDMQKNGINPYTTSTALSSGWVWDIPLYGRNGTGYVYSSAFISEEEAEQEFRQHLGEVANNSKASHIKMRIGRNRNSWVKNCVAIGLSSGFVEPLESTGIFFIQHAIEELVNHFPGKCFNEELIRSYNKAVADCIDGVRDFLILHYCASDRADTKFWQATKNDIKVPEELQEKLRLWKNRLPSNKSINPKYHGFESYSYSVMLLGLNYIPESSLPVLEHIRNHNAQAVFQAIKERADYLISTLPSQYEYLTYVIQSQEHSEYLRDNHFPTALVNDMAQISVPIS

SEQ ID NO: 90067 - protein, 508 aa, Pseudoalteromonas sp.; identical to SEQ ID NO: 89546
  misc_feature (1)..(508): tr|A0A1R4KA91|A0A1R4KA91_9GAMM Tryptophan halogenase, p utative OS=Pseudoalteromonas sp. JB197 OX=1434839 GN=CZ 797_10320 PE=4 SV=1

SEQ ID NO: 90068 - protein, 522 aa, Colwellia sp.
  misc_feature (1)..(522): tr|A0A3D0C803|A0A3D0C803_COLSX Tryptophan halogenase OS =Colwellia sp. OX=56799 GN=DEO86_09425 PE=4 SV=1
MSVISSQPKKIIILGGGSAGWMAASLLHKAWAKKGTEILLIESDVINKIGVGEGSTPSLRLFFEHLGISEQEWMPECNATYKCGISFPGWTSLDDPAYANYPAYIHPFYSQADWKTGNAFMHNARLRREGVDVPAHPDNYWLQSYLAKHFKAPIARQQLSDEMDYGYHFDSALVGDFLKKRLLSLGLNHLTDTVDGVELDESDQISSVITKSNGAQRADLFIDCTGFAARLIRQALNVNFIDYSDSLFNDRAVAIQSPIDCSKNIPSQTTSTALSAGWAWQIPLSNRYGNGYVYSSKYISDEDAEKELRKHIGPSCKDHNARIIKMRLGRLSQHWHKNVLAVGLSQGFIEPLEATALMLIQHTVESFINNYEDMQLRKRDVLVQQDSFNDQLNEVFESIKDYIVAHYRLNSRTDSQYWCDNRENKNNSPRLNALLSTWHTPGGDFEAELHRHNAELTYFAPSWYCLFSGKGHFPTSLNEPSSNTKVAPTAEIIKYCHQVSQQFYHHNEQLERVYGDQWPKKV

SEQ ID NO: 90069 - protein, 101 aa, Ruegeria halocynthiae
  misc_feature (1)..(101): tr|A0A1H3G0J5|A0A1H3G0J5_9RHOB Tryptophan halogenase OS =Ruegeria halocynthiae OX=985054 GN=SAMN05444358_1228 P E=4 SV=1
MQPTGSVNYHVHSDTRQAFHIDAGGVTGKLISPELVATVIDVKDVCMGDAAVRFAVDSVGFLRAPTKVTNFTAGELWKADYDRELTDLLCPSSGILGQMAA

SEQ ID NO: 90070 - protein, 795 aa, Methylobacterium sp.
  misc_feature (1)..(795): tr|A0A0Q5CUX8|A0A0Q5CUX8_9RHIZ Tryptophan halogenase OS =Methylobacterium sp. Leaf123 OX=1736264 GN=ASF53_01045 PE=4 SV=1
  misc_feature (85)..(85): Xaa can be any naturally occurring amino acid
MFRSERSAPPRLVIAGGGPAGWLAAFYLKRVLRRAGWTVTLVGTAPATGISVALATRPSFTRFLNGFDIDEAIVMRRCAATYRLXSRYDDWFVQGEGHWHPFGACGPRIAGRDLFHYWMKLRGAGAEEEAGSYSDYAPQALMAAAGRGPRPDAAPSSLTESGEYGYHLDRAALVRFLRELALSEGVRAVTGRVGGIERDLYGDVAALVLDGGQKVEGDIFLDCTGAASQLIGTALGEAWIAGSGPGDRLARLSLPRSPEPPPFTAYRGRAEGWTASLPLADRTEHHFVYDSRATSPDAAAEILHRAFDGEGGLAHAELRYGRRAAPWQRNVVALGAAAGAVEPLVGFDLDLVLAGLEAFLAYLPRQGEGGDVLRRAYNARLNRFHDDAAEAVAAHYVLGRRPDRFWANARAVTIPDRLADRLDLYELAGHVAPSEEVLFGEGDHYLLFSGADFLPRRPFAPVDVADGREVARLLASIRAQSGGVAQAMAPHARLIEALHGPAPADAPVIRVAAAEVPSGPASLRRTPEGARLADLVAGLGQPFGYERSVKASPAGLQTERFLVSLHRSSLGLAPGKTLDELAARLGLPERERAEAAGLIADADILHLGYEDGPSGALYKLYVEWSSRTDAAWSAADAAGAEPMLVHRAYKWRPEGGHPPVVTLYHWPRVRSPDEIGARLTRIAGAWGAAGTSVRDTAQALLRLAQERGRGAVHYLEAREEPGLRLSYDLNLYACGLTVADAEPLLGQAFVDLGTSPQAAAAVLGERLRESLGHVAGGVGRDGQPFVTVYSGKAGA

SEQ ID NO: 90071 - protein, 287 aa, Oxalobacteraceae bacterium
  misc_feature (1)..(287): tr|A0A4Q3JSJ3|A0A4Q3JSJ3_9BURK Tryptophan 7-halogenase (Fragment) OS=Oxalobacteraceae bacterium OX=1871070 GN= EOO78_30060 PE=4 SV=1
MSNTIEHIVVVGGGSAGWLAAAVIAAEHRHLRVTLVESPGVPPIGVGEGTWPSMRDTLHRIGVSESAFFRECDAAFKQGSRFDRWVDGSAGDYYFHPFVLPQGYGDANLAAAWQAQHRTVPFADLASFQPHLCVQGRAPKQARTPEFAAVANYGYHLDAGKFGVFLRSHCVDKLGVRHVLDHVDAVVSHEDGERRGDIAGLRLRDGGVLAGDLFVDCTGMQSLLLGGHYGVALLHQRHVLFNDRALAVQVPYATPDAPIASQTTSTAQTCGWIWDIGLPTRRGIGHV

SEQ ID NO: 90072 - protein, 521 aa, Gammaproteobacteria bacterium
  misc_feature (1)..(521): tr|A0A0S7YXE4|A0A0S7YXE4_9GAMM Tryptophan halogenase OS =Gammaproteobacteria bacterium SG8_30 OX=1703404 GN=AMJ 58_11425 PE=4 SV=1
MNRPVTRVVVVGGGAAGWITAGLIAAEHDAASPSGVQVALVESPDVGPIGVGEGTWPTMRTTLSKLGIAETDFVRECDASFKQGTRFDGWCKGASYDRYYHPFTLPGGYVTTNLAEHWLTLSERVPFADAVSVQSHLCARGLAPKQAATPEYAAVANYGYHLDAGKFATLLQKHCTRRLGVRHILDHVTGVNSDEDGQIASLDSKIHGQIAGDLFVDCTGFASLLLGKHYRVPFISRRDNLFIDTALAVQVPYAGPESPIESQTISTAQQAGWIWDIGLSSRRGVGYVYSSAHTTDEQAECDLRAYVAPALGAGAESVPLRRIPINPGHRERFWHQNCVAVGMSAGFLEPLEASALVMVELSAQMISEQLPATRETMPIVAKRFNENFRYRWDRVIDFLKLHYVLSRRTDSDFWIDNREERSVPESLNEALALWRHRVPWHGDLPHVDEVFSSASYQYVLYGMGFRTEPRATTRRSRDREVADRLFRDNVSRTQQLIAALPKNRELIDQVRKFGLPKGKAA

SEQ ID NO: 90073 - protein, 504 aa, Alteromonas naphthalenivorans; identical to SEQ ID NO: 86132
  misc_feature (1)..(504): tr|F5ZGD3|F5ZGD3_ALTNA Tryptophan halogenase OS=Alterom onas naphthalenivorans OX=715451 GN=ambt_22070 PE=4 SV= 1

SEQ ID NO: 90074 - protein, 514 aa, Sphingobium sp.
  misc_feature (1)..(514): tr|A0A1B3MQ93|A0A1B3MQ93_9SPHN FAD dependent oxidoreduc tase family protein OS=Sphingobium sp. RAC03 OX=1843368 GN=BSY17_3555 PE=4 SV=1
MVHPVRNIVIVGGGTAGWLTAGIIAARHRTRIGQGFSVTLVESPNTPIIGVGEGTWPTLRTTLSRMGVSESDFFRECDAAFKQGARFDGWTTGAVDDGYYHPLMLPQNFGQVNLAPHWLASNQGESFCDSVSAQGRICDDGLAPKTIATAEYDALANYAYHLDAGKFAPFIQRHCCETLGVHHVLADVQQVLMHENGDIRAIQTAQAGEIEGDLFVDCTGFKALLIEGAMKVPFKDCNDVLFCDTALAMQVPYERPDSPMASHTISTAQTSGWIWDIGIQTRRGVGHVFSSSHISDEEAERELRAYIGPAADGLNARKIKIRSGHRETFWKGNCVAVGLAAGFLEPLEASAIVLIELSAKIIAEQMPACREVMDIISSRFNATTHYRWGRIIDFLKLHYVLTKRTDSDFWRDNVRDETIPDRLKELLLLWRYQSPWFHDEFDRVEEVFPAASYQYVLYGMGYHTEVDPASLSRDHRLADRARRENAALTDKLCAGLPRHRDLINKIVAHGLPPV

SEQ ID NO: 90075 - protein, 547 aa, Idiomarina aquimaris
  misc_feature (1)..(547): tr|A0A432XG67|A0A432XG67_9GAMM Tryptophan 7-halogenase OS=Idiomarina aquimaris OX=641841 GN=CWE21_07890 PE=4 S V=1
MEKRKILIVGGGSAGWMAAAYLNGALNRRGNDHRVDIELLESPDTPRISVGEATIPSMRHLLAAIGIDEMEFMRVTEGTFKQSIKYVNWVHNDNSFYHHPFSSLRTHPIDYAGSNWLRSDRSVPFMETCSIQPLICEWGRAPVMFGEWRMGARLNYAYQMNAQKFADYLRDFSTARGVVHTKANMAQVKKHANGDIASVTTDKGQEITADIFVDCTGFRSLLLEKEMGVGYEDFGKYLLCDRAVTMHVPYDTHYPGMVRPYTTATALSNGWIWDIPMQTRRSIGYVHSSAFIDEEAAEREMRAYQGGNTDDLPCRFIPFKAGRRHQQWQGNCVAIGLSGGFIEPLESTGLYLSDLGAVLLAEHFPWRREDQEMLAARYNRLMTNRYYEILDFINMHYCLTKRTDTEFWRTVQEREHITDRLQAKFDYWRRKPPSPHDFQDQNFAAMLGQDTSALPPIGNGRQDARAPVDTGGLWNHESYECILYGMEFLQKECDQWFGERRPPTQVNPAILQRLQMARQMLPPHELWLQQALGMQDYPKAARPKGWI

SEQ ID NO: 90076 - protein, 490 aa, Colwellia sp.
  misc_feature (1)..(490): tr|A0A3D0C5A2|A0A3D0C5A2_COLSX Tryptophan halogenase (F ragment) OS=Colwellia sp. OX=56799 GN=DEO86_04765 PE=4 SV=1
DGVSITLIESPDIKPIGVGEGTWPTMRNTLEKIGISEDDFFRCTDASFKQGSQFIGWNTGQINDSYYHPFIAPHGFGQTNISANWQQLNNHIPFAHAISFQPYLCDHGCAPKQQQTPEYAGVANYGYHLNAGKFSALLQQHCIEKLGVQHISDDVIKVNGEIEENITSVTTKRNGDISAQLFVDCSGSKSILLGQHYQVPFISKKNILFNDTALAVQVPYSSPDAPIASHTISTAQKAGWIWDIGLPTRRGIGYVYASDYLTDSEAETTLRDYLKQDLPEQIINETVIRKISFTPGHREKFWHKNCVAVGMAAGFLEPLEASALALVELSANMIAKELPANMSIIDITAKRFNQRFHYRWQRIIEFLKLHYLLSKRTDSQYWRDNQSAESVPQRLQELIKLWRFQAPSYNDFSEIEEIFPAASYQYILYGMGFLTEKRSTSTHYDNTALAEKYAVENRQLCEKYLAGLPKNRQLIDHILARGNNNNVRSI

SEQ ID NO: 90077 - protein, 513 aa, Novosphingobium mathurense
  misc_feature (1)..(513): tr|A0A1U6I6F8|A0A1U6I6F8_9SPHN Tryptophan halogenase OS =Novosphingobium mathurense OX=428990 GN=SAMN06295987_1 04262 PE=4 SV=1
MQRPTKKIVIVGGGTAGWLTAGVIAAKHRSRMPGGFSVTLVESPNTPIIGVGEGTWPTLRTTLARIGVSETDFFRECDAAFKQGAKFARWTTGAPDDAYYHPLMLPQSFAQLNLAPHWLANGESSFCDAVCPQGRICDDGLAPKTIATPEFEALANYAYHLDAGKFAPFLQRHCTQKLGVRHVLADVQRVEMTDDGDIKSVVTEQAGEIEGDLFVDCTGFKALLIGEALGVPFKDCSDVLFCDTALAVQLPYESETSAIASHTISTAQSAGWIWDIGLPTRRGIGYVYSSDHTSGDEAEQELRAYLGAAGKDLPLRKIPIRSGHRETFWKRNCVAVGLAAGFLEPLEASAIVLIELSAKLIAEQMPACREVMDAIARRFNATTDYRWGRIIDFLKLHYVLTQRTDSAFWQDNLRPETIPERLQELLLLWKYQGPWFHDEFDRVEEVFPPASYQYVLYGMGFRTEVESEALAGDASLAARAMRENAAQTQRLRAGLPRHRDLIRKIVDHGLQPV

SEQ ID NO: 90078 - protein, 496 aa, Shewanella decolorationis
  misc_feature (1)..(496): tr|V1DGU0|V1DGU0_9GAMM Tryptophan halogenase OS=Shewane lla decolorationis S12 OX=1353536 GN=SHD_3043 PE=4 SV=1
MSQIKDIVIVGGGTSGWMTAALLAKLFKHTLNITLVESEDIGTIGVGEATIPPLQLFNSVLGIPENEFIQATHATFKLGIQFEHWGKQGDSYMHAFGNIGKDIGYTQFHQYWLSTQPEMMASFWDYSLNYQAALNNKFQSLEQIPHSPLSGLTHAYHFDAARYALLLRQYSEKSGVKRIEGKIESVNCAANGHITNLTLVSGNSVQGDFFIDCSGFAALLIGKTLNVGYESYQDWLLCDSAYAVPSEKACEIKPYTRAIAHEAGWQWRIPLQHRTGNGIVYSSRYMKDEEAKAKLLSTLEGKPLAEPKKISFIPGRRLKQWQHNCVAIGLSSGFLEPLESTSIHLVQSAIIRLTKLFPHQGVVQATVDEFNRQSQLEFEQIRDFIILHYYLNRRSDSDTDTLWSACQQMQIPESLQQKISLFSETGAIFRHKDELFTEAAWVQVMLGQGIIPTDYNPLANTVAPEALTEFLSNIKVIIKNTVSNMPTHEQYLAQLV

SEQ ID NO: 90079 - protein, 497 aa, Microbulbifer donghaiensis
  misc_feature (1)..(497): tr|A0A1M5B632|A0A1M5B632_9GAMM Tryptophan halogenase OS =Microbulbifer donghaiensis OX=494016 GN=SAMN04487965_2 076 PE=4 SV=1
MDTEKKIKKVVIAGGGTAGWMTAAALSKLIGKHLDIRLVESDAIGTVGVGEATIPTLHIFHQLLGLNEQEVMAATNATFKLGIKFENWRDVGKDYFHSFGTLGKDCWAAQFHHFWRKGLDRGIDFDIGDYCKEHLAAREGRFAVLPNQDRNHAYHLDATLYARFLRKFAEKNGVTRTEGKIAEVRLNHSDGFIEALQLESGELIEGELFIDCTGFRGLLIEQSLHTGYHDWTHWLPCDRAIAVQTEAVDRPVPYTRSIARESGWQWRIPLQSRVGNGLVYCSKYMDEEQARTQLLENVEGQLLSDPRVIPFRTGTRRKHWNKNCVAIGLSSGFIEPLESTSIHLIQRSVVRLMQLFPSRGICPADVDEFNAQTLNELEYIRDFIVLHYHVTERTDSKFWRYCRTMPIPDSLAHRLQMFRESGTLFNYEADLFGIASWIQVMLGQGLMPERHHPIVDLMGETELENFLASIRQQVRRQVENMPSHLDFIDHYCKANLD

SEQ ID NO: 90080 - protein, 531 aa, Streptomyces sp.
  misc_feature (1)..(531): tr|A0A3R8TW68|A0A3R8TW68_9ACTN Tryptophan 7-halogenase OS=Streptomyces sp. RP5T OX=2490848 GN=EHS43_01480 PE=4 SV=1
MEDHRIRNVVILGGGTAGWMAASYLGKALQGTATITVLEAPSIPKIGVGEATIPLLQNAFFNYLGIPEDEWMRECNAAFKTAVKFINWRTPGPAQAEGRPHEGRSDHFYHPFGLLPNHDGIPLSHYWYRKRALGETDLPFDYACFKEPAMMDAKRAPRWADGGPATRYAWHFDAHLVADYLRRYATGKQGVVHVQDEMTEVLKDERGFLTELRTKNGHSLPGDLFIDCSGFRGLLINQAMEEPFIDMSDHLLCDSAVATSVPHDDEKNGIEPYTSAIAMESGWTWKIPLLGRFGSGYVFSSRFADHDRAAQDLCRLWGLDPDATQVNRIRFRVGRNRRAWVRNCVSVGLASCFLEPLESTGIHFTYGAIYQLVKHFPDRRFDQALIDGFNREIEVMFDDTRDFIQAHFYFSPRNDTEFWRANKELKLTDNILEKVEAYKAGLPINQPYTTADTYYGDPGAEFRNFWTNGSYYCIFAGLGLMPDHPLPILDHRPESVAGAEQHFSAIRKEQELHAEGLGDNYRYLRSLHGLQ

SEQ ID NO: 90081 - protein, 479 aa, Gammaproteobacteria bacterium
  misc_feature (1)..(479): tr|A0A0S7YXU6|A0A0S7YXU6_9GAMM Tryptophan halogenase OS =Gammaproteobacteria bacterium SG8_30 OX=1703404 GN=AMJ 58_11440 PE=4 SV=1
MAAAALGKLMGRNLDISLIESDQIGTVGVGEATIPLLSAFHQLLGIDERDFMRQAQVTFKLGIQFENWGAIGDKYLHGFGIVGQDCWACPFHHFWVKSVKLGNKAPLTEYLLHRHAANAGRFELDRKNGLAYAYHFDATLYAKYLRRFSEQHGVTRIEGRIVDVATSRENGGIESLTLESGRKIEGDLYLDCSGFRALLIEQALHSGYADWTHWLPCDRAIAVQTRSVGPPRPYTRSIAREAGWQWQIPLQHRVGNGLVYCSQYLSDDDARKLLLDHVDGESISEPRLIRFRTGRRLKQWNRNCVSLGLASGFLEPLESTSLYLVQSGIVRLMHFFPTRGIDQLEIDEYNRKSRLEFEYIRDFIIMHYHVTQRDDSPFWNHCRTMDIPDSLSHRLELYKRNGRIFREDFELFFDGSWSQVMTGQRLMPEGYHPIVDMMSDQELKGLLSEIRSRHAQTVSRYPSHEAFLDEYCRAENPDR

SEQ ID NO: 90082 - protein, 457 aa, Xanthomonadales bacterium
  misc_feature (1)..(457): tr|A0A354Z1M6|A0A354Z1M6_9GAMM Tryptophan halogenase (F ragment) OS=Xanthomonadales bacterium OX=2006849 GN=DDZ 76_01025 PE=4 SV=1
MPADLTPFRVAILGGGTAGWMAACLMATRWQDRPVEITVIESPEIGIVGVGEGSTPQLNVFFRTLGLTEADWMPACNATWKNGIRFRRWSSAPGFDSYFHPFLSVIDVHTQQAFFLSTLLRRNGYDVPAHPDAFFLSTRLAEQRLAPLPARQFPFDMAYGYHFDAFLVGQCLARFAQSLGVRHQQARVDAVDLTDSGDVAALRLDDGSRITADLFVDSSGFRALIGQRALGVPFRAFTDNLFADAAVTLPTPPDPTGTNAHTTATALDCGWVWDIPLRNRTGNGYVYASAFCSADAAEQELRRHLGLLDADVEARHLKMRVGRVEQHWARNCLSVGLSQGFIEPLEATALHLVQATVEGFLDAFDGEGAIETRRAAFNARINRRFDGVRDYIVCHYRMNRRDDTPYWRANREHDRLSDSLKAILSTWFTGADLSAEIERQGIADIYPALSWHCLLAG

SEQ ID NO: 90083 - protein, 507 aa, Colwellia sp.
  misc_feature (1)..(507): tr|A0A3D3GZZ4|A0A3D3GZZ4_COLSX Tryptophan halogenase OS =Colwellia sp. OX=56799 GN=DIS98_05275 PE=4 SV=1
MTVGENKQQKINKVVIVGGGSAGWMTAAALAKVLGKNYCKIQLIESDQINTVSVGEATIPQISLFNKILGIDENEFVKQTQGTFKLGIEFLNWNKKKGGYMHPFGDHGRSMHAIQFHHYWLKMFNQGLAPDLEQYSLAAVAAREGKFMRSQNMGDSPLSDINYAFHFDATLYAKYLRKFAEKRGVTRTEGKVVDVSLRDSDGFIDSVILEDGQRINADLFIDCSGFKGLLIEKALNTGFEDWSDLLPCDSAVAIPCKPKDPDKLYPFTQSKAQKAGWIWRIPLQHRIGNGYVYPSKYISDEEAVDILTAQLEGEVIGKPNFLRWKTGIRKKTWNKNCVAIGLSAGFVEPLESTGLHLIQSAIAKLMALFPHQGFNQIDIDTFNKQSKTELEYIRDFIVLHYKVTDRDDSEFWRHCQSMKVSERLQAKIDLYQANGRIYREDNELFNETSWLSVMNGQGLVPSGYHPFVDALTDEDIDNRLKHIHKVIQKSVDVMPLQTDFINENCKA

SEQ ID NO: 90084 - protein, 515 aa, Pseudoalteromonas sp.
  misc_feature (1)..(515): tr|A0A1R4IBK1|A0A1R4IBK1_9GAMM Tryptophan halogenase, p utative OS=Pseudoalteromonas sp. JB197 OX=1434839 GN=CZ 797_00815 PE=4 SV=1
MHHNKIKHIVIVGGGSAGWLTAGLIAAQPHLTRQAKVTLIESPDVPILGVGEGSWPTLRQTLKTIGVSETEFIRQCDASFKQGSRFDGWINDAGNEHYYHPFSLPVGYQQLNIAPYWFGQHHAVSFSHAVSSQSYLCDHHKAPKTHLHCDYQSDANYGYHFDAGKFAELLKRHCIDKLGVTHLVSHVDEVINDADGYISALATRDLGLLQGDLFIDCSGHHARLISQHYAIELEPQEHILFNNRAVAAQVPYSNRQQDILSYTKATAQQTGWIWDIGLQSRRGVGMVYSSEFETAAGATDKLLAYLSNTQKELDTSQLSVRELSFTPGYRSQFWYKNCVAIGMSAGFIEPLEASALVMVELELGLNYLLANFPTQRNAMPHLSKRYDQQCHYRWQRVIEFLKLHYVLSERSSDYWQAHRDTSTIPQTLLDNLALWQYQSPWLNDFDRAQEVFSAASYQFILYGMKHLPAFPKMNMPASIIEHFTNNQQAAKQGLANLPTNRQLLEHIQKFGLQPI

SEQ ID NO: 90085 - protein, 496 aa, Colwellia sp.
  misc_feature (1)..(496): tr|A0A3D3GW13|A0A3D3GW13_COLSX Tryptophan halogenase OS =Colwellia sp. OX=56799 GN=DIS98_02880 PE=4 SV=1
MNDKAIKKVVIAGGGTAGWMTAAALSKLFGKNLEVVLVESDDIPTVGVGEATIPTLHIFHRLLGINEQEFMAATNATFKLGISFENWRNVNKDYIHSFGFLGHNCWAADFQHFWLKGKQRGIVSEIGDYVPEHLGARQGKFTVEANQASNYAYHLDAGLYAVFLEKIAEKHGLKRIEGCINKVVVDKDSGFIDSLELVNGKVVEGDLFIDCTGFRGLLIEQALHTGYEDWSHILPCDSAIAVQTKTVGKPVPYTRSIARDAGWQWKIPLQNRTGNGFVFCSKYMSNEEATQTLLANIEGEMLNEPRVIKYKTGSRRKHWNKNCVAIGLSSGFIEPLESTGIHLFQKAIIRLMQMFPSQGIKQADVDEFNTQTKTEVDSIKDFIILHYNLTERKDTPFWRYCSTMDIPETLKHRMLLFKESANVFKKEEELFGETSWVQVMMGQGLMPEQYHPIVDLMDDNELQKFLDNIRLSVKRKVDNWPDHLDFIEQYCKATVK

SEQ ID NO: 90086 - protein, 537 aa, Colwellia sp.
  misc_feature (1)..(537): tr|A0A3D3GWC1|A0A3D3GWC1_COLSX Tryptophan halogenase OS =Colwellia sp. OX=56799 GN=DIS98_06705 PE=4 SV=1
MSNQQNPHNIVILGGGTAGWMTANLMASAWQTQLNNGQLSITLIESPAIGIIGVGEGSTPQLKTFFETIGVTEKEWMPACNATYKNGILFQNWSTRPGFTRYFHPFTSVIDAHTAPAFVHNSHFKRQGYDIDSHVDRFFLSATLAAQQKAPIGQENFPFDISYGYHFDAVLMGKYLSKVASTKGVKHIVAKVEQVILAKSGDISQLLLNNGGTVSADLFIDCSGFESVLLQKSLQVPFVSFKENLFNDRAVTIATPRTPQQKINSQTISTAMKYGWAWDIPLTNRTGNGYVYSSQFCSAEQAEQELREKLGLTNNEIKANHLNMKVGRVTEHWHRNCLAVGLSQGFIEPLEATALHFVQETIEGFIVTYNNTATIGLNDANFNKISGDISQQVAAQKVQFNQKMNDRFDGIRDYIVGHYRLSNRSDTEYWRLNSENPNISNNLKKIVQVWLHGEDLNKAFIEGKVKSFYPPVSWHALLAGYGVFPETNQQLAYNAQANKYDLSHIDQFIKRSALNYDDHQVFLTGMQQEDDGDVSNR

SEQ ID NO: 90087 - protein, 492 aa, Porphyrobacter sp.
  misc_feature (1)..(492): tr|A0A2N4WWC3|A0A2N4WWC3_9SPHN Tryptophan halogenase OS =Porphyrobacter sp. TH134 OX=2067450 GN=C0V72_05685 PE= 4 SV=1
MTAAALVRVLGAMPGLSVTLIESEAIGTVGVGEATIPQIIGFNRLLGLDEMQFMRETRATYKLGIEFVDWLRPGHAYVHPFGSFGIDMLGIEFQHIWLRGQQAGDTSRIDDYSIAAMAGKSGRFAWPRPDNPKSPMSKLSYAFQFDAGRYARFLRRFAESAGAVRVEGRITDVRRDGETGFVTSVLLDDGREFGGELFIDCSGFRSLLLGQALGVPFTDWSKWLPCDSAVAVPCEIGGRNEPLTRSTARTAGWQWRIPLQHRIGNGHVFSSAHIDRTAATDLLLANLDGKPLADPNQIAFKAGHRERVWDKNVVALGLAAGFLEPLESTSIHLVQSGIARLLALFPDTGFSPAETERFNRESVREYVNIRDFLVLHYRASERDDSEFWRYCRHLPPPDGLAEKLELFRSSGRIIRDNNELFTEDSWLSVMLSQGVQPQTYHPAAWMLDEGETRKRLAHIRDVIAQTVSQLPSQDDFLRANGGAIAAAEYLTA

SEQ ID NO: 90088 - protein, 520 aa, Cellvibrionales bacterium; identical to SEQ ID NO: 84418
  misc_feature (1)..(520): tr|A0A3R7VPU5|A0A3R7VPU5_9GAMM Tryptophan 7-halogenase OS=Cellvibrionales bacterium TMED157 OX=1986773 GN=CBD1 7_003410 PE=4 SV=1

SEQ ID NO: 90089 - protein, 502 aa, Microbulbifer donghaiensis
  misc_feature (1)..(502): tr|A0A1M5FBQ1|A0A1M5FBQ1_9GAMM Tryptophan halogenase OS =Microbulbifer donghaiensis OX=494016 GN=SAMN04487965_2 867 PE=4 SV=1
MNDHKKRVVILGGGTAGWITANLMATHWKDKGFDITLVESPDIGIIGVGEGSTPPLKGFMDVIGVKESEWMPECNATYKVGITFKDWSTKPGFTEYVHPFLAQPDQFTAPAFFHNSFLRRKGVDLEGHPDHFFLATEMIRQKLAPVTPENFPFEIAYGYHFDSGLLGKFLARVAEKKGVKYKSATVTDVLLDTQGNIDCLKTAEGETLKADLYVDSSGFRGQLIQQALKVPFQSCAESLFNDSAVVFATEQEESYAPHTISTALKYGWAWKIPLTNRNGNGYVYSSRFVDDDKAETEFRQHLGLLDSDVEARRLKFKVGRVEQHWAKNCLAVGLSQGFIEPLEATALDMVQETVTRFIEAYNNGNYTDKYRKEFNDRISGRFDAVRDYIVCHYRITSRSDSDYWIANGSNEKISPSLRAILMSWMAGKNITDELLDQKLDVYFPNVSWNCLLTGKGIYPPQEQLRPGNELANKYKMEDIHEFIRRCALNFKSHQEQLQLLRQ

SEQ ID NO: 90090 - protein, 509 aa, Colwellia sp.
  misc_feature (1)..(509): tr|A0A3D0C9J3|A0A3D0C9J3_COLSX Tryptophan 7-halogenase OS=Colwellia sp. OX=56799 GN=DEO86_09430 PE=4 SV=1
MSMKKIVVVGGGTAGWLAANHLGKKFKHNSAITVTLIESPDIAPIGVGEGTVPNIRKTLSSFGISETEFIRECDVTFKQSIKFVNWMDKHKQGSDNFFHHLFDAPDKYAEDLTPYWLNHGQDSRYADMLSPQHSACEHNKAPKSITTPEYEGTLGYAYHLNAAKFAHLLCKNAVGKFAVEHLKANVIDVELNNDGAITSLVTKELGKLEYDFYLDCTGFESLLLGKALNVPFVDKSKELLVNSALVVQVPTQEEDEIPPYTVATAHQAGWIWDIALTNRRGVGFVYSNNHMSDDEAKTKLDHYLKGNPAGLTYRKLPMKVGHREKFWHKNCVSLGLAQGFLEPLEATSILLTDFAASYLADRFPESDEQMVMLEQRFNHVMGYAWDRVVDFIKLHYCISDRTDSQFWLDNKKAETIPDTLKARLHLWQQFSPQKEDFFSKFEIFDYDNYLYLLYGMNFKTKLASLPSHSHDKSKVQAEGIKAIAAQLNLQLPSHRELINKIKQYGLQAI

SEQ ID NO: 90091 - protein, 384 aa, Pseudomonas sp.
  misc_feature (1)..(384): tr|A0A2R7RRG1|A0A2R7RRG1_9PSED Tryptophan halogenase (F ragment) OS=Pseudomonas sp. HMWF010 OX=2056847 GN=DBR41 _28015 PE=4 SV=1
DHWSAGFQHFWMHGLTKGHVHSYDDYCLELKAALEGKFAHLPDERMNYAYQLDSTLYAAFLRKMAEGEGATRIEGKIARVELDGTTGNIAALCLDGDRRVEGDLFIDCTGFRALLIEGALHAGYDDWSHYLPCDSAIAVQTASVRPPVPYTRAIAHDAGWQWRIPLQHRQGNGIVYCSRYLDKDAALDRLLGSVEGEVLTKPNVIGFTTGARRKQWHRNCIAVGLSGGFMEPLESTSIHLIQRAILRIIRMLPNGKVSERDIAEFNEQQFADMYQIRDFLVLHYKVTERRDSPFWRHCAALPIPESLEQKIELFRETGRVFRRNEELFAENSWVQVMMGQGIMPETYHPVATKLPPEELEGFLAAQREAVANTVARLPDQQSYL

SEQ ID NO: 90092 - protein, 507 aa, Shewanella putrefaciens
  misc_feature (1)..(507): tr|A0A252EW56|A0A252EW56_SHEPU Tryptophan halogenase OS =Shewanella putrefaciens OX=24 GN=B7D78_08000 PE=4 SV=1
MTIRKIAIIGGGTSGWLAANHLGRVLQGRSELSITLIESPDIPIIGVGEGTVPSIRKSLQSFGISESEFIRSCDVTFKQSIKFVNWLDKARHGKDNFYHHLFDIINLQGVDTVSAWLGEKQGDFADYVSPQHLVCEAAKAPKLITTPEYAGVLGYAYHLNAAKFAKLLAKNAIEKFNVEHIFATVQDVRLGDDGAISSLLTEQGTLSFDFYIDCSGFESILLAKALKVPFISKAHQLFIDTALVAQIPTQPTDIIPPYTQATAHRAGWIWDIALTQRRGTGFVYSSAHMAQSEAERKFDHYLGGKLADVPHRKIPMTVGHRQQFWVKNCVALGLAQGFLEPIEATSILLTDFSARFLAERFPVHTDDVDYLAKRFNDTVGYAWERVVEFAKLHYCLSDRTDSSFWLDNQASETIPEGLRQRLELWKSYSPIAEDFPSKFEVFNLDNYLYVLYGMKYQTNLCGGSSATQASLNMYMNKMSKVKQQMLDGLPEHRELLDKICTYGLQSI

SEQ ID NO: 90093 - protein, 530 aa, Caulobacter sp.
  misc_feature (1)..(530): tr|A0A4R3H178|A0A4R3H178_9CAUL Tryptophan halogenase OS =Caulobacter sp. BK020 OX=2512117 GN=EV278_110131 PE=4 SV=1
MSQAINDILIVGGGTAGWMTAAYLARRLGSTRPDGVRITLIESSEIGIIGVGEGTFPTIQNTMRTLGVDEARFMREAGAAFKQGIRFVDWKTAPRDGVHSHYYHPFAQPRLLNGGLDLAPYWLMGEAGDIPFSDAVTLQDKVCEAMRGPKRLDDPQYGGPMAYAYHFDAGKLASLLREVGKATGVKHLLGNVLTVNKAEDGSIASVTTREHGDLVADLYVDCTGFAGALIGEAMGSAWIDRGDTLFVDRALALQVPYERPDAPVATTTISTAHEAGWTWDIGLPDRRGTGYVYSSRHTTDERAEQVLRGYVGRAGDGLTPRLLKLKVGHRQAHWIGNCVAVGLSGGFLEPLESTGVVLIEAAAYMLARNLPRRGGMDAAARQFNAAMTDRYLRAIDFIKLHYCLSQRTDNRFWTDNADPASIPETLLDHLAMWKHRPPNVFDFPNLHESFKYFNYQYILYGMGFETTVDPAAHVHGDLARADFARVREAGLRAAASLPDHRALLTDIYTRGFSTQAPGLATAEAGEAPRR

SEQ ID NO: 90094 - protein, 506 aa, Xanthomonas arboricola
  misc_feature (1)..(506): tr|A0A2S6Z0Z5|A0A2S6Z0Z5_9XANT Tryptophan halogenase OS =Xanthomonas arboricola pv. populi OX=487823 GN=XaplCFB P3122_17580 PE=4 SV=1
MIPAPLRNIVIVGGGTAGWMAAAAFARVLGPGFNVQLIESEQLGTVGVGEATVPHIKAFNNLLGIDEAEFVRQTQGSFKLGIEFVDWQRPGTSYIHGFGTQIGHPLGLLPFHQYWIKQHLRGKAQPLGAYTLNTVAAVRGKFMTSAGDVPANSPLANIAYAYHFDATQYARFLRNYSEQRGVTRIEGLVEQVQLHADSGRVQSLQLASGQVVSGDLFIDCSGFRGLLIEEALHTGYHDFTHWLPCDRALAVPSENVGPPTPYTRSTARAAGWQWRIPLQHRTGNGYVYSSAHISDDEAAATLLANLDGRPLADPRPLRFTTGRRKQFWNRNVVALGLASGFLEPLESTSIHLIQAGISRLLELFPREGISPVLVQRYNDRLAFEFDRIRDFLLLHYHATERDDSAFWRHCRTMPITPELQTTLDLFCDSGRFYRNAEKMFAEISWVQVMVGQGILPQGYHPLVDQVPDHDAEGFLASVAQTIGHCVDVMPTHQQFIDRYCKAAAPR

SEQ ID NO: 90095 - protein, 502 aa, Altererythrobacter sp.
  misc_feature (1)..(502): tr|A0A369Q813|A0A369Q813_9SPHN Tryptophan 7-halogenase OS=Altererythrobacter sp. HME9302 OX=2161824 GN=prnA PE =4 SV=1
MAIGKIVIVGGGTAGWMAAAAMSRLVSGNDVSVTLVESEQIGTVGVGEATIPHFVDFNRLLDIDEREMLSEVQGTFKLGIQFVNWGQIGESYFHPFGNYGYQIDGVDFHNIWLKQRMEGNDRPIHAFSAETIAAMHRKFSRTEDFQRDDLPPINYAYHLDAGRYAQYLRKYAEARGAVRREGKVADVALYGETGHVASVTLDSGDVIEGDFFIDCSGFRGLLIEQALASGYEDWSQWLPCNRAVALPCTNDGGTLPYTRATAHSAGWQWRVPLQERNGNGHVYCSEYMSDDEAHAILRNNLDGEVLAEPNFLRFTTGRRNKFWNGNVVALGLSAGFMEPLESTSIHLINTGISKLVALFSLDGVTQAQEDAFNRLTGKEYARIRDFLILHYKATQRTDSAFWDYCRTMDVPETLQEKIDLFRANGQIFREEDELFTATSWVAVMLGQGIAPTGYNPMTATLKEPALSEELSEVERSITHLVGAMPSHRDYVQKYCPAPATMS

SEQ ID NO: 90096 - protein, 509 aa, Porphyrobacter sp.
  misc_feature (1)..(509): tr|A0A2N4WTL4|A0A2N4WTL4_9SPHN Tryptophan halogenase OS =Porphyrobacter sp. TH134 OX=2067450 GN=C0V72_08425 PE= 4 SV=1
MTQPAPLKSIVIVGGGSAGWMTAAALSHAVGSACAITLIESEAIGTVGVGEATIPPIRHFNQRLGIDEATFVRETQGSYKLGIEFVDWGELGHRYFHPFGQYGAEFDSVPFYHHWMHEHLAGRIDGPIDDFSMCWAMARAGKFSHPAADRRMIQSTFDYAYHFDAGLYAAFLRRFAESRGVVRKEGRVVDVASRAEDGFIAAVTLDDGTRIAGEFFVDCSGFRGLLIEEALEAGYDNWQHWLPCDRAVAVPSERAGERGEFTPYTRSTARAAGWQWRIPLQHRTGNGYVHCSQFISEDEAAATLLANLDGKALADPRTLRFVTGKRREFWKRNCVAIGLSAGFMEPLESTSLHLIQYGILRLIALLPDSAMSPLLAREYNAQTALEYERIRDFLILHYKASTRDDSELWRYCAAMPIPDSLQYKIDHFREGGMLVSDERELFANPSWIAVYLGQGIVPKRAPALAEMRGSVPVAERLAQIRQAMAEAVAAMPSHGEFVARHCAAPPISA

SEQ ID NO: 90097 - protein, 501 aa, Caulobacter sp.
  misc_feature (1)..(501): tr|A0A4R3HEZ2|A0A4R3HEZ2_9CAUL Tryptophan halogenase OS =Caulobacter sp. BK020 OX=2512117 GN=EV278_102292 PE=4 SV=1
MNDGPQQHIVILGGGAAGWIAAALLAKQTDRRQTRITLVESEEIGIIGVGEATVPLLAQCNAMLGIDEFDFIRRTQGTFKLGIEFCDWGVAGNRHFHAFSDYGHPVQGVSPHHYWLRLRQAGDERPIDDYSFAYAVAKDNRFAPSDPENSRYHHAYHFDAALYARYLRDVATELGVQRIEGKMTHVDLDGDTGDIAGIHLANGVTVPGDLFLDCTGFASELLGKALGTPFVDWSRWLLCDSALAVPSKRAGPPMPFTRSTAHAGGWRWTIPLQHRSGNGMVYSSQFWSDEAAREALLGAIDGEPLAEPRLFRFTSGHRKQFWNRNCIGIGFASNFLEPLESTGLQLIVMGILKLFKYFPQRTIDPALRDEYNRVSTREIERIRDFIIAHYHLSRRPEPLWAACRDIDIPDSLRHKLEVWTASGQIALGDLESHVEPSWLAILLGNGAVPARYNVLADLHSLEQIREGMRLRREEILRSAQAVTSHQDFIDRYCKAPQAAAR

SEQ ID NO: 90098 - protein, 196 aa, Sphingomonas hengshuiensis
  misc_feature (1)..(196): tr|A0A2W5CRV3|A0A2W5CRV3_9SPHN Tryptophan halogenase (F ragment) OS=Sphingomonas hengshuiensis OX=1609977 GN=DI 607_03575 PE=4 SV=1
VGDDAPAARHLRMKVGRIEKVWTANCLAVGLSQGFIEPLEATALHVVQATVEGFINAWQSGGFTPRHRDRFNASIAARFEGIRDYIVCHYRANQRDDTDYWRDNATNPHISMSLADVLACWRSGGDLVAEIERQGIATYYSTMSWHCLLSGYGCYPPDHALHAAQGGSDMAQIDDFLARCATNFAPHHVQLASLAH

SEQ ID NO: 90099 - protein, 522 aa, Streptomyces sp.; identical to SEQ ID NO: 88858
  misc_feature (1)..(522): tr|A0A069JZE3|A0A069JZE3_9ACTN Tryptophan halogenase OS =Streptomyces sp. NTK 937 OX=1487711 GN=DT87_23565 PE=4 SV=1

SEQ ID NO: 90100 - protein, 500 aa, Novosphingobium ginsenosidimutans
  misc_feature (1)..(500): tr|A0A5B8S3V7|A0A5B8S3V7_9SPHN Tryptophan 7-halogenase OS=Novosphingobium ginsenosidimutans OX=1176536 GN=FRF7 1_08605 PE=4 SV=1
MGDGRPYRIVILGGGTAGWMSAAALARFAPATHSITLIESEAIGTVGVGEATIPAIMLFNQALELDEAEFLRETMGSFKLGIEFAGWLKPGHSYMHAFGEVGRQLGLLPFRHYWARGRKLGLAKPLAHYSPNELAARTGRAGPGAPGVSLPYAYHFDAGLYAGYLRRYAEARGVTRHEGKIASVQRAESGDIAAVTTDDGRSFEGDFFIDCSGFRGLLIEQELGAGYEDWRHWLPCDRAVAVPCAASGDFTPYTRSTARSAGWQWRIPLQHRIGNGHVYCSEFISDDEATAVLLANLDGPPAADPRPLQFVTGRRRKFWDRNVLAVGLSSGFMEPLESTSIHLIQSTITRFLTVLPGGPVDDAVRDGFNRRAALEFERIRDFLILHYWANQRHGEPFWDHCRNMDLPDSLKARIEEFQAACVIQPSADELFTEVGWLQVMVGQGLEPASWNPIADGLSDADLGRFLDGVERAAIEAVRPMPQHIDYLASLVTAEAARGAA

SEQ ID NO: 90101 - protein, 524 aa, Caulobacter sp.
  misc_feature (1)..(524): tr|A0A4R3H089|A0A4R3H089_9CAUL Tryptophan halogenase OS =Caulobacter sp. BK020 OX=2512117 GN=EV278_1186 PE=4 SV =1
MSASASERANLRGQPIRRVVIVGGGTSGWMAAAALARMAPPDLSITLVESDEIGTIGVGEATIPTLADFNAFLGVDEDDFVRQTQATFKLGIEFVDWGRMGERYLHPFGVHGHPTPEFKFHQLWLRLVHWAGDDPERRALVGDLGDYNVGTVAARLGRFSRPQAGVHNVLSTIRHAFHFDAGLYARYLRAYAEARGVVRLEGMVVGAQQRPQDGFFEAVRLRDGRVIEGDLFIDCSGFRGLLINGVLGAGFIDWSRYLPCDRAVAVPYERTAPPDPFTRATADLAGWRWRIPLQHRMGSGYVYCSDHLSDQAATDRLVSQAEGRLLADVRPLRFTAGLRERFWVKNCVAIGLAGGFLEPLESTSIHLAQMGVARLILLWPDLAFGQAEIDEYNTAARLEYEQIRNFIILHYKATRRVDTEFWRRCGAMQIPDGLAHKIELFASSGRVFRFQDDLFTEDSWLAVMLGQGVRPQGYDRLVDRIAHDELLTNMGRLKDVVLKSALSLPAHQTFINTHCRGATGIAPA

SEQ ID NO: 90102 - protein, 520 aa, Xanthomonas arboricola
  misc_feature (1)..(520): tr|A0A2S7B1H2|A0A2S7B1H2_9XANT Tryptophan halogenase OS =Xanthomonas arboricola pv. populi OX=487823 GN=XaplCFB P3123_15975 PE=4 SV=1
MTDTAPSDPQQRPVRRVVVAGGGTAGWMAAAALSKVLGRHLQITLVESDEIGTVGVGEATIPSLVTFHRLLEIDEAAFMAATQATIKLGIGFEHWRDVDRHYIHSFGHTGTDHWSAGFQHFWLKGRQRGVARDFGDYCLELRAAQEGRFAHLPNGGMNYAYHLDAGLYARFLRRFSEGFGVQRIEGRIGRVETDAHSGYLTALTLDNGTRVEGDLFLDCTGFAGLLIGKTLGVGTDDWSQWLFADSALAVQTESVGAPVPYTRSRADQAGWMWRIPLQHRVGNGIVYSSRYMDQDSAAQVLQRNLSGWALTQPRALRFTPNQRHRVWEKNCVALGLASGFLEPLESTNIHLIQRGIIRLMQTFPQVINAVDIAEYNRQAAAEITHIRDFVILHYHATDRRDTPFWRDCAAMDIPDTLRHRVELFRQSGRVFHQANELFAENSWVQVMLGQGITPKQHHPVADLMGDAELSHFLETIRTRVDAALVRLPAHADFLRRYCPAPLPDPATRLPADAALATGAG

SEQ ID NO: 90103 - protein, 503 aa, Colwellia sp.
  misc_feature (1)..(503): tr|A0A3D3GWY5|A0A3D3GWY5_COLSX Tryptophan halogenase OS =Colwellia sp. OX=56799 GN=DIS98_06710 PE=4 SV=1
MSATDKINDIVIVGGGSAGWMTAAMLAKQLEANVNITLVESDDIGTIGVGEATIPPIKAFNRLLGIDENDFLKKCNGSIKLGISFENWSQKNHSYFHPFGRFAVDFDYMPFGYFWNKQRESGNAKPLQEYASAWHLAKHDKFSLPTNDPKSLFSGFDYAYHFDSSLYANYLKEYATKRGVIRQEGKINHVSTHANNGFIRSVTLASGQVINGDFFIDCSGGSALLINKTLGVKFIDWSEHLLCNRAIAVQTKHVKPISPYTRSIAGEAGWQWRIPLQTRMGNGFVHSSHFIDEQQAIDKLVDSVDGELLTDPRVINFKVGRREKFWYKNCVAIGLSSGFLEPLESTSLHLIQRAIMRLIYLFPNKHCDEINTRFYNKQSIEEYEHIRNFIILHYKATQRDDSEFWRYCQHMQVPDSLQQQIELFATHGHLDLNGKDLFKQDNWLAVLTGQGIHPKSVAPIMAYKQKIDLPRTLNSFYDMMTKTVQQMPNHEDYLRKKCNFSLK

SEQ ID NO: 90104 - protein, 454 aa, Amycolatopsis sp.
  misc_feature (1)..(454): tr|A0A429F0Q6|A0A429F0Q6_9PSEU Tryptophan halogenase OS =Amycolatopsis sp. WAC 04182 OX=2203198 GN=DMH01_32870 PE=4 SV=1
MDDYDVIVVGGGPGGSTAAGLTAAEGHRVLLLDKDRFPRYQIGESLLPATIHGICAMLGVRDEIDRAGFVRKRGGTFKWGTGAEPWTFSFAASDRMAGPTSYAYQVERTRFDALLLDGARRLGAEVRQGHRVLGTIQAGERIGGVRYLDDAGHERQATARFVVDASGHGSRLHHDVGGTREYSPHFRNLALFGYFEGGRRMPAPDTGNILCVSFPDGWFWYIPLSDTLTSVGAVVKHEAADRVQGDPDVAYSALIEDCPLIEEYLRDARRATEPPYDRLRVRKDYSYDRTVLWSPGMVLVGDAACFIDPVFSSGVHLATYSALLAARSINSTLAGFSDEKRCFAEFEARYRREFGLFRDFLISFYQLDSDEDDYFRQARRLTGRHGAAEAAFAGLVGGVSSQDFSRAMFGDVLAEGVQLQLRGLLGEAAGDEPPMFPGGLVPTADGRRWRVPDA

SEQ ID NO: 90105 - protein, 504 aa, Caulobacter zeae
  misc_feature (1)..(504): tr|A0A2N5DHM6|A0A2N5DHM6_9CAUL Tryptophan halogenase OS =Caulobacter zeae OX=2055137 GN=SGCZBJ_11045 PE=4 SV=1
MVDQRIRKVVVVGGGTAGWMAAAAFSRLLVDDAVSVEVVESEAIGTVGVGEATIPTIRNFNQTLGLDEVEFIRATQASFKLGIDFRDWGRVGHRYFHGFGDFGTDHEAVQAHQLWRRLRALGDPSSLEDWSLPTAAAALNRFIPPSPDPRSPLHDYAYAYHFDAGLYAAFLRRYAEARGVMRAEGKIVDVALRGEDGFVEAVVLEDGRRVEGDLFVDCSGFRALLIEGALKAGFEDWSRWLPCDRALAVPCKLGGDGLTPYTRSTAREAGWQWRIPLQHRIGNGYVYSSAFVDDERAARTLMENLDGQALDDPRQLRFLAGRRRKFWDRNVVAVGLSGGFLEPLESTSISLIQNGVARLLEFFPDRRCDPLLADEFNRVSAQEYERIRDFIILHYCINQRDEPMWRQVREVELPDSLRAKIALYKARGHVAIHEGDGFGRPSWIAIYNGLGVVPEAYDPLADRIPEAELRKLMEHRRALIRHTAQSMPTQDAFIARHCAAAPIG

SEQ ID NO: 90106 - protein, 515 aa, Porphyrobacter sp.
  misc_feature (1)..(515): tr|A0A2N4WS86|A0A2N4WS86_9SPHN Tryptophan halogenase OS =Porphyrobacter sp. TH134 OX=2067450 GN=C0V72_11240 PE= 4 SV=1
MARRGWTGIEENVAIERIIIVGGGTAGWMAAAALSRIKAGRAVDITLIESEAIGTVGVGEATIPPFVGFNQLLGINEAEMLAEVGGTFKLGIQFENWGKLGDSYIHPFGAYGYTMGGISFHHVWHRMTRAGDKRPIQVFNLETMAAYFGKFARTEDYTRDDLPPVNYAYHLDAGRYAAYLRRFAETRGVVREEGRIADVALDGETGFVTSVTLDDGRRFAGDLFVDCSGFRGLLIEQALRTGYDDWSHYLPCNRAVALPCQREDGSPPPPFTRATAHSAGWQWQVPLQHRNGNGHVYCSSYMEDSQALDILLGNIAGKPQAEPNWLRFTTGRRKKFWNKNVVALGLAAGFMEPLESTSIHLVNTGIDKLISLLSLDGITKVQEDTFNRLTGREYARIRDFLILHYNATQRSDSEFWNYVRTMAVPDTLTEKVEIFRANGQIFREEDELFTETSWAAVMMGQGITMGGHNAMADAIDSPAARAEVDEMEKSIRYMVQHMPGHGDYLARYCPAPMAA

SEQ ID NO: 90107 - protein, 354 aa, Pseudomonas sp.
  misc_feature (1)..(354): tr|A0A2R7RPD8|A0A2R7RPD8_9PSED Tryptophan halogenase (F ragment) OS=Pseudomonas sp. HMWF010 OX=2056847 GN=DBR41 _29300 PE=4 SV=1
PIIAARTGRFAPPSPDPRALASTFAYAYQFDAGLYAAYLRTYAEARGVVRTEGRIRDVTLRGEDGFIEAVVLESGERIEGDLFIDCSGFRGLLIEQALKTGYEDWTRWLPCDRAAAVPCEAVEPPGPYTRATSDEAGWRWRIPLQHRVGNGYVYCSGYISDDEAAKVLLEKLDGRPQADPRFLRFTTGRRRRQWNRNCVAIGLASGFLEPLESTSIHLIQVAITTLLEMFPDQSCAQADQDEYNRVMDLEFERIRDFLVLHYHATQRDDSPFWRDKAAAPIPDSLSYKMALFRERGMVVKYRDGFFLEPSWLAVYLGQNIMPQGYDPMTDAIDPKDSARLLGELQAAVARTAQA

SEQ ID NO: 90108 - protein, 496 aa, Caulobacter sp.
  misc_feature (1)..(496): tr|A0A0Q8FUL8|A0A0Q8FUL8_9CAUL Tryptophan halogenase OS =Caulobacter sp. Root655 OX=1736578 GN=ASD79_11205 PE=4 SV=1
MAEQVVKKVVIAGGGSAGWMAAAALSKQLGPLLDITLIESDDIGTVGVGESTVPTARTFNALLNLDEPEFMSACQATFKLGISFENWGEIGDRYIHSFGQIGKSTWLGDFHHFWLQAKAQGFGGDLGDYCLELKAAEDHRFFTDENASLNYAYHIDATLYGRYLRAKSEGKGVRRVEGKITSVKQRSDDGFIEALVLESGEVIEGDLFIDCTGFRSLLMGGALEVGFEDWTHWLPNNSALAVQTRTDAPAYPYTRAIAHRAGWLWGIPLQGKIGNGFVYSSDHMSDDEAQAGLRDMIEGEMVAEPRLIRFRAGRRRKAWHKNCVAIGLAAGFIEPLESTSIHMIMVAVHRLLQLFPFAGCNEALSDRFNHLADDEIEKIRDFVVLHYKLTERTDSPFWDHCRTMEIPDSLAHRIALFRDSGHVFRAPGELFQTDSWLQVMLGQRLRPSGHHHMGRLMPPEQLRQALNDLKGNIARAVDRMPSHQAFVDRYCPVAPA

SEQ ID NO: 90109 - protein, 533 aa, Gammaproteobacteria bacterium
  misc_feature (1)..(533): tr|A0A2M7ZX56|A0A2M7ZX56_9GAMM Tryptophan halogenase OS =Gammaproteobacteria bacterium CG_4_9_14_3_um_filter_38 _9 OX=1974022 GN=CO120_07620 PE=4 SV=1
MQKTQSNIKDIVIIGGGTAGWMSATYIAKSLNFQVNITVIESAEHSPIGVGEATIPTIKTEFFDRLGIPEEEWMPKLGGTFKMGIKYANWKTPAEKGGDHYYHVFGEIPLIDEVPLSSVWIKQYLEGQTKQSFAEACFPSAVAFDHHLSPRLLDGTKVQHYAYHFDALMLAQYLKEWAITRGIRHVVDKLVSTEQDADGQITCVIGQSGKKYPADFFVDCSGFAGFLIDKVYQEPIVSFNDFLLTDRAIAINIPDAPNNTDIRSYTTATAMKAGWTWEIPLYQRSGNGYVYSSQFISDQEAQDEICQHFGKRVEGLNLRPIKFQSRRHRHSWVKNCVAIGLSSSFLEPLESSTIYFIYAALYQLIKCFPQKNIDPVLREKFNKKINYMVDDNRDFIAMHFKTVQREDTEFWRVNKYETKIPETLELILQKHKSGLPIKRPTVDNNNIYPTFKSLFQNFWTETNYQCILCGVGYLPNNPYPLLNYREDIMTIGKQLLQQITKRQKELMKILPTHYEYLTHQLEHSKMKKEKVDA

SEQ ID NO: 90110 - protein, 509 aa, Caulobacter zeae
  misc_feature (1)..(509): tr|A0A2N5DMN1|A0A2N5DMN1_9CAUL Tryptophan halogenase OS =Caulobacter zeae OX=2055137 GN=SGCZBJ_08000 PE=4 SV=1
MSEAIRNIVVVGGGTAGWMTAAALAQTVGTQRYSITLVESEQIGTVGVGEATIPMILLFNKVLGLDEDVFIRETNATFKLGIEFVDWRRLGHSYFHPFGLYGADMDGVGFQHFWLRWARESGDRNHDGFNAETLAAATGRFMRTPPAPNLPKINYAFQFDAALYAAFLRRYAEARGVVRVEGKIAGVERDGESGHVSRLVLDDGRTIDGDFFVDCSGFRGLLIEETMGAGYDDWSRWLPCNRAAAMPCERAGQLTPYTRATAREAGWQWRIPLQHRSGNGYVFCDAFIGEEEAVRLLGERLDGAALAEAKVLKFTAGRRRKSWIGNVLAIGLSSGFLEPLESTSIHLIQAAIAKLLTLFPKTGFDPFVVDKFNREMALEYEKVRDFIIAHYKVGERDDTEFWRWCRDMVPPDSLAQRLEVFRTRGEVLIDQKELFKETNWFAILVGQGLVPDDHHAVADAISSEELRSRMGRIRAAINERVAGMPPHDLYLEKAGLLGAAARAGRRAPA

SEQ ID NO: 90111 - protein, 512 aa, Caulobacter zeae
  misc_feature (1)..(512): tr|A0A2N5DFT8|A0A2N5DFT8_9CAUL Tryptophan halogenase OS =Caulobacter zeae OX=2055137 GN=SGCZBJ_11885 PE=4 SV=1
MSEDVRNGRIRSIVIVGGGTAGWMAAASLRRHFGKAPIDITLVESSEIGTIGVGEATIPTIRNFYQSLGLDDLEVLRATQGTCKLGIRFKDWMAPGSAFIHPFSLYGQDLNGVPFQHYWLKARSVAEVGEMGEYSLGASLAAAGKFTVPAANPPSSLSVFDWALHFDAALFAQLMRRVAEANGVRRIDAKVVKVNLRPEDGFVASLDLHTGQSIEGDLFIDCSGFRGLLIEEALQTGYEDWSQWLFCDRALAVQSQPPEGAEPPPYTDVTAHSAGWRWRIPLQHRYGNGYVYSSRHIDDQAAEAELVAAVPDRLLHEPRLIRFTPGRRKKVWNRNVVALGLASGFLEPLESTSIALIETGIEKLKALFPDRSFDPAVVDEFNDWSRREMERVRDFVVLHYKAAQRGDTPFWRTTRDADVPETLARKVELFRSRGHIARYRWEMFQPPSWLAIFAGFDILPGGWDPALDGIDGAALAASLNQMRAGVARAVAQASTHGDFLRRYVGQAPAAAE

SEQ ID NO: 90112 - protein, 504 aa, Caulobacter sp.
  misc_feature (1)..(504): tr|A0A0Q8FYF4|A0A0Q8FYF4_9CAUL Tryptophan halogenase OS =Caulobacter sp. Root655 OX=1736578 GN=ASD79_22890 PE=4 SV=1
MAHLNKIVIVGGGSAGWICAAMLSHYFQNGPTQVELIESEEIGTIGVGESTIPPFLQLIRTLGIDEQDFIQQTQAAFKLAIRFENWRKKDEVYYHPFGQIGGPLEVNEFYQCWLRAKQNGHPSGLQDFAPATVMADTGKFMLPGKAQRTMIANANYALHIDARLVALYLRKFAEARNVKRTEGIVTDVVTRPDGGIEKVIMKDGREVAGDFFIDCSGFRSLLIGKTLGEPFRDWSDVLLCDRAVATQTENISPPHPYTLAQAQDFGWRWRIPLQHRAGNGYVYSSKYLSDDEATATLLSQTEGEVLRDPWVVHFKTGMRERLWVKNCVAIGLAGGFIEPLESTALHLIYKGMDYLLRFFPDMDADQTLAAEYNRRMTVDYEEIRDFVVLHYAVTQRDDTPFWREYQKVELPESLQQRIALFKAGAVLRDGVDDMFRAPSWQSVMEGMGIRPQRYQQLVDRIPLSVINNMLDKSAPMLAEFVATLPNHEDFLREHCPAEPLKRSA

SEQ ID NO: 90113 - protein, 239 aa, Sphingomonas hengshuiensis
  misc_feature (1)..(239): tr|A0A2W5C0B8|A0A2W5C0B8_9SPHN Tryptophan halogenase (F ragment) OS=Sphingomonas hengshuiensis OX=1609977 GN=DI 607_12195 PE=4 SV=1
MKPVRIAILGGGTAGWMAANLFAHAWPLARITVIESPEIGIIGVGEGSTPQLKAFFDRLGIAERDWMPACNATYKNGIGFHGWSARAGAESYFHPFPTMIDVHTADAFFNHSAARRRGMAAEAHPDRFNLPARLAAEQRGPIPGDSFPFAVSYGYHFDAYLVGAFLREHAVARGVIHLPQRVREVRVAPDGAVQALMTEDGAAVEADLFVDASGFASVIAQTALGVPFRSFADNLFNDS

SEQ ID NO: 90114 - protein, 501 aa, Caulobacter sp.
  misc_feature (1)..(501): tr|A0A4R3H868|A0A4R3H868_9CAUL Tryptophan halogenase OS =Caulobacter sp. BK020 OX=2512117 GN=EV278_105227 PE=4 SV=1
MTDHRLRRIVIVGGGTAGWMTAAALGRFLKDGRTQVTLVESEEIGTIGVGESTIPQINIFNRMLGLDENEFVRRTKATFKLAIDFVDWKQIGHRYYHPFGPYGLDMEGVSFHAYWLRLNAMGEAADLTEYSLQALASAQGKFMRANGQRNSPLGTLSHAYHIDAGLYALFLREYAEQRGVARQEGRIVEVHQRVEDGFIEAVTLQSGQRVEGDLFIDCSGFRGLLIEQTLKTGFEDWSHWLLNDRAVAVPCALAGSRQPVTRATARPTGWQWRIPLQHRLGNGYAYSSAHVSDDEATADLLANLDGVPLRDPFTLRFTAGRRKKSWNKNVVAIGLSAGFMEPLESQSIHLIQVGIARLLAMFPDRRFQTPDIDRYNRVMQFEYETIRDFLILHFHVTRRNDTPYWDYLREMPIPDYLADKMAVFQSYGRVFRENEELFTDTSWFAVMVGQGLEPRGHDPMADVMSDDELRARMANIHAVIAKSAQAMPDHMRFIAENCAAA

SEQ ID NO: 90115 - protein, 509 aa, Caulobacter zeae
  misc_feature (1)..(509): tr|A0A2N5DMR4|A0A2N5DMR4_9CAUL Tryptophan halogenase OS =Caulobacter zeae OX=2055137 GN=SGCZBJ_07990 PE=4 SV=1
METSAPLDIVIVGGGTAGWMVGTALVSGLRPHQARVRLVESDEIATVGVGEATIPAMRDYNRFVGIDEVEMMRETNGTFKLGIEFLDWGFKGSSYHHPFGVHGAAIGGAGFHHQWNRARLAGHDLDIEQFSYAIAAARDDRFEFPNPDPDKIDSTYSYAYHFDASLYAKYLRKVAEGRGLKRTEGKVVDVARDPLSGDVASITLASGEVVRGDFFVDCTGFRGLLIGQALNSPFEEWTDWLPCDRAWAVPCARAGRFTPFTRSTAREAGWQWRIPLQHRTGNGYVYSSRYISDDEAAATLMANLDGEALAEPRQIRFKAGRRTASWTRNVMAAGLASGFLEPLESTSIYLVQIAVMNLLKLFPGKRVEPALVEEFNRRVDMEYDRVRDFLILHYHANTRTDGELWKHCREMEIPESLKHKLELFRHRGVAPNYHDGLFALPSWISVLLGQGVLPGGYDRMVDNVPLPQALAEMERQRSAIARRVPAMPMHADFVASHCAIPRPIAEAVA

SEQ ID NO: 90116 - protein, 504 aa, Caulobacter sp.
  misc_feature (1)..(504): tr|A0A4R3HBK6|A0A4R3HBK6_9CAUL Tryptophan halogenase OS =Caulobacter sp. BK020 OX=2512117 GN=EV278_10229 PE=4 S V=1
MAHLNKIVIVGGGSAGWICAAMLSHYFQNGPTAIELVESEEIGTIGVGESTIPPFLQLIRTLGINEQEFIQETQAAFKLGIRFENWLEKGDVYYHPFGQIGGPLEVNEFYQCWLRAKQNGHPSKLQDFAPASVMAQAGKFMLPAAAQKTMIANANYALHVDARLVALYLRRFAEARGVTRTEGVVTDVATRSDGGVQKVILKDGREVAGDFFVDCSGFRALLIGKTLGEPFRDWSDVLLCDRAVVAQTENVGPPHPYTLVQAQDFGWRWRIPLQHRAGNGYVFASKYLSDDEATATLMSQIQGEVVLGPNIIPFKTGVRERPWVRNVVSIGLSCGFIEPLESTALHLIYKGMDYLLRFMPDMDADPILAAEYNRRMVADYEEIRDFIVLHYVTTRRDDTPFWRDYQQVAPPESLRERMALFKAAGVLRDGVDDMFRAPSWQSVMEGMGVRPDRYQQLVDRIPLSVIMNLMDKSAPMLAAVVAALPSHEEFLRTHCPAAPLRRSA

SEQ ID NO: 90117 - protein, 533 aa, Streptomyces sp.
  misc_feature (1)..(533): tr|A0A024YP53|A0A024YP53_9ACTN Tryptophan halogenase OS =Streptomyces sp. PCS3-D2 OX=1460244 GN=AW27_14945 PE=4 SV=1
MTSTDTRLQKVVILGGGTAGWMTAAYLGKALQGTVDITVLEAPTIPRIGVGEATVPNLQRSFFDYLGIAEDEWMRECNASFKMAVRFVNWRTDGQGESTARELPGGGPDHFYHPFGLLPDYDQTPLSHYWFKRKYEGRTTEPFDYACFREPPVMDAMKAPRWLDGRPATRYAWHFDAQLVADFLRRFATEKQGVNHVQDEMVRAEQDSRGHVTTLHTKGGLALDADLFVDCSGFRGLLINQAMQEPFIDMSDHLLCDSAVATAVPHDDEANGVEPYTSAIAMSSGWAWKIPMLGRFGTGYVYSSKFTDQDAATREFADMWGLDVEETKFNHIRFRVGRNRRAWVKNVVSIGLSSCFLEPLESTGIYFITAAIYQLAKHFPDKTFNEGLIDSFNHEIEVMFDDTRDFIQAHFFYAPRNDTPFWQANKKLVLPDNIKQKISAYKAGLPINSPITDESTYYGNFEAEFRNFWTNGSYYCIFAGLGLEPDAPLPTLAHRPESVAGAEPLFDTVKRQQQNLLETLPSAYDYLRQLHGA

SEQ ID NO: 90118 - protein, 513 aa, Sphingomonas hengshuiensis
  misc_feature (1)..(513): tr|A0A2W5BB87|A0A2W5BB87_9SPHN Tryptophan halogenase OS =Sphingomonas hengshuiensis OX=1609977 GN=DI632_03080 P E=4 SV=1
MTERIRRIVIVGGGTAGWLAACRIAAAADSHAADPLTVTLIESPDVPTIGVGEGTWPTMRGTLARIGIDEATFLRAADAGFKQGSRFDGWRTGLPGDSYHHPFTAPAALSPGDLLRDWRQGSFAAHVSAQPAICDEHLAPRQPTMPPYAGALNYGYHLDAGKFAELLRETACTRLGVRHLRDHVTGIEAAQNGDIAAVDTRTSGRIAGDLFLDCTGHAALLIGGHYGVGSIDRTDILFNDRALAVQVPVAHDSPIASQTIATAHDAGWIWDIGLPTRRGIGCVYASGFSSDADAAATLTAYLQRIAPEVEPARLSFRQLRFRSAHRERFWRNNCLAIGLSAGFLEPLEASAIVTIELSLDALLDGFPADRSAMDLHARRFNALFRYRWDRIVDFLKLHYALSERDSPYWRAHRDPASIPPALHDLLALWRTQPPSPADFAHANEVFPAASHQYVLYGMGMPPPPPGPLRAERSDTKMVLEQVRQRARALTASLPTNREYLNALTRAPAEVAHV

SEQ ID NO: 90119 - protein, 487 aa, Caulobacter sp.
  misc_feature (1)..(487): tr|A0A0Q8FHZ3|A0A0Q8FHZ3_9CAUL Tryptophan halogenase OS =Caulobacter sp. Root655 OX=1736578 GN=ASD79_09535 PE=4 SV=1
MAAAAFSRLLGESFVEVVLIESDQIATVGVGEATIPPIRHFNDKLGLDEADFVRQTQASFKLGVDFQDWGTIGHRYFHAFGDFGADIEAVGAHHYWRKLQGLGEVFPLEDLSMPTMAAYRGKFIPPNPDPRSVMHDYSYAFHFDASLYARYLRGYAEARGVVRTEGRIVDVQLRGTDGFIEAVALDSGDRVEGDLFIDCSGFRGLLIEGALKTGYEDWSHWLPCDRAIAAPCASGGDGLTPYTRATARAAGWHWRIPLQHRTGNGYVHCSQFVGEDEAVSDLLSNLDGPLIGQPQTIHFTPGRRLKAWNRNCVAMGLASGFIEPLESTSINFIQTAIGRLLDFFPNKDFDPTLVDEFNRLSRQEMEQVRDFIILHYKLTDRTDSGLWDYCRAMAIPDGLAHKIEVFRRTGRVVMHEGDAFAVPSWLAIFQGLKAVPERYDPLVDRMSVEQIREVLAGRRAAILRAAEAMPGQQAFIDKFCRAELPAA

SEQ ID NO: 90120 - protein, 598 aa, Microcystis aeruginosa
  misc_feature (1)..(598): tr|A0A1V4BLU6|A0A1V4BLU6_MICAE Tryptophan halogenase OS =Microcystis aeruginosa KW OX=1960155 GN=B1L04_20720 PE =4 SV=1
MVTTDTKVYDVVIMGAGFAGVCQARHLLLNVPNIKIALIDPRPEERTNKDLKIGESMVEIATLFVCKELGLYEYMIENHPPKFGLNFHWPKKKDKTTTTDDYYHIWNNRQPPLASFQMNRAKFERDLLKMNKAMGATFYQGRVVDVDLTSKDELKTVIAKVENEQITLKAKHVIDAAGRKFIIGQKTDNLLFGADNLFGLDTGSVWVRVNNIDRTIFHDGYDPYGTTCSHYYATNHWFGHGHWLWMIPTEKDSQEISIGIAYHRSAIADNQINTKEKFYDFLKANHEILYRLVNSGENIDFHYLPRPSHTSKTMFSADNWYVIGDAACIFDPFYSLGSSMISYQIECTTEIIRSKLVGEAIGEKKQAAYNDFILTYTRFNNHLIKHHDQQLGDASIMSWRIYHDYIWWFGVQVPMYTGKWFLDLDFLARYTLGLKEHQTGYCEHLYQQFNEVIKQGKNLGFMDCYRGDQLWGDYHTLQHFDNFVENTKLEPKRSNVFASMKWTNFYTAIWYAKFLWKGFGWRGFLNGKNLYYLVEHFVHMLQAIIGEMFYKHFTKGIPDNSQIEQMRQEFTHYRYRPQLNSWLKEEVKRSPEKIPIIV

SEQ ID NO: 90121 - protein, 501 aa, Caulobacter sp.
  misc_feature (1)..(501): tr|A0A4R3H213|A0A4R3H213_9CAUL Tryptophan halogenase OS =Caulobacter sp. BK020 OX=2512117 GN=EV278_11840 PE=4 S V=1
MSRPIRSVAVVGRDVSAWLTALALQRAFGRQGVSVTVVELPSALRAVDAVIALPALEGLHRLLGLDESEVLAACSGVYALGQQFANWSRSRPPFVHAYDSQGAALRQIPFLHYWLKARAEGLNVALEDFSLGAAAAKHGRFIVHNDATDSFSKARNGYHLDAQSYVRLLRHKAMAAGAQRVAGTLDRVARTPVGVASVTLNGGTSVAADLFVDASGPDAVLAGRALEVPFESWSSWFPCDRILAASGPRLKPLPAMSRISAFGAGWMGMFPLQDRTPVVAAYDSRRISDEEMARTASVLAGMALGDAVVSPFAAGCRAAPWTGNCVAIGEAAACLEPLDAAPLHMIHLGISHLITLFPVDADNLLEAHPYNEAVLSHARNLRDFQIAHYRLNERLDESFWDGARAAEPPPGLAYKLDLFAARGAVALYEDETFQEENWISILIGHGLIPRGHDPQADAMPREEQIQSFQRMLGFIAAEVREMPSIEAQLELFAPPPSSASF

SEQ ID NO: 90122 - protein, 509 aa, Caulobacter zeae
  misc_feature (1)..(509): tr|A0A2N5DFV0|A0A2N5DFV0_9CAUL Tryptophan halogenase OS =Caulobacter zeae OX=2055137 GN=SGCZBJ_11880 PE=4 SV=1
MANNLRKIVIVGGGSAGWITAAMISHYLKDSPCEIELIESEQIGIIGVGESTIPPFLQLIRSLGIDEKEFMQETQAAFKLAIRFENWRKKGEVYYHPFGLIGGLVDVHEFYQVWLRGKAEGHPSSLQDFAPASVMADRWKFMSPAMAPRTMLANANYAVHIDAALLAKFLRKFAEARGVKRTEGIVKDVATRPDGFIEKVILQDGREASGDLFIDCSGFRSLLSGKTLGTEFLDWSDVLLNDRAIAVQTANIQDPHPYTLAQAQDAGWRWRIPLQHRAGNGYVYCSQYCSDDEALATLMSQVEGEAVRDPWLVPFKTGMRKQLFNKNCVAIGLAGGFIEPLESTALHLIYRGVDYLLRFFPDRDCDPVLAAEYNRRMQVDYEEIRDFIVLHYFTTKRDDTPFWRAYQQVTPPESLRERIELFKASGVLRDGVDDMFRAPSWQSVMEGMGIRPKRYQQLVDTLPAGVVKGLLDKSAPMLSELVDTLPSHGDFLRQHCPAPVPEALLKKAG

SEQ ID NO: 90123 - protein, 506 aa, Sphingomonas hengshuiensis
  misc_feature (1)..(506): tr|A0A2W5B4B2|A0A2W5B4B2_9SPHN Tryptophan halogenase OS =Sphingomonas hengshuiensis OX=1609977 GN=DI632_07295 P E=4 SV=1
MAIDQEPVRRVAIVGGGSAGWMAAAALARFLPPGVHVTLIESDAIGTVGVGEATIPQLRLFNQHLGIDEDDFVARTGGSFKLGIEFVGWNGPDSRYIHAFGTIGRSLGLVPFHHYWLAAGGGDRPQSLWSHSACAVATAQHRFDREPGHPQAPAGTNWAYHFDAARYAACLRERAEAGGVERVEGRVIGVAQDGETGLVEAVMLDDGRRIAADFFIDCSGFAALLIGRMAGDRWDDWSPLLPCDRALAVPCAATHPITPCTRATARSAGWQWRIPLQARTGNGLVYSSGHLSDDAAAAVLTGNLDGAALADPKLLRFTTGRRHAPWIGNCVALGLAAGFLEPLESTSIHLVQSGIARLLSLWPVATPRGADIAEFNRQSAREWLAVRDFLIAHYALNDRDEPFWQERRAVPVPDSLRDRIALFEQSGRIVRDEHELFAEVAWLQLFVGQGVMPNGHHPLAGALPADRCARFLDMSRQHVAATVARMPTHDQFLRAHCQAPDAKVAA

SEQ ID NO: 90124 - protein, 519 aa, Colwellia sp.
  misc_feature (1)..(519): tr|A0A3D3GVZ5|A0A3D3GVZ5_COLSX Tryptophan halogenase OS =Colwellia sp. OX=56799 GN=DIS98_06020 PE=4 SV=1
MSKVTKRVVIVGGGSAGWITAGVIAAEHKANSPSGIQVILIESPDVQTVGVGEGTWPTMRKTLKKIGISENDLFKECDASFKQGAKFAKWVTGAEDDFYYHPFVLPHGYLETDLVIPWQKTQAKIPFADVVSFQGKICEQGLAPKQITTPEYAAVANYAYHLDAVKLGQFLRKHCIEKLGVQHIIDHVTQVNSAHDGDIASILTNEHGSVEGDLFIDCTGKASLLLGQHYQIPFICKKGILFNDSALAVHVPYPDEDSPIAPHTNSTAQSAGWIWDIGLPTRRGVGYTYSSKHISDEDAEVELRKYIEDSTSKNIVDSLMVRKITIKPGHREKFWHKNCVAVGIAAGFLEPLEASALVLIELAAEKISNDLPATRDVMDIVAKRYNKQFLYRWNRIVEFLKLHYILTKRTDSAYWIDNCKEETIPDSLLELLVLWRHHPPCPDDFIHINEVFPSASWQYVLYGMGFETQARSTTRKSVNTEAAQRLFSENKAITNKYLSALPVNRELIDKIKKYGMKKV

SEQ ID NO: 90125 - protein, 537 aa, Caulobacter sp.
  misc_feature (1)..(537): tr|A0A4R3HAY8|A0A4R3HAY8_9CAUL Tryptophan halogenase OS =Caulobacter sp. BK020 OX=2512117 GN=EV278_10228 PE=4 S V=1
MITTKTGAGSPREEAASASIEGVSHMQDSARDRRIRDIVIVGGGTAGWMAAASLRQHFGAAPVTITLIESSEIGTIGVGEATIPTIRRFYQALGLSDIDVLRATGGTCKLGIRFNDWTAPGASFIHPFGLYGQDLKGVSFHHYWMRLRALGEDVPISDYSLGASLAAGGKFTTPSRNPPSTLSVFDWALHFDAGLFARLMRQVAEQNGVRRIDARIVKTNLRAEDGFIESVSLDSGATVAGDLFIDCSGFRGLLIEEALHTGYEDWSPWLLCDSALAVQSEGQGAPPPYTDVTAHEAGWRWRIPLQHRWGNGYVYSSRHTTDEAARAVLTGALDERLLHEPRKIGFHPGRRLKAWNKNCIALGLASGFLEPLESTSIALIETGIEKIKALFPNRDFDPAVVDEFNEMSRLEMERVRDFIILHYKLNQRPDDPTGFWTHCRQMTVPDTLQKKIDLWRAQGHFVRYRWEMFSPPSWLAIYAGFGLLPETYDLSVDGFDAGQLSAALAEMRKAVADTVAATRAHGDFIEQYARPQPVAAE

SEQ ID NO: 90126 - protein, 502 aa, Sphingomonas hengshuiensis
  misc_feature (1)..(502): tr|A0A2W4Z4P2|A0A2W4Z4P2_9SPHN Tryptophan halogenase OS =Sphingomonas hengshuiensis OX=1609977 GN=DI632_12820 P E=4 SV=1
MTDNHIRQIVVLGGGSAGWMAAAALATYLGRAVSVRLVESEEVGIVGVGESSVPFMKTFNSETLGIDEREFVTRTSSTFKLGIRFTDWGRIGERYIHGFGTIGRGLGPLPFHQLWLKRFLAGRAGPLGDYSLQTVAAPAGRFQWSGPADTPLGDIAYAYHLDAVLYARFLRELAERRGVERIEGRVVDVEQDGGIGHVRAVVLADGRRVAGEFFIDCSGFRGVLIEQTLKTGYLDWRHWLPCDSAFVMPSAPVGPPMPYTEAAARPAGWQWRIPLQHRVGNGYVYSSAHLDDEAALATLLGTIEGQAIDVPRRLRFTAGRRARAWNGNVVALGLAAGFLEPLESTGIYLAQAGIRRLLGLFPGRDFNPALAERFNRETAFEYERTRDFLVLHYHATTRDDTPFWNDCRTMDVPDPLREAIALFRADGRYFRNGEDFFALPSWVQVMIGQGIVPAGYHPIVDAMPEGHLDQYLERVRGEIAAAVATMPAHHAFIDRYCKATVP

SEQ ID NO: 90127 - protein, 483 aa, Caulobacter sp.
  misc_feature (1)..(483): tr|A0A4R3H8Q8|A0A4R3H8Q8_9CAUL Tryptophan halogenase OS =Caulobacter sp. BK020 OX=2512117 GN=EV278_105225 PE=4 SV=1
MTGSPLNNVAILGGGVAGWMTAAALARVLPPACEIRVIETADAAPRGALSTLPALRGFHGLLGLDEATVMRTARGTFKLGARYGGWTGFDHDHVEGFSDAGANLDGVAFHHHWLRARQRGEAGRYEDYSLAAVAGRLGRFAPPSEDPRSVLSTLSYGLHLDSAGYVAALRSTAGRVAARPGEIAQVVLDTEGAVQAVVLADGERIAADLFIDTTPDGRLIGATPSGGWIDETVALPCNRLALRELARRADPPPLTEFETVTEGWLRRVPLRDADAVTLAYASDLTSDDEARAILGGEATIIRRHNGRRERAWSKGCLAIGPAASQLEPLNGDDAQAIQSGVGRLIALLPTAEGSPLAAAEYNRLMAETFDRARDLAVLRYVAASRTDRFWSRARRAAPSTALAYKQAQFESRGRVVLYDEETFVEGAWVGALLGLGITPRRHDRLADRLPAGQADAALTRLRGLIRQAALAMPTHADALKDRP

SEQ ID NO: 90128 - protein, 507 aa, Caulobacter sp.
  misc_feature (1)..(507): tr|A0A4R3H6T9|A0A4R3H6T9_9CAUL Tryptophan halogenase OS =Caulobacter sp. BK020 OX=2512117 GN=EV278_105226 PE=4 SV=1
MTPPPIRKVLVLGGGTAGWMTAAALSKVLGGQIEVTLIESEQIGTVGVGEATIPPILTFNAMLGIDERAFMRATRATFKLGIEFRDWTRLGDRYMHPFGSFGLDIEAIKFHQVWRKVRDQVGPLEDFNLAAVAARRNRFALPDPDPAKVLSSLKYAFHFDAGLYARFLRGFAEARGATRVEGKVADVTLRGDDGFIQSLTLEDGRVFEADLFIDCSGFRALLIGQALGGRYVDWSHWLPNDRAVAIPCDTGGDGLTPYTRATADKAGWRWRIPLQHRTGNGYVYSSAHLGDDAALAALIAGLDGPARAEPNVLRFQAGRRDRAWIKNCVAIGLSSGFLEPLESTSIHLIQAGITKLLALFPDKGFDPLEIDEYNRLTAQQVELVRDFIILHFKATERADTPYWDHVRTMDVPDSLQRKIDLFAGRGRLFQSDYDLFAEPSWIAVLMGQGIVPRRYDALVDSLPEAALVQRLQRMSALIGQTAQAMPDHAAFIARYCAAETVVAPILA

SEQ ID NO: 90129 - protein, 504 aa, Novosphingobium malaysiense
  misc_feature (1)..(504): tr|A0A0B1ZUU6|A0A0B1ZUU6_9SPHN Tryptophan halogenase OS =Novosphingobium malaysiense OX=1348853 GN=LK12_00405 P E=4 SV=1
MNGPDRKTTRYVVAGGGSAGWITAAILAHFLPPDAASIILVESEEIGIIGVGEATVPLLGQLNALLGIHEPDFVAATNGTFKLGIEFVDWGEKGNRHFHGFGDFGEDIDGLAPHQHWLRLNKTGAIPPLGEWSMPWAAGRRDRFAPPQAMKGEAAQFSYAYHFDAALYAGFLRRLAEAKGVKRVEGRIIDAERDGETGLVSHLTLDGGHRIDGDIFVDCTGFASLLLGKTLGVPYRDWSEWLPCDRAAAVPSSRAGRLTPFTRATALPAGWRWRIPLQSRTGNGHVYASRFLSDDEAVAQLLTGLDGEQLAEPRLLRFTPGRRDRFWEGNVIAIGLAAGFLEPLESTAIQLIQTGAARIVEYLPSGRPDAALAAEYNRQTALEYERIRDFIIAHYCRSRRTEPLWREVATMDLPETLAHKLAVWSACGRVPLYELESHQEASWVSILIGQGIIPNSHNPRADALPESKVRTILEQRRMFLAQAAGRMPAHDYFISRTCSAREMA

SEQ ID NO: 90130 - protein, 506 aa, Caulobacter zeae
  misc_feature (1)..(506): tr|A0A2N5DED2|A0A2N5DED2_9CAUL Tryptophan halogenase OS =Caulobacter zeae OX=2055137 GN=SGCZBJ_14235 PE=4 SV=1
MADNRIGRIVIVGGGTAGWMSAAMLARALGPAAKISLVESEAIGTVGVGEASIPQLRNFNAFLGLDEDAFLRATEGTIKLGIEFVDWLHPGHRYMHAFGPVGRPLGTTPFHHYWLDARRRGTAGDDFWAWSANALAARAGRFGRTPGEAGAEPLTWAFHFDAALYARHLRTYAQARGVQRIEGRIIGVDQDGESGFLRAVALEGERRVEGDLFIDCSGFRGLLIEETLKSGYEDWRKWLPMDSAWAAPSRDDAPPVPYTRAWARDAGWQWRIPLQHRTGNGHVFSSAWTDKDAAARTLMANLEGEALAEPRLLTFVTGRRRKSWNRNVVALGLASGFMEPLESTSIHLVQSGLARLLALFPDQGFDPLLADEFNRQTEQEYACIRDFLVLHYKATQREDTPFWASRKAMEIPHSLAERMALFAGSGRVFSRDEDLFKESSWVQVLLGQGVTPAAAHPMTAVAADAQVDGWLDDLARIAGRTAASLPTHAAFLAAAGGPRPAQRLAG

SEQ ID NO: 90131 - protein, 505 aa, Caulobacter zeae
  misc_feature (1)..(505): tr|A0A2N5D3G7|A0A2N5D3G7_9CAUL Tryptophan halogenase OS =Caulobacter zeae OX=2055137 GN=SGCZBJ_21790 PE=4 SV=1
MSDQRVRSVIVVGGGTAGWMTAAALAKTLSAQGLKITLVESEAIGTVGVGEATIPPILTFNTMLGVDEREFMRATRASFKLGIEFVDWGAIGEMYHHPFGTFGLDLEGIKFHQVWRKFAASAGPIGDYNLTEAAARRWRFSLPDPDPSKVMSSLRYAYHFDAGLYARFLRGFSEQRGVVRIEGRIGQVDQNAESGFVEAVVLEDGRRVEGDFFVDCTGFRGLVIGQALKAPYQDWGRWLPNNRAVAIGCELGGDGLTPFTRATAREGGWQWRIPLQHRIGNGYVYSSHHVDDQRALDTLLANLDGAPTDEPNFLRFTPGRRERAWEKNVCSIGLSAGFIEPLESTSIHMIQAGITKLLALFPRNGVDPLEVDEYNRLTAEQVDRIRDFVILHFHATRRDDTDYWRYLASMTVPDSLARRMELFAHRGRWFPSEYDLFHEPNWLAVLLGQGIVPEEWDPLVDSLPENEVRQRLSHLSALIARTAEAMPDHAQFVARYCGAAQGVAA

SEQ ID NO: 90132 - protein, 511 aa, Caulobacter sp.
  misc_feature (1)..(511): tr|A0A4V2UGG0|A0A4V2UGG0_9CAUL Tryptophan halogenase OS =Caulobacter sp. BK020 OX=2512117 GN=EV278_105224 PE=4 SV=1
MTDQTVRNILIVGGGTAGWMTAAALSAKLAGLPIAIRLVESAEIGTVGVGEATVPHIRHFNAALGLDEADFMRKTQATYKLGIEFRGWGKLGDSYIHPFGAYGAAIAGVSFHHHWLRARQGGDDTPLEAYSLPVMAARGGKFAPPSPDLSSVASTYNYAYQFDAGLYAAYLRAYAEARGVVRTEGKVADVALRGDDGFIEAITMEGGERIGADLFIDCSGFRGLLIEQALKTGYEDWTRWLPCDRAAAVPCETVEASTPYTRCTADAAGWRWRIPLQHRVGNGYVYSSQHISDDAAAAALLAGLEGRAQADPRVLRFVAGHRRKQWSKNCVAVGLASGFLEPLESTSIHLIQVAVTTLLELFPDRTCDQADQDEYNRVMTLEFERIRDFLVLHYHANQRTGEAFWDDRRNLPIPDSLAYKMDLFHDRGVVVKYKDGFFLEPSWLAVYLGQNIVPRAYDPVSGSVPDAVLAQRLKAIRDSIAEATRAMPAHDDWIARFCAARSGATAQAVTA

SEQ ID NO: 90133 - protein, 504 aa, Caulobacter zeae
  misc_feature (1)..(504): tr|A0A2N5D3G3|A0A2N5D3G3_9CAUL Tryptophan halogenase OS =Caulobacter zeae OX=2055137 GN=SGCZBJ_21795 PE=4 SV=1
MSNDRIRHVVIVGGGTAGWMTAAALGRFLKDGVTKVTVIESEAIGTVGVGESTIPQINMFNRMLGLDEDDFLRRTKATYKLAIEFRDWKQIGHTYHHPFGPYGVDMEGVSFHAYWLRYQAMGEAADLSEYSLQSLAAAQAKFQRPTGQKNSPLGDIAYAFHFDAGLYARFLRDYAEARSVRRIEGRIVDVALRGTDGFVESVTLENGAVVEGDLFIDCSGFRGLLIEGAMKSGFEDWSHWLLNDRAVAVPCASGGSTDPVTRATARPAGWQWRIPLQHRIGNGYAFSNAHISEDEATAYLLANLDGEALATPWTLKFKAGRRKKSWNKNVVAIGLSAGFMEPLESQSIHLIQVGISRLLAMFPDRRFQQPDIDRYNRVMTFEYEKIRDFLILHYKATQRSDTPYWDYLREMEIPDYLADKIAVFESHGRIFRENEELFNDTSWFAVMVGQGLKPKGWDPMADVMSDDLLRARMREIQAVIARSAEAMPDHMSFVADRVARAQAA

SEQ ID NO: 90134 - protein, 512 aa, Novosphingobium ginsenosidimutans
  misc_feature (1)..(512): tr|A0A5B8S2D6|A0A5B8S2D6_9SPHN Tryptophan 7-halogenase OS=Novosphingobium ginsenosidimutans OX=1176536 GN=FRF7 1_02055 PE=4 SV=1
MESPIRQVVIVGGGTAGWLSACLLAARLPELTVTLVESPNIPTIGVGEGTWPTMRETLASIGIPEAEFLRECDAAFKQGSRFDGWVTGAGDDTYLHPFTLPPLGDLRELLAAWQQVAPDQPFAQAMTPQGAVCAAGLAPRQRAMPDFAGALNYAYHLDAGKFAALLMRHATGRLGVRHVSAEVCGTRAAANGDIAAVLLRDAGELAGDLFLDCTGQAALLIGGHCQVDWIDRSDVSFNDRALAAQVPVEPGSPIAAQTVGTAHRAGWIWDIALPTRRGIGCVYASRFLDDDAAEAVLRDYIAAKVPGADAATIQPRRLAFQTGHRARFWQGNCLAVGLSAGFIEPLEASAIVLIELSLRRLIEAFPADRAAMEPLSRRFNDLFRQRWDRIVEFLKLHYVLSRRTEPYWLAQRDPATIPERLTESLELWRHLPPSPRDFPDFEEIFPAASQQYVLYGMGFPLPSRLPQPSGQALARISEVRDRARAMQAGLPENRSYFAALAASAPERPAAAS

SEQ ID NO: 90135 - protein, 521 aa, Xanthomonas arboricola
  misc_feature (1)..(521): tr|A0A2S6Z2N8|A0A2S6Z2N8_9XANT Tryptophan halogenase OS =Xanthomonas arboricola pv. populi OX=487823 GN=XaplCFB P3122_14600 PE=4 SV=1
MTDTAPSDPQQRPVRRVVIAGGGTAGWMAAAALSKVLGKHLQIVLVESDEIGTVGVGEATIPSLVTFHRLLEIDEAAFMAATQATIKLGIGFEHWRDVDRHYIHSFGHTGTDHWSAGFQHFWLKGRQRGLARDFGDYCLELRAAQEGRFAHLPNGGMNYAYHLDAGLYARFLRRFSEGFGVQRIEGRIGNVETHAHSGYLTALTLDNGTRVEGDLFLDCTGFAGLLIGKTLGVGTDDWSQWLFADSALAVQTESVGAPVPYTRSRADQAGWMWRIPLQHRVGNGIVYSSRYMDQDSAAQVLQRNLSGRALTQPRALRFTPNQRHRVWEKNCVALGLASGFLEPLESTNIHLIQRGIIRLMQTFPQVINDVDIAEYNRQAAAEITHIRDFVILHYHATDRRDTPFWRDCAAMDIPDTLRHRVELFRQSGRVFHQANELFAENSWVQVMLGQGITPKQHHPVADLMGDAELRHFLETIRTRVDAALARLPAHADFLHRYCPAPPLPEPATRLPANAALATGAR

SEQ ID NO: 90136 - protein, 511 aa, Caulobacter sp.
  misc_feature (1)..(511): tr|A0A4R3HBN4|A0A4R3HBN4_9CAUL Tryptophan halogenase OS =Caulobacter sp. BK020 OX=2512117 GN=EV278_103354 PE=4 SV=1
MLTEISRENGPLRRIAIVGGGAAGWMAAAALARVLGPQGPAITLIESEEIGIVGVGEATIPPIRAFNAMIGLDEDVFVRETRGTFKLGIEFVDWRQRGHRYFHPFGVYGPDFGPTPFEGAWRRLRQAGRAEPLETYSVCAQAAAAGRFARPQPGGGPLSQLAYAFHFDAALYARLLRAHAEAAGVVRREGKVAAVNLRGGDGFVESVTMEDGERIAADLFLDCTGFRALLIGQALESPFEDWSRWLPNDRAVAVPSANAGPPAPYTRSTAREAGWQWRIPLQHRTGNGYVFSSRHVSEDEATANLLANLDGEPLAEPRVLRFQAGRRPAGWVRNVVALGLASGFLEPLESTSIHLIQVGIARLLEMLPTRAFEPADARRYNRLMAAEFDGVRDFLILHFHATERRDTAYWEELAAMSVPDTLVERLRIYRATGRVFRESDELFTKTSWLAVMDGQGPRVEGCEPLAEGLPLDQLEARLARIAEATAEAVRRMPSQADFIRVHGQAATVVAG

SEQ ID NO: 90137 - protein, 498 aa, Novosphingobium ginsenosidimutans
  misc_feature (1)..(498): tr|A0A5B8S188|A0A5B8S188_9SPHN Tryptophan 7-halogenase OS=Novosphingobium ginsenosidimutans OX=1176536 GN=FRF7 1_03490 PE=4 SV=1
MASQAQPIRKILIVGGGSAGWMTAAALSANLAQGCEIALIESEEVGTVGVGEATIPPIRTFNQMLGIDEAEFMKRTQASYKLGIEFVNWGRAGHRYFHPFGPHGRAFDVVPVHQHWLLAKAAGETAGFDEHSMAWHLAKANRFVRPSGDPRSVLSTFDYAYHFDAGLYARYLRAYSEQRGVVRHEGKIGSVQQHGETGFVTGVTLEDGRSLEAELFIDCSGFRGLLIEGALQAGYADWTHWLPCDRAVAIPCEKAGDFTPYTRSTAREAGWQWRIPLQHRTGNGHVYSSQFTSDEAALDVLLSNLDGKPLAEPNRLRFTTGMRRKFWDKNVIAVGLSSGFLEPLESTSLHLIQAGISKLLALFPDTSFDPAVIAEYNHIAATEMERIRDFIVLHYKLMDRDEPMWRHTAAMEVPDSLAFKIDHFRRYGRHIPRDMDLFAPPSWHAVHIGQFNLPEGTDPLGAYRPSGREWLGKLRSAMANEAARQPSHQAFIDQHCKA

SEQ ID NO: 90138 - protein, 477 aa, Amycolatopsis sp.
  misc_feature (1)..(477): tr|A0A429EUT7|A0A429EUT7_9PSEU Tryptophan halogenase OS =Amycolatopsis sp. WAC 04182 OX=2203198 GN=DMH01_40650 PE=4 SV=1
MSSPQYDVIVVGGGPAGSTVSTLVSKAGHRVLLLEKEKFPRYQIGESLLPATVHGVIPILGVEKEVAEAGFTVKRGGTFKWGKRPEPWTFEFAVSSKMPGPTSFAYQVERMKFDDILLRNARKHGVEVREESSVVKAITDETGRVRGVHYKDSDGKVHEVFARYVVDSSGNTSRLFKASGAERHYSPFFRNLALFTYFEGAGRLPEPNAGNIFSVAFEHGWFWFIPLSPTLTSVGAVVHQDSAELVQGDPDEAMRRFIDACPRIKDILGDAKRITEGPYGSYRVRKDWSYCNSRFSGPGMVLVGDSACFVDPVFSSGVHLATYGGLLAARSINGCLAGTVDEEAAFAEFEKRYRREYGLFHEFLIGFYDMNKSEDSYFWQARKVSESASTDVEAFVELVGGVASNDLRLTADDLAATVESVEHKPGGAANGTVLTRMLKAGAGLQGRALLGSRSGEGAALEPGGLRASDDGLSWVRS

SEQ ID NO: 90139 - protein, 514 aa, Caulobacter sp.
  misc_feature (1)..(514): tr|A0A4R3HBS7|A0A4R3HBS7_9CAUL Tryptophan halogenase OS =Caulobacter sp. BK020 OX=2512117 GN=EV278_102208 PE=4 SV=1
MVRPVKNIVVVGGGTAGWLTAGLIAAKHKARQATGFTVTLVESPNTPIIGVGEGTWPTLRTTLAKIGVSETDFFRECDAAFKQGAKFARWTTGAADDAYYHPLMLPQGFSQVNLVPHWLVGGNGRSFCDAVTPQGRLCDDGLAPKTITAPPYQGAANYAYHLDAGKFAPFLQRHCCDKLGVRHVLADVRSVAMTEDGDIRGVVTQQQGEIQGDLFIDCTGFRALLLGEALGVPFRDCGDVLFCDTALAIQVPYETEASPIASHTISTAQSAGWIWDIGLPTRRGVGHVYSSRHISDDDAERELRAYIGPAGRDLSARKIAIRSGHRETFWKRNCVAVGLAAGFLEPLEASAIVLIELSAKLIAEQMPACREVMDIVAARFNATTHYRWGRIIDFLKLHYVLSQRSDTAFWRDNRARETIPDRLADLLQLWRHQPPWLHDEFDRADEVFPAASYQYVLYGMGFRTEIEPEALVDERAMAERALRETAVQTERLRATLPRHRDLIRKIVEHGLQPV

SEQ ID NO: 90140 - protein, 240 aa, Pseudomonas sp.
  misc_feature (1)..(240): tr|A0A2R7S5P8|A0A2R7S5P8_9PSED Tryptophan halogenase (F ragment) OS=Pseudomonas sp. HMWF010 OX=2056847 GN=DBR41 _23025 PE=4 SV=1
MSRPVRNVVIVGRDAAAWLTALGLKRAFGRQGVNVTVLELPSMVRSADVLVGLPTLEGLHRLLGLDTDDMLAATAGAYALGQQFANWSQARPPFVHAYDTHGAPIHRIDFLQHWLKARSEGMNVPLEEFSLGAAAAKHGRFVVHGDATSGFSKARAGYHLDASAYIRLVRQKAIELGVQRQAGTLGEVVRSDSGIVSVSLAGGEPLAADLFVDASGVDAVLIGKVLEQPLESWSPWFGCD

SEQ ID NO: 90141 - protein, 505 aa, Sphingomonas hengshuiensis
  misc_feature (1)..(505): tr|A0A2W4YVM2|A0A2W4YVM2_9SPHN Tryptophan halogenase OS =Sphingomonas hengshuiensis OX=1609977 GN=DI632_13940 P E=4 SV=1
MTPLRRILIAGGGSAGWMTAAMFARLFKGRYAITLVESDAIGTVGVGEATIPAIKKFNELLGIDEDDFLRRTQGSFKLGIQFNDWSRIGSSYVHGFGVIGRDLEWLRCHQYWLKLHGEGRGGPLDAYSINTVAATANRFMRPRADMPDSPIGQIAYAFHFDAGLYAAYLAEYARERGVERREGEIVAVAQDADTGFLTSVTLADGSMIAADLFIDCSGFRGLLIERTLAAGYEDWRHWLPCDRAVAVPSRRSADFTPYTRSTARPAGWQWRIPLQHRTGNGHVYASRYMDDEMAEAMLLDHLDEPAVGDPRRLAFVPGRRRRGWVRNCVAIGLAAGFLEPLESTGLHLIQSAILRLVRLMPDARFDPATSAEYNRQTDFEMERIRDFIILHYKATTRDDTPFWRHVRTMDVPDTLARKMALFAANGRIFREDDELFAEESWIQVLIGQGIVPAAPDPLVDVTPRAEVERHLADVRGVIAKCVDRMPDHGAFVARHCAAPPPQPAP

SEQ ID NO: 90142 - protein, 496 aa, Colwellia sp.
  misc_feature (1)..(496): tr|A0A3D3GWL1|A0A3D3GWL1_COLSX Tryptophan halogenase OS =Colwellia sp. OX=56799 GN=DIS98_06025 PE=4 SV=1
MKNEKIQKIVIAGGGTAGWMTAASLSKLLGKGFDITIVESDEIGTVGVGEAAIPTLVTFHRLLAIDEQAFMRATHATFKLGINFENWKQKNENYMHGFGNVGKACWAGEFQHFWLHSLRKNVDVPYDKYCYEIQAAKAGKFAKSQEAPLNYAYHLDATLYGRFLRNFSEELGVKRIEGKIVSVIKNEDNGHISSLMLDSGKQIEGQLFIDCTGFNGLLIEKSLHTGYEDWSHWLPCDSAIAVQTKPTDSALPYTRSIAQDSGWQWRIPLQNRVGNGLVYCSNYLTDENAKSLLLKNIDGETINEPRVIKYRTGRRRKGWNKNCIAIGLSSGFVEPLESTSLHLIMSGILRLIKLFPFAGINQSAIDEYNQQFNEEIESIRDFIIMHYHVTERDDSPFWRYCKNMDVPPSLKHRINLFEETARLSVNDGELFHPDSWSQVMFGQGIIPKQYHQIANVMGKDEFTNFLRGLREPIKKKVEQLPSHQEFIDYYCKAEKT

SEQ ID NO: 90143 - protein, 508 aa, Caulobacter sp.
  misc_feature (1)..(508): tr|A0A4R3GX88|A0A4R3GX88_9CAUL Tryptophan halogenase OS =Caulobacter sp. BK020 OX=2512117 GN=EV278_11839 PE=4 S V=1
MPALPTPPARIRDIVVVGGGTAGWMAAAALSKVMGTQAYTITLVESELIGTVGVGEATIPMITMFNSVLGIDENEFVRETNATFKLGIEFAGWRREGHSYFHPFGQFGVDMDGINFNHYWLRWMQAGGGTDHGRFNAETEAARQGKFGRTGDGRSPGLPNINYAFQFDASLYAAYLRRYAEKRGARRTEGQVVKVERNGQSGLIESLLLKDGQAIRGDLFIDCSGFRGLLIEETLQAGYEDWSHWLPVNRAAAVPCAKVEDPVPYTRATAREAGWQWRIPLQHRTGNGYVFCDQFISEDEAARLLMTRLDGAPLAEPRILRFVTGRRRKSWIGNCVALGLASGFMEPLESTSIHLVQVGISKLLAMFPKGGFNPLITDRYNAEMEADYVNIRDFLIAHYKITEREDTPFWRYCKSMSIPDSLATRLEIFRTRGEAMVVHHELFKEQSWFAVLMGQGLTPVDHHPVADLLSEDELKLRLAKVRTSIQDRVNGLPGHQQFIDKNCRSAAG

SEQ ID NO: 90144 - protein, 519 aa, Caulobacter sp.
  misc_feature (1)..(519): tr|A0A4R3H8H6|A0A4R3H8H6_9CAUL Tryptophan halogenase OS =Caulobacter sp. BK020 OX=2512117 GN=EV278_104163 PE=4 SV=1
MDRRRRILIVGGGAAGWLTAAYLAKSLRIAEQAHLEITLLESPEVGIIGVGEATFPTIRTTLQFLGVDEARFIRETSATFKQGIRFNDWAWAPTENGERHQYFHPFEAPFSTDGASLAPYWLLQNEATRAPFAEAMTIQARVADAQRAPKRPHEGNFSGPLNYAYHFDAAKLAQVLAERARELGVRHLQGRLTQVELDATGAIDHVVCAEHGRLEAELYIDCTGFHAELIGKALKAPFKSARPILFADRALACKASYDRPDAPIQSFTIATAHEAGWIWDIGLKDARGVGCVYSSDHVDDDRALAILGDYVGRDVEIAPRALSFEAGYRTRQWVKNCVAVGLSAGFLEPLESTGVVLIEAAVAIIAELFPHNGPISAPALRFNELMTARYDNIITFLKLHYCLSRRSEPFWRQNADPATMPERLVDLLEQWRWRPPTRYDFILDLETFAFFNYQYILYGMGFKTDLSPGRDEFPDVAGAEKLFAKIRNFGERATHDLPSHRDLIAQINRFGFDRSLEPA

SEQ ID NO: 90145 - protein, 152 aa, Pseudomonas sp.
  misc_feature (1)..(152): tr|A0A2R7S413|A0A2R7S413_9PSED Tryptophan halogenase (F ragment) OS=Pseudomonas sp. HMWF010 OX=2056847 GN=DBR41 _24175 PE=4 SV=1
MPAPLKVVIVGGGTSGWMSAAALVAGLPPGLCEVRLVESDEIGIVGVGEATLPQIKDFNDHIGVDEADFMRQTQATFKLGIEFVDWGFKGSSYIHPFGVHGKPLGGVPFYQYWAKARLNGRVDDLGDYSLPIVASRQNRFAFPSTDEDGLSS

SEQ ID NO: 90146 - protein, 520 aa, Caulobacter sp.
  misc_feature (1)..(520): tr|A0A0Q8FHJ0|A0A0Q8FHJ0_9CAUL Tryptophan halogenase OS =Caulobacter sp. Root655 OX=1736578 GN=ASD79_09530 PE=4 SV=1
MTDASIRKIVIVGGGTAGWMTAAALSRVLREFRAEPSKVAIQLIEAPDIGTVGVGEATIPPLMLFNQLLGLDEDTFIRETQGTFKLGIEFVDWTRLGHRYVHPFGRYGADLEASAFHHYWLRLRSLGDTTEFGDYSLPTLASWMRRFDRPTRDSASVMSTYSYAFHFDAALYARFLRGYAEARGVERIERKVVDVTLRGADGFIESITLDDGRVVDGDLFIDCSGFRGVLTEGALKTGYEEWSHWLPCDRAVANQSESVEDLTPFTRATAQTAGWQWRIPLQHRIGNGYVYSSPFISDDDATATMLRTLDGKPCTDPRILKFTAGRRRKAWNKNCLAIGLAGGFMEPLESTSIHLIQSGVTRLIQLFPDRNFDPVLLGEYNRLTQQEYEKIRDFLVLHYHANERADSPLWKHVREMSIPDTLAHKMELFRASGRLASMGLDLFQEPSWLAVLIGQNVMPRGYDPLVDLMDLDRVRKNLAAMKLTLRQAAEAMPTHRDFIAAHCAAPSSELTVSREWTRRT

SEQ ID NO: 90147 - protein, 561 aa, Ruegeria halocynthiae
  misc_feature (1)..(561): tr|A0A1H2W124|A0A1H2W124_9RHOB Tryptophan halogenase OS =Ruegeria halocynthiae OX=985054 GN=SAMN05444358_101164 1 PE=4 SV=1
MNNRLSKITIVGGGTAGWMTALLLDMVFSRTSAPKDRPRLCLIESPNISTVGVGEATVPRMPVTIRQAGISEREFFRETNASFKLGVKFCNWNKDAKGNRIDYVNPFAHGQMLYGLEAAEYFLRFGNGDRDFTQSISPHDHLGRLCKGARQLGQPEFEQRFGYAYHLDAVKFAGMLAKVCTKRGVEHIQDEVQSVELDEQGNVSHLMLERAGRHDIEMVVDCTGFRGLIINKALGEPFMDYSDYLPNDRAMALQIDHPDPDKIESLTRSTALGAGWTWRVPLYNRVGTGYVFSSAHRTDDQAADEYLEWLGDSGKGATPRIIPMRIGRVRNAWVKNCVAIGLSGGFIEPLESTAIHMIDHAVRWLAEHLPTRDIEPSLRTRYNRQMNKLYNEVLEFICLHYRLGNRTDDQYWIDARTELKLPDRLAENLELWQHRLPLNHDTEFTTLFDHRVYQTVLLGKQVYDTGYGAGIRDRLRPLKKPIWFQGMKRAKVDLAQIVKSMPDHKTLLRDIRGELEQPAFGMAAAMKPTVAMPGAEPASATIQNMPDLAEIQSGTKDLQLF

SEQ ID NO: 90148 - protein, 516 aa, Caulobacter sp.
  misc_feature (1)..(516): tr|A0A0Q8G0A8|A0A0Q8G0A8_9CAUL Tryptophan halogenase OS =Caulobacter sp. Root655 OX=1736578 GN=ASD79_22885 PE=4 SV=1
MQETAQDRRIRDIVIVGGGTAGWMAAASLRRHFASAPINITLVESSEIGTIGVGEATIPTIRRFYQAMGLSDIDVLRATGGTCKLGIRFNDWLKPGSSFVHPFGLYGQDLNGVAFHHYWMRLRALGEKVPVGDYSLGASLAAAGKFTTPSRDPPSSLSVFDWALHFDASLFAKLMRQVAEQGGVRRIDARITKVNLRGEDGFIESVDLDTGATVTGDLFIDCSGFRGLLIEEALHTGYEDWSHWLLCDRALAVQSEGKGDPPPYTDVTARPAGWQWRIPLQHRYGNGYVYSSRHTTDEEARAVLVGSLDERLLHEPRRITFNPGRRLKAWNKNCIALGLASGFLEPLESTSIALIETGIEKIKLLFPNRDFDPCVVDEFNEMSRLEFERVRDFIILHYKANQRPGTPGGDPTGFWTHCREMSIPDTLQKKIDLWKARGHFVRYRWEMFSQPSWLAIYAGFEMLPESYDPSVDGFDAGQLSGALAEMRRAVAEVVAATPAHGDFIEQYARPRPVAAE

SEQ ID NO: 90149 - protein, 502 aa, Glaciecola punicea
  misc_feature (1)..(502): tr|H5TD19|H5TD19_9ALTE FADH2 O2-dependent halogenase I OS=Glaciecola punicea ACAM 611 OX=1121923 GN=prnA PE=4 SV=1
MDTEKKSKVVIVGGGSAGWMTAAALSHLLPRDRFAITLIESKTIGTVSVGEATIPSILEFNQMLGIDEAEFLSFTHGSFKLGIEFHDWYKKGHQYMHPFGPYGVNMNGIPFHHYWLKDKLQGKEDPLSDYCLEYQAALNNKFCHPQAQSRSAMANIKYAYHFDAVKYAEYLSAFSVKRGVNKIIAQITKVHQHAQTQDISSVALSNGELIEGDLFIDCSGFKGLLIAQTLKVGFEDWRQYLPCDSAIAQPSESLSTIKPYTISTAHECGWQWQIPLQHRIGNGFVFSSQFLSKDLAIDCLAKRLPSKALSEPRQLNWINGKRQQAWKNNCIAIGLSAGFIEPLESTGLQLIQSAIMRLLSLFPSGRCQQVDIDTYNRYTDDELWRIRDFIILHYKATQRNDSAFWRYCASMPIPDSLQNKIELYQSSGRIFRENNELFSEISWLSVMNGQGLVPKAYHPLVNNLSEQQRQQNLSHIAGAMREAEQQMPDHKAYLQKYCRVST

SEQ ID NO: 90150 - protein, 507 aa, Caulobacter sp.
  misc_feature (1)..(507): tr|A0A4V2UH26|A0A4V2UH26_9CAUL Tryptophan halogenase OS =Caulobacter sp. BK020 OX=2512117 GN=EV278_101389 PE=4 SV=1
MSDGNWIQTIVIVGGGSAGWMTAAALARGLDRRYRIHVVESQDIGVVGVGEATIPPIRLFNAMLGLDEAEFMRETQATYKLGIQFRDWGAVGQSYFHPFGVYGVNAELGHFFQYWLKLNTEGADLDLADYALCAQAAKAGRFDRQSDDPRDPMSTFGFAYHFDTILYGQYLRRFAQKLGVVRTEGEVVQVDQNAETGFVTALRLKSGQVVEGDLFIDCSGFRGLLIEQTLKAGYEDWSDLLPMDRAAAAPCGLSGPLSPYTTSTAREAGWQWRIPLQHRVGNGYVYSSRFISDDDAVATLTANLESKPLAEPRLLRFNTGRRRKAWDKNVVAIGLSSGFMEPLESTSIHLIQASINKLLQHFPDRSFSPANRDVYNRRIQIDMETIRDFLVLHYKATVRDDAPLWSYVRQMPIPDSLAERIALFEERGQLVIHPDEMFTPTSWLAVLLGQGVRPRSYSPLVAGQDSRAIAEGFRNMKTMMARRIEAMPSHVDYLKRHRMWAAEAAMA

SEQ ID NO: 90151 - protein, 90 aa, Pseudomonas sp.
  misc_feature (1)..(90): tr|A0A2R7RNN3|A0A2R7RNN3_9PSED Tryptophan halogenase (F ragment) OS=Pseudomonas sp. HMWF010 OX=2056847 GN=DBR41 _29330 PE=4 SV=1
MERRRSILIVGGGTAGWLTAAYLARSLRIAEQGHLEITLLESPEVGVIGVGEATFPTIRNTLQFLGIDEGRFIRETTATFKQGIRFDDWA

SEQ ID NO: 90152 - protein, 503 aa, Caulobacter sp.
  misc_feature (1)..(503): tr|A0A4R3H757|A0A4R3H757_9CAUL Tryptophan halogenase OS =Caulobacter sp. BK020 OX=2512117 GN=EV278_105218 PE=4 SV=1
MNRIERLVILGGGTAGWMTATALAKAFGPRLTIELLESEAIGTVGVGEATIPTIHWFNALIGLDEAEFVRATKATFKLGIEFVDWARPGDRYFHPFGRHGVELDAVPFHQHWLKARSDGFDRPLSAFSLATQLAAANRFARPADDPRSILSTLGYAYHFDASLYAQHLRGLAEAAGVRRREGRVNQVERAPDTGFVMALTIDRGERIEGDLFVDCSGFRALLIDGVMEAGFEDWSHWLPCDRAVAVPCTRVAETTPYTRSTLRPAGWQWRIPLQHRMGNGYVYASAFLSDDEAAATLLGGLDGEALGEPRLLRFRAGFRRETWRKNVVAIGLSSGFLEPLESTSIHLIQSGIAKLITLFPDRDCDPGLARQFNTLFGRDMDGIRDFLILHYHATHGHEAPLWRQARRMALPESLIDREAQYRRAGRLMLTSDELFREASWLAVLEGQGVRAEGCSPLADTLDPAANRRQLEQIEAVIARAAPTLPKHDDAIAAMIGGIAPVPG

SEQ ID NO: 90153 - protein, 495 aa, Sphingomonas hengshuiensis
  misc_feature (1)..(495): tr|A0A2W5BGD5|A0A2W5BGD5_9SPHN Tryptophan halogenase OS =Sphingomonas hengshuiensis OX=1609977 GN=DI632_03065 P E=4 SV=1
MSAAPVRVVIAGGGTAGWMAAAAIARAMGRTVEVVLVESEAIGTVGVGESTIPPLVTYNRLLGINEAEFMAATAATFKLGILFEGWKTADSRYFHSFGITGRDHWAAGFQHYWLNGLTRGHDRPYDDYCTELVAALQGKFAHLPGDATNYAYQLDSARYARFLRTMAERDGVTRIEGRIAQVELDAETGDIAALRLDGGRRATGDLFLDCTGFRALLIEGALHAGYDDWTHWLPCDAAIALQTESVGPPLPYTRATAHDAGWQWRIPLQHRVGNGIVYCSRYLDRDAAFDRLTGNVEGAVLTEPNFLRFTTGARRRQWYRNCVAIGLSGGFMEPLESTSIHLIQRAVLRLIRLFPQGRISPADVTEFNDQQRQDMEQIRDFLILHYNVTDRRDSPFWRQCANMDVPETLAQKIGLFRQTGRVFRRNEELFGENSWVQVMMGQGIVPERHHPLAAKLTDDELDRLLSTLRRQVIDTVATMPPHGDYVARYCPADRS

SEQ ID NO: 90154 - protein, 364 aa, Pseudomonas sp.
  misc_feature (1)..(364): tr|A0A2R7S5Y3|A0A2R7S5Y3_9PSED Tryptophan halogenase (F ragment) OS=Pseudomonas sp. HMWF010 OX=2056847 GN=DBR41 _23030 PE=4 SV=1
EDGLSSNFAYAYHFDAHLYARFLRGFAEARGLRRTEGRIVDVTLKPEDGHIASIRLESGEVIAGDLFIDCSGFRSLLMGQALGVGYEDWTPWLPCDRAYAVPCERAGALTPYTRSTAREAGWQWRIPLQHRTGNGYVYSSRFISDDEAAATLLANLDGEAQGDPRPLRFQAGRRETSWSRNCIAIGLASGFLEPLESTSIYLIQVAITNLLKLLPGRAIDPALVSEFNRLIDVEYGRVRDFLILHYHLNGRDDAPLWRYCREMPVPDSLTSRMALFEHRGHIAKYKDGLFQPPSWLAVFVGQGLLPAGYDPLVDNVPQEHILRELDQFRADVAQTVEAMRDHGGFVADFCAAPANRPLSSRVAS

SEQ ID NO: 90155 - protein, 285 aa, Pseudomonas sp.
  misc_feature (1)..(285): tr|A0A2R7S8M5|A0A2R7S8M5_9PSED Tryptophan halogenase (F ragment) OS=Pseudomonas sp. HMWF010 OX=2056847 GN=DBR41 _21295 PE=4 SV=1
MNIDNRLRSIVIVGGGTAGWMTAAALGRFLTKDGQTRVTLVESDAIGTVGVGESTIPQINIFNRMLGLDENEFVRRTKATFKLAIEFRDWERIGHSYHHPFGPYGLDMEAVSFHAYWLKLHAMGEDDDLGAYSLQAVGARQDRFMRPNGQANSPLGAIAYAFHFDAGLYARFLRDYAEARGVRRREGRITSVQQDGLNGHVTSVILESGEAVEGDLFIDCSGFRGLLIEETLHSGFEDWSNWLLNDRAVAVPCASGGSFSPVTRATARPAGWQWRIPLQHRIGNG

SEQ ID NO: 90156 - protein, 505 aa, Pseudoxanthomonas sp.
  misc_feature (1)..(505): tr|A0A4Q8LYF4|A0A4Q8LYF4_9GAMM Tryptophan 7-halogenase OS=Pseudoxanthomonas sp. NML130969 OX=2480811 GN=EA655_ 17220 PE=4 SV=1
MASESIASIVVVGGGAAGWSAAAALIRHLPHCRVQLVESEEIGIVGVGEATVPNVRYFNRQVLGLEEGEFVRRTQGTFKLGVEFRDWRRPGDAYMHGFGAVGYDMGPLAFHQLWLHEVRAGRADADIGRYVLQNLAARQGRFMTAPADAPAGSPLAEIAYAYHFDATLYAGYLRERAERQGVVRVEGRVVEATLRAQDGFVEAVVLADGRRIEGDLFIDCSGFRSLLLGEALQVPWVDWSHWLPCDRAVAVPCAPAGPPEPFTRSTARTAGWQWHIPLQHRVGNGHVYSSAFMDDATATEQLMSSLEGPARAEPRLLRFATGRRARFWERNVVAMGLASGFMEPLESTSILLVHNAVLRLLDVFPDKRFDPALLRRYNETTVFEWERIRDFLILHYKATERDDSAFWRHCAAMAIPDSLQQVIDLFAGSGRYHRNGEEFFSTSSWVQVLLGQGIVPRREHPLLAAIPEPQIQQFVGRVAQVLDNCVAAMPPHEQFIARTCAAPPP

SEQ ID NO: 90157 - protein, 509 aa, Pseudoalteromonas luteoviolacea
  misc_feature (1)..(509): tr|A0A541BDP6|A0A541BDP6_9GAMM Tryptophan 7-halogenase OS=Pseudoalteromonas luteoviolacea OX=43657 GN=FLM44_04 720 PE=4 SV=1
MASITIVGGGTAGWMTAVLLNQAYNKFGNTVSIQLVESPDVDIVGVGEATVPAIKDFLQAVGIDEAEFIKSTNATIKNGILFKNWCAPTKEGEVHQYMHPFDQERVEKRLDVATSWLLSSRNKSYDDSVSIAKALSDKNLTPKVQQSKSFQSIVPYSYHLDARLFGQFLRKHAIARGVTRVEAHVNNVVAKEGKIVSLSTDKGEITSDLFIDCTGFRALLMSKLEEQENWHSYSDVLLCDKAVTIQTANDTSYAPNPYTISHALSAGWSWKIDLQNRSGNGYVYSSRHISPEQAELEFRKHLGLDEQSKFNHIDMHVGRRRQQWIGNCVAVGLSSGFIEPLESTGLHLIYLAARQFVLHNNFSKTQQSTRDNYNKTMNDTYDELKDFIVLHYVLSDRTDSEFWRDIPKTLDGCELLKSRLSVWKHKVCEYFDVSNSTSHMFSDVSYRYILYGMNYFPELDIPFVEGEFDDVFAYIENRQQQACHHTLSHKEYLNATVHGQSGFVSVSMK

SEQ ID NO: 90158 - protein, 500 aa, Pseudoalteromonas luteoviolacea
  misc_feature (1)..(500): tr|A0A1C0TTI2|A0A1C0TTI2_9GAMM Tryptophan halogenase OS =Pseudoalteromonas luteoviolacea OX=43657 GN=A7985_0129 0 PE=4 SV=1
MSSRKIVILGGGTAGWMAANLIAKSWRDKNIQISVVESPDIGIIGVGEGSTPQFKAFMDFIEVPESEWMPKCNASFKNGIRFVNWSTRPGFEQYFHPFPAQPDDYSAPAFFHNSFVRRKGIDLEGHPDPFFLATYLAEQAKAPIAAENFPFEINYGYHFDSGKLGELLAEKARESGVEHIEARVQDVRKNTDGTIAALVCEEGREICGDIFIDCSGFSSLLMQQHMQVGFESFENNLFNDSAVVLPTEQGDVIASETVSVARKYGWSWHIPLTNRIGNGYVYSSKYCDKDQAETELRAALGLLDSEVEARHLNMRVGQVKEHWHKNCVAIGLSQGFIEPLEATALHIVQETVQSFIECYQDGEFTCKEQGKHNQMMSQRYQAIRDYIVAHYRVNSRTDTNYWRDNANNNQISKSLFNVLNAWVQGKNLSDELDRQDIDKYYPSVSWHCLLAGYGIYPEKHQLIAGNESANIHDVEKIRDYIRRCGLNFLDHRAQLARFLD

SEQ ID NO: 90159 - protein, 507 aa, Pseudoalteromonas luteoviolacea
  misc_feature (1)..(507): tr|A0A541BDJ6|A0A541BDJ6_9GAMM Tryptophan 7-halogenase OS=Pseudoalteromonas luteoviolacea OX=43657 GN=FLM44_04 725 PE=4 SV=1
MLVNDYVVVGGGTAGWLSACLLASATSEQAAKTVTLIESPDIPIIGVGEGTVPSIRDTLKRVGISESDIFNHCDGSFKQSIKFVNWMDKKKHGENNFYHHLFDYPFPFGDNLCQYWHNQSTSSFAEIVSIQQYLAESMKAPKGICDPEFAGVSDYAYHFDAHKFAQLLKRHAIEKLGVIYVSDTVVDVTHSHDGSIDQLVLKEQGSMGFDFYIDCSGFSSYLLGGKLDVPFVDKQDVIFSNKALTVQVPELEASIPPYTISTAHQAGWIWDIALSNRRGVGFVYCDAYLDKDTAFHKLQTYVGRDLNDFNVRDLDMKIGFRERAWEKNCIAIGLSQGFVEPLEATAILLSDFSANLFCNKLPETTADIAVLSKRFNQRVSYAWQSVIDFVKLHYCISDRQDSEFWQDNRASNSIPDSLKERLELWSQTYPTKDDFFSKFEVFDIENYLYVLCGMNFDFNRYGLTEKKTKEFAAQHQQVFVTAEQYKRQLLEQRALLEKVKVNNFSKS

SEQ ID NO: 90160 - protein, 487 aa, Sphingomonas sp.
  misc_feature (1)..(487): tr|A0A0S9CFK2|A0A0S9CFK2_9SPHN Tryptophan halogenase OS =Sphingomonas sp. Leaf231 OX=1736301 GN=ASE95_06650 PE= 4 SV=1
MTAVRRVVIAGGGTAGWLAAAMLTKQLGAMVAVTLVESEEIGTVGVGESTIPTVRAFHELIGVDERDFVRATGASYKLGISFEGWTRPDEHYLHSFGKLGQSTWMADFHHFWLEARAQGRAGELGTYCVEHEAARAERFAGGAEAGLNYAYHFDAARYARYLRERCEADGLRRIEGKIARVERDGDSGGIAALVMEDGTRVEGDLFLDCTGFRALLIGETLDVGYEDWGQWLATDRAIAVQTTATAPAVPYTRAIAHEAGWQWRIPLQHRVGNGIVYASAYLSDDEARARLLGNVAGETLIEPRVIRFRTGRRVKAWERNCIALSLAGGFVEPLESTSIHLIMIALTRLLQLFPFDGVSAAAAARFNDMARREIEGVRDFIILHYTLNQRDEPFWQRMRDMPLPDTLVERIALFRESAQAFQASDELFTVTSWVQVMLGQKLEPAGHNRVARMMPPGRLEQTLAHLAGQVTGAVRGLPLHQAYLDQV

SEQ ID NO: 90161 - protein, 501 aa, Pseudoxanthomonas sp.
  misc_feature (1)..(501): tr|A0A4V2HFR6|A0A4V2HFR6_9GAMM Tryptophan 7-halogenase OS=Pseudoxanthomonas sp. NML130969 OX=2480811 GN=EA655_ 15170 PE=4 SV=1
MTDSSQPRPVKRVVIAGGGTAGWMAAAALSRTLGKVLDITLVESEEIGTVGVGEATIPTLVTFHRLLDIDEQAFMAATGATIKLGIQFEGWREPGQDYIHSFGTTGKDHWTAGFQHFWMKGRQRGLARDYGDYCLELRAAQEQRFAHLARNGMNYAFHLDAGLYARFLRRFSEGFGARRIEGRIATVQTSAQGDIAALVMEDGTRVEGDLFIDCTGFRALLLGRTLGVAFQDWSHWLFADSALAVQTESVAPPVPYTRSMAGPAGWQWRIPLQHRVGNGIVYSSRFMDQEAARAALLDNLEGPPLFEPRPLRFTPGQRQVTWKRNCVALGLASGFLEPLESTNIHLVSRNLTRLLQSFPHVIRQVDIDEYNAQTEAEMVHIRDFVILHYHVTRRRDTPFWHACAQMDIPATLRHRIDLFAQTGRVFHVPNELFAENSWIQVMLGQGIAPAQYHPVADLMDDAELARFLDGIHQQVEQTVARLPPHADYLRSYCAQPRPAMA

SEQ ID NO: 90162 - protein, 509 aa, Xanthomonas sp.
  misc_feature (1)..(509): tr|A0A0J6FUS3|A0A0J6FUS3_9XANT Tryptophan halogenase OS =Xanthomonas sp. NCPPB 1128 OX=1775876 GN=ACP93_04585 P E=4 SV=1
MNLATTTDGRIRKVVIAGGGTAGWLAGCALAHQFRDRLDITLVESEQIGTVGVGESTVPPIRTFHRFLQIDEQEFLRAVAGTFKLSISFEHWRRPGDRFIHPFGTIGQGTWATPFHHFWLDSLRRGMPSDLGDFCLESVASRADRFSLDTQPQVNYAYHFDAALYAKFLRKKAEAHGLRRVEGQIREVRQHAHDGSVASLLLEDGQVIEGDLFIDCTGFRGLLTEQTLHTGYEDWHEWLPSDRAVAVQTEAVAPPVPYTRAIAHEAGWRWHIALQHRVGCGLVFSSRHMSDDEAHAKLLRDVDGPPLRDPWLVPFRSGRRLQAWNKNVVALGLASGFIEPLESTSIHLTISAVVRLIQLFPHEGISPALVELYNTVSRQEMEHVRDFIILHYHATQRGEPMWKACREMALPESLGIRLRAWRERAHAWQDPGELFRVDSWTSVLLGQGIQPGPPHPLAAAIDDADLRTLLTRIRQPLQQASAAMPSQAEFIERYCKAAPDVWQRGVSLA

SEQ ID NO: 90163 - protein, 504 aa, Cellvibrionales bacterium
  misc_feature (1)..(504): tr|A0A3B8RWB7|A0A3B8RWB7_9GAMM Tryptophan halogenase OS =Cellvibrionales bacterium OX=2026722 GN=DCE61_03325 PE =4 SV=1
MNNNKIRRIVIVGGGTSGWMTAAAMSALLPANAYDITLIESDQIGTIGVGEATIPPMQLFNREIGIKEDEFIKETGATFKLGIEFHNWKKQGEHYFHPFGQYGRKLDATPFHQYWLRANKRGTAAKLGEYSLCEIMARTKKFAPTSPDPKSVLSTTGYAYHLDAGLYAKFLRKNAEKKGVKRVEGKVIDVTLREPDGFIQSVTLESSKVIAGDLFIDCSGFRGLLIEEALKTGYEDWSHYLLCDKALAVPSENIDTPRPYTMCTAHKAGWQWRIPLQHRTGNGHVYCSKYTSDDEAASTLLANLEGKALGEPRQLKFTTGRRKKFWNKNCIAIGLSAGFMEPLESTSIHLIQKSITHLITSMPGKEFNRAEIDEFNNINSRDYELIRDFLILHYHLNERTEDFWKHCRTMDVPDSLKHKIALFKNRGRISVEEENLFRLDSWLAVLHGQGITPNGYDPLADCHNKDTVGGFLSDVKSSFVRATKAMPTHEEFIDRHCKSSVGKG

SEQ ID NO: 90164 - protein, 525 aa, Alteromonadaceae bacterium
  misc_feature (1)..(525): tr|A0A495D6J4|A0A495D6J4_9ALTE Tryptophan halogenase OS =Alteromonadaceae bacterium 2052S.S.stab0a.01 OX=130490 0 GN=K256_0698 PE=4 SV=1
MCGFTRNRVTVNSNNNMNPEKFVTANNLRKVAIVGGGTAGWITAAALAKTLENRGIEIVLVESADIGIIGVGEATIPPLMGFLRYLGIDEREFMAATQASYKLGIKFTDWHSPGTSYWHPFGSIGVNIDGQEFFPHWHKARASGENSMLWQYSPSAVMGESGRFYHPSAADKQSFLAGADYALHFDATLVAGYLRDYCLKRGVVRIEDTVETATLTSTGFIDELVLKNHPDLQADFFFDCSGMKGILIGEQLKVPYLDWSNYLLCNRAVALQTENYGNVPPFTHSVARDSGWTWHIPLQHRNGNGYVYSSAFCEPEEAERCLRESVEGKPLTDARHFSFTPGRREQLWYKNCLSLGFASGFLEPLESTAIHLTTKGVETFLSLLPNRDCHPALAQEFNRRFAMEYDSIRDFIVLHYCVTEREDTPFWRKCRELPLPPSLEEKIALYRAQGRIYRNTDDLFKPHSWHSVFDGMNVIPDQHNPMVDRTNAHEVQGIFTQVRELMQKMASGLPTHREFLERHCAAPKV

SEQ ID NO: 90165 - protein, 521 aa, Alteromonadaceae bacterium
  misc_feature (1)..(521): tr|A0A495DH29|A0A495DH29_9ALTE Tryptophan halogenase OS =Alteromonadaceae bacterium 2052S.S.stab0a.01 OX=130490 0 GN=K256_3897 PE=4 SV=1
MSSDGNNENAITRIVIVGGGTAGWMTAAALANFLDTDKISLVLVESDQIGTVGVGEATLPHLRFFNQTLGIDENAFMQATHATYKIGIEFSHWGRKGDSYIHPFGDYGKPVGDIGFHHVWRYLQMQGYQADLSEFSLPVIAAQLGRFDYPDTDMSQIGATFSYAFHLDAGLYAKYLREFSEARGIQRKEGRIQQVQLHPDGGIAALSLDGGEKIEGDFFIDCSGFRSLLLGNTLGVEFCDWSHWLPCDRAIAIPCAGTENPLPYTKAIARDSGWQWRIPLQHRIGNGHVYCSQHLSDDEALAQLTANLDGEPLAEPNFIQFKAGHRVKTWEKNCVAVGLSGGFLEPLESTSIYLIQIAITKLLENFPGSRDETSVMTEFNRQMTLEFERIRDFLILHYHATTRDDTPFWQYCRTMAVPEDLAYKMELFKQRGHVVEYEHGLFLEPSWVAVYLGQGVVPEGFDPRVSGFDFRPLETQLEKLRNSIRAFAEGMPLHSEAIQKYCFAADAVVQPAAHMNLYGRS

SEQ ID NO: 90166 - protein, 504 aa, Sphingomonas sp.
  misc_feature (1)..(504): tr|A0A3S0R233|A0A3S0R233_9SPHN Tryptophan 7-halogenase OS=Sphingomonas sp. TF3 OX=2495580 GN=EJC47_12020 PE=4 SV=1
MDANAPLRTITIVGGGTAGWMTAALLSHVFRSYTIRLIESDEIGIIGVGEATIPSIRTYNDLAGIDQIEMMRASQATFKLGIDFVDWHRGADRYFHGFGRIGHDFMWLHPHQLWLGERCETRAPFDAYALNCVAAMQNKFRYPDPRSPGSPLGGLDYAYHFDASLFARYLRGRSEANGVIRIEGKIVDVTRDRESGHVAQLVLDDGRAVDGDLFVDCSGMRALLIGDALGVGYEDWNHWLLNDRALAVPCERVAPLTPYTRVTARGAGWQWRIPLQHRNGNGHVYSSAHISDDQAAALLLANLDGKPLADPRAIRFRPGKRHRAWEKNVVAIGLSAGFLEPLESTSIHLIHTGITKLLGLFPHRGFAAADIAEYNRQHDFEFTDVRDFIVAHYKVTDREDTPYWRYLKHMAIPDSLAERLALFASSGRFYKRAAAELFRVESWVQVLLGQGFAMGCDPNAAMVSAEVRSDFLADVADVTADVAAAMPDHAAFIARHCKAPPIAA

SEQ ID NO: 90167 - protein, 511 aa, Sphingomonas sp.
  misc_feature (1)..(511): tr|A0A432VNZ3|A0A432VNZ3_9SPHN Tryptophan 7-halogenase OS=Sphingomonas sp. TF3 OX=2495580 GN=EJC47_01040 PE=4 SV=1
MTQAAAGKAIVILGGGTAGWMAACLIAQRWPHAQVTLVESPEIGIVGVGEGSTPQLKHFFDRLGIAEAEWMPACDATYKLGIGFHGWSDRAGHGAYFHPFPTALDSHTAPHFFYNTRARRTGRDVAAHPDRFLLPARLAAAACAPQPDANFPFEVSYGYHFDAHKVGAFLGHHATTKLGVVQLQRTIATAERDASGDIAALLCDDGERIPGDVFLDASGFRSILFEKTLGVPFQSFADTLFNDRAVVLPTPRDEAAPLPSQTRATALTAGWVWDIPLTTRTGNGYVYSSCHLSPDQAEAELRAHLGVGDVGTARHLTMRVGRVAKSWSHNALAIGLAQGFIEPLEATALHIVMATVEAFLDAVDANGFTPAASGPFNDAIAARYDGVRDYIVAHYRLNQRGTDPTGYWAEARALAQLSDPLKALMSAWFTGADMAALVEQMGIGRYYNAISWHCLMAGYGTFPDEHRLAPAGPDIERIDLHKIDDFLDRCALNFRPHLTHLPRHLKSRDTR

SEQ ID NO: 90168 - protein, 508 aa, Pseudoxanthomonas taiwanensis
  misc_feature (1)..(508): tr|A0A562D194|A0A562D194_9GAMM Tryptophan halogenase OS =Pseudoxanthomonas taiwanensis J19 OX=935569 GN=L613_00 8200000140 PE=4 SV=1
MDDARLPSTPIRRVVIAGGGTAGWMAAAALARTLGRVLDITLVESEQIGTVGVGEATIPPLRTFHRLLGIGEQDYLAATQGTIKLGISFENWRAQGHRYIHSFGSSGRDHWSAGFQHFWLRGRQEGLAGDYADYCIELQAAHQDRFSHLPDYHVNYAYHMDAALYARFLRALAQRHGCRRVEGKIAEVETDPGSGCIGALKLESGDVLEGDFFIDCTGFRALLIGQALGVGFSDWSQWLLNDRALAAQTTAVRDAVPYTRAIAGTAGWQWRIPLQHRVGNGIVYSSRFMDDDQAREAFLSSLEGEVIRAPWPVRFRPGQRQRCWEKNCVALGLAGSFIEPLESTTIHLIQRGIVRLLQSFPGVLSQAAIDDYNAQLDAELQHVRDFVVLHYHATERRDSPYWEEVASMRLQHRIDLFRETGLVFHQPGELFAENSWVQVMMGQGIVPARHHPAAAVLGRGDLQRFLGDARRQVLETVARMPAHMDYLRRYAPAPPPGLQQAGTAAQDA

SEQ ID NO: 90169 - protein, 537 aa, Pseudomonas protegens
  misc_feature (1)..(537): tr|A0A423EF85|A0A423EF85_9PSED Tryptophan halogenase OS =Pseudomonas protegens OX=380021 GN=BK644_22490 PE=4 SV =1
MNKPIKNIVIVGGGTAGWMAASYLVRALQQQVNITLIESAAIPRIGVGEATIPSLQKVFFDFLGIPEREWMPQVNGAFKAAIKFVNWRKSPDPSREDYFYHLFGSVPNCDGVPLTHYWLRKREQGFQQPMAYACYPQPGALDGKLAPCLADGTRQMSHAWHFDAHLVADFLKRWAVERGVNRVVDEVVEVQLNDRGYISTLLTKEGRTLEADLFIDCSGMRGLLINQALKEPFIDMSDYLLCDSAVASAVPNDDAREGVEPYTCAIAMNSGWTWKIPMLGRFGSGYVFSSKFTSRDQATADFLKLWGLSDNQQLNQIKFRVGRNKRAWVNNCVSIGLSSCFLEPLESTGIYFIYAALYQLVKHFPDTSFDPRLRDAFNAEIVYMFDDCRDFVQAHYFTTSREDTPFWLANRHELRLSDAIQEKVERYKAGLPLTTTSFDDSTYYETFDYEFKNFWLNGNYYCIFAGLGMLPDRSLPLLQHRPESIQKAEAMFASIRREAERLRTSLPTNYDYLRSLRDGAQLSRNQHGPTLAAQERQ

SEQ ID NO: 90170 - protein, 496 aa, Sphingomonas sp.
  misc_feature (1)..(496): tr|A0A430BB46|A0A430BB46_9SPHN Tryptophan halogenase OS =Sphingomonas sp. S-NIH.Pt15_0812 OX=1920129 GN=BRX43_1 7560 PE=4 SV=1
MNAVTPRRIVIAGGGTAGWMAAAALTRTLGRTAEVTLVESDAIGTIGVGESTIPPLITFNRLLGIGEAEFMAATQATFKLGIQFDGWKGPEDSYFHAFGLTGKDHWAAGFQHFWLDGQARGHAEPYDDYCLELVAAREGKFAHLPDDRMSYAYQLDSTLYGRFLRRMAEGDGTTRIEGRIAGVDLDAESGDIAALRLDDGRRIEGDLFLDCTGFRALLIGQALHVGYDDWTHWLPCDAAIAVQTESVRPPVPYTRAMAHDAGWQWRIPLQHRVGNGIVYCSRYLDREAALRRLLGNVEGKVLTEPNHLRFVTGARRRQWHRNCIAIGLSGGFMEPLESTSIHLIQRAILRLIRLLPPGPISPHDVAEFNDQQLTDMDQIRDFLILHYKVTERRDSGFWRHCAAMDIPDSLAQKIGLFRETGRVFRRNDELFAENSWIQVMLGQGITPQAHHPIAAKLPDEELARFLGGLRQSVATAMRGLPPHADYVARYCGAAPA

SEQ ID NO: 90171 - protein, 506 aa, Erythrobacter flavus
  misc_feature (1)..(506): tr|A0A3T1CIE4|A0A3T1CIE4_9SPHN Tryptophan halogenase OS =Erythrobacter flavus OX=192812 GN=EKJ_15570 PE=4 SV=1
MTERAQAIRNVVIVGGGTAGWMTAAALARLLGGTGLAITLVESAAIGTVGVGEATLPQIRRFNSLLGIDEREMMARTAATIKLGIEFRDWGRVGDGYIHPFGRFGQEIGPASFVDYWARAHARGMVAPIGQYCLPIMAALQGRFEPPDASGTRQPYDYAFQFDAGLYAAWLSEHAQSAGVVRREGRIVDVARNSESGAISAVSLEDGAAIRGDLFIDCSGFRALLIGETLETSFEDWSNWLPCNRAFAVPCANGGDYGPYTRATARAAGWQWRIPLQHRVGNGLVYCDAFWDDADAAEALMANLEGEPGAEPRQLRFTTGRRSALWRSNCVAIGLAGGFLEPLESTSIDLIQSGILNLVELFPHTAIEETDRREYNRLMDLEFERIRDFLVLHYVANQREEEFWQAMRAMPLPDSLSARIEDFRERAILPDYADGLFQPVSWISVFLGQNVVPRRWDPRADAMDADELGKRLAAIHGKIADDAAAMPLHLDFLERAGARYGYGAGQ

SEQ ID NO: 90172 - protein, 508 aa, Reyranella sp.
  misc_feature (1)..(508): tr|A0A5C5SGV4|A0A5C5SGV4_9PROT Tryptophan 7-halogenase OS=Reyranella sp. CPCC 100927 OX=2599616 GN=FQU96_34050 PE=4 SV=1
MLDLTAVKTAAIVGGGIAGWFSALMLRRVLGADVNVTLIDTPGGGAGDIGVSAHVNLVDGLRRNKIPVDEFVRETSAVYKLGVVYEGWRGDDRNDRYYRLFCSAGSRELSWRQNGFCPLLSARIAAGLDLHSWIPGFETIARNAPQKDIPALLRKADLVASYHFDGRRAANYFRKAALARGVKYRTSRVNALELDERGYVRALRITGDSLGVDFVIDASGMARIGIGNTFRAPWRSFSDHLLADRVIPFHWRTSGNPALLTHAVSMNAGWTWLAPQIDRIGAGYVFSSGHIDEPSAIAEIATRFGQAMTPMPMLRFEPGHFETAWVNNVVALGLASGAVEPLEATSMGQLLEQLRNLERIFLGTGGIIGHQTIERFNRANAQCWAGIRDFLRMHYDCQRRDTAFWRDAATAQLSESYAEMRACLQRRTPRFLDIEAYCGSGWQSLFQVVDWILAAASLGITTAAAARDELSRLPPEMRDDVEAYLDGQRRAVVERRPSSAVRYEIVAA

SEQ ID NO: 90173 - protein, 509 aa, Sphingomonas sp.
  misc_feature (1)..(509): tr|A0A430BIR0|A0A430BIR0_9SPHN Tryptophan 7-halogenase OS=Sphingomonas sp. S-NIH.Pt15_0812 OX=1920129 GN=BRX43 _08840 PE=4 SV=1
MGARVDDETARGDDPRGPLRSIVIVGGGLAGWMAAAQLARQLESVSITIVEAPEDQVAGTAEATTPTIRAYLRGIGVAEQEVIAACQGTARLGTEFVDWRGPGRRFFHPFGQYGMRSRGVAFHHYWRKLRAAGHELPIAELCLASAMARYDRFMLPSDRPEQDLLAFDWGLHLDAGLFARFLMRRAIAQGVVHVDAGVSHVHVEHGLIRAVDTAGGRTITGDLFLDCTGPRSRLLGRALETPFEDWSNLLPCDRVVTVPCVRTGPLHPYTRSTARPAGWQWRIPLQNRIGNGHVYSSRHLSDDAAAAALTGWLEGEAMAEPQLLRMRAGRRTRAWAGNCVALGEAAGFLEPLESTSLALIQSGIERLLALFPDRGCAPALADEYNRVTALEYDRLRDFLVLHYAANARHGEAFWDERRGTALPPMLAHKLRLFRARGHLVQYDGETFGDSSWLSLYAGLGVEATAHDPMADHFSVDDVQAAITRMKASIADTVALAEPHETFLARAVRD

SEQ ID NO: 90174 - protein, 505 aa, Alteromonadaceae bacterium
  misc_feature (1)..(505): tr|A0A495DH11|A0A495DH11_9ALTE Tryptophan halogenase OS =Alteromonadaceae bacterium 2052S.S.stab0a.01 OX=130490 0 GN=K256_3899 PE=4 SV=1
MNQNSIRKMVIVGGGTAGWMTAAAAAKILKNQYCEIQLIESDEIATIGVGEATIPQMRVYNRVLDLDENDFIKKTQATFKLGIEFVDWTRLGQSYIHPFGYYGISMEGVEFHHFWLRMYNQGRAAELENYSIAASAAQKGRFMRPVNRPNSPLADIDYAFHFDAGLYARYLREYSEARGVTRTEGKITQVVQRPNDGFIDAVVLEDGTRIEGDLFIDCTGFRGLLIEETLKTGYDDWSHWLPCDRAIAVPCANAGDPIPYTRSTARTAGWQWRIPLQHRIGNGHVFSSRFMSEDEATAILLANLDGEPLADPRTIKFTGGKRRQYWNKNVVAIGLASGFVEPLESTAIHLIQSTIARLFSLFPTRDFHQDEIDRFNRLSDLEIERVRDFIILHYIATERQDSPFWQYIQSVEAPEYLQRKIRMYQNSGRIYREDEELFNETSWLAVFHGQGIRANGYHPIVDTLSDEDVQRRVDNIREVIGNSSEQMPPQMDFIRQHCLADKIKM

SEQ ID NO: 90175 - protein, 525 aa, Erythrobacter flavus
  misc_feature (1)..(525): tr|A0A3T1CE45|A0A3T1CE45_9SPHN Tryptophan halogenase OS =Erythrobacter flavus OX=192812 GN=EKJ_00830 PE=4 SV=1
MMTQVQGEGSGANPLRSICIVGGGTAGWSAAALLARVLRGSGCRITLVESSAIPTVGVGEATIPPIFDFLRNIGADEVEFIRRCQATFKLGIQFRDWLHCDHAYWHPFGNLGVTINQRPFHHYYCRNLAQGHGESLADLCPSVALAEDGKFAFPSPDGNWPGGAVAYALHFDAGLVAAFLREHAEAAGVERLDRRIVGATRGEGERIAAVQFDDGESLAADFYIDCSGFRGLLVEETLNAGFEDWKRWLPCDSAIAAPTAAQQQRAPYTVATARSSGWQWRIPLQHRTGNGLVYASDFISDADAHEELLSGLDGEPLADARVLRFTAGLRKRAWVGNCLAIGLSAGFLEPLESTSIHLIHTGLNRLLDLFPDRGFDPALADAYNRDVWREYAHIRDFLLLHYVPNRREGEAFWDHMRSLDLPDTLAEKIELFTRAGRIMSKQRELFSDISWFYVMHGMGLEPAAIDPLVDVAPSAEVRKVIDQLSGAMKAFRSAAPTHDAILERLLDPSETRRPHFGTGRGWATR

SEQ ID NO: 90176 - protein, 506 aa, Xanthomonas codiaei
  misc_feature (1)..(506): tr|A0A2S7CP12|A0A2S7CP12_9XANT Tryptophan halogenase OS =Xanthomonas codiaei OX=56463 GN=XcodCFBP4690_12785 PE= 4 SV=1
MIPAPLRNIVIVGGGTAGWMAAAAFARVLGPTFNVQLIESEQLGTIGVGEATVPHIKAFNNLLGINEAEFVRQTQGSFKLGIEFVDWQRPGTAYIHGFGTQIGHPLGLLPFHQYWIKQQLRGTAQPLGAYTLNTVAAARGKFMTSAGDVPANSPLANIAYAYHFDASQYAHFLRRYSEQRGVTRIEGLVEQVQLHPENGHVRSLQLASGQVVHGELFIDCSGFRGLLIEEALHTGYHDFTHWLPCDRALAVPCENVGPPTPYTRSTARAAGWQWRIPLQHRTGNGYVYCSAHISDDEAAATLLANLDGKPLADPRPLRFTTGRRKQFWNRNVVALGLASGFLEPLESTSIHLIQSGISKLLELFPREGISPVLVQRYNDRLAFEFDRIRDFLLLHYHATERDDSAFWRHCRHMPITPELQAALELFRDSGRFYRNAEEMFAEISWVQVLVGQGIVPTGYHPLVDQVPDTDAEGFLASVAQTISRCVDVMPSHQQFIDRYCKAPAIR

SEQ ID NO: 90177 - protein, 514 aa, Streptomyces platensis
  misc_feature (1)..(514): tr|A0A1Y2NJF7|A0A1Y2NJF7_STRPT Flavin-dependent tryptop han halogenase RebH OS=Streptomyces platensis OX=58346 GN=rebH PE=4 SV=1
MINSVVIVGGGTAGWMSASYLKAAYGDRINVTLVESDRVATIGVGEATFSTVRHFFDYLGLDEREWMPECSGSYKLGIRFENWREPGQHFYHPFERLRTSDGYTLADWWLQEGDRSEPFDRSCFITPALCEAKRSPRLMDGSLFAGGLDGSLGRSTLEEQRSQFPYAYHFDAALLAKFLTKYGTDRGVRHVVDDVTHVGRDERGWISHVATREHGDLTGDLFIDCTGFKGMLINETLEEPFESFQDVLPNNRAVALRVPQDDQATTGMNPYTTATAMDAGWIWNIPLFGRNGNGYVYSDEFCSPEEAERTLRNHVAPGRDDLEANHIRMRIGRNRRSWVNNCVAIGLSSAFVEPLESTGIFFIQHGIEQLVKNFPDERWDPALADDYNHRVAEVLDGVKEFLVLHYKAAQREDTPYWKEAKTRALPDGLAERLAIGTSHLLDERTIYQPYHGFEQYSWITMMLGLGHEPERPRPSLAHIDPTNARAELARLRADADELVAALPSCYEYIASLNS

SEQ ID NO: 90178 - protein, 477 aa, Massilia plicata
  misc_feature (1)..(477): tr|A0A4P7BP15|A0A4P7BP15_9BURK Tryptophan 7-halogenase OS=Massilia plicata OX=321984 GN=E1742_16285 PE=4 SV=1
MVAAGLSKSLGKRLDIKLIESDEIGTVGVGEATIPTLMNFHHLMEIDEREFMAETMATFKLGISFENWRNANENYVHSFGTTGTDHWTAGFQHFWHKGRERGLAGDYGDYCLELKASLQNRFAHLPKAGMNYAYHMDAGRYAKFLRRFSERYGVQRIEGKIAEVRKDLIGGDIRALRLDSGAELEGDLFIDCTGFRALLIGETMGVGYEDWSHWLFNDSAVALQTTSVGEAVPLTRAIGREAGWQWRIPLQHRTGNGIVYSTRYTDDDTALRTLQDNVEGEALTAPRVIRFKPGQRHQTWKGNCIAIGLASGFLEPIESTSIHLIQRGIIRLMQMFPTDGISQADVDEYNKQAETEIHHIRDFIILHYNVTNRRDTQYWRDAASMKVPASLQHRIDLFRETGRVFRIPNELFAENSWIQVMLGQGIMPRQHHQTADLMGDEELAHFLGSIATSIDRTVAQLPQHEQYVRRYCAGTGW

SEQ ID NO: 90179 - protein, 517 aa, Streptomyces sp.
  misc_feature (1)..(517): tr|A0A1H0E035|A0A1H0E035_9ACTN Tryptophan halogenase OS =Streptomyces sp. cf386 OX=1761904 GN=SAMN04487981_1064 12 PE=4 SV=1
MLNRVVIVGGGTAGWMTASYLKAAFGDRIDLTLVESGKVGTIGVGEATFSDIRHFFEFLGLKESDWMPACNATYKLAVRFENWRKPGHHFYHPFEQMRSVDGFPLTDWWLKNGRTDRFDVDCFVMANICDAERSPRHLGGAMLSQPYDEHVEEPQGLTMSEHQGKTQFPYAYHFEAALLAKYLTTYTVERGAKHIIDDVKDVKLDERGWISSVVTAEHGELTGDLFIDCTGFRGMLLNKALEEPFISFQNTLPNDSAVALQVPQDMEARGIRPCTTATAQDAGWIWTIPLYGRIGTGYVYASDYLSADEAERTLREFVGPSAADAEANHIKMRIGRSNRSWVNNCVGIGLTSGFVEPLESTGIFFIHHAAEQLVKNFPGADWNPVQRDSYNSSVANVMDGVREFLALHYAAAARNDTQYWKDTKTRELPDGLAERIEHWKYQLPDTESVYPYYHGLPPYSYMCILLGMGGIDLKPSPALSLADNSAALKEFQSVHDQAATLIGQLPTQYEYFTHMRR

SEQ ID NO: 90180 - protein, 507 aa, Asticcacaulis taihuensis
  misc_feature (1)..(507): tr|A0A1G4RXM7|A0A1G4RXM7_9CAUL Tryptophan halogenase OS =Asticcacaulis taihuensis OX=260084 GN=SAMN02927928_222 9 PE=4 SV=1
MSTAQARGADHFVIVGGGTAGWMAAACLARLLLRTPGPQKVSLVESEDIPTIGVGEATVPSIQDMLRYLNIDEADFVDATDATYKLAIRFRDWSGPGSDFFHGFGELGPTIDNLPLFQHWLREKIAGAPVPPLSDLSMSAQLALHNRFAKPTTNGNSPLYMAGYAYHFDAGKVAQYLRGYAEAKGVRRIEGRIIEVTQDDQGDIAGLRLADGREIAGDFFIDCSGFAGLLIGKTLGSDYEDWSHWLPCDRAVAMPTQGLRPIAPYTLVTARAAGWTWRIPLLSRLGNGYVYASRFCDDETARQTLTDAVDSAPVAEPRLLRFTPGRRRHPWLRNCLSLGLASGFLEPLESTSIHLIFANLFRFFDYFPRTVDCATLSQGFNARSVREIEEIRDFLILHYKASPRRDTDFWRYVTGMDIPDSLSAKSEVFRQQGKLFADYYDFFKPASWMAIYDGLGVVPDAADPLAALVPQDKARAILRDVTEGIRQAALTAPTHEAALSALLRRAL

SEQ ID NO: 90181 - protein, 519 aa, Massilia lurida
  misc_feature (1)..(519): tr|A0A562R5W3|A0A562R5W3_9BURK Tryptophan halogenase OS =Massilia lurida OX=1036180 GN=IP91_03240 PE=4 SV=1
MAPIRNILIVGGGTAGWLAACFLAKTLGARDAQAIRITLVESKEIGIIGVGEGTFPSIRGTLSAIGIDEATFIRDCSATFKQGIRFDHWVRPSGTPGHDHYFHPFSQPSQRPGGPELLPYWLMGAAGANVPFAAAATLQKHVADQSHGPKRLTDGDYLGPLNYAYHFDAGRFAALLCRHAQTLGVHRIEATVDGVTLGDDGAIASVMTREAGALTADLYIDCTGFRARLVGEALGAPFRSVSDTLFVDRALAMQVPYARVDAPIPSYTIATAHEAGWTWDIGLHERRGIGYVYSSRHTSDERAERILRAYIGPAANDREPRMLKLNVGYRETQWVKNCVAIGLSGGFLEPLESSGIGLIEAATYLVSYLFPHDGNLAPAAKLFNAQMKTRYERIVDFVKLHYCLTQRTDHAFWTDNADPATIPDTLRDQLAMWRARPPHRLDFVTDLEMYPPSSWQYVLYGMEYATRLHANATSLPDLEAARREFQTIAGLARHAVADLPPHRTLVEHFCKRQGALRRA

SEQ ID NO: 90182 - protein, 500 aa, Asticcacaulis taihuensis
  misc_feature (1)..(500): tr|A0A1G4RHT3|A0A1G4RHT3_9CAUL Tryptophan halogenase OS =Asticcacaulis taihuensis OX=260084 GN=SAMN02927928_188 6 PE=4 SV=1
MSDHPVKKVVIVGRDDALWLSANVLWRALGQSGLDITVVELPSLLRPGDVYPTLKQQEAYHNLIGINEGPMMKASHATYTLGQRFNNWSKTKPPFIHGYSTYGRPLNRVSFHHYWVKARAQGLKAEFEDFSLNAVAAKYGRFFLPGEAVDGFAICDYAYHLEAQGYCHVLKTVALDRKIKHVSGRLAEVARDTLSGDITGVTLTDGQAIEGDFFIDASGAESALLGEGLDVGFDSWRQWFPCDRLMTTYAAPLAPLPPFSQVSAFRSGWVGLYPLRNCTAVQQVYTSHDLTDEAAYEAAGIFTSLKLNPDAVVTPFTAGTRRRFWEKNCVAIGEAAAVLDPIDSVRMHVNLLGLSHLISLFPIDRDCGIESTEYNRNVHSSLERIRDYQLCHYVLNQRFDQPFWDHCRNIEVPDALRYKLDLFEARGNLVVYDDETFEEDDWLSMLLGHGLIPKAYDPLADQVSDAEAIQHFQKMLGFIKAAVEPMKPMEETLGIVPIRA

SEQ ID NO: 90183 - protein, 527 aa, Asticcacaulis taihuensis
  misc_feature (1)..(527): tr|A0A1G4SI85|A0A1G4SI85_9CAUL Tryptophan halogenase OS =Asticcacaulis taihuensis OX=260084 GN=SAMN02927928_266 1 PE=4 SV=1
MTSSPRILIAGGGTAGWMTAAYLARVFGQGAGAPRITLIESPDIGTVGVGEGSIPTIRTTLQTLGIDEAEFLRDCSATFKQGIRFDDWEVEGTSYSHPFEAPYFTDGAGLLPYWLLQDPATRPPFAEAVTLQKRVADAGRAPKRAHEGGYFGGRMNYAYHFDAGRFGNLLARYACLYGVTHLAGRISEVETGTDGIAAVISPEHGRIEADFYIDCTGFAALLIGKALGSPFHSVRDVLLTDTALAIQLPYADPQEAIPSYTISTAHESGWTWDIGLDSRRGVGYVYSSAHSSDDRAREVLRTYLRRYAGDNAASLEPRLIRFDPGYRKAQWVRNCCAIGLSAGFYEPLEATGIMMIEVAIGLLVDCFPFTGPADASAALFNERMCQRYEKTAEFLKLHYCISRRPEAFWRDNADPATIPENLRALLDMWTYRPPSRFDTLTDIDIFAASSYQYILYGMNYPTDLRAQAPIHSRTEAADKIFARIRAFTDGAIRDLPSHRDLITQIYAHGFAPPPALKRTDPFLTVSR

SEQ ID NO: 90184 - protein, 361 aa, Burkholderia pseudomallei; identical to SEQ ID NO: 87386
  misc_feature (1)..(361): tr|A0A0F6G2S4|A0A0F6G2S4_BURPE Tryptophan halogenase OS =Burkholderia pseudomallei MSHR2543 OX=1249472 GN=prnA PE=4 SV=1

SEQ ID NO: 90185 - protein, 502 aa, Terrabacteria group; identical to SEQ ID NO: 87509
  misc_feature (1)..(502): tr|A0A537K705|A0A537K705_9BACT Tryptophan 7-halogenase OS=Terrabacteria group bacterium ANGP1 OX=2569760 GN=E6 H00_03780 PE=4 SV=1

SEQ ID NO: 90186 - protein, 499 aa, Alphaproteobacteria bacterium
  misc_feature (1)..(499): tr|A0A537M958|A0A537M958_9PROT Tryptophan 7-halogenase OS=Alphaproteobacteria bacterium OX=1913988 GN=E6G94_03 185 PE=4 SV=1
MQDRAIRSIVIVGGGTAGWMAAAALAKVAGTQNRSITLVESEEIGTVGVGEATIPPITIFNRLLGIDEDEFVRETQATFKLGIEFVDWLRVGHRYFHHFGLFGADLKDGVSFAHYWLRWVGQGGNPDNLRFSSEAEAARMGKFARARTKRGDTPNINYAFQFDAARYAAFLRRFAEKRGVERVEGKVVDVQQNGESGHIESVELAGGKRIEGDFFIDCSGFRALLIGKTLGCPFDDWSQWLLANGAVAMPSRRDGDPEPFTRVTAVESGWQWHIPLQHRTGNGYVFCDRFITPDDAAAKLAGRLGDTALADPRILRFTAGQRRSWEKNCLAIGLSCGFLEPLESTSIHLIQVAISKLLDLFPDRDFHPAILDRFNKEMDLLYVSIRDFLIAHYKLTEREDTPFWRYCKHMDVPDSLATKLHLFETRGEVLAADHDIFREISWFAVLYGQGVVPKGYHPLADAMSDDDLSLTLSQIRAAIRERVDSLPSHAQFLDSIVGR

SEQ ID NO: 90187 - protein, 530 aa, Alphaproteobacteria bacterium
  misc_feature (1)..(530): tr|A0A411JKH3|A0A411JKH3_9PROT Putative tryptophan halo genase OS=Alphaproteobacteria bacterium OX=1913988 PE=4 SV=1
MAFWQHLPGQQNPGNHGQARPAGIEEHMAIQQIIIVGGGTAGWMAAAALSRLKAGRPVEITLIESEAIGTVGVGEATIPPFVGFNELIGVDEREMLSAVGGTFKLGIQFENWNRIGDSYIHPFGAYGYTMGGISFHHVWHRMAGAGDKRPIQVFNLETMAAYFGKFARTEDYKRDDLPPVNYAYHLDAGRYAAFLRQLAESRGVVRQEGRIADAAIDGESGFVTGVTLDDGRQFAGDLFIDCSGFRGLLIEQALKTGYEDWTHYLPCDRAVALPCKRDDGSPPPPFTRATAHRAGWQWQVPLQHRNGNGHVYCSAHMEDQEALDILLGNIAGKPQAEPNWLRFVTGRRKKFWNKNVVALGLAAGFMEPLESTSIHLINTGIDKLLSLLSLDGITQAQEDAFNRLTAREYARIRDFLILHYNATSRTDSDFWNYVRTMPVPDTLTEKVELFKANGQIFREEDELFTETSWAAVMMGQGITMGGHNAMADALDPAKTAEEVNEMEQSIRYLVGAMPGHGDYLARYCPAPAAA

SEQ ID NO: 90188 - protein, 494 aa, Teredinibacter sp.
  misc_feature (1)..(494): tr|A0A509DVK4|A0A509DVK4_9GAMM Flavin-dependent tryptop han halogenase RebH OS=Teredinibacter sp. ISS155 OX=258 4524 GN=rebH_2 PE=4 SV=1
MVVVGGGTAGWIAAAVLANEFAEGELVIELVESEEIGTIGVGESTIPPFLELLKNLKIDERDFIQKTQASFKLGIEFVDWHTKGERYFHPFGHITAGMDEYMFYNLWIKSYLNGEHYAIQDFCASSVMARHNKFFLPQSAQNTPIAESRYALHLDAKLVAQYLREYAEARGVIRTEGRVERVEQNDDGSIAGVKLQNGTQVAGDFFIDCTGFHALLTEKTLHVDFVDWTHYLPCDRAVVVQTKNAGEILPYTRATAQDFGWSWRIPLQSRTGNGYVYASEYCSDEEARKTLLNAVDGELLTEPRVIPYRTGVRQQIWTQNCLALGLASGFIEPLESTAIHLVVRGMVHFMRHFPDREISSAFIDEYNRRMTVDYEEIRDFIVLHYCLTDREDTEFWRWCKNMELPESLSRIIDYFKVQGNVPEVLDPLFHPVSWRSVCEGMAVRPRKYSALIESTNYDEAKQHFDKYKIMLEEFIQKLPSCSEFVSKNCPAKVS

SEQ ID NO: 90189 - protein, 497 aa, Streptomyces iranensis
  misc_feature (1)..(497): tr|A0A060ZPC6|A0A060ZPC6_9ACTN Tryptophan halogenase OS =Streptomyces iranensis OX=576784 GN=SIRAN1886 PE=4 SV= 1
MSSEGREQYDVVVVGGGPGGSTLAALVAMRGHRVLILEKETFPRYQIGESLLPSTIHGVCRMTGVAEKLAAAGFTPKKGGTFRWGANAEPWTFSFSVSPKIAGATSHAFQVERSKFDNILLEHAVEKGAEVRFRVSVTDVIEDAERVTGVRYTDADGTEHEVHATYVVDASGNGSRLHKRVGGTREYSQFFRSLALFGYFEGGKRLPAPNSGNILSVAFESGWFWYIPLTPDLTSVGAVVRRENADKIQGDPERALLALIDECPLIKEYLSDATRVTEGQYGQLRVRKDYSYHQTNFWRPGLVLIGDAACFVDPVFSSGVHLATYSALLAARSISSSLAGIVSEEAAFTEFEARYRREYGVFYEFLMSFYDMHVDEDSYFWSAKKVTRNQHTELESFVELVAGVSSSEFDLDGAESAALRMKSKSAEFVSAIDEMSADADGNMTPLFRSSAVRQAMQEGAQVQSRAFLGEDLGPDVPMFPGGLITSDDGMLWQPGPA

SEQ ID NO: 90190 - protein, 314 aa, Alteromonas sp.
  misc_feature (1)..(314): tr|A0A520WJ35|A0A520WJ35_ALTSX Tryptophan 7-halogenase (Fragment) OS=Alteromonas sp. OX=232 GN=EVA22_10110 PE= 4 SV=1
MTTPHRIVIAGGGTAGWMAANLLAHRWANQAVTITLIESEDIGTIGVGEGSTPTLKRFFQTLDIPEYDWMEECQATYKVNIKFTGWNGNNSHSYSHPFISQLDVFSERAFHVNALTRRLGLDVETQPDKFLMAGYLAKKNLAPLPSHNFPFDIEYGYHFDSLKLGRFLRERAKSKGVYHVVGNIESVHTSPSGDISHLICQDGQKFDGDLFIDCTGFSGLILQKTLGVPFRDFSDNLFNDSAVVLPTPACANLPVETESVAMSNGWRWQIPLRNRTGNGYVYSQQYQEKDAAECELRRALGMENTDVEAKHLSM

SEQ ID NO: 90191 - protein, 511 aa, Teredinibacter sp.
  misc_feature (1)..(511): tr|A0A509E0P7|A0A509E0P7_9GAMM Flavin-dependent tryptop han halogenase PrnA OS=Teredinibacter sp. ISS155 OX=258 4524 GN=prnA_3 PE=4 SV=1
MQPERITSIVIVGGGTAGWISAAILAKLLPSTACKITLIESSEIATVGVGEATIPPIIELLRYLEIDEQDFICKTEATFKLGILFKDWLTPGSNYFHPFGSVGVGINKVSFFHYWQIIRAQFPDTQFADFSPAAAMANAGKFIPPAMSGEDSLLRGANYALHFDANLVAKYLQTYSLAKGVERRQATINSVHQNDKGFIQQLTLHNGETIAGDLFLDCSGFTGLLIEKTLHAGYENWQKYLPCDSAVTVLSQKSEKTPPYTVATAKAAGWQWQIPLQHRMGNGYVYCSKDCEDSDAQHLLLNSLATPAISEARKLTFTTGYRKIMWKHNCIAVGLSAGFLEPLESTGIHLIMRAVKKLVELLPNKNCDPALADEFNRTMIAEYEAIRDFLVLHYVTTQRSDSPFWRRCSSMDIPESLARKIAIFLDQGKIAFNPHDLFMEQNWHAIFEGMNVRPNSVDWFADFTPESEALNIARQLQHLLHKIVGTLPSHDNFLTQVRGNNIRSTKLPQAS

SEQ ID NO: 90192 - protein, 499 aa, Teredinibacter sp.
  misc_feature (1)..(499): tr|A0A509E1C9|A0A509E1C9_9GAMM Flavin-dependent tryptop han halogenase PrnA OS=Teredinibacter sp. ISS155 OX=258 4524 GN=prnA_2 PE=4 SV=1
MKPNKIVIVGGGAAGWMTANLMAHEWGGSGISIVVVESSSIGTVGVGEGSTPFLREFFAKLNICEDEWMPACNATFKNGIRFPGWSVLDSSYFHPFYVEQDAENAIQFFKASFARRMGFDLVVNPDAYFLATQIANQRRAPIRADGVQSNTDYGYHFDSDLLGRFLKKKAIARGVQYIDDKVLHVNLNDSGDVETVRSEKNGEIAGDFFVDCSGFKGLIIQQSLGERVISFKSKLFNDSAVAIPTPLNNSSDSGLLSETISTAISNGWVWQIPLSNRFGNGYVYCSDFLSEDQAELQLREFLSAHGDESPARHLHWTPGRISQHWKRNCVAIGLSQGFLEPLEAPMMRIIQHTCESFIDNFQNGSFTGQYRDTFNAGINQLIDGTSDYLQAHYKASSRSDSEYWVANRSNMSMSDELKGLLSAWISAASFDEVLAEIADSQVYHKTSWYCLFAGKGCFRPSRQVGPQKLVDQRNSIMSRLELEARRYMKHSEYLKSICS

SEQ ID NO: 90193 - protein, 506 aa, Xanthomonas campestris; identical to SEQ ID NO: 85891
  misc_feature (1)..(506): tr|A0A1T1S1D0|A0A1T1S1D0_XANCA Tryptophan halogenase OS =Xanthomonas campestris pv. durantae OX=487862 GN=Xdur_ 16930 PE=4 SV=1

SEQ ID NO: 90194 - protein, 561 aa, Ruegeria sp.
  misc_feature (1)..(561): tr|B7QXA4|B7QXA4_9RHOB Tryptophan halogenase OS=Ruegeri a sp. R11 OX=439497 GN=RR11_1384 PE=4 SV=1
MDNRLKKITIVGGGTAGWMTALILETEFARTSAAKDRPKICLIESPNIATVGVGEATVPRMPKTLRQAGISERAFFRETNASFKLGVKFCNWNKDAKGNRIDYVNPFAHGQLLEGLEAAEYFLRFGNGDRDFTQSIAPHDDLGRLCKGARPLGQPEFEQRFGYAYHLDAVKFAGMLTKVCTKQGVEHIRDEVTSVELDEHGNVSHLMLEKRGRHDIEMVIDCTGFRGLIINKALGEPFLDYSEYLPNDRAMALQIEHPDPEKIESLTRSTALGAGWTWRVPLYNRVGTGYVFSSAHRTDDQAADEYLEWLGDSGKGATPRVIPMRIGRVRNAWVKNCLAIGLAGGFIEPLESTAIHMIDHAVRWFAEHLPTKEIAPSLRSRYNRQMDKLYNEVLEFICLHYRLGNRTDDQYWIDARTEMKVPDRLAENLELWQHRLPMPHDIEFATLFDYRVYQTVLLGKQVYDTGYGAGIRDRLRPLKKPIWFQWWKGAKMDLAQILKAMPDHKTLLRDIRGELDQSGFGIAAAMKPTVSMPGEAMAPFAVQNMPSHTEIQTGSKDLQLF

SEQ ID NO: 90195 - protein, 507 aa, Terrabacteria group
  misc_feature (1)..(507): tr|A0A537K886|A0A537K886_9BACT Tryptophan 7-halogenase OS=Terrabacteria group bacterium ANGP1 OX=2569760 GN=E6 H00_03220 PE=4 SV=1
MPAQEIKSVVIAGGGTAGWMAAAAIAKVMGPRLSITLVESDEIGIIGVGEATIPSIALYNDLLRLDENDFLRQTQGTFKLGIEFVNWYEPGHRYMHAFGAIGKDLAYIPFHHYWLQEVLQGRGESLWHYSLNWMAAHQDRFARLERIADTPLPGVIYAFHFDASLYAAYLRRLAQQMGVRRVEGMIAEVLQNPESGDVSALRLKDGREISGELFIDCTGFRGLLIERTLKVGYDDWTPWLPVDRALAIPTERVGPLTPYTRSTALEAGWQWRIPLQHRTGNGHVYSSAFVDDDRAAELLIANLDSRPLADPRPIRFVTGRRRQLWSHNVVCLGLASGFLEPLESTAIHLIQANIQRLVLLFPHHGDCDHRRAQFNQAAAAEYEYVRDFIILHYYLNNRVGERFWDECRHMSVPDSLTHKIELFRETGGIFPTMYDLFHLTSWLQVMWGQGVRPRGAHPFVQTVAPHDRVEYLKNIRDLIAQAASELPLHDEFIARHCRAPAPAAAVT

SEQ ID NO: 90196 - protein, 505 aa, Alphaproteobacteria bacterium
  misc_feature (1)..(505): tr|A0A411JKG5|A0A411JKG5_9PROT Putative tryptophan halo genase OS=Alphaproteobacteria bacterium OX=1913988 PE=4 SV=1
MTAAAPLKTIVIVGGGSAGWMTAAALADAVGQTCAITLIESEAIGTVGVGEATIPPIRHFNRRLGIDEATFIRETQGSYKLGIEFVDWGKLGHSYFHPFGQYGAEFDQVPFYHHWMHEWLAGRVDGPIDEFAMCWAMAKAGKFTHPSPDRRLIQSTFDYAYHFDAGLYAAYLRRFAESRGVVRKEGRVIDVALRGADGFIEAVTLDDGTRIAGEFFVDCSGFRGLLIEEALAAGYDNWQHWLPCDRAVAVPCERGTFTPYTRSTAKAAGWQWRIPLQHRTGNGYVHCSDFLSEDAAADELLATLDGKPLADPRPLRFVTGKRREFWKRNCVAIGLSAGFMEPLESTSLHLIQYAILRLIALLPDSAMSPLLAREYNAQTTREYELIRDFLILHYKASERDDSELWRYTAAMPIPDSLQYKIDHFRAHGMLVADGQELFANPSWIAVYLGQGIVPQRAPALAHMRTGVPVAERLAQIRSAMDEAVAAMPSHGEFIARHCAAPPVAA

SEQ ID NO: 90197 - protein, 227 aa, Alteromonas sp.
  misc_feature (1)..(227): tr|A0A520WMQ4|A0A520WMQ4_ALTSX Tryptophan 7-halogenase (Fragment) OS=Alteromonas sp. OX=232 GN=EVA22_04620 PE= 4 SV=1
NRTGNGYVYSQQYQEKDAAECELRRALGMENTDVEAKHLSMRVGQCERHWDKNCLALGLSQGFIEPLEATALHLVQTSIELFADNYSFNETSAQQRQAFNREVSERFERVRDYIVCHYKLNGRNDSDYWRDNRANMKLSESLLSLLDVWYRKGDIVEEIKRQGIGRHFSTTSWHCLLSGYGVYPPPALNQPASLKESGDLFEEKKLAAFFNRCSLNFDKQSTLFNAG

SEQ ID NO: 90198 - protein, 505 aa, Xanthomonas campestris
  misc_feature (1)..(505): tr|A0A1T1S979|A0A1T1S979_XANCA Tryptophan halogenase OS =Xanthomonas campestris pv. durantae OX=487862 GN=Xdur_ 09040 PE=4 SV=1
MTQAQIRRVVIAGGGTAGWIAACALSHQFRNLLDITLVESEQIGTVGVGESTVPPIRTFHRFLQIDEQEFLRAVAGTFKLSISFEHWRRHGERYIHPFGITGQSTLVCAFHHLWLESQRRGMPGSFGDYCLETVASRVDRFALHGEPAVNYAYHLDAALYAKFLRARSEACGVKRVEGRIQQVTVQPHSGDVASLVLEDGQTIEGDLFIDCSGFRGLLIEQTLHTGYEDWSHWLPCDRAVAVQTEALGPPVPYTRAIAHEAGWRWHIPLQHRVGNGLVFSSKHLSDDQAHAKLLRDVAAPAVREPWMVPFRTGRRLKAWNKNVVSLGLASGFIEPLESTSIHLTISAVVRLLALFPAEGIAPSQVQLFNDVSRAEMEHVRDFVTLHYHATQRDEPLWQQCRQMELPESLALRLRAWRERAHAWQGADELFRVDSWTHVLMGQGIAPEQHHPLTRAFSDHDLRRLLDGIAQPIQHSVQQMPSQQDFIERYCKAGEQVWGMRSPVPA

SEQ ID NO: 90199 - protein, 485 aa, Teredinibacter sp.
  misc_feature (1)..(485): tr|A0A509DT86|A0A509DT86_9GAMM Flavin-dependent tryptop han halogenase RebH OS=Teredinibacter sp. ISS155 OX=258 4524 GN=rebH_1 PE=4 SV=1
MSAAAFANVFDPSQYSIKLIESSAISSVGVGEATIPPIRQFNRMLGIDEDEFIRNTNGTFKLGIEFVNWGKIGDAYMHPFGAYGTKFGSLTFYNYWLKYYLQGKSQSISDYSLSVQAAKSKKFMRPAKLPNSPLAEITYAFHFDAGLYAQFLRNFAESRGVQRIDDIVDQVNIDPINGQIRSLDMKSGEHHKGDLFIDCTGFKALLIQGALKTGFEDWSNYLLCDSAVTVATKNTETPAPYTRATAHPVGWQWRIPLQSRVGNGYVYSQSFISDDDAKQVLLDNIQGETINDPRVIRFKTGIRKKVWHKNCISIGLSSGFLEPLESTSIHLIQTALAKLLAFFPTQSFDEELIDQYNALMREEFENVRDFVILHYKLTEREDSDFWRYCKNMDIPVKLQHKMAMFKSTGRLHRENNELFDVISQFAVMFGQGLIPESYHPLADDVNDLEFDKGMNAIKEVITRSAEAMPTQEEFIKKHCEFKPSP

SEQ ID NO: 90200 - protein, 500 aa, Alphaproteobacteria bacterium
  misc_feature (1)..(500): tr|A0A537M925|A0A537M925_9PROT Tryptophan 7-halogenase OS=Alphaproteobacteria bacterium OX=1913988 GN=E6G94_03 190 PE=4 SV=1
MATGEPIREVVIVGGGTAGWMTAAAIARFAGPGRRIRLIESEAIGIVGVGEGTIPPILEFNKQVGLDEQAFIRETRATYKLGIEFVGWSKEGERYFHPFGRIGRTYDGVDFHHLWRKYREHPSVGPLIAYTISAVAGLNGRFSHPSPDIRSPLADLSYAFHFDASLYGQFLRRHAEARGVERVEGRIVDVERDPETGHVRAVRLDDDRRVEGELFVDCSGFRSLLLGQAMGVEFDDWSHWLPCDRAIAVPSERTEPLLPFTRATARPSGWQWRIPLQHRIGNGHVYSSAHMEEEEAERLLVEGLDGKPIGGFNHIRFTAGRRAKSWAGNVIAIGLSSGFLEPLESTSIHLIQHGIQKLVALFPDSSFDPVAVAEYNRSFSEMYDSVRDFIILHYKVNQRSGPFWSQVREMEVPDSLAHKLSLFADRGRFFRYHDDLFELASWTAVMLGQGLIPKSWDPLLDSLKDEEVLRAMADLRAGYHKAASTMETHADIIARIAGAR

SEQ ID NO: 90201 - protein, 525 aa, Teredinibacter sp.
  misc_feature (1)..(525): tr|A0A509E1K4|A0A509E1K4_9GAMM Flavin-dependent tryptop han halogenase RebH OS=Teredinibacter sp. ISS155 OX=258 4524 GN=rebH_6 PE=4 SV=1
MKKIRSVVVVGGGTAGWITAGRIAALQKKRLGKSQNATDKAVQVLLVESANKPPIGVGEGTWPTMRNTLRQLDIRESDFIKHCDATFKQGAKFSGWVTGKQDDYYYHPLVLPQDFSQVDIAPYWLWQKQQQQTESFSKAVCFQEYLCEQNQAPKNIRTPEYAGIANYAYHLNSEKFSRFLQQHCMEHLDVKHLVGDVTGVQSQPNGDIESLVISGQEAPLAGDLFIDCTGFSSILLGKHFNVPLTSCEDVLFADTALATRVNYDSSDAPIATHTNATAQNAGWIWDIGLQTRRGIGYVYSSKHSSEEAALAELLRYTGGQVNEADVRKIPINSGYRQTFWKNNCVAVGLSAGFIEPLEASALVLVELSASMIAEQFPATRELMDIVAKRFNDTFSYRWQRIVDFLKLHYVLTKRQDTAFWKDNQDMTSVPESLQELLQLWRYHSPRDYDFTSNNEVFPAASWQYVLFGMGFEADYSHTYNPDSYSSNMANQAMMKNKGMVDRCVAQLPKHRELIDKIHQYGLQSI

SEQ ID NO: 90202 - protein, 504 aa, Cellvibrio sp.
  misc_feature (1)..(504): tr|A0A5J6PEK5|A0A5J6PEK5_9GAMM Tryptophan 7-halogenase OS=Cellvibrio sp. KY-GH-1 OX=2303332 GN=D0C16_16015 PE= 4 SV=1
MKRTENPLGSICIVGGGTAGWMAASLLSNILHGSNTKITLIESADIATIGVGEATVPSFMAFLKDARLDTKEFMQATAGSIKLGIRFENWYQQNHHFLHPFGKIGRAIDGHEFYQIWLKTLADGNTTRWVDHSPSGIMSEENRFITEMQLAKTPLASYGYAVHLDAAYAARHMREITLARGVQRIESTVESVQTDERKFIQSVQLANGQTIESDFFIDCTGFKGLLISETLKVGYDDWSNYLPCNRAVAVQTENAGDPLAYTIASARAAGWSWKIPLQHRTGNGYVFASDYCSDDEAINTLMSVIKGDLINEPRIIPFVSGMREKIWYKNCLALGLASGFIEPLESTAIHLVYRTLVHFIRNFPDKHFASFLEQQFNCDIARDYMEIRDFVILHYCTTQRGDTAFWRWCQTMEIPESLREKINQFRHRGQLQHHPENLFGADSWYSILEGMNIRPETYHPLVDALDSQKLGQSLKQGANAIRATVMKLPSHGEFLRQHCPAKQS

SEQ ID NO: 90203 - protein, 226 aa, Alphaproteobacteria bacterium
  misc_feature (1)..(226): tr|A0A537M0B0|A0A537M0B0_9PROT Tryptophan 7-halogenase (Fragment) OS=Alphaproteobacteria bacterium OX=1913988 GN=E6G94_11200 PE=4 SV=1
IGNGHVYSSAHISDEDATAALLANLDGAPVAEPRLLRFVTGRRKKFWNGNVVALGLAAGFMEPLESTSLHLVQSGITRLLALWPDRDFDPLSIAEYNRITIEEYERIRDFLILHYKLTGRDDSELWRYCGAMEVPETLQYRIDHFRAGGRLVSPGNELFQNASWLAVHVGQLNWPERYDPLADARAADVDAPAILASMAGAAAEAAEAMPRHEAWIDRFCRAGGTP

SEQ ID NO: 90204 - protein, 557 aa, Alteromonas sp.
  misc_feature (1)..(557): tr|A0A520WQM8|A0A520WQM8_ALTSX Tryptophan 7-halogenase OS=Alteromonas sp. OX=232 GN=EVA22_00835 PE=4 SV=1
MSDNESHSSMHRVVIVGGGTAGWLAAGILAAKLSANHTVTLIESPNIPSLGVGEGSWPSLRDTLLDIGISETEFLTVCHGAFKQGSSFVNWRKGGHCYYHPFTVPTGYNELDIYTCWKSIAPNTSYEDVFSLQAAMCAAGKAPKQIATPDYAHVLNYGYHFDATKLAELLKNHCVDKLNVAHVVGHVDSVHSHQNGDIESVSTKDGEKIVGDLFIDCSGSRGLLIKEHFTIPWVPVKRTMLNDRAVALQVPYSNEDAEIKSTTVATAQTCGWTWDIALQHRRGVGLVYSSQFTNEEQAKQVLIDYVRERYPSAQDAELSFRTLSFEPGYRSQFWVKNCLSLGMSSGFVEPLEASAIAMVELGLRMLCEAFPQNKAHMEIASKRYNSRFAYRWQRVIDFLKLHYALSDREEPYWLAQRDKASIPDSLAELLELWKYQSPSRLDLIENEEIFPSASYQYVLYGMGFSSSTSPLRLNEEHKRKAVHIRETLQQTKNAYLQGLPSNRVLLNDIAKRYSNEKQHVPSHAQREKNKHASASSCNDIKNTSDKKDTSNDRIGFR

SEQ ID NO: 90205 - protein, 511 aa, Terrabacteria group
  misc_feature (1)..(511): tr|A0A537K8C1|A0A537K8C1_9BACT Tryptophan 7-halogenase OS=Terrabacteria group bacterium ANGP1 OX=2569760 GN=E6 H00_03215 PE=4 SV=1
MNVAQTPGPIPSVVILGGGTAGWMTAASLLQRLSRLGITVTVVESSQIGTIGVGEATVPAILRYFSSLDLDAFDVLRATNGTIKLGIEFDGWKHEGHSFIHPFSRYGIQAGPVAFHHLWNRLRAAGETAPIDDYSLGVQMARAGRVFLPPKQPRAEFEIFDWAVHFDAGRFALFLRRFCEARGVRRIDARLTEVVRDPQSGHITRLRLDNGETVDGQLFIDCSGFHRLLIERVLESGYEDWRHWLMCDRAVALPCAAADPTQLAPYTRARALAAGWAWRIPLQNRVGNGYVYSSDHISDEDAVVSLRRELEGEALAEPNLVRFRAGHVRRFWVGNCVAIGLSGGFLEPLESTSISLIQMGIDKLIHLWPDTRMAPELASEYNRLSVQEFARVRDFIVLHYAANGRSEGDLWRYCREMALPDTLEHKIALYRAGGQLVQYQSESFFDSSWVCMYANFGIEARNWDPLAELIDLDELKNLTRRLRPDIAVLAREGSPHREFLRLKGALAETRA

SEQ ID NO: 90206 - protein, 418 aa, Alteromonas sp.
  misc_feature (1)..(418): tr|A0A520WLM9|A0A520WLM9_ALTSX Tryptophan 7-halogenase (Fragment) OS=Alteromonas sp. OX=232 GN=EVA22_06040 PE= 4 SV=1
MNKLPQEIVIVGGGTAGWMTACYLARTAELMANNSNVPACAPKITLLESAVISTVGVGEGSTPYLRHFFEFLGINEIEWMLRCSATYKMGISFERWTTTAESKTTRPAFTDSDSYFHPFFSSLDIPTADMYFSAVNEYRKGASHDINPSHYFTAAHMVGKGITPDTICSSANIDYAYHFDAGLLGDFLKEYALNKGVSHQIGTVANVECHEHTINSLKLDDGNTLSADFFIDCSGFRGLLGKQALSRRFTSYADTLFNDAAVAIASDATASPETALQTRSIALSHGWQWHIPLTSRTGNGYVYSSQFCTEAQAEEELRLALEPDQPHQQARHLKMTVGRLEEHWKGNCLCIGLSQGFIEPLEATALMLVQYALNHFIDCWQSNNPRREVRYNSEINRMFDGIRDYIAAHYYLNTRDDS

SEQ ID NO: 90207 - protein, 499 aa, Alphaproteobacteria bacterium
  misc_feature (1)..(499): tr|A0A537LTV2|A0A537LTV2_9PROT Tryptophan 7-halogenase OS=Alphaproteobacteria bacterium OX=1913988 GN=E6G94_16 140 PE=4 SV=1
MADPRRHHIVIVGGGTAGWMTAAALARFASRTHRVTLVESDAIGTVGVGEATIPQIRLFNAALGIEEDEFVRETQGSFKLGIEFADWLRPGHRYMHAFGTIGRAAGIVPFHQLWLRGRALGVADELRHYSLNEAAALAGKFDRVARAPGSVLPEIPYAYHFDAGLYARFLRRFAEARGVERVEGRIVHVRRDGEGGDIASVELEGGASVAGELFIDCSGFRGLLIGETLGAGFEDWSHWLPCDRAMAVPSERQSAPEPFTRSTARAAGWQWRIPLQHRTGNGYVYSSRHISDDEAASALLAYVEGEALADPRPLRFKAGKRRRMWVRNCVALGLSAGFMEPLESTSIHLVQSAISRLLDLLPAGRVAEAEIAEFNRKSDFEWARIRDFIILHYRGTEREEPLWHACREMALPEELQHRIDLFRAAGRIARDHDELFAEVAWLQVMIGQGMLPEGWHPLADGFPADDLQGFLADMRRLVDHEAARMPAHGDFIERHCAAL

SEQ ID NO: 90208 - protein, 509 aa, Xanthomonas campestris; identical to SEQ ID NO: 82725
  misc_feature (1)..(509): tr|A0A1T1SLW5|A0A1T1SLW5_XANCA Tryptophan halogenase OS =Xanthomonas campestris pv. durantae OX=487862 GN=Xdur_ 04220 PE=4 SV=1

SEQ ID NO: 90209 - protein, 505 aa, Teredinibacter sp.
  misc_feature (1)..(505): tr|A0A509DZN9|A0A509DZN9_9GAMM Flavin-dependent tryptop han halogenase RebH OS=Teredinibacter sp. ISS155 OX=258 4524 GN=rebH_5 PE=4 SV=1
MLDSRNSPDSIVIVGGGSAGWMAANLFIHSWPRTKITLIESQDIGTIGVGEGSTPYLKSFFNQLGIKDCEWMPKCNATYKAGIRFPSWSQIDGYTSYFHPFYSQLDLNTGDEFFKRCLQKKTGEANSVHPDDYFVAEKIAAYGKAPIENKKLPFDVDYGYHFDAGLLGAYLKKLAISKGLKHLVGNVNEVVIGEEGGIKQLNTSVGTLIADVYVDCTGFAGLLINKALKVEFKSYSGSLLNDSAVTVATDMSDRELIPAETCSTALHNGWIWRIPLVNRYGNGYVYSSSFVSSDDAEVEMLRHLKLDKVNHPECKHIKMKVGRNASHWEKNCIAVGLSQGFIEPLEATALMLTQFTIEKFIENYSSEEIEVNVRRENFNSKVNMLIEGVRDYVQAHYLLNSRSDTEYWKACREDAKISSRLESIVAAWDVGELDLALESLTGKLAYLRPSWYVMLSGMGRFSLLDQKNDSRDVSREKAANYCRQIAQTVFQDHRTLLSRYSNNAK

SEQ ID NO: 90210 - protein, 502 aa, Alphaproteobacteria bacterium
  misc_feature (1)..(502): tr|A0A537LTP3|A0A537LTP3_9PROT Tryptophan 7-halogenase OS=Alphaproteobacteria bacterium OX=1913988 GN=E6G94_16 195 PE=4 SV=1
MSEHAIREVVVVGGGTAGWMAAAAFSVLLDRRTVKVTLIESDEIGTVGVGEATIPPLVAYNNMLGIKEDEFLAATQGTFKLGIEFVDWGALGTRYFHPFGEHGQDFRGVHFHQLYLREAKRRALPDIREWSMSGAAAALGRFARPGPDARLPLSQLAYAFHFDAGLYARFLRGLAERNEVTRVEGRIVDVALHHESGNVEAVTLADGRSVAGELFIDCSGFRGLLIEEKLGTGYQDWSRWLPCDRAVAVPCAYSGQPDPFTRSTARASGWQWRIPLQHRMGNGIVYSSAYMERGEAEALLLANLEGEALAEPRHLGFTAGMRRLAWNRNVVALGLSGGFVEPLESTSIHLVQSGIAKLLALFPDRRFDAAERDEYNRQMEEVYEDVRDFIILHYKATQRDDSDFWNYCRTMEVPEKLAAKLDLWRGKARLFREGRELFGTASWVAVLLGQGVIPEAHEPAADALDPDFVADAMEKMRLSYARMAEHMPMQGDFIAQACRAAR

SEQ ID NO: 90211 - protein, 480 aa, Alphaproteobacteria bacterium
  misc_feature (1)..(480): tr|A0A537M962|A0A537M962_9PROT Tryptophan 7-halogenase OS=Alphaproteobacteria bacterium OX=1913988 GN=E6G94_03 180 PE=4 SV=1
MSASRRSVRNVGVGGAALTRKAERVVVVGRDAALWIVAASLQSAFGRSGVRVDAIELPSLLQEVDVYAAVPSLGALHKLLGIEESVLLAACAGVPMVGQRFSNWAKSSPPFLHGYDVERTPGGDVTFFQYWVKARLEGLKVGFEEFSLAAVAAKQGRVPFTEDDPNPSAASHGYHLHARGYAALLKQLAGRAGVRHRRGRVAGVERDGERIARVTLDDGEALEADLFVDASGTEAVLAGPANSDNFESWRQWLPCDSTLAASAQPLRPAPAFSQISAFRAGWVGLYPLQDRTAVIATWDSKSFGAAQMVESLPVLSGLAIAGDAVVTPFEAGARLRPWSGNCVAIGDSAISLEPLDAVQLHSVHVGVTQLVALFPVDADRLIEADTYNEVVLQHARNVRDFQAAHYRLNRRFDEPFWVACSPAGGFRCCSKGNRSRSRIGPRSCSAMGSPRRATIRAWTGCRRRSISRRCSSGCARWRWR

SEQ ID NO: 90212 - protein, 111 aa, Alphaproteobacteria bacterium
  misc_feature (1)..(111): tr|A0A537LTT6|A0A537LTT6_9PROT Tryptophan 7-halogenase (Fragment) OS=Alphaproteobacteria bacterium OX=1913988 GN=E6G94_16150 PE=4 SV=1
MSDRNIRKVVVVGGGSAGWMAAAALTNALRGGCEIELVESDEIGIVGVGEATIPPIKLFNQTLGVDENDFVRATEGSFKLGIEFVDWAEKGHRYFHPFGTFGVDFDAVPLH

SEQ ID NO: 90213 - protein, 497 aa, Teredinibacter sp.
  misc_feature (1)..(497): tr|A0A509DZW1|A0A509DZW1_9GAMM Flavin-dependent tryptop han halogenase PrnA OS=Teredinibacter sp. ISS155 OX=258 4524 GN=prnA_1 PE=4 SV=1
MNEQEVKNIVVAGGGTAGWIAATALKKGLGDRVNVTLVESDDIPTVGVGEATIPPLLVLHQILGISEREFMSATNATFKLGIAFENWKDLNTKYIHSFGVAGKDCWACGFSHFWIKGMQEGLADEYGDYCLEHLAARENKFAVVANNGLNYAYHLDAGLYAKFLRGTSEECGVVRKEGKIKTVNLSKTNGFIESLTLESQENISGDFFIDCTGFRALLIGDALHTGFEDWSHWLLCDSAVAVQTESVRPPVPYTRSIAHEAGWQWQIPLQNRTGNGLVYCSRYMDDETAKNTLLKHVEGKTLNDPRIIKFKTGTRLKHWSKNCLALGLSSGFLEPLESTSIHLIQKSVIRFMQLFPGNGVKQVDIDEFNRQTKKDVDYIRDFIILHYCVTERDDSQFWRYCKNMSVPDTLKHRLSLFEETGRIFRGEDELFASESWIQVMMGQGLIPKTYHPIVDLMPRQELQQFLNRLKEITRSKLNQLPMHEEFIDKYCRSGERN

SEQ ID NO: 90214 - protein, 508 aa, Glaciecola sp.; identical to SEQ ID NO: 86499
  misc_feature (1)..(508): tr|F4AU57|F4AU57_GLAS4 Tryptophan halogenase OS=Glaciec ola sp. (strain 4H-3-7+YE-5) OX=983545 GN=Glaag_3676 PE =4 SV=1

SEQ ID NO: 90215 - protein, 509 aa, Alphaproteobacteria bacterium
  misc_feature (1)..(509): tr|A0A411JKH0|A0A411JKH0_9PROT Putative tryptophan halo genase OS=Alphaproteobacteria bacterium OX=1913988 PE=4 SV=1
MERPDVRKLVIVGGGTAGWIAAAAFARLLGQRLDIELVESEAIGTVGVGEATIPQIIRLNAILGIDEHEFLRATSGTFKLGIEFVDWARRGSRYLHTFGDTGMNLGNVAFHHYWRRSTIGEAAPDPKGLWHWSLHQLAADEARFGKLDKVGNTAMTGLAYAYHFDASRYALFLRAYAEGRGVTRTEGIVERVERDGESGDITAIVLKGGQRIAGDFFIDCTGFRSLLLGETLGVGYQDWSRWLPCDRALAVPSERLPRLVPYTRATAKDAGWQWRIPLQHRTGNGHVYSSGFTSDEAAADTLLAGLDTKALGDPRPIRFTTGRREASWTHNCAAIGLSGGFLEPLESTSIHLIQSHVSRLIRLFPRTAGASAMREEYNRRCAAEFAQIRDFLILHYHQTEREDTEFWRYCKHMDVPDSLTHKLELFAASGRTGRDPDDLFQDASWVQVMLGQGIIPADYDPMADQIADSQLAEFLANLRRIITRSVAGLPSHEDYLARHCPAAPLDAAA

SEQ ID NO: 90216 - protein, 501 aa, Teredinibacter sp.
  misc_feature (1)..(501): tr|A0A509DXR0|A0A509DXR0_9GAMM Flavin-dependent tryptop han halogenase RebH OS=Teredinibacter sp. ISS155 OX=258 4524 GN=rebH_3 PE=4 SV=1
MSVQKKKIVIVGGGTAGWMSAAALKFHFKQLVDITLIESSDIGTVGVGEATIPTIRNFYLGLGLKDLDVMRATRATCKLGIQFNDWLRPGSSFIHPFGLYGQDSQGIEFHQFWLKLRKQGLADELGKYSLGVALAEKNKFTLPAKNPPSSLSVFDWALHFDAALFAQYMREFSMSLGVEHLDAKITKVNLRESDGYIANLSTESGATVAGDLFIDCSGFRGLLIEEALHTGYESWQKWLLCDSAQAVQSIAHGTPSPYTRVDAKTAGWQWKIPLQHRFGNGHVYASGFMGDEEAQQVLFNAIPEQTISDAKLIKFTAGRRKKAWNKNCIAIGLSAGFLEPLESTSIALVQTAIEKIRTLLTNFDFDDAVVNEFNETTALEYERVRDFLILHYKATQRSDSEFWRFCQHMEIPESLSHKLALFKSSGYVVNYRWEMFHLPSWLAIFSGFDYLPDNYDMRVDAFPEAQLAKSFAKMQASIQQAVADTPDHDAFIAEFCAAEKY

SEQ ID NO: 90217 - protein, 536 aa, Calothrix sp.; identical to SEQ ID NO: 87469
  misc_feature (1)..(536): tr|A0A1Z4SQD3|A0A1Z4SQD3_9CYAN Tryptophan halogenase OS =Calothrix sp. NIES-4105 OX=2005463 GN=NIES4105_25690 P E=4 SV=1

SEQ ID NO: 90218 - protein, 537 aa, Glaciecola sp.
  misc_feature (1)..(537): tr|F4ASN5|F4ASN5_GLAS4 Tryptophan halogenase OS=Glaciec ola sp. (strain 4H-3-7+YE-5) OX=983545 GN=Glaag_2348 PE =4 SV=1
MTFNEQLNREKYVQLNSQVKDIVIVGGGTAGWLTAGLLASRLSSRVQSGELNITLCESPDVPTIGVGEGSWPTLRSTLQSIGVTETDFIRQCNVSFKQGSRFVNWQHDRPSQYDHPFDVPQQASQGAEAQHWLSTQSQVPFSQAYCLQTELANNNLAPKLITTPEFTGFANYGYHLDAALFAEFLREHCIQHLQVKHVLANVKQVEQDENGDITCLHLAPPSQNNSNPPDYINGDLFVDCTGFRALLLGDTLGVCNTQVDDVLFANNAIATQLPYVEQNSPIASFTESTAQDNGWIWDIGLPNRRGIGYVYSDRYCDEQDAHRTLVKFLQKTQQNTDTLSYKQIHFTPGYKQQFWKNNCVAIGLSAGFIEPLEASALVLVEMSANMLAEQLPNTRSCMDVIAKRFNQTFTYRWQRIIDFLKLHYVLSRRSSAFWQDNRAQSSVPDSLKELLALWQHKVPDMNDFPARDEVFQAASYQFVLYGAGFKSQLLSTPDKNLLEAAEQQFLSIQGYTSQLTNKTISNRDLLSKIYRYGLQKR

SEQ ID NO: 90219 - protein, 506 aa, Glaciecola sp.
  misc_feature (1)..(506): tr|F4ASX9|F4ASX9_GLAS4 Tryptophan halogenase OS=Glaciec ola sp. (strain 4H-3-7+YE-5) OX=983545 GN=Glaag_3529 PE =4 SV=1
MQTSLPFKKIIIIGGGTAGWMSACYLAKMWQDYDLEIKIIESDAIGTIGVGEGTTPSIKGFFEQLGIEAKEWMPACNATYKTGIRFVNWSSDPNYKSYFHPFYSQLDEYFQHEFFQNIQLKHRGFDVHAHPDQYLLASELAQQRKAPIEPEHYPFDMAYAYHFDATLLAQFLKKKALQWNVTHQVATINEVKQKDDGSIASVVTESGETIEADFFVDCSGFRSLLLGKSLKVPYNSFADSLLNDSAVTIVTEREDTTPSMTLSTALSCGWAWRIPLTNRFGNGYVFSSRFQSPQDAEEEFRRHLALPESAQFNHLKMRMGHFAKGWEKNVLAVGLSQGFIEPLEATALHFATQSVVDFVSAVDNSTDQAGYSNQTAYNNKLSDRFSCVRDYIELHYLANSRHDTPYWKAARSHTPSRRLQRILTTWHQGKSVPRVLDEEAVSLQLFGHESWLCLLAGKGVFPESEHTIDALPTAMRIDMQKIKHFVETSAKHYPLHDDALAALKQS

SEQ ID NO: 90220 - protein, 496 aa, Shewanella putrefaciens; identical to SEQ ID NO: 83369
  misc_feature (1)..(496): tr|A0A252ES50|A0A252ES50_SHEPU Tryptophan halogenase OS =Shewanella putrefaciens OX=24 GN=B7D78_14645 PE=4 SV=1

SEQ ID NO: 90221 - protein, 435 aa, Streptomyces toyocaensis
  misc_feature (1)..(435): tr|Q8KLM2|Q8KLM2_STRTO StaK OS=Streptomyces toyocaensis OX=55952 GN=BU52_01300 PE=4 SV=1
MSAETFDVVVAGGGPAGSTAASLVAMQGHRVLLVEKEVLPRHRVGESLLPSTVHGVCRMLGVTDELAETDFPVKRGATFQWGGRAEPWAFSFGASSRLTDATSFAYQADRARFDEILLKNAKRKGVVVREGCSVTAVVEEGDRVTGLRHTDPDGGEHEVGARFVIDASGHESPLSASVGGTRDRAGSFRGLALSGYFGNGCKRLPEPRSGDGLSVTFDGGWFWYVPLFGGLTSVGAVVSEERAEKLQDDREEAFKALIAECPAISDLLSEGMRVTAGKYGKLRVREDYVYHRTTFWRPGMLLVGDAACSVDPLFSSGVHLATYSALLAARSINSVLAGDVDEKTALTEFEARYRRELGAFSELLTTFHTMTGEEHPEPESFVDVAAGVSSGEWALAAQGGGAAAPGEPMFRGGLAVSPDGMKWLPAASKEREDAR

SEQ ID NO: 90222 - protein, 503 aa, Sphingomonas koreensis
  misc_feature (1)..(503): tr|A0A2M8WBS4|A0A2M8WBS4_9SPHN Tryptophan 7-halogenase OS=Sphingomonas koreensis OX=93064 GN=BDW16_1664 PE=4 S V=1
MTEEHGEDAIRTIAIVGGGTAGWMAASYLARTLAHTNIAITLIDSSEIGTVGVGEATVPAIRDFLAVVGLADADVLAATEGTIKYGIHFADWAEPGHRFYHPFGLYGVSARGVPFHQYWLKLRAAGHDLSLEDYCLCTQLAEQGRFLPPPEQPGSELGVFDFALHFDASMFATLLRDLSLSLGVTHIDARIDGVEQAPEDGQVRAVRLADGRSVAADLWIDCSGFRGLLIGEAMGVPFVDWRNWLPCDRAIALGCEPSGAYRPVTTSTARAAGWQWHIPLRHRIGNGYVYCSDYISDDEAEAVLRANIEGPALGEARRIRFTPGHRASFWKGNVVAIGLAGGFLEPLESTSITLIQSGLERLVRLFPDRRFDPALAALFDRQSQLEFERIRDFLLVHYCLNRREGEPLWDRMRTMELPGHLQGKIDAWRAQGELVRYEWETFQDPSWLSMYAGFGIEPRRYNVRADQFDGAELLATFGRMRTAIDDTVKLGVPAAQFAAALRR

SEQ ID NO: 90223 - protein, 505 aa, Parvularcula sp.
  misc_feature (1)..(505): tr|A0A357L228|A0A357L228_9PROT Tryptophan halogenase OS =Parvularcula sp. OX=1979207 GN=DDZ68_01940 PE=4 SV=1
MTFSPPPNRDPLRSVVIVGGGTAGWMAASVLSKAFGPALSITLIESEEIGIVGVGEATIPQIRHINNFLEIDENAFLKATNGTFKLGIQFNDWGRLGDSYMHAFGDIGMALGLTPFHHYWLRAVAAGKGGSLWDYSVNHQIAIRDRFAIMERIGSSRLTGTRHAFHFDASLYARFLRGRAEAAGVRRVEGKIVEVRRRAADGFIEGVTLEGGARIDGEFFIDCSGFRGLLIEGALAAGYEDWTHWLPCDRAVAAPCAHGAAIRPYTQASARKSGWQWAIPLQNRVGNGHVYCSRHISDDEAAAVLKENLEGELLGEPRLLRFVTGMRKRQWVKNCVSLGLASGFLEPLESTSIHLIQSGVSRLVSMFPDRHFDAALIDEFNRQSRFEFERIRDFIILHYHANERTDSPFWIERREMAVPEALAAKLDLFRSTGRIYREHEELFTEQGWLQVMIGQRIAPLRYHPLADGLSESQLDEFLANIRTLIDRAAAAAPGHADYVKANCAA

SEQ ID NO: 90224 - protein, 503 aa, Sphingomonas koreensis
  misc_feature (1)..(503): tr|A0A430CPC3|A0A430CPC3_9SPHN Tryptophan 7-halogenase OS=Sphingomonas koreensis OX=93064 GN=DAH55_14415 PE=4 SV=1
MTMGRPFELVIVGGGTAGWMCAAACAAKLVPTGVRVRLVESEEIGTVGVGEATLPQMKDFNDFLGLDEVEFMKATQASFKLGIEFVNWGHEGHRYIHPFGTYGRPVGEADFFSYWIRARRSGIASRLDDYCFPIVAAWQNRFMLPNGDPNDVRNAFAYAYHLDAFLYARYLRGWAEARGIERVEGRIVDVERDGGSGAIAAVTLASGEPVAGDFFIDCSGFRSLLLGSMLGVELEDWSHWLPCDSAQAVPCARSQDFTPYTRSTRRKAGWQWRIPLQHRTGNGYVYSSAHVSDDEAAATLLANLDGEALAEPRVLRFKAGKRRLAWSRNCIGMGLAGGFLEPLESTSIYLVQMAIMHMLTLLPSTEGIDPALPAEFNRVMDVEYDRIRDFLILHYIANEADAPLWAHVTAVDLPDTLQDKIDRFRHRGHVQAYRDGLFGPPSWQAVFVGQGIEPLAADRLADVLPAEALAQRLEMLASTIARGAGSAPSHADFIARYCPAPAP

SEQ ID NO: 90225 - protein, 503 aa, Parvularcula sp.
  misc_feature (1)..(503): tr|A0A355C313|A0A355C313_9PROT Tryptophan halogenase OS =Parvularcula sp. OX=1979207 GN=DDZ68_13405 PE=4 SV=1
MTDHPRAIRKILIAGGGTAGWMTAAALSSTLSQGCEIVLVESEEIGTIGVGEATIPPIRLFNDTLGIDERDFVRETQGSFKLGIEFVNWSRKGHRYFHPFGPHGRPFDIVAVHQHWLRARAEGEQASFDDHSMAWAMAKAGRFNKPAADPRSVLSTFDYAYHFDAGLYARYLRRYSEERGVMRVEGKIGGVEQNAESGFVERILMQDGRILEAELFIDCTGFRGLLIEGALKAGYEDWTRWLPCDRAAAAPCAKSGAFTPYTRSTALDAGWQWRIPLQHRTGNGYVYSSNFISDEAALETLLGGLDGAPLAAPNQLRFVTGMRRKFWDRNVIAIGLASGFMEPLESTSIHLIQAGISKLLALFPDRDFDPLIIAEYNRIAVTEFERIRDFLILHYKLTERDDAELWRYCRSMSVPDTVQFKIDHFRRYGRHIAREMDLFGAPSWHAVHIGQFNMPERTDPVAGYRTVNSREWLAKLRAAMTAEAQRQPEHQAFIDQHCKAAAR

SEQ ID NO: 90226 - protein, 512 aa, Unknown
  misc_feature (1)..(512): tr|A0A0K0P9W9|A0A0K0P9W9_9BACT Tryptophan-5 halogenase OS=uncultured bacterium OX=77133 GN=lzrH1 PE=4 SV=1
MLKSVVIVGGGTSGWMTASYLTAAFGDRIEVTLVESARVGAIGVGEATFSTVRHFFEYLGLEEKDWMPACNATYKLAIRFENWREEGHHFYHPFERQRVVDGFTLPDWWLRNPSSDRFDRDCFLVGTLCDSLKSPRHLDGTLFEGGLGERSTYRTTLSEQSTQFPYAYHFDATLVANFLRDYAVARGVRHVLDDVVDVALDSRGWISHVVTKERGELAGDLFIDCTGFRSLLLGKALEEPFESYQSSLPNDSAVALRVPLDMERKGLRPCTTATAQEAGWIWTIPLFDRIGTGYVYASEYSTPEQAEQRLREFVGPAAEGLEANHIKMRIGRSRRHWVNNCVAIGLSSGFVEPLESTGIFFIQHGIEQLVKHFPDVSWEDGLRDSYNNLVNRCMDGVREFLVLHYYAAKRADNQYWQDTKNRALPDGLAERLERWKTRLPDAESVYPHYHGFEAYSYVCMLLGLGGVELKPSPALGLLDPSSAQHEFKLVAEQATELERTLPTQYEYFARLR

SEQ ID NO: 90227 - protein, 530 aa, Unknown
  misc_feature (1)..(530): tr|V9Y0K0|V9Y0K0_9BACT RebH-like halogenase OS=uncultur ed bacterium OX=77133 GN=asmbl_15 PE=4 SV=1
MGNAIEKIVILGGGTAGWMAASYLGKALSETVDITVLAAPEIPTLGVGEATIPNLQTAFFDFLEIEESEWMRACNASYKMAIKFINWRTGGEGVSHLRRFGGRTDHFYHIFGLLPYFDQLPLSHYWVYRTWAEQTDEPFDYACYHEPLILDENRSPRWMDGSRATNYAWHFDAHLVADFLRRFSTGTLGVRHIEDRMEHVRHRTDGSIESLSTRAGHTLEADLFIDCSGFRGLLINQAMAEPFLDMSDHLLCDSAIAAAVPHNDDTLGVEPFTSAIAMKAGWTWKIPMLGRFGTGYVYSSRFATEEKATQDFCVLWGLNPNTMPLNKIRFRVGRNRRAWVKNCVSIGTSSCFVEPLESTGIYFIYAALYQLMKHFPDKGFDSVLIDRFNREIETMFDDTRDFIQAHFYFSPRNDTPFWKANKELKLGDSMQEKVEMYRAGMAINVPATDDASSYYRNFEEEFRNFWNNSNYYCILAGLGVMPRAPSPRLHHMPASRKRAEAVFADVKRQQRDLLDTLPTCYEFLRNQHGG

SEQ ID NO: 90228 - protein, 506 aa, Sphingomonas koreensis
  misc_feature (1)..(506): tr|A0A430CLE3|A0A430CLE3_9SPHN Tryptophan 7-halogenase OS=Sphingomonas koreensis OX=93064 GN=DAH55_16995 PE=4 SV=1
MSQRSIVIAGGGTAGWMTAAALARFCGSGWTITLVESDAIGTVGVGEATIPMIRLFNQALGIDEAEFLRETHGTWKLGIEFDGWGVPGERYMHAFGQVGRGLGLLPFHHYWLRARAAGRAGPLGNYVLNDIAAKANRFGHVERAADSVLPAMPYAFHFDAGLYAAYLRRYAEARGVARIEGRVERVERDGENGDVTTLVLAGGVRVAGDLFVDCSGFRGLLIEGALETGFEDWGHWLPCDRALAVPCERADPLIPYTRATARKAGWQWRIPLQHRTGNGYVFSSAHISEDEAASVLLANLDGAPQAEPRVLKFRAGKRRKAWNRNVVAIGLSSGFLEPLESTSIHLIQSGITRLLDFLPNGRVADADRDAYNRMTDFEIERIRDFVILHYFANRREGEPMWDALRYMDLPEPLADRIAMFRACGRIVREHDELFDVPGWIQVLAGQGIVPERWHPLADELSAEQLDQFLSTVADAYARDAARLPGHADYLTRFCGAPSTLSQSSIA

SEQ ID NO: 90229 - protein, 503 aa, Citromicrobium sp.; identical to SEQ ID NO: 87684
  misc_feature (1)..(503): tr|A0A2D9IF17|A0A2D9IF17_9SPHN Tryptophan halogenase OS =Citromicrobium sp. OX=2024827 GN=CL805_02455 PE=4 SV=1

SEQ ID NO: 90230 - protein, 491 aa, Sphingomonas koreensis
  misc_feature (1)..(491): tr|A0A2M8WBS3|A0A2M8WBS3_9SPHN Tryptophan halogenase OS =Sphingomonas koreensis OX=93064 GN=BDW16_1640 PE=4 SV= 1
MSGPVERVAVYGGGVAAPMAALAVARAYGRLGTQVTWVDTGEAPPPHAALVAVPDLAAFHRLLGITDAALIETASATLNMGQQFAGWSGGDDAFLHAYGDAGTPFASLPLVQHWTRARQAGLRVALEDFCLAAAAAKQGRAGEARDPATRQAVKHGWHLDAAGYTELLRAACKGAAVTIVQGGGAQPHAADGRVDRIVLADGAAVTADLFVDADGALTRSLDPHGAEEGNGLCDRILCGSAARLDPLPLYSRVAAHEAGWVTLIPLSDRLAVEIAYDSRQMPDDAARMVMERAAGRAVETGGSEAFSATLRPRPWFANCVAIGRAASDAPRLDGAELLLLQLAVAQLVLLWPIDRDAMPEADIYNEELTGSYARVRDFAAQHFRLNRRHGEPFWDAARAAPVSAELAAKIDLFAARGMFAHFNYEAHVEDGWALCMTGHGVVPHSFDPQALLVEDQALMAEFQRQLRAIAAEVRSMETHAEALARIRSGGR

SEQ ID NO: 90231 - protein, 512 aa, Sphingomonas koreensis
  misc_feature (1)..(512): tr|A0A2M8WDI7|A0A2M8WDI7_9SPHN Tryptophan 7-halogenase OS=Sphingomonas koreensis OX=93064 GN=BDW16_2289 PE=4 S V=1
MEAGQTGTGNPPIRRIVIVGGGTAGWMTAALLSKLLFRGYDITLVESDEIGIIGVGEATIPGIKDYNHLAGIDLTEMIRATQATFKLGIEFVNWREPGFRYIHGFGKIGTDLMWLHPHQLWLKLAAMGQAKHFDLYSLNTLAARQNKFCFPDPRNPGSPMGHLDYAYHFDASLYARFLRGRSEAQGVTRTEGRIVEVRQRPEDGFVESVVLADGQTVSGDLFVDCSGMRSLLLGQTLGVGYEDWSHWLPCDRALAVPCESVSPLTPYTRSTAHGAGWQWRIPLQHRIGNGHVYSSAHVSDDEAADVLLANLDGKALADPRPVRFAPGKRHKAWEKNVVAIGLSSGFLEPLESTSIHLIQTGILKLVALFPGQGFNAADIAEYNRQHNFEFDDVRDFIIAHYKVTNREDTPFWAHVRHMEVPDSLAERLELFRASARFFVHGKAELFREESWVQVLLGQGMAMTYDPVVDMIPDEDVIAFMRDIEEVNADVAAAMPTHQAFIDRHCKAPSLAS

SEQ ID NO: 90232 - protein, 509 aa, Brevundimonas sp.
  misc_feature (1)..(509): tr|A0A2D8FKD1|A0A2D8FKD1_9CAUL Tryptophan halogenase OS =Brevundimonas sp. OX=1871086 GN=CL682_00475 PE=4 SV=1
MDEIDDPRIRSVVIVGGGTAGWMTAAALVQHFRSTPLKITVVESSDIGTIGVGEATIPTIRRFYGQLGLRDDDVMRATQATCKLGIRFIDWSGPGSDFIHPFGLYGQDVKGIGFHHYWLKQKRAGDPAPLAAYSLGASLAAGGKFIQPSPNPPSQLSVFDWALHLDAGLFAQHLRAYAEAGGCARIDARIRSVELRPEDGFVRALTLDDGREVEGDLFVDCSGFKGLVIGEALGVGFEDWGRWLPCDAAYAVQSANRPGDAPAPFTRVTARSAGWQWGIPLRHRAGNGLVFSSAHLSDDQALAELMPHLLGDPLTEPRRIPFRPGRRTQAWARNCVAIGLSSGFLEPLESTSIALIETGIERLKALFPDRRFAQPILDEFNDQTAREMERVRDFIILHYKLNRRTDTDFWRDCRDMAVPETLERKLALWTARGQFVRYRWEMFHPASWLAIYDGFGLYPDHYDPAVDAMDPAYLARSLAEMRTNIADFVARTPDHAQFLAGLDPAASAA

SEQ ID NO: 90233 - protein, 495 aa, Colwellia sp.
  misc_feature (1)..(495): tr|A0A2G2F8N1|A0A2G2F8N1_COLSX Tryptophan halogenase OS =Colwellia sp. OX=56799 GN=COA35_13750 PE=4 SV=1
MTKTNAVKNVVIAGGGTAGWMAAAALAKLIGKNIHVTLVESDDIGTVGVGEATIPPIRTFHKLLGINEQAFMKATQASFKLGISFENWGDENTRYIHSFGATGKECWAGEFHHFWLQGKTLGINNPFGDYCYELQAAKAGKFAFNQQNPINYAYHMDATRYAQFLREFSEPLGVKRVEGKIQKVVKNAKTGHIESLLLNSGEQINGDFFIDCTGFRGLLIEQALHTGYEDWSHLLPCNSAIAVQTKSTSDTVLPLTRSIAHKSGWQWRIPLQSRVGNGLVYCSQYMDDEQAKALLLNNIEGEALTEPRVIKFKTGRRLKGWNKNCLALGLASGFVEPLESTSIHLIMSGIIRFMRLFPFNGITNHAIDEYNKQLKSEIENIRDFIVLHYKVTNRDDSEFWQQCSAMEVPKTLQHKIDLFKQTGRVFLDDGDIFRVDSWVQVMLGQGIVPEQHHLIASMMSDEELTRFLHGIKQQIEQRVSQLPPHHEFLKHYCPA

SEQ ID NO: 90234 - protein, 503 aa, Mizugakiibacter sediminis
  misc_feature (1)..(503): tr|A0A0K8QLJ5|A0A0K8QLJ5_9GAMM Tryptophan halogenase OS =Mizugakiibacter sediminis OX=1475481 GN=MBSD_1520 PE=4 SV=1
MSDARIKRVVIVGGGTAGWMAAAVLARALGPAVEIRLIESEEIGIVGVGEATIPQIRLLNPFLGLDENALLRAVNGTIKLGIRFHDWGRLGDRYWHAFGDLGLPLGLLTFHHYWLRSRARSDAPDLWAYSLNAAAAAANRFARLDRVGDTPLTGLRYAYHFDAMLYGRYLRRHSDARSVRRIEGKVVDVQLRGEDGFIEALRLESGETVAGDLFIDCSGFRGLLIEGALKTGYENWQHWLPCDRALALPSARVEPLRPYTQALARTAGWQWRIPLQHRTGNGHVYCSRFISDDEAAAQLLANLDGEALAEPRPLRFVSGMRRQAWNRNCVALGLASGFMEPLESTSIHLVQSGLSRLLAMFPDRHCDPALAAEYNRQTRFEYERIRDFIVLHYKATERDDSPFWRHCAQMPVPDTLAHKLELFRRTGSVFREADELFTEAGWLQVMLGQRIAPARYHPLADGPSAAQLDEFLGQIRALVAHAVSTLPDHARFIEQQCAAPLPA

SEQ ID NO: 90235 - protein, 516 aa, Mitsuaria sp.
  misc_feature (1)..(516): tr|A0A5C6ZR72|A0A5C6ZR72_9BURK Tryptophan 7-halogenase OS=Mitsuaria sp. TWR114 OX=2601731 GN=FUT87_05935 PE=4 SV=1
MSFTPPAPSVPRSPVRRVVIAGGGTAGWMMAACIAKHLGKQLDIRLVESDEIGTVGVGEATIPTMLTFHQLLGLDEREFMAATQATIKLGIQFEGWRDPDARYIHAFGSTGIDHWTAGFQHFWMKGRERGMASDYGDYCLELRAAQQHRFAHLPGDGINYAFHLDASLYGAFLRRFSDGFGVRRIEGRIAEVLLRPDGDLRALKLQDGSEVEGDLFIDCTGMRSVLLGQTLGVGYQDWSHWLPCDSAIALQTASVRDAVPYTRAIAHPWGWQWQIPLQHRVGNGVVFSSRYTDDETARAALLGNIEGEVLTPHRVIRFKPGQRDVVWQRNCVAVGLASGFLEPLESTSIHLIQRSAIRLLQMFPKDGIRQSDVDEYNAQMRHELEHIRDFIVLHYHLQQRTDSPMWRDLREMSVPASLQHRLDLFRESGRVFRGPNELFTENSWIQVMLGQGLMPEQHHPTADLMSDRELAGFLGGIKARIDQTVQQMPGHQQYIARYAPGTQWQMPQVPQAPVTV

SEQ ID NO: 90236 - protein, 538 aa, Burkholderia pyrrocinia
  misc_feature (1)..(538): tr|Q9RBU7|Q9RBU7_BURPY Tryptophan halogenase OS=Burkhol deria pyrrocinia OX=60550 GN=prnA PE=4 SV=1
MSNPIKNIVIVGGGTAGWMAASYLVRALQQQTNITLIESAAIPRIGVGEATIPSLQKVFFDFLGIPEREWMPQVNGAFKAAIKFVNWRKSPDRSRDDHFYHLFGSVPNCDGVPLTHYWLRKREQGFQQPMEYACYPQPGALDGKLAPCLSDGTRQMSHAWHFDAHLVADFLKRWAVERGVKRVVDEVVEVRLNDRGYISSLSTKEGRTLEADLFIDCSGMRGLLINQALKEPFIDMSDYLLCDSAVASAVPNADARVGVEPYTSAIAMNSGWTWKIPMLGRFGSGYVFSSKFTSRDQATADFLNLWGLSDNQPLNQIKFRVGRNGRAWVNNCVAIGLSSCFLEPLESTGIYFIYAALYQLVKHFPDTSFDPRLTDAFNAEIVYMFDDCRDFVQAHYFATSRDDTPFWLANRHDLRLSDAIKEKVQRYKAGLPLTTTSFDDSTYYETFDYEFKNFWLNGNYYCIFAGLGMLPDRSLPLLRHRPESIDKAEAMFARIRREAERLRTSLPTNYDYLRSLRDGDAGLSRSQPGSTLAAPEIL

SEQ ID NO: 90237 - protein, 526 aa, Amycolatopsis regifaucium
  misc_feature (1)..(526): tr|A0A154MSY8|A0A154MSY8_9PSEU Uncharacterized protein OS=Amycolatopsis regifaucium OX=546365 GN=ATP06_0213490 PE=4 SV=1
MARPVEKVVIVGGGTAGWLSAAYLNRAFGEKVDITLVESDRIGRIGVGEATVPTLRTTFAFLGMKEEEWMPRCNAAFKSAVRLNDWRKPHPGKESHTYFHPFFTVPEPPVPNYEKPFHKRFGRGVSLAHFWLKQKLSGDTRLRETFGDAGMPLQGLCELNKAPRPMPGSDGPNPGFRYAYHFDAALMAGYLKELATGRGVHHVIADVESVALDPRGHIEKVVTETGAELTADLFLDCSGFRGLLINQTLNEPFISEKDVLLCDSAIALSSDHHPDGLRPYTSATARNEGWIWEIPLFNREGSGYVYSGQLTTPDKAEKELRDFLGTRAHDVEGNHIKMRVGHNRRSWVNNCVAVGLSSCFVEPLESTTIALIEYQLALLVLHFPDSDLDERRAKRYNETMVSAFEDVRDFIVMHYCLTDRDDTEFWRAVREAPIPDSLAEKLTEYAESVIIPDGSQLRLFETRSLWAILSGMDFDFKKAPPSVELMNDAAAWEMFEQIDKEREIYSASLPNHMDYLKALHALGAKG

SEQ ID NO: 90238 - protein, 501 aa, Altererythrobacter sp.
  misc_feature (1)..(501): tr|A0A2E1Y7U8|A0A2E1Y7U8_9SPHN Tryptophan halogenase OS =Altererythrobacter sp. OX=1872480 GN=CL574_05930 PE=4 SV=1
MRTATTPRRIVIAGGGTSGWMAAAALARTMGDTIELTLVESDAIGTVGVGESTIPPLVKYNQLTGIDEAEFMRETNATFKLGIEFENWKTDGESYFHSFGATGKDHWSAGFQHFWMHGLTQGHEHSYDDYCLELAAAHAGKFAILPDNRLNYAYQLDATAYARFLRRKAESFGATRREGKIAAVELDSESGDIAALTLESGERIEGDLFLDCTGFRALLIEGALHVGYDDWSHYLPNDRAIAVQTESVRDPVPFTRAIAHEAGWQWRIPLQHRQGNGIVYCSRYMSDDEAEARLLSTVEGATCSTPNRLRFTTGARRKQWHRNCVAVGLSSGFMEPLESTSIHLIQRAVLRLIRMLPSGERVSRRDIDEFNDQQLTDMDQIRDFLILHYKVTQRRDSPFWRQCAAMEIPDSLTQKIELFRETGRVFRKNEELFAENSWVQVMMGQGLMPETYHPIATKMSSEELERFLGTLRSNVARTVAGLPEHHAFVKRYCGAKQAEAA

SEQ ID NO: 90239 - protein, 513 aa, Altererythrobacter sp.
  misc_feature (1)..(513): tr|A0A2E1Y9T1|A0A2E1Y9T1_9SPHN Tryptophan halogenase OS =Altererythrobacter sp. OX=1872480 GN=CL574_09245 PE=4 SV=1
MKQSGQSRSGGSRKRRVVVLGGGTAGWMTAAGLVRLLPDGVDVQLVESEDIGIVGVGEATLPHIRSFIETLGIDEAAFMEATHATYKLGIDFRDFGRIGTSYIHPFGSFGEELNGVGFHHYWLELHRHGLAGQLGDYSLAVAAALANKFRPPAADESLASTYGYAYQFDATLFGPFMRSFSTEAGVTRHEGKVVAVQRNTANGDVAALELDDGRLIEGDLFVDCSGFRSLLLGEELGEQWEDWSHWLPCDRAAAMPCTHSSEDISPYTTATAMPAGWRWQIPLQHRMGNGYVFSSTHVSEDRACEAIIGHVDGKPLADPRILRFRPGRRRRSWSHNVIGVGLASGFLEPLESTSIYLAQMAITYLIELFPQADAIDASDRDEFNRLVDMEYDRIRDFLILHYHVTTRDDSEFWNDMRTMRVPDTLADKLELWRRTGRVAKYSEGLFFEPSWVAVYIGQGLLPEQHDARPAALDRTKLTRAVDRLEQAVRAEVQGMPRHRDFLRSDASRLAPAA

SEQ ID NO: 90240 - protein, 503 aa, Rhodobiaceae bacterium
  misc_feature (1)..(503): tr|A0A3C0VLU5|A0A3C0VLU5_9RHIZ Tryptophan halogenase OS =Rhodobiaceae bacterium OX=2026785 GN=DCP14_02390 PE=4 SV=1
MSLDMSEENDFKLRKIVIAGGGTAGWMAAAALSKTLGDLVDIKLVESEQIGTVGVGEATIPPIITFHRMLDIPENEFMRETQATFKLGISFENWRVDGEKYIHSFGTTGKDHWTSGFQHFWLNGLKRGHNISYDDYCLELKAALDNKFSHLPNEGMSYAFHLDSSRYAKFLRRFSEKNSVERVEGKINKVNLNGESGFISSLDLDNGITLEGDIFIDCTGFRGLLIGEALGIEFEDWTDQLPCNGAIAVQTESTRPAVPYTRSIAHEAGWQWRIPLQHRTGNGIVYCNDFLDENGALDKLLQTVDGKTITDPNFIKFRAGTRKKQWHKNCVAVGLSSGFMEPLESTSIHLIQRNILRFIRMMPYQEISQRDIDEFNNQADWDMETIRDFLVLHYIANERDDPFWKMCADIKLTDSLKQKIELFRETGRVFRQSDELFAENSWIQVMLGQGIMPEAHHPIASKMTDQEMNLFLKTIREGVEKTVKNLPMHHDYVKQYCGVTETA

SEQ ID NO: 90241 - protein, 498 aa, Alteromonas sp.
  misc_feature (1)..(498): tr|A0A2D5LGT1|A0A2D5LGT1_ALTSX Tryptophan halogenase OS =Alteromonas sp. OX=232 GN=CL592_01360 PE=4 SV=1
MAQKKTRVVVAGGGTAGWLTAFSLVTRLGNVLDIILVESDQIGTVGVGEATIPTMCNFHQLMGINEGEFMAATNATFKLGIQFDNWANDGDSYIHSFGEIGQRSWMAEFHEFWMEAAANGQQDSLEDYCLELKAAKANKFATKIGNRPLNFAYHLDATAYAAYLRKKSEAAGVTRCEGKIQSVDTDPQNGNLTRLTLDTGIAIEGDVFIDCTGFRGLLIGEHLGVGYEDWSHWLAADRAIAIQTQSTEAPKPYTIATAHKAGWQWRIPLQSRVGNGIVYSSRFLSDDDALATLKQNIDGEMLTEPRYLKFKTGRREKAWHKNCIAVGLASGFLEPLESTSIHLVTTALIRLMKLFPFSSNHQLLAEQYNRETQKEMETIRDFIILHYNLTKRTDSDFWDHYRTMDIPEPLAHRMEIFAQNGYVWPDDVALFRVDSWVQVMMGQGLMPAQHHGASRMLPTDGLKQQLSAFKQSVDNALGQLPAHADFIARYCPAGEQVK

SEQ ID NO: 90242 - protein, 530 aa, Streptomyces thermoautotrophicus
  misc_feature (1)..(530): tr|A0A132N2I3|A0A132N2I3_9ACTN Tryptophan halogenase OS =Streptomyces thermoautotrophicus OX=1469144 GN=LI90_18 73 PE=4 SV=1
MDNAIRKIVILGGGTAGWMAASYLGKALNHTVDITVLAAPDIPTLGVGEATIPNLQTAFFDFLGIAEDEWMRECNASYKMAVKFINWRTGGDGVPQARDLNGRPDHFYHVFGLLPYHDQLPLSHYWFYKRWTQQSDEPFDYACYKEPPILDAKLAPRWMDGTRATNYAWHFDAHLVADYLRRFATEKLGVRHIPDQMVHVTQSENGFIESLTTKSGLVLTADLFIDCSGFRGALINRALGEPFLDMRDHLLCDSAVASVVPHDDEANGVEPYTSAIAMKAGWTWKIPMLGRFGSGYVYSSRFADEEEAVRDFCALWNLDPETTSLNKIRFRVGRNRRAWVKNCVSIGTSSCFVEPLESTGIYFIYAALYQLVKHFPDRNFNPVLIDRFNREIELMFDDTRDFIQAHFYFSPRMDTPFWRANKRLQLGDNMRDKMEMYRAGLGINCPPTDDAQVYYGNFEEEFRNFWNNSNYYCVLAGLGHVPEAPTPRLNHMASSLASVDAVFDKVKKEQRELLQTLPTCYEFLRKQHGR

SEQ ID NO: 90243 - protein, 505 aa, Rheinheimera sp.
  misc_feature (1)..(505): tr|A0A0U4VZZ7|A0A0U4VZZ7_9GAMM Tryptophan halogenase OS =Rheinheimera sp. F8 OX=1763998 GN=ATY27_05305 PE=4 SV= 1
MHQTPATGSAGKPIRKVVIAGGGTAGWMTAALLKKVLADSVEIELVESEEIGIVGVGEATIPPIQIFNQYLGLDEKAFLRDTHATMKLAIKFENWRKPGESYYHTFGAPGASLGFCNFQHYWLRARAAGLPQSLWDYDLNYLSCEAGKFNIIKTPNPVYEMPYAYHFDSALYGQFLRKMAESAGVKRTEGMIEAVQQHGISGDIEALQLKDGRKIHGDLFVDCTGLRGLLIRQTLGVQYESWAKYLPANSALAVPSERFDKTLPYTRSIAHKAGWQWRIPLTHRNGNGIVYSSAYLSDDEAYSTLMGNLDSKALAEPRKISFETGRTSNQWAKNVVAIGLSSGFLEPLESTSIHLIQSGIVRLLKVFPNQGISDAVVDYYNADSKQEFETIRDFIILHYHANERDDSGFWRDMRNMAVPARLQEKMALFRESAQVFNDHNDIFRDASWIQVMLGQGIMPRDYHPAAKVPTTSELMATLGKVQEAKQQPLTQMLSHDEFLARYSGV

SEQ ID NO: 90244 - protein, 533 aa, Xanthomonas campestris; identical to SEQ ID NO: 89408
  misc_feature (1)..(533): tr|A0A0A6TDH4|A0A0A6TDH4_XANCH Tryptophan halogenase OS =Xanthomonas campestris pv. phaseoli OX=317013 GN=prnA PE=4 SV=1

SEQ ID NO: 90245 - protein, 520 aa, Rheinheimera sp.
  misc_feature (1)..(520): tr|A0A0U4V0Z7|A0A0U4V0Z7_9GAMM Tryptophan halogenase OS =Rheinheimera sp. F8 OX=1763998 GN=ATY27_05300 PE=4 SV= 1
MSGNLPPFHFAIVGGGTAGWMAALLFAHKWLKPAAEQTRPVQITLIEAPDIGIIGVGEGSTPSLKRFFQQLGIADSEWMPACQATYKTNIRFVNWSPAAAAMGLGSDYSHPFISQPDLHSETAFYSNCFKRRLGLAVETSPEKFLLNGYLAAQQLAPLTPANFPFRIEYGFHFDSGLLGQFLKQKALAMGVQYQALTVTAVNQLPDGHIASLTGEIADGDSKVVQTLDADFFIDCTGFRANLLQQTLQVPFESFASNLFNDAAVVLPTEAFAIPPVETKATALSNGWAWQIPLRHRSGNGYVYSSAFISKDAAELELRQHLGLLDSEVNARHLQMKVGQVTRSWEKNCLALGLSQGFIEPLEATALHLVQSSIEQFIDSFADFSTEGQAEFNRQVHQRFEAVRDYIVAHYKLSSRSDSHYWRANSSNMQLSESLRQILDVWFRQGDLAQELSRQEQGRQQSGSHFGATSWHCLLAGYGIFPPLRQPQPANVSDAFTELELAAFFNGCSLNFQPQHLLWTR

SEQ ID NO: 90246 - protein, 491 aa, Amycolatopsis regifaucium
  misc_feature (1)..(491): tr|A0A154M6F4|A0A154M6F4_9PSEU Tryptophan halogenase OS =Amycolatopsis regifaucium OX=546365 GN=ATP06_0208140 P E=4 SV=1
MSVEDFDVVVAGGGPGGSTVATLVAMQGHRVLLLEKEVFPRYQIGESLLPATVHGVCRMLGVSDELANAGFPIKRGGTFRWGARPEPWTFHFGISAKMAGSTSHAYQVERARFDDILLKNAKSKGVVVREGCSVNDVVEDGERVTGARYTDPDGNEREVSARFVIDASGNKSRLYSKVGGSRNYSEFFRSLALFGYFEGGKRLPEPVSGNILSVAFDNGWFWYIPLSDTLTSVGAVVRREDADKIQGDREKALNALIAECPLISDYLSNATRVTTGRYGELRVRKDYSYQQESYWRPGMILVGDAACFVDPVFSSGVHLATYSALLAARSINSVLAGDLDEKTALNEFESRYRREYGVFYEFLVSFYQMNVNEESYFWQAKKVTQNQSTDIESFVELIGGVSSGETALTAADRIAARSAEFAAAVDKMAAGDGDDMVPMFKSAVVQQAMQEAGQVQMKALLGEDAEPELPLFPGGLVTSPDGMKWLPHHPV

SEQ ID NO: 90247 - protein, 454 aa, Amycolatopsis regifaucium
  misc_feature (1)..(454): tr|A0A154M575|A0A154M575_9PSEU Tryptophan halogenase OS =Amycolatopsis regifaucium OX=546365 GN=ATP06_0206385 P E=4 SV=1
MDDYDVIVVGGGPGGSTVAGLTAAEGHRVLLVDKDVFPRYQIGESLLPATIHGICALLGVREEIERAGFVRKGGGTFKWGTSAEPWTFSFAASERMAGPTSYAYQVERSRFDLVLLDGARRLGAEVRQGHRALGTIREGDRITGVRYADDTGRERLATARFVVDASGHGSRLHHDVGGAREYSPHFRNLALFGYFEGGHRMPAPHAGNILCVSFADGWFWYIPLSDTLTSVGAVVKQESATRVQGDPDVAYASLIDDCPLIAEFLRDAHRATEPPYDRLRVRKDYSYDRTVLWCPGMVLVGDAACFIDPVFSSGVHLATYSALLAARSINTTLAGLGEESRCFTEFEARYRREFSLFRDFLLTFYELDTGEDDYFRQARRLISSHGAADEAFADLVGGVSSQDFSRGMFGNVLAEGVQLQLRGLLGGAAGDEPPMFPGGLVPTADGRRWRVPDA

SEQ ID NO: 90248 - protein, 525 aa, Altererythrobacter sp.
  misc_feature (1)..(525): tr|A0A2E1YAM2|A0A2E1YAM2_9SPHN Tryptophan halogenase OS =Altererythrobacter sp. OX=1872480 GN=CL574_09225 PE=4 SV=1
MASRNGIGTGGGGRIKRVVIVGGGTAGWMAAAALSRFFDDGQRSIELVESDAIGTVGVGEATIPPLAKFNAMLGIREDEFLRETRGTYKLGIEFVNWGQIGDSYFHPFGSYGQPFHGIPFHQLFLREKVRSGNGGKIGDYSMSTVAALRQRFGRPSPTAKSLVNQIAYAYHFDAGLYAAFLRRFAEDRGVTRTEGRIAHVEQDSEEGNVTAVVLENGHRIEGELFIDCSGFRGLLIEETLETGYDDWSKWLPMDRALALPSSNGGSPPPFTRSIAHGAGWQWRIPLQHRIGNGHVFSSAYIEEQTALDVLLANLEGEALQDPRKLAFRSGMRRKAWNRNVVSLGLSAGFVEPLESTSIHLIQNGIARLFALFPDNPISPIERDEYNRGMAELYEDIRDFIILHYKATQREDTEFWRYVRHMPIPDSLSRKMDLWKLHGRVFRENAELFAADSWIAVMLGQNVWPDTYDPIADTLDAEKIASAMVQMRQAYSETADRLPTHEDFLRQSGGWHHRQDMQIKQPDYEA

SEQ ID NO: 90249 - protein, 511 aa, Altererythrobacter sp.
  misc_feature (1)..(511): tr|A0A2E6K9W4|A0A2E6K9W4_9SPHN Tryptophan halogenase OS =Altererythrobacter sp. OX=1872480 GN=CL574_09230 PE=4 SV=1
MMLEPISKVVILGGGTAGWMVAAALSKAMGGIPDFSVKLVESEAIGTVGVGEATIPQIVSFNRLLGIDEMEFLRETHATYKLGIEFVDWLREGHSYIHPFGSFGIDMLGIEFRHFWLRGKEQGASETIDSYSIAAMAAKDGRFDWPRPDMPRSPLSRLAYAFQFDAGRYARFLRKIAEARGVARVEGQVADIRQHPETGFVTGLTLVDGQQIEGDLFIDCSGFRSLLLGQTLEIPFLDWSRWLACDSAVAVPCKLGGRNEPLTRSTARPAGWQWRIPLQHRIGNGHVFSSGHMERDIATETLLDNLDGESLADPIHLSFKAGRRARSWEKNVVALGLAAGFLEPLESTSIHLVQSGIARLMAFFPDKDFSALEIARFNAETEKEYRDIRDFLILHYKATERDDTEFWRYCRNLEAPDGLAEKIAMFRSSGRIFREDNELFTEESWMAVMLGQGIEPDRYHPAARLLDGPETLDRLQHIRNAIAGTVAQMPTQDVFLRQRGGAITAGRIAPT

SEQ ID NO: 90250 - protein, 444 aa, Actinoplanes sp.
  misc_feature (1)..(444): tr|A0A0A0MP30|A0A0A0MP30_9ACTN Halogenase OS=Actinoplan es sp. ATCC 53533 OX=1288362 GN=DMB66_27140 PE=4 SV=1
MPVEEFDVVVAGGGPAGSTVASLVAMQGHRVLLLEKEVFPRYQIGESLLPSTVQGVCRMLGVMNELAGTNFRVKHGGTFRWGARSEPWTFSFADSPQLTGPTSFAYQVERARFDEILLRNAQRKGVEVREGCSVAGVIEGDERVAGLRYTDSDGGEHEVRARFVVDASGNKSRLYSSVGGARNHSDLPGGLALSGYFGRCREPAPYSGNTLIVAFESGWFWYTNITGGLSSVGAVVRPEMAEKIQGDREKAFAALIAECPLISELLSEASRVKAGKYGKLRVSENYSYHQTALWRPGMILVGDAACVMDPVLSSGVHLATYGALLAARSINSVLADDLDEKTALTEFEARYRREYGVFHDFLMSFYDMDVSEESYFRQAKKVTNSERTELESFVDLAVGLSSGEPAPTAPGGEDDAPEVPLFPGGMVASPDGMKWLPYPEAIRS

SEQ ID NO: 90251 - protein, 503 aa, Microbulbifer thermotolerans
  misc_feature (1)..(503): tr|A0A143HPI5|A0A143HPI5_9GAMM Tryptophan halogenase OS =Microbulbifer thermotolerans OX=252514 GN=A3224_13185 PE=4 SV=1
MDKNNNKISRVVIAGGGTAGWIAAAALSKKLGELLDITLVESEAIGTVGVGEASIPPMRVFHRLLGIEERAFMRATGATFKLGIAFENWGREGDRYIHAFGRIGQGSWLCEFHHFWLRARALGMDFALGDFCSELQAAEAGKFATAEQSEINYAYHLDAGAYAKFLRNFSQRLGVRRVEGKIIRVGRNADSGFIEALQLDNGRRIEGDLFIDCTGFRGLLIEEALGTGYEDWSHWLLSDSAVPVQTRVTGPAPPYTRATARGAGWQWRIPLQYRVGNGLVYCSDYLSDDEAAAQLLANIEGEVLTEPKVIRFKTGRRRRAWNKNCIALGLASGFVEPLESTSIHLIITGITRLMQLFPFDGIADATVNHYNALTRTELESIRDFIVLHYHLNERESSAFWRRCRDMEIPQSLAQRIRLFRDNAYAYQGDGELFRVDSWVQVMLGQGLKPQGYHPLTRLMPEAQLAQLLGGLKASIARGVAPLPAHQDFVEGYCAAELAEAVPG

SEQ ID NO: 90252 - protein, 532 aa, Serratia rubidaea
  misc_feature (1)..(532): tr|A0A447QVU3|A0A447QVU3_SERRU Geranylgeranyl reductase family OS=Serratia rubidaea OX=61652 GN=NCTC12971_0329 7 PE=4 SV=1
MSKPIKNIVIVGGGTAGWMSASYLVRALQQQANITLIESEAIPRIGVGEATIPSLQKVFFDFLGIPEREWMPQVNGAFKAGIKFVNWRKPPSPSHNDYFYHLFGNVPNCDGVPLTHYWLRKREQGFQQSMAYACYPQPGALDGNLAPCLHDGSRQMSHAWHFDAHLVADFLKRWAVDRGVNRVVDEVVEVKLNEHGFISSLLTKEGRQLEADLFIDCSGMRGLLINQALKEPFIDMSDYLLCDSAVASAVPNDDTQAGVEPYTSSIAMNAGWTWKIPMLGRFGSGYVFSSKFTSRDQATSDFLNLWGLSDNQPLNQIKFRVGRNKRAWVNNCVSIGLASCFLEPLESTGIYFIYAALYQLVKHFPDTAFDPRLADAFNAEIVYMFDDCRDFVQAHYFTSAREDTAFWLANRHELRLSDAIQEKIERYKAGLPLTTTSFDDATYYDTFDFEFKNFWLNGNYYCIFAGLDMLPDRSLPLLQLRPESIDKAEAMFASIQHEAERLRTSLPTNYDYLRSLQKGYAEQSRPASPEIL

SEQ ID NO: 90253 - protein, 533 aa, Kutzneria sp.
  misc_feature (1)..(533): tr|A8CF75|A8CF75_9PSEU KtzQ OS=Kutzneria sp. 744 OX=345 341 GN=ktzQ PE=4 SV=1
MDDNRIRSILVLGGGTAGWMSACYLSKALGPGVEVTVLEAPSISRIRVGEATIPNLHKVFFDFLGIAEDEWMRECNASYKAAVRFVNWRTPGDGQATPRRRPDGRPDHFDHLFGQLPEHENLPLSQYWAHRRLNGLTDEPFDRSCYVQPELLDRKLSPRLMDGTKLASYAWHFDADLVADFLCRFAVQKLNVTHVQDVFTHADLDQRGHITAVNTESGRTLAADLFIDCSGFRSVLMGKVMQEPFLDMSKHLLNDRAVALMLPHDDEKVGIEPYTSSLAMRSGWSWKIPLLGRFGSGYVYSSQFTSQDEAAEELCRMWDVDPAEQTFNNVRFRVGRSRRAWVRNCVAIGVSAMFVEPLESTGLYFSYASLYQLVKHFPDKRFRPILADRFNREVATMYDDTRDFLQAHFSLSPRDDSEFWRACKELPFADGFAEKVEMYRAGLPVELPVTIDDGHYYGNFEAEFRNFWTNSNYYCIFAGLGFLPEHPLPVLEFRPEAVDRAEPVFAAVRRRTEELVATAPTMQAYLRRLHQGT

SEQ ID NO: 90254 - protein, 515 aa, Rheinheimera sp.
  misc_feature (1)..(515): tr|A0A0U4VK71|A0A0U4VK71_9GAMM Tryptophan halogenase OS =Rheinheimera sp. F8 OX=1763998 GN=ATY27_06450 PE=4 SV= 1
MQKTTIRTIVIVGGGTAGWMCAAALCQHFSTPQFRAQPVQIRLIESSELGTVGVGESTIPSIRRFYARLGLTDPQVIAATKATCKLGIEFRNWRTVGSSFIHPFGLFGQQVQDVPFIHCYLKAQQLGDTTPLAAYSLGVNLAQQNKFCLPAPQPQSMLSIFDWALHFDASRFAVLMREYSEARGVERTDAMIDQVLTNANGIEALVLQSGEVVKGDFFVDCTGFKGMLIEEALQSGYENWSQWLFCDRAIAVQSEVSGAPVARTKATAHSAGWQWQIPLQHRHGNGYVYASACISDDEATATMLSHVSGQPLHNPRQFRFTPGRRKQAWVKNCVALGLASGFLEPLESTSIALIETSIDRLLQTFSTPAYDQTDIDRFNEVTKLEYERIRDFIILHYKANQRDDAPLWRQSRAMTLPPELADKMQAYQDHAEVPRLPWEIFGADSWLALYDGLGVKPGAFNARADSLPPQQLLAQLQQMRDYISRTVQAVPEHQEFLRRFCGYQSMPQAVAGASK

SEQ ID NO: 90255 - protein, 510 aa, Caulobacter flavus
  misc_feature (1)..(510): tr|A0A2N5CSW5|A0A2N5CSW5_9CAUL Tryptophan halogenase OS =Caulobacter flavus OX=1679497 GN=C1707_15840 PE=4 SV=1
METSAPLDIVIVGGGTAGWMVGTALVSGLRPHQARVRLVESDEIATVGVGEATIPAMRDYNRFVGIDEVEMMRETNGTFKLGIEFLDWGFKGSSYHHPFGVHGAGIGGAGFHHHWNRARLAGHDLDIEQFSYAIAAARADRFEFPNPDPDKIDSTYSYAYHFDASLYARYLRKVAEGRGLKRTEGKVVDVTRDPLSGDVASITLASGEVVKGDFFVDCTGFRGLLIGQTLDSPFEEWTDWLPCDRAWAVPCARADRFTPFTRSTAREAGWQWRIPLQHRTGNGYVYSSRYISDDEAAATLMANLDGEALAEPRQVRFKAGRRTASWTRNVMAAGLASGFLEPLESTSIYLIQVAVMNLLKLFPGKRVEPALVEEFNRRVDMEYDRVRDFLILHYHANTRTDGELWKHCREMEIPESLKHKLELFRHRGVAPNYHDGLFALPSWISVLLGQGVLPGGYDRLVDNVPLAQALAEMERQRSAITRRMPAMPTHADFVARHCAISERAVAEAVA

SEQ ID NO: 90256 - protein, 512 aa, Unknown
  misc_feature (1)..(512): tr|V9XWY5|V9XWY5_9BACT Putative tryptophan 5-halogenase OS=uncultured bacterium OX=77133 GN=asmbl_19 PE=4 SV=1
MIQSVVIVGGGTAGWMTASYLKAAFGPRMAVTLVESDRVGTIGVGEATFSTIRHFFDYLDLPEEKWMPQCSASYKLAIRFENWRRPGHHFYHPFERLRVVDGFNLADWWLRLGDRSGDFDRECFLTPWLCDARRSPRRLDGALFAGDIDGGLGRSTLAEQRAQFPYAYHFDADLLAKFLAGYGIERGVQHVVDDVVGIGQDERGWITHVNTRAHGELRGDLFVDCTGFRGLLINQTLGERFQSFNDVLPNNRAVSLRVPRDIERLGMEPYTTATAMGAGWIWTIPLFGRNGNGYVYSDAFCSPEEAEETLRRFAAPGQDDLPANHIAMRIGRNERSWVANCVAIGLSSAFVEPLESTGIFFIQHGIEELVKHFPDDQWDPVLVDSYNARVAHVVDGVKEFLVLHYRAAGREDTPYWKEAKVREIPDGLAERLTLASRLLLDDNTTYPYYHGFEPYSWNTMLLGLGSGPPGPRPAVQVIDPTAARGELAAVRRDADRLTAALPSCYEYLATLH

SEQ ID NO: 90257 - protein, 587 aa, Microcystis aeruginosa
  misc_feature (1)..(587): tr|A0A5J5LTD0|A0A5J5LTD0_MICAE Tryptophan halogenase OS =Microcystis aeruginosa EAWAG127a OX=2529855 GN=EZJ55_0 8485 PE=4 SV=1
MNTTQALHYDVVIMGAGFAGLCQARHLMLNIPNIRVALIDPRPENRPDTDLKIGESTVEIAALLICKELGLHDYMIENHPPKAGLNFHWPKNPAETDSIDDYYHVWINRQPPIPTFQINRAKFERDLLKMNKEMGAIFYNGRVVDVDLTEGDQLKTVTVKLEDTTIEITAKHIVDAAGRRFIIGKKTDNLIFGSDQLLGVNNGSAWVRIKDVDRTIFHSGYHPAGTTVSHYYATNHYFGPGHWLWMIPIDRDSKELSLGVIHHHDVIPAATINTQEKFTAFLKANHTVLYKLLQNSELVDFHYLPRVAHKSKVMFSPDNWYVVGDSACIFDAFYSLGTTMIAIAVESITEIIRAKLANEANAEEKRAVYNDFNLAFTDSVNTFMQEHQKQLGHASIMSWRIYFEYMWWFGVLVPMYIGKWHLDPAFLKQFTGPFRTFLNGLFVDVYQDCNQLVERGVNMGLMDAIRADQLIGSYYTFKHFEDFLENSKLEPQRCNIFTSMKNTFFYVAIWYAMFQWKGFGWRGLLKPRNLAHFSYLLAQSGLSALGEMRHNFLTRSLPDNSEIEEMRQEFKEYRYQGKLQPWSAELS

SEQ ID NO: 90258 - protein, 83 aa, Unknown
  misc_feature (1)..(83): tr|V9Y0Y4|V9Y0Y4_9BACT Tryptophan 5-halogenase domain p rotein OS=uncultured bacterium OX=77133 GN=asmbl_7 PE=4 SV=1
MKNCVAIGLAAAFFEPLESTGIFLIQHGIEELVKYFPDGEPDPVVVADYLRRAAHVVDGVKEFLVLHYRAACSSGPTRWPASG

SEQ ID NO: 90259 - protein, 512 aa, Unknown
  misc_feature (1)..(512): tr|B8Y7X1|B8Y7X1_9BACT Putative tryptophan halogenase H al63D9 OS=uncultured bacterium OX=77133 PE=4 SV=1
MGGKRIVIVGGGTAGWLTAATLARTLAPTDPGGVAVTLVESRDIPIIGVGEGSFPTLRTTLQSLGVSEQAFCRGADGTFKQGVRFTGWAGRPTPGHAQDDYMHVFELPYGGDAPGLLPAWLATGGSNRPAYADAVSAQEQVMRAARAPKRPGDPDYSAPFAYAYHFDAGKLASFLRDTAIASGVEHVQATVGEIVRAEDGTIAAVVPEGGSAPIAGDLFIDCTGFSARMIGETLGSRFTPVDDVLFNDRALAVQVPYDRPDAEIASYTHATAHGAGWIWDIGLRERRGIGCVYSSRHCSDEEAERTLRAYAGPAAKDLSLRQLRFRTGYRETQWIGNCVAIGLAAGFFEPLESTGIMLIEVAARMVAELAVNADRDAMAAAARLYNRTMPARFAAIVEFLKLHYAISHRRDTAYWRDNTDRASWPDGLADKLAQWRRRPPSRFDFVIDHESFLPPNWQYILYGHGFDTAAPAVGQQEMAGAFQAFAKVRAAQRQAVAALPSHRTLVDHYQRA

SEQ ID NO: 90260 - protein, 229 aa, Unknown
  misc_feature (1)..(229): tr|A0A2I6QNK4|A0A2I6QNK4_9BACT Tryptophan halogenase OS =uncultured bacterium OX=77133 PE=4 SV=1
MTQLETERPVRSIAIIGGGTAGWMSAAAISKSFGRKIDVVLIESEEIGIIGVGEATVPHLSAFNRLLQIDEAEFVRQTKGSFKLGIQFNDWGKIGDSYIHGFGTIGRDLGLMPFHQYWLKARSQGHAKDISEYSLNTIAAPQGKFMTLRATLRPIRRWRRLPTPTTSTPFSMRASCGNMPKRAAQSGSKARSSPSINRATTASSKASSSRAARSSGPICSWIARVSAHC

SEQ ID NO: 90261 - protein, 494 aa, Pseudoalteromonas distincta
  misc_feature (1)..(494): tr|A0A5B0UGT6|A0A5B0UGT6_9GAMM Tryptophan 7-halogenase OS=Pseudoalteromonas distincta OX=77608 GN=EU511_06940 PE=4 SV=1
MNQNAIKKIVIAGGGTAGWMCSAAMAKLLGKNIEICLVESDLIPTVGVGESTIPTLHIFHDLLKISESEFMAATNATFKLGISFEGWKQNQQSYFHSFGYVGQGCWAAGFQHFWLKGMQQGVAADIGDYCTEHVASRLGKFAVVPNQDRNHAYQLDAGLYAKFLRNFAQQNGAKRIEGMISKVNLEPTNGFIKSLTLGDGQIIEGDLFIDCTGFKGLLIEQALHTGYEDWSHWLPCDSAVAIQTELVSPIVPYTRAMAHKCGWQWQIPLQSRRGNGLVFCSKYMSDDEAKTALLNNVEGKPINEPRVIKYRTGTRRKHWNKNCVAIGLASGFIEPLESTSIHLIQQSIIRLMQNMPTKAIESCYQDDFNNKMRFEAENIRDFIVLHYHVTQRTDSDFWRYCKNMPIPESLAKRIELFKQSGHVYKAEQELFGEASWLQVMLGQGLVPQNYHPIVDSMSDDELKRFLESIKNHVAKKADSLPSHIDFINHYCKAK

SEQ ID NO: 90262 - protein, 584 aa, Deltaproteobacteria bacterium
  misc_feature (1)..(584): tr|A0A538QF05|A0A538QF05_9DELT Tryptophan halogenase OS =Deltaproteobacteria bacterium OX=2026735 GN=E6J91_1534 5 PE=4 SV=1
MSEYQDKVYDVAIMGGGPAGATLAARLARETELSVAIFEAEFFPRDHIGETLVHTIVPSLYESGALGKVLSSDCYVKKAGGFYSWDPKQPWASYFEHELHEHDGYFRWSIHCNRPEFDHILLTHARDSGAEVYEGTPVNGVSRQDDITTLDLGVHGTARCKLFVNCSGRTSSTTITGERQFLSNYRNIAIWNHIVGGRPAQSLPGDWNIFRERNLSPIASLAFEHGWFWYIPVPKLVQGKRVVTHSLGVVTDPSALSDPKKRFTDPRIFMDTARRVPLLGELIKDAQLVSDKFMTAPNYSRISGRMCDWDKREIRVGDAAYFVDPLFSSAVHFALQHAGMAMVMIKAAFDPTMSDAMKRELWEDYHETLGSVARGFSLAIDQWYCEIARDNPGSVYWKHRSAAPTFLNRAETFQSLINGQIHGDLLQVITKGTNNINSLGKQGGLRRTHDEIRQKEPRGDARIRLRRNVDVKPSLTLEGPVRTPDGKVIPFLHGPYWDNPEKHASEVLPLFPGPRSCHRFHFTDDDTAIKVKFHDPEHKGLELAEQLKSGQYTYGQLKEQLSPPQQHLLLLAVMSDMVEQVPTS

SEQ ID NO: 90263 - protein, 438 aa, Unknown
  misc_feature (1)..(438): tr|A0A059WXQ9|A0A059WXQ9_9BACT Tryptophan halogenase (F ragment) OS=uncultured bacterium OX=77133 PE=4 SV=1
QKYDLPRLLPLTKYGPWQRAYPRIVCGLKRGFSYFLHRPETPFACQPDHGNELLVAASSTDESSDTHWLRADVDMFLAEEAANGGVEYVDRCEAALEPRDDHWRIASPRLSGAVRADFLIDGSGEGGVLARVLKIPNDVGHLKTNSRAIFCHVAGLRKWEELLVAQGNDLRDHPYPCDAAAVHHFLAEGWMWQLRFNNDVTSVGFTLAADAPAPQVSAGEEWRILLDRYPSLHAQFANSTIVQPPEGLRRTGRLQRCAAQMVGPTWAMLPNTAGFIDPLHSTGIAHSLCGIERLVGILSARAAPDAMHAALQKHATLQRREIHLIDRLVSGCYLARQDFRLLVPFASLYFAAATTYEHRRHEGATAKGYLLADDPAFTSLVEQLWERVDELAATPHLPDPKAAAFERKVAAAIRPYNRVGLLEPAVRNMYHHTAAPER

SEQ ID NO: 90264 - protein, 524 aa, Massilia sp.
  misc_feature (1)..(524): tr|A0A344JMD7|A0A344JMD7_9BURK Tryptophan 7-halogenase OS=Massilia sp. YMA4 OX=1593482 GN=DPH57_25790 PE=4 SV= 1
MQPIRNILIVGGGTAGWLAAGFLARTLGTQGGGNAITLVESKDIGIIGVGEGTFPSIRGTLSVLGIDEGRFIRECSATFKQGVRFNHWVRAPGARGPDHYFHPFSQPSQRPGGPELLPYWLQGAAGADVPFAAAVTMQKHVADMSHAPKRSGDADFVGPLNYAYHFDAGAFATLLASHAQSLGVRRVEATVDQVKLDDTGAIAAVVTREAGELAADLYVDCTGFRARLIGEALGSPFRNINDTLFVDRALAMQVPYERPDSPIPSYTISTAHEAGWTWDIGLHERRGIGYVYSSRHTNDDRADQLLRQYIGPASDGREPRLLKLNVGYRETQWVKNCVAIGLSGGFLEPLESSGIGLIEAATYLVSYLFPYDGNLAPAAKLFNAQMKARYERIVDFVKLHYCLTQRTDNAFWIENAHASTIPESLREQLAMWRARPPHRLDFVTDIEMYPPSSWQYVLYGMEFPTRQMAHPAALPDMTAARREFQTIAQLSHHALADLPTHRALVEHYRRGGTMAAAPARRLYV

SEQ ID NO: 90265 - protein, 530 aa, Unknown
  misc_feature (1)..(530): tr|V9Y105|V9Y105_9BACT RebH-like halogenase OS=uncultur ed bacterium OX=77133 GN=asmbl_12 PE=4 SV=1
MGNAIEKIVILGGGTAGWMAASYLGKALNGTVDITVLAAPDIPTLGVGEATIPNLQTAFFDFLGISEDEWMRECNASYKMAIKFVNWRTAGDGSPDPRNLDRGSDHFYHIFGLLPYYDQLPLSHYWVQRVLAKQTDEPFDYACYPEPLALDQNRSPRWMDGSRATNYAWHFDAHLVADFLRRFATGKLGVRHVQDRMEHVTHAPDGSIQSLLTRSGETLEADLFVDCSGFRGLLINQAMGEPFLDMSDHLLCNSAVASAVPHDDATQGVEPFTSAIAMKAGWTWKIPMLGRFGTGYVYSSQFADEDEAVRDFCDLWNLDPERVPLNKIRFRVGRNRRAWVKNCVSIGTSSCFVEPLESTGIYFIYAALYQLVKHFPDENFNSILIDRFNTEIETMFDDTRDFIQAHFYFSPRVDTPFWRANKELRLGDRMCEKVEMYRAGMAINSPVSDDATVYYGNFEEEFRNFWNNSNYYCVLAGLGVVPTSATPRLHHMPASVEGVEKVFQDVKRRQRSLLETLPTCYEFLRAQHGR

SEQ ID NO: 90266 - protein, 436 aa, Unknown
  misc_feature (1)..(436): tr|A0A0U3AEW9|A0A0U3AEW9_9BACT Tryptophan halogenase (F ragment) OS=uncultured bacterium OX=77133 PE=4 SV=1
RCEASFKLGVDFVDWGHAGNRYFHAFGDYGAEVEAIQPYALWRRLRELGDPTPLVAYNVPAQIARAHRFLPPNPDPRSPLHDYSYAFHFDASLYAGLLKELVLKRGVTRIDAKIAHVRLKPDDGFIAGVTLDDDREIDADFFIDCSGFRGLLIEEALKTGYTDWSHWLPVDGAWAVPTAKSGDTTPYTRSTAREAGWQWRIPLQHRTGNGHVFSSRFTTAEAARDTLVDQLDGAMLKDPMLIRFQTGHRNKFWHKNCIAVGLASGFIEPLESTSINFIQTEIARFLDLFPLQGPNPALEDEFNRLTLQEYVRVRDFIILHYRLNQRPEPLWRHTAEMAIPDELAHKIAVFQARGRVVMHEGDAFSAASWTAIFDGQGVVSEAYDPLADRLPEADLLSLMQQRRDGIARVVGQLPSLDDFIARHCASPAYLKSQVTA

SEQ ID NO: 90267 - protein, 497 aa, Pseudoalteromonas distincta
  misc_feature (1)..(497): tr|A0A5B0UDG6|A0A5B0UDG6_9GAMM Tryptophan 7-halogenase OS=Pseudoalteromonas distincta OX=77608 GN=EU511_09300 PE=4 SV=1
MKPIKHVVIAGGGTAGWITAALLNKVLGKVIKITLIESSTIGTIGVGEATIPPIIQLNNALGINEQDFINATNASIKLGIEFENWKTTSHSYMHAFGSFGKDFPFCDFYNFWVKGKITGSEDSLWDFSLNYQAAKQHKFAPLNTIPNTQLPGLSYAYHFDATLYAEFLKKLAMSRGVDHIDAKIEQVEQCPLSGNIKTLTLGNTQQINGDLFIDATGQRALLIEQTLNTGFVDWSHYLPCDSAVAVQSQGTSELKPYTRSIAHSAGWQWQIPLQSRIGNGLVYCSRYLSDDAATQLLLNNLPAEPITAPRVIKFKTGRRLKQWHKNVVSVGLASGFLEPLESTSIHLIQSAVTRLIKLFPHHGISETLVTEFNKQSVIEIEHIRDFIILHYKLTEREDSVFWRQCKQMDIPHSLAHKLKLFKETGKVVRENDELFAEVAWQQVFIGQGLIPDDYNSIVDSLSSEQLNDLFSTLKTLITSTVDQLPTHKDFLAKIKKA

SEQ ID NO: 90268 - protein, 530 aa, Unknown
  misc_feature (1)..(530): tr|V9XX83|V9XX83_9BACT RebH-like halogenase OS=uncultur ed bacterium OX=77133 GN=asmbl_21 PE=4 SV=1
MDEPISKIVILGGGTAGWMAATYLARALGCTVGITVLTAPDVPTIGVGEATIPNLQTAFFDFLGIEEDEWMRECNASYKVAIKFVNWRTGGSGEPRPRIDDNGASDHFYHVFGLLPNSDQLPLSQHWVRRRHRTSDDEPFDYACYREPPALDELRSPRFADGRRATNYAWHFDAHLVADFLRRVAIERLGVRHVEDRVESVARRTDGGIRSVTARSGASFEADLFIDCAGFRGLLINQVMGEPFLDMSDQLLCDSAVATAVPHDDAANGVEPFTSAIAMPSGWTWKIPMLGRFGTGYVYASRYATEDEAVRDFSTLWGLDPESAKLNRIRFRVGRNRRAWVHNCVSIGTSSCFVEPLESTGIFFIYAALYQLVKHFPDTGFSPVLRDRFNREIELMFDDTRDFIQAHYYFSPRVDTPFWKANKELALSASMEEKIDSYRAGLPINPPANDDAQRYYGNFEEELRNFWNNSNYYCVLAGLGLVPDRPLPRLAHVAGADERADLRFTEVKRGQQEFLDMLPTCYEYLRQQHG

SEQ ID NO: 90269 - protein, 498 aa, Sphingomonas koreensis
  misc_feature (1)..(498): tr|A0A2M8WI02|A0A2M8WI02_9SPHN Tryptophan 7-halogenase OS=Sphingomonas koreensis OX=93064 GN=BDW16_3893 PE=4 S V=1
MTEKRPTRVVIAGGGTSGWMAAAAISRTMGRTVDLTLVESEQIGTIGVGESTIPPLVNFNRILGIGEAEFMAAAQATFKLGILFDNWKHDGHSYFHSFGLSGKDHWSAGFQHFWLYARSRGCPEPYDDYCLELAAAMQGKFAHLPQDRMNYAYHVDATLYGRYLRKLAEESGTKRVEGKIQRVELNGETGDIAALHLDGERRIEGDVFVDCTGFRGLLIEGALHAGFEDWGHWLPNDSAIAVQARHLGPPQPYTQAIAHDAGWQWRIPLQHRMGAGIVYSSGYLSRDEAHHRLISTVGEPLIEPFDIKFRGGVRRKQWYRNCVAIGLSGGFVEPLEATTVHLIQRAVLRFVRLMPNGRVSERDAAEFNEQQRQDIEQIRDFVILHYKATDRRDSAFWRHVAAMPVPDSLSQKIELFRETGRTFRRNEELFAENSWVQVMMGQGIDPQSWHPIAEKLSDEELMRLMSTLREDVTRTVATLPEHHTYVAQYCGAADPLAA

SEQ ID NO: 90270 - protein, 515 aa, Unknown
  misc_feature (1)..(515): tr|V9Y1B2|V9Y1B2_9BACT Tryptophan 5-halogenase OS=uncul tured bacterium OX=77133 GN=asmbl_15 PE=4 SV=1
MTPSVVIVGGGTAGWMTASYLAAAFGPRLSITLVESERVGTIGVGEATFSTVRHFFEYLGLEEQDWMPQCAASYKLAIRFQDWQTPGRYFYHPFERPETVQGFSLLDWTLRADAEPRTFDERCFLTRAMCEAGRSPRQLDGSLFVSQLDGPLGRSTLAEQRDQFPYAYHFDADLLARFLQGYGTARGVRHIVDDVVEVGQDTRGWLTHIRTEGHGDFTGDLFVDCTGFRGVLVNRTLGEPFHSFSEVLPNNRAVALRVPRDPAVRAVAPYTTATAMPAGWIWTIPLDQRDGLGYVYSDQFCTPEEAERTLREIAAPGRDDLPANHVQMRIGRTKRPWVKNCVAIGLSSAFVEPLESTGIFFIQHGIEELVKHFPMGEPDPAVVAGYNRRVAHVVDGVKEFLVMHYRAAARDDTPYWKEAKVRPAPDGLVERMTYGARTLLDESDIYPHFHGFEAYSWNTMLLGLGAGPTGPRPAMQLMDSTRAQQAFEALRAEARRTVSALPACGEYLDRLAGRS

SEQ ID NO: 90271 - protein, 494 aa, Sphingomonas koreensis
  misc_feature (1)..(494): tr|A0A2M8WBT2|A0A2M8WBT2_9SPHN Tryptophan 7-halogenase OS=Sphingomonas koreensis OX=93064 GN=BDW16_1639 PE=4 S V=1
MSARPVRRIVIVGGGSAGWMTAAALGRALAGQSHSITLVESEAIGTVGVGEATVPPILDFNRYLRIDPDEFLRETNGSIKLGIEFEGWGGAGHRYFHPFGFFGVEMSGIHFHHFWLRHVAEVGPRDHSEYHLEAMALREGRFARMTRTGPVHHAVHFDASLYARFLRGRAEASGVVRVEGKVVHVRLDPENGYIDALALDDGRSIEGDLFIDCSGFRGLLIEGALETGYESWNHWLPCDSAVAVPAANAGDPLPFTRSTAREAGWQWRIPLQHRDGNGYVYSSAHLPHAEAARLLSERLPGPAQADPNFLRFTAGHRRKIWNRNCVAIGLAGGFLEPLESTSIHLIQTTIIRLLALLPRDGIDPNVVARFNRESLHEYRTIRDFVIAHYALAGRDDTPFWRDVAATGVPDTLAERIEAFRATGNILFEPGDLFGPTNWYWVMTGQGVWPRSWHPIADGLSSAELTARLAVLRGRVAEQLAELPPHVEFLRRLSA

SEQ ID NO: 90272 - protein, 512 aa, Unknown
  misc_feature (1)..(512): tr|V9Y1F5|V9Y1F5_9BACT Putative tryptophan 5-halogenase OS=uncultured bacterium OX=77133 GN=asmbl_21 PE=4 SV=1
MIKSVVIVGGGTAGWMSATYLKAALGPRLSVTLVESDRVCTIGVGEATFSTIRHFFDYLGLREEKWMPHCAASYKLAIRFENWRRLGHHFYHPFERLRIADGFHLADWWLRLGDRSSSFDRECFITPSLCESKRSPRHLDGTLFTGNLDVPLSRSTLAEQRAQFPYAYHFDADLLAKFLAGYGIDRGVRHVVDDVVGVGQDERGWITHVTTRNYGDVTGELFIDCTGFRGLLINQTLGERFQSFVDVLPNNRAVSLRVPKDIDRLGMQPYTVATAVGAGWIWTIPLFGRNGTGYVYSDEFCTPEDAERTLRKFTAPGQDDLSANHITMRIGRNERSWVANCVAIGLSSAFVEPLESTGIFFIQHGIEELVKHFPDERWDSALAARYNARVAHVVDGVKEFLVLHYRVAGRDDTPYWKETKVREIPEGLAEKLELGSRLLLDEATVYAHYHGFEPYSWNTMLLGLGGGPNRPRPALELMDPTSAREAFADVRRDAERITASLPSCYEYLAILH

SEQ ID NO: 90273 - protein, 529 aa, Unknown
  misc_feature (1)..(529): tr|M9QSI0|M9QSI0_9BACT Tryptophan 6-halogenase OS=uncul tured bacterium OX=77133 GN=borH PE=4 SV=1
MDNRINRIVILGGGTAGWMTASYLAKALGDTVTITLLEAPAIGRIGVGEATVPNLQRVFFDFLGLREEEWMPECNAAFKTAVKFINWRTPGPGEAKARTIDGRPDHFYHPFGLLPEHGQVPLSHYWAYNRAAGTTDEPFDYACFAETAAMDAVRAPKWLDGRPATRYAWHFDAHLVAEFLRRHATERLNVEHVQGEMQQVLRDERGFITALRTVEGRDLEGDLFIDCSGFRGLLINKAMEEPFIDMNDQLLCNRAVATAIKHDDDAHGVEPYTSAIAMRSGWSWKIPMLGRFGTGYVYSSRFAEKDEATLDFCRMWGLDPENTPLNQVAFRVGRNRRAWVKNCVSIGLASCFLEPLESTGIYFITAAIYQLTQHFPDRTFALALSDAFNHEIEAMFDDTRDFIQAHFYVSPRTDTPFWKANKDLHLPEQMREKIAMYKAGLPINAPVTDESTYYGRFEAEFRNFWTNGSYYCIFAGLGLRPDNPLPMLRHRPEQVREAQALFAGVKDKQRELVETLPSNLEFLRSLHGK

SEQ ID NO: 90274 - protein, 88 aa, Unknown
  misc_feature (1)..(88): tr|V9Y0Z5|V9Y0Z5_9BACT Tryptophan 5-halogenase domain p rotein OS=uncultured bacterium OX=77133 GN=asmbl_8 PE=4 SV=1
MLPNNRAVALRVPRAPGAQEVAPYTTATAMPAGWIWTIPLDQRDGTGYVYSDQFCTPEEAERTLREFAAPGSDDLPANHVAMRIGRTQ

SEQ ID NO: 90275 - protein, 74 aa, Unknown
  misc_feature (1)..(74): tr|K1ZZY8|K1ZZY8_9BACT Tryptophan halogenase OS=uncultu red bacterium OX=77133 GN=ACD_54C00242G0001 PE=4 SV=1
MGLPHVSHELHVPVLDGLGLLSPARAKAWLADRPTLRSLARKTTLASHKDHLQAANRCLPHRAFLVSLQKEPTA

SEQ ID NO: 90276 - protein, 516 aa, Pseudoalteromonas distincta
  misc_feature (1)..(516): tr|A0A5B0UIR8|A0A5B0UIR8_9GAMM Tryptophan 7-halogenase OS=Pseudoalteromonas distincta OX=77608 GN=EU511_06515 PE=4 SV=1
MTKPITKIVVLGGGTAGWLSAGLLAAEHPHLNVTLVESANVPILGVGEGTWPSMRNTLQRIGIKEIDFITQCDASFKQGSKFINWRNLSEGENYYHPFMNPQGYEHTNLHASWQRIAPDQKFADVVNMQSFVCQAALAPKQLQTPEYAAVTNYGYHLDAGKFAEFLKNHCVKNLNVTHIIDDVTEVINDEHGYIASLKTNNNGDITGDLFIDCSGSCARLIGEHFNSEFIAQDHILFNNSAVAAQIPNAHIDQPIASATLSTAQSYGWIWDIALPTRRGTGYVFSSKYQSDESATNTLKSYIAKSTSEQQAEQLTYRVLKFSPGYRQKFWIKNCVAVGMSAGFLEPLEASALAMVELSISMISEQLPQNRTHMSQLETRFNERFSTRWQRVIEFLKLHYVLSERDDTPYWQDISNLNTAPERLQNLLKLWQFQPPSRFDFIENEEVFSSSSYQYVLYGMGFDTQTVSAQNTFNDPRAGDYYYQQNRDKIAQCLNGLPSNRALLNHLLSNNGQPHND

SEQ ID NO: 90277 - protein, 164 aa, Deltaproteobacteria bacterium
  misc_feature (1)..(164): tr|A0A534RE17|A0A534RE17_9DELT Tryptophan 7-halogenase (Fragment) OS=Deltaproteobacteria bacterium OX=2026735 GN=E6J83_02705 PE=4 SV=1
SYDSVRFTGPGYLLAGDAACFIDPVFSTGVHLACLAGFLGGRAVHAVLAGEASEADALAAYEQTYRGAFERYLRFLYFFYDHNEDPDSYFWTARRVLAHAPADLSAREAFVRLISGNGDWDGAPALLAREHARWADGIRAGRAGAVPGIELLRVGLTRRLTGLG

SEQ ID NO: 90278 - protein, 219 aa, Streptomyces fungicidicus
  misc_feature (1)..(219): tr|V9XQT8|V9XQT8_9ACTN Tryptophan 6-halogenase (Fragmen t) OS=Streptomyces fungicidicus OX=68203 PE=4 SV=1
GGGTAGWMTASYLGKALQDTVAITVLEAPTIPRIGVGEATVPNLQRSFFDYLGIPEEEWMRECNASFKMAVRFINWRTEGRGEPNPRTLPGDGPDHFYHPFGLLPDHDQTPLSHYWFQRKHQGETTEPFDYACFREPPLMDAMKAPGHTDGTAATRYAWHFDAHLVADFLRRFATEKQGVRHVQDEMVRVEQDERGYVTALHTKGGQALDADLFIDCSG

SEQ ID NO: 90279 - protein, 503 aa, Unknown
  misc_feature (1)..(503): tr|B8Y7X2|B8Y7X2_9BACT Putative tryptophan halogenase H al64E9 OS=uncultured bacterium OX=77133 PE=4 SV=1
MTADRADQDGSGRRVRSVAILGGGTAGWMTAAALARTFGRHVAITLLESEEIGTVGVGEATIPTIHWYNQLIGFDEAAFLRETKATFKLGIEFLDWTRPGHRYFHPFGQYGVELPGVAFHQRWLRARADGLDLPLPAFSLADRLAREGRFAKPSGGAQSILSTLGYAYHFDASLYARHLRGIAETAGVRRVEGKLADVERDGESGTVTALTTERGERIEADLFVDCSGFRALLIGTELEDWSRWLPCDRAVAVPCARVAETTPFTRSTARTAGWQWRIPLQHRTGNGYVFCSRHVSEDEATATLLANLDGEALAEPRTLRFTAGTRREAWRGNVVAIGLSSGFLEPLESTSIHLIQSGIAKLLTLFPDRDCDPALATRYNALLNADMDNIRDFLILHYHATEREEPLWQEVRAAALPDTLLAREEQYRRAGRLMLGPEELFRDASWHAVLNGQGITAQGYNPLADTLDPVTNRAQVQQIADVIARAAPTLPKHDAALAALMDA

SEQ ID NO: 90280 - protein, 795 aa, Methylobacterium sp.
  misc_feature (1)..(795): tr|A0A0Q4WFS2|A0A0Q4WFS2_9RHIZ Tryptophan halogenase OS =Methylobacterium sp. Leaf90 OX=1736246 GN=ASF36_05115 PE=4 SV=1
MFRSERSAPPRLVVAGGGPAGWMAALYLKRVLRRAGWTVTLVGAAPAAGASAALATRPAFTRFLKGFGIDEAIFMRRCAATYRLASRYDDWFAEGQGHWHPFGACGPRIAGRDLFHYWMKLRGEGPEDEAGSYADYAPQALMAAEGRGPRPLADRSSLTESGDYGYHLDRAALVRFLRELALSEGVRGVTGRVREIERNLYGDVGALILDGGQTIEGDIFLDCTGATAQLIGTALGEAWVAGSGPGDRVARLFLPRSPEVPPFTAYRGRAEGWTASLPLADRTEHQFVYDSRTTPPDAVAATLRRAFDGEAGIVDAELRHGRRASPWQRNVVAMGAAAGAVEPLLGFDLDLVLAGLETFLAYLPRQGEGGDVLRRAYAARLNRFHDDAAEAVAAHYVLGRRSEPFWAAARAVMIPDRLADRLDLYELAGHVALSEEGPFSEGDHYLLFSGADFLPRRPFAPVDVADGREIARLFASIRAQSAQIAGAMAPHVRLMDALHGEAPVAAPAVRIAAASAPAGPAALRRTPEGARLADLVAGLGQPFGYERSVKASPAGLQTDRFLMSLHRASLGLTPEATLDRLAAGLGLPERERAEAAGLIGGADILHLGYEDGPSGALYKLYVEWSSRTDAAWTGADEAGAEPMLVHRAYKWKPGGTHPPVVTLYHWPRVRGPEEIEARLNRMAGAWGPAGAPARDTAHAILRLAQERGRGAVHYLEAREEPGLRLSYDLNLYACGLTVADAEPRLGQAFVDLGVPREAAAMVLRERLQETLGHVAGGVGRDGQPFVTVYSGVAGG

SEQ ID NO: 90281 - protein, 501 aa, Sphingomonas koreensis
  misc_feature (1)..(501): tr|A0A1L6JDC4|A0A1L6JDC4_9SPHN Tryptophan 7-halogenase OS=Sphingomonas koreensis OX=93064 GN=BDW16_3848 PE=4 S V=1
MKQIKRILIVGGGSAGWMTAALLARLFEGLYEITLVESEEIGTIGVGEATIPAIKKYNELLALDEDDFMRRTQGSFKLGIQFVDWWRNGESYIHGFGLIGQDLGWLRCHHYWLKMRGQGRASDFSNYSINTAAALADKFMRADPRMTESPIGHIAHAFHFDAGLYARYLRDYAEARGVRRREGKVMDVTLRGDDGFVESVTMADGEVIAADFFVDCSGFRGLIIEQAMQTGYETWTHWLPCDRAIAVPCARIEPFTPYTRATARTAGWQWRIPLQHRTGNGHVYSSQYIDDAEAERQLLDNLDGAQLAEPNRIRFTTGKRKQIWNRNCVAIGLASGFLEPLESTSIHLIQSSIIRMVRLLPDAGFDPAGIAEFNRQTDFEYERIRDFIILHYKATERDDTPFWRYCRDMDVPTTLQRKIDLFAANGRIFREDEELFAEESWIQVLLGQGVMPRGYDPLVDVKDEGEIAQYLGDIERVIRKCVDVMPDHAAYVARTCPARAS

SEQ ID NO: 90282 - protein, 509 aa, Stenotrophomonas maltophilia
  misc_feature (1)..(509): tr|A0A501QKK3|A0A501QKK3_STEMA Tryptophan 7-halogenase OS=Stenotrophomonas maltophilia OX=40324 GN=FJP69_01765 PE=4 SV=1
MNAADTIQGPIRRVVIAGGGTAGWLAGCALAHQFRQQLDITLVESEQIGTVGVGESTVPPIRTFHRFLQIDEQEFLRAVAGTFKLSISFENWRRPGERFIHPFGTIGQGTWATPFHHFWLDSLRRGMPSELGDFCLESAASLADRFSLQTQPQVNYAYHFDAGLYARFLRGKAEANGLRRVEGKIREVRQHPHDGSVASLVLDDGQVIEGDLFIDCTGFRGLLTEQTLHTGYEDWNEWLPSDRAVAVQTDSPAPPVPYTRAIAHEAGWRWHIALQHRVGCGLVFSSRHMSDDEAQAKLLRDVDGQPLRDPWLVPFRSGRRLQAWNRNVVALGLASGFIEPLESTSIHLTISAVVRLIQLFPSDGITPSLVALYNDVSRQEMEHVRDFIILHYHANQRDEPMWKACREMALPESLQVRLRAWRERAHAWQDPGELFRVDSWTSVLMGQGIQPGAPHPLARAIGDADLRTLLHRIRQPVQETVAKMPTQAEFIERYCKAAPDAWQRGRAVA

SEQ ID NO: 90283 - protein, 530 aa, Unknown
  misc_feature (1)..(530): tr|A0A0K0P8P2|A0A0K0P8P2_9BACT Tryptophan-6 halogenase OS=uncultured bacterium OX=77133 GN=lzrH2 PE=4 SV=1
MEDHRIRKVVVLGGGTAGWMTASYLGKALGPDVALTVLEAPSIPKIGVGEATVPNLHRTFFDFLGLAEDEWMRECNASYKMGVRFINWRTPGAGEAKARELRGKPDHFDHLFGLLPNHANLPLSHYWTAERLAGRTDEAFDYACYRESPVLDAALAPRHADGSRWTNYAWHFDAHLVADFLRRFATERQGALHVEDEMTEPVIDHRGHITALRTKSGRLIEGDLFVDCSGFRGLLINKAMREPFLDMSDHLLNDSAVATAVPHDDEANGVEPYTSAIAMSHGWTWKIPMLGRFGTGYVYSSRFTSPDEATKELCDMWGLDPETQPLNHVKFRVGRNRRTWVRNVVSIGLSSCFLEPLESTGIYFITAALYQLAKHFPDKRFDPVLADSFNREIETMFDDSRDFLQAHFSLAPRQDTVFWRSCKELELAENFKGKLAAYRAGLAVNMPAVDETTYYANFEAEFRNYWTNSSYYCIFAGLDYLPEHPLPLLDQRGDLVAGAEPVFAEMKRKQKELLAGLPTHYDHLRRLHGR

SEQ ID NO: 90284 - protein, 495 aa, Pseudoalteromonas distincta
  misc_feature (1)..(495): tr|A0A5B0UJC0|A0A5B0UJC0_9GAMM Tryptophan 7-halogenase OS=Pseudoalteromonas distincta OX=77608 GN=EU511_06510 PE=4 SV=1
MTKTNAVKNVVIAGGGTAGWMAAAALAKLVGNNINITLVESDDIGTVGVGEATIPPIRTFHKLLGINEQAFMKATQASFKLGISFENWGDENTHYIHSFGATGKECWAGEFHHFWLQGKTLGINNPFGDYCYELQAAKAGKFAFNQQNPINYAYHMDATRYAQFLREFSEPLGVTRIEGKIQKVVKNTKTGHIESLILNNGEHINGDFFIDCTGFRGLLIEQALHTGYEDWSHLLPCNSAIAVQTKSTSETVLPLTRSIAHKSGWQWRIPLQNRVGNGLVYCSQYMDDEQAKALLLNKIEGEALTKPRIIKFKTGRRLKGWNKNCLALGLASGFVEPLESTSIHLIMSGIIRFMRLFPFNGITNHAIDEYNKQLKSEIENIRDFIVLHYKVTNRDDSEFWQHCSAMEVPKTLQHKIDLFKQTGRVFLDDGDIFRVDSWVQVMLGQGIEPNQHHLIASMMSDEELTRFLHGIKQQIEQRVSQLPSHHEFLKQYCPA

SEQ ID NO: 90285 - protein, 397 aa, Rhizobium leguminosarum
  misc_feature (1)..(397): tr|A0A2L1CRU2|A0A2L1CRU2_RHILV FAD-binding oxidoreducta se OS=Rhizobium leguminosarum bv. viciae OX=387 GN=E0H4 4_01345 PE=4 SV=1
MQASKSSYDVVIVGGAVVGSSTAYFLATNPDFNGSVLVIEKDWTYQRSATALSSSSIRHQFSNAINVKVSQFGTEFIRHFKENVIVDDDTPEIGFHEAGYLFLAEDDRGDQVLRRNHETQVSCGAEVTLLDPDGLGRRFPWLNLEGLTLGSTGERGEGWFDSVGLLQGFRKKARSLGVEYIEDEVVAINREGDRIVSVSTKSGQTIACGTMVNTSGTNGKKVAGMAGLDVPVEPRRRSLFVVDCRTPLEGKVGLTIDPTGVFFRPEGKFYLMGTYPKHDPEVDPNDFDVMHDEFDEEIWPILANRVPAFEAIKVVNSWAGHYDYCTLDHNVVLGPHTEVSNFLFANGFSGHGLQQSPAMGRGLSELIAYGGFKTLDLSPFGYERVAADRPFLEDAVI

SEQ ID NO: 90286 - protein, 504 aa, Caulobacter flavus
  misc_feature (1)..(504): tr|A0A2N5CRG4|A0A2N5CRG4_9CAUL Tryptophan halogenase OS =Caulobacter flavus OX=1679497 GN=C1707_07875 PE=4 SV=1
MADNRIGRIVIVGGGTAGWMSAAMLARALGPGVAISLVESEAIGTVGVGEASIPQLRNFNAFVGLDEDAFLRATEGTIKLGIEFVDWLRPGHRYMHAFGPVGRPLGTTPFHHYWLDACRRGTAGDDFWAWSANALAARAGRFGRTPPDPAQSGAEPLTWAYHFDAALYAHHLRAHAEARGVTRIEGRIVGVDQDGDTGFLRAVTLEGERRVEGELFVDCSGFRGLLIEEALRSGYEDWRAWLPMDSAWAVPSRDAAPPVPYTRAWARDAGWQWRIPLQHRTGNGHVFSSAWTDKDAAVRTLMDNLEGEALAEPRLLTFVTGRRKQSWNRNVVALGLAAGFMEPLESTSIHLVQSGLARLLALFPDKGFDPLLAGEFNRQTADEYARIRDFLVLHYKATEREDTPFWASRKAMEVPETLAERMALFASSGRVFSRDADLFKESSWVQVLLGQGVTPAAAHPMTAVAADGQVDGWLDDLARIAARTAACLPSHAAFLGRPETRLAG

SEQ ID NO: 90287 - protein, 509 aa, Caulobacter flavus
  misc_feature (1)..(509): tr|A0A2N5CN89|A0A2N5CN89_9CAUL Tryptophan halogenase OS =Caulobacter flavus OX=1679497 GN=C1707_10585 PE=4 SV=1
MANNLRKIVIVGGGSAGWITAAMLSHYLKDSPCEIELIESEQIGIIGVGESTIPPFLQLIRSLGISEKEFMQETQAAFKLAIRFENWRQKGEVYYHPFGLIGGLVDVHEFYQVWLRGKAEGHPSSLQDFAPASVMADRWKFMSPAMAPRTMLANANYAVHIDAALLAKFLRKFAEARGVKRTEGIVKDVATRPDGFIEKVILQDGREASGDLFIDCSGFRSLLNGKTLGTEFLDWSDVLLNDRAIAVQTANIQDPHPYTLAQAQDFGWRWRIPLQHRAGNGYVYCSQYCSDDEALATLMSQVEGEAVRDPWLVPFKTGMRKQLFNKNCVAIGLAGGFIEPLESTALHLIYRGVDYLLRFFPDRDCDATLAAEYNRRMQIDYEEIRDFIVLHYFTTKRDDTPFWRAYQQVTPPESLRERIELFKSSGVLRDGVDDMFRAPSWQSVMEGMGIRPKRYQQLVDTLPAGVVKGLLDKSAPMLSELVDTLPSHGDFLRQHCPAPMPEALLKRAG

SEQ ID NO: 90288 - protein, 538 aa, Burkholderia pseudomallei; identical to SEQ ID NO: 82926
  misc_feature (1)..(538): tr|A0A095MVK2|A0A095MVK2_BURPE Tryptophan 7-halogenase OS=Burkholderia pseudomallei OX=28450 GN=BOC42_32895 PE =4 SV=1

SEQ ID NO: 90289 - protein, 605 aa, Streptomyces albogriseolus
  misc_feature (1)..(605): tr|M1MEQ9|M1MEQ9_STRAO Amido transferase OS=Streptomyce s albogriseolus OX=1887 GN=thdD PE=4 SV=1
MCGIAGWVDFNRDLTGERSTVLAMTDTMALRGPDDTGIWLSPHAALGHRRLAVIDVEGGRQPMAADDVAVLTYSGEVYNFRELRVQLEARGHRFRTHSDTEVVLRGYLEWGEDLVDKLNGIYAFALWDVRREELLLIRDRMGVKPLFYYPLPGGGVLFGSEPKAILAHPQADRAVDADGLREIFTITQTPGLSLYKGMHEVRAGQVVKVRRQGLTKRQYWRLTAQEHTDDLDTTVRTVRELLEDIVERQLVSDVPLCSLLSGGLDSSALTALALKHGDTRSFAVDFAGYADHFQPDEMRGSADGPFVRDAVAHLRPDHTDITLDTTELTDPRLRTSVMDAWEYPQFSGDMNTSLYMLFRAIQGHSTVALSGESADEVFGGYAWFHLPKAVDSGTFPWLVFMMQKQRPEDLFDPELRKKLDVLAYERDRYSDALAEVPYLPMVSARERRMREVSYLHLTRFVNMLLDRKDRLSMAHGLEVRVPFCDHRLVEYVFNTPWAFKTFDGREKSLLRAAVSDLVPASILERRKSPYPATQDPAYGQALRGTLTDLVADGTAPVLPLLDGEAVRTLLKSPAEDTASTVTRISLEMVLDLNSWLESQELRVDV

SEQ ID NO: 90290 - protein, 531 aa, Streptomyces albogriseolus
  misc_feature (1)..(531): tr|A1E280|A1E280_STRAO Tryptophan 6-halogenase OS=Strep tomyces albogriseolus OX=1887 GN=thal PE=1 SV=1
MDNRIKTVVILGGGTAGWMTAAYLGKALQNTVKIVVLEAPTIPRIGVGEATVPNLQRAFFDYLGIPEEEWMRECNASYKMAVKFINWRTPGEGSPDPRTLDDGHTDTFHHPFGLLPSADQIPLSHYWAAKRLQGETDENFDEACFADTAIMNAKKAPRFLDMRRATNYAWHFDASKVAAFLRNFAVTKQAVEHVEDEMTEVLTDERGFITALRTKSGRILQGDLFVDCSGFRGLLINKAMEEPFIDMSDHLLCNSAVATAVPHDDEKNGVEPYTSSIAMEAGWTWKIPMLGRFGSGHVYSDHFATQDEATLAFSKLWGLDPDNTEFNHVRFRVGRNRRAWVRNCVSVGLASCFVEPLESSGIYFIYAAIHMLAKHFPDKTFDKVLVDRFNREIEEMFDDTRDFLQAHYYFSPRVDTPFWRANKELKLADSIKDKVETYRAGLPVNLPVTDEGTYYGNFEAEFRNFWTNGSYYCIFAGLGLMPRNPLPALAYKPQSIAEAELLFADVKRKGDTLVESLPSTYDLLRQLHGAS

SEQ ID NO: 90291 - protein, 514 aa, Caulobacterales bacterium; identical to SEQ ID NO: 83757
  misc_feature (1)..(514): tr|A0A1F8IG44|A0A1F8IG44_9PROT Tryptophan halogenase OS =Caulobacterales bacterium RIFCSPHIGHO2_12_FULL_68_13 O X=1797586 GN=A3E24_04595 PE=4 SV=1

SEQ ID NO: 90292 - protein, 543 aa, Shewanella sp.
  misc_feature (1)..(543): tr|A0A2M7HNU5|A0A2M7HNU5_9GAMM Tryptophan halogenase OS =Shewanella sp. CG12_big_fil_rev_8_21_14_0_65_47_15 OX= 1975537 GN=COW15_17040 PE=4 SV=1
MQQATHTAINKIVIVGGGTAGWITAALLAAEHNVDKGQLAHSPRLDITLIESPDVATIGVGEGTWPSMRNTLDKIGISETEFIRQCDASFKQGSRFIHWQHDDTEHTNPFGSNQYIHPFSLPHGHQELDLCPFWLPHSDKVSFAHAVSNQDALTQLGLAPKTIATPEYHFQNNYGYHLDAGKFSQLLMQHCTEKLGIKYIRDHVTQVHSHPNGDIESLATKEHGVILGDMFVDCSGTKSLLLGEHFNVPFLCQKAVLFNDSALAIQVPYAEENSPIASCTLSTAQPNGWIWDIGLPTRKGVGYVYSSAHCSDDEAEQTLRAYLANDTSTKPQSASSNAVDSRKQEYRKLNINPGYHAKCWQNNCIAIGMAAGFIEPLEASALALVEWTANTLATQLPTHRGVMDTIAQRVNERYERHWQQIIDFLKLHYVVSRREVDGYWRDHRDTASIPERLQQQLDLWRYQAPSSHDISYKEPLFPAASFQYVLYGMGFHTALPTHIKPSQQQVAQRLFSENQKKINALSQSLPNNRDLLNKVRQFGFSKI

SEQ ID NO: 90293 - protein, 445 aa, Calothrix sp.
  misc_feature (1)..(445): tr|A0A1Z4H135|A0A1Z4H135_9CYAN Tryptophan halogenase OS =Calothrix sp. NIES-2100 OX=1954172 GN=NIES2100_31720 P E=4 SV=1
MKIAVIGGGTAGYIAASHISKHFPQFDLYHIYDSNIPTIGVGEGTTPYFLEWLERITNLSYAELEKRCHVTRKFGISFENWGVEHEKFFHHFYPIGEQYSYHVSAREIVNLLQEYVCATQIDCQVTDVKSDGISVNIAFANHTNLEVDLAIDARGFPKTLDENYVKLSWIPTNAALIRQIPGANDNIIELKIGSDLLKYQSATRSIARPHGWIFTIPLTNRTSYGYIYNRNINSVSEIEADFDEFFDSEAITYAGQPKHLNFPNFTVRNCFDGALFKIGNSASFLEPLEATAIGCILKQVEAIGYWLLPAFAKLETREKLAEKDLKVFNQYFINYVYKMSLFVGWHYAMGSRFHTKFWEFAKANFYQEIENLENKKLLEEFYEVLESGSKSPHPIENFREFSLTVAKTEKNILSVLIEGIPKLFGQWTKPSFTEVGYGIGYFDHK

SEQ ID NO: 90294 - protein, 501 aa, Altererythrobacter xiamenensis
  misc_feature (1)..(501): tr|A0A1Y6FG44|A0A1Y6FG44_9SPHN Tryptophan halogenase OS =Altererythrobacter xiamenensis OX=1316679 GN=SAMN06297 468_2176 PE=4 SV=1
MAIDKIVIVGGGTAGWMAAAVLSRLKKGRELDVTLIESEAIGTVGVGEATIPPFVEFNQLLEIDEREMLSSVQGTFKLGIQFSNWGDVGESYIHPFGAYGYNMGGISFHHVWHQMREMGDKRPIQAFNVETMAAYFGRFARTEDFNRDDLPPVNYAYHLDASAYARFLRKYAETRGVVRQEGRIEDVQLDAESGFVNAVTLESGERFEGDLFIDCSGFRGLLIEQALETGYEDWTHWLPCNRAVALPCNRDDGSPPPPFTRATAHAAGWQWQVPLQHRNGNGHVYCDAYMSADEAHDILVANIAGKPTAEPNHLRFVTGRRKKFWNKNVVALGLSAGFMEPLESTSIHLINTGLNKLVAVLSLDGITQTQEDAFNRLTGKEYARIRDFLILHYNATRRDDSEFWNYCRTMSVPDTLTEKVELFKRNGQIFREEDELFTETSWAAVMMGQGIQMEGHNPVAETLDRETTLKELHEMEQSIRFAVNQMPGHGEYLTKYCPAPA

SEQ ID NO: 90295 - protein, 496 aa, Enterobacillus tribolii
  misc_feature (1)..(496): tr|A0A370Q3T4|A0A370Q3T4_9ENTR Tryptophan halogenase OS =Enterobacillus tribolii OX=1487935 GN=C8D90_1208 PE=4 SV=1
MLSLKGIKRIVVLGGGTAGWYTALSLRKIFSDNVEIRVVESTELGIVGVGEGGLLNFQSALRSIDIDLNEFVRETNATFKWGFCYEGWRTGEKDDKYYHPFASSTGAASQWENLGHYPLFSAMINHSIPLTSYLRGFDLIVNNASQAEAALALSSQSVDIINSFHFDSYKIAKYFKKVALERNIIHQDVIVEHVETDERGHVTALITQENEKIELDFLVDATGLARKVIDKVVPSEWFSFKDHLLLDRAIPFYMPHPLENPYLVSRAIAMKSGWMWQIPLQNRVGAGYVYSSKHISDEDALQEIKDYLGFDIEPQQNVIKFEPGCYRQIWVKNVLTVGLASGFVEPLEATSIGQMIETVRNFIRILVTSQGVVSDNAVREFNESNFTSWMEILDFLRMHYDCPRRDTEFWQDVAKTPLTENYRAFKECMQARAPRLMDVESYLLYGRRGMFHIVNWMFVAVGLGLIPHTAVVGDLMALPPESKQRAQNFLDSLKKD

SEQ ID NO: 90296 - protein, 504 aa, Altererythrobacter xiamenensis
  misc_feature (1)..(504): tr|A0A1Y6ELI6|A0A1Y6ELI6_9SPHN Tryptophan halogenase OS =Altererythrobacter xiamenensis OX=1316679 GN=SAMN06297 468_0861 PE=4 SV=1
MKGDSNSDDRGDRLRKIVIVGGGSAGWMAAAALSSVTSTPIVLVESDEIGTVGVGEATIPQIRTFNRALAIDEREFVRATNATFKLGIRFLGWNGEGSDYIHAFGQVGQPTAVMPFHQLWLRGRALGFAGAFGEYALNDVAARAGKMAMPGRGMPAQGANMPWAYHFDASLYAQFLRKRAEAKGVKRIEGKIVGVTCDHEEPAIESVTLASGQVIEGDFFLDCTGFRGLLISQLEGSDFCDWSHWLPCDSAQAAPCRSDGEISPFTSSTAHSAGWQWRIPLQHRVGNGVVYCSAHMSDDEARAHLLANIDSAPDAEPRQIRFTTGTRRNHWIGNCMAVGLSAGFLEPLESTSIHLIQYSIARLMAMLPRRGTDPAIAASFNHEVSRQWLRVRDFLILHYWANGRVGEPFWDACRTMELPETLVPKIEQFKATGHFIREEEELFTEVGWSQVFLGHGIIPESWHPLADEMPEAELRQFLDRMGAGYREMVSRMPTQAEFIGALLR

SEQ ID NO: 90297 - protein, 415 aa, Pseudomonas lactis
  misc_feature (1)..(415): tr|I4KAJ8|I4KAJ8_9PSED Putative tryptophan halogenase O S=Pseudomonas lactis OX=1615674 GN=PflSS101_0449 PE=4 S V=1
MPTVEMERRQVVVIGAGPSGAIAAALLKRKGHDVLIIEREHFPRFSIGESLLSHCIDFIEEAGMLDAVQAAGFQVKTGAAFAWGERYSAFDFSDTFSNGKPTTFQVQRGEFDKLLADQAALQGVEIRYGQTIVGVDFSAESRYLHVRRQNGSEYHLKARFVLDASGYGRVLPRLLDLEAPSNFPLRQAVFTHVEDRIEHPGFDRSKILVTTHPTQRDIWFWTIPFSNGRCSVGVVAAKEHFEGAGSDLDACLHGFIEQTPSLSGVLQNAVWDTPARTIGGYSANVKTLHGPGFALLGNAAEFLDPVFSSGVTIAMRSASMAAGVLHRQLSGETVDWQAEFAEPLKRGVDTFRCYVEGWYAGTFQDVIFHPGSSPEIRRMISSILAGYAWDERNPFVSEPKRRLRMLSDICASEAV

SEQ ID NO: 90298 - protein, 500 aa, Altererythrobacter xiamenensis
  misc_feature (1)..(500): tr|A0A1Y6F4F8|A0A1Y6F4F8_9SPHN Tryptophan halogenase OS =Altererythrobacter xiamenensis OX=1316679 GN=SAMN06297 468_2022 PE=4 SV=1
MGEQGIRKLVIVGGGTAGWIAAAAFSRLIGPRLSIELVESETIGTVGVGEATIPQIIRLNTILGFDEADFVRQTNGTFKLGIEFVDWSQIGSRYLHTFGDAGINLGNVHFHHYWRRQAMQGGDKSLWHYSLHQLAAQQGKFAHLDRVGKTSMTGLAYAYHFDAGLYARYLRHFSETNGVTRTEGIVQSVERDGESGDIAAITLDRGAKIEGDFFIDCTGFRSLLLGSELGVEYRDWSKWLPCNRAQAVPSERLPDLPPFTRATARTAGWQWRIPLQHRTGNGHVYCSEFLSDDEAATILLDNLDTPATGDPRPIRFTTGRREAFWSHNCVAIGLSSGFLEPLESTSIHLIQSNVGRLIELFPRERIRDADRDEYNRRTVAEFEQIRDFLILHYHQTDREDSEFWRYCKHMDVPEPLRHKMELFAASGRIGRDADDLFRDASWAQVMLGQGIMPQDYNPMADKLSDEQLGSFLGDVRQIIERAVAGLPSHADYIEKHCRAS

SEQ ID NO: 90299 - protein, 519 aa, Novosphingobium sp.
  misc_feature (1)..(519): tr|A0A0Q4C8I6|A0A0Q4C8I6_9SPHN Tryptophan halogenase OS =Novosphingobium sp. Leaf2 OX=1735670 GN=ASE49_14085 PE =4 SV=1
MTTDTPSSCRVVILGGGTAGWLAAAYLSRTLGLSDITLVESSEIGIVGVGEGTFPTIRATLAGLGISEAEFLVRADATFKQGVLFEGWATGTDSYFHPFNLPIGGEDEALLPHWLADTSAQRPAWADAVTVQEQAIRAGRAPKRPEDPDFSGPMNYAYHFDAARFADYLRDISIAAGVVRIEGTVATVQRQADGDIGALDLADGRTVAGDFFLDCSGFRALLIGQTLGADFTSCSDSLFNDRALAMQVPYAQPGAPVRPYTLATAHEAGWTWDIGLTTRRGIGYVYSSRHCSDDEAEATLRRYVGSQGDALSPRQLRFETGYRQRQWIGNCVAVGLSAGFFEPLESTGIMLIEAALRMVGDFLAPNLLAPGNRDARNGAARSFNRLMAARFARIVHFLKLHYCITRRSDTAYWRDNADPATIPEPLRDMLAQWRHRPPSRFDFVVDLETFLPPSYHYILYGMGFETSMPGARHPGAAQAREAFARVRAAHAGARSGLPDHRALLNHYHARTAVPSSKVS

SEQ ID NO: 90300 - protein, 507 aa, Shewanella sp.
  misc_feature (1)..(507): tr|A0A2M7HT37|A0A2M7HT37_9GAMM Tryptophan 7-halogenase OS=Shewanella sp. CG12_big_fil_rev_8_21_14_0_65_47_15 O X=1975537 GN=COW15_10150 PE=4 SV=1
MTIRKIAIIGGGTSGWLAANHLGRVLKDNPELSITLIESPDIPIIGVGEGTVPAIRRSLQSFGISESEFIRSCDVTFKQSIKFVNWLDKSRHGKGNFYHHLFDMPSSLGEDLTPSWLMDKSEHFAEYVSPQHAVCEANKAPKLITTPEYSGVLGYAYHLNAAKFAKLLAKNAVEKFKVEHISTTVRDVNLTADSAIASLLTDNGVLSFDFYIDCSGFESILLAKKLEVPFINKSHQLFIDTALVAQVPTQQSDIIPPFTLATAHQAGWIWDIALTQRRGTGFVYSSQHMEHAEAEAKFDRYLGGKLADVVHRKIPMTVGYRQQFWAKNCVALGLAQGFLEPIEATSILLTDFSARLLAERFPTDKEDISYLAKRFNDTVSQAWERVVEFAKLHYCLSDRADSAFWRDNRADETIPDLLKQRLTLWKQFSPISEDFPSKFEVFNMDNYLYVLYGMKYPTKQPHTNPASLKNAKLHLNELRNITLRMVDGLPEHRELLEKISLYGLQRI

SEQ ID NO: 90301 - protein, 504 aa, Pseudonocardiales bacterium
  misc_feature (1)..(504): tr|A0A2W6DBG0|A0A2W6DBG0_9PSEU Tryptophan halogenase OS =Pseudonocardiales bacterium OX=2201155 GN=DLM60_17645 PE=4 SV=1
MSISQVENVDVVVVGGGPAGATVSTLVARQGHRVLLVEKQKFPRYQIGESLLPSTIHGVCRILGVADELERAGFKRKRGGTFKWGASPEPWEFSFAVSPRLAGPTSFAYQVERSKFDSILLDNARRSGVDVREGHAVSEVLEENGRVVGVRYEDDDGQSREARARYVVDASGNGSRIHRVVGGKRNYSDFFRNIAVFGYFEGGGRLPAPKDGNIFSATFDEGWIWYIPLADNLTSVGAVVGRENAKEIQGDAAGAWRRMLKSCPEIHALLDGVDQVTQGQYAEVRVRKDYSYWKDRFWSPGMILVGDAACFVDPVFSSGVHLATYSALLAARSINSCLDGTLTEDRGFGEFEARYRREYGLFYEFLVSFYDMHHDQQSYFWEAKKITNCRGNELRAFVELVGGIVSGDASLVSSDAAVARLTTASAEFETAVQSLNDSGDLRNPIFEAKSIGAVLREGANLQGRAMFGEPIEPEAPLFTGGLVASKDGMHWTEPVGQRPAHRAR

SEQ ID NO: 90302 - protein, 505 aa, Altererythrobacter xiamenensis
  misc_feature (1)..(505): tr|A0A1Y6F8A9|A0A1Y6F8A9_9SPHN Tryptophan halogenase OS =Altererythrobacter xiamenensis OX=1316679 GN=SAMN06297 468_2025 PE=4 SV=1
MASQFAPIRQICIVGGGSAGWMTAAALSDALGPRVDITLIESEMIGTVGVGEATIPPIRYFNQRLGIDEATFIRETAGSFKLGIEFVDWRRLGHSYFHPFGQHGAEFDQVPFYHYWMRESLAGRIDGPIDDFSMAWAMSKAGKFAPPLPDRRQIQSTYDYAYHFDATLYARFLRGYAEQRGVTRVEGKVVGVTLDSESGAIASVTLEDGRAFEAELFIDCSGFRGLLIEDALKAGYDNWQHWLPCDRAVAVPSARGETISPYTRSTAKAAGWQWRIPLQHRTGNGYVHCTEYVSEDEATETLVSSIVGELLAEPRTLRFVTGKRRAFWAKNCVAIGLSAGFMEPLESTSLHLIQYGILRLLALFPDSEMSPLLAEEYNRQTAAEYERIRDFLILHYKATERDDSELWRYCAAMDIPDSLQYKIDHFRNYGMLVSDERELFNNPSWIAVYLGQGIEPRRAPAIAKLREEVPVADRFAAISKAMQDAVAQMPAHADFLAQHCKSPHA

SEQ ID NO: 90303 - protein, 496 aa, Shewanella sp.
  misc_feature (1)..(496): tr|A0A2M7HQA1|A0A2M7HQA1_9GAMM Tryptophan halogenase OS =Shewanella sp. CG12_big_fil_rev_8_21_14_0_65_47_15 OX= 1975537 GN=COW15_15405 PE=4 SV=1
MNYIKNIIIVGGGTSGWMTAAMLAKLFKSTLNITLIESEDIGTIGVGEATIPPLQIFNNVLGINEADFINATQATFKLGIQFENWGKPGEAYMHAFGHVGKDIGFTQFHHYWLSTSPKEVNSFWDYSVNYQAAKHNKFQVLQHIPNSPLAGLTHAYHFDATLYAQFLRRFSEQLGVKRIEGKVISVDLAPCGKIDTVKLQTGQVIAADFFVDCSGFAALLIEKALKVDFDSYQHWLPCDRAYAVPCEKTTTITPYTRSIAHDVGWQWRIPLQHRTGNGLVYCSRYVSDDAAKQLLLDNLDGKPLAEPKKINFTTGRRLKQWHKNCVAIGLSSGFLEPLESTSLHLVQSAIIRLSKLFPHQGIAQANVDEFNHQSKLEFEQIRDFIILHYHLNQRVNSQENSLWQQCQTMEIPDSLQQKIELFRETGAVFRHQEELFTEAAWVQVMLGQGIMPQDFNPLSRTISASDLAAFLQNMRTIIDNAVGKMPTHNQYLAHLG

SEQ ID NO: 90304 - protein, 498 aa, Acinetobacter wuhouensis; identical to SEQ ID NO: 88386
  misc_feature (1)..(498): tr|A0A3G2SZT5|A0A3G2SZT5_9GAMM Tryptophan 7-halogenase OS=Acinetobacter wuhouensis OX=1879050 GN=CDG68_06745 P E=4 SV=1

SEQ ID NO: 90305 - protein, 406 aa, Parvibaculum lavamentivorans
  misc_feature (1)..(406): tr|A7HT83|A7HT83_PARL1 Tryptophan halogenase OS=Parviba culum lavamentivorans (strain DS-1 / DSM 13023 / NCIMB 13966) OX=402881 GN=Plav_1497 PE=4 SV=1
MNPDVVIIGAGPAGSVAAAMLAGAGFSVEVLERAHFPRFSIGESLLPQAMEWLAEADLLRDVVEAGFQHKNGAMFRHGDREESFDFRMKSSDGWGTTYQVRRDKFDDLLAKGAVRKGAKVSFGQTVIAMRPDPVAPSLTVRDEEGNEREITARFVLDASGFGRVLARLLDLESPAGFPDRMSIFTHVEDNIPPQAYDRNKILITVNPRNSEIWYWMIPLADGLCSMGVVGKPEHLAPYGSTREEQLASLVAESGLMGELLVNARRVRDVGEISGYAARVSSLTGPGYALLGNAGEFLDPVFSSGVTIALKSASLATHALVRQLKGETPDWDKEFAQPLARGVETFRAYVSGWYDGSLQKIIFSQPADANQIKKMITSVLAGYAWDEANPFVREPGKYLKMVEELCG

SEQ ID NO: 90306 - protein, 503 aa, Shewanella sp.
  misc_feature (1)..(503): tr|A0A2K8ZJF7|A0A2K8ZJF7_9GAMM Tryptophan halogenase OS =Shewanella sp. Pdp11 OX=2059264 GN=AYJ58_08475 PE=4 SV =1
MTTAIKRVVIAGGGTAGWMAAAALTKLMGKHLEIVLVESDEIGTVGVGEATIPTLHIFHRLLGLKEQEVMAATNATFKLGISFENWQDINKNYLHSFGFLGKDCWACGFQHFWLKGKQLGMVSEIGDYCAEHLAARQGRFAVLPNQDYNHAYHMDASLYAKYLRKMAEQHGIHRIEGKIKQVLQHHDSGNIKALVLENDETIEGDLFIDCTGFRALLIEQTLNTGFEDWSHYLPCDSAIAVQTQSVGAPIPYTRSIARESGWQWRIPLQNRTGNGLVFCSKFISDEDATELLLANLEGEPLNKPRIIKFKTGTRRLHWHKNCVAVGLSGGFLEPLESTSIHLIQRSIIRLMQLFPSAGIVQSDIDEFNQQTKLEMDNIRDFIILHYKATEREDSRFWRYCKNMDIPASLKHRIEMFADSGKVYKYGSELFGESSWIQVMMGQGIMPKHYHPIVDVMEEPELEAFLNNIKSTVKRKVESLPAHLDFIQHYCPAEVLTNTKPMAM

SEQ ID NO: 90307 - protein, 503 aa, Shewanella sp.
  misc_feature (1)..(503): tr|A0A2M7HNV1|A0A2M7HNV1_9GAMM Tryptophan halogenase OS =Shewanella sp. CG12_big_fil_rev_8_21_14_0_65_47_15 OX= 1975537 GN=COW15_17025 PE=4 SV=1
MTTAIKRVVIAGGGTAGWMAAAALTKLMGKHLEIVLVESDEIGTVGVGEATIPTLHIFHRLLGLKEQEVMAATNATFKLGISFENWQDTNKNYLHSFGFLGKDCWACGFQHFWLKGKQLGIVSDIGDYCAEHLAARQGRFAVLPNQDYNHAYHMDASLYAKYLRKMAEQHGIHRIEGKIKQVLQHHDSGNIKALVLENDETIEGDLFIDCTGFRALLIEQTLNTGFEDWSHYLPCDSAIAVQTQSVGAPIPYTRSIARESGWQWRIPLQNRTGNGLVFCSKFISDEDATELLLANLEGEPLNKPRVIKFKTGTRRLHWHKNCVAVGLSGGFLEPLESTSIHLIQRSIIRLMQLFPSAGIMQSDIDEFNQQTKLEMDNIRDFIILHYKATEREDSRFWRYCKNMDIPASLKHRIEMFADSGKVYKYGSELFGESSWIQVMMGQGIMPKHYHPIVDVMEEPELEAFLNNIKSTVKRKVESLPAHLDFIQHYCPAEVLTNTKPMAM

SEQ ID NO: 90308 - protein, 495 aa, Calothrix sp.
  misc_feature (1)..(495): tr|A0A1Z4GVL5|A0A1Z4GVL5_9CYAN Tryptophan halogenase OS =Calothrix sp. NIES-2100 OX=1954172 GN=NIES2100_12410 P E=4 SV=1
MNLNIKRVAIVGGSSAGLLSAVTLKHFFPQLEILLIYSRKHAAIGVGESTTAWFPQFLHEHLNISQEEFYKSIWPVWKLGIKFEWGVPDISHFNYTFDRQFRYDSKSLSKTPGFYCMHDMRQASRYSILMDRQHSPLLHDGQGNIKILADGFGYHIDVYEFINYLSTKASSLGVDIQEIEVLDAKLDEQGNIQHLCCEDDLKIEADLFIDCSGFKSQLLRGVLKSEYISFSDRLFCDSAIVGNWKRQTPIFPFTTATTMNSGWRWRIDLRERVSFGYVYSSSFCNQDEAIQEYLSLTPYATDDLRKISFKSGRYRRFWVNNVVAIGNASGFVEPLESTGQHMIVETIWRVVLALQDSNLRPSPKLIDATNQYIADLWDEICDFLTLHFKFNRKLDTPFWKYCQEKTDLGSMQNLVDLYQDSGVCRAIAHLIPKSSIFEIDGYLTMLCGQQLPVKHLKPLTERESSEWLQYRQILHKNLEGSLSPQEAFHILENIW

SEQ ID NO: 90309 - protein, 501 aa, Shewanella sp.
  misc_feature (1)..(501): tr|A0A2K9A833|A0A2K9A833_9GAMM Tryptophan halogenase OS =Shewanella sp. Pdp11 OX=2059264 GN=AYJ58_09790 PE=4 SV =1
MKVKQAIRKIIILGGGTAGWMAAAALANNPVFAAIELCLVESDNIGTIGVGEGSTPHLKRFMDNLGISEKDWMEPCHASYKTGIDFINWNGDGQQYFHPFYFQMDVKPAEVFFINANARRRGHGSAVRPDAFFSSGVLAKHNLSPKPNKALPYTNEYGYHFDATELANYLKDYACQRGVRQIIADVVEVSTTQHQQIETLILANGERLSADFFIDASGFSAKLIHKALGVPFQSFADELLNDSAVTVPVLMDSIQTQAQQAKYHTRATALSAGWLWQIPLTNRLGNGYVYSSRHLSANAAAKELLHSVNLPESTQVRFLKMRVGVSDKAWHNNVLAIGLAQSFIEPLEATSIMMTQFTLERFMSLFERYQLNKQAETLSRQTLNQAVMQLVLGIKDYIQAHYVTSQRSEPYWLAARKVTISQRLTQLLQAWYQGEDFDLLLYQYDQQLAYFRPSWYALLAGMDYRDPKLKRPFEPISAEITAQAIRYSQTLVEQYFQPKHP

SEQ ID NO: 90310 - protein, 513 aa, Sphingosinicella sp.
  misc_feature (1)..(513): tr|A0A4V0YI23|A0A4V0YI23_9SPHN Tryptophan 7-halogenase OS=Sphingosinicella sp. BN140058 OX=1892855 GN=ETR14_09 525 PE=4 SV=1
MDPIRSIIVVGGGTAGWMAAAALSKQLENSPTSITLVESPEIGTIGVGEATIPPIIQMNQLLGLDEDEFVRETRATFKLGIEFENWGAIGERYMHPFGRYGGDIGTLDFHHYWRRLRALDPAAAGDIGDYSLPIMAARRGKFQRPEPNPRNVLSNIAYAFHFDAGLYAEYLRRQAEARGVVRHARRITDVALAGNGNVASVLLDGGERLAADFFIDCSGFRGLLIEGALGTGYEDWSHWLPCDRAVAVPSERAGPPPPYTRSTAQAGGWQWRIPLQHRTGNGYVYSSRCLSDDEAAAALLAGLDGAPLGDPRPLRFTTGMRRKFWNRNVLALGLAAGFMEPLESTSIHLVQAGLSKLFNLFPDRGFAEADIDFYNRSFREDWERIRDFLILHYHATRRDDSALWNHVRTMEIPGTLKAKLEVFASRGRIFRASDELFAESSWLAVLEGQGLRPTRYDPLADAMPEQVLRSKLSGLRAVIARGADAMPRHSQFIADHCAYAGPKASGTAATMVG

SEQ ID NO: 90311 - protein, 507 aa, Sphingomonas sp.
  misc_feature (1)..(507): tr|A0A4P6XC77|A0A4P6XC77_9SPHN Tryptophan 7-halogenase OS=Sphingomonas sp. AAP5 OX=1523415 GN=E2E30_05230 PE=4 SV=1
MDTAISKVVIVGGGTAGWLAACRIAAAARPLAAHPITVTLVESPDVATIGVGEGTWPTMRATLERIGIGEAEFLLACDASFKHGSRFHGWATGAADDVYFHPFTPPLEADARALVAAWQAEAAGAAFADVVTPQSQVAGQCLAPRQRSMPDYAGALNYGYHLDAGKLAALLMRHATERLGVRHVRDHVIGVDRTETGEVVAVNTRDTDAVTGDLFLDCTGHAALLVGDVPFIDRSDVLFNDRALAVQVPVAADSPIAAQTDATAHAAGWIWDIGLPTRRGVGCVYSSAHMSDDAALETLSAYLGSAEPITPRRLTFRSGHRDRFWTGNCLAIGLSAGFLEPLEASAIVTIELALDALLDDWPTHATLPLTAARFNTLFRYRWDRIVEFLKLHYVLSRREGRYWQDHRDPASIPPRLAELLALWQHRPPTRADLPMVDELFPAASYQYILYGMGARVPDPGPLRGGPLPSFGSIAQRTRGMVATLPPIRAYLDACRAASQPIAMEHMN

SEQ ID NO: 90312 - protein, 314 aa, Streptomyces sp.; identical to SEQ ID NO: 84962
  misc_feature (1)..(314): tr|A0A3D9JHU9|A0A3D9JHU9_9ACTN Tryptophan halogenase OS =Streptomyces sp. 67 OX=1827603 GN=CLW07_7494 PE=4 SV=1

SEQ ID NO: 90313 - protein, 505 aa, Sphingosinicella sp.
  misc_feature (1)..(505): tr|A0A4P6FMU3|A0A4P6FMU3_9SPHN Tryptophan 7-halogenase OS=Sphingosinicella sp. BN140058 OX=1892855 GN=ETR14_16 040 PE=4 SV=1
MNARQPIRDVVIVGGGTAGWMTAAAAARFLAGGGKRRIRLIESEEIGTVGVGEGTIPPMIEFNQLLGIPEADFLAATKATYKLGIDFVGWGAEGERYFHPFGKLGLNLDGIDFHQVWLKYRDHPAIGPISDYSIAALAARDHRFAHPDKSGRSPLANLGYAYHLDAGLYAAMLRRYAERGGVERIEGRITTVDRDPETGNVAAVVLESGLRIEGELFIDCSGFRSLLLGQTLGVEFEDWSHWLPCDRAIAVPSARSEPITPFTRAIAHKAGWQWRIPLQHRTGNGHVYASAHIDDGEAEEILVANLDTQPIGAFNRLRFKAGRRVKSWEGNVVAIGLSSGFLEPLESTSIYLIQYGIQRLFGLFPDSRFSASERTEYNRFMADAYELVRDFIILHYQATRRPEPFWQEVRSVEMPASLRRKIDLFADKGRIFRYSDELFELPSWVAVMLGQGIVPAGHDPLADSLPDDQVIPAIAELRRGYARIAQGLPRHADFISQALAAAKTG

SEQ ID NO: 90314 - protein, 499 aa, Shewanella sp.
  misc_feature (1)..(499): tr|A0A2K9A9H5|A0A2K9A9H5_9GAMM Tryptophan halogenase OS =Shewanella sp. Pdp11 OX=2059264 GN=AYJ58_12420 PE=4 SV =1
MNKIRDIVIVGGGSSGWMTAAMLARLFKSILNITLIESEDIGTVGVGEATIPPLQIFNNVLGISEADFINATQATFKLGIQFENWGKPNETYMHAFGNVGKDIGFTQFHHYWLSTSPKEVNSFWDYSVNYQAAKHNKFQVLQQIPNSPLAGLTHAYHFDAALYAQFLRRFSEQLGVKRIEGQITAVELTPNGDIESVTLGSGKTVTADFFIDCSGFAALLIEKALKVGFDSYQHWLPCDSAYAVPCEKTAAITPYTRSIAHDAGWQWRIPLQHRTGNGLVYCSRYISDDAAKQLLLNHLDGKPLAEPKKINFKTGRRIKQWHKNCVAIGLSSGFLEPLESTSLHLVQSVIIRLSKLFPHQGIAQANVDEFNRQSQLEFEQIRDFIILHYHLNQREDAKENGFWYQCRTMLLPESLQQKIALFRATGTVFRHQDELFTEAAWIQVMLGQGIRPQDFNPLAATIQPQALSEFLLNMRTIIDNTVTKLPSHDQYLAHISTHK

SEQ ID NO: 90315 - protein, 500 aa, Sphingosinicella sp.
  misc_feature (1)..(500): tr|A0A4P6FST0|A0A4P6FST0_9SPHN Tryptophan 7-halogenase OS=Sphingosinicella sp. BN140058 OX=1892855 GN=ETR14_13 845 PE=4 SV=1
MASHALRRILIVGGGSAGWMTAALFAKLFRGLYEIRLIESEEIGTIGVGEATIPAIKTYNDLLGIDEREFVRETRGTFKLGIQFNDWLRPGSSYIHGFGVIGQDLGWLRCHQYWLKAQTLGKASDLAAYSINTAAALRNRFLPAQAKMKDSPLGHIAYAYHFDAGLYARFLRARAEAGGVVRTEGKVVDVSLRAGDGFIDTVTLASGERIAADLFIDCSGFRGLLIEQALATGYEDWTHWLPCDRAIAIPCARSEDFTPYTRASVRPAGWQWRIPLQHRTGNGHVYASRYMEEAEAERILLATLDGEPLAEPNRLRFVTGKRRQTWNRNCVALGLAAGFMEPLESTSLYLVQSAAIRLARLFPDSRFDPATIAEFNRQTDFEYQRTRDFIILHYKATERDDTPFWRHVRDMEVPETLRRKIDLFAANGRIFREDDELFAEESWIQVFLGQGLIPRRHDPLVDLQDEADILRYLADVEAVIAKCVNLMPSHAAFVDKFAAA

SEQ ID NO: 90316 - protein, 547 aa, Planctomyces sp.
  misc_feature (1)..(547): tr|A0A2E8EZM4|A0A2E8EZM4_9PLAN Tryptophan halogenase OS =Planctomyces sp. OX=37635 GN=CMJ45_06105 PE=4 SV=1
MTSHDQSPDVVVIGGGPAGSTAATMLARQGVSVLLLERETFPREHVGESLLPASIPVLEELGVLPAVEAAGFLTKWGATMVWGSDPSPWSWYFRETNQRNPHSYQVWRPQFDQLLLENSRAHGVDVREGHRVVEVLWDDGKTTGVRYQADSGETGTVQCRYVVDASGQTGLLARGLNLRQWDPFFQNLAVYGYFSGAQPLPEPDETNIFIEAYPHGWLWSIPLHTGWTSVGAVVDSATSQDEISNGNPERFLEAQIIQAPHTSRMLRNAHLEIGPFIVKDWSYVCERVAGDGYVLAGDAACFVDPLFSSGVHLALMSGILSAAYVTSALKDPEIAEPAAAAYHELYLKEYGHFREMARLFYSSNLTSDSYFWEARRLLEDAGNFTPRQAFIQAVAGQPPRGYERAVLEQGQAPLEFASSVRQVESERERRRVRWEAACSGTDTGDPILAAVPKLAPETQIQRKPILGAGEFVWGTVLTTVSQPEGTPCSGLISALVSRIDGTRTVAHLLDEVGSLGEPSQAAQIRQTALAALGILYVDGTVEELGGL

SEQ ID NO: 90317 - protein, 509 aa, Caulobacterales bacterium; identical to SEQ ID NO: 85061
  misc_feature (1)..(509): tr|A0A1F8IGR1|A0A1F8IGR1_9PROT Tryptophan halogenase OS =Caulobacterales bacterium RIFCSPHIGHO2_12_FULL_68_13 O X=1797586 GN=A3E24_04590 PE=4 SV=1

SEQ ID NO: 90318 - protein, 509 aa, Shewanella sp.
  misc_feature (1)..(509): tr|A0A2K9A3N3|A0A2K9A3N3_9GAMM Tryptophan halogenase OS =Shewanella sp. Pdp11 OX=2059264 GN=AYJ58_08290 PE=4 SV =1
MKIKRVAIIGGGTAGWLAANHLGAELCHDPEIEITLIESLDVPTIGVGEGSVPYLAKGLKRFGISEAELLLACDATFKQGIKFVNWLDKNVHGDNHYYHAFDAPYPAGIDVSSYWVSHASQRPFDDVGIQARICDLGLSPKLKGSGDYDGALSYAYHFNALKFAGLLAKNAQKKFNVKHQFATIVGVEQDQFGLISHLITADNSSLAFDFYVDCSGFSSILIDKALKVPFESKSSELLTDTVLVQQVPLNAKENINPYTTATAHKAGWIWDIPLTTRRGTGFVYSSRHMSDEEALTLYADYLQVEKAQFKPRKIPMEIGYRKEFWHKNCVALGLAQGFVEPLEATSILVSDFSAELLARHFPRTIEDISVSTSYYNSVITYVWERVVDFIKLHYCISDRKDSSFWLDNQKEDTVSFELKQRLARFKLRPPHQSDFFSRFDLFDHKNFLYVLYGMKFKTNHSALSQQEITHCEKLFSDNDLLVGRAETLLLNHRDWLEGLMRAFEAKNLK

SEQ ID NO: 90319 - protein, 507 aa, Sphingomonas gei
  misc_feature (1)..(507): tr|A0A4S1XGA2|A0A4S1XGA2_9SPHN Tryptophan 7-halogenase OS=Sphingomonas gei OX=1395960 GN=E5A73_07870 PE=4 SV=1
MPRDRGILVVGGGTAGWLAAAYLARFFAGRIPITLLESPDIGIIGVGEGAFPTIRATLQFLGIDEARFIREASATFKQGIRFDDWLHAPRDGTRHQYLHPFEAPFHTESTSLIPYWLLQDEATRASFAEAVTIQNRVAQACCAPKQGREGAYAGPLNYAYHFDARRLAQTLEARAVDLGVRHLKGLLTGVDLAEDGSIARIRTAEHGALEADLYLDCSGFRAELIGKALGVPFKSAKHQLFTDRALACKIPYADPDAPIESLTIATAHEAGWTWDISLESARGIGCVYSSAHMRDEDAAAILRAYIGHDDYKARIIPFEPGYRETQWAKNCVAVGLSGGFLEPLESTGVVLIEAAVAMIADLFPHSGPVDAPAARFNQLMAARYENIINFLKLHYCLSMRDEPFWRDNADPASIPEALQQLLRQWRHRPPSRFDFTLDVESFAFFNYQYILYGMGFRTDLSAARADFPDAEAAAKLFARIRSFGERAVEDLPTHRALIREINAGASL

SEQ ID NO: 90320 - protein, 514 aa, Stenotrophomonas sp.
  misc_feature (1)..(514): tr|A0A2G7S1V1|A0A2G7S1V1_9GAMM Tryptophan halogenase OS =Stenotrophomonas sp. LMG 10879 OX=487706 GN=CR919_0132 0 PE=4 SV=1
MGSIALNAADTTRGRIRRVVIAGGGTAGWLAGCALAHQFRQQLDITLVESEQIGTVGVGESTVPPIRTFHRFLQIDEQEFMRAVAGTFKLSISFENWRRPGERFIHPFGTIGQGTWATPFHHFWLDSLRRGMPSELGDFCLESVASQADRFSLQTQPQVNYAYHFDAGLYARFLRGKAEANGLRRVEGKIREVRQHADDGSVASLLLEDGQVIEGDLFIDCTGFRGLLTEQTLHTGYEDWNEWLPSDRAVAVQTDAATPPVPYTRAIAHEAGWRWHIALQHRVGCGLVFSSRHMSDDEAQAKLLRDVDGRPLRDPWLVPFRSGRRLQAWNRNVVALGLASGFIEPLESTSIHLTISAVVRLIQLFPSEGITPSLVALYNDVSRQEMEHVRDFIILHYHANQRDEPMWKACREMALPESLQVRLRAWRERAHAWQDPGELFRVDSWTSVLMGQGILPGPPHPLARAISDADLRTLLHRLRQPVQEAVAKMPSQADFIERYCRAAPGAWQTGRAVA

SEQ ID NO: 90321 - protein, 484 aa, Caulobacterales bacterium
  misc_feature (1)..(484): tr|A0A1F8IFI9|A0A1F8IFI9_9PROT Tryptophan halogenase OS =Caulobacterales bacterium RIFCSPHIGHO2_12_FULL_68_13 O X=1797586 GN=A3E24_00930 PE=4 SV=1
MTAAALARLVAPSGVQITLVESEAIGTVGVGESTLPHIRAFNERLGIDEAAFMKATRATFKLGIQFENWGQIGGSYIHPFGDYGAPGGEAPFHHYWLRGRELGDVGPIDDYSLPVVAAREGRFAPPSDDPRSLLSTYRYAYQFDATLYARFLRGMAETEGVRRIEGRIQNVAQDGESGAITKVTLDDGRQIEGDLFVDCSGFRALLIEQTLKAGFTDWSHWLPCDRAVALPCESDQPTVPYTRATALEAGWQFRIPLQHRVGNGYVYSSAFIDDAAALDRLVGRLEGKPLKAPNVLKFTAGQRTRNWAANCVSVGLSSGFIEPLESTSIYLIQIAITKLIELWPTAVIDPATEAEFNRQMDLEYVRIRDFIILHYCATARNDTPFWDYVRTMPLPDTLSEKIELFRARGIVQDYREGLFLHPSWVAVYLGQDILPRRHHPLVDAVSATQLMSSLERLRRMVREASYKLPSQDDYIARYCAHLPL

SEQ ID NO: 90322 - protein, 502 aa, Sphingomonas sp.
  misc_feature (1)..(502): tr|A0A0Q4GBF5|A0A0Q4GBF5_9SPHN Tryptophan halogenase OS =Sphingomonas sp. Leaf20 OX=1735685 GN=ASE72_16440 PE=4 SV=1
MKRVQRLVILGGGTAGWMTAAAMSATFGDLVKISILESDAIGTIGVGEATIPTIHWFNQLIGLDEEAFVAATKASFKLGIEFVDWARPGTRYFHPFGRYGVDLGPVPFHQHWLRAKGDGLDRSLSTYSLAAQLAAVGRFAKPVDDPRSILSTLGYAYHFDASLYARHLRQLAEKRGVVRHEGLLRDIKRDPDTGFVTALTSDRGERLEGDLFIDCSGFRALLIGETMGARFEDWSHWLPCDRAVAVPCARIAATTPFTRSTLRPAGWQWRIPLQHRTGNGYVYASSFVSDDEAVATLLSNLDGEALADPRMLRFTAGFRREAWRGNVVAIGLSSGFLEPLESTSIHLIQSGIAKLITLFPDADCDPVLARQFNTLFARDMDGIRDFLILHYHATQGHDAPLWQHTRHMTPPPTLVDKMAQYTRAGRLMLSADELFREASWLAVLEGQGVGALGHAPLADTLDAATNRRQLNQIETVIARATPTLPLHDAAIAALVAPQVAGR

SEQ ID NO: 90323 - protein, 490 aa, Sphingomonas sp.
  misc_feature (1)..(490): tr|A0A3M0EEM4|A0A3M0EEM4_9SPHN Tryptophan halogenase OS =Sphingomonas sp. PP-F2F-G114-C0414 OX=2135662 GN=C8J47 _1896 PE=4 SV=1
MRQEQLRSVLVAGGGITAWCAAAALKRRAPFLDVAILRCTPSRDALADRIACTLPSLLGFHDDLGIGAADGIARTASGYRLGTLFSGWATGLPDYVHAYGRYGRSLGPTAFHLHWIRSVLEGARAAPFDSHSPAAALARAGRFAPTMPETPFADHEYGLTLDLPRYQTMMRAFALHVGVREIVGEIAGIVRDTGDGIAAVELAGGSCMVADLFVDATGPDAKLRGALDDVRDDWSAWLPCDRVLLAEGSAEPLVLTTAVAHPAGWRWSSGAQSGFAYASGEISDAKAARVLRNAAGTAPGEPIRVRPGTRPHPWLGNCIAIGDAATEVEPLEWCNLHLALSAIDRLIAMLPGRTPTRGEAAEFNRQTLAEAERVRDFLALHYKTAQRDDPLWQAVAAAVPPASLSHTLAQFTERGRLPFYEEETFARDSWAAVLIGQGVLPRRIDPLVAAVPAAAAQTAMARLTTEIAAALPHIPTHAAYRAAQTRHLLP

SEQ ID NO: 90324 - protein, 504 aa, Streptomyces sp.
  misc_feature (1)..(504): tr|A0A1X1NDB7|A0A1X1NDB7_9ACTN Tryptophan halogenase OS =Streptomyces sp. CB03238 OX=1907777 GN=BKD26_24360 PE= 4 SV=1
MMSHVVIVGGGTAGWMTATYLKAAFGERIQVTLVESKQVSTIGVGEATFSTVRHFFRFLGLAEHEWMPECHASYKLAIRFEDWRARGHYFYHPFERPRTVNGFSLADWWQHLRPGDRFDRDASVLAALCDARSSPKYLDGTLFDMAGEDSTQFPYAYHFDATLLARFLCGYGTRRGVRHVVDDVLDVRLDERGHIRDVLTKEHGELAGDLFVDCTGFRGMLLNKALGVPFLSYQDSLPNDSAVALRVPVDVARRGMRPCTTATARAAGWIWTIPLLDRLGTGYVYASDYCSPEEAERTLREFVGPEADDVTANHIRMRIGRSARSWAGNCVAIGLSSGFVEPLESTGIFFIQNGIEQLVRHFPDGRDDERLRRAYNRQVGHVMDGVREFLVLHYYAAARDDNQYWRDAKTRPMPDALAERIEQWHTTLPDADSVYPYFHGFEPYSYTAMLLGLGGIRTRPLPVLARLDGTEAVKEFHRIRQQADSLIDRLPSQYAYLAQLRGGA

SEQ ID NO: 90325 - protein, 488 aa, Sphingomonas sp.
  misc_feature (1)..(488): tr|A0A2R7JJR1|A0A2R7JJR1_9SPHN Tryptophan halogenase OS =Sphingomonas sp. HMWF008 OX=2056845 GN=DBR17_07670 PE= 4 SV=1
MAAAAFARFLPPGTSIALVESDAIGTVGVGEATIPQIRLFNQGLGIDEDDFVRATQGTFKLGIEFVGWSGAPGGIESRYIHAFGTIGRGLGLVPFHQHWLRHRSLGGTRGLWDFSASALAAQHDRFSRDMGRPDLPSGIAWAFQFDAGLYAAYLRTYAEARGVVRHEGRVVAVAQDSERGDITGVTLDDGVEVAGDFFVDCSGFRGLLIEQTLQAGYDDWSALLPCDRALAVPSANVGSTTPYTRATARDAGWQWRIPLQHRTGNGLVYCGAFLDDARAADLLLGGLDGQALADPRPLAFTTGRRRRAWVQNCVALGLAAGFMEPLESTSIHLIQSGIARLLQLFPQDGESSIEAAEFNRQTEQEWLAVRDFLVLHYHANGRDEPFWRACREAPIPDSLAHRIDLFRSTGRLFREGEELFAEPGWLQVLIGQGVTPRRYDPLADGLPAGHLDEFLSLARRHVEQVVGKMPTHDAFIAAHCAASDRMAA

SEQ ID NO: 90326 - protein, 493 aa, Acinetobacter junii
  misc_feature (1)..(493): tr|A0A4Q1SMA9|A0A4Q1SMA9_ACIJU Tryptophan 7-halogenase OS=Acinetobacter junii OX=40215 GN=ETZ13_05515 PE=4 SV= 1
MLNLRGMDRVVVVGGGTAGWFAALQLRQVFSPSVEIMVISAPEIPIVGVGEGGVLNLLSVLHDLNIDLKDFIEQTGSTLKLGFRYERWRTGKQEDYYYHLFPLPTPDFAWNEFGFNPYLSGLFNHGIDVSRYMASYEFSEERKPFQEVLEILLKGKNNFGASLHFDTFRVGQYLKKIALARGIIHVEQKIENFVFNPTTENVSAIQCVNHEISCDFVIDASGFSRLLIGKKYQSQWCSFSDTLPMNRALPFHLPHKNKIELVTRATAMSSGWVWQIPLQERIGAGYVYHDQFITDQEAQLEVENWLGHSINPVKPIAFEAGYFQQVWIKNVVGIGLASGFIEPLEATSIGQMLSQLQLLVSFIRENHGVISQQNIDFYNQQNAQYWEGIRDFIRMHYDTGRSDTPFWKFMLTVPQSESYQELKKCWVHRTPRDIDFVGHSMDGMYMFSAANWLAVGAAVGVIKPEATVAELYALPPDKKQKLAKFLEQIRKKL

SEQ ID NO: 90327 - protein, 561 aa, Phaeobacter piscinae; identical to SEQ ID NO: 84532
  misc_feature (1)..(561): tr|A0A291FR01|A0A291FR01_9RHOB Putative tryptophan halo genase OS=Phaeobacter piscinae OX=1580596 GN=PhaeoP36_0 2420 PE=4 SV=1

SEQ ID NO: 90328 - protein, 109 aa, Glaciecola sp.
  misc_feature (1)..(109): tr|A0A3D1S552|A0A3D1S552_9ALTE Tryptophan halogenase (F ragment) OS=Glaciecola sp. OX=1905676 GN=DER52_10265 PE =4 SV=1
MTQQSISHVVIIGGGSAGWMTAAALSKNLNPQHTKITLIESSTLGTVSVGEATIPQIRQFNAMLGVNEDEFITRTSGSFKLGIKFFNWGHIGDEYAHPFGPYGVNMHGI

SEQ ID NO: 90329 - protein, 382 aa, Neisseria gonorrhoeae
  misc_feature (1)..(382): tr|D6H9H1|D6H9H1_NEIGO Tryptophan halogenase OS=Neisser ia gonorrhoeae DGI2 OX=528348 GN=NGMG_00333 PE=4 SV=1
MRVGKQHFPRFVIGESLLPHCMEMLEEAGFADAVRTGPGFQLKNGAAFSWGSRYTEFDFTDKFSDGPGTVYQVRRAVFDKILIEEAAKQGVEVRFGHGVTAFDNSGDFARLNIETDTGESYELTAKFVLDASGYGRVLPRLLNLETPSHLPPRQTHFTHIDDNITHPKFDRNKILITTHPQHRDVWIWLIPFGDNRCSVGVVGTPDKLAGESETVLKKFVYECPMLSEILDKAVWENDFPFRSIQGYSANVKSLHGRHFALLGNAAEFLDPVFSSGVTIALHSAELAADLLTKQLKGEAADWQTEFAEPLMIGVDAFRTYVDGWYDFRFQNVVYAPDRSPEISRMLSSILAGYAWDTENPFVAKSEQRLTALSEWVGQLESE

SEQ ID NO: 90330 - protein, 513 aa, Sphingomonas sp.
  misc_feature (1)..(513): tr|A0A3M0E3Z6|A0A3M0E3Z6_9SPHN Tryptophan halogenase OS =Sphingomonas sp. PP-F2F-G114-C0414 OX=2135662 GN=C8J47 _2491 PE=4 SV=1
MHQIRNIVIVGGGTAGWLTAGVIAARHKGQREHGFTVTLVESPNIPTIGVGEGTWPTLRATLRKMGVSETELFRHCNAAFKQGARFNRWTTGAVDDGYYHPLMLPQQFGAVNLAPHWLAEDGADSFCDAVTPQGRICDEGLAPKTMATPEFDGVANYAYHLDAGKFSHFLQRHCCDTLGVRHVLADVTEVILDETGDIARVETAQGVSIEGDLFVDCTGFAARLIGDAMGVSFRSCTDTLFCDTALAVQLPYERPDDPIASHTISTAQSAGWIWDIGLPHRRGVGHVFSSSHIDVDTAEQELRAYLGPAGKDLPVRKLSIRAGHRETFWKGNCVAVGLAAGFLEPLEASAIVLIELSAKMIAEQMPVCREVMGVVANRFNETTTYRWGRIIDFLKLHYTLTKRTDTDFWRDNVRPESIPDRLRGLMELWQYQSPWIHDEFDRAEEVFPSASYQYVLYGMGARTAVMPGTIEADAELARRARRENHVQTQRMMSSLPGHRDLIDRIVKHGLQPI

SEQ ID NO: 90331 - protein, 505 aa, Sphingomonas sp.
  misc_feature (1)..(505): tr|A0A0Q4G8Q9|A0A0Q4G8Q9_9SPHN Tryptophan halogenase OS =Sphingomonas sp. Leaf20 OX=1735685 GN=ASE72_17515 PE=4 SV=1
MTIGAPVRRIVIVGGGTAGWMAAAALARLIPTGASITLIESDAIGTVGVGEATIPPIRGFNAMLGIDEAEFLAATAGSFKLGIEFLDWGAPGERYLHPFGGFGFDIEGVRFHQYWRRRRAAGVVEDIEAYSLCAVAARAGRFMPPSPDPASVLSQMAHAYHFDAGLYARFLRGRAERDGVVRVEGDVVDVALDGETGHVRHVMLAGDRVIEGDLFLDCSGFRGLLIEQTLGAGYEDWTHWLPCDRAVAMPTANAGAAITPYTRSTAREAGWQWRIPLQHRTGNGYVYSSAHCSDDEAAATLRAGVDGTPLAEPRLLRFTAGRRRKQWIGNVVALGLASGFTEPLESTSIHMVQTGISKLLALFPDQGFSPVEIDTYNRLAATQFDQVRDFLILHYHATRREDSPFWREMRARPIPDSLSEKIALWRRRGRLFRWEDDLFAEASWVAVLLGQGIVPEGWDRLADAVDARDVDARFNRLRAMFADAASRMPRHEEYIARTCPTRVRA

SEQ ID NO: 90332 - protein, 503 aa, Sphingomonas sp.
  misc_feature (1)..(503): tr|A0A3M0EIE6|A0A3M0EIE6_9SPHN Tryptophan halogenase OS =Sphingomonas sp. PP-F2F-G114-C0414 OX=2135662 GN=C8J47 _1895 PE=4 SV=1
MAKPKTRVVVVGGGTAGWMTAAALSRLLPGQCSVHLIESEAIGVVGVGEATLPHIRAFNERLGIDEADFMARTRATFKLGIEFRDWNRLGDSYIHPFGTFGRGTGGVDFQHYWARLLGEGAPLPSLDSVSYACALARAGKFDRPETDPHRLAGTFGYAYQFDALLFAPYLREIAEGMGARRTEGVVVRVERDGDSGDIAAIVLDTGERIEGDLFVDCSGFRALLLGEAMAEPFVDWSHWLPTDRAVAMPCRTRTAVTPYTSAIAMPAGWRWRIPLQHRTGNGYVYASGFVADDDARRALEAAVEGEALAAPRVLRFKAGRRRRSWVGNCVAIGLASGFLEPLESTSIYLVQQAITTLIELFPEPRIAATDRDEFNRVIDLEYDRIRDFLILHYHATTRSDSPFWDYVRTMPIPDTLSEKLDLWRTRARIVKYREGVFLDPSWVAVYLGQGIVPEGWDPRADPVASDALARSLDALRGEIASDVARRPDHRSFIERYCAMAQAA

SEQ ID NO: 90333 - protein, 502 aa, Erythrobacter sp.
  misc_feature (1)..(502): tr|A0A1A7QL63|A0A1A7QL63_9SPHN Tryptophan halogenase OS =Erythrobacter sp. QSSC1-22B OX=1860125 GN=A9995_00055 PE=4 SV=1
MAIEKIVIVGGGTAGWMAAAALSRLKTGNALDIELVESEQIGTVGVGEATIPPFVEFNSLLEIDEQEMLAATQGSFKLGIQFVNWGSIGESYIHPFGSYGYEIGGVSFQHIWHRLYQSGDKRPIQVFSLETMAAYFGKFARTEDYRSDDLPPTNYAYHIDATRYAAFLRGYAERRGVIRREGKVMDVTLDSESGYVASLTMENGETIRGDLFIDCSGFRGLLIEQALETGNEDWRHYLPCDRAVALPCKRVDGSAPPPVTRATAHSAGWQWQVPLQHRNGNGHVYCSEYMSDEEAHDILVRNLAGKPQADPNFLRFVTGRRKKFWNKNVVALGLAAGFMEPLESTSIHLINTGISKLIALLSLDGITQTQEDAYNRLTAKEYARIRDFLVLHYTATSRTDSDFWNYCRTMDVPDTLTEKIELFRTNGQIFREEDELFTETSWAAVMMGQGIAMGGHNPMADTIGETKLLKEVDEIEKSIAFLVKQMPTHADYLAKYCPGKPM

SEQ ID NO: 90334 - protein, 389 aa, Streptomyces agglomeratus
  misc_feature (1)..(389): tr|A0A1E5PJP6|A0A1E5PJP6_9ACTN Tryptophan halogenase OS =Streptomyces agglomeratus OX=285458 GN=AS594_29410 PE= 4 SV=1
MLDRDRFPRYHVGESLIPAFMRPMQELGITERMDARGFERKYGGTLVWGNAQVPWNFSFIEGGTHEYAYHTRRADMDSLILDRARELGAFIIEEATVKEPIETDGRVTGVRYTLRGTDGVHEARAKLVVDASGQARLLSRRYADITWHEELRNVAVWTYFDNCERLPGDEYTNILIEGLDEGWFWAIPIDKGTISVGYVTRSESANKDGQSLEALFKAEAAKSTKLKKMLAGANQSAGWRTARDWSYTSQSFNGNGWVCVGDSAAFVDPLFSTGVALATLAGSTLSRIIDQIIKHPEIEEQALKRYVTSYRGFFDEIRTFVERFYDRTKYKEFYHSLASEMVDPDRERTPSANFVQLISGLSGKHPMLTITLDDLIEDMDEAEPVVAKN

SEQ ID NO: 90335 - protein, 497 aa, Sphingomonas sp.
  misc_feature (1)..(497): tr|A0A2R7IUR1|A0A2R7IUR1_9SPHN Tryptophan halogenase OS =Sphingomonas sp. HMWF008 OX=2056845 GN=DBR17_15035 PE= 4 SV=1
MTQLPAGLRIAILGGGTAGWMAANLFAHAWPSASVTVIESPEIGIIGVGEGSTPQLKAFFDRLGIAEAEWMPACNATYKNGIAFRGWSDRAGFESYFHPFPSPLDLHTAPAFFDATRRRRHGQDVWAHPDRFFLPARLAAERLAPIAAESFPLGPAYGYHFDAHLVGAFLRTHAAKRGVVHLERRIVEAAVAEGAITALIAEGGERIAGDLFVDSSGFRSVIHQAALGVPFVSFGENLFNDSAVVMPTPADPTGTACATRATALKAGWAWDIPLTSRTGNGYVYASAYCSKDEAEAELRAHLGVGDDGTARHLSMKVGRVAESWSGNSLAVGLSQGFIEPLEATALHIVQATVEGFIQAYQAGGFTPENRAAFNARIAARYDGIRDYIVCHYRMNRRSDSAYWRDNAANDRLSESLKAIITCWFTGGDLEAEIARQGIAGYYAATSWHCLFAGYGQFPNGAPHPAGPGAVDMAVIDDFLRRAALNFADHRSVLAALG

SEQ ID NO: 90336 - protein, 415 aa, Glaciecola sp.
  misc_feature (1)..(415): tr|A0A348MUJ3|A0A348MUJ3_9ALTE Tryptophan halogenase (F ragment) OS=Glaciecola sp. OX=1905676 GN=DCR37_02760 PE =4 SV=1
MSKAVRKIVIVGGGTAGWLTAAIIASHHKADLPTGISISLVESSDIPTVGVGEGTWPTMKNTLQQIGLKESEVFKRCHAVFKQGGKFVNWVHGTGDFYYHPFTVPMGYGRIDLAPYVSSIENYAVESNFQHHICEAGLAPRTMAESEYTAQCNYAYHLDAGAFADLLKQHCRDNLGVHHIIGTVKETLLSENGDIQAVVLDENVKIDGDIFIDCTGFASLLLGKALDVPFVPQDDVLFNDTALAMHVPYDSESSPIACHTIATAQNAGWIWDIGLTHRRGVGHVYASDYLSDDEAESNLRQYLGESGKGVPTRKISFKSGHRKQFWKNNCVAVGMSAGFVEPLEATAIMLVEISARYIAENLPAEDTLVPIVAKRFNQQMHYRWKRIIDFLKLHYMLTKRPEPYWQDHCKSASIP

SEQ ID NO: 90337 - protein, 534 aa, Streptomyces sp.; identical to SEQ ID NO: 83858
  misc_feature (1)..(534): tr|A0A286EDX1|A0A286EDX1_9ACTN Tryptophan halogenase OS =Streptomyces sp. 1222.2 OX=1938833 GN=SAMN06272781_198 8 PE=4 SV=1

SEQ ID NO: 90338 - protein, 501 aa, Sphingomonas sp.
  misc_feature (1)..(501): tr|A0A3M0EK89|A0A3M0EK89_9SPHN Tryptophan halogenase OS =Sphingomonas sp. PP-F2F-G114-C0414 OX=2135662 GN=C8J47 _1215 PE=4 SV=1
MVEQRIRKVVIAGGGTAGWLAAAALTRQLGQLLDITLVESEEIGTIGVGEATIPTMRAFHTILGLDEREFMRATQATFKLGISFENWARDGDRYIHSFGDIGKSTWMGEFHHFWLAAKAAGDPSEIGDYCLELQAAKAERFALPSEGQINYAYHLDAGLYARFLRARSEANGLKRIEGRIASVDRDGETGFIRALVLDSGERVEGDLFLDCTGFRGLLIEGTYGAGYEDWSHWLPTNSALAVQSAATGPAHPYTRAIAHDAGWRWRIPLQHRVGNGLVYASDHLSDDEAHARLLGAIGGAPLTPPRLIRFRTGRRRQVWIGNCVALSLASGFVEPLESTSIHLVMTGLMRLMQTFPFGGIAPSLVTRFNDQAQAELERVRDFIILHYHLNERPEPFWAARRDMPIPDTLVERIALFTEGAQAYQGGEDLFRVASWVQVMLGQRLTPRDHHRLGSIMGGPQLASVLTNIRSTIADAVAGMPTHQQFLDRYLATPTAAASGIR

SEQ ID NO: 90339 - protein, 515 aa, Sphingomonas sp.
  misc_feature (1)..(515): tr|A0A0Q4FV03|A0A0Q4FV03_9SPHN Tryptophan halogenase OS =Sphingomonas sp. Leaf20 OX=1735685 GN=ASE72_17525 PE=4 SV=1
MNATYREAGLSGRARLRIVIVGGGTAGWMTAATLGLTTGASAAGRLADITLVESEEIGTVGVGEATVPHIRFFNQRLGIDEADFVRRTKATFKLGIEFCDWGRIGDSYIHPFGDFGHDVDGLPFHQHWLHANRGKPDETPGLAACSLPIVAARAGRFTPPLDDPRSVGSTYSYAYQFDAGLYAAYLRDYAETRGVTRIEGRVEDVERGPSGIAALRLADGQRIEGDLFVDCSGFRALLIEGALKAGHEDWAHWLPCDAAWAVPTANTGPLVPYTRATARDAGWQWRIPLQHRTGNGHVFSTRFTDPERARAVLLDNLEGEALAEPRMLRFRTGRRNRQWIDNCVAIGLSAGFLEPLESTSIHLIQLAIGKLIELFPNDAVLDPADAAEFNRAMALEYDRVRDFLVLHYCATERDDTPFWRHMRTMDLPPSLAGKIAAFRDRGIVEQYREGMFLPASWLAVYYGQRIMPERIHPLVAALPAADSRARVAAVADACRRTAEGMPTHADYLAGIGAAA

SEQ ID NO: 90340 - protein, 507 aa, Sphingomonas sp.
  misc_feature (1)..(507): tr|A0A3M0EG97|A0A3M0EG97_9SPHN Tryptophan halogenase OS =Sphingomonas sp. PP-F2F-G114-C0414 OX=2135662 GN=C8J47 _1124 PE=4 SV=1
MTGTPATRITKVVIVGGGTAGWMTAAALSRLVATGVAVTLVESEGIGTVGVGEATIPSLRDYNRMLGIDEDALVRATGATFKLGIEFRDWRRLGDSYLHPFGTHGRDIEGVSFHQLWLRQANLGGDPGPIGDYCLSAVAARKGRFTRPTSNPQSVLSTLSYAFHFDAALYAKFLRGMAEEAGVVRVEGRVAAVDRDAETGFITGLRLDGDRLIDGELFIDCSGFRSLLLGDALGVPFTSWQHWLPCDRAWAVPSERQGMLTPYTRATADTAGWRWRIPLQHRVGNGHVYASDHVDDDAALRALLAGLDGKPSAEPRQLRFVAGRRERLWERNCVAIGLSGGFLEPLESTSIHLIQSGITRLMTLFPDRGFGGVEIAEYNRVMLREYAQIRDFIILHYHATERSDSTFWNHCRTMTIPDTLQAKLDLWSGKARTFREQGELFTPDGWIAVLLGQGVRPASTDPLVAALPTEESARFMDHVRDMIGKTADAMPTHEQFIAQHCAAAIAA

SEQ ID NO: 90341 - protein, 509 aa, Gordonia sp.
  misc_feature (1)..(509): tr|A0A1A0X4Q8|A0A1A0X4Q8_9ACTN Tryptophan halogenase OS =Gordonia sp. 852002-50816_SCH5313054-a OX=1834091 GN=A 5786_09315 PE=4 SV=1
MSDATRSGQPVSETADVVVVGGGPGGSTVATLLARSGHRVVQLEKESFPRYQIGESLLPSTIHGVCRLLGVDEKIKNAGFMHKRGGSFRWGKNPVPWNFLFAISPEFAGEGSYAYQVERMKFDQILLENAAEQGVDVRQRSRVNGTITDETGRVTGIRYVDADRVEHQIDAKFVVDASGNTTRLSKYAGGERIYSDFFQNVAVFGYFENGKRFPAPDSGNILCAAFDEGWMWYIPLSDTLTSVGAVISRDKAEHVLNAQEETLLHYVDRCEIVKDMLSDATRVTEGTYGEIRIRKDYSYANTQFWGNGMVLVSDAACFIDPVFSTGVHLATYSGVLAARSINSVLAGAMTEERAFTEFEGRYRREYAVFYEFLSAFYDMEQSEDSYFWKARKVTNFDRNDMTAFVSLVAGAYSGEQALTDPEQIIERFSASTAALTEAAERTGGMDTDSGQRMGHLFGTQVVRDVMEEMNAFQARGAVGTDGSEPPLLDGGLVPSADGLSWAEPAPATV

SEQ ID NO: 90342 - protein, 493 aa, Acinetobacter junii
  misc_feature (1)..(493): tr|A0A380URA0|A0A380URA0_ACIJU Geranylgeranyl reductase family OS=Acinetobacter junii OX=40215 GN=NCTC12153_03 082 PE=4 SV=1
MINLRGMNRVVVVGGGTAGWFAALQLRQLFSPSVEVMVISAPEIPIVGVGEGGVLNLLSVLHDLNIDLKDFIEQTGSTLKLGFRYERWRTGKQEDYYYHLFPLPTPDFAWNEFGFNPYLSGLFNHGIDVSRYMASYEFSEERKPFQEVLEILLKGKNNFGASLHFDTFRVGQYLKKIALARGIIHVEQKIENFVFNPTTENVSAIQCVNHEISCDFVIDASGFSRLLIGKKYQSQWCSFSDTLPMNRALPFHLPHKNKIELVTRATAMSSGWVWQIPLQERIGAGYVYHDQFITDQEAQLEVENWLGHSINPVKPIAFEAGYFQQVWIKNVVGIGLASGFIEPLEATSIGQMLSQLQLLVSFIRENHGVISQQNIDFYNQQNAQYWEGIRDFIRMHYDTGRSDTPFWKYMLNVPRSESYQELKKCWVHRTPRDIDFVEHSMGGMSMFSAASWFAVGAGVGVIKPEATVAELYALPPDKKQKLAKFLEQIRQKV

SEQ ID NO: 90343 - protein, 517 aa, Glaciecola sp.
  misc_feature (1)..(517): tr|A0A348MXA6|A0A348MXA6_9ALTE Tryptophan halogenase OS =Glaciecola sp. OX=1905676 GN=DCR37_07715 PE=4 SV=1
MFYPYLGTETMNNQIITVVGGGSAGWMTANLLHNQLHQHGFTIRVIESPSIGIIGVGEGSTPQLKVFFDMLGIAEQTWMPRCDATFKHGIRFNGWTDLVHPQYDHYFHPFPSNQDHNSGRYFLQQVHTMLAGYPAMPHPDLYFLTATLAQQNKTPAHEHPELQTNYGYHFDSAKLGQFLKTHGTQQGIQVITTTIDSIQHQANTIVSVTDEQGQIFNSDWFFDCTGFGGKLIQEALGTDFIHYTDNLFNDRAVAIPTRREEQELPQTTATALPCGWAWRIPLTSRIGNGYVYSSQYCTADEAEHVLRQHLNIDDKIPARHLSMKVGRLAQHWVGNTIAVGLAQGFIEPLEATALHLVQETVTQFIGAFTAGRFTTIYKEQFNDNINARFEGIRDYIVAHYACNQLTHARMSQKYASSNSRFHFDGKAVTIDTPRYWEDCREKVVTSENLQAVLACWERGGDLHQLLVDRKMQTYYPTLSWYTLLAGYRRFTHQQYQDNLQTQQIQAKLVELTQHFTC

SEQ ID NO: 90344 - protein, 493 aa, Psychrosphaera saromensis
  misc_feature (1)..(493): tr|A0A2S7UX78|A0A2S7UX78_9GAMM Tryptophan halogenase OS =Psychrosphaera saromensis OX=716813 GN=BTO11_13470 PE= 4 SV=1
MKNITDIVIVGGGTAGWVSAALLVKVLGKTHNIKLIESESISSVGVGEATIPPILQLNNALGIDEAHFLKATKGTIKLGIEFENWSSLGSQYMHAFGSVGKNLPFCDFNHLFLSAQKLENKFSFGDFSLNYQAAKNGKFDKLANIPATNLPGITHAYHFDASLYAQLLREYSEASGVERIEGKVTKVDQAPSCGHVTQVTLETGQVIAGDLFIDCSGMRALLIEQTLNTGFEDWRHWLPCDRAIALPSEPTKPIPPYTRSVAKDAGWCWHIPLQHRMGNGIVYSSKFISDEQAEQTLRASLSGKPLSEPNFIKFKTGRRTKQWNKNVVAIGLSSGFLEPLESTSIHLIQTGIIRLLKCFPHQGIKDVEVAEYNRQSKIEFENIRDFIILHYKVNQREDTDFWQYCQQMDIPKTLERKIELFKQSGKVFREQDDVFSEIAWQQVLLGQEVIPEDYHPMADTLTNEQLLDLMDNLNTLIQATVAKMPSHEGFLNE

SEQ ID NO: 90345 - protein, 514 aa, Proteobacteria bacterium
  misc_feature (1)..(514): tr|A0A1W9IL86|A0A1W9IL86_9PROT Tryptophan halogenase OS =Proteobacteria bacterium HN_bin10 OX=1827386 GN=A4S17_ 00675 PE=4 SV=1
MHNKRIDKVVILGGGTAGWMTAAALAKLFSPRIKVALVESDEIGIVGVGEATIPTIHWFNELIELNEAEFMRATQASFKLGIEFVDWTEPNHRYFHPFGQFGATLPGVSFHHRWLRARRDGLKTPLSAYSLATQLALDGRFAKPALDPKSILSTLGYAYHFDAALYARHLRTLSEAQGVVRHEGKVVHVDQHPETGFVTALTTDKGDRLEGDLFIDCSGFRALLIEGVLGAGYDDWSHWLPCDRAAAVPCARGEAITPYTRSTARDAGWQWRIPLRHRTGNGYVYSSNFTSDEAAAELLLANLDGERLADPRFLRFTAGRRRKTWDRNVVAIGLSAGFLEPLESTSIHLIQSGIAKLLALFPDSDCDPGLAGQFNRLFALDMDNIKDFLILHYHATSGRHEPLWEYCRHMPLPDSLVEKESVYRRSGRVLVGTDDLFKEASWIAVLSGQGIDPGDYNPLADMLDTNSNLAQLEHIEQVIARSLPTLPVHEQAILAVIGAGRQGAQDQPAPGHHA

SEQ ID NO: 90346 - protein, 519 aa, Psychrosphaera saromensis
  misc_feature (1)..(519): tr|A0A2S7UUF6|A0A2S7UUF6_9GAMM Tryptophan halogenase OS =Psychrosphaera saromensis OX=716813 GN=BTO11_07845 PE= 4 SV=1
MSEAVRRIVIVGGGTAGWLTAGVIAAEHNSKSESGLQVTLIESPDVSAIGVGEGTWPTMRETLDKIGINETDLFRECEASFKQGSKFSKWVTGDVDDNYTHPFVLPHGYLKTDLVFPWQKNREAISFSDAMSYQGHICENGRAPKLISTPEYAGVTNYAYHLNATKLGLFLQKHCIESLGVKHIVDHVTGIISSDDGDIELLNTNVSGKIGGDLFIDCSGLSSILLGKHFDVPFISKKHILFNDTALAVQVPYLDDNAPIASHTISTAQSSGWIWDIGLPSRRGVGYVYSSQHSNDKDAEIELRAYIETSIGKVETDKLNVRKISFNPGHREKFWHRNCVAIGMAAGFLEPLEASALVLVELAAAKISNEMPATRETMDIVAKRYNKQFLYRWDRIIDFLKLHYALTKRTDSAYWLDNRKPESIPESLSELLTLWKYHPPGPQDFNHAEEVFPSASWQYILYGMGFETTESTMTRKFHDEEAAQRFYNENKSLTQKYLSALPSNRDLIDKIKLYGLQKV

SEQ ID NO: 90347 - protein, 409 aa, Caballeronia catudaia
  misc_feature (1)..(409): tr|A0A158AJV8|A0A158AJV8_9BURK Tryptophan halogenase OS =Caballeronia catudaia OX=1777136 GN=AWB75_02324 PE=4 S V=1
MNVSVDVAIIGAGPSGAVAAALLRKGGHSVLVLERQHFPRFSIGESLLPQSMAYLEEAGMLQDVVEAGFQYKNGAQFVHRERAAAFDFRDKHSDGWGTTFQVERAVFDDLLIRRAAKQGAEVRFGHAVLDMKTGDAPVLEVADEAGARYQVHARFVLDASGFGRVLPRLLNLEAPTRLPTRAAIFTHVRDGIAPETHDRNKITVAVHPEHGDVWYWMIPLANGRSSVGCVAQAAFLDVPEAEREAKLRALIRCEPTLNRLIGDAPFLMPVRHIGGYSANVERLHGPGYALLGNAGEFLDPVFSSGVTIAFRSAHLAVQTLKRHLNGETVDWHAHYDAPLRRGIDTFRAFVENWYTGKLQDIIFSRDQTPVIRRMISAVLAGYAWDETNPYVVDPVRRLNALHEVCKQQN

SEQ ID NO: 90348 - protein, 395 aa, Glaciecola sp.
  misc_feature (1)..(395): tr|A0A3D1RZS7|A0A3D1RZS7_9ALTE Tryptophan halogenase (F ragment) OS=Glaciecola sp. OX=1905676 GN=DER52_01380 PE =4 SV=1
VNMHGISFYHYYLRAKTLQIPHPVSAYNLEYHALNQHKFSRPDENTSSLLKNINYAYHFDATEYAAFLKDYALARGVEWIDDTITKVNQHPNGDIKSVSLTSRPDIEAPLFIDCSGFKGLIIEEACQVGYEDWRHWLPCDSAVAQPSAALDEIYPYTKATARDAGWQWQIPLQHRIGNGHVFASQFMTADKATQILTDNLPSPALAEPRLLNWCNGKRKKAWHKNVIAIGLSAGFIEPLESTGLQLIQSAIMRLLSLFPHQQINALDRNEYNKHTDFEIEKIRDFVILHYKATQREDSEFWRYLKHMPVPESLHYKIDMYQQTGRIIRDSNELFDELSWFSVMHGQGIIPTHYHPLADNMSATELVRHMNNIQDAISHTVNAMPSHQAFINRITQ

SEQ ID NO: 90349 - protein, 493 aa, Acinetobacter junii
  misc_feature (1)..(493): tr|A0A4T0ZZ02|A0A4T0ZZ02_ACIJU Tryptophan halogenase OS =Acinetobacter junii OX=40215 GN=DIZ45_03675 PE=4 SV=1
MINLRGMNRVVVVGGGTAGWFAALQLRQLFSPSVEVMVISAPEIPIVGVGEGGVLNLLSVLHDLNIDLKDFIEQTGSTLKLGFRYERWRTGKQEDYYYHLFPLPTPDFAWNEFGFNPYLSGLFNHGIDVSRYMASYEFSEERKPFQEVLQILLEGKNNFGASLHFDTFRVGQYLKKIALARGIIHVEQKIENFVFNPTTENVSAIQCVNHEISCDFVIDASGFSRLLIGKKYQSQWCSFSDTLPMNRALPFHLPHKNKIELVTRATAMSSGWVWQIPLQERIGAGYVYHDQFITDQEAQLEVENWLGHSINPVKPIAFEAGYFQQVWIKNVVGIGLASGFIEPLEATSIGQMLSQLQLLVSFIRENHGVISQQNIDFYNQQNAQYWEGIRDFIRMHYDTGRSDTPFWKYMLNVPRSESYQELKKCWVHRTPRDIDFVEHSMGGMSMFSAASWFAVGAGVGVIKPEATVAELYALPPDKKQKLAKFLEQIRQKL

SEQ ID NO: 90350 - protein, 561 aa, Phaeobacter piscinae
  misc_feature (1)..(561): tr|A0A291G2E1|A0A291G2E1_9RHOB Putative tryptophan halo genase OS=Phaeobacter piscinae OX=1580596 GN=PhaeoP13_0 2436 PE=4 SV=1
MNNRLRKITIVGGGTAGWMTALILETELSRTSAPKDRPKICLIESPNIATVGVGEATVPRMPKTLRQAGISERTFFRETNASFKLGVKFCNWNTDAKGNRIDYVNPFAHGQLLEGLEPAEYFLRFGNGDRDYTQSISPHDDLGRLCKGARPLGQPEFEQRFGYAYHLDAVKFAGMLTKVCTKHGVEHIQDEVTSVELDEQGNVSHLMLEQCGRHDVEMVIDCTGFRGLIINQALGEPFMDYSDYLPNDRAMALQIDHPDPEKIESLTRSTALGAGWTWRVPLYNRVGTGYVFSSAHRTDDQAADEYLEWLGDSGKGATPRIIPMRIGRVRNAWVKNCVAIGLAGGFIEPLESTAIHMIDHAVRWLTEHMPTRDIAPSLRSRYNRQMDKLYDEVLEFICLHYRLGNRTDDQYWIDARTEMKIPDRLAENLELWQHRLPMPHDIEFATLFDYRVYQTVLLGKQVYDTGYGPGIRDRLRPLKKPIWFQWWKGAKVDLAQILKSMPDHKTLLRDIRGELDQPGFGMAAAMKPTVPMPCAEAVPCMIQNMPSFSEIENGQKDLQLF

SEQ ID NO: 90351 - protein, 510 aa, Sphingomonas sp.
  misc_feature (1)..(510): tr|A0A2R7JF85|A0A2R7JF85_9SPHN Tryptophan halogenase OS =Sphingomonas sp. HMWF008 OX=2056845 GN=DBR17_08675 PE= 4 SV=1
MSDTAARTRVVIAGGGTAGWLAAAVLLHQLGPLVDVTLVESDDIGTIGVGEATIPTIRSFHALIGLDEREFMVATGATFKLGISFENWARAGDRYFHSFGDVGHATWMGDFQHFWLEAQARGAAAPFGAYCLEHEAGLNERFAAGPQSPLNYAYHFDAATYARFLRGRCEAQGLTRREGRIGRVELNPANGHIAALHLDNGARIEGDLFLDCTGFRALLIGDALGVGYEDWSQWLPTNRALAMQTTSTGPAKPYTRAIAHDAGWRWQIPLQHRVGNGLVYCADYLSDDAAHDRLMSAIEGEPTTEPRLIRFQTGRRTEAWRANCVALSLASGFVEPLESTSIHLVMIALTRLLQHFPFDGISAAVVARFNAMADREIEAVRDFIVLHYHLNERAEPFWQARRDMTIPDSLANRIALFAEAGQAYQASDELFRVASWLQVMLGQRLMPRSYHHLARLMPTDQLVEALDTLEARIASQVRALPTHQAFLDSYCPSVQPKREALARREAVSAV

SEQ ID NO: 90352 - protein, 507 aa, Sphingomonas sp.
  misc_feature (1)..(507): tr|A0A3M0EKL3|A0A3M0EKL3_9SPHN Tryptophan halogenase OS =Sphingomonas sp. PP-F2F-G114-C0414 OX=2135662 GN=C8J47 _1349 PE=4 SV=1
MSDRALRSIAIIGGGTAGWMAAAAVARVLGTHNVAVTLVESEEIGTVGVGEATIPPIQAFNALLGIDEDAFVKATMGSFKLGIEFVDWLRPGTRYFHPFGVYGTDIGAVPFEGLWHRLRAQGLADPLEAYSICAQAAKDGRFMRPLTDGGNTPLHRIGYAFHFDASLYARFLRTHAEAAGVVRREGRVVDVALRAVDGFIEAVTLASGERIEADLFVDCSGFRSLLLGETLGTGFEDWSHWLPNDRAIAVPTASNGPPTPFTRSTARAAGWQWRIPLQHRTGNGYVFSSDHLSEDEATATLLASLDGEPLADPRTLRFRTGRRDAFWVKNCVGLGLSSGFLEPLESTSIHLIQAGIARLLEMLPNRDFEAADIRRYNRLMTAEYDSIRDFIILHFHATERADTPYWDHVRTMAVPETLAERIRIYQATGRVFRESDDLFSKTSWLAVMDGQGLRAEGFDPLAASLSIDDAQARLARIAAVTAAAAARMPPHAHFIARHCAGAIASRT

SEQ ID NO: 90353 - protein, 547 aa, Sphingomonas sp.
  misc_feature (1)..(547): tr|A0A3M0E9R6|A0A3M0E9R6_9SPHN Tryptophan halogenase OS =Sphingomonas sp. PP-F2F-G114-C0414 OX=2135662 GN=C8J47 _1897 PE=4 SV=1
MNEHSIRRVVIVGGGTAGWMAAAAFARFLNNGYTEITLVESEEIGTVGVGEATIPPLINFNQMLGLDENAFLAATSGTFKLGIEFVDWGALGERYFHPFGNYGHDLQGVHFHQLWLREKARRPIADISAWSMSAMAAANGKFGRATGDARSPVRELFYAFHFDASLYARYLRDYAERAGIVRIEGKIAEVNQRPADGYVAAVTLEDGRRIEGDLFIDCSGFRGLLIEETLHTGYESYAQWLPCDRAVAVPCALPNPGEPDAFTRSTAHKAGWRWRIPLQHRMGNGLVYCSKYLGDDEAEAQLLASLEGEQLAEPRRLQFTAGRRRDCWNRNVVALGLSSGFIEPLESTSIHLVQAGIQRLIALFPDKRFDPVERDEFNRQMHDLYEDIRDFIILHYKATRRDDSPFWNRVRTMDIPESLQRKIDLFAGKGRLFREGYDLFSNPSWVAVCLGQGITPQGWEPAADALDEQKVASALEQMRRGYLDTAQRLPTHGEFLRRTAPSPLAAQAAPSSSAPASAPAPTSSDDVPFFAFTAESPFDVGGGGSPL

SEQ ID NO: 90354 - protein, 496 aa, Sphingomonas sp.
  misc_feature (1)..(496): tr|A0A3M0DYK3|A0A3M0DYK3_9SPHN Tryptophan halogenase OS =Sphingomonas sp. PP-F2F-G114-C0414 OX=2135662 GN=C8J47 _3457 PE=4 SV=1
MTSPTAPVPLQSIVIVGGGTAGWIAAAMLARFVPRTTTIRLVESDAIGTVGVGEATIPQIRLLTAALGIDENAMLAATQGTFKLGIEFVDWTGCGSRYMHAFGAVGRGLGVVPFHHHWLRARSEGQAAPLGDYVASARAAADARFDRHPDLAYAYHFDATLLARWLRGLAEASGVDRIEGRIVTAQRGGETGDLTSVTLDDGRTAEGDFFLDCSGFRSLLLGEALGVAFEDWSHWLPCDRAMAVACEATTPLLPYTRATAQPVGWQWRIPLQHRTGNGLVYAAAHLSDDEATARLLANLDGAAIGEPRPLRFATGKRATFWERNVVALGLASGFMEPLESTSIHMVQSAVARLLSLFPSTGDNAAARTAYNHQTHVEYDTVRDFLILHYHANRRPEPFWQRCRDMALPDRLAEKIAQFRAAAILTQDVADLFTEPAWLQVMIGQGINPVTWSPLAEALSPDQLAGFLADIRDRHAATARALPAHADTVARHCTAKR

SEQ ID NO: 90355 - protein, 513 aa, Glaciecola sp.
  misc_feature (1)..(513): tr|A0A3D1S1D7|A0A3D1S1D7_9ALTE Tryptophan halogenase OS =Glaciecola sp. OX=1905676 GN=DER52_03400 PE=4 SV=1
MSGVINRIIVLGGGTAGWITAGILAKKHASNLSNQGIKVTLIESPEISVVGVGEGTWPTMRKTLSQLGISETQFMRECGATFKQASKFVNWVNAKDDVYYHPFTEPQGFNKVDPAPYWQSVVEPTCSFSEAVSFQQYLCEQGLAPKTIANKEYEVIANYGYHLDAAKFIALLRKHCISELGVEHISDTVERIEQAPCGDISCLQTKEHGAQLADLFVDCSGMRSLLLGETLKVPFVPCDDVFLADTAIATQVPYINENDPIACHTISTAQEAGWIWDIGLQERRGVGYVYSSKHCSEEQARKTLANYIGLEEVKTAKKINFKPGHRKIFWKNNCVAVGLAAGFLEPLEASALMLIEASANYIADQLPPNKELMPITAKRFNAIMLKKWRGVIDFLKLHYALSERTEPFWLEHRDTQSIPNSLQELLSIWRYSSPSEYDFTDNVEAFSAASYQYILYGVGFKSDFSQMEHIYNQGELAKKQLQMTKMRIDQLKYNLPTHRDLINKLNSLGFAKL

SEQ ID NO: 90356 - protein, 298 aa, Kitasatospora atroaurantiaca
  misc_feature (1)..(298): tr|A0A561EJI8|A0A561EJI8_9ACTN Tryptophan halogenase OS =Kitasatospora atroaurantiaca OX=285545 GN=FB465_0708 P E=4 SV=1
MDRLATVSTPVYEARSAWAEPTVDHRSSLLNRYGPPLAVDRAALDELLREAAREAGVRLVRAHAKPVAGPDGGWLVPGLENPVPVVVDATGTARAVSRARLRWHGVDRLRYTIWQTRPADRLPQPWSLVEAAPDGWWYSAPTPGSERLTVMQVQDTAGRAPQLPPPRTSERLAHRSLPRPAAQRVAVVGCAGPPWTAGLVAVGDAALSVDPLSSSGLRHALELAGPASEAALGLLHGDERPADDYARAVRHAFLKHLADRQFFHAAATRYQTAAFWSHRSDLEHMRLADAQSGHRSGV

SEQ ID NO: 90357 - protein, 501 aa, Halieaceae bacterium
  misc_feature (1)..(501): tr|F3KZU8|F3KZU8_9GAMM Tryptophan halogenase OS=Halieac eae bacterium IMCC3088 OX=2518989 GN=IMCC3088_541 PE=4 SV=1
MTDAIKRVVIVGGGTAGWNAAALFARTLGKVISITLVESDEIGIVGVGEATIPPIINFNNALGFDEAEFLRATQGSIKLGIQFENWGNAGDSYMHAFGNIGKDFAFCGFHHFWLRSQQEGIESDYWDFSLNYQTARKNKFAKLNHIPGTQLPGISYAYHFDAGLYAQYLRNYCEHSGVTRVEGMIKRAHQHSETGFIESVELESGQLIEGDLFIDCSGFRGLLIEQVLETGYEDWSHWLPCDRALAVPTESNGTIKPYTRSIAHTAGWQWNIPLQHRTGNGHVYCSAYMSDDEAARTLLQHVEGAPLAEPRSIPFKTGRRRKQWHKNCVAFGLASGFLEPLESTSIHLVQSGLRRLVQHFPHNGIKPAEVDEFNRQSQVEFEKIRDFIIMHYKVNARTDSQFWIDCRNMDIPDSLQHRLELFKTSGKVFKEGDELFQEIAWQQVLIGQGLVPSDYHPLADSISREQLAGLMADLKSLVAGASDNCARHEEFLLSCGVQLDG

SEQ ID NO: 90358 - protein, 500 aa, Sphingomonas sp.
  misc_feature (1)..(500): tr|A0A0Q4G6R5|A0A0Q4G6R5_9SPHN Tryptophan halogenase OS =Sphingomonas sp. Leaf20 OX=1735685 GN=ASE72_17510 PE=4 SV=1
MTAALGSVVIVGGGTAGWMAAVALGRLLGPAGTRVTLVESDEIATVGVGEATIPPIRTFHAMLGIDEDAFLRATGGSYKLGIRFEGWTRPGESYVHPFGQIGTDIAGVPFAAQWLRARQAGAAEALGAYSLEARAAEAGRFSRPIANGDSPLSRIGYAYHFDAGRYAAFLRAQAEAHGVVRREGRVDRVERGPAAIAAVHLADGSRIEGDLFLDCTGFRALLIEGALQAGWTDWSLWLPCDRAVAVPSAADAAPLALTRAIAEPAGWRWRIPLQHRTGNGHVFSSRHCSDDEATATLLAGLQGEALADPRVIRFATGHRTRFWTGNCIALGLAAGFMEPLESTSIHLVQSGLQHLLRMLPTGGPPAPAIVDRYNRTMTGEFVRIRDFLVAHYHLNARTEPFWRERAAAPIPDGLAEKLALFRAGGRIFREADELFNEVSWLALLTGQDAPVTGHDPICDALPIAIAAKRLAQIERVVATSLTHLPPHADALARLGQDRTI

SEQ ID NO: 90359 - protein, 502 aa, Rhodanobacteraceae bacterium
  misc_feature (1)..(502): tr|A0A522QWB3|A0A522QWB3_9GAMM Tryptophan 7-halogenase OS=Rhodanobacteraceae bacterium OX=2052182 GN=EPN40_133 20 PE=4 SV=1
MSTPPVHRIVIVGGGTAGWMAAAALAKILGRECAIRLVESEKIGTIGVGESTVPHLKLFNDLLGIDDVAFVRQTRGTFKLGIEFVDWARVGDRYFHGFGKIGHDMGALPFHQFWLKARSLGIADELGAYSLHTQAGPRGKFMPSATDVPQNSPLADIAYAYHFDAGLYARLLRGYAENLGVHRIEGTIIDVRQRGEDGFVEAVVLENGERVEGDLFLDCSGFRGLLIEQTLHAGYEDWSHWLPCNRAVAVSCEPVGPPTPFVRCTAREAGWTWRIPLQHRVGNGYVYSSAYISDDEAAAGLLKWLDGRALGEPRVLRFTAGQRRRAWDRNVVAMGLAAGFLEPLESTTIYMVQSAITRLTNLWPRRDCSATLRDRYNAQTAFEIERIRDFIILHFCATERDDSPFWNYCRTMDIPEPLADNIRLFRDSGRFYRSAEELFALTSWVEVMIGQRVLPRTWHPAVDQLPEADLRKLMDGVQRVIAACVDAMPTHQQFIARCCAAG

SEQ ID NO: 90360 - protein, 509 aa, Brevundimonas abyssalis
  misc_feature (1)..(509): tr|U2Z9S7|U2Z9S7_9CAUL Tryptophan halogenase OS=Brevund imonas abyssalis TAR-001 OX=1391729 GN=MBEBAB_0052 PE=4 SV=1
MIQPDLIRNVVIVGGGTAGWMAAAALSRLIANGVTSVTLVESDTIGTVGVGEATIPPIRTFNEMLGLDERAFLQATRGSYKLAIEFVDWTRPGHTYQHPFGPFGADINAVKFHQFWLKMHREGRAAEFGDYNLCGVAARLNRFGALPPQHRSPLTPMSWAYHFDAARYARFLRDHAETRGVVRQEGKVVSVEQRPEDGFIDAIVLDDGRRVEGELFIDCTGFRGLLIEQALKAGFEDWSHWLPCDRAVAVQCLNDNAISPFTRSTAREAGWQWRIPLQHRVGTGYVYSSAHISDDQAADTVMANLDGKPVTDPRILSFRAGRRRKAWVKNCVALGLASGFLEPLESTSIHLIQAGITKLLALFPHRGFDPVAIDEYNRLTNVQIEQIRDFIILHYHANERTGLDLWDHVRTMAIPDSLQHKLDLFRGAGRFFRHEDELFAESSWMAVLIGQNVMPQRYDPLVDSIPEADVARAMEELRTTIRAAAESLPDHADFLARHCAAPEPESVPA

SEQ ID NO: 90361 - protein, 460 aa, Streptomyces mobaraensis
  misc_feature (1)..(460): tr|M3BCI3|M3BCI3_STRMB Tryptophan halogenase OS=Strepto myces mobaraensis NBRC 13819 = DSM 40847 OX=1223523 GN= H340_27387 PE=4 SV=1
MSVKLLERETFPRYHIGESIASSCRTIVDLVGALDEVDSRGYTVKNGVLLRWGKEDWAIDWPKIFGPDVRSWQVDRDDFDHVLLKNAVKQGADVTEGVTVKRVLFDGDRAVGAEWTDPDSGELVSEEFDYVIDASGRTGVISRHLKNRQPHEIFRNVAIWGYWQGGSLLPTSPTGGINVIGAPDGWYWVIPLRGDRYSVGFVCHQDRFLERRKEHDDLEAMLASLVQENPTVRDLMAEGEYQPGVRVEQDFSYVADSFHGPGYYLAGDAACFLDPLLSTGVHLALYSGMLAATSVLATVNEDVTEKEAGAFYESLYRNAYQRLFTLVSGVYQQQAGKAAYFGLADAMVPERATEEYEQVDGAVAFAELVAGLADIHDAVTGTHEDHAHQAHTQAVALPEDNSVRQLLAAAENARLMAEAGTPSAPVSEAPGKMDAHDLYDPATGLYLRTTPTLGIGRSRA

SEQ ID NO: 90362 - protein, 504 aa, Xanthomonadaceae bacterium
  misc_feature (1)..(504): tr|A0A2A3LM51|A0A2A3LM51_9GAMM Tryptophan halogenase OS =Xanthomonadaceae bacterium NML93-0399 OX=2032565 GN=CM Z84_03460 PE=4 SV=1
MDHLQRIVIVGGGTAGWMTAAALSRVLGPAYDIALVESEQIGTVGVGEATVPHIKAFNQLLRIDEADFVRSTQGSFKLGIEFVDWLDVGERYNHGFGTEIGHPLGLLPFHQYWLKARARGRAGPLGDYTLNTLAAQRGRFMVSATDVPAGSPLSNIAYAYHFDAGLYARYLRRYAEQRGARRHEGMIDHVAQHPESGFVSSVRLQDGTVLEGDLFVDCSGFRGLLIEQTLQTGYHDFTQWLPCDRALAVPTANVGPPAPFTRATARPAGWQWRIPLQHRTGNGYVYSSAHVSDDEAAATLLANLEGEALGDPRPLRFVTGRRKQCWNRNVVAIGLSSGFLEPLESTSIHLIQSGISKLLELLPREGFNPVLAERYNAQLAFEFDRIRDFIVLHYNATRRDDTPFWRHCRTMEIPAELRTAIDLFRDSGRFFRNASEMFDTISWVQVMVGQGIVPRGWHPLVDNLPDDEIARFVDSVGRTLNACVDAMPPHQAFIDRHCKATPPV

SEQ ID NO: 90363 - protein, 498 aa, Duganella sp.
  misc_feature (1)..(498): tr|A0A0Q8RAX3|A0A0Q8RAX3_9BURK Tryptophan halogenase OS =Duganella sp. Root198D2 OX=1736489 GN=ASE26_05645 PE=4 SV=1
MAGKPIRNIVIVGGGTAGWMSAAPLALKLGKACRIVLVESPEIGTVGVGEATLPTIRYFNHALGLDNADFVRKTQATYKLGIEFKDWGHVGNRFFHGFGDFGPTIENRSPVTYWLRLAREYKDMPSYEEWSTATAMARSNRFMEPYGDQPAATNAFSYAYHFDASLYAAYLRDYAMERGVQRIEGLISEVEQHPETGFITAVKLNDGRRVEGDLFIDCSGFRGLLIEGVYQAGYDDWSAMLPCNSAQAVPSEKVEPLTPYTTSTARSAGWTWRIPLQHRTGNGHVYCNGFTSDEEAGRVLLAGLDGRALDNPRQLRFTTGRRRKSWVKNCVAIGLSSGFLEPLESTSINIIENSVGWLLQYFPDRDASPELADEFNRLVSQRYEYVRDFIILHYKATRRDDSEFWRYCANMAIPDTLRHQIELFRATGRVAIYDRDGFSVASHVSILMGLGIVPRAYDPLVDLFDLARLHEHFSRLRETISQAVAAMPGHGQYIKQLR

SEQ ID NO: 90364 - protein, 502 aa, Arenicella xantha
  misc_feature (1)..(502): tr|A0A395JRX8|A0A395JRX8_9GAMM Tryptophan halogenase OS =Arenicella xantha OX=644221 GN=DFR28_101581 PE=4 SV=1
MDNRIRKIVIVGGGTAGWMTAAALSKVLINNYCEIELVESEAIGTVGVGEATIPQISRFNTLLGIDENEFVRETQGTFKLGIEFRDWGQLGDSYIHPFGVFGVPIESVPFHHYWLKMRQAEKFSRLQDFSLACVAAPKGKFTRPMNIPKSPLSQIAYAFQFDAGLYAKYLRRYSEARGVKRTEGKVSQVHQRSDDGFIASVEMESGERIEGDLFIDCSGFRGLLIEQTLKTGYEEWTHWLPCDRAAAVPCMSAGPPEPYTRSTARDAGWQWRIPLQHRTGNGHVYSSQFTDDDTAIETLLSSLDGEPLADVNKLRFVTGRRKQFWNKNVVAIGLSSGFIEPLESTSIHLIQSGISKLIGLFPSRDFQQPDIDKYNQQSISEIESIRDFIILHYKATQRDDTEFWNYCRTMSLPSSLDERLALYKSNGRLYREGDELFSETSWLAVLVGQGILPASYHPLVDAYDSDGMERYLSGVLDVIDRSVDSMPTHAEFIQKHCAAGPR

SEQ ID NO: 90365 - protein, 514 aa, Streptomyces sp.
  misc_feature (1)..(514): tr|A0A1C6NF57|A0A1C6NF57_9ACTN Tryptophan halogenase OS =Streptomyces sp. SceaMP-e96 OX=1100824 GN=YWIDRAFT_016 68 PE=4 SV=1
MINSVVIVGGGTAGWMSASYLKAAYGDRINVTLVESDRVATIGVGEATFSTVRHFFDYLGLDEREWMPECSGSYKLGIRFENWREPGHHFYHPFERLRTSDGYTLADWWLQEGDRSQPFDRSCFITPALCEAKRSPRLLDGSLFAGGLDGSLGRSTLEEQRAQFPYAYHFDAALLAKFLTKYGTDRGVRHVVDDVTQVGRDERGWISHVATREHGDLTGDLFIDCTGFKGMLINETLDEPFESFQDVLPNNRAVALRVPQPDQATTGMNPYTTATAMDAGWIWNIPLFGRNGNGYVYSDEFCTPEEAERTLREHVAPGQDDLEANHIRMRIGRNRRSWVNNCVAIGLSSAFVEPLESTGIFFIQHGIEQLVKNFPDENWDPALVDDYNNRVAEVLDGVKEFLVLHYKAAQREDTPYWKEAKTRALPDGLAERLAIGSSHLLDERTIYQPYHGFEQYSWITMMLGLGHEPKRPRPSLAHIDPTNARAELARLKADADELVAALPSCYEYIASINS

SEQ ID NO: 90366 - protein, 561 aa, Phaeobacter porticola
  misc_feature (1)..(561): tr|A0A1L3I7A2|A0A1L3I7A2_9RHOB Putative tryptophan halo genase OS=Phaeobacter porticola OX=1844006 GN=PhaeoP97_ 02601 PE=4 SV=1
MNNRLRKITIVGGGTAGWMTALILETELSRTSAPKDRPKICLIESPNIATVGVGEATVPRMPKTLRQAGISERAFFRETNASFKLGVKFCNWNKDAEGNRIDYVNPFAHGQLLDGLEPAEYFLRFGNGDRDYTQSIAPHDDLGRLCKGARPLGQPEFEQRFGYAYHLDAVKFAGMLTKVCTKHGVEHIQDEVTSVELDEQGNVSHLMLEQRGRHDIEMVIDCTGFRGLIINQALGEPFMDYSDYLPNDRAMALQIEHPDPEKIESLTRSTALGAGWTWRVPLYNRVGTGYVFSSAHRTDDQAADEYLEWLGDSGKGATPRIIPMRIGRVRNAWVKNCVAIGLSGGFIEPLESTAIHMIDHAVRWLTEHMPTRDIAPSLRTRYNRQMDKLYDEVLEFICLHYRLGNRTDDQYWIDARTEMKIPDRLAENLELWQHRLPMPHDIEFATLFDYRVYQTVLLGKQVYDTGYGSGIRDRLRPLKKPIWFQWWKGAKVDLTRILNTMPDHKTLLRDIRGELGQKSFGMAAAVKPTVPMPDAPQVHWAIQNMPSHNEIQSGEKDLQLF

SEQ ID NO: 90367 - protein, 513 aa, Paucibacter sp.
  misc_feature (1)..(513): tr|A0A3N7CAB6|A0A3N7CAB6_9BURK Tryptophan halogenase OS =Paucibacter sp. KBW04 OX=2153361 GN=DBR47_06785 PE=4 S V=1
MTLKALRRIVIVGGGTAGWMCAAALSKLMQPEQGNQPLWQIRVLESDEIGIIGVGEATIPAIKSFNAVLGIAEDDFLRATQGTFKLGIEFVNWGGLGQRYVHGFGAIGQALDGIAFQHHWLRLQAHGRAGDLFDYSINTVAPLQGKFMRPRADMAGSPLAEIAHAFHFDANLYARFLRQHAEQRQVQRTEGRIVEVLQHAEQGQSSGLISGLRLASGEVVEGDFFIDCSGLRALLIEQTLHAGFEDWSHWLPADRAWAVPCASRQPLLPFTRSTAHSAGWQWRIPLQHRTGNGHVFSSAFMEEGAAADLLLSKLDGEALAEPRLVKFRTGRRKQFWVGNCVALGLASGFMEPLESTSIHLIQTAITRLMDLFPRQGLDAADIASYNRQTQFEYERIRDFIILHYKATRRDDSPFWNYCREMAVPDSLLEKMELYRSNGRIYREANELFWEPSWLQVMHGQGLRPRAYHPLADVRPLAQVQDWADNIREVVQRCVGVMPMQGDFIAANCAAPPL

SEQ ID NO: 90368 - protein, 507 aa, Brevundimonas abyssalis
  misc_feature (1)..(507): tr|U3AJF3|U3AJF3_9CAUL Tryptophan halogenase OS=Brevund imonas abyssalis TAR-001 OX=1391729 GN=MBEBAB_0049 PE=4 SV=1
MSDKCITKVLIVGGGTAGWMTAAALSETLKGLALDIRLVESEAIGTVGVGESTIPHIRHFNTRLGINEADFLSRTQATFKLGIEFRDWGRLGDSYIHPFGAYGADPAAHEVELFHHLWTRAGAPESLEAWSLPVAMARRERFTHPSTDPASPLSGFSYAYQFDASLYAAYLRRYSEARGVVRTEGRIADVALHGETGFVTHVTLESGERIDADLVIDCSGFRGLVIEQAMKTGYHDWTRWLPCDRAVALPCEHGGLFPPATRATALKAGWAWRIPLQHRVGNGHVYCSAFLDDDAAETALMDQLEGAALAPPNRLRFLTGKRKLQWNRNCVAIGLASGFLEPLESTSIHLIQAAIGYLLDLFPTGDWDPSDAAEFNQTMDMEYERIRDFLVLHYHATTRDDSEFWNHCRTMTIPDSLAWKMELFRERGVVAAYEHGVFLHPSWVAVYVGQHVTPRRWDPRLDDLDPAAVRADLEGQRRRIAGLAERQPRHADVLGAARAAVMAEARA

SEQ ID NO: 90369 - protein, 508 aa, Pseudoalteromonas sp.
  misc_feature (1)..(508): tr|A0A4Q6J8I4|A0A4Q6J8I4_9GAMM Tryptophan 7-halogenase OS=Pseudoalteromonas sp. MEBiC 03485 OX=2571103 GN=EVU9 2_19695 PE=4 SV=1
MSKKINNIVIIGGGAAGWLTAGLLSKEHPDKSITLIESADIGISGVGEGTWPSMRHTLQRIGIKETDFLQQCDASFKQGSKFINWRGKEQADNYYHPFMVPEGYNEYDVHAAWQQLFSEQKYADAMNVQSFVCQATLAPKQLNTPEYAGVTNYGYHLDAHKFAQFLTKHCVNTLNVKRILDNVLHANNNAQGYIESVTTQNNGVINGDLFIDCSGSQGLLIAKHYQIPFLDQSHILFNNTAVAAHLPYESPSQDIASATLSTAQSAGWIWDIGLPTRRGIGYTFSDKYCDVETAVETLKSYAAQSVGIQQANNIETRTLRFTPGYREVFWHKNCVAIGMSQGFIEPLEASALAMVELSISMLSEQMPVDQVHMQLLRKRFNKRFRYRWKQVINFLKLHYVLSSRDDSSYWSDNHHHKSIPSELQSLLKLWQYQAPSRFDFIENEEIFSSASYQYVLYGMGFKTKQTKKLDNHTYQMAQKLYQLNRKKIAQYLQKLPTNRLLLEQLQRE

SEQ ID NO: 90370 - protein, 500 aa, Rhodanobacteraceae bacterium
  misc_feature (1)..(500): tr|A0A522QVA2|A0A522QVA2_9GAMM Tryptophan 7-halogenase OS=Rhodanobacteraceae bacterium OX=2052182 GN=EPN40_136 60 PE=4 SV=1
MSDRRIRSIVIVGGGSAGWMAAAALSNALQGSCRIELIESDEIGTIGVGEATLPPLKRFNQMLGIDEHAFVAATRGTFKLGIDFLNWSRLGHRYFHPFGQIGVSFDAVPFHQYWLRERARGDATPLQDYAFAWVAARLGRFELPATDSRYVQSTFDYAYHFDATLYARYLRGYAEQRGVVRVEGKVVDVALRPEDGFIRSLTLAGGKVVEADLYIDCSGFRGVLIEGALEIGYESWNHWLPCDRAVAVPSEHGSEPVPYTRAIAHGAGWQWRIPLQHRMGNGMVYCSRHIGDDEAAALLLANLEGKALDEPRLLRFVTGRRRQFWNRNCVALGLAAGFMEPIESTSIHLVQSSLVRLLALFPDRDFDPLAAREFNRITHTEYERIRDFLILHYHATQRDDAPLWRETGAMSIPETLQYKLDQFRSGGRTVAEPLELFQNPNWLAVLVGQEVWPRRHDPLADMRTAVDATRFLADLRGLMEQAAQAMPTHAQYIQRHCSAA

SEQ ID NO: 90371 - protein, 499 aa, Hyphomonas sp.
  misc_feature (1)..(499): tr|A0A059E4G8|A0A059E4G8_9RHOB Uncharacterized protein OS=Hyphomonas sp. L-53-1-40 OX=1207058 GN=L53_10845 PE= 4 SV=1
METQNIRRVVIAGGGTAGWIAAASLSRLLGPLLDITLVESDAIGTVGVGEATIPTHRTFHHLMGIDERDFMRATKATFKLGIAFEEWGGLGDRYIHSFGQVGKSNWMGEFYNIWMYAQERGIGAELDAYCFELQAAEAGRFFTSDKANINYAYHLDASLYAKFLRTFSEAKGVKRVEGLIEEVEQDGESGFITALKLQSGERIEGDLFIDCTGFRGMLIEQTLKTGYEDWTHWLPTDSALAVQTRSVGPAQPYTRAIAHHAGWRWRIPLQHRVGNGLVFCSENMQPDEAKEYLLGHVDGEPLTEPRLIRYKTGRRKKVWNKNCVALGLSSGFVEPLESTSIHLIQVGATRLVQQFPFAGISEAIANHYNEQAERELEKIRDFIVLHYKLTERDDSDFWRARRDMPVPDSLAQRISLFRENGLAYQATDDLFRVDSWLQVMLGQRLKPKGYHHMGHLMTDDQLTTALGGLAANIKRAVSQMPSHQDFIDQYCAVPESETV

SEQ ID NO: 90372 - protein, 389 aa, Pseudoalteromonas sp.
  misc_feature (1)..(389): tr|A0A4V2BV13|A0A4V2BV13_9GAMM DUF1864 family protein O S=Pseudoalteromonas sp. MEBiC 03485 OX=2571103 GN=EVU92 _03840 PE=4 SV=1
MTENTKAFDSWLRTRFVEINSELEKLYWQQDDKVNVEGVGEDLKRQLEQEGNEHIRALLAEGNTDEGFDNAFDLLGNVGLYMAACRRHEITEPSRETTSPLVEASALAMHIGASIGVTPRFATAHLTTHNKAVDGLYKRFTDLEDEKIFVDYNTKGILAYKRAADALLKIQPLGISHPIAADLLAVAKQALLDVIESNNALYNKLDTDRFFYCVRPYYKPYRVGKEVYRGANAGDFAGINVIDLLLGLCFANEPSYSQMLVDKFLYMMPEDQQILRESMRMTSIMDDFLAAEAERDSEWLQTNLKLFIQVCKLHGDTAIGHHNQLVSKYIAQPSQKMQQQHMDKVTASGPPLHMLLNSLEQLRDRRAAAKRDDIRTRFDDLTKLKQWIK

SEQ ID NO: 90373 - protein, 270 aa, Pseudoalteromonas sp.
  misc_feature (1)..(270): tr|A0A4Q6JFN1|A0A4Q6JFN1_9GAMM Tryptophan synthase alph a chain OS=Pseudoalteromonas sp. MEBiC 03485 OX=2571103 GN=trpA PE=3 SV=1
MSQTNRYGQLFATLNETNQGAFVPFVTIGDPNKALSVEIIKSLIDGGADALELGIPFSDPIADGPVIQAANIRALDENINTQDCFDIIKQVREYNADIPIGLLLYSNLVFKRGIEKFYQDAKEAGVDSILVADVPLHESKLFRQTAMKNGIDPIFIATPNADDDTLRECASYGRGYTYLLSRAGVTGTETKAQMPADSLVKKLKDYHAAPALLGFGVSTPEDVKSALESGAAGAISGSAVVKIIEANLDDKAAMLSGLKEFIASMKAATK

SEQ ID NO: 90374 - protein, 498 aa, Arsukibacterium ikkense
  misc_feature (1)..(498): tr|A0A0M2V9S0|A0A0M2V9S0_9GAMM Tryptophan halogenase OS =Arsukibacterium ikkense OX=336831 GN=WG68_07800 PE=4 S V=1
MQSQAIKRVVIAGGGTAGWMAAAAIAKLMGKHLQICLVESDDIATVGVGEATIPPLLTLHKLLGINEAEFMAATQATFKLGIQFENWRDQGQDYIHSFGTTGQDCWAAGFQHFWLKGQQVGLASDYGDYCPELLAAQAGKFAHLPNRPLNYAFHFDAGLYAKFLRTMAEQHGATRIEGKIAKVETCEQSGNITALQLVSGECIAGDLFIDCTGFRALLIEQTLHTGFDDWSHWLPCDSAIAVQTRATREPVPYTRSIAHGAGWQWQIPLQHRVGNGLVYCSKYYSDDEAKALLLANLSGDLLTEPRLIKFRTGMRRKHWNKNCIALGLASGFIEPLESTSIHLIQRSIVRLLQMFPLHGISLADVDEFNQQTEHEVLNIRDFIILHYHVTARRDTAFWRYCQSMPIPESLAHRIRLFKETGRVFKVPNELFGENSWTQVMLGQGITPEQYHPIVELMSEQELSHFLSQIKLQNQRLVAQLPSHQAFLQSYCPAMSNRV

SEQ ID NO: 90375 - protein, 510 aa, Xanthomonadaceae bacterium
  misc_feature (1)..(510): tr|A0A2A3LFM2|A0A2A3LFM2_9GAMM Tryptophan halogenase OS =Xanthomonadaceae bacterium NML93-0399 OX=2032565 GN=CM Z84_15215 PE=4 SV=1
MPDTSHPGPAVRRVVIAGGGTAGWMVAAGLSRALGKLLDIVLVESDEIPTVGVGEATIPTLVTFHRALGLDEREFMAATQATFKLGIRFADWKTRGEEYVHSFGTTGKDHWSAGFQHFWHRGRARGIAGDYGDYCLELRAALEDRFAHLPDNGLNYAFHMDAGLYARYLRRFSEAHGVRRIEGRIAEVQADRASAHIKALMLASGERIDGDLFIDCTGFRGLLIEQALGVGYEDWSHWLLCDSAIAVQTTPVGPAVPYTRSTAREAGWQWRIPLQHRVGNGIVYSSRYVDDAQARDTLLEHLEGERLTEPRTIRFRPGQRLRTWHGNCVAIGLASGFLEPLESTSIHLIQRGIVRLLQMFPAGGIAQTDVDEYNRQSREEIESIRDFVILHYKVTDRDDTPFWRACREMDVPASLAHRIALFADSGRVFREGFELFAENSWVQVMLGQGLVPRSHHPTADLMDDAELSRFLGQIRDRVSHTLAQLPAHETYVRGYCPAATPRGPAAAADR

SEQ ID NO: 90376 - protein, 520 aa, Arenicella xantha
  misc_feature (1)..(520): tr|A0A395JUH7|A0A395JUH7_9GAMM Tryptophan halogenase OS =Arenicella xantha OX=644221 GN=DFR28_101583 PE=4 SV=1
MIENANNAINKVVIVGGGTAGWMTAAALSEVLSNTGCEITLIESEQIGTVGVGEATLPHLRFFNQRLGIDEPEFMRAVNATYKLGIEFANWGQKGDSYIHPFGDFGKPQNNIAFHHYWVKSHLHGNKTPIGDFSLPVVASQQAKFDFPAQDLNSLLSTFSFAYHIDAGLYAKYLREYSEQRGVTRKEGKVIGVNQDAETGFITSVEIDDGTQIEGQLFIDCSGFRGLLIEQALETGYEDWQHWLPCDRAVAIPCAANPNQASIPYTRATADEAGWRWRIPLQHRVGNGHVYCSDFMSDEQAERTLRTNLEGEPERDANFLRFTTGRRKKMWNKNCVAIGLSAGFLEPLESTGIHLIQLAIMKLIEFFPDQSIDPAFSDEFNRVMQMEIERIKDFLILHYNATERDDTEFWNYVRTMSLPDELQRKMELFERTGHVVKYQEGLFLEPSWIAVYLGQRKIPRAYDPRLDALSIDQLDAQLEKLKQSIVRAVNGMPSHSQAIKQIGDPANLGWKNTSMNLYGH

SEQ ID NO: 90377 - protein, 522 aa, Pseudoalteromonas sp.
  misc_feature (1)..(522): tr|A0A4Q6JFT5|A0A4Q6JFT5_9GAMM Anthranilate synthase co mponent 1 OS=Pseudoalteromonas sp. MEBiC 03485 OX=25711 03 GN=EVU92_14180 PE=3 SV=1
MIFSHITTTPGEVTSITQVRDYISSPLALYSLLDKPNSLLLESAEIDSKDSVKSLILVDSALRIVCQGKQVTLTAQSNNGKQLLPYLQSHVQNCSAELVDDTLTLTYNEIASDIDEASKLVADNAFSALRSCINSIKSTTDNPFSVFLGGVFAYDMVANFEALSDVPDGENSCPDYVFYLAETLVVIDHQAKTTELIGNVFNGPEVHANCFEVGQQLERLNTVCDNAQSYQGQKQTGSNPISIDVSDEQYCEHVIRLKKNIVDGDIFQVVPSRTFSLACPDSLHAYSQLKQQNPSPYMFYMRDEEFVLFGASPESALKYCPESKQVEVYPIAGTRPRGKFANGQINPDLDSRIELELRNDQKERAEHLMLVDLARNDVARISVPGTRHAKELLKVDRYSQVMHLVSRVVGTLKPELDALHAYQACMNMGTLVGAPKVRAAELVRQTEQKRRGSYGGAVGYLTGDGAMDSCIVIRSAFVKNGTAFVQAGAGVVFDSEPQSEANETRAKAQAVITAIQSTYEAQ

SEQ ID NO: 90378 - protein, 505 aa, Sphingomonas sp.
  misc_feature (1)..(505): tr|A0A0Q4G303|A0A0Q4G303_9SPHN Tryptophan halogenase OS =Sphingomonas sp. Leaf17 OX=1735683 GN=ASE75_01070 PE=4 SV=1
MTDPQALRDIVIVGGGTAGWMCAAALSRFVANDTTRVTLIESDAIGTVGVGEATIPTINFFNQMLGIDEDVFLAEVGGTFKLGIEFSDWGKIGDRYLHPFGQYGQTMEGLQFHHIWAKLAGMGKAAPLSDYSPCAVASAAGRFARQAGDPRSPFSRPAYAFHIDATLYARYLRGYAEGNGVTRLEGRITQVDRDGESGHVTTLMLDDGRTVAGDLFIDCSGFRSLLLGDTLGVGYEDWSHWLPCNRAVAMPTATVGPPAPYTMAIARDAGWQWRIPLQHRTGNGMVYADAFMDPATAEATLRANLAGPPTGDARHLSFKAGRRDRFWEGNVVALGLAGGFLEPLESTSIHLIQTGISKLLALLPDRRFAAIERAEYNRLMIRSYDGVRDFIILHYAATTRNDTPFWNHVRTMELPDSLSSKIELFRQKGRFFRYDDELFEIASWVAVLYGQGVIPDGYDPIVDALDETRLAAALDHMRGHIRACVGAMPSHADFIRQHCAMGTRV

SEQ ID NO: 90379 - protein, 507 aa, Arenicella xantha
  misc_feature (1)..(507): tr|A0A395JNY9|A0A395JNY9_9GAMM Flavin-dependent dehydro genase OS=Arenicella xantha OX=644221 GN=DFR28_101757 P E=4 SV=1
MSKEIKSIAIIGGGTAGWLTAAIIAAHHKSNDPNALKVTLVEASDIPTVGVGEGTWPTMKNTIHRIGLKESELFAKCHAAFKQGGKFVDWVHGNGDFYYHPFTVPLGYGRIDLAPYVSQIEDFAIESNFQHHICEAGLAPRSLSEGEYQGQCNYAYHLDAGAFAQVLKEFCKNELNVAHQIGTVGDVTLGNDGAIESVLLNDGGTVSADLYVDCTGFSSLLLGKHLNVPFVSADQYLFNDSALSAHIPYTDEQDPIVTHTVATAQNAGWIWDIGLTHRRGVGHVYASEYLSDDEAEANLRRYLGPQSDQLSARKISFSSGHRAQFWKKNCVAVGMSAGFVEPLEATAIMLVEVAARYIAENLPPDTSIMRITEKRFNEQMDYRWRRIIDFLKLHYMLTKRTEPYWQAHTESDSIPDSLKEDLEIWGHRGPVNSDFDSAVELFPAASYQYVMYGMGFKPDFSRQAYLYQEQQKAQRIMQQNRQITEQMLKSLPAHRDLIDRWMASTQR

SEQ ID NO: 90380 - protein, 502 aa, Arenicella xantha
  misc_feature (1)..(502): tr|A0A395JNW5|A0A395JNW5_9GAMM Tryptophan halogenase OS =Arenicella xantha OX=644221 GN=DFR28_101582 PE=4 SV=1
MADKQSGAILKIAIVGSDLHAWSTAARLAVALRNQGVTITVVAASEINPPPVVAFGTSAHAYHQALGVREVDLIKHLNGAYRYGTRYLAWGSADDDVIHTFSPCGEMLERVHFHHFLSRLRLQGETIDPEHYSLAASASRQNKFTHPQANTPYQLIDYAMQFDGHRYAQFIRSFALDNGVKHVVAGVHQVVRSKDSGDIQRLVLTDQSELEADFLFDASGSIAALISGALHVPWKSWSNCLPYDQQLELMRNTRAATPVVNKLINNAAGWLRTDAVPGVTFAQQVYCSKSTTADQALAAAEQACAGDEPLRVSGSRELQVGIRTHSWQNNCVAVGAAAASLTPLYFDEYHFTHTALDRWLSLYPLCGDSTLSAEEYNRMTRLEYASARDIHTLRLLTERPSSEPTSSPAHEVVWPNSLLHRVALFEQTGQVAFYESDLLEKHQWVSLFMACGIWPQRYDPLAAKISLDDSRRVVGAIADKIVQSAHKMPDHDALLRAIRNTQ

SEQ ID NO: 90381 - protein, 589 aa, Streptomyces mobaraensis
  misc_feature (1)..(589): tr|M3B5S1|M3B5S1_STRMB Tryptophan halogenase OS=Strepto myces mobaraensis NBRC 13819 = DSM 40847 OX=1223523 GN= H340_07071 PE=4 SV=1
MREYYDVVIMGGGPAGSTLGALLAQRSDLRTAIFDKEVFPREHIGESFAHPVVPALQESGALAKVLASPCWVKKYGGVYAWDPDRPSVALFDRALFEKDGVLRWTMHVNRAEFDHILLDHAADVGVEVFQGTAVTAYEPDANGGVVRLADGTSVRAGYFVDASGRQSSVSAARNKRGWLSNFKNIAIWQHFTGGGHTQNLPADWNVFTSDNFSPIGCFAFRDGWCWYIPVPKVIDGRRVLTHSVGIVTNPAVLKEPGRDYTDQATFLAAVREVPYLKDLVTDVVPVADHMITATNYSRVAEEFGDYDERHLLVGDAAFFVDPLFSSGVAVALTQAQAAALLLLKTTGGSLEEADRRQLWRDYNDKWHGTAETFALMIDQWYHAIAKNNPDSVYWNTRGTGADLGIREQTFDALLNTAFQPALLDVMTHNSRRVEDLDAAGPYLSATALAEPAGLTPDAVLTLAPTTAVRDSVTMLVPGFKATNPPANVQLPPAVLAGMAEYWKNPLTHHAAAPAPLRDTVPCKRIHSTEDPHGPSIDADVRRDGVDELWELLSAGPVKYGEIAGRLTPAQVRLVKRMCVGGFLTVTPAA

SEQ ID NO: 90382 - protein, 366 aa, Sphingomonadaceae bacterium
  misc_feature (1)..(366): tr|A0A2D6KSM1|A0A2D6KSM1_9SPHN Tryptophan halogenase (F ragment) OS=Sphingomonadaceae bacterium OX=1930536 GN=C MN66_11265 PE=4 SV=1
WPGGAVAYALHFDAGLVAAFLREHAEAAGVERLDRRIVGATRGEGERIAAVQFDDGETLAADFYIDCSGFRGLLVEETLNAGFEDWKRWLPCDSAIAAPTAAQQQRAPYTVATARSAGWQWRIPLQHRTGNGLVYASDFISDADAHEELLSGLDGEPLADARVLRFTAGLRKRAWVGNCLAIGLSAGFLEPLESTSIHLIHTGLNRLLDLFPDRGFDPALADAYNRDVWREYAHIRDFLLLHYAPNRREGEPFWDHMRGLDLPDTLAEKIELFTRTGRIMSKQRELFSDISWFYVMHGMGLEPAATDPLVDVAPSAEVRKVIDQLSGAMKAFRSAAPTHDAILERLLDPSETRRPQFGTGGGWATR

SEQ ID NO: 90383 - protein, 115 aa, Sphingomonadaceae bacterium
  misc_feature (1)..(115): tr|A0A2D6UK12|A0A2D6UK12_9SPHN Tryptophan halogenase Pr nA (Fragment) OS=Sphingomonadaceae bacterium OX=1930536 GN=CMN65_02075 PE=4 SV=1
MTQVQGEGSGADPLRSICIVGGGTAGWSAAALLARVLRGSGCRITLVESSAIPTVGVGEATIPPIFDFLRNIGADEVEFIRRCQATFKLGIQFRDWLHRDHAYWHPFGNLGVTIN

SEQ ID NO: 90384 - protein, 512 aa, Paucibacter sp.
  misc_feature (1)..(512): tr|A0A3N7CNR9|A0A3N7CNR9_9BURK Tryptophan halogenase OS =Paucibacter sp. KBW04 OX=2153361 GN=DBR47_06120 PE=4 S V=1
MQPKPPELLKTVVIVGGGTAGWMTAAALSTALRGRYQIRLVESDEIGIVGVGEATIPMIQVFNRIIGVDENDFLRETQGTFKLGIEFVNWGRLGDRYMHGFGPVGQALWTVPFDQYWHRMNGLGRAQDLGAYSITRMAALANKFMPARDDLENSPLNHIAHAYHFDASLYARYLRKLCEGRGVQRIEGKIVSVSQQEAGEHAGHVQALQLENGQRVEGDLFIDCSGMRALLIEQTLKTGYEDWTHWLPCDRALAVPCESVLPLTPYTRSTAHRAGWQWRIPLQHRIGNGHVFSSQSISEDEAAATLLANLDGKPLAEPRLIKFRTGMRRKSWHKNVVAIGLSSGFLEPLESTSIHLIQAAIQRLIDFFPDRGFNPVDVEEFNRQNRFDYESVRDFIILHYHLNQRQDSDFWKACTSMEVPESLRQKMALYRAHGRIVRFNNELFSEVAWLQVMQGQNLRPEAHHPLADLMPEQEVFDYLEGVRGVIGKCVDVMPDHAAYIKKFCAAKPPAKM

SEQ ID NO: 90385 - protein, 517 aa, Sphingomonadaceae bacterium
  misc_feature (1)..(517): tr|A0A2D4XZS8|A0A2D4XZS8_9SPHN Tryptophan halogenase OS =Sphingomonadaceae bacterium OX=1930536 GN=CMN67_00495 PE=4 SV=1
  misc_feature (172)..(173): Xaa can be any naturally occurring amino acid
  misc_feature (185)..(185): Xaa can be any naturally occurring amino acid
  misc_feature (189)..(189): Xaa can be any naturally occurring amino acid
  misc_feature (201)..(201): Xaa can be any naturally occurring amino acid
  misc_feature (210)..(210): Xaa can be any naturally occurring amino acid
  misc_feature (221)..(221): Xaa can be any naturally occurring amino acid
  misc_feature (226)..(226): Xaa can be any naturally occurring amino acid
  misc_feature (234)..(234): Xaa can be any naturally occurring amino acid
  misc_feature (257)..(257): Xaa can be any naturally occurring amino acid
  misc_feature (268)..(268): Xaa can be any naturally occurring amino acid
MSGEFTNLVIVGGGTAGWLSACLLAARRPELAITLIEAPDIPTVGVGEGSWPTLRETLAVIGIDETEFLTECDASFKQGSRFDGWVDGSERDCYYHPFSAPLSGSMPDILTAWKMQNDGQPYAEAVSPQAAICNRDLAPRQRTMPPFAGALNYGYHLDAGKFGALLASHGVXXLGVRHVHGKVTXTERXVDGLFTRLLLDXGSAIEGDFXIDCTGMASKLXGEELXIGWVDRSXVSFNDRALAVQVPVVPDSAIASXTIGTAHRAGWXWDIGLPTRRGVGCVYSSRFLSDDEAQAILMNYVGAKIAGAEQAALTPRGLKFSTGYREKFWAGNCLAIGLSAGFIEPLEASAIVLIELSLKALADGYPQSRAALPRLTDRFNSLFRYRWERIVDFLKLHYVLSTRTEPYWQAHRDPATIPSSLAAHLDLWRDHAPSSGDFPQIDEIFSAASHQYVLYGMRFPQPADISSAPSSEVQRQFAKVAERSRALSAALPSNRAYFDALCSSMDKNSARGVPTRQ

SEQ ID NO: 90386 - protein, 341 aa, Bradyrhizobium sp.
  misc_feature (1)..(341): tr|A0A1H8JRS8|A0A1H8JRS8_9BRAD Tryptophan halogenase OS =Bradyrhizobium sp. OK095 OX=1882760 GN=SAMN05443254_11 243 PE=4 SV=1
MAVIARIEGRGRGRGEVLSPLVQPVLRQLGLWPAFLAQDFAPSHRTLTSWDGEGLTSSELLLEARGPSWRVDRAAFDGWIATEACSAAERIDAKVSRLAREADGWSVACDDGTSHSARLIIDATGRARALADRQGFRARAQDRLIAAYAEATISGPAAPELLVEAFEDGWWYTLALGEGRRAFACMTDSDLARGLRLNTPDGWRAALAKTQFVAAVASRGVQFEQARLIPAGGRTAATATGFRFLCAGDAASAFDPISGHGVVKAMRSGVFAAYAASDCLARGDTAALGRYDSWVAREAAVYATTLGEHYGSVSRWADRPFWQRRRADVSSRNSLSNLSEQ

SEQ ID NO: 90387 - protein, 496 aa, Arsukibacterium ikkense
  misc_feature (1)..(496): tr|A0A0M2V6B6|A0A0M2V6B6_9GAMM Tryptophan halogenase OS =Arsukibacterium ikkense OX=336831 GN=WG68_11635 PE=4 S V=1
MNNAVKKVVVLGGGTAGWMAAALLKKVLAGAIDIELVESEDIGTVGVGEATIPPIRLFNNVMGINEAEFLRETKATIKLAIKFDNWRVPGEGYFHTFGAPGKSLAFCHFHHLWLRARQHGDKTDLWQYDLNYLCAMAGKFAPINAKDSILELPYAYHFDAGLYARYLRKLSEQMGVTRHEGKVQQVFQHPNGDIKCLVLEDGRELSGDLFIDCSGFRGLLIQDKLNAGYDDWSHFLPCDRAVAVPSERFEKTLPYTRSIAHSAGWQWRIPLQHRNGNGLVYSSAHYSDQQAADLLLTNLDSKAVADPKFLRFKTGRRRQQWQRNVVAVGLSSGFLEPLESTSIHLIQSAVVRLIQLFPHNGICQSAINEYNKQSQLEFEQIRDFLILHYHVNERSDSQFWRDMQQLAIPDSLRQKMAIFADNGQLFREQNDLFLESSWLQVMLGQGIEPKDYHPIASNFSIEKLREMLANIQAIKQEPLSKLPDHDTYIQTMISRG

SEQ ID NO: 90388 - protein, 500 aa, Sphingomonadaceae bacterium
  misc_feature (1)..(500): tr|A0A2D4XZV8|A0A2D4XZV8_9SPHN Tryptophan halogenase OS =Sphingomonadaceae bacterium OX=1930536 GN=CMN67_00510 PE=4 SV=1
MSSDYKPRRIVVAGGGTAGWMTAAALAKTMGDAIDLTLVESDAIGTVGVGEATIPPLINFNRLLGINEAEFMRETQATFKLGIEFENWKRDGEKYFHSFGSTGRDHWSAGFQHFWGEGLLRGHDYSYDDYCLELCAAYAGKFAHLPDNRLNYAYHLNATAYAAFLRRIAEGAGASRVEGKIAHVELDGESGNIAAIGLENGQRLEGDIFVDCTGFRSLLIEGALHVGYDDWSHHLPCDSAIAVQTELSASPVPYTRAIAHDAGWQWRIPLQHRGGNGIVYCSRYLSKDAAHDRLMSTLEGKAISEPRAIPFTTGARRKQWHRNCIAIGLSSGFLEPLESTSIHLIQRAVIRLLRMMPAGEVSERDIAEFNDQQLTDMIQVRDFLILHYKATDRRDSAFWRQCATMDIPDSLTQKMELFRETGRVFRKNDELFVENSWVQVMLGQGILPQAFHPVAKKMSDEELSKFLEMLRTNVARTVQGLPAHHAYVAQFCGAKEVAAA

SEQ ID NO: 90389 - protein, 495 aa, Pseudoalteromonas sp.
  misc_feature (1)..(495): tr|A0A2N1BF70|A0A2N1BF70_9GAMM Tryptophan halogenase OS =Pseudoalteromonas sp. GutCa3 OX=888433 GN=CXF64_06115 PE=4 SV=1
MTKTNAVKNVVIAGGGTAGWMAAAALAKLVGNNINITLVESDDIGTVGVGEATIPPIRTFHKLLGINEQAFMKATQASFKLGISFENWGDENTHYIHSFGATGKECWAGEFHHFWLQGKTLGINNPFGDYCYELQAAKGGKFAFNQQNPINYAYHMDATRYAQFLREFSEPLGVKRIEGKIQKVVKNTKTGHIESLILNNGEHINGDFFIDCTGFRGLLIEQALHTGYEDWSHLLPCNSAIAVQTKSTSETVLPLTRSIAHKNGWQWRIPLQNRVGNGLVYCSQYMDDEQAKALLLNNIEGEPLTEPRIIKFKTGRRLKGWNKNCLALGLASGFVEPLESTSIHLIMSGIIRFMRLFPFNGITNHAIDEYNKQLKSEIENIRDFIVLHYKVTNRDDSEFWQHCSAMEVPKTLQHKIDLFKQTGRVFLDDGDIFRVDSWVQVMLGQGIEPNQHHLIASMMSDEELTRFLHGIKQQIEQRVSQLPPHHEFLKQYCPA

SEQ ID NO: 90390 - protein, 500 aa, Sphingomonadaceae bacterium
  misc_feature (1)..(500): tr|A0A520X289|A0A520X289_9SPHN Tryptophan 7-halogenase OS=Sphingomonadaceae bacterium OX=1930536 GN=EX262_0244 5 PE=4 SV=1
MSEEKAPDVVILGGGSAGWITACLLHQQWAAKGGSVTVVESPEIGIIGVGEGSTPQLKAFFDQLGIDEAEWMPACNATYKLGIRFTGWSERPGFESYYHPFPGPVDMHSEPHFVHNCALARHGLDVPAHPDDWYLASLLSEEGKGPHPAETFPFVPSYGYHFDAHALGAFLRDRAVRKGVVHRPLKVTSVERTSGGDIAALQCEGGERVEGELFVDSSGFRAMLAQEELGATFLPFAENLFNDRAVVLPTPHSGKFKPQTEAIAMRAGWRWKIPLTTRVGNGYVYSSNHISDEEAEAELRAALGLEESEQQARVLRMKVGRLEHSWTRNCLAAGLAQGFIEPLEATALHIVIATTLEFAQAYEAGGFSDRHRDTFNASIAARYEGIRDYIVGHYRLAQRSDTPYWRENIANDRLSDNLKKMMTAWFRQADLLAANDEAYGGKRYYANASWHCLFAGYGTFPPTEKLQSPPPQARPADLAQVKTILATCARNFEPYNPLAD

SEQ ID NO: 90391 - protein, 562 aa, Ruegeria sp.
  misc_feature (1)..(562): tr|A0A366WWA1|A0A366WWA1_9RHOB Tryptophan 7-halogenase OS=Ruegeria sp. A3M17 OX=2267229 GN=DS906_18900 PE=4 SV =1
MNNRLRKITIVGGGTAGWMTALILDMVFSRTSAPKDRPRLCLIESPNIATVGVGEATVPRMPVTLRQAGISERDFFRETNASFKLGVKFCNWNKDAKGNRIDYVNPFAHGQLLEGLEAAEYFLRFGNGDRDFTQSISPHDDLARLCKGGRPLGQPEFEQRFGYAYHLDAVKFAGMLSKVCTKRGVEHIQDEVQAVELDEQGNVSHLMLERKGRHDIEMVIDCTGFRGLIINKALGEPFMDYSEYLPNDRAMALQIEHPDPEKIESVTRSTALGAGWTWRVPLYNRVGTGYVYSSAHRTDDQAAEEYLEWLGDSGKGLTPRVIPMRIGRARNAWVKNCLAIGLSGGFIEPLESTAIHMVDHAVRWFAEHLPTRDIEPSLRARYNRQMNNLYDEVLDFICLHYRLGNRTDDQYWIDARTEMKIPDRLAENLELWQHRLPMEHDIEFATLFNFRVYQAVLLGKQVYDTGYGTGIRDRLRPLKKPIWFQWWKGAKVDLAQILKAMPDHKTLLRDIRGELEQPPAFGKAAAMQPTVAMPGEQLAPVAIQNMPNLAEIQSGRKDLQLF

SEQ ID NO: 90392 - protein, 503 aa, Streptomyces sp.
  misc_feature (1)..(503): tr|A0A0N0TIU3|A0A0N0TIU3_9ACTN Tryptophan halogenase OS =Streptomyces sp. NRRL B-3648 OX=1519493 GN=ADL04_06565 PE=4 SV=1
MTASYLKAAFGDRIDITLVESGKVGTIGVGEATFSDIRHFFEFLGLKESDWMPACNATYKLAVRFENWREKGHYFYHPFEQVRSVNGFPLTDWWLQQGPTERFDKDCFVMASVIDAGLSPRRLDGSLLDSPFDENAEEMRGLTMSEHQGKTQFPYAYHFEAALLAKYLTAYAVERGVRHVVDDVTDVGLDERGWIKGVMTAGHGELTGDLFVDCTGFRGLLLNKALEEPFISYQDTLPNDSAVALQVPMDMERRGIRPCTTATAQDAGWIWTIPLMGRVGTGYVYARDYLSPEEAERTLREFVGPAAADVEANHIRMRIGRSRNSWVRNCVAVGLASGFVEPLESTGIFFIHHAIEQLVKNFPGPDWDPVVRDRYNDGVAHVMDGVREFLALHYQAAKRSDTQYWRDTKTRALPDGLAERIEKWRAQLPDSESIFPYYHGLPPYSYMCILLGMGGIDVKPSAALALSDFSAAQQEFDAIRDKARQLVKTLPEAYTYFSRMHQP

SEQ ID NO: 90393 - protein, 508 aa, Arenicella xantha
  misc_feature (1)..(508): tr|A0A395JIQ7|A0A395JIQ7_9GAMM Tryptophan halogenase OS =Arenicella xantha OX=644221 GN=DFR28_103337 PE=4 SV=1
MTNQQSNNPVQNVVIVGGGTAGWITAAAFSRVLVPQGYNVTLIESDAIGTVGVGEATIPPIRDFHRMLGINEADFVKETQATFKLGIEFNGWSNPESRYFHPFGEYGRKLDSVQFHQYWQRASSLTDCGELSDFSLCSVAAYQGKFAPTSQDPESILSGIGYAYHFDASRYARFLRSYSEQRGVRRVEGKVVDVLQNANNGFIEGVQLESSDVIKGDFFIDCTGFAALLISKTLNVEYEDWSDLLPADSAVAVQCKKSSTPIRPYTQTFAQDGGWRWRIPLQHRTGNGFVYSSKFTSDEDAVSTLLAGLDGEPLSEPRKLKFRTGKRQQSWSHNCVAVGLSAGFLEPLESTSIHLIQTAVIRLLSMFPGKEFEPAQIQEYNQQVNDEVAFIRDFIILHYHLNDRPEPLWTYCREMSIPDSLAQKISLFKSRGHVVEAQYDLFKTASWVAVMRGQGVHPSYYDPMAESKPEKQLLGIMQELKAAYQRASEAMPAHDEFIAQHCQAAVPK

SEQ ID NO: 90394 - protein, 394 aa, Pseudoalteromonas sp.
  misc_feature (1)..(394): tr|A0A4Q6JFN7|A0A4Q6JFN7_9GAMM Tryptophan synthase beta chain OS=Pseudoalteromonas sp. MEBiC 03485 OX=2571103 GN=trpB PE=3 SV=1
MQNPAYFGEFGGMFVPQLLVPALKQLEAEFNKSQKDPAFQAEFEKLLNEYAGRPTPLTLTRNLVKNPKVKLYLKREDLLHGGAHKTNQVLGQALLTKRMGKKEVIAETGAGQHGVATALACALLGLKCRVYMGAKDVERQQPNVFRMKLMGAEVIPVTAGSGTLKDAVNEALRDWSANYKDAHYLLGTAAGPHPFPTMVREFQKMIGEEAKQQVLKAEGRLPDAVLACVGGGSNAIGMFTDFIDEPSVKLIGVEPAGKGLDTHQHGATLCKGTKGILHGTYTYIMQDDDGQIEESYSVSAGLDYPAVGPQHAHLHETGRAQYVGISDTEALEAFQLLAKNEGIIPALESSHALAYALKYAEQQTEDTILVVNLSGRGDKDLAHVHSVLSEGGAL

SEQ ID NO: 90395 - protein, 424 aa, Pedosphaera parvula
  misc_feature (1)..(424): tr|B9XPY2|B9XPY2_PEDPL Tryptophan halogenase OS=Pedosph aera parvula (strain Ellin514) OX=320771 GN=Cflav_PD131 8 PE=4 SV=1
MKTDYDVIVIGGGPAGSSAAAILAEKGHKVLVLEREKFPRYHVGESLLPFTFHPLQRLGLVEKLRASQFVKKFSVQFVSPSGRASQPFYFFNRYDKDVAQTWQVLRSEFDQIVLDHAREKGAHVIEEITVTELLKDGDRVIGARTKDKTGKITDYHAPLTFDCTGKESFAAVRNGWRIKDPMLNKVAVWTYYKGALRDEGIDAGATTVAFVPEKGWFWYIPQHNDIISVGVVAEGKYLSRDGVRDPEKMFLREVTQNKWIEQHLAVGKQFGPYYVTNEFSFHSKYCATEGLVLVGDAFCFLDPVFSSGLMFAMKSGVLAADYADEALKAADFSPARFEGYGKTLREGIENMRKLVYAFYDPNFSFRKLTDKYPDLAGDITDCLSGDINKDFTKLFTAIKEFAEIPESLPYGQPLIKPDAQMQAA

SEQ ID NO: 90396 - protein, 493 aa, Alteromonas mediterranea
  misc_feature (1)..(493): tr|S5AI20|S5AI20_9ALTE Tryptophan halogenase OS=Alterom onas mediterranea 615 OX=1300253 GN=I633_20735 PE=4 SV= 1
MNKSVKTIVIAGGGTAGWTAAAAIAKQMGPTVNITLVESDEVGTVGVGEATIPPMRVFHKLLGIDEKDFMRATSATFKLGIQFENWGQKGDNYIHSFGVTGRESFVAPFHHFWLYGKEQGVANDFGNYCFELEAAKQDKFATSQNANIQYAYHLDSSLYATLLRNYSETRGVTRKEGKIEQITQNKETGFIESLKLASGDVIHGDFFIDCTGFRGLLIEETLKTGYEDWSHWLPCDSAVAVQTESDSAPRPITKAIAHDSGWQWKIPLQHRTGNGLVYCSKYLSDEHATQRLLDNITGNTITKPRIIKFKTGRRLKAWNKNCLALGLSSGFVEPLESTSIHLIIMGIIRFLKLFPNGGVSELIADEYNRQTLEEVVKIRDFIILHYHATYRKDSPFWQYCHDMEVPDTLKHRMQLFKEFGHAFQEDGELFRVDSWTQVMLGQGIMPESYHASVKGMPAKELQRFLQGIELSVLKGLENMPSHETFLKHYCSSR

SEQ ID NO: 90397 - protein, 500 aa, Arenicella xantha
  misc_feature (1)..(500): tr|A0A395JL93|A0A395JL93_9GAMM Tryptophan halogenase OS =Arenicella xantha OX=644221 GN=DFR28_103163 PE=4 SV=1
MTDKIINNVVIVGGGTAGWISAALLVRMLGKTLNVTLVESDQIGTVGVGEATIPPILTLNQALGIDQADFMAKTNATIKLGIEFENWRKPGHKYMHAFGKLGKDFPFCGFEQLWLRGLKAGYSSDFWDYSLNYQAAKQGKFALLDNIPKTDMQGLVYAFHFDAGLYANYLRELSERAGVTRIEGKVKQVDRHTASGDITSLVLDDGRTVDGDLFIDCSGFRALLIGETLGVEYEDWRHWLPCDSALAVQSEASLPVPPYTQSIAHSAGWRWRIPLTKRTGNGIVFSSQHMHEEEARQYLLDSLDGAAITEPRLLRFTAGRRASQWHKNCVAIGLSSGFLEPLESTSIHLIQTAVIRLLKLFPHAGIKATEVAEYNRQAAEEIEHVRDFIILHYHATEREDSEFWRACRSMDIPDGLRHKIELFRQSGKVYNPTEALFSDVAWQQVMLGQGIVPNDYHPLADAMSEAQLAEYHRNVKSIIKQVVEKLPLHQDFLDVVHRKS

SEQ ID NO: 90398 - protein, 584 aa, Beauveria bassiana
  misc_feature (1)..(584): tr|A0A0A2VID2|A0A0A2VID2_BEABA Tryptophan 2-halogenase OS=Beauveria bassiana D1-5 OX=1245745 GN=BBAD15_g7321 P E=4 SV=1
MAVPSSCTVLVVGGGPAGSYAAACLAREGIDTVLLEAEKFPSITIRYHIGESTLPSLRHFFQFIDVYHKINAHGFYHKNGAVFRLAQGQPDAYTDFLEVGGPEGYAWNVLRSEFDDILFRHAGVCGAQIFESTEVKQILFARERENTAAVPDDDEVTVDAPRPESAIWARKNGTSGSISFKYLVDASGRQGILSTKYLKNRRVNDNFKNVANWAYWKSDNIYGPGTHMQGSPYFEALDDASGWAWFMPLHDGTRSVGIVQDQKQAARAKRDLGRPSGLEYYKLALKMAPTTQNLLAGAELASDVRSASDWSYTASTYHLPNARICGDAGSFIDPLFSSGVHLAITGGLSAAATIAASVIGDCDEHTAGAWHSKKTVQSYSRFFLAVSSATKQIREKHLPILQDLNEEGFQRAFDLFRPIIQGTVDNDTRSKVTQAEISKILEFCSKSFTYVAPEQKEALFKKLTKLGVNGEDSDVSWANGLGDLQHHLTADELKVLGILQSRRLTREDPFEIDSFTLDPIDGLAPSLVRGSLGLVNSEQARIDPGCLFSPEFLDGKRPGIREGSIFHSSDGEDRLNKEAVETVA

SEQ ID NO: 90399 - protein, 571 aa, Leucoagaricus sp.
  misc_feature (1)..(571): tr|A0A137QNS0|A0A137QNS0_9AGAR Tryptophan 2-halogenase OS=Leucoagaricus sp. SymC.cos OX=1714833 GN=AN958_06763 PE=4 SV=1
MTIMSLQPSRTTVLVIGGGPAGAYAASALAREGIDTTVIEAAKFPRYHIGESMLPSLNAFVRFIGAEERLRSHGFVIKRGAAVKFNQHKKEGCKCSSNHPSFLSDRNLTIGFLDTDFVLGDIRNASWNVIRSEFDNMLLRHAEESGAHVFEETKVTEIKFAETKGTEMRPTMALYVCKNGETRQIRFDYLVDASGRNGIVSTKVFESTVIFLDRIDMGAQYLKNRKMNQSLHNIACWAYWTGQKQYMPNTDRHNAPWFESLTDESGWGWFIPLHNGTVSVGIVMDSAISSRKKAEGCEASETGEYTLKGHYLDQLKFVPGLSNLLEGATLKEDDEYYYVRSAADFSYAADKYAGDHYRIIGDASAFIDPFFSSGVHLALLGGLTAATTIAASIKKQCTEEMAWKFHDVKVATAYTRFLLVVMSAYKQIRNQSTAVLSDIDEDNFDRAFDILRPVIQGTSDVGKKLTENELQKTMEFCKDVFAPTDPEMVKAVGARLRPELLSAGTPIWTEEEIEKEAGNDEETKIVLHRMNARKPVNQMYQGPENLRVGDVDGYVAHLHHGALGLIRVASV

SEQ ID NO: 90400 - protein, 521 aa, Leucoagaricus sp.
  misc_feature (1)..(521): tr|A0A137QC77|A0A137QC77_9AGAR Tryptophan 2-halogenase (Fragment) OS=Leucoagaricus sp. SymC.cos OX=1714833 GN= AN958_12016 PE=4 SV=1
PSFASVLVIGGGPSGSYSAACLAQDGFSVTLLEAETFPRYHVGESMLPSMRHFLRYIDADDKFDSFGFIQKHGAAFKFNPRKREGFTNFISQNPDNYAWNVTRAEADKLILDRARELGAQVFEGHRVTELQFAKAATKANATATQAQSGTLDPAQDIPVSATWKNVATGQTGTINFDYVIDASGRNGLISRALGLRKYNQSLKNVAYWGYWVGTNEYRHPSCTVQPPFFEALHDETGWAWFIPLHNGKVSIGVVIDENVSKSKKANMEKKGDESINVRHYLEELKVNATKIHSLIGEGNLIEYNGGPKIRMASDYSYSGTAYAGLNYRIVGDAGAFIDPFFSSGVHLAISGALSAAATIAAAVRSECTAAQAADWHNQRVGTSYTRFLMIVLSAYRQIRAQELPVLSDIDEDNFDRAFDLFRPVIQGDVDVKKGPSEDSLRKTIDFCTQAFEPTSMERWHGKEGDDSKANSEEMSEESKANIMSVNKSLRADDMYQIKSFVADKFNGLSIRLEKGRLGLEA

SEQ ID NO: 90401 - protein, 462 aa, Metarhizium brunneum
  misc_feature (1)..(462): tr|A0A0B4G862|A0A0B4G862_METBS Tryptophan halogenase (F ragment) OS=Metarhizium brunneum (strain ARSEF 3297) OX =1276141 GN=MBR_04067 PE=4 SV=1
MPPVDIDFPSTTVRLLVCSLSLLVAIHALPNVLFKDVVIVGGGASGSYAAVRLREDFGKSITLVEKDEILGGHVDSYVDTKTGTPYDFGVKEFIQAGNATGFFDRLGVQRGRSTKTPLNTTYIDFKSGKVLDFAPPPSAAQLDALADFLRVVEPWEHFLQPGYFDFPEPSHIPGELLVPFGDFVSKHGLERAMPFIYQTTGLGVGNMTRAITLFALQAFASGRNQDLYDAVAAVLGSDVLYASKVVNTLRTNLGVIVTVRHLKSRRLTYIAAKALLIAIEPTGDNTGPFSLDPDEKHIFSKFTYTREYTGIIDNAALAAHASYFNLPSDAAPNNYLSYPEPPFTARIDYMGSGHYFRVTVIGDDKLDDKGAKALVDKDFATLVDAHVLRGSAAEKVHWVAFSTHGPMHARVSVGDVQRGFFQKLYALQGRRSTWWTGGAWSVNFQSALWQYDDIIVPMMLWG

SEQ ID NO: 90402 - protein, 575 aa, Talaromyces marneffei
  misc_feature (1)..(575): tr|A0A093X8M4|A0A093X8M4_TALMA Tryptophan 2-halogenase OS=Talaromyces marneffei PM1 OX=1077442 GN=GQ26_0570070 PE=4 SV=1
MAIPEKTTVLVIGGGPAGSYCASALAREGIETVLLEAEKFPRYHVGESMLPSLRHYLRFIEADKKLDAHGFIRKNGALFKLNSKPAAYTDFVGAGGPNGFSFNIIRSQADDLLFRHAGTSGAKIFDGVKVNSIEFVPSGLPRSDDPDCEIPDPGRPVSASWVNKDTGDAGSIKFDYLVDASGRQGLVSTKYWKNRKMNTGAQLQSVATWGYWTGGGIVEKGTSREGCPYFEAIADASGWTWYIPLHNGQWSVGVVMNQKVLADKKRAAGDGKNVYLQTIRETPGLQALLENGELVTELRSASDWSYNATAYSSPYLRVAGDAGCFIDPFFSSGVHLALTGGFSAATTICASIKGQTSEIGAAIWHTKKVSESYTRFLVIVSTALKQINEKDEPVISDFDEKTFERAFKHFRPIIQGTVDVQGKLSQAEVSQALNFCFRAFHQVDSKEKQNLIEKMRSLAISDPDDLSNEKYSAALKELEAVLTPDQLHILQTIRARQMLRPEDMFTVETIGSDVIDGLSVNMVTGQLGLVHPGKAFKVAPSNKDILALLNGEELSESSIGFKTDPGYQNPTAAAH

SEQ ID NO: 90403 - protein, 566 aa, Penicillium subrubescens
  misc_feature (1)..(566): tr|A0A1Q5ULG1|A0A1Q5ULG1_9EURO Tryptophan 2-halogenase OS=Penicillium subrubescens OX=1316194 GN=PENSUB_1014 P E=4 SV=1
MAVPQSCTVLVIGGGPAGSYAAAALAREGIETVLLEADKFPRYHIGESTLPSLRHFFKFIDFYDTFDAHGFYHKNGAVFRLAQAQPDAYTDFLEAGGPNAYAWNLIRSESDDLLFRHAGTCGAHIFDETKVDAIQFESDTNETSPDGVLNPGRPVSVTWVRKDGSSGSTSLKYLVDASGRHGILSTKYLKNRKFNENFKNVANWAYWKSDNVYGPGTHMEGSPYFEALDDASGWAWFMPLHDGTRSVGIVQDQKLATEKKRELGRPSTLDFYKKCLGMAPRTKELLSEAEVVTDVKSASDWSYTASAYHLPNARICGDAGSFIDPLFSSGVHLAVTGGLSAAATIAASIRGDCDEQTAGSWHSKKTVESYTRFFLAVSSATKQIREQYEPIIQDMDEEGFQRAFDLFRPIIQGTVDADTTSKMSQSEISKALEFCFRAFTYVPPELKDALLEKLKKLGAKSGQNDATAAKELDDIQKHLTADELQVLEILRSRRMIREDPFEMDSFTLDTIDGLAPNLVHGKLGLVKSEQAKIDRAHFYSPKFLDGKGPEIREGSVYLPTSKVQLA

SEQ ID NO: 90404 - protein, 526 aa, Aspergillus udagawae
  misc_feature (1)..(526): tr|A0A0K8KZQ9|A0A0K8KZQ9_9EURO Tryptophan 2-halogenase OS=Aspergillus udagawae OX=91492 GN=AUD_0242 PE=4 SV=1
MCPVMDKVEMEIPAHCTVLVVGGGPGGSYTAAALARENVDVVLLESDRFPRYHIGESMLPSFRHFLRYIDLDSTFLDHGFTQKNGAAFKVVQGKREGYTDFISAGGPNNFTWNVIRSEADYLMFQHARSGGAKVFDGVRVNDIDFDDKTSHPVRASYTQKATGTKGTINFRYLVDASGRAGLVNTKYMKNRTYNKALKNVAHWGYWRGTKPYQEGMERENSPFFEALKDESGWAWYIPLHDGTVSIGVVMDQELATSKRRAMFDTSCKEDHTLESFYRSSLRLAPNLMQLISGGELTSSVKLASDYSYSASTYSSPYVRVVGDAGCFIDPFFSSGVHIALTGALSAAVTICAALKGDCKEATAANWHSTKIQSVYQRFLMVVLSAYHQMRRQDNSIWSQLGEDNVDEAFERIRIIIQGTADIGGSGVSQSHLKETLDFCAQAWNHAEPEKMAKFKQKLGSSSLSSVESNRFSREELQILHHLQARKAMCTESTLGLDCFHTDVIEGLKPVLDRGRLGLVRILPAEL

SEQ ID NO: 90405 - protein, 600 aa, Metarhizium anisopliae
  misc_feature (1)..(600): tr|A0A0B4FEW2|A0A0B4FEW2_METAF Tryptophan halogenase (F ragment) OS=Metarhizium anisopliae (strain ARSEF 549) O X=1276135 GN=MAN_06560 PE=4 SV=1
MAVPPSCTVLVIGGGPAGSYAAAALAREGIETVVLEADKFPRYHIGESTLPSLRHFFKFIDFYDTVDAYGFYHKVPSSLHFFHLNEELTSPYQAKNGAVFRLAQAQPDACKSPSPAYTDFLEAGGPNGYAWNLIRSEFDDLLFKHAGTCGAQIFSETRVDTIQFEPVANGLKPDMNRNLGDNLNPGRPVSATWVRKDGTSGSITYKYLVDASGRQGILSTKYLKNRKFNNNFKNAAIWAYWKSDNVYGPGTHMEGSPYFEALDDASGWAWFMPLHDGTRSVGIVQDQKMATEKKHELGRPSTLDFYKQCLQMAPGIRELLSEAELIPHVRAACDWSYTASTYHLPNARICGDAGSFIDPLFSSGVHLAITGGLSAAATISASIRGDCSEAAAGSWHSKKTVESYTRFFLAVSSATKQIRTQHEPIIKDMDEDGFQRAFDLFRPIIQGTADADEAGKVSQLEISKILHFCFKAFTYVPPEKKDALFDKLRKLDSKALQDDAKQVQTLDGIEKHLTADELQILEILRSRRMIREDPFEMDSFTLDTIDGMAPRLVRGTLGLVNYEQAKIDKAHFYSQDFLDGNYPGIREGSVHLPTSRVQLG

SEQ ID NO: 90406 - protein, 674 aa, Metarhizium album
  misc_feature (1)..(674): tr|A0A0B2X351|A0A0B2X351_METAS Tryptophan halogenase OS =Metarhizium album (strain ARSEF 1941) OX=1081103 GN=MA M_02682 PE=4 SV=1
MAVPQSCSVLVVGGGPAGSYAAAALAREGIDTVVLEADKFPRYHIGESTLPSLRHFFKFIDFYDTVDAHGFYRKVLPWACSASPAPRPGSRVNKSMPHHRTVLFSGSLKISPTPASLYQPRPCVDSDSASRANMCQDTDFLEAGGPGGYAWNLIRSEFDDLLFRHAGTCGARVFSETKVDAIRFASETDGTQRPDSTENRNGTSDPGRPVSATWVRKDGTSGSIRFEYLVDASGRHGILSTKYLKNRRFNENFKNAALWAYWRSDNVYGRGTHMHGSPYFEALDDASGWAWFMPLHDGTRSVGIVQDQKMAADRKRELGRPSTVDFYRHCLEMAPRTSQLLSGAELVPDVRSAADWSYTASTYHLPCARICGDAGSFIDPLFSSGVHLAVTGGLSAAATIAASIRGDCGEEAAGAWHSKKTVESYTRFFLAVSSATKQIRARHEPVIQDMDEDGFQRAFDLFKPIIQGTADADTAGKVSRAEISKILAFCFKAFTYVPPEKKDALFDKLRRLDSASARKDAHATAAAETLDHDDMQKHLTADELQVLETLRSRRMVREDPFEMDSFTLDTIDGMAPRLVRGSLGLVRSEQAKIDRAHFYAEDFLDGKHPGIREGSVYMPASRVRLEYFGNGGVSLANAASWQQSVNKVEIRSGSNKRTREKYLGDEHDGLETAD

SEQ ID NO: 90407 - protein, 567 aa, Aspergillus parasiticus
  misc_feature (1)..(567): tr|A0A0F0IFV2|A0A0F0IFV2_ASPPU Tryptophan halogenase OS =Aspergillus parasiticus (strain ATCC 56775 / NRRL 5862 / SRRC 143 / SU-1) OX=1403190 GN=P875_00128062 PE=4 SV =1
MPPRYLRSISPSSVTIITMSIPNRCTVLVVGGGPAGSYAAAALAREGVDTVLLEADVFPRYHIGESMLPSIRHFLRFIDLDSKFDSYGFVNKNGAAFKLNSKPEAYTDFIAAGGPGSHAWNVVRSEADHLMFKHAGENGAQVFDGVKVNSIEFEQIDGLTVDPSLAELGRPVSATWSCKATGEKGSITFEYLIDATGRAGLVSTKYMKNRRYNQGLKNVASWGYWSNASSYGVGTPREGDPYFEAIEDGSGWVWLIPLHNGTTSIGVVMNQAAATAKKRETGATTKDLYLNTIKNTPGVWQLLDKAELQSDLKSASDWSYNASSYASPYLRIVGDAGCFIDPFFSSGVHLALASGLSAALTIRAAQRGDCDEQAAVSWHSKKVAEGYTRFLLVVMSALKQISDREKPVLTDFDEDSFNRAFDFFRPIIQGTADVDKNLTQAEIAQTIEFCVQAFQTASTDEQDAVMTKVAAINSQNGTEGALRELHASLSADERRTLTTIQARQIIRSEDQMNIDNFTIDVIDGMVPRLERRSLGLARFVPKAQTSREDGLRATLGLPEKQKSIFSY

SEQ ID NO: 90408 - protein, 502 aa, Erythrobacter gangjinensis
  misc_feature (1)..(502): tr|A0A0G9MMB9|A0A0G9MMB9_9SPHN Tryptophan halogenase OS =Erythrobacter gangjinensis OX=502682 GN=AAW01_10135 PE =4 SV=1
MAIDRIVIVGGGTAGWMAAAALSRLKKNRELSITLVESEAIGTVGVGEATIPPFVDFNQLLEIDEREMLAASQGSFKLGIQFANWGALGDSYIHPFGNYGYELGNMSFHHVWHFMQQAGDNRPIQVFNAETMAAYFGKFARTQEMQREDLPPINYAYHLDAGRYAVFLRRYAEGRGVVRKEGRIEDVKLDGESGDVTGVTIDDGTQLDGDFFVDCSGFRGLLIEQALQTGYEEWTHWLPCNRAVALPCNRDDGSPPPPFTKATAHSAGWQWQVPLQHRNGNGHVYCDAYMSADEATDILVANLAGKPTADPNHLRFVTGRRKKFWNRNVVALGLAAGFMEPLESTSIHLINTGLTKLIAVLSLDGPTDAQRDTFNRLTRKEYEKIRDFLILHYHATRRDDSEFWNYCRNMSVPDSLTEKMALFRETGQIFREEDELFTETSWAAVMMGQGISMQGHNAMAETLDKAATKAELDEIEKSIRFLVQHMPAHGDFLAKYCPAPTM

SEQ ID NO: 90409 - protein, 503 aa, Sphingobium yanoikuyae
  misc_feature (1)..(503): tr|A0A085K432|A0A085K432_SPHYA Tryptophan 7-halogenase OS=Sphingobium yanoikuyae OX=13690 GN=EBF16_20510 PE=4 SV=1
MHADFPTSDRVVKRVVVAGGGTAGWVTATALVRHLGPLIDITLIESDAIGTIGVGESTVPTFRGFHQLMKIREDRFMAEAQATVKLGIEFKNWGHVGDRYIHPFGTIGLQWSWMADFHHFWLHARAQGFGGELGEYCLEWVAGEANRMSLSSSVAPSYAYHIDAARYARFLRSLAEPAGVKRVEGKIRNVELAPESGHIAALVLESGTRIEGDLFIDCTGFRSLLLGEALGVGFEDWGQWIRTDRAVAVQSTSDGPAQPYTSAIAHEAGWRWRIPLQHRDGNGFVFASDFMSDDEAHARLLAEIEGEPIVDPWLVRFKTGTRTRAWHKNCVGLGLAGGFIEPLESTSIHLMMAAVTRLIEDFPFHGFDDALLDHFNRKSRLEFENIRDFIILHYHVTQRDDSPFWDHCRTMEIPDSLKERLALWQENGRAYQLGHELFRVDSWSSVLLGQGMHPRGYHHVAAMMPEPQLREELARMRKDIVGVVAEMPSHREFLRRYCPAELV

SEQ ID NO: 90410 - protein, 505 aa, Xanthomonas citri
  misc_feature (1)..(505): tr|A0A2H1SEA6|A0A2H1SEA6_XANCI Tryptophan halogenase OS =Xanthomonas citri pv. fuscans OX=366649 GN=AC612_07810 PE=4 SV=1
MTQAQIRKVVIAGGGTAGWIAACALSHQFRNLLDITLVESEQIGTVGVGESTVPPIRTFHRFLQIDEQEFLRAVAGTFKLSISFEHWRRQGERYIHPFGITGQSTLVCAFHHLWLESQRRGMPGSFGDYCLETVASRVDRFALHGEPAVNYAYHLDAALYARFLRARSEACGVKRVEGRIQQVTVQPHSGDVASLVLEDGQTIEGDLFIDCSGFRGLLIEQTLHTGYEDWSHWLPCDRAVAVQTEALGPPVPYTRAIAHEAGWRWHIPLQHRVGNGLVFSSKHLSDDEAHAKLLRDVAAPAVKEPWMVPFRTGRRLKAWNKNVVSLGLASGFIEPLESTSIHLTISAVVRLLALFPAAGIAPSQVQLFNDVSRAEMEHVRDFVILHYHATQREEPLWQQCRQMELPESLALRLRAWRERAHAWQGADELFRVDSWTHVLMGQGIAPEQHHPLTRAFSDHDLRRLLDGIAQPIQHAVQQMPSQQDFIERYCKAGEQVWGMRSPVPA

SEQ ID NO: 90411 - protein, 498 aa, Parvularcula sp.
  misc_feature (1)..(498): tr|A0A355C367|A0A355C367_9PROT Tryptophan halogenase OS =Parvularcula sp. OX=1979207 GN=DDZ68_13610 PE=4 SV=1
MKHLKKIMIVGGGSAGWMSAALLSRLFQGLYEITLVESEDIGTIGVGEATIPAIKKYNELLGLDENEFIKRTQGSFKLGIQFNDWSQLGSSYIHGFGVIGQNLEWLRAHQYWLRARKSGRASDFANYSINTAAALQNKFMRAAADMPDSPLAHIAHAFHFDAGLYARFLRGYAEDRGVRRREGKIADATLNAEDGFVQSVTMADGETIAADFFIDCSGFHGVIIEKALKTGYEDWTRYLPCDRAIAVGCARSENFTPYTKSTARTAGWQWRIPLQHRTGNGHVFCSSFMEADEAEKILIENLDGAPLTDPLHIRFTTGKRKKIWNKNCVAVGLASGFLEPLESTSLHLIQSAVIRLIRLLPDASFDQATIDEFNRQTDFEYERIRDFIILHYKATSRDDTPFWRHCRAMEIPSTLRRKWDLFASNGRVFREDDELFTEESWIQVFLGQDVIPRGYDPLVDIKSDTQLAQYLGNIENVIGKCVAVMPSHADFVAKTCKA

SEQ ID NO: 90412 - protein, 513 aa, Colwellia sp.
  misc_feature (1)..(513): tr|A0A2G2EJ40|A0A2G2EJ40_COLSX Tryptophan 7-halogenase OS=Colwellia sp. OX=56799 GN=COA35_10165 PE=4 SV=1
MSGVINRIIVLGGGTAGWITAGILAKKHASNLSNQGIKVTLIESPEISVVGVGEGTWPTMRKTLSQLGISETQFMRECGATFKQASKFVNWVNAKDDVYYHPFTEPQGFNKVDPAPYWQSVVEPTCSFSEAVSFQQYLCEQGLAPKTIANKEYEVIANYGYHLDAAKFIALLRKHCISELGVEHISDTVDRIEQAPCGDISCLQTKEHGAQLADLFVDCSGMRSLLLGETLKVPFVPCDDVFLADTAIATQVPYINENDPIACHTISTAQEAGWIWDIGLQERRGVGYVYSSKHCSEEQARKTLANYIGLEEVKTAKKINFKPGHRKIFWKNNCVAVGLAAGFLEPLEASALMLIEASANYIADQLPPNKELMPITAKRFNAIMLKKWRGVIDFLKLHYALSERTEPFWLEHRDTQSIPNSLQELLSIWRYSSPSEYDFTDNVEAFSAASYQYILYGVGFKSDFSQMEHIYNQGELAKKQLQMTKIRIDQLKYNLPTHRDLINKVNSLGFAKL

SEQ ID NO: 90413 - protein, 509 aa, Xanthomonas oryzae; identical to SEQ ID NO: 84130
  misc_feature (1)..(509): tr|A0A0C5UFG5|A0A0C5UFG5_9XANT Tryptophan halogenase OS =Xanthomonas oryzae pv. oryzicola OX=129394 GN=BE73_003 00 PE=4 SV=1

SEQ ID NO: 90414 - protein, 518 aa, Colwellia sp.
  misc_feature (1)..(518): tr|A0A2G2F1P2|A0A2G2F1P2_COLSX Tryptophan 7-halogenase OS=Colwellia sp. OX=56799 GN=COA35_16225 PE=4 SV=1
MNQQNKKIKTVVVVGGGIAGWLTAGRLAAHHKSNTPDGLNVVLVESPNVPIIGVGEGTWPTMRSTLIALGISETDFIRECEASFKQGAKFAKWVDGSEDDFYYHPLVLPQGFSKTDMAGHWLNNAAESTSFSNAVCYQEAICEQGLAPKTIRTPEYAAIANYAYHLDSAKFAIFLQKHCTQELGVKHILADVTQVNSAKNGDIASVTTKQQGEISGDLFVDCTGFSSLLLGEHYEVPFKPCDDVLFIDTALAVQVPYDNEDECIASHTISTAQEAGWIWDIGLQHRRGVGYVYSSKYSSEAQARENLKAYVGDKIESLTIRKIPIKSGHRSHFWQNNCVAVGLSAGFLEPLEASALVLVEMSAQMISEQLPQTRDIMDITAKRFNETFTYRWEKIIDFLKLHYILSNRDDNAFWRDNRDPKTIPQSLQDLMKLWQYRAPADHDFTSNNEVFPAASYQYVLYGMGFKSDYSTTAYMLKDTVFAKSQFDKNKSMINQAVTNLPSNRELLNKIKHHGFSVI

SEQ ID NO: 90415 - protein, 506 aa, Xanthomonas citri
  misc_feature (1)..(506): tr|A0A2H1SA59|A0A2H1SA59_XANCI Tryptophan halogenase OS =Xanthomonas citri pv. fuscans OX=366649 GN=AC612_21640 PE=4 SV=1
MIPAPLRNIVIVGGGTAGWMAAAAFARVLGPTFKVQLIESEQLGTVGVGEATVPHIKAFNNLLGIDEAEFVRQTQGSFKLGIEFVDWQRPGSTYMHGFGPQIGHPLGLLPFHQYWIKQHARGKAQPLGAYTLNTVAATRGKFMTSAGDVPANSPLANIAYAYHFDATQYAHFLRRYSQQRGVSRIEGLVERVQLHPESGHVQSLQLASGQVVHGDLFIDCSGFGGLLIEQALHTGYHDFTHWLPCDRALAVPCEKVGPPTPYTRSTARAAGWQWRIPLQHRTGNGYVYCSAHISDDEAAATLLANLDGKPLADPRPLRFTTGRRKQCWNRNVVALGLASGFLEPLESTSIHLIQSGISKLLELFPREGISPVLVQRYNDRLAFEFDRIRDFLLLHYHATERDDSAFWRHCRHMPITPELQATLDLFRDSGRFYRNAEEMFAEISWVQVLVGQGILPQGYHPLVDQVPDRDAEGFLASVAQTISHCVDVMPSHQQFIDRYCKAATLP

SEQ ID NO: 90416 - protein, 494 aa, Sphingomonas sp.
  misc_feature (1)..(494): tr|A0A031HZZ9|A0A031HZZ9_9SPHN FAD dependent oxidoreduc tase family protein OS=Sphingomonas sp. RIT328 OX=14705 91 GN=BW41_01841 PE=4 SV=1
MTAPRIRRIVILGGGTAGWMTAAALSRALAGQGVAVTLVESEAIGTIGVGEATIPTIHWFNQIIGLDEARFMAETKATVKLGIEFVGWTGAGSRYFHPFGTFGPAGDGAMFLHRLIRGRAEGDTAATEAYSLTAQIARAGRFARPVADRRSLLSTLGYAYHFDAGLYARYLRGLAERGGTQRIAGTVAHVRRHGDSGFVEALTLDDGRVVAGDLFIDCSGLRALLIGETLGVGYDDWSHWLPCDRAWAAPSAPELRPTPFTRATAAEAGWRWRIPLQHRVGNGYVFASRFQDEEAARASLLAGMDGPATAEPRLIRFTPGLRRQAWRGNVVAIGLASGFLEPLESTSIHLIQSGIAKLLSLFPAADCSPLLARQFNRVFAQDTHDIRDFLILHYRATQGRTEPMWRERQTMAIPDTLAERLDHFRSSGRIVLTSDELFREASWFAVLDGQGERAGDYNPLIGAQSRDDTLAGLAAVRAEIARTAATLPPIGAGR

SEQ ID NO: 90417 - protein, 546 aa, Streptomyces sp.
  misc_feature (1)..(546): tr|A0A142I756|A0A142I756_9ACTN Tryptophan 6-halogenase OS=Streptomyces sp. FXJ1.172 OX=710705 GN=ThnH PE=4 SV= 1
MSTRTDSHLDTHNDTRNDTRIQKVVILGGGTAGWMTAAYLGKALQNTVQITVLEAPSIPRIGVGEATIPNLQRAFFDYLGIAEEEWMRECNASYKMAVKFINWRTPGEGSPSPRTVDGHPDTFHHPFGLLPSADHIPLSHYWAAKTLRGETTEPYDHACFVDTAIMDARKAPRWLDSRRATNYAWHFDAQLVADFLRTFAVTKQAVEHVEDEMTEALTDERGYLTALRTKSGRLLDGDLFIDCSGFRGLLINQAMGEPFLDMSDHLLCDSAVATAVPHDDETHGVEPYTSSIAMPAGWTWKIPTLGRFGSGYVFSSRFADRDQATAEFARLWGLDPEQTPFNHIRFRVGRNRRAWVRNCVGIGLASCFVEPLESSGIYFVYAAIHMLAKHFPDRTFDPVLVDRFNREIQDMFDDTRDFLQAHYYFSPRTDTPFWRANKELELADGIKDKAETYRAGLPVNLPISDEGTYYGNFEAEFRNFWTNGSYYCIFAGLGMLPRHPLPSLAHKPESVARAEQLFADIKRKQHEWVRSLPSTHQLLRHLHGAS

SEQ ID NO: 90418 - protein, 521 aa, Planctomycetaceae bacterium
  misc_feature (1)..(521): tr|A0A2E8B4X4|A0A2E8B4X4_9PLAN Uncharacterized protein OS=Planctomycetaceae bacterium OX=2026779 GN=CMJ62_2042 5 PE=4 SV=1
MIDSQNGNRDPQGNRRIRRIVVMGGGTAGFLTAITLQRKLPDISVQVVRSTKMGVIGVGEGTIVTIIKFLHRYLGLNSQRFHERAKPSLKLGIKYLWGERPFFHYTFSTQLSNPDSQLSLPRGYYCDDSFDFADLSSALMLHDKVCLKRIDGRPKLGGGFSYHLENRTFVGYLEEVADECGIPKIDDVVTGVEQDEEGIKSLILSSGQRVEGDMFVDASGFSAELVGKALGEKFVDFKQALFCDRAVVGGWERTDESYHPYTVAETMDAGWCWQIEHDDVINRGYVFSSDFISDDQAEAEYRRKNPRVDRANVIRFPAGSRRNPWIKNVVAIGNSSGFVEPLEATAIGTICDSVAHIIRALKASDGFMLPIQRDIYNRVSRKNWEIIRDFLAIHYKFNRRLNTPFWQAARHDVDIGSASNIVEYFKAVGPDFRLLEYDMKRNFFTNEGYFAMLVGQRVPYQRKVSISPMEKKHWQSYKQEISQVAQGGMNMDECLADLRQHGLPADALDMDDSDFGGLRWQ

SEQ ID NO: 90419 - protein, 501 aa, Colwellia sp.
  misc_feature (1)..(501): tr|A0A2G2EN51|A0A2G2EN51_COLSX Tryptophan halogenase OS =Colwellia sp. OX=56799 GN=COA35_05180 PE=4 SV=1
MNDANNIRSIVIVGGGSAGWMTASALAKVIGCDNCQITLVESADIGTVSVGEATIPQIQLFNTILDIDESEFIRFTNATFKLGIEFIDWKEKGHRYFHPFGNYGTNMEALPFHHFWLKMQNEPAFSNLSNYSLASVGAYANKFMHPSTQQNSPLAGINYAYHFDATLYAKFLRNYATSRGVCRIEGKVDEVNLNPVSGEIESLVLNDNTVLDGDLFIDCSGFKGLLIEQALKTGYEDWTHLLPCNKAIATPCLSKKALNPYTQSTAQSAGWTWRIPLQNRVGNGYVYSSEFMSDDKAHALLLNTIESEALADINQLQWVTGMRKKSWNKNCIAIGLSAGFVEPLESTGLHLIQSAIAKLMTLFPSKDFTQCDIDLFNQQTETEYHRIRDFIILHYKLTNRDDSEFWRYCKNIEMPDSLKQKIEMFSENGRIFRHDNELFNETSWLAVMHGQGIKPKSYHPLVDRLSRDEIKRRLKNIESVISRSADVMPDHEAYILKNYTR

SEQ ID NO: 90420 - protein, 543 aa, Marinobacter sp.
  misc_feature (1)..(543): tr|A0A2T4DYL2|A0A2T4DYL2_9ALTE Tryptophan 7-halogenase OS=Marinobacter sp. Z-F4-2 OX=2137199 GN=C9993_05800 PE =4 SV=1
MNKRRKILIVGGGSAGWMAAAYLNAALNQRGENSRVDIELLESPDTPRISVGEATIPSMKHLLAAIGINEFDFMKACDATFKQSIRYTNWVHNDKSFYHHPFSSMRIHPLERAGLDWLASDQSIPFMETCSAQPIICEWGLSPKMLGEWDMGAPLNYAYHMNAQKFADYLRDFSTARGVVHTLENMVEVKKASDDRIGSITTDKGREIEADIFVDSTGFSALLIEKQMGVGFEDCSQYLLCDRAVTMHVPYDTHFPGMVRPYTSATALSNGWVWDIPMSNRRSVGYVHSSAFISKEDAERELRAYQGGNTDNLDARFVPFKVGRRKQIWSGNVIAIGLAGGFIEPLESTGLYLSDLGAVLLAEHFPWDEHGMEVLASRYNRVMSNRFYEILDFINMHYCLTKRTDTEFWRTVQQPEHINDRLKAKFEFWKVKPPTQHDFQDQWFMGMSQQPQAAELTGGDMRPAVDTGGLWNHESYECILYGMEFLKDECDRWFGTNRPPTKVHPAIIQRLQQARQKLPPHHIWLHRVMGMQPYQTAYRPHGW

SEQ ID NO: 90421 - protein, 547 aa, Dehalococcoidia bacterium
  misc_feature (1)..(547): tr|A0A3C0JNB9|A0A3C0JNB9_9CHLR Tryptophan halogenase OS =Dehalococcoidia bacterium OX=2026734 GN=DCL97_03550 PE =4 SV=1
MTAHEQSPDVVVIGGGPAGSTAATMLARQGVSVLLLERERFPREHIGESLLPASIPILEELGVLPAVEAAGFLTKWGATMVWGSDPTPWSWYFRETNQRNPHSYQVWRPQFDQLLLENSRAHGVDVREGHRVLEVLWQDGKATGVRYQSDDGETGTIQCRYVVDASGQTGLLARDLNLRQWDPFFQNLAVYGYFRGAHPLPEPDETNIFIEAHPHGWLWSIPLHTGWTSVGAVVDSATSQNEISTGSLDGFLQAQIDQAPHTSKMLRDAHLESGPFIVKDWSYVCERVAGDGYVLAGDAACFVDPLFSSGVHLALMSGIMAAAYVTSALKDPEIVEAAAAAYHELYLKEYGHFREMARLFYSSNLTSDSYFWEARRLLEDAGNFTPRQAFIQAVAGQPPRGYERAVLEQGQAPLEFASSVRQVESERERRRVRWEAALSGTDNGDPIMAAVPRLAPETQIQRKPVLGAGEFVWGTVLTTVSQPEGIPCSGLISAMVSQIDGARTVAQLLDELASLGEPSQADQIRQTALAALGILYVDGTVEELGGL

SEQ ID NO: 90422 - protein, 516 aa, Streptomyces sp.
  misc_feature (1)..(516): tr|A0A429UFP7|A0A429UFP7_9ACTN Tryptophan 7-halogenase OS=Streptomyces sp. WAC05374 OX=2487420 GN=E2B92_17520 PE=4 SV=1
MLNNVVIVGGGTAGWMTASYLKAAFGDRINITLVESGNIGAVGVGEATFSDIRHFFEFLGLKEKDWMPACNATYKLAVRFENWREKGHYFYHPFEQMRSVNGFPLTDWWLKQGPTDRFDKDCFVMASVIDAGLSPRHRDGTLIDQPFDEGADEMQGLTMSEHQGKTQFPYAYQFEAALLAKYLTTYSVERGVTHIVDDVREVSLDDRGWISKVRTAEHGDLTGDLFIDCTGFRGLLVNQALEEPFISYQDTLPNDSAVALQVPMDMERRGILPCTTATAQDAGWIWTIPLTGRVGTGYVYAKDYLSPEEAERTLREFVGPAAADVEANHIRMRIGRSRNSWVKNCVAIGLSSGFVEPLESTGIFFIHHAIEQLVKNFPAADWNETHRDLYNSAISHVMDGVREFLVLHYVAAKRNDTQYWRDTKTRKIPDSLAERIEKWKVQLPDSETVYPYYHGLPPYSYMCILLGMGGIELKPSPALALADGAAAQREFEQIREKTQRLTQVLPKAYDYFTRLS

SEQ ID NO: 90423 - protein, 521 aa, Xanthomonas citri; identical to SEQ ID NO: 86409
  misc_feature (1)..(521): tr|A0A2H1S9G0|A0A2H1S9G0_XANCI Tryptophan halogenase OS =Xanthomonas citri pv. fuscans OX=366649 GN=prnA PE=4 S V=1

SEQ ID NO: 90424 - protein, 544 aa, Dehalococcoidia bacterium
  misc_feature (1)..(544): tr|A0A2E5LZL3|A0A2E5LZL3_9CHLR Tryptophan halogenase OS =Dehalococcoidia bacterium OX=2026734 GN=CL897_06810 PE =4 SV=1
MRDNEYDTDVVVVGGGPAGSAAATMLSRKGWGVRLYERNQFPREHVGESLLPASMPILAELGVLPAIEAAGFLPKYGATMVWGREPDPWSWSFRESSPRYPHAFQVVRAQFDEILLRNASKNGVDVRERHRVLYADAGPSGANLRIEDDALREHTIRARFVIDASGQSGLIAHARSLRKPDPFFHNLAIYGYYTGGARLPEPDANNILIESIKDGWLWVIPLHTGLASVGVVVDSSFGRKQIAKLGVQAFFREQIANGPHTSTLLEDATLTTNPTVVRDWSYTSGELAGEGFVLAGDAACFVDPLFSSGVHLALSSGVLAAAYVTSALTDPKLGRAAAAVYSENYLQQYHHFRELARLFYSSNRTVDSYFWETRRITGADDSTPSRLAFIRAVAGQPPAGYERAVLAHGETPRSFSEAVTAIEGYREARGTSFDKRFGSDFPLLLTSRPSLVPETRLEQKPVAGEGEFTWGQVIITPERAEGVPVSTLVALVVAQIDGKRTVNDLFERLRERIPQETLDQLRPGIAQALRLLHVEGVIANFDDG

SEQ ID NO: 90425 - protein, 501 aa, Brevundimonas sp.
  misc_feature (1)..(501): tr|A0A2D8FLS4|A0A2D8FLS4_9CAUL Tryptophan halogenase OS =Brevundimonas sp. OX=1871086 GN=CL682_03000 PE=4 SV=1
MRQLKKILIVGGGSAGWMAAALFSRLFRGLYDITLIESEAIGTVGVGEATIPAIKTFNALINLDEADFMRRTQASFKLGIQFNDWDRIGASYIHGFGVIGRDLEWLRCHQYWLKMRAAGRASDFAAYSINTAAALQNRFMRADPQRNGSPLGHIAHAFHFDAGLYAKYLRGLSEAAGVRRREGKIASVQLRPDDGFVQSVTMEDGAVEAADLFIDCSGFRGLIIEEAMKTGYEDWTHWLPCDRALAVPCARTEPFTPYTRATARPAGWQWRIPLQHRTGNGHVYSSRYMDEAEAERILLSNLDGEQLAEPNRIRFVAGKRRQVWNKNCVAAGLASGFLEPLESTSLHLIQSVLTRLVRLMPDGGFDPTTIAEFNRQMDFEYERIRDFVILHYKATYRDDTPFWRDCRDMAVPDTLQRKMDLFRANGRVFREDDELFTEESWIQVFLGQGVIPAGYDPLVDVTPEAEIERFLNDVETVIGKCVAVMPSHADYVARVCSAVAA

SEQ ID NO: 90426 - protein, 431 aa, Pseudomonas syringae
  misc_feature (1)..(431): tr|A0A0N0X4J6|A0A0N0X4J6_PSEYM Tryptophan halogenase OS =Pseudomonas syringae pv. maculicola OX=59511 GN=ALP13_ 103222 PE=4 SV=1
MKPIVILGAGPAGAAVALGLRRLGYPVTLVSEWRRFAALEGVSVRVLDALRGAGLHQALTDAAQPSQRQVSWNGQQHAQNIEFLLDRPSFDRGLREDLRLAGVELIEGRVLTVQPHASAHRIELQGRDALLADFLVEARGRQAPALGKGLRGPETVSLLNRWQGAPGTNASAVESPADGWAWMARRADGQCYWQWTVDVASAELPGKALLLDYCRQRFQQSALTQAFFGGEPQTDLHLHARSSTAILCPQVCGDHWIRVGDAAMAVDPLSGNGIFQSLSSALQAPAVINTLLRKPERRLLAQRFHQQRVEQLFLRFARIGRDFYADEQRWSNQPFWQARRQWPDAEVAHAGADFSTLRIELAPVLRDGFVDEAEVVITADQPLGIWHVQGVELAPLVRRLRSEPAERVLAGLTVEQGRMVRGWLLAQGFRP

SEQ ID NO: 90427 - protein, 503 aa, Gammaproteobacteria bacterium
  misc_feature (1)..(503): tr|A0A2E6PFY1|A0A2E6PFY1_9GAMM Tryptophan halogenase OS =Gammaproteobacteria bacterium OX=1913989 GN=CMQ06_0227 0 PE=4 SV=1
MKVKSIVILGGGTAGWMTANALQKKWQHLGINITLVESPDIGIVGVGEGSTPKLKHFFDSLGIKESEWMPECNATYKNGISFKNWSTVSGYEEYFHPFGCSLDFVTLKFLYDNATLRRKGVDVIAHPNRFSLMASLAEKKLAPIASKNFPFHFQYGYHFDSVLIGKFLQKKAAEVGGINHIQATVKSVELNSNGDITSLKLNNDQILSGDFFVDCSGFASILLEKTLKVPFISFSDNLFNDSAITIPTEIEPNIPSQTVSTALTNGWVWRIPLTNRIGNGYVYSSQYCTQDEAEKELRAHLGVLESDIEARHLKMKVGRAKESWRNNCVAVGLSQGFIEPLEATALQFVISTIEEFATAFEEGGFTHQFKELFNRRMNMNFEGIRDYIVLHYKTNSRSDSQYWIDNRENKNIPNNVKDMLGCWYNIQSLEDELKRLNIGSYYTKMSWNCMLSGMGLFPPKESLTSADAQTAQADLEFVDKFIGGCSMNFKPHKKMLIGANTST

SEQ ID NO: 90428 - protein, 506 aa, Xanthomonas citri
  misc_feature (1)..(506): tr|A0A220WBU4|A0A220WBU4_XANCI Tryptophan halogenase OS =Xanthomonas citri pv. vignicola OX=473426 GN=XcvCFBP71 11P_01010 PE=4 SV=1
MIPAPLRNIVIVGGGTAGWMAAAAFARVLGPTFEVQLIESEQLGTVGVGEATVPHIKAFNNLLGIDEAEFVRQTQGSFKLGIEFVDWQRPGSTYMHGFGTQIGHPLGLLPFHQYWIKQHARGKAQPLGAYTLNTVAATRGKFMTSAGDVPANSPLANIAYAYHFDATQYAHFLRRYSQQRGVSRIEGLVEQVQLHPESGHVQSLQLASGQVVHGDLFIDCSGFGGLLIEQALHTGYHDFTHWLPCDRALAVPCEKGGPPTPYTRSTARAAGWQWRIPLQHRTGNGYVYCSAHISDDEAAATLLANLDGKPLADPRPLRFTTGRRKQCWNRNVVALGLASGFLEPLESTSIHLIQSGISKLLELFPREGISPVLVQRYNDRLAFEFDRIRDFLLLHYHATERDDSAFWRHCRHMPITPELQATLDLFRDSGRFYRNAEEMFAEISWVQVLVGQGILPQGYHPLVDQVPDRDAEGFLASVAQTISHCVDVMPSHQQFIDRYCKAATLP

SEQ ID NO: 90429 - protein, 493 aa, Glaciecola sp.
  misc_feature (1)..(493): tr|A0A2Z6UAX8|A0A2Z6UAX8_GLASK Uncharacterized protein OS=Glaciecola sp. (strain KUL10) OX=2161813 GN=KUL10_05 190 PE=4 SV=1
MENIKPIKKIVIAGGGTAGWMAASLFNHHWAKYGVEVSVIESPQIGIIGVGEGSTPSLKRFFYNLGIAENEWMPACHATYKVNIQFEGWSPRSGISRYGHPFISQIDTFSEKHFYTNCYTRRLGLDVNTYPDDFLLCGWLAKLKKSPITPVHFPFVVEYGYHFDSALLGQFLCDRAKKLGVQNIQANIESVELAKNGHIKNLKLDSRQTIEADFFVDCTGFNSLLMQKALNVGFIPYKSNLFNDAAVAMPSKVIKQPLPQTKSTALSNGWVWQIPLQHRTGNGYVYASDYISKDQAETELRSHLGLLESDAEAKHLRMNVGQVKQHWARNCLAVGLSQGFIEPLEATALHLTQEAIECFIDKFESANFTNDNQTDFNSEMSERYERVRDYIVAHYKLNSRDDSAYWRDNRANMNLSESLLSLLTVWYRKGDIGAEIKRQNIQSHFGVTSWHCMLAGYGAFPALAREQPGKGDMYANEGLANFFKSCCLNFESL

SEQ ID NO: 90430 - protein, 496 aa, Marinicaulis flavus
  misc_feature (1)..(496): tr|A0A2S7K0T6|A0A2S7K0T6_9PROT Tryptophan halogenase OS =Marinicaulis flavus OX=2058213 GN=CW354_17095 PE=4 SV= 1
MHDQRVKKVVIAGGGTAGWCAAAALTSQLGPLIDVTLVESEDIGTVGVGEATIPTIRTFHHLLGIDERAFMRATQASFKLAIMFENWARLGDRYLHSFGQIGKPTWMGGFHNVWLQARAEGLAGEIGDYCFEHEAAKAGKFFTSPEAKINYAYHLDAGLYGRFLREFSETKGAKRIEGKIQEVEQRPDDGFISALVMESGERVEGDLFIDCTGFRGLLIEQTLKAGYEDWSHWLPTDSAIALQTASVGPAPPYTRASAHEAGWRWRIPLRHRVGNGAVFCSRYLSDDEARAYLLGAIDGEPITEPRLIRYRTGKRRKAWIKNCVALGLSSGFVEPLESTSIHLIQIGLTRLIQLFPFSGCHNALVRRYNEQADVELERVRDFIILHYKLTERDDSPFWRRCRDMEIPDTLAQRIALFRDDAYAYQGPEDLFRVDSWLQVMLGQRLEPQGRHHLGRLMTREQMQGALDSLKNNIADAVAKMPDHQTFLEQYYPPAEA

SEQ ID NO: 90431 - protein, 525 aa, Aestuariibacter sp.
  misc_feature (1)..(525): tr|A0A506RLQ3|A0A506RLQ3_9ALTE Tryptophan 7-halogenase OS=Aestuariibacter sp. GS-14 OX=2590670 GN=FJ444_09240 PE=4 SV=1
MNAPIQQVVIVGGGTAGWLCAGMLAAKLGKQGERQRGIEITLIESPDVSTIGVGEGSWPSLRDTLREIGLSESAFITHCQASFKQGSTFVGWRDGSEHDRYHHPFTNPAGYTEIDVHACWQALHSNKPYDRAFSVQPELCEQHKAPKQLATPDYAYVLNYGYHFDATRLAEMVSDHCVNQLGVRHVKAHIEQVVSHQNGDIKAVTTQCGQTLEGELFIDCSGQSALLAGKHYNVPWHSVKDILLNDSAMAVQVPYHEQDNTIASTTLATAHPQGWSWDIGLQHRRGVGMVYSSDFASADDIEQSLKRYLTKRLPHDVVEQATCRQLHFSPGYRTEFWTHNCLSLGMASGFIEPLEASAVAMVELGVRMLCEQFPQNRDHMRILAARYNERFAYRWARVIDFVKLHYAINQRINDAYWNAHRDPATWPDSLKTLLSLWQYQPPSRYDVVQNEEIFPSASYQFVLYGMGFKTQSPTLADASDMLKRADAISQKLQATLLQFSQGLPDNRALLNAIRERYQHLSGAPL

SEQ ID NO: 90432 - protein, 522 aa, Streptomyces sp.
  misc_feature (1)..(522): tr|A0A1C4SQ52|A0A1C4SQ52_9ACTN Tryptophan halogenase OS =Streptomyces sp. di188 OX=693491 GN=GA0115245_144118 P E=4 SV=1
MSKSVVIVGGGTAGWMTASYLKAAFGDRLAVTLVESRNVPTIGVGEASFSTIRHFFAYLGLEESDWMPECHATYKLGIRYDNWRAEGHHFYHPFERPRTVEGVSLADWWLRKKPSADYDRDCSVIAALCEAKSSPRQFEGGLLTLGAGEQDPAAVGRSTMAQQTTQFPYAYQFDATLLAKLLTGYGTDRGVRHVLDDVVDVAVDEHGDISHVRTKESGDLSGDLFVDCTGFRSLLLNKKLGVPFLSYQDTLPNDSAVALRVPMEMADQGMGPYTRASAQAAGWIWTIPLYGRTGTGYVYASDYCTPEEAERTLRAYVGPAAEDLEANHIRMRIGRSENSWVNNCVAIGLSSGFVEPLESTGIFFIQNAIEQLVKHFPGGREDEQLRVSYNRQVAHVMDGVREFLVLHYVAAKRNDNAYWRDAKTRTMPDALAGRIEQWKVKLPDEDTIFPYYHGFEPYSYTAMILGLGGLDVQPLPGLALMDDIAAVKELQLVRDQARSLVETLPSHADYIAHVHRRRTASA

SEQ ID NO: 90433 - protein, 510 aa, Asticcacaulis sp.
  misc_feature (1)..(510): tr|V4NUA0|V4NUA0_9CAUL Uncharacterized protein OS=Astic cacaulis sp. YBE204 OX=1282363 GN=AEYBE204_06620 PE=4 S V=1
MSAAPLSSVVIVGGGTAGWMTAAALARHLSGTSVRIRLIESSAIGTIGVGEATIPTIRHFYRSLGLSDAEVIRDTAATVKLGIGFVDWREKGHDFIHPFAGYGQDFRNGFDGDDIGFHHVLNRLRAEGTPHDLERYSLCVQLARAGKFAFAPDPAPFNGAFYDWALHLDAGLFADLLRRHAEGAGVERIDAKVEQVVLHPETGFIDHLALDTGESVPGELFIDCSGFSALLIEKALGVGYESYADRLFCDRALAVQSESRTIDTPYTKVTARDAGWTWRIPLQHRTGNGFVYSSRHTDDETALRDLKAGIPDPLLFEPRPLRFTPGRRHRAWVKNCVAIGLSSGFLEPLESTSIALIQTGIEKLKQLFPDHGFNPILAEEYNDMSQREFERVRDFLVLHYRSTRRTDTAFWRDCQAVALPDTLRHKIELYKARGHFVRYRWEMFHPQSWLAIYDGFGIVPEGVDPAAQALSRTDIDGALSQMRDYIDRTVARAPRHADFIAWCLLQGKAA

SEQ ID NO: 90434 - protein, 506 aa, Xanthomonas campestris
  misc_feature (1)..(506): tr|A0A2S4JIW1|A0A2S4JIW1_XANCA Tryptophan halogenase OS =Xanthomonas campestris OX=339 GN=TR80_17920 PE=4 SV=1
MIPAPLRNIVIVGGGTAGWMAAAAFARVLGPSFNVQLIESEQLGTIGVGEATVPHIKAFNNLLGIDEAEFVRQTQGSFKLGIEFVDWQRPGTSYIHGFGTQIGHPLGLLPFHQYWIKQQLRGKAQPLGAYTLNTVAATRGKFMTSAGDVPANSPLANIAYAYHFDASQYARFLRGYAEQRGVTRLEGLIEQVQLDAHTGHVQSVQLASGQVVSGDLFIDCSGFRGLLIEEALHTGYHDFTHWLPCDRALAVPCEKVGPPTPYTRSTARAAGWQWRIPLQHRTGNGYVYSSAHISDDEAAATLLANLDGTPLADPRPLRFTTGRRKQFWNRNVVALGLASGFLEPLESTSIHLIQSGISKLLELFPREGISPVLVQRYNDRLAFEFDRIRDFLVLHYHATERDDSAFWRHCRTQPITPELQTTLDLFRDSGRFYRNAEEMFAEISWVQVMVGQGILPQGYHPLVDQVPDTDAEGFLASVAQTISHCVDVMPTHQQFIDRYCRADPMR

SEQ ID NO: 90435 - protein, 498 aa, Xanthomonas campestris
  misc_feature (1)..(498): tr|A0A3R7D009|A0A3R7D009_XANCA Tryptophan halogenase OS =Xanthomonas campestris OX=339 GN=XcmpCFBP7700_04345 PE =4 SV=1
MTQARIRKVVIAGGGTAGWVAAAALAHQFRGLLEIVLVESEQIGTIGVGESTVPPIRAFHRFLQIDEQEFLRAVAGTFKLAISFEGWQGQGDRYIHPFGSTGQGTLVCAFHHFWLEAQRRGMHSGFDEYCLEAQAARADRFAVLQQPAVNYAYHLDAGLYARFLRTHAQRYGATRIEGKIQQVRQHADSGFVEALVLEDGQVVEGDLFIDCTGFRGLLIEQTLHTGYEDWSHWLPCDRAVAVQTESVEPPVPYTRAIAHAAGWRWQIPLQHRVGNGLVYARAHLSDDEASAMLLAAVQGTPRRDPMLVPFVTGRRLQTWNKNVVALGLASGFVEPLESTSIHLAIVAVMRLITLFPADGIAQPQVDLFNRISRAEAEHVRDFVILHYHATQREEALWRQCRAMELPESLQLRLRAWREGAHAWQEGDELFRVDSWTHVLLGQGIAPAQHHPLTRALPDQHLQQLLDGIRQPLQHVVTQLPTQQAFIDNYCKVDQSTWG

SEQ ID NO: 90436 - protein, 503 aa, Aestuariibacter sp.
  misc_feature (1)..(503): tr|A0A506RCM4|A0A506RCM4_9ALTE Tryptophan 7-halogenase OS=Aestuariibacter sp. GS-14 OX=2590670 GN=FJ444_14710 PE=4 SV=1
MNHSQPNHSAQATKPHVVIAGGGTAGWMTAAALVKKLGPLIRITLVESSDIPTIGVGEATIPPLRVFHQLLGINEADFMRATSATFKLGIEFASFGKLNQRYIHSFGQTGQSSWLAEFIHFWREGLDRGIATDYGSYCLELAAAKANKFYTSAQNAPLNYAYHLDAGAYATFLKRLSVQAGVKHVVDTIEQVTLNDTGNIDALKLAQSGNLQGDLFIDCTGFRSRLMGEALNVGYEDWSHWLFCDRALAVQTELAPPLKPYTVASAHRAGWRWEIPLQHRMGNGFVYSSQFLDDHAARDTFSKALSNKPLQEIRALQFTTGRRLKAWHKNCVAIGLSSGFVEPMESTSIHLIVMGITRLMQLFPYSGNTQHLQDEYNAQTQTELERIRDFIVLHYHVTQREDSAFWRACKNMRIPDSLAERIELFTEHGHAFQKASELFRVDSWSQVMLGQGILPQNWHPAAKMMSDEQLAGALKKGQMEISQRVAQLPEHGAFVGQYCGIGM

SEQ ID NO: 90437 - protein, 507 aa, Aestuariibacter sp.
  misc_feature (1)..(507): tr|A0A506RWJ3|A0A506RWJ3_9ALTE Tryptophan 7-halogenase OS=Aestuariibacter sp. GS-14 OX=2590670 GN=FJ444_00425 PE=4 SV=1
MVTHPQHICIAGGGTAGWMTAAALANRLPRSHYRITLVESAQIGTVGVGESTIPHIRQFNDALGIAEDEFIAATSATCKLGIEFTHWGKQGDSYIHPFGELGKPLAGIEFHHLWQAASLQGLDVPIESFSVAAVAARQRKFSPPHASPEQLLSTYTYAYHLDASAYARFLCEYAEQRQVERVETQIREVKRAHQGGPITALSLDNGQEIIADWYIDCTGFRSLLIGDYPQAEFIDWSEWLKTNRAVVLPCEKDGPSRPYTKAMARDAGWQWQIPLQHRIGNGYVFCSDYISDEEAEHTLRSTLPGEALAEARFLDFKAGCRKQLWVENCVAIGLSAGFLEPLESTSIFLIQMGIAKFLEHLPGAHTHAGRNQYNRELTEQYQVIRDFIILHYYLTQRHDTPFWRDCQAINIPDSLTELIAAFRECGLVDKQQYGLWPAVCIGQHLHPKHVDSRVAAIPPQQLIGMLNQLKSDIAAQVATLPNMDDYLLSLVARTPLQKSGMQAGERV

SEQ ID NO: 90438 - protein, 520 aa, Xanthomonas campestris
  misc_feature (1)..(520): tr|A0A419NVU0|A0A419NVU0_XANCA Tryptophan halogenase OS =Xanthomonas campestris OX=339 GN=XcmpCFBP7700_20230 PE =4 SV=1
MHAPVPSESQRLVRRVVIAGGGTAGWMAAAALSKLLGRQLQITLVESDEIGTVGVGEATIPSLVTFHRLLEIDEAQFMAATQATFKVGIAFEHWRDVDRHYIHSFGHTGTDHWSAGFQHFWLKARARGVARDFGDYCLELRAAQEGRFAHLPNGGMNYAYHLDAGLYARFLRRFSEGFGVQRIEGRIGSVQTDAHSGDIAALVLDDGTRIEGDLFLDCTGFRALLIGQTLGVGSEDWSRWLFADSALAVQTESVGAPVTFTRARADRAGWMWRIPLQHRVGNGIVYSSRYMDQDSAAQVLEHNLQGRALTTPRALRFTPNQRHRVWEKNCVALGLASGFLEPIESTNIHLIQRGIVRLLQTFPQVIDPVDIAEYNRQAAEEIAHIRDFVILHYHATDRRDTPFWRDCAGMDIPDSLRHRMELFRQSGRVFHQGNELFAENSWIQVMLGQGIVPRHHHPVADLMGDAELSQFLEGIRQRVEATLARLPPHAEFLRRYCPAPALPAPLPQPAPGTPLAAPAA

SEQ ID NO: 90439 - protein, 491 aa, Aestuariibacter sp.
  misc_feature (1)..(491): tr|A0A506RTP8|A0A506RTP8_9ALTE Tryptophan 7-halogenase OS=Aestuariibacter sp. GS-14 OX=2590670 GN=FJ444_02455 PE=4 SV=1
MSEQPLNIVIVGGGTAGWMTANLLAKRWQHKAVKITLVESPDIGIIGVGEGSTPTLKRFFDDMQIAESDWMPACNATYKVSIRFDGWSPESGVNSYAHPFIGQLDTFSERAFYVNCMTRRLGLDVNVKPEDFLFNGWLANYYRSPKTPANFPFRIEYGYHFDSGLLGGFLQRYAQTQGVTHKALKITGVKYHPSGDIKELHTAEGQTIQGDVFIDCSGFRSLLLQQTLKVPFQSFGNNLFNDSAVVCATAPLTPLPVETRSTALSAGWAWQIPLTNRTGNGYVYSSAYLDPEQAEAELCKHLGLNRENTQIRHLKMNVGQVSEHWFKNCVAVGLAQGFIEPLEATALHLVQTSVEIFMDHYEKGGFSDQYRHAYNAVIRERFERVRDYIVAHYKLNTRNDSEYWRANRNNEALSESLLQLLDVWFRRGDLQQEIQRQKLDSHFGATSWHCLLAGYGAFPRLAANQPNTGDLYKEHNLETFFSGCLLNFAAQ

SEQ ID NO: 90440 - protein, 505 aa, Aestuariibacter sp.
  misc_feature (1)..(505): tr|A0A506RI03|A0A506RI03_9ALTE Tryptophan 7-halogenase OS=Aestuariibacter sp. GS-14 OX=2590670 GN=FJ444_12715 PE=4 SV=1
MSEHSIKKIVIVGGGTAGWMAAAAMSKLLNDNSITIQLIESEEIGTVGVGEATIPHILYFNRLLGINENDFVKFTNGTFKLGIEFVDWGQTGESYIHPFGPYGMDMEGIHFHHMWLRQQKMGQAKPIDEFNLQILAAQANKFQRAQVELQGSPLSTIAYAFQFDAMLYAKHLRGIAEANGVVRTEGKITQVNQHPENGHIASVDTDNGHHIDGDLFIDCSGFKGLLIEQTLNSGYEDWSHYLPCDRAIAVASNKLDELTPFTRATAKSAGWQWRIPLQSRTGNGHVYCSKFMDDDTALQSLYADLNSKPISEPNYLRFKAGIRKKPWNKNVVSLGLASGFLEPLESTSIHLIQTAIARLMTNFPDKLFNQHDIDYYNERTRLEYEQVRDFLILHYKATRRNDSPFWHYCRTMDIPESLHKRIEIYKQNARLYRHDNELFNHVSWFAVMHGQGIQPERYHPIADILSEDELHRRMEEIHTVTGKCLQVMPGHEDFIAKHCKANLPV

SEQ ID NO: 90441 - protein, 521 aa, Aestuariibacter sp.
  misc_feature (1)..(521): tr|A0A506RGR6|A0A506RGR6_9ALTE Tryptophan 7-halogenase OS=Aestuariibacter sp. GS-14 OX=2590670 GN=FJ444_12725 PE=4 SV=1
MARHQTVSRLCLRWHQQRRGAISMPGIKRIVIAGNGLAANMTALALQQQLPPDITLTLVSSAKHAELDCLYGSISAPHLYPFHLTLGVSEPDLLFNTNSTFCWGNYFDRWAMTPCSWLQGFHLPFPAMRGVGLHHFVTRHGETELATYLINAQADKTGKFAHPPEDNRHPLSRAEYGYQFDASALSALYASKLSSKVTVINASISEVATDTGDISITSLQLDNGQRIEADLYIDCSGPDAKVYSTLEQNNQASKSQVENARTLFAIHSTLQRGETLPTHRHIRAREFGWQADTYLRDSIQRLTVCSPEQKSQAIDAHGAQASIAMAFSAGHRQQAWTGNCVAIGQAASVIEPLTPAPLMMLMRDIQRLLELIPVTNTMLAEATEYNRRFIADIEHTGLFQGALFAFEHRQDSLPEHAYWQQAAQSVQSEKLTRKLTQYNHRGMLVSYDLEPFNEQDWLMLHSGMQRRPQTYDIVADQVPRAEMANQLNGMGNVIQQVVSQMPPHAIYLEKLMAYLSQKRSQ

SEQ ID NO: 90442 - protein, 496 aa, Sphingomonas sp.; identical to SEQ ID NO: 85878
  misc_feature (1)..(496): tr|A0A0Q4LR11|A0A0Q4LR11_9SPHN Tryptophan halogenase OS =Sphingomonas sp. Leaf42 OX=1736219 GN=ASE97_11240 PE=4 SV=1

SEQ ID NO: 90443 - protein, 562 aa, Alteromonas sp.
  misc_feature (1)..(562): tr|A0A3S5BF41|A0A3S5BF41_9ALTE Tryptophan halogenase OS =Alteromonas sp. 76-1 OX=2358187 GN=ALT761_04075 PE=4 S V=1
MSNQPIKHVVIVGGGTAGWLCAGVLAARLGKRISNRTNTNSNNPNHAQNIGEESAIHITLVESPNVPSIGVGEGSWPSLRDTLQEIGIKEADFLTCCHASFKQGSTFAGWRNGHQDDKYQHPFTTPTGYTELDIHRCWQQFFSSESFEQSFCLQPEICDAGLAPKQSTTPEYAYVLNYGYHFDATALATLLTNHCKNNLGVKHTQAHIANVVAQDNGDIESLVTENGDTIKGDLFIDCSGQQGLLIDKHYHVPWHSVSSVLLNNRAVAVQVPYGSSDLSASADTIASTTIATAQTCGWTWDIGLQHRRGVGLVYASDYASEENAESILREHLAKGLPQSEIENLTYRHLQFDPGYRKQFWVNNCIGMGMSAGFIEPLEASAIAMVELGIRMLCDQFPQNRQHMSHVATRYNQRFTYRWERVIDFLKLHYVLSEREEPYWLAQRSESSIPDSLNALLDLWQYQAPSRYDLIENEEIFPSASYQYILYGMGFHTTGRQLDKNSNMVKKAFALKQSLQQGKRQLLAGLPTNRDLLSTISHQLEKDTTANNNDKKEGPRHDVIGFR

SEQ ID NO: 90444 - protein, 503 aa, Glaciecola sp.
  misc_feature (1)..(503): tr|A0A2Z6UAH1|A0A2Z6UAH1_GLASK Tryptophan halogenase OS =Glaciecola sp. (strain KUL10) OX=2161813 GN=KUL10_3259 0 PE=4 SV=1
MNQYQSNPQSVKRVVIAGGGTAGWMTAACLSKLIGKNIDVTLVESDNIATVGVGEATIPPIRTLHKLLGINEQEFIRETNATFKLGIEFSNWRENEHSYIHSFGMTGKECWAGEFHHFWLRGLEKGITHDFGDYCFELQAAKQNKFGISNQQAINFAYHLDATAYAKYLRKFSEALGAKRVEGKIKYVQKHPQNGFISALALESGAIIEGDLFIDCTGFRGLLIEQALHTGYDDWSHWLPCNTAVTVQTQNTKQPIPYTKSIAHEAGWQWRIPLQHRMGNGLVFCNSFMDIDQATEKLRTSVTGKMINEPRQINFLTGRRRKGWNKNCVAIGLSSGFIEPLESTSIHLIMTAAVRLMRLFPYSGITQSTVDEYNNKLDSELNSIRDFIVMHYKVTNRQDTEFWRHCNAMEIPDTLRHKLDLFKETGRVFLDDGDIFRVDSWTQVLMGQGMYPQQYHHIAAEMDDNELVRFLNAIRTQVMQSVAQLPSHADFVNRYANAIDKAS

SEQ ID NO: 90445 - protein, 495 aa, Pseudoalteromonas sp.
  misc_feature (1)..(495): tr|A0A4P9J1E7|A0A4P9J1E7_9GAMM Tryptophan 7-halogenase OS=Pseudoalteromonas sp. 16-SW-7 OX=2583375 GN=FFU37_08 350 PE=4 SV=1
MTKTNAVKNVVIAGGGTAGWMAAAALAKLVGNNINITLVESDDIGTVGVGEATIPPIRTFHKLLGINEQAFMKATQASFKLGISFENWGDENTHYIHSFGATGKECWAGEFHHFWLQGKTLGINNPFGDYCYELQAAKAGKFAFNQQNPINYAYHMDATRYAQFLREFSEPLGVKRIEGKIQKVVKSTKTGHIESLILNNGEHINGDFFIDCTGFRGLLIEQALHTGYEDWSHLLPCNSAIAVQTKSTSDTVLPLTRSIAHKSGWQWRIPLQNRVGNGLVYCSQYMDDEQAKALLLNKIEGEALTEPRIIKFKTGRRLKGWNKNCLALGLASGFVEPLESTSIHLIMSGIIRFMRLFPFNGITNHAIDEYNKQLKSEIENIRDFIVLHYKVTNRDDSEFWQHCSAMEVPKTLQHKIDLFKQTGRVFLDDGDIFRVDSWVQVMLGQGIEPNQHHLIASIMSAEELTRFLHGIKQQIEQRVSQLPSHHEFLKQYCPA

SEQ ID NO: 90446 - protein, 537 aa, Burkholderia lata
  misc_feature (1)..(537): tr|Q39P61|Q39P61_BURL3 Tryptophan halogenase OS=Burkhol deria lata (strain ATCC 17760 / DSM 23089 / LMG 22485 / NCIMB 9086 / R18194 / 383) OX=482957 GN=Bcep18194_C670 6 PE=4 SV=1
MSNPIKNIVIVGGGTAGWMSASYLVRALQQQANITLIESEAIPRIGVGEATIPNLQKVFFDFLGIPEREWMPQVNGAFKAAIKFVNWRKAPDRSRDDHFYHLFGSVPNCDGVPLTHYWLRKREQGFQQPMEYACYPQPDALDAKLAPCLPDGTRQMPHAWHFDAHLVADFLKRWAVERGVKRVVDEVVEVRLNERGFISSLSTKEGRTLEADLFIDCSGMRGLLINQALKEPFIDMSDYLLCDSAVASAVPNDDARVGIEPYTSSIAMNSGWTWKIPMLGRFGSGYVFSSKFTSRDQATADFLHLWNLSDKQPLNQIKFRVGRNGRAWVNNCVAIGLSSCFLEPLESTGIYFIYAALYQLVKHFPDTSFDPRLREAFNAEIVYMFDDCRDFVQAHYFTTSREDTPFWRANRHDLRLSDAIKEKVERYKAGLPLTTTSFDDATYYETFDFEFKNFWLNGNYYCIFAGLGMLPDRSLPLLRHRPESIDKAEAMFARIRRESERLRTSLPTNYDYLRSLREGAGRSRSQPGQAVAAPEIQ

SEQ ID NO: 90447 - protein, 513 aa, Rubellimicrobium roseum
  misc_feature (1)..(513): tr|A0A5C4N647|A0A5C4N647_9RHOB Tryptophan 7-halogenase OS=Rubellimicrobium roseum OX=687525 GN=FHG71_17530 PE= 4 SV=1
MGPARTAPEGLVMAAAGWPERIVVVGGGTAGWLAAMMLSDVAGKKSPGTSVTVIESSKIGVIGVGEGSTAVFRQMLRRFGLDEEEFLRETGATIKFGIRHRDWRRLGHHYDGPIDDPHLVAPGIPLDCYAVAAGKPVQEAHLFQHLIWKRRGPFAEVDGRRVPAGPFHHAFHFDQALVGQWLRKKARGIRHIDDQVTGVEKGGEGIVALHLEGGLRIEGDLFIDASGFRRRLVSEMPFDWISFSDMLPNNRALPFWLDLKDGEEIDPVTGAWAQGHGWMWQIPTQGRFGCGYVYCDAYITPEEAQAEIERTLGHPIEPRGDIRINPGRQRDVWVGNVVAVGLASSFLEPLEATSIHGTIGQLICLTEWLGQPGGKARYNATAARQVDDFRDFVRLHYVSERRDTAYWRDVTASHPPVVTERLEKWSRKFPSREDFEPFPLGLAHVQEQLYVPVLNGLGLLNQDLARAEMARDPKLRQKARETHASLVAEYFRAAERCLPHRAWLESLHKELAA

SEQ ID NO: 90448 - protein, 495 aa, Streptomyces hyalinus
  misc_feature (1)..(495): tr|A0A401Z635|A0A401Z635_9ACTN Flavin-dependent tryptop han halogenase RebH OS=Streptomyces hyalinus OX=516124 GN=rebH_1 PE=4 SV=1
MTATYLKQTFRDEVSVTVVESERVGTVGVGEATFSTIRHFFAYLGLEERDWMPSCAASYKLGIRYANWREVGTYFYHPFERLPVLDGFTLDDWWLHLDGDVENFDTSCLLLSALCEANRSPRLLDGSLFTTLLDREIGNANEQRTQFPYAYHFDADLLAKFLTTFGVERGVRHVVDDVVEVRRDERGWIDHLVTTEHGDIPGDLFVDCTGFRGLLINGVLEEPFESFEDVLPNNRAVALRVPADPGREMAPYTSATAAEAGWIWTIPLYERVGTGYVYSDEFCDPAEAERTLRRFAAPDRPDLEANHIRMRIGRNRNSWVKNCVAIGLSSGFVEPLESTGIFFIQHGIEQLVNYFPDRDWDPALAVRYNRSIAEVIDGVKEFLVMHYCAAGREDTPYWKAAKSRAVPEGLAERLESWRTLLPEPDTIYPRFHGFEAYNWKVMLIGLGKAPARPRPALAGLDPSGAMAEFAAIRRQAERLVAELPGCREYVSRLHG

SEQ ID NO: 90449 - protein, 497 aa, Aestuariibacter sp.
  misc_feature (1)..(497): tr|A0A506RMA8|A0A506RMA8_9ALTE Tryptophan 7-halogenase OS=Aestuariibacter sp. GS-14 OX=2590670 GN=FJ444_06465 PE=4 SV=1
MTHKKTRVVIAGGGTAGWLSAFSLVTRLGNLLDITLVESDQIGTVGVGEATIPTMCNFHRLMGLDEREFMAATQATFKLGIQFDNWANQGDSYVHSFGEIGQRSWMAEFHEFWMEAIANGQQDKLEDYCLELKAAKQNKFALNVGNRPLNYAYHLDATAYAAYLRNKAESAGVTRREGKIVQVNKHLDSGNLSALVLDNGTHIDGDVFIDCTGFRALLIGEELGVGYHDWSHLLAADRAIAVQSTAIEPPRPYTIATAHKAGWQWRIPLQSRVGNGIVYSSRFSDDESALNTLMSNISGDPVTSPRYLKFATGMRKQAWANNCIAIGLSSGFLEPLESTSIHLVTTALIRLMKLFPFDGECRLLAERYNRETQKEMETIRDFIVLHYHLTQRDDSEFWHFYRTMDIPESLQHRMAMFAEHGYAWPDDVALFRVDSWVQVMMGQGLMPKRHHGASRMLPAQSLTQQLTAFKQSVNQALAQLPAHDTFLKQYCPANQST

SEQ ID NO: 90450 - protein, 506 aa, Xanthomonas campestris
  misc_feature (1)..(506): tr|A0A3R7GIN8|A0A3R7GIN8_XANCA Tryptophan halogenase OS =Xanthomonas campestris OX=339 GN=XcmpCFBP7700_19115 PE =4 SV=1
MIPASLRNIVIVGGGTAGWMAAAAFARVLGPSFNVQLIESEQLGTIGVGEATVPHIKAFNNLLGIDEAEFVRQTQGSFKLGIEFVDWQRPGTSYIHGFGTQIGHPLGLLPFHQYWIKQQLRGKAQPLGAYTLNTVAATRGKFMTSAGDVPANSPLANIAYAYHFDASQYARFLRGYAEQRGVTRLEGLIEQVQLDAHTGHVQSVQLASGQVVSGDLFIDCSGFRGLLIEEALHTGYHDFTHWLPCDRALAVPCEKVGPPTPYTRSTARAAGWQWRIPLQHRTGNGYVYSSAHVSDDEAAATLLANLDGTPLADPRPLRFTTGRRKQFWNRNVVALGLASGFLEPLESTSIHLIQSGISKLLELFPREGISPVLVQRYNDRLAFEFDRIRDFLVLHYHATERDDSAFWRHCRTQPITPELQTTLDLFRDSGRFYRNAEEMFAEISWVQVMVGQGILPQGYHPLVDQVPDTDAESFLASVAQTISHCVDVMPTHQQFIDRYCRADPMR

SEQ ID NO: 90451 - protein, 522 aa, Streptomyces sp.
  misc_feature (1)..(522): tr|A0A2S2GDI6|A0A2S2GDI6_9ACTN Tryptophan 7-halogenase OS=Streptomyces sp. SM18 OX=1736046 GN=B9S64_25570 PE=4 SV=1
MARSVVIVGGGTAGWMTASYLKATFGDKLAVTLVESKNVPTIGVGEASFSTIRHFFSYLGLAETDWMPECHATYKLGIRYDNWRAEGHHFYHPFERPRIVEGVSLADWWLHKRPSDDYDQDCSVIAALCDAKRSPRQLEGSLLELDAVEHEAEHASRSTMAEQNTQFPYAYQFDATLLAKLLTRYGTDRGVRHVLDDVVHAEVDERGDVTHVRTKESGDLAGDLFIDCTGFRGMLLNKRLEVPFLSYQDSLPNDSAVALRVPMEMSDQGMGPYTRSTAQDAGWIWTIPLSDRIGTGYVYASDYCTPDEAERTLRSFVGPGSEDLTANHIKMRIGRSENSWVNNVVAIGLSSGFVEPLESTGIFFIQNGIEQLVKHFPGGRDDHQLRRSYNRQVANVMDGVREFLVLHYIAAKRNNNAYWQDAKARTVPDALAERIEQWKVKLPDADTVFPYYHGFEPYSYTAMILGLGGLDVRPRPGLALMDDTAASKELRQVRDQAASLVERLPSHWDYLAHVTKLKGKRS

SEQ ID NO: 90452 - protein, 442 aa, Caballeronia glebae
  misc_feature (1)..(442): tr|A0A158DJD2|A0A158DJD2_9BURK Tryptophan halogenase OS =Caballeronia glebae OX=1777143 GN=AWB82_06832 PE=4 SV= 1
MSESTQTWDVVVIGGGPAGSTAATLLADRGYRVRVLEKARHPRFHIGESLLPANLRLFEKLGVADEVRAIGMVKLAAEFVSPQHDNRTQRFLFADAWDKSMPSAYQVRRSALDDILLRNAAKHGAHVSEGCRARDVAFAPDGSGATIDAEHDDGRSEALRARFVVDASGRDTLLANHFKTKRRNERHNSSALYGHFRDARRNEGENEGNITVFWFEHGWFWFIPLADGATSVGAVVWPAYLKQRPKGSSVETFFRDTIALCAPLAERLEHAELISEVHATGNYSYTGDMTHGRNFLLLGDAFAFIDPVFSSGVMLAMQSAFAGAQAIDAALSNPANAQAALAKFDRDVRHGPREFSWFIYRMTSPTMRNLFMGPKNPLRMKEALLSLLAGDIFGTTPIWHSLRAFKGIYYIAAALDWRNSLRAYRQRRRNLRDAQRAELSAN

SEQ ID NO: 90453 - protein, 513 aa, Devosia sp.
  misc_feature (1)..(513): tr|A0A087LTP0|A0A087LTP0_9RHIZ Uncharacterized protein OS=Devosia sp. 17-2-E-8 OX=1535287 GN=JP74_04080 PE=4 S V=1
MAQPSHFVIVGGGTAGWLAAFIIQDSARRMKLDAKISVVESSRIRTVGVGEATTAAFRVFLQHFKIDEFEFFRETEATFKLGIRHQDWRRKGYTYYGPIDDPHQVVAPPPGAPSDYLNVYAVSAGKKVQDMHLFGPLLERRKAPYARKADGSLLRLGPFHHAFHFDQSLVGQFLKRKSRGVEIVDAVVEGVERDGQTGDIRALKLDSGELLAADFFIDATGFRKRLIVQELQAPWISYARELPVNRALPFWLDIKEGDEINNYTLAWAQENGWMWQIPTQTRYGCGYVYSDEFTTPEQAKLEVERAIGREIEVRDDIRFTIGRLEKAWIGNCVAVGLSSSFLEPLESTSIHGTIVQMMLFAGHYLKEPGEMTQVERDDYNRRVGRQVDDFRTFVNTHYVTERDDTPFWRNVRAERLHPETKERLARWRQEMPRTEHFPNYLAGLPHIETQLHYPVLDGLGLLDPAVAKAEMARDPKLRAFAKKTHDALVKEYKQAATQAMGHAEFLEAVREMG

SEQ ID NO: 90454 - protein, 529 aa, Streptomyces hyalinus
  misc_feature (1)..(529): tr|A0A401Z618|A0A401Z618_9ACTN Flavin-dependent tryptop han halogenase RebH OS=Streptomyces hyalinus OX=516124 GN=rebH_2 PE=4 SV=1
MDHRIKRLVVLGGGTAGWMTASYLGKALQGAVDITVLEAPTIPRIGVGEATVPNLQSAFFDYLGIPEDEWMRECNASFKAGIRFVNWRTPGNGAAQPRALHGGVDHFYHHFANLPEHDGIPLSHYWHLRTLRGETDVPFDYACFAEAEVLDAKKGPRYGDGSQATGYAWHFDANLVADFLRRFATEKQGVRHVRDEMTEAVLDERGHITALRTKEGRLLEGDLFVDCSGFRGLLINQAMEEPFLDMSDQLLCDSAVATAIPHDDAANGVEPFTSAIAMSSGWTWKIPMLTRFGTGYVYSSKFTGQDEATREFCDLWGLNPDRTPFNHVRFRVGRNRRAWVRNVVSIGLASCFVEPLESTGIYFIYSAVHQLAKHFPDKRFDPTLVDHFNREVESMFDFTRDFIQTHFYFSPRTDTEFWRANKELPLGDDVREKISLYRAGFPVNTSQAGERVYYGNSEVDNKNFWNNTNYWCIFAGLGHLPDRVLPALEYKPASIESVENLFAEVESRRRHLLAELPTTHEFLRQLHGK

SEQ ID NO: 90455 - protein, 520 aa, Xanthomonas campestris
  misc_feature (1)..(520): tr|A0A3E1KZ03|A0A3E1KZ03_XANCA Tryptophan 7-halogenase OS=Xanthomonas campestris OX=339 GN=D0A35_18630 PE=4 SV =1
MHAPVPSESQRLVRRVVIAGGGTAGWMAAAALSKLLGRQLQITLVESDEIGTVGVGEATIPSLVTFHRLLEIDEAQFMAATQATFKMGIAFEHWRDVDRHYIHSFGHTGTDHWSAGFQHFWLKARARGMARDFGDYCLELRAAQEGRFAHLPNGGMNYAYHLDAGLYARFLRRFSEGFGVQRIEGRIGSVQTDAHSGDIAALVLDDGTRIEGDLFLDCTGFRALLIGQTLGVGSEDWSRWLFADSALAVQTESVGAPVTFTRARADRAGWMWRIPLQHRVGNGIVYSSRYMDQDSAAQVLEHNLQGRALTTPRALRFTPNQRHRVWEKNCVALGLASGFLEPIESTNIHLIQRGIVRLLQTFPQVIDPVDIAEYNRQAAEEIAHIRDFVILHYHATDRRDTPFWRDCASMDIPDSLRHRMELFRQSGRVFHQGNELFAENSWIQVMLGQGIVPRHHHPVADLMGDAELSQFLEGIRQRVEATLARLPPHVEFLRRYCPAPALPAPMPQPAPGTPLAAPAA

SEQ ID NO: 90456 - protein, 495 aa, Aestuariibacter sp.
  misc_feature (1)..(495): tr|A0A506RUC8|A0A506RUC8_9ALTE Tryptophan 7-halogenase OS=Aestuariibacter sp. GS-14 OX=2590670 GN=FJ444_02450 PE=4 SV=1
MPQPIQNVVIAGGGTAGWMTAALLRKVLSPAVRIELVESEQIGIVGVGEATIPPIQVFNNFLGIDEREFLRDTHATIKLAIKFENWKTHGDSYYHTFGAPGTTMGFCSFHHYWLKAQQTGLSQSLWDFDLNYLSCEQGRFNKINTPNPLYEMQYAYHFDSALYGQFLRKKAEQAGVVRTEGIIEHVQQDPATGYITALQLTSGKQVQGDLFIDCTGLRGLLIQQALGVGYDDYSHWLPADSAQAVPSERFTSTLPYTRSIAHKVGWQWRIPLTHRNGNGIVYSSQYLSDDQATETLLNNLDTKALDTPRTIRFKTGRTAQQWCKNVVAIGLSSGFLEPLESTSIHLIQSGIIRLMKMFPNNGISQAMTDLYNTESKDEFETIRDFIILHYHVNQRDDSDFWRDMRTMSIPDRLAQKIAAFEETAAIFNEKNDIFRDASWVQVMMGQGLSPRDYHPAADAMDNAQLMAAMSQIYQAKQQPLDKLLSHDEFLQRYTA

SEQ ID NO: 90457 - protein, 515 aa, Alteromonas sp.
  misc_feature (1)..(515): tr|A0A448XU12|A0A448XU12_9ALTE Tryptophan halogenase OS =Alteromonas sp. 76-1 OX=2358187 GN=ALT761_00255 PE=4 S V=1
MTPVNSVVIVGGGTAGWLTAGLLAATHSKQGSTGARLSVKVIESDSIHPIGVGEGTWPTMRSTLAKIGIEEAALVQQASATFKQASKFVHWHTEGQRTGYYHPFSAPQGSASVDITPYWLHNNALNEYASDVCFQPSLCEQGLAPKLTADSKQNFSANYGYHLDAGKFISVLRDHCKKELGVEHIIDDVTDVATDDAGIKHVVTKNNDQIHGDIFVDCTGFTARLIEKALDVPMEDASSVLFSDSALVHQIAYSDEHQPIACHTLSTAQEAGWIWDIGLQNRRGTGYVYSSKFQSDDEATKTFAAYLKSINPDEELPSIFRKINYKTGYRKRFWEKNCVAIGLSSGFLEPLEASSLMLIEQSAIQLAEQLPAYTQVMPHVANRFNRALTNKWQSTIEFLKLHYVLSNRNEDFWLANRAPQSIPKRLTSLLEEWQYRPILDSDFTDRDDVFSAQSYRYILYGMSHKTDLSQYERSMSQYEGADKHLQLNKALIAQLTARLPSHRGLIDTMLNKHSA

SEQ ID NO: 90458 - protein, 500 aa, Rhodanobacter denitrificans
  misc_feature (1)..(500): tr|A0A368KG60|A0A368KG60_9GAMM Tryptophan 7-halogenase OS=Rhodanobacter denitrificans OX=666685 GN=DEO45_03830 PE=4 SV=1
MTDRRIRRIVIVGGGTAGWMAAAALARGLQGNCRIDVVESDEIGTIGVGEATLPPIKLFNQTLGIDENAFVAATQGTFKLGIEFVDWSSLGHRYFHPFGQIGMPFDAVPLHQYWLRERARGDTTPLQDYAYAWVAARKGRFERPSGGRQHVQSTFDYAYHFDAALYARFLRGYAEQRGVVRTEGKVVDVTLRGDDGFIESVTLAGGAVLEADLFIDCSGFRGLLIEGSLKTGYESWEQWLPCDRAVAVPSAHGEAPVPYTRATAHAAGWQWRIPLQHRMGNGLVYGSRYIGDDEATALLLSKLEGEALAEPRLLRFVTGRRRLAWNRNCVALGLAAGFMEPLESTSIHLVQSSLSRLLALFPDRDFDPLAAREFNRLTHAEHERIRDFLILHYHATTRDDAPLWRDCRAMAIPDTLQYKLDQFRSCGRTVAEPLELFQNPNWLAVMIGQEVWPARYDPLVDLRTAVDAPSRLAELRQVMEQVALAMPTQAEYIDRHCRAR

SEQ ID NO: 90459 - protein, 384 aa, Bacteroidetes bacterium
  misc_feature (1)..(384): tr|A0A136NDB0|A0A136NDB0_9BACT Tryptophan halogenase OS =Bacteroidetes bacterium OLB11 OX=1617422 GN=UZ11_BCD00 4000292 PE=4 SV=1
MVIVEKTTFPRFVIGESLLPRCMEALEEAGFLNALKDAKFQEKSGAKFVMSDKTICDFNFNEKHSSGYEWTWQVPRADFDKILADECGKMNIPIYYESEVVHIQFHDDESSDIDIKLKDGTIHKISAKFIIDGSGYGRVIPRMFGLEKESNLAPRRALFTHYIDKNRNKIKAEEPDRITIYVYDTTTWVWCIPFSNGNTSVGFVGFPDFFEKFNSTPTENLKAMIASHEELNEQFGDCEMIFEPRELKSWSATTDKFYGKGFVLTGNVTEFLDPMFSSGVTLASVSAQKAAHLVIDKLNNKPVDWEKDYMEPCMQGVNVFRTFVNEWYSGDLHTIFFSKNQNEEIRRQISSVLAGYVWDKSNPFVNNHEKQVKSLAKYIRDTQA

SEQ ID NO: 90460 - protein, 516 aa, Novosphingobium sp.
  misc_feature (1)..(516): tr|A0A1W7M383|A0A1W7M383_9SPHN Uncharacterized protein OS=Novosphingobium sp. MD-1 OX=1630648 GN=NMD1_00047 PE =4 SV=1
MRDVVIVGGGTAGWLTAAIIAAKHRPRIGHDFSVTLVESPNVPIIGVGEGTWPTLRSTLKSVGISETDFFRECDAAFKQGALFAKWTTGAEDDAYYHPLVLPQRFGQLNLAPHWLAGTLVEDEDADETFCDAVCPQGRICDENLAPKTMADAEFEGQANYAYHLDAGKFAPFMQRHCTEKLGVRHVLADMRQVLQDESGDIRAIVTEQAGEIAGDLFIDCTGMRSLLLGETMGVGFRDCNDVLFCDTALAVQVPYPDPDAPIATHTISTAQSAGWIWDIGLPTRRGVGHVYSSRHISREQAEAELRAYIGPAADSLAVRKIDIRSGHRELFWKGNCVAVGLAAGFLEPLEASAIVLIELSAKMIAEQMPPAREVMDIVARRYNEKTLYRWGRIIDFLKLHYVLSQRRDTAFWRDNMDPATIPERLRELLALWRWQPPYLHEEFDRVDEVFPSASYQYVLYGMGFRSEVSARALEPEVRDARRARGQNADITTRMLTALPRHRDLINRIVEYGLQPV

SEQ ID NO: 90461 - protein, 508 aa, Novosphingobium sp.
  misc_feature (1)..(508): tr|A0A4R7DP75|A0A4R7DP75_9SPHN Tryptophan halogenase OS =Novosphingobium sp. GV013 OX=2135688 GN=C8K09_1177 PE= 4 SV=1
MSMSENERRIRSILIVGGGTAGWMTAAALARSLPRGCAITLIESEEIGTVGVGEATIPPIQRFNEMLGIDERAFMKATMGSFKLGIEFVDWGKLNHRYFHPFGPFGRPFDTVDLHHYWLRARAAGDTARLDDHSMAWAIAREGRFSPPSPDPRNVLSTFDYAYHFDAGLYARFLRSYAEERGVTRIEGRIASVRQDGETGFVAGVTMEDGRSADADLFVDCSGFRGLLIEGALKAGYEDWTHWLPCDRAVAMPCANVGPLTPYTRSTAREAGWQWRIPLQHRTGNGYVYCSQFLTDDAAVDTLTCNLDGKALGDPRPLRFVTGRRKSFWTKNVVAIGLSSGFMEPLESTSIHLIQAGISKLLALFPDRTFDPLVIEEYNRIAVNEFERIRDFIILHYKLTQREDSALWRYCAAMDVPDTLHTKIEHFRRYGRLVQRDADLFGPPSWLAVHIGQGNFPERTDPLADYRGIDGREWLAKLRSAMHAAAVRLPTHEQYLASHCAASILPDA

SEQ ID NO: 90462 - protein, 521 aa, Xanthomonas citri
  misc_feature (1)..(521): tr|A0A220WCD5|A0A220WCD5_XANCI Tryptophan halogenase OS =Xanthomonas citri pv. vignicola OX=473426 GN=XcvCFBP71 11P_02170 PE=4 SV=1
MPDTTPSDPHQRPVRRVVIAGGGTAGWMAAAALSKLLGRHLHITLVESDEIGTVGVGEATIPSLVTFHRLLEIDEAAFMAATQATIKLGIAFEHWRDVDQHYIHSFGHAGTDHWSAGFQHFWLKGRQRGVARDFGDYCLELRAAQEGRFAHLPNGGMNYAYHLDAGLYARFLRRFSEGFGVTRVEGRIGQVETDAQSGFLTALTLQDGTRVEGDLFLDCTGFAGLLIGKTLGVGSDDWSRWLFADSALAVQTESVGPPVTYTRSRADQAGWMWRIPLQHRVGNGIVYSSRYMDQDGARAVLERNLTGRALTEPRPLRFTPNQRHRVWEKNCVALGLASGFLEPLESTNIHLIQRGIIRLLQTFPQVINAVDIAEYNRQAAQEITHIRDFVILHYHATDRRDTPFWRDCAAMDIPDSLRHRVELFRQSGRVFHQANELFAENSWVQVMLGQGVVPQQHHPVADLMGDAELGRFLETIRTRVEAALVRLPAHADFLQRYCPAPPLPEPAACVPAPPVMATPAG

SEQ ID NO: 90463 - protein, 505 aa, Xanthomonas citri
  misc_feature (1)..(505): tr|A0A220WF80|A0A220WF80_XANCI Tryptophan halogenase OS =Xanthomonas citri pv. vignicola OX=473426 GN=XcvCFBP71 11P_08235 PE=4 SV=1
MTQAQIRKVVIAGGGTAGWIAACALSHQFRNLLDITLVESEQIGTVGVGESTVPPIRTFHRFLQIDEQEFLRAVAGTFKLSISFEHWRRQGERYIHPFGITGQSTLVCAFHHLWLESQRRGMPGSFGDYCLETVASRVDRFALHGEPAVNYAYHLDAALYARFLRARSEACGVKRVEGRIQQVTVQPHSGDVASLVLEDGQTIEGDLFIDCSGFRGLLIEQTLHTGYEDWSHWLPCDRAVAVQTEALGPPVPYTRAIAHEAGWRWHIPLQHRVGNGLVFSSKHLSDDEAHAKLLRDVAAPAVKEPWMVPFRTGRRLKAWNKNVVSLGLASGFIEPLESTSIHLTISAVVRLLALFPAGGIAPSQVQLFNDISRAEMEHVRDFVILHYHATQREEPLWQQCRQMELPESLALRLRAWRERAHAWQGADELFRVDSWTHVLMGQGIAPEQHHPLTRAFSDHDLRRLLDGIAQPIQHAVQQMPSQQDFIERYCKAGEQVWGMRSPVPA

SEQ ID NO: 90464 - protein, 543 aa, Antarctobacter heliothermus
  misc_feature (1)..(543): tr|A0A239EYZ7|A0A239EYZ7_9RHOB Tryptophan halogenase OS =Antarctobacter heliothermus OX=74033 GN=SAMN04488078_1 01765 PE=4 SV=1
MTAPIRKITIVGGGTAGWLAASLLNSLLREKRPPEDAIQITLIESPDIPTVGVGEATVPNMPRTLADCGISEAEFFRCCNASFKLGVLFDHWNVDADGQPISYVNPFDAPPPLNGAPLAAYYLKYGAGDLDFVHLFSPCLDLRDGLRGPRPFRAGEFAQGAGFAYHLDAGKFSALLRDTCIARGVVHVFDNLQDVELDETGKVAALHLEKGGRHDVELVLDCTGFRGLIINKALGSEFISYSKYLANDRAMAVQVPHLSDDIEPMTRSTAMGAGWTWRVPLFNRVGTGYVFSSAHRTDEQARDELMAWVGSAGEGLEPRVIPMRIGRNRENWVKNCVAVGLSGGFIEPLESTAIHMIDMAVRALITYFPDTSYAAPLRHRYNRQMERLYDEVRDFICLHYALGNRTDSPYWIDAREELEVSDALAENLALWRHALPQPGDLDSAVLFSAQVYQAVLLGKRVYEMGYKADNFAAGYALDEDRWWEFVAQRRARYAEFADRAANHRHLLREIRGELMGRERRAVERGEAVNVPRAAPDLAESSML

SEQ ID NO: 90465 - protein, 499 aa, Alteromonas sp.
  misc_feature (1)..(499): tr|A0A3S5BB85|A0A3S5BB85_9ALTE Tryptophan halogenase OS =Alteromonas sp. 76-1 OX=2358187 GN=ALT761_00806 PE=4 S V=1
MSQSMSIKSIVIVGGGSAGWMTAATLSKVLDLSKCNVTLIESEDIRGVSVGEATIPQITLFNRILGIDETDFIRATNATYKLGIEFKDWKHQGHAYFHPFGSFGINMEALPFHHFWLKRFNEGAGGDLCSYSIEAMAAKSGRFGKVKAQSNSPLANMSYAYHFDSTLYANFLRDFAVKRGVRHVNGKVEAVSKHLNGHINTLTLQDGQCIDGEFYIDCSGFRSLLLEKEMGATFNDWSDLLPCDSAIAIPCKSADSMLKPYTQSSAKAAGWTWRIPLQHRIGNGYVYSSKFTEKDVVLDELMAQLEGEPLAEPNFLAWKTGMRPQSWINNCLGIGLSAGFIEPLESTGLHLIQSAIARLMTLFPDNRFCQSDIDMYNRQTEKEFEQIRDFIVLHYVLTERNDSEFWRYCRNIPLSESLTQKMQLYKDSGRIFRIDNELFNETSWLAVMHGQGLRSEGYHPLVDRMSTSLIDERLTHIASVIDKSASVLPEHAQFIAQLG

SEQ ID NO: 90466 - protein, 533 aa, Nostoc sp.
  misc_feature (1)..(533): tr|K9QN72|K9QN72_NOSS7 Tryptophan halogenase OS=Nostoc sp. (strain ATCC 29411 / PCC 7524) OX=28072 GN=Nos7524_ 0715 PE=4 SV=1
MKLQNPQQIQNIVILGGGSAGWLSATYLNQILNSGQGSPCQITLIESADIGIIGVGEATIHTFPGTLQLLGIPESEWMVKCNATFKNAIKFVNWSGLPGKDEYWHPLTRLPETPGSSIPLFHYWLQSKLQGNSAAFDASCFAAVELCAAQKSPKSVNNRNPHTTVGDYGYHLDAGLLATYLKQKGKSEGIRQIVDHVLDVAFDENGFIRHLVTENHGEVAGDLFIDCSGFSGRLINQALQEPFISYSDSLLCDRAVALPVLYESGDKYNEKRGGINPYTTSTALSTGWAWNTPLVERSGNGYVYASAFISPEQAEMELRQHLQEYTTPARHLQIRVGKTRNTWVKNCVSIGLSSGFIEPLESTGIYLIEAGLYHLLQNFPDQKFDPMLRENYNRTMQNLYEDIRDFIVLHYCLTQREDTPFWQANKYNLKIPDSLQQRLEQWRFMWPSQNFSAVSQPLFGDYSYVCILAGMGYLPEKVLPIVTYQQGLSTQLFTQLSNYSQQLKKCLPNHVDYLRDIHQRDILTNLFVKGNRQ

SEQ ID NO: 90467 - protein, 497 aa, Pseudoalteromonas sp.
  misc_feature (1)..(497): tr|A0A4P9IZZ3|A0A4P9IZZ3_9GAMM Tryptophan 7-halogenase OS=Pseudoalteromonas sp. 16-SW-7 OX=2583375 GN=FFU37_05 885 PE=4 SV=1
MKPIKHVVIAGGGTAGWITAALLNKVLGKVIKVTLIESSTIGTIGVGEATIPPIIQLNNALGINEQDFINATNASIKLGIEFENWKTPSHSYMHSFGSFGKDFPFCDFYNFWIKGKITGCEDSLWDFSLNYQAAKQHKFAPLNTIPNTQLPGLSYAYHFDASLYAEFLKKLATSRGVEHIDAKIEQAEQCPLSGNIKSLTLGNTQQINGDLFIDATGQRALLIEQTLNTGFVDWSHYLPCDSAVAVQTQGTSELKPYTRSIAHSAGWQWQIPLQSRIGNGLVYCSRYLSDDAATQLLLNNLPAEPMTEPRVIKFKTGRRLKQWHRNVVSVGLASGFLEPLESTSIHLIQSAVTRLIKLFPHNGISEALVTEFNKQSVTEIEHIRDFIILHYKLTEREDSAFWRQCKQMDIPDSLAHKLKLFKQTGKVVRENDELFAEVAWQQVFIGQGLIPEDYNSIVDSLSSEQLNDLFSTLKTLITSTVDQLPTHKDFLAKIKKA

SEQ ID NO: 90468 - protein, 503 aa, Brevundimonas sp.
  misc_feature (1)..(503): tr|A0A0Q7SWG4|A0A0Q7SWG4_9CAUL Tryptophan halogenase OS =Brevundimonas sp. Root1423 OX=1736462 GN=ASD25_18430 P E=4 SV=1
MSEPIRSILIVGGGTAGWMAAAALQRTLGPHAKVSLVESDDIGIVGVGEATVPPIRDFNALIGLDEAEFMRETRATLKVAIVFKDWGHIGNRYVHPFGTFGRGPTLADFQQTYFSLKARGLAGDLGDYSVCWRAADAGKVGDRDPDPRSPRNSLFSAYHFDAGLYARYLRKVCEGRGVERIEGKIVDVVQRGEDGFIDGVTLEDGRVLKADLFIDCTGFRALLIEGALKAGYEDWSHWLPVDRAVAVPCAGVKPLTPYTLSTAREAGWQWRIALQHRTGNGYVYCSDHLSDDAARETLLANLDGEPLAEPRLLRFATGRRRKYWDRNVVSLGLSSGFIEPLESTSIHLVQAGIYRLLQHFPDMDFSPVNIDGYNRRLGREVELIRDFVILHYHASRRDDSPFWRQVAVMPIPDSLSERVEAFRDRALLYQVWADEYFSQGSWLAVMYGQGITPRGPSPLYAYQDADKAAAGLRNISEVLARTVDGLPEHEAYLRANAMWAEDA

SEQ ID NO: 90469 - protein, 493 aa, Sphingomonas sp.; identical to SEQ ID NO: 85826
  misc_feature (1)..(493): tr|A0A0Q4LNX5|A0A0Q4LNX5_9SPHN Tryptophan halogenase OS =Sphingomonas sp. Leaf42 OX=1736219 GN=ASE97_03640 PE=4 SV=1

SEQ ID NO: 90470 - protein, 518 aa, Sphingobium sp.
  misc_feature (1)..(518): tr|A0A197C164|A0A197C164_9SPHN Tryptophan halogenase OS =Sphingobium sp. 20006FA OX=2056888 GN=A8O16_03840 PE=4 SV=1
MTADIPSPGRIVIVGGGTAGWLSAATFSRTLGMRDVTLVESSEIGIIGVGEGTFPTIRSTLAGLGVGEGEFLRSADATFKQGVLFDGWATGADSYFHPFNMPIGGEDEALLPHWLAMEGQRASWADSVTVQERVIRAGRAPKRVQDPDFSGPMNYAYHFDAARFADYLRTISLAAGVRRIEGMVAHVEQREDGDIAALTLSDGRRVEGDIFIDCSGFRALLIGQTLGSGFVGCGDTLFNDRALAMQVPHDRPDAPIRPYTLATAHEAGWTWDIGLPERRGIGYVYSSRHCSDDEAEAVLRRYVGPGGEALTPRQLRFATGYRERQWIGNCIAIGLSAGFFEPLESTGIMLIEAALRMVGDFLLPAGSASDTAARNAAARRFNRLMTARFERIVRFLKLHYCITRRTDTAYWRDNADPASIPADLQDLLAQWRHRPPSRFDFTVDLETFLPPSYHYILYGMGFETRLAGGIGRYPGGQEARAAFARVAGASGAAVSHLPDHRALLDHLRGRQPSARVSR

SEQ ID NO: 90471 - protein, 522 aa, Streptomyces pharetrae
  misc_feature (1)..(522): tr|A0A1Y2PPG0|A0A1Y2PPG0_9ACTN Tryptophan halogenase OS =Streptomyces pharetrae CZA14 OX=1144883 GN=OQI_27735 P E=4 SV=1
MAKSVVIVGGGTAGWMTASYLKAAFGERLAVTLVESRNVPTIGVGEASFSTIRHFFSYLGLQETDWMPDCHATYKLAIRYDNWRAEGHHFYHPFERPRVVEGVSLADWWLHKRPSEDYDRDCSVIAALCDAKRSPRRLGGALLAPELGAQDPVSMSRSTMAEQNTQFPYAYQFDATLLARLLTGYGTDRGVRHVLDDVVDTAVDERGHITHVRTKESGDLAGDLFIDCTGFRGMLLNKTLGVPFISYQDTLPNDSAVALRVPMEMADQGMGPYTRASAQAAGWIWTIPLHGRVGTGYVYASDYCTPEEAERTLRGYWGPAADDLTANHIRMRIGRSENSWVNNCVAIGLSSGFVEPLESTGIFFIQNAIEQLVKHFPGGPNDEQLRRSYNRQVANVMDGVREFLVLHYVAAKRNDNDYWRDAKTRTMPDALGARIEQWQAKLPDQDTIFPYYHGFEPYSYTAMILGLGGLDVRPLPGLAMMDDVAAEKELRLVRDQAKSLVETLPSHWDYIAHLNDRKGARA

SEQ ID NO: 90472 - protein, 516 aa, Pseudoalteromonas sp.
  misc_feature (1)..(516): tr|A0A4V1HDE3|A0A4V1HDE3_9GAMM Tryptophan 7-halogenase OS=Pseudoalteromonas sp. 16-SW-7 OX=2583375 GN=FFU37_08 345 PE=4 SV=1
MTKPITKIVVLGGGTAGWLSAGLLAAEHPHLNVTLVESENVPILGVGEGTWPSMRNTLQRIGIKEIDFITQCDASFKQGSKFINWRNLSEGENYYHPFMNPQGYEHTNLHASWQRIAPNQKFADVVNMQSFVCQAALAPKQLQTPEYAAVTNYGYHLDAGKFAEFLKNHCVKNLNVTHIIDDVTEVINDVHGYIASLKTNNNGDITGDLFIDCSGSRARLIGDHFNSEFIAQDHILFNNSAVAAQIPNAHINQPIASATLSTAQSNGWIWDIALPTRRGTGYVFSSKYQSDESATNTLKSYIAKSTSEQQAEQLTYRVLKFSPGYRQKFWIKNCVAVGMSAGFLEPLEASALAMVELSISMISEQLPQNRTHMSQLETRFNERFSTRWQRVIEFLKLHYVLSERDDTPYWQDISNLNTAPERLQNLLKLWQFQPPSRFDFIENEEVFSSSSYQYVLYGMGFNTQTVSAQNTFNDPRAGDYYYQQNREKIAQCLNGLPSNRALLNHLLSNNGQPHND

SEQ ID NO: 90473 - protein, 508 aa, Pseudoalteromonas sp.
  misc_feature (1)..(508): tr|A0A4P9J4P7|A0A4P9J4P7_9GAMM Tryptophan 7-halogenase OS=Pseudoalteromonas sp. 16-SW-7 OX=2583375 GN=FFU37_16 425 PE=4 SV=1
MNKAIKTIAVIGGGTAGWLSAAIIASYHQGKNGDGLKVMLVESSDIPTIGVGEGTWPTMKNTLQQIGLREVDVFKACNATFKQGGKFVNWTHGNNDFYYHPFTVPLGYGRIDLAPYLDNVEDFAQQTNFQHDICEASLAPRGIAQGEYQGNCNYAYHLDAGAFAEMLKQHCKSKLGVEHIIGTVDQVKLDDDGAINELTLKDQTRIISADLFIDCTGFSSLLLGQALNVPFKKMDHVLFNDSALAMQVPYDENDDSLASHTIATAQNAGWIWDIGLTHRRGVGHVYSSKFLSDDEAEQNLRNYLGDAANGLTARKISFESGYREKFWHKNCVAVGMSAGFVEPLEATAIMLVEISARFVAEHMPADTQVMPIVAKRFNEQMDYRWQRIIDFLKLHYMLTKRPEPYWQAHVHPDTIPQTLQEDLLLWGSRGPLIQDFHGALELFPAASYQYVLYGMGFKPDFTKQAYLYSQDAQAKQIIERNSQLTQQMLQTLPPHRAYIEQWLAANPV

SEQ ID NO: 90474 - protein, 501 aa, Glaciecola sp.
  misc_feature (1)..(501): tr|A0A2Z6U456|A0A2Z6U456_GLASK FADH2 O2-dependent halog enase I OS=Glaciecola sp. (strain KUL10) OX=2161813 GN= prnA PE=4 SV=1
MLQHVNKVVILGGGSAGWMTAAAISKVFGNKLDLTLIESEAVGTVSVGEATIPQISLFNNLLGLDENEFVKKTKGTFKLGIEFANWKEKGHSYMHPFGTFGTNMDAIQFHHYWLKMFLKGDAPDLTKYSLLCQAAYKGKFCRPQAIKNSPLSSIPYAFHFDATLYAKYLREFAEARGAKRIEGKVQDVFTRSSDGFIDSLLLEDGQRINADLFIDCSGFKGLLIEQTLKTGYEDWGHWLPCDRAVAMPCKAAKENYPYTVSTAQDAGWTWRIPLQHRVGNGYVYPSRFVSDEQALETLKGQMENEPLNKPNFLKWQTGRRKQMWNKNCIAIGLSAGFIEPLESTGLHLIQTAISRLMGFFPHQGFNQVDIDVFNKQTQLEMEQIRDFIILHYKLTDREDTEFWRYVKNMDVPKGLEEKLALYATNGRIFRQDNELFDETSWLAVMHGQGLRPEGYHPLVDTFEEAEVERRLKHIESVIAKSVDTMPTQQSFIDQYCAAMAD

SEQ ID NO: 90475 - protein, 520 aa, Glaciecola sp.
  misc_feature (1)..(520): tr|A0A2Z6U4D7|A0A2Z6U4D7_GLASK Tryptophan halogenase OS =Glaciecola sp. (strain KUL10) OX=2161813 GN=KUL10_1146 0 PE=4 SV=1
MNSRKKEIEDIVILGGGTAGWMTAAALSKLLPSQHFKVTLIESDAIGTVGVGEATLPHLGAFNRRLGIDEAEFMRVTQATFKVGIEFQNWGQKGDAYIHPFGDYGYKIAGVPFHHFWTKEKLNGDTTKIDDYSLPVKACQANKFTFPSKDETSVDSTYSYAYHIDAGLYAKFLREFSEKRGARRIEGKVVEVITRSSDNHIDSLIMEDGQRIEADFFVDCTGFRAQLIEQVYQSGYVDWSHWLPCNSAIAIATAQQEVPIPYTKAIAREAGWQWRIPLQHRHGNGYVYCDKFIDREQALDTLQSNLVGPAITEPNYLKFQTGRRKKSWINNCLAIGLSSGFLEPLESTSIYLIQSAIMKLVELIPQQSNLQIKATEYNRSLDMEMERIRDFLILHYHATERDDTPFWDYIRTMQIPDSLQDKMDMFKATGHVQNYRYGLFLEPSWVAVYLGQRFIPNSYDQRVNTLDRSAYIEGMQQFKQEVADAVKRMPSHNDTIHQYCTIGGIENDGLLQSGLYGKRL

SEQ ID NO: 90476 - protein, 505 aa, Sphingomonas sp.; identical to SEQ ID NO: 85900
  misc_feature (1)..(505): tr|A0A0Q4M5T2|A0A0Q4M5T2_9SPHN Tryptophan halogenase OS =Sphingomonas sp. Leaf42 OX=1736219 GN=ASE97_03655 PE=4 SV=1

SEQ ID NO: 90477 - protein, 507 aa, Glaciecola sp.
  misc_feature (1)..(507): tr|A0A2Z6UBJ5|A0A2Z6UBJ5_GLASK Tryptophan halogenase OS =Glaciecola sp. (strain KUL10) OX=2161813 GN=KUL10_1661 0 PE=4 SV=1
MTSIVIVGGGTAGWLTAAIIAAKNSHLKHGQNAVQISLIESPDVKNLGVGEGTWPTMRETLRSIGISERELLKKCNASFKQASKFVNWHTQNNHYYHPFTLPSSYGAFNLAEHWQPSNEQDFADFVCAQSAACEQALAPKLSTMKDYAFALNYGYHLDANKFVALLQSHCETVFGVNYIQDHVQGVVNDKDGYISHLNLKDRGTVEGDMFIDCSGFTSILIDKHYGIPFKTCSDVLFNDRAIAAQVEHADDKTEIASSTIATAQSNGWIWDIALQNRRGIGYVYSSRFETDSNAEVSLKRYIEQDPKLARSDVSTRTIKFTPGYRQKFWHKNCVAIGVSAGFVEPLEATAMVLIEKSAQWVSEQITNDHKAMNVLAKRFNSVTTERWIEIVDFLKLHYVLSDRKDSEYWCAHREANSIPETLKESLILWRTQSPWLYESMNRFELFSSASKQFVLYGMQFKTSHQQLLNQQTDTTKRLNRIRDENYLLKQQLIKQLPTNREYLANLS

SEQ ID NO: 90478 - protein, 505 aa, Sphingomonas sp.; identical to SEQ ID NO: 85890
  misc_feature (1)..(505): tr|A0A0Q4LSW4|A0A0Q4LSW4_9SPHN Tryptophan halogenase OS =Sphingomonas sp. Leaf42 OX=1736219 GN=ASE97_11175 PE=4 SV=1

SEQ ID NO: 90479 - protein, 507 aa, Glaciecola sp.
  misc_feature (1)..(507): tr|A0A2Z6URF9|A0A2Z6URF9_GLASK Tryptophan halogenase OS =Glaciecola sp. (strain KUL10) OX=2161813 GN=KUL10_1858 0 PE=4 SV=1
MNNISNILIVGGGTAGWMAACLMAHRWQNKSLTITLIESANIGTVGVGEGSTPFLRDFFDQLGIAETTWMAACDATYKCGIEFPGWCSHTGPSSYFHPFYGEADTHCVGEFFASCQQRREGFDTPTHPNDYFVNSYLAEQGKGPYKQAGLASNIEYGYHFDAAKLGLFLAEHARSLGVIHLQDEVEKVNASNEKIASIATKSYGLLKADFYVDATGLKGLLIQQTLGEKLISYQDYLPNNSAVAISTDYSTDETSDKRFQDMKTQTLSEALEHGWMWSIPLQTRCGNGYVYSDRFITKTDAEQRLRRRLGNNDKPALHLSWTPGRIEQHWKNNCLAVGLSQGFLEPLEAPMLNLIQQTCESFVEHFESQDQSNAAKQFNQTINSLIDGTRDYLQAHYLLNTRDDSEYWIKARENQHISAVLSDIIFAWDNPGSFEQALIKNANHLAYAKTSWYCIFAGKGRFTDAHKHSLRLTEKKHKKAVDICQKTSQDFMYQTDLLNTVSTRRAL

SEQ ID NO: 90480 - protein, 498 aa, Glaciecola sp.
  misc_feature (1)..(498): tr|A0A2Z6UHB3|A0A2Z6UHB3_GLASK Tryptophan halogenase OS =Glaciecola sp. (strain KUL10) OX=2161813 GN=KUL10_1981 0 PE=4 SV=1
MQTQVKKVAVLGGGTSGWISAALLKKVLGTTVDVELVESEQIGTVGVGEATIPPIQKVNQVLGINEAEFLRETKATIKLAIKFENWRVNGESYFHTFGAPGRSMAFCHFHHFWKRAKTLGLKESLWEYDLNYLCCKENKFAQINAKDPVLDLSYAYHFDAGLYARYLRKLSEQMGVVRTEGRVEKILQDEQSGNITRLKLENGKEVQADLFIDCSGFRGLLIQQTLNAGFEDWSHWLPCDSAVAIASERHEQTAPFTRSIAREAGWQWRIPLQHRNGNGLVYSSAHLNKEQAEDFLLKHLDAKALSEPNHIRFKTGRRRKQWHKNVVAVGLSSGFLEPLESTSIHLIQSAVTRLIQLFPHDGMSQSNINEYNAQSKLEYEQIRDFIILHYTLNERTDAPFWRDVREMEIPSLLQHKMDLFRESGKIVREFNDLFHESSWLQVMLGQGIEPQDYHPLANSMSEADLFEFLRRLKEIKNEPLPKLPSHDLFLEKFAGFAG

SEQ ID NO: 90481 - protein, 515 aa, Flavimaricola marinus
  misc_feature (1)..(515): tr|A0A238LKR9|A0A238LKR9_9RHOB Flavin-dependent tryptop han halogenase RebH OS=Flavimaricola marinus OX=1819565 GN=rebH_2 PE=4 SV=1
MTKSDPTHLVIVGGGTAGWLAAHLFKTESERQGIPMRITLVESSKVPTIGVGEGTTSVFGGVLQSLGFDEEDFLAHTDATIKYGIRHRDWRRLGHVYDGPIDDAYALTDRIPGAGSWIDTFCVAAGRSVSAPHIFAKLMETGKAPVAEMGGRRVPVSRFHHAYHFDQAKVGAYLRRKATDISKIDALVESAERDGKSGCVTKLRLDTGETIAGDFFIDCTGFRRTLIQGTMGASWVSYSDALPVNRAMPFWLDLAEDEEIPTFTHAWAQASGWMWQIPTQGRIGCGYVYSDRHSSPDIALAEIEGVLGRKIEPRADIPVDAGRISEVWRGNVLALGLASSFLEPLEATSIHGTIVAILLFCRRHLLQISAPLQKNQQRYNAAIAKQVDDFRDFINLHYVSERDDSPFWRDVETDFILPQVRQKLINWQERMPGPEDFTNDLDGLPHVEELLHYPVLDGLGLLNRSVARERMAQDRKLRDFARATVDHLEKQAGNVASHAISHRAWLSSLSSNPIA

SEQ ID NO: 90482 - protein, 487 aa, Glaciecola sp.
  misc_feature (1)..(487): tr|A0A2Z6UB41|A0A2Z6UB41_GLASK Tryptophan halogenase OS =Glaciecola sp. (strain KUL10) OX=2161813 GN=KUL10_2700 0 PE=4 SV=1
MKKIVILGGGTAGWMAANILNKALAAEGFEIHLIESEQIGIIGVGEGSTPQLKQFFAYLDIDESQWMPACNATYKNGISFNDWTNSEGHNHYFHPFPSPFDQQTLGAFLYYCKLRHQGMDIDCLPNQFFLTAKLAEYAYTPITKEGIAPIKLNYAYHFDSVLLGQFLAKIAKEKGVKHTIATLKSSELDEPIGIKSISLDNGDIVEADLFVDASGFNSELLQKALGVKFHSYSDNLFNDSAIAFPSEITEKYNTQTEASALSAGWAWKIPLTNRYGNGYVFSSRYTDFEQAESELKAHLGIASELEVNARRLKMKVGQVEKHWHKNVLAIGLSQGFIEPLEATALHLVQESLMQFIKHFNKGKFIDENKTAFNQTINERFEGIRDYIVCHYKVNTRTDSQYWQDNRDNPCISENLQAVLEAWDNSEDIASVLQSRNMTQYYPVVSWYCLLAGYQRFPEATAPNKMPASQIEGLRKMLAARTELFIPV

SEQ ID NO: 90483 - protein, 495 aa, Glaciecola sp.
  misc_feature (1)..(495): tr|A0A2Z6U6E1|A0A2Z6U6E1_GLASK Tryptophan halogenase OS =Glaciecola sp. (strain KUL10) OX=2161813 GN=KUL10_1855 0 PE=4 SV=1
MSVHTPKSIVIVGGGTAGWMAANLIIHAWPTTQVTLVESADVGIIGVGEGATPYLKTFFARLGINEEEWMPACDATYKVGINFENWSGRQGFKDYFHPFFCALDKPTADMFFHNCQVKRHGGQSHTNPGDFFISGELARQKINPALSAKALSEGIQEIDYAYHFDSAKLGHFLKLKACQKGLTHIIDNVTDVISHLSGDIEKVVTENHGDLGAELFIDCTGFRARLIHQTLKRNYVSYADSLLNNAAVAIQTPNDSNLKLEVQTRSIALSNGWMWKIPLTSRQGNGYVYSDHHISPNDAEQELRQQLNIDENADVRVKHLSMRIGRLGEHWHKNCLAVGLSQGFIEPLEATALMLTQLTVDQFIQQFDNAAQPLDNKRNTFNKQLNTTFDGVRDYIAAHYQLSKRDDTQYWRDNQFNKATPAIFAELKQAWLSRQDFEQSLSKHAQGLVYLRPSWYCIFAGMGAFPENLKPVNNIAPVEQALNYAQKIAQSYFKN

SEQ ID NO: 90484 - protein, 561 aa, Ruegeria denitrificans
  misc_feature (1)..(561): tr|A0A0P1IH62|A0A0P1IH62_9RHOB Flavin-dependent tryptop han halogenase RebH OS=Ruegeria denitrificans OX=171569 2 GN=rebH PE=4 SV=1
MNNRLSQITIVGGGTAGWMTALILDMVFSRTSASKDRPRICLIESPNIATVGVGEATVPRMPVTLRQAGISERDFFRETNASFKLGVKFCNWNKDRKGNRIDYVNPFAHGQMVQGLEAAEFFLRFGNGDRDFTQSISPHDHLGRLCKGARQLGQPEFEQRFGYAYHLDAVKFAGMLTKVCTKRGVEHIRDEVQSVELDEQGNVSHLMLERKGRHDIEMVIDCTGFRGLIINQALGEPFLDYSDYLPNDRAMALQIEHPKPEKIESLTRSTALGAGWTWRVPLYNRVGTGYVFSSAHRTDDQAADEYLKWLGDSGKGATPRVIPMRVGRVRNAWVKNCVAIGLSGGFIEPLESTAIHMVDHAVRWFAEHLPTKDVEPSLRDRYNRQMDKLYNEVLEFICLHYRLGNRKDDQYWIDARTEMKVPDRLAENLELWQHRLPMDHDVEFATLFDHRVYQTVLLGKQSYDTGYGTGIRDRIRPLKKQIWLQGMQRAKADLAQIIKSMPDHKTLLREIRGELERPAFGKTAGMKPTVPMPGTTPAPVTIQNMPNFAEIQSGAKDLQLF

SEQ ID NO: 90485 - protein, 528 aa, Alteromonas sp.
  misc_feature (1)..(528): tr|A0A3S5B6C0|A0A3S5B6C0_9ALTE Tryptophan halogenase OS =Alteromonas sp. 76-1 OX=2358187 GN=ALT761_02145 PE=4 S V=1
MAVANKTPASQQATDQQTTVHHEAKQAPVKRVVVAGGGTAGWLTAALLKKVIGDAVNITLVESEAIGTVGVGEATIPPIRLVNQVLGIDEATFLRDTKATIKLAIRFENWKQQGQQYYHTFGAPGKSMAFCHFHHFWLKARQQGLKHDLWEYDLNYLAAEAGKFARINAKDPVLELPFAYHFDASLYAKYLRKLSEGLRVKRVEGKISYVSRHKHSGNVKALHLENGHAIEGDLFIDCTGFRGLLINETLGAGYDDWSHLLPCDSAIAVPSERHENTAPFTRSIAHSAGWQWRIPLQHRNGNGHVYSSRYISDSQAHDTLMANLDTKPLGDPKLIKFTTGRRRQQWCKNVVAVGLSSGFLEPLESTSIHLIQSAIVRLIKLFPHQGISDSAVEEYNAQSKVEFEQIRDFLVLHYCLNEREDSDFWRDMRHLTLPDSLTHKMALFKQNGNLVREQNDLFLESSWLQVMYGQGLVPDDYHGLANSFSDEKTQAMLSSLYNIKREPIASLPTHDAYIQSMIDSANKTSVSF

SEQ ID NO: 90486 - protein, 499 aa, Pseudoalteromonas sp.
  misc_feature (1)..(499): tr|A0A4Z0SLE8|A0A4Z0SLE8_9GAMM Tryptophan halogenase OS =Pseudoalteromonas sp. KS88 OX=2109918 GN=C7Y70_10775 P E=4 SV=1
MKNKQIKEVVIAGGGTAGWITAALLNKVLGKVVNITLVESDQIGTVGVGEASIPPILHLNAALGIRENEFIKATQATIKLGIEFENWRSQKHSYMHAFGDIGKDFPFCEFYHFWLRAKQQGTASDFWDFSLNYQAAKQHKFTHLQHIPNTQLTGLNYAYHFDATLYGEYLKSLSISRGVNRIEGKIAQVEQCQNTGFITALALEDGQTVTGDLFIDCTGLSALLIEQTLNTGFEDWSHWLPCDSAIAVQTKSAAEPVPYTRSIAHDAGWQWQIPLQHRVGNGLVFSSRHITDEQAKQQLLENLPGEPITEPRVIRFKTGRRRKQWHKNVVSVGLSSGFLEPLESTSIHLIQTAAIRLIKLFPHNGIDDSLVETFNQQSQTEIERIRDFIILHYKLTERTDSAFWRQCKQMSIPDSLQKKIDLFKATGKIIREDDELFAQIAWQQVMIGQGLEANDYSALASALNDDQLSELFSSLKTLINGTVEQLPSHSDFLLRMKNN

SEQ ID NO: 90487 - protein, 514 aa, Sphingobium sp.; identical to SEQ ID NO: 82987
  misc_feature (1)..(514): tr|A0A197C218|A0A197C218_9SPHN Tryptophan halogenase OS =Sphingobium sp. 20006FA OX=2056888 GN=A8O16_04020 PE=4 SV=1

SEQ ID NO: 90488 - protein, 529 aa, Glaciecola sp.
  misc_feature (1)..(529): tr|A0A2Z6UCD0|A0A2Z6UCD0_GLASK Tryptophan halogenase OS =Glaciecola sp. (strain KUL10) OX=2161813 GN=KUL10_1147 0 PE=4 SV=1
MTSPNIELSTHSENENQAIRTIIVNSLNNPDLSNDSVKPCHQQLDDLICGLFTAISLKVNLAACDMSITHVCPEVESFKQIISVISLNIHQLAFLRSLGIDEKRLMNTCDAQHTLGTRYLNWSSDQQDFVLVEGEYGVPFDKVKFHHFIERLDKFSYDEFAIAAQMARQGRFVHPNNDPSSLLSSFTYGLNVDAYSFAKLLSQCAAAFKIEAITADSLEATMSDNGLASINASCHSGKQRSLSADFFIDCASKSSAIYQCFLPDKMKLESSPIKQQNKLRLCAVTQSSNRLLNILQPHAFGWSKTINTASKTMIECQFDDTVTLEQVLSDLAQKGIECQECDEHAVERVEQIMLKQPWQQNCLFIGRKICDIDTLTHDLLDILDEQLRLLFQVFPSRKAQQNLVNFYNRNIHEQCLSLLDMVICHYQLNQTQTSQCWLDNRQTKGSENLSHLTALFEQTGIFPEFENQFIAERKWINFLIGFGVIPQSTHPLSLNISDAEQKVMSFQHHLKALLVQLPTYEAYVATARN

SEQ ID NO: 90489 - protein, 507 aa, Alteromonas sp.
  misc_feature (1)..(507): tr|A0A448Y4R2|A0A448Y4R2_9ALTE Tryptophan halogenase OS =Alteromonas sp. 76-1 OX=2358187 GN=ALT761_04074 PE=4 S V=1
MMSSVSGNLNAMGTGAKNSPVKRVVIAGGGTAGWMAAAALSKLLGKSLSITLVESKDIGIVGVGEATIPPIRTFHKLLGIDEKAFMRATNATFKLGIEFENWREQDHSYIHSFGVTGRECWAGEFHHFWLRAKALGFGGDFGDYCTELKAAQEGKFAYGERMPMNFAYHFDAVAYGRFLKGLAVEAGVTHIEGDIYHVSKCSHTGCISSIRLSDGQEVAGDLFIDCTGFKGLLIEKTLHTGYENWSHWLPCDSALAVQTESTGAPIPYTKSVAHDAGWRWKIPLQNRVGNGLVYCSNYMSDDEAKDTLLSAIEGETLNEPRIIRFTPGKRRLGWNKNCVALGLASGFIEPLESTSIHLIMTGIVRLMRLFPFDGITQSTVNEYNNKYNSEMAAILDFIVMHYKVTNREDSPFWEHCKSMDIPPSLTHKINLFKQTGRVFLDDGDIFRVDSWTQVMMGQGVVPEQYHRVADEMSETELERFLAGLKQQVDNQVSALPSHEQFLKQYLG

SEQ ID NO: 90490 - protein, 533 aa, Streptomyces sp.; identical to SEQ ID NO: 83428
  misc_feature (1)..(533): tr|A0A2N3TWY0|A0A2N3TWY0_9ACTN Tryptophan halogenase OS =Streptomyces sp. 73 OX=2035222 GN=CLW15_6080 PE=4 SV=1

SEQ ID NO: 90491 - protein, 506 aa, Sphingomonas sp.; identical to SEQ ID NO: 87184
  misc_feature (1)..(506): tr|A0A0Q4M5R6|A0A0Q4M5R6_9SPHN Tryptophan halogenase OS =Sphingomonas sp. Leaf42 OX=1736219 GN=ASE97_03575 PE=4 SV=1

SEQ ID NO: 90492 - protein, 496 aa, Glaciecola sp.
  misc_feature (1)..(496): tr|A0A2Z6U2I0|A0A2Z6U2I0_GLASK Tryptophan halogenase OS =Glaciecola sp. (strain KUL10) OX=2161813 GN=KUL10_0520 0 PE=4 SV=1
MQNAINKVVIAGGGTAGWMTAALMKKILGQQVQIELVESEDIGIVGVGEATIPPIQTFNQVLGIDEKEFLRETNGTIKLAIKFENWRVDGESYFHTFGAPGANMGFCNFQHYWLRAIREGHRASLWDYDLNYLCCLEESFNKVNSQNPMFDMPYAYHFDSALYGRYLRKLAEQSGVVRTEGIIEHIQQDSENGYITGLQLKNGAQVQGDLFVDCTGIRALLLQKTLDIEYVDWSKWLPADSALAVQTERFEKTLPYTRSIAHKVGWQWRIPLTHRNGNGIVYSSRYTNDENAERILLSNLESEPVNDVKKVSFKTGRTVKQWDKNVIAVGLSSGFLEPLESTSIHLIQSAVVRLLKLFPQNGITQSVIDLYNQESEVEYETIRDFIVLHYHVNQRNDSDFWIDMRNMDIPDRLRNKIEVFSSVGNMFNDQHDIFRDASWLQVMLGQGIQPKDYHPAANVPTSEQLRETLNRVFEAKRQPLSKMLPHDEFLKRYLSS

SEQ ID NO: 90493 - protein, 504 aa, Sphingomonas sp.; identical to SEQ ID NO: 85828
  misc_feature (1)..(504): tr|A0A0Q4L7G2|A0A0Q4L7G2_9SPHN Tryptophan halogenase OS =Sphingomonas sp. Leaf42 OX=1736219 GN=ASE97_15360 PE=4 SV=1

SEQ ID NO: 90494 - protein, 501 aa, Glaciecola sp.
  misc_feature (1)..(501): tr|A0A2Z6UGU9|A0A2Z6UGU9_GLASK Tryptophan halogenase OS =Glaciecola sp. (strain KUL10) OX=2161813 GN=KUL10_1660 0 PE=4 SV=1
MNKKTKVVIAGGGTSGWLSAYSLIARLGAVLDITLIESDHIGTVGVGEATIPTMRNYHQLIGIDEQEFMRATQATFKLGIEFENWGQQQQSYMHSFGEIGQRSWMVEFHEFWMEAKANGFGGSLDDYCLELKAAKANKFATKLGNRSINYAYHLNATAYAQYLRGKSEALGVKRVEGKITHISNHANGNISCLYLDNGLQIDGDFFIDCTGFKSLLLGESLGVVFEDWGHYLAADSAFAVQTESVEDPKPFTVATAHSAGWQWRIPLQHRTGNGLVFSNQFLGDQAALDLLTQNLKGKMISEPRKLKFRTGRRQKAWYKNCVAIGLANGFIEPLESTSIHLVTTALVRLMKLFPISESTSFQAERFNQETNKELESIRDFIILHYHLTEREDSEFWRHYKNMQIPETLNHRMQIFKENAYAWPDEVGLFRVDSWVQVMMGQGIFPKQHHLGAKVIETKGLHQQLSSYKQMVEKAVAQLPTHVDFLKQYCDSHLQQMEKEQA

SEQ ID NO: 90495 - protein, 508 aa, Sphingomonas sp.; identical to SEQ ID NO: 87196
  misc_feature (1)..(508): tr|A0A0Q4M0J0|A0A0Q4M0J0_9SPHN Tryptophan halogenase OS =Sphingomonas sp. Leaf42 OX=1736219 GN=ASE97_01160 PE=4 SV=1

SEQ ID NO: 90496 - protein, 489 aa, Sphingomonas sp.; identical to SEQ ID NO: 85786
  misc_feature (1)..(489): tr|A0A0Q4L7L0|A0A0Q4L7L0_9SPHN Tryptophan halogenase OS =Sphingomonas sp. Leaf42 OX=1736219 GN=ASE97_15370 PE=4 SV=1

SEQ ID NO: 90497 - protein, 275 aa, Streptomyces sp.
  misc_feature (1)..(275): tr|A0A2N3TH76|A0A2N3TH76_9ACTN Tryptophan halogenase OS =Streptomyces sp. 73 OX=2035222 GN=CLW15_0748 PE=4 SV=1
MRATLDIDPYVKVNPTLPTSGPWHGFQVDRQRLDALLLDRARQAGAEVRLGCRALEPVVAGGAVTGVRFSGGAWPPLRTRTVIDATERACWLSRALDLTAPPCSPRLLIWYGYASGACAQRDAAPAIVADDTGWTWTARVGPARYQWMRLDFVPRRGRKYGPPREFAGLESEAPARAADVSWRLCPEPAGPGWFVTGDAGVLLDPASSHGVLRAPLSGWTAGSLTAAAAARALDPGRAAGIYRQWLHEGAERDMIHLSARYATLGARGFGRAEGA

SEQ ID NO: 90498 - protein, 505 aa, Novosphingobium sp.
  misc_feature (1)..(505): tr|A0A258V9L4|A0A258V9L4_9SPHN Tryptophan halogenase OS =Novosphingobium sp. 28-62-57 OX=1970409 GN=B7Y36_03700 PE=4 SV=1
MTELRSILIIGGGTAGWLTACYLARYLDIARRRDVTITLVESPAIGTIGVGEGGFPTMRTTLQFLGIDEHTFIRKTAATFKQGIRFDHWLSAPREGRTSNFFHPFEAPLYAQDESLVARWLAQDPAKRPPFAEAVTIQQRVAAGARGPKAPGDGDYDAPLSYAYHFDAERLAAVLAARGIELGVERIDDRLLAAEAGPEGIAHLRFERTGTREADLYIDCTGLHAELIGGALAEPFVSVRRYLFTDRALACRVPYDQPSAELPSHTVAAAHEAGWLWDIALRDRRGVGCVYSSDHLDDARAHAILAAHPGVGAAGADDARLICYDPGYRARHWVGNCVAVGLAAGFVEPLEATGIVMIEAAAAMIAEFWTPNGPSDASAARFNALMIARYENLLNFLKLHYCLSRRDEPFWRTNTDLQSIPPALQELLERWRWRAPSRFDFALDSETFAFFSYQYILYGMGFKTRLPGPQAAKMTDPFAKVRAYGEQALRDLPLHRDLIDRINAT

SEQ ID NO: 90499 - protein, 494 aa, Pseudoalteromonas sp.
  misc_feature (1)..(494): tr|A0A4P9J0M8|A0A4P9J0M8_9GAMM Tryptophan 7-halogenase OS=Pseudoalteromonas sp. 16-SW-7 OX=2583375 GN=FFU37_07 935 PE=4 SV=1
MNQNAIKKIVIAGGGTAGWMCSAAMAKLLGKNIEVCLVESDLIPTVGVGESTIPTLHIFHDLLKISESEFMAATNATFKLGISFEGWKQNQQSYFHSFGYVGQGCWAAGFQHFWLKGMQQGVAADIGDYCTEHVASRLGKFAVVPNQDRNHAYQLDAGLYAKFLRNFAQQNGAKRIEGMISKVNLEPTNGFIKSLTLGDGQIIEGDLFIDCTGFKGLLIEQALHTGYEDWSHWLPCDSAVAVQTELVSPIVPYTRAMAHKCGWQWQIPLQSRRGNGLVFCSKYMSDDEAKTALLNNVEGKPINEPRVIKYRTGTRRKHWNKNCVAIGLASGFIEPLESTSIHLIQQSIIRLMQNMPTKAIESCYQDDFNDKMRFEAENIRDFIVLHYYVTQRTDSDFWRYCKNMPIPESLAKRIELFKQSGHVYKAEQELFGEASWLQVMLGQGLMPQNYHPIVDSMSDDELKRFLESIKNHVAKKADSLPSHIDFINHYCKAK

SEQ ID NO: 90500 - protein, 515 aa, Ferrimonas balearica
  misc_feature (1)..(515): tr|E1ST93|E1ST93_FERBD Tryptophan halogenase OS=Ferrimo nas balearica (strain DSM 9799 / CCM 4581 / PAT) OX=550 540 GN=Fbal_2925 PE=4 SV=1
MAQQGIRRLIVVGGGTAGWLAASHLARKFRVNQHPTISVTLVESPNIPTIGVGEGTVPTMRQTLHWLGIRETDFIRQCDVTFKQSIKFIDWLRPPAGGQSHAYHHLFDYPAIQGLDPTPYWCQDPGGTPYADAVSVQAHLCEQGLGPKTLMHPEFGGATAYAYHLDAAKFSALLTDHAVNQLGVHHVLAEVTEVVADGNGGIAAIVTDRAGTLEGDLFVDCTGFSALLAEQTLKVPFIDKSDVLFVDSALAIQVPYERADAPIPCHTLSTATHSGWIWDIGLTERRGVGHVYSSRHCSDEEAERVLRAYLGPVAEGLSCRKIAMKVGYRERAWQGNCVAIGLSGGFVEPLEATGLLVFDLTARMLAEMLPGQREAMPAVAERFNQRVRHSWDRVIDFIKLHYVLSQREDSAFWRDNRAPESIPQSLKDNLAYWQQQQPSGYDFASNLSIFNLENYLYVLYGMEFDTEVCAERLDQGEAARQKMAQLAQQAERLASQLLPHRQLLERIRQHGLQKV

SEQ ID NO: 90501 - protein, 414 aa, Paraburkholderia phytofirmans
  misc_feature (1)..(414): tr|B2T674|B2T674_PARPJ Tryptophan halogenase OS=Parabur kholderia phytofirmans (strain DSM 17436 / LMG 22146 / PsJN) OX=398527 GN=Bphyt_3046 PE=4 SV=1
MSTHSSKRTTVDVVIIGAGPAGAVAAALLRKAGRSVLVLERQHFPRFSIGESLLPQSMAYLEEAGMLRAVVEAGFQYKNGAHFVYRDQSSAFDFRDKHSPGWGTTYQVERAVFDDILIRCAAEQGADVRFGHTVRAVHTGATPLVDVIDEADHAYQIEARFVFDASGFGRVLPRLLNLEAPTRMPTRAAIFTHVQDGIPAGMTDRNKICVATHPEHRDVWFWMIPLAGGRSSVGCVAEASFLDVPDAERDAKLRALIQQEPTLNRLIGNAPFLMPVRHIGGYAANVERLHGPGYALLGNAGEFLDPVFSSGVTIALRSAHLAVQTLNRHLDGEQVDWSAAYDVPLRKGIDTFRAFVERWYSGALQDIIFYPEQTPSIRRMISAVLAGYAWDETNPYVADPVRRLNALHEVCMQR

SEQ ID NO: 90502 - protein, 507 aa, Massilia lutea
  misc_feature (1)..(507): tr|A0A4V0Z3L1|A0A4V0Z3L1_9BURK Tryptophan 7-halogenase OS=Massilia lutea OX=321985 GN=EWM63_13210 PE=4 SV=1
MSSLINHVVVVGGGSAGWLTAGVLAADHPALRVTLVESPDVAPIGVGEGTWPSMRDTLHRIGVSESAFFRECDAAFKQGSRFNGWRHGGGADDYYFHPFVLPQGFGEADLVASWQRDFPDVPFADLASFQPHLCTNGRAPKQPATPEFAAVANYGYHLDAGKFGVFLRKHCLEKLGVRYVPDHVMAINSHGNGDIASLQTKEHGALDGDLFIDCTGMQSLLLGRHYGVPLLHRKDVLFNDCALAVQVPYEREDSPIASQTTSTAQRAGWIWDIGLPTRRGIGHVYSSAHTSDEQAEADLRAYVGTDMPAPRKLTFQPGYREQFWHRNVVAIGLSAGFIEPLEASALALVEMSAAMVSDDLPATRDAMDIVARRFNDAFTYRWERVIEFLKLHYVLSGRNDSSYWHDNRRAETIPARLQELLVLWRHRPPSRLDFNRIEEVFPSASWQYVLYGMGFRPDRERITRRGSTGNADGYFREAAELTRKMLRALPSNRELIDHIRLHGLQKI

SEQ ID NO: 90503 - protein, 523 aa, Burkholderia metallica
  misc_feature (1)..(523): tr|A0A1B4HZ21|A0A1B4HZ21_9BURK Tryptophan halogenase OS =Burkholderia metallica OX=488729 GN=WJ16_17180 PE=4 SV =1
MRNLMKSILIVGGGSAGWMTAAYLSKAYGHQVKISLIESPTIPKIGVGEATIPNLQKVFFDFLGLKEQDWMPHCNASFKSAIKFIGWNTKSDPADYFYHMFGQLKEVNGIPLSHYWAHLKNTGQTSEPFAYACYNKSTLLDAKLSPKDRDGNSRMSHAWHFDAHLVANYLRDLSVSWGVEHIQGEVVETRLNEDGGIRSVRLQSGAEIAADFFVDCSGFKGLLINQALKEPFIDMSRYLLCDSAVAASITHDDEANGVEPYTSAIAMSNGWTWKIPLLGRFGSGYVYSSSFSSKDTATEDFLKLWGVREDQVKLNHIKFRTGRNRRAWVKNCVSIGLASCFLEPLESTGLYFIYAAIYQFAQHFPDATLDPRLADAFNKKIEVMFDDCRDFIQTHYFTTQRNDSDFWRANKHDLTISDSLREKLDAYHAGLVVCPPVTVDERNYYGNFDLEFANFWTNSNYYCMFTGLNWMPQKSHPKLVYHDAWMKQALAEFQNLKREEAALSATLPTNYDYLRNIRGTRSS

SEQ ID NO: 90504 - protein, 496 aa, Shewanella xiamenensis
  misc_feature (1)..(496): tr|A0A1E3V1J0|A0A1E3V1J0_9GAMM Tryptophan halogenase OS =Shewanella xiamenensis OX=332186 GN=ABT47_20245 PE=4 S V=1
MSQIKDIVIVGGGTSGWMTAALLAKLFKHTLNITLVESEDIGTIGVGEATIPPLQLFNSVLGIPENEFIQATHATFKLGIQFEHWGKQGDSYMHAFGSIGKDIGYTQFHQYWLSTQPEMMASFWDYSLNYQAALNNKFQSIEQIPHSPLSGLTHAYHFDAARYAWLLRQYSEKSGVKRIEGKIESVNCAANGHITNLTLVSGNSVQGDFFIDCSGFAALLIGKTLNVGYESYQDWLLCDSAYAVPSEKACEIKPYTRAIAHEAGWQWRIPLQHRTGNGIVYSSRYMKDEEAKAKLLSTLEGKPLAEPKKISFIPGRRLKQWQHNCVAIGLSSGFLEPLESTSIHLVQSAIIRLTKLFPHQGVVQATVDEFNRQSQLEFEQIRDFIILHYCLNQRSDSDTDTLWSACQQMQIPESLQQKISLFSETGAIFRHKDELFTEAAWVQVMLGQGIIPTDYNPLANTVAPEALTEFLSNIKVIIKNTVSNMPTHEQYLAQLV

SEQ ID NO: 90505 - protein, 515 aa, Sphingomonas melonis
  misc_feature (1)..(515): tr|A0A154NBM6|A0A154NBM6_9SPHN Tryptophan halogenase OS =Sphingomonas melonis TY OX=621456 GN=AVM11_02210 PE=4 SV=1
MTLPVPDHAIRSIVIVGGGTAGWMAAAAFSRLLNTGYTRVTLIESEEIGTVGVGEATIPPLLNFNRMLGIDENEFLAATAGTFKLGIEFRDWGAIGDRYIHPFGTFGQDLQGISFHQLWLRERSRRAIPDITAWSMSAQAAARGRFGRAREDARSPVRELFYAYHFDASLYARYLRGYAERGGVTRIEGRIADVRLRGEDGYVEALTLVDGRQVAGDLFIDCSGFRGLLIEEALHTGYESYAQWLPCDRAVAVPCALPSAREPDPYTRATARAAGWQWRIPLQHRMGNGYVYCSEFLSDEAAEFDLLASLEGEPLGDPRRLRFTAGRRRQSWNRNVIALGLSSGFIEPLESTSIHLVQAGIQRIVAMFPDTRFDPAERDEFNRQLHDLYEDIRDFIILHYAQTRRTDTPFWDRVRTMPLPDSLTRKLELWRGKGRLFREGYDLFSVPSWVAVCLGQGLVPSTWEPAADALDETLVAEAMETMRRGYADTAERLPTHGDFLRMVAPSPLANWGQTR

SEQ ID NO: 90506 - protein, 667 aa, Paraglaciecola arctica
  misc_feature (1)..(667): tr|K6YVW2|K6YVW2_9ALTE Tryptophan halogenase, putative OS=Paraglaciecola arctica BSs20135 OX=493475 GN=GARC_53 57 PE=4 SV=1
MLKSIVIVGGGSAGWITAGLLAAEHATKDNQRITITLVESKNIGTIGVGEGTWPTMVGTLKKIGIAETDFLQCCNASFKQASKFKQWVSGEESDQYYHPFSMPQDFDKVNLAPYWLAQKERIPFAQAVSLQATLCDKKLAPKQVESPDYATVENHGYHLDAVKFAALLTQHCTTKLNVKHIVDDVIAVQATDNNDISAVVTKNHGAIAGDLFIDCSGLAALLIDKHYKVPFISKKDILFIDKALAVQVPYSSENAPIESATVSTAQTAGWIWDIGLPTRRGVGHVYSSKYISKDEACAQLKNYLSNDVADVEKLTFRELNISPGYREKFWVNNCVAVGMSAGFIEPLEASALVMVELAALMISKHLPASRKAMDVVAKNYNEIFVFRWERIIDFLKLHYVLSKRTDSQFWIDNKKPETIPDTLKDLLTLWQEQAPGNNGYLSPYDLFPAASYQYILYGMGFTSQPNLIDSSSEAFALAKKSLEKVQDRKNNIPKLLPSNRDLLNEIAKIKPKQVIQQNWVKVDLLTSNELAKNFPLFLKKIDTQYVCIALLGFEQAENLYALQDDAQLLEQSNILQTSHQHSAHQQSYIEQLVQHDLIEPVQLDITFNNNQSVVVSELFTINQPHLKKITASEINETLSERALSLASNLIESLNNIPMLIAMKNKLI

SEQ ID NO: 90507 - protein, 534 aa, Sphingomonas sp.
  misc_feature (1)..(534): tr|A0A430DU86|A0A430DU86_9SPHN Tryptophan 7-halogenase OS=Sphingomonas sp. ABOLF OX=1985879 GN=CA235_02390 PE= 4 SV=1
MNEHTIRNVVIVGGGTAGWMAAAAFSRFLNNGATRITLVESEEIGTVGVGEATIPPLLTFNRMLGINENDFIRETGGTYKLGIEFDGWGDVGERYFHPFGAHGHDLGGIHFHQLYLRERKRRVMQDISAWSMSAVAAQAGKFARPAEGAQSAVKELLYAFHFDASLYARFLRRYAEAGGVQRIEGKIVEVALRPEDGHVAAVKLENGQAVEGDLFIDCSGFRGLLIEEALETGYEDWSQWLPCNRAVAVPSSYSGDPDPFTRATARGAGWQWRIPLQQRMGNGLVYCSDFMTAEAAERELLANLEGEPLAEPRHLSFVTGRRKLGWNRNVVALGLSSGFVEPLESTSIHLVQAGITRLIALFPDRRFNPVERDEYNRQMRDLYEDVRDFVILHYKATRRRDTPFWDRCRTMDVPETLQRKIDLFRAKGRVFRDGAELFATTSWVAVCLGQHIVPEEHEPAADALDEDKVAAALEEMRQGYLRVAAQLPTHAEFLRHIGAALANTPAPPQPAEVPGEPNFSFASETPFNFSANPL

SEQ ID NO: 90508 - protein, 499 aa, Sphingopyxis bauzanensis
  misc_feature (1)..(499): tr|A0A246JVS1|A0A246JVS1_9SPHN Tryptophan halogenase OS =Sphingopyxis bauzanensis OX=651663 GN=CDQ92_08860 PE=4 SV=1
MSDKKPVQRIVIAGGGTAGWMMASAIARTMGQTVDLTLVESEQIGTIGVGESTIPPLVNFNRILGIPEPEFMRATQATFKLGILFDNWKHDGDSYFHSFGLSGKDHWSAGFQHFWLNARERGHEQPYADYCLELVAAMQGKFAHLPEERMNYAYHVDATLYGRYLRKLAEADGCKRVEGKIARVELNDENGDIAALHLDGDRRIEGDMFVDCTGFRGLLIDGALHAGFEDWSHWLPNDSAIAVQAKHVGLPQPYTQAIAHDAGWQWRIPLQHRMGAGIVYTSGYLSRDEAYDRLMRSVGEPLIEPFDIKFKGGVRRRQWYRNCVAVGLSGGFVEPLEATTVHLIQRAVLRFIRLMPNGRVSERDAQEFNDQQRLDIEQIRDFVVLHYKATNRRDSPFWRHVANMPVPDSLQQKIELFRETGRVFRKYEELFAENSWVQVMMGQGIEPQSYHPIADKLRDDEVERLFQTIRDNIAQTVATLPEHHAYVARYCGAEAPKAA

SEQ ID NO: 90509 - protein, 506 aa, Luteibacter sp.
  misc_feature (1)..(506): tr|A0A1I0Q9D0|A0A1I0Q9D0_9GAMM Tryptophan halogenase OS =Luteibacter sp. 329MFSha OX=1798239 GN=SAMN04515660_32 11 PE=4 SV=1
MSHAITNIVVVGGGTAGWMAASALSRVLNRQATVRLVESDEIGIVGVGEATVPHIKAFNNLLGINEADFVARTQGTFKLGIQFRDWGSLGDSYIHGFGVMGHDIGLTPFHQYWLKGRLAGCATDLIDYSVNTVAAIRGKFMPAPVDVPASNPLGGIAYAYHFDAALYARYLRAYSEARGVRRTEGRIRDVELDPATGHVRAVLLDDGERVEGDLFIDCSGFRGLLIEGALKTGYEEWTRWLPCDRALAVPCERVEAPTPYTRCTAREAGWQWRIPLQHRTGNGYVYSSQYIGDDAATAKLLARLDGKALADPRPLRFVTGMRKKSWNRNVVALGLASGFMEPLESTSIHMIQAGISKLLQLFPSNGVMDPVLADRFNEQTRFECERIRDFLVLHYKATTRDDSPFWNHCRTMEIPDSLQANIDLFRHSGRFFRNGEEMFGAVSWIQVMIGQGIMPTGYNPLVDQMPDDDLPKFLNSVREIVSKNVDLMPTHQQFIDRECRAAAEAV

SEQ ID NO: 90510 - protein, 513 aa, Devosia sp.
  misc_feature (1)..(513): tr|A0A2U0T5S7|A0A2U0T5S7_9RHIZ Tryptophan halogenase OS =Devosia sp. PTEAB7WZ OX=2135613 GN=C7966_10598 PE=4 SV =1
MDEPSHYVIVGGGTAGWIAAFIIQDEARRRGLDFRLSVVESSKIPTVGVGEATTAAFRVLLRHFCIDELEFMRKTDASFKLGIRHEDWRRKGYTYYGPIDDPHQVVQPPAGAPSDYLNVYAVAAGRPVQDMHMFQPLLEQWKAPFARKPDGSLIPLGPFHHAYHFDQALVGKFFASKSKGVEKVDAIVEGIERHPETGDIMALVLADNQRLEGDFFIDATGFRKQLIVKELQAPWVSYAHELPVNRALPFWIDVKEGEELPTYTRAWAQNSGWMWQIPTRTRFGCGYVYSDEFSTPEQAKAEVEAALGHEIEVRGDIRFQIGRLEKAWIGNCLAVGLSSSFLEPLESTSIHGTIVQMMLFAQRYMDRPDRVEQGARDDYNARVGRQVDDFRTFVNTHYVTERDDTPFWREVRANRIHPETKERLARWRERMPRAEHFPNYLGGLPHIETQLHYPVLDGLGLLDQSLARREMEAAPKLRQFARETFESLVREYRGAAQQALGHAEFLQIVQDMG

SEQ ID NO: 90511 - protein, 516 aa, Streptomyces toyocaensis
  misc_feature (1)..(516): tr|A0A081XRD9|A0A081XRD9_STRTO Tryptophan halogenase OS =Streptomyces toyocaensis OX=55952 GN=BU52_16995 PE=4 S V=1
MIGHVVIVGGGTAGWMAATYLKATFQDRLDVTLVESANVATIGVGEATFSTVRHFFDYLGLAEEEWMPSCNATYKLAIRFENWRGRGEYFYHPFERLRTADGFTLADWWLKLGPHDRRLDEACYVLPALCDAKRAPKRLDGTLFHNSLHDGGDRPRRTTMFQQDTQFPYAYHFDAALLAEFLAGHGTRQGVRRVLDDVVDVRRDERGGISEIVTREHGPLAGDLFVDCTGFRGLLINKTLEEPFESYENVLPNDRAVALRVPVDTEPDGLAPYTTASARDAGWIWTIPLFGRIGTGYVYSSQFCTPEEAEAELRSFVGPQAADAEANHIRMRIGRNRRSWVHNCVAIGLSSGFVEPLESTGIFFIQHGIEQLVRHWPDQGHDQVLAQGYNESVARCLDGVREFLVLHYKAAARSDTPYWKAADERELPEGLAERLRLWEARLPSGSSVYPYYHGFESYSYNVMLTGLGRAPQRSHPALDLLDPTAARDQFADVRRQAERLAGELPSQYEYLAQLHG

SEQ ID NO: 90512 - protein, 515 aa, Paraglaciecola arctica
  misc_feature (1)..(515): tr|K6YD38|K6YD38_9ALTE Uncharacterized protein OS=Parag laciecola arctica BSs20135 OX=493475 GN=GARC_4889 PE=4 SV=1
MKTTVVIVGGGTAGWLTAGIIAAKHCSVDNSASPSTQQTEVILVESPDVKNLGVGEGTWPTMRDTLRQIGISERVFLSCCDASFKQGSKFVGWLDEGDEYYYHPFMAPAGYGSVSLAEHWSATPKDIDFESWVSAQGTICEQNLAPKTPQMSEYAFALNYGYHLNAGKFVKMLHTHCVEKLGVQYIQGHVEHVLEDKNGDISEIVLASGQHVAGNLFIDCSGFAAILIGKHYQIPFQSKQHVLFNDTALALQVDHGSEDVPIASCTVATAQKNGWIWDISLQSRRGIGHVFSSDFSDVGQAEDALFNYVKNDPFLAAQDITPRKIKFTPGHRDTFWHKNCVAIGVSAGFVEPLEATALVLIEKSAEWISEQLPRDRSAMTVLANRFNLLTLQRWQEIIDFLKLHYVLTNRTDSEYWRAHQQADSIPESLQDALALWRSQAPGVYETNQRFELFSSASKQYVLYGMGFHTTREQCGLAHQEISMAKRFRNETIHATEKLLSVLPSNRHFLSRLKKV

SEQ ID NO: 90513 - protein, 523 aa, Bradyrhizobium genosp.
  misc_feature (1)..(523): tr|A0A4Q7FDU5|A0A4Q7FDU5_9BRAD Tryptophan halogenase OS =Bradyrhizobium genosp. SA-3 OX=508868 GN=CWO91_23215 P E=4 SV=1
MTSESIVILGGGSAGWMTAAYLKKALRGVDIALIESANVGTIGVGEASFSTMKLFFDYLGLDESEWMPPCNATYKLAIKFTNWTAGGGHFYHPFQRYEVIDGNNLGEWWLHLKPNEAPFDSACFSTPSLCENNRSPRYLNGEVFDHKVKTTFNFASEAPPNTFLSDHRLQYPYGYHFEASLLASFLKNYATALGVRCIKDDVEDVLLSSDGSIDCLRTRRNGAVKGSLYVDCTGFRGLLINQALKEPFVSFQDVLLNDRAIALQVPYQADTSNIQPFTSATALPSGWVWNIPLYNRVGTGYVYCSQFISSEQAESDLRAHLGPRAKDCIANHIKMRIGRCRNSWVKNCVAIGLSSGFVEPLESTGIFFIQFGIEELLRHYSGSTTDPDVVADYNRIIADCIDGVRDFLVLHYRASDRADTPFWKATKEISVPSSVDQRLALWKKRLPNERSINSCYHGFEFYSYSVMLLGLHYRPVNSLLTLRHSNVSAAVAAFQAVRDRTAELVRTLPSHLEYLQHLRRARN

SEQ ID NO: 90514 - protein, 500 aa, Sphingobium sp.
  misc_feature (1)..(500): tr|A0A013WZL1|A0A013WZL1_9SPHN Tryptophan halogenase OS =Sphingobium sp. Ant17 OX=1461752 GN=BF95_05560 PE=4 SV =1
MSTLPPPRRIVVAGGGTAGWMTAAALARTLGPVAQVTLVESEQIGTIGVGESTIPPLVAYNRILGINEADFMRATQATFKLGINFENWRVPGESYFHSFGGTGKDHWSAGFQHFWMHGQAQGHDAPYGDYCLELKAAEAGRFAHLPDDRMNYAYQLDSGLYARFLRRMAEADGAQRIEGRITQVELDSESGDIAALLLDGDRRIEGDLFIDCTGFRALLIEGALHVGYDDWTHWLPCDGAVAIQTSSVRPPVPYTRAIAHEAGWQWRIPLQHRQGNGIVYCSSFLDPDAALEKLLASVEGDKLVQPNPIRFRTGARRRQWHRNCVAVGLSGGFMEPLESTSIHLIQRAVLRILRMLPAGTVSPLDIAEFNDQQMTDMEQIRDFLILHYKATDRRDTPFWRHCAAMAVPDSLAHRMELFRQTGRVFRKNEELFAENSWVQVMMGQGITPQSHHPIASKLRPDELTHLLASLKDQVSRTVANLPDHAAYIARYCSAQEPVAA

SEQ ID NO: 90515 - protein, 536 aa, Sphingopyxis bauzanensis
  misc_feature (1)..(536): tr|A0A246JS34|A0A246JS34_9SPHN Tryptophan halogenase OS =Sphingopyxis bauzanensis OX=651663 GN=CDQ92_13745 PE=4 SV=1
MVATSWPVSPISSDGTSGPAHKSGPLPDKRELNRVGDSRITKVVIVGGGTAGWMAAAALSRTMDNLSIRLVESDEIGTVGVGEATIPAIRLFNALIGIDENEFIRETGGTFKLGIQFHDWGRIGDVYMHAFGQIGRSLGMLQFPQYWLRGRNEGIAGRLGDYSLNETAGRQNRFARLPQIPNTSLDGIAYAFHFDAALYAAYLRKIAEQAGAERTEGKIFGVRRNGETGHVEAVVLEDGTAIDGEIFIDCSGFRALLIEEALGTGFEDWTHWLPCDRAIAVPSENAGPARPYTQAIAHKAGWQWRIPLQHRTGNGHVFCSDFISEDEATATLLANVEGRPLAEPRMLRFRTGMRRKAWNGNVVALGLASGFLEPLESTSIHLIQNGIAKLLAHFPDRDFDAANIDAYNRRVRFDYERIRDFVILHYHANQRTDSPFWIRCREMGIPETLAHKIELFRSQGQIVREGDELFIEIGWFQVLTGQNIMPDGYHPMADQLTHDELASFFADIETIVARTASHLPGHDEFIAQHCAAGVPA

SEQ ID NO: 90516 - protein, 519 aa, Sphingobium sp.
  misc_feature (1)..(519): tr|T0GYM2|T0GYM2_9SPHN Tryptophan halogenase OS=Sphingo bium sp. HDIP04 OX=428994 GN=L286_07470 PE=4 SV=1
MGNFDMIHPVRNIVIVGGGTAGWLTAGVIAARHRSRIGNGFTVTLVESPNTPIIGVGEGTWPTLRTTLSRMGISETDLFRECDAAFKQGARFARWTTGTPDDGYYHPLMLPQNFGQVNLAPHWLAGDGDESFCDSVCSQGRICDDGLAPKTIATAEYDALANYAYHLDAGKFAPFLQRHCTEKLGVRHVQADVEQVLMKEDGDIRAIRTTQAGEIEGDLFVDCTGFKALLIEGAMKVPFRDCNDVLFCDTALAMQVPYDRPDSPMASHTISTAQSAGWIWDIGLPTRRGIGHVYSSNHISDEEAERELRAYIGPPAEGLSARKIPIRSGHRETFWKGNCVAVGLAAGFLEPLEASAIVLIELSAKIIAEQMPACREVMDIVASRFNATTHYRWGRIIDFLKLHYVLTKRTDSDFWRDNVREETIPDRLQELMLLWRYQSPWFLDEFDRVEEVFPAASYQYVLYGMGFRTEVDRPALARDAHLADRARRENAAMTAKLRAGLPRHRDLIDKIVTHGLQPV

SEQ ID NO: 90517 - protein, 518 aa, Sphingomonas sp.
  misc_feature (1)..(518): tr|A0A430DG31|A0A430DG31_9SPHN Tryptophan 7-halogenase OS=Sphingomonas sp. ABOLF OX=1985879 GN=CA235_18110 PE= 4 SV=1
MRKRLLIVGGGTAGWLTAGYLAKRLSTDLPGGVAITLVESPEIGILGVGEGTFPTIRRTLKTIGISEVDLVRKCGASFKQGARFAHWRFTPGAPGPDHYTHPFQLAQADNGLDLLPYWLLGHGGEANWDEVCSPQKKAADAHRAPKLPSHPDYVAPLNYAFHFDAVALAGLLRDKAVENGVTHLTDRVTQVHVGEDGAIAGVDTEANGRLDADLYIDCTGFRAELIDKALGQPYRSCRDVLFCDSALAIQVPYRDEREPIVSYTLATAQEAGWMWDIGLDRRRGIGHVFSSAHTDDTRAEELLRAYVGDVGGDQEVRKIRFEAGYRETNWHKNCVAIGLSSGFFEPLEATGIVFSEVAAGLVANLFPWGGDHETSARQFNANMLQRYERARDFIKLHYCISERRDSEFWRDNVAASSIPDSLHDLLDRWRFRPPTEIDIDANVDIFTEASWQYVLYGMGWKTDLSARAGAYRYVEDARRAFAEVERQAAFAIANLPSNRQLIDYARTRSFGPPQGVAR

SEQ ID NO: 90518 - protein, 518 aa, Aestuariibacter sp.
  misc_feature (1)..(518): tr|A0A2D6XXX9|A0A2D6XXX9_9ALTE Tryptophan halogenase OS =Aestuariibacter sp. OX=1872400 GN=CL531_05855 PE=4 SV= 1
MTSASQPVRKVVIVGGGTAGWLTAGRIAAEHATKAHHPVEVVLVESPNIPTIGVGEGTWPTMRNTLIKLGIRETDFIRECDASFKQGAKFAGWVTGDADDFYYHPLMLPQGFSQGNLGPYWQQHQDTIEQSFSNAVCFQEALCEHNRAPKSIRHAEFGAVANYAYHLDAGKFTAFLTRHCTEKLNVRHVLADVTGVTAHDNGDIRAIQTQQAGEIDGDLFVDCTGFQSLLLGKHYKVPFVPCDDVLFIDRALAVHVPYDSPDAPVATHTISTAQQAGWIWDIGLQSRRGVGHVYASRYQSEQQALDQLAQYVGPQFNDLSVKQIQIQSGHRAHFWHNNCVAVGLSAGFLEPLEASALVLVELSATMLAEQLPVNHATMPIIAKRFNQTFQYRWQRIIDFLKLHYMLTKRTDTAFWRDNCDPATIPDSLQELLDLWRYHPPYDHDFTSNNEVFPAASYQYVMYGMGFESDLSFGQQQVAKAFAQQQLQMNQQARQKVLSALPTHRDLLNKINQYGLQPV

SEQ ID NO: 90519 - protein, 504 aa, Paraglaciecola arctica
  misc_feature (1)..(504): tr|K6XE85|K6XE85_9ALTE Tryptophan halogenase OS=Paragla ciecola arctica BSs20135 OX=493475 GN=GARC_1977 PE=4 SV =1
MKPTQDPIKKIVIVGGGTAGWIAAATLGNIFKQKDVQIELVESDEIGIIGVGEATIPPLLATIRSLGIDEVEFIKATQASFKWGIQFEDWRIKGGSYFHPFGSIGSIIDGHDFYQLWLKSQAEGDTPPLMAHSPEAVLSEQGRFFLPFKAAGTPLAGAQYALHLDSALVGKFLRKFSEKLGVVRSEGKVETVEQNANGEIHSVVLNSGRQIQGDFFIDCSGFRGLLIEQSLNCGYDDWSAYLPCNRAVAVQTENVGATPPYTVSKARDAGWTWRIPLQHRTGNGYVFCDKYCSDQQAIDTLLDSVEGKVIGEPRVIPFVTGIRKKTWHKNCLALGLAQGFLEPLESTAIHLVSKTLAFFVRMFPDRQTNQVQIDEFNRRVRADYQEIRDFLVLHYCTTERDDSEFWRYCANMPIPESLQQKIDFFSVAGGLIPGVEELFQPTSWYAVFDGMGVKPQRYNPTADALDYVKLKTSLHSGQQAITNIARQQPSHDAFIQEYCRAPKP

SEQ ID NO: 90520 - protein, 505 aa, Xanthomonas translucens
  misc_feature (1)..(505): tr|A0A514EGP0|A0A514EGP0_XANCT Tryptophan 7-halogenase OS=Xanthomonas translucens pv. cerealis OX=152263 GN=E4 A48_17335 PE=4 SV=1
MVQIRKVVIAGGGTAGWIAACALAHQFRDLLDITLIESEQIGTVGVGESTVPPIRSFHRFLQIDEQEFLRAVAGTFKLSISFENWRRPGERYIHPFGLTGQSTLACAFHHFWLEAQRRGMLSELGDYCLETVASRLDRFALQQSLPVNYAYHLDAGLYARLLRRHAERYGLKRVEGRIQQVRQHAESGCVEALLLEDGTLIEGDLFIDCTGFRGLLIEQTLHTGYEDWKQWLPCDRAVAVQTEAVAAPVPYTRAIAHAAGWRWHIPLQHRVGCGLVFSSAHLSDDEARAKLLHDAAAPPIKDPWLVPFRTGRRRKAWNKNVVALGLASGFIEPLESTSIHLTIAAVMRLIMLFPSEGIAPSMVDLYNDVSRAEMEHVRDFIILHYHANQRDEPMWRACREMALPDSLQQRLRAWRERAHAWQGADELFRVDSWIHVLLGQGIVPAQHHPLARALPDQQLQQFLDAIRQPIDRAVAQMPSQQDFIARYCKAGPEVWVGPASVAAPA

SEQ ID NO: 90521 - protein, 495 aa, Sphingomonas sp.
  misc_feature (1)..(495): tr|A0A430DUF7|A0A430DUF7_9SPHN Tryptophan 7-halogenase OS=Sphingomonas sp. ABOLF OX=1985879 GN=CA235_02395 PE= 4 SV=1
MLDEPVRSVAVFGGGIVGWSAAVALKRRVPGISVTIVPVPPPANALADQMPQTLPSAIGFHDDVGLREEDAVLRAGGGWRLGTLFEDWASGQPAYVHAYGSYGQSFGTASFHHHWTRAAHAGLAAPYDAHSPAAMLARAGRMLPPDPEPGSPFADIQAGLALDIGRYRAMLEAFARHVGVVVRTGEVAEVRLRGGDGFIERVALADGGSVEADLFVDASGPEGVVRGAIDTAWEDWRPWLACDRLMQASATTATPSMLDHVVALPAGWRWQSALPGATSHGLCYASGLLGDEDARRLLADASGVEPLPAIGFRQGTRPEPWARNCVAIGDAAVVIEPLEWTNLHLAHSAIDRIISAMPGRACHPLEIADYNRQAVAEVTRVRDFVLCHYATARRPEPFWQPRAALPESLARTLRLFAERGRLPFFEEETFTRDSWLAILLGQGLIPRRIDPLIGTTPAHQSDAAMAGYRAAIARALPQFPTAAQHHAAQHARITR

SEQ ID NO: 90522 - protein, 507 aa, Aestuariibacter sp.
  misc_feature (1)..(507): tr|A0A2D6XYL2|A0A2D6XYL2_9ALTE Tryptophan halogenase OS =Aestuariibacter sp. OX=1872400 GN=CL531_07125 PE=4 SV= 1
  misc_feature (194)..(194): Xaa can be any naturally occurring amino acid
  misc_feature (255)..(256): Xaa can be any naturally occurring amino acid
  misc_feature (315)..(315): Xaa can be any naturally occurring amino acid
  misc_feature (317)..(317): Xaa can be any naturally occurring amino acid
  misc_feature (320)..(320): Xaa can be any naturally occurring amino acid
  misc_feature (327)..(328): Xaa can be any naturally occurring amino acid
  misc_feature (344)..(344): Xaa can be any naturally occurring amino acid
  misc_feature (390)..(390): Xaa can be any naturally occurring amino acid
  misc_feature (420)..(420): Xaa can be any naturally occurring amino acid
  misc_feature (433)..(433): Xaa can be any naturally occurring amino acid
  misc_feature (465)..(465): Xaa can be any naturally occurring amino acid
MVTTPQHICIAGGGTAGWMTAAALANRLPHSHYRITLVESAQIGTVGVGESTIPHIRQFNSALGITEDEFIAATSATCKLGIEFTDWGKVGESYIHPFGELGKPLAGIEFHHLWQAASLQGLDVPIESFSVAAVAARQRKFSPPHASREHLLSTYTYAYHLDASAYARFLRDYAEQRQVIRVEAQIREVKRDHXGGPITALSLDNGQEISADWFIDCTGFRSLLIGDYSQAEFIDWSEWLKTNRAVVLPCEKDGXXRPYTKAMARDAGWQWQIPLQHRIGNGYVYCSDYISDEEAEHTLRSTLPGEALADVRFLXFXAGXRKQLWVXXCVAIGLSAGFLEPLEXTSIFLIQMGIAKFLEHLPGTHNDAARNQYNRELTEQYQVIRDFIIXHYYLTQRHDTPFWRDCQAMTLPDSLTELIXAFRDSGLVDKKQXGLWPAVCIGQHLHPKQVDSRVAAIPPQQLIGXLNQLKSDIAAQVATLPNMDDYLSSLVAQTPLQKSGMRAGGQV

SEQ ID NO: 90523 - protein, 505 aa, Xanthomonas translucens
  misc_feature (1)..(505): tr|A0A0K2ZZG5|A0A0K2ZZG5_XANCT Tryptophan halogenase OS =Xanthomonas translucens pv. phlei OX=487906 GN=XTPLMG7 30_3026 PE=4 SV=1
MIAAPLRNLVIVGGGTAGWMAAAALARVLGPDYRITLIESEQIGIVGVGEATVPHIKAFNNLLGINEAEFVRQTQGSFKLGIEFVDWQRQGTSYIHGFGTEIGHSLGLLPFQQYWFKQALAGKAKPLGAYTLNTVAARRGKFMTSASDAPPNSPLGNIAYAYHFDASLYAAFLRRFSEQRGVTRREGIVEQVQLDPESGDVLSVRLASGDTIAGDLFIDCSGFRGLLIEQALHTGYHDFTHWLPCDRALAVPCAKVGPPTPYTRATARTAGWQWRIPLQHRTGNGYVYSSAHISDDEAAATLLANLDGAALADPRPLRFVTGRRKQVWNRNVVALGLASGFMEPLESTSIHLIQSGISKLLELFPREGISPVLVQRYNDRIAFEFDRIRDFLVLHYTATERDDSDFWRQCRAMAITPELQATLDLFGDSGRFYRNGDEMFAEISWVQVMVGQGILPRAYHPLVDQVPAADIERFVASIEQTIGHCVDAMPPHQAFIDRYCAAAPR

SEQ ID NO: 90524 - protein, 519 aa, Paraglaciecola arctica
  misc_feature (1)..(519): tr|K6Z8P1|K6Z8P1_9ALTE Tryptophan halogenase OS=Paragla ciecola arctica BSs20135 OX=493475 GN=GARC_2825 PE=4 SV =1
MNQSEFKKIVIVGGGTAGWLTACIIAAEHQCKHSQTVKLTLVESPQVSTIGVGEGTWPTMRSTLQNIGISEAEFFRCCDASFKQGSQFIGWLDGTKKDSYFHPFTVPHGLGQADLAKHWRKFNTDSSFADCVSFQPELCRLGLAPKQISTPEYAAVANYGYHLNAGKFADLLKTHGTQNLGIEHLSAHVEKIQSLPSGHIQAIETDKGTIEGDLFVDCTGMNALLIGKHFNVPWIPKHDILFNDSALATQLEYEPNNTQIASHTLSTAQSNGWIWDIGLTTRRGIGYVYSSRHCSDDEAELVLHKYLSDKTAGNYQQNTNIRKISFKPGYRQQFWIKNCVAVGMSAGFIEPLEASALALVELSAKMISQELPENFQMMAICAKRFNQRFTYRWERIIEFLKLHYVLSKRTDSDYWKENRDLNSIPERLQELITLWQYQPPSTNDFYDVEEVFPSSSYQYILYGMGFKPPTHVTSRRNSDFSKAAHFYQESKMLTQRYVAGLTSNRDLIKHIVSQGLPKH

SEQ ID NO: 90525 - protein, 529 aa, Rippkaea orientalis
  misc_feature (1)..(529): tr|B7K4G1|B7K4G1_RIPO1 Tryptophan halogenase OS=Rippkae a orientalis (strain PCC 8801) OX=41431 GN=PCC8801_1365 PE=4 SV=1
MQTTTSRSPQAIENVLIVGGGTAGWMTATYLNKAFGPQVKVTLMESPSVPRIGVGEATVPNLQRTFWDFLGIPEREWMKEVNGAFKTAVRFVNWRKPKSGEGVNHFYHPFGILPNLEGVLLPHYWYHLTRGTDPVDYSCFREPPLMDAKKAPVYRDGTSAVPHAWHFDAHLVAKFLSNWGKERGVVHILDYLENATLDEQGNIASIQTRNGLTLEADLFIDCTGFRGLLINKALNEPFIDMNDHLLCDSAVAAAIPSNDERDDIEPFTSAFAQEAGWIWKIPMMGRFGSGYVYCSQFLSEDEAATNFCKFWNVDESKTNLNRIRFRTGRNRRAWVKNCVSIGLSSCFLEPLESTGIYFITGAIYQLAKYFPSKQMEPALRDKFNEEIEYMYDDCRDFIQAHYLITTRDDSPFWLANKHELTMSDSIKNKLELYKAGLPVSPLPSSEKDYYASLDNEFHNFWTDGSYYCILSGLGCFPEQSHPYLRDHPETVRESVEVFTKIKEQQQELLEELPSNYEYLRQLHKVDHLV

SEQ ID NO: 90526 - protein, 495 aa, Paraglaciecola arctica
  misc_feature (1)..(495): tr|K6YUK0|K6YUK0_9ALTE Uncharacterized protein OS=Parag laciecola arctica BSs20135 OX=493475 GN=GARC_4890 PE=4 SV=1
MNAKTKVVVAGGGTAGWLTAFSLVTRLGTLLDITLVESDQIGTVGVGEATIPTMRAFHSLIGIDEKEFMAATQATFKLGIQFDNWGQQGDSYFHSFGEIGQRSWMAEFHEFWMEAKAQGFGGNLQDYCLELKAAKANKFSTFVGKKPVNFAYHMNATDYAAYLRKKSESAGVKRVEGRIEQIQNDETGNISSLTLKGGEQVFGDVFIDCTGFRGLLIGDNLDVEYEDWSHWLAADSAIAVQTQAVEAPRPYTQSIAHSAGWQWRIPLQNRVGNGIVYSSQFLSEDEARQTLLANLTGQTITEPRTLRFKTGRRKKAWHKNCIAIGLASGFLEPLESTSIHLVTTAILRLMKLFPFGGNTTMLAEQFNRETQLELETIRDFVILHYHQTQRNDSPFWDHYRTMQVPDSLVHRMAMFRENGYAWPDDVSLFRVDSWVQVMMGQGLMPKQHHGAGRVLPVEGLKQQMMALRNMIDKSVAQMSEHGDFIQTYCPAQNGR

SEQ ID NO: 90527 - protein, 510 aa, Sphingomonas sp.
  misc_feature (1)..(510): tr|A0A430DU68|A0A430DU68_9SPHN Tryptophan 7-halogenase OS=Sphingomonas sp. ABOLF OX=1985879 GN=CA235_02385 PE= 4 SV=1
MRPDAIRRVVIVGGGTAGWMAAAAITRVLGEMPGLSIELVESEEIGTVGVGEATIPQIVLFNKMLGIDEAEFVRETRATYKLGIEFVDWLRPGHRYVHPFGFYGLDMKGIEFHHFWLKGRDLGDPTPLDAYSLGIVGGLQGRFAHPRPDQPSSPLSKLGYAFQFDAGLYARFLRRLAEANGATRIEGRIVDVEHDGETGHVAAVVLQSGTRIEGDLFLDCSGFRGLLIEGAMTAGFEDWTQWLPCDRAVAVPCANGGDRQPLTRSTARGAGWQWRIPLQHRIGNGYVYSSAHLSDDEAAATLLANLDGAPLADPRLLRFTAGHRRRAWVGNVVALGLAGGFLEPLESTSIHLVQSAIARLLTYWPSRRFDQLEIDRFNAAHVSDYLEIRDFLVLHYKATERADTPFWDYCRTLEPPPGLASKLAVFGANGRIFREGNELFTETSWLSVMVGQGVEAGGYHPAADLLSDAETLTRLEHIRQVIADTASLLPHQDDHLRQIGCDPRPSLVVA

SEQ ID NO: 90528 - protein, 492 aa, Paraglaciecola arctica
  misc_feature (1)..(492): tr|K6YNQ5|K6YNQ5_9ALTE FADH2 O2-dependent halogenase I OS=Paraglaciecola arctica BSs20135 OX=493475 GN=prnA PE =4 SV=1
MNNQIKRVVIVGGGTAGWMAAAALSKLITSIEVTLIESDEIGTVGVGEATIPTLIYFSQLLKIDEAEFLRETQATFKLGINFENWRNEGEDYFHGFGITGQSCWAAGFQHFWRKGRELGIASDFSDYCLESVAAKANKFAQLPNNGLNYAYHFDATLYGKYLRKIAEQHKTKRVEGMISKVNLNPSNGDIQSLTLKDGQLIEGDLFLDCSGQRALLIEGALHTGFIDWSHWLPNDSAIALQTESVGEPVPYTRSIAHKAGWQWQIPLQHRVGNGVVYCSQYITDDKAQEHLLANVEGEHLTQPRVIKFKTGTRRKHWNKNCIAVGLSSGFLEPLESTSIHLIQQAIVRLMRIFPVNGIQKCDVDEFNQQTDTDIESIRDFIILHYKVTQRTDSDYWLHCRNMTVPDSLAHRLELFEETGRVFRKNNELFDDSWMQVMIGQGLIPKSHHPIVDNMSNDELKRFLQTIKDTEQQKVAGLPTHQQFIQHFCATPK

SEQ ID NO: 90529 - protein, 513 aa, Paraglaciecola arctica
  misc_feature (1)..(513): tr|K6Y2S1|K6Y2S1_9ALTE Tryptophan halogenase OS=Paragla ciecola arctica BSs20135 OX=493475 GN=GARC_1261 PE=4 SV =1
MQNTLKSICIVGGGTSGWMAATLLTTALRGSNIQITVIESPDIATIGVGESTVPSMMDFLQASQINLKEFIQATSATFKLGIRFDDWLTQGESYFHPFGRVGKDINGFDFYQAWLKSLADGQTSRWVDHSPSAIMAEHERFMLRPHQSNQTQPENWVLSHFAHSLHLDAIQVARYLRDLCHKRGVTRIEATVKNVNVDKKDFIRSLELDNGSIVESNFFIDCTGFKGLLIENSLKVGYQDWSHYLPCNRAVTVQTENVANPVPYTIATAREAGWTWKIPLQHRTGNGYVFSSEHCSDEQATETLLNSVNGKLINNPKIIPFVTGKREKIWHNNCLALGLAAGFLEPLESTAIHLVYKTLVHFIKYFPDMDFDTCNELAFNQKIDVDYTEIRDFIILHYCTSGRDDSDFWRWCQTMPVPDSLSEKIRLFRQRGQIEHSTEPFFTSDSWYSILEGMKIRPQKYHPLLDGFDSQGLANTLHKNIENIRSTVLKMPSHHDYIQANCQATHQNAKATI

SEQ ID NO: 90530 - protein, 509 aa, Gordonia sp.
  misc_feature (1)..(509): tr|A0A1A0LG17|A0A1A0LG17_9ACTN Tryptophan halogenase OS =Gordonia sp. 852002-10350_SCH5691597 OX=1834085 GN=A57 77_11750 PE=4 SV=1
MSDVTHGGEPISETADVVVVGGGPGGSTVATLLARSGHRVVQLEKESFPRYQIGESLLPSTIHGVCRLLGVDEKIKNAGFMHKRGGSFRWGKNPVPWNFLFAISPEFAGEGSYAYQVERMKFDQILLENAAEQGVDVRQRSRVNGTITDESGRVTGIRYVDADRVEHRIDAKFVVDASGNTTRLSKHAGGERIYSDFFQNVAVFGYFENGKRFPAPDSGNILCAAFDEGWMWYIPLSDTLTSVGAVISRDKAEHVLNAQEETLLHYVDRCEIVKDMLSDATRVTEGTYGEIRIRKDYSYANTRFWGNGMVLVGDAACFIDPVFSTGVHLATYSGVLAARSINSVLAGAMTEERAFTEFEGRYRREYAVFYEFLSAFYDMEQSEDSYFWKARKVTNFDRNDMTAFVSLVAGAYSGEQALTDPEQIIERFSASTAALTEAAERTGGMDTDSGQRMGHLFGTQVVRDVMEEMNAFQARGAVGTDGTEPPLLDGGLVPSADGLSWAEPAPATV

SEQ ID NO: 90531 - protein, 500 aa, Pseudoalteromonas atlantica
  misc_feature (1)..(500): tr|Q15XQ8|Q15XQ8_PSEA6 Tryptophan halogenase OS=Pseudoa lteromonas atlantica (strain T6c / ATCC BAA-1087) OX=34 2610 GN=Patl_0802 PE=4 SV=1
MLPIPQNITIVGLNVHGLLTALMLRKAYNPAVTKITLVGQIEENQPPKVMLAGSALNTLLAHFGQSEAHWMQQTDATFKLSNRYVGFSETPFSVANTSEVDILHQPLMLELTKLKRQHYQLDLSLDDFFFSAALAKRNLSPKAQDFPFETHYQYQVDTDSLLILLQKIAATNSIDMLQKSLETLQLDPQGRLKHVECEGQILSGDYFFDCTGSAKLLIGNMPEFREETLPEVRINDRVLTFTASARTCASEVITTALDCGFVQQYSLRGSVHFQYHYSSKFIQDEQAVQVLGRHMYLQGYDNVLQRNLSANQACLVFQPWSKNCIAIGPACGLTQGTEDHELAHTFAMLERFVSSIQSPDDVSAVVQDYNDRIKSRFIYIHSFHSTLLLLNARRNSPYWQTPQDPNALTPIGKTLFSQWLNGQDLEVEPIWDINGANAWYALFSGLGHYPKDDTKPHPQAASIQDNIQDMGRKLNGCCLNFQSHESQLDEGQCHANVTAV

SEQ ID NO: 90532 - protein, 571 aa, Tolypocladium ophioglossoides
  misc_feature (1)..(571): tr|A0A0L0MZK9|A0A0L0MZK9_9HYPO Tryptophan 2-halogenase OS=Tolypocladium ophioglossoides CBS 100239 OX=1163406 GN=TOPH_08017 PE=4 SV=1
MSIPESCSVLVVGGGPAGSYTASALAREGVDVVVLEADYFPRYHIGESMLASMRHFLRFIDLEKTFDSYGFRRKASICFYETSNGAAFKLNNKRAGYTDFIAANGPNGYSWNVIRSESDKLMFDHAEKSGAHTFQGVKVESIQFVPDQDFPEDERICNPGRAVSASWSRKADGATGSITFDYIVDASGRNGIISTKYLHNRKFNQALKNVANWGYWKGAKTYAPGTEKEGAPLFEALTDHSGWCWAIPLHDDTLSVGIVMRQDLSLARKKALGSPSMVGFYKDCLTMAPEIHARLADAELVSPSIKAASDWSYSASAYAGHNFRLVGDAGCFIDPYFSSGVHLALAGALSAAMTIRASRQGDCSEFEAAKWHSTKIAESYSRFLLVVMTALRQIRKGDEPVLSDFDEDGFDRAFGFFRPIIQGLADADVGGTLTQGLISKSVEFCFHAFEDISPEARQAVLDKLDRVRADPDTETKQDLEKLNEDELAILRTIRARQMLRTEDSMNIESFSHDVVDGFVPRLIHGKLGLNKVHSRAAALTYSESLFESGLNDMDANASGDLKARSEGTVQV

SEQ ID NO: 90533 - protein, 303 aa, Grifola frondosa
  misc_feature (1)..(303): tr|A0A1C7LYY2|A0A1C7LYY2_GRIFR Tryptophan 2-halogenase OS=Grifola frondosa OX=5627 GN=cmdE_1 PE=4 SV=1
MPSIPTCAQILIIGGGPSGSYAASALAREGFSVVLLEADKFPRYHIGESLLPSVRPFLKFIDAENLVATHGFTTKPGAAVKLNQYKHEGYTDFIALDSNNNSWNVIRSEFDELLLQHASKSGALVFEETKVIDIEFGAKPGSQERPVAATWKTSTGEEGCIRFDYLVDASGRNGIMSTKYLNNRRHNKSLKNIACWGYWEGTDKYIRAPLERTPYGSRHFKVERTYSFESGDSRGLYGSRHEYRQEESCQAMCRRRYRHIEEHYLEELDRAPGLIRLLGDAKLRTSYGTDYDQERRVITATQQ

SEQ ID NO: 90534 - protein, 542 aa, Moelleriella libera
  misc_feature (1)..(542): tr|A0A167YK81|A0A167YK81_9HYPO Tryptophan halogenase OS =Moelleriella libera RCEF 2490 OX=1081109 GN=AAL_06692 PE=4 SV=1
MTVPQNCTVLVIGGGPAGSYAASALAREGIDTVVLEAQKFPRQVATNGAVFRLAQDQPSAYTDFLEAGGPNGYAWNLVRSESDDLLFRHAGNCGAHIFDEIKVDAIEFEDGPPGDGRRVNGNGRADQRRPVSATWLGKDGASGSIAFKYLVDASGRNGLVSTRYLKNRTFNENFKNIANWAYWKSDNIYGVGTHMEGSPYFEALDDASGWAWFMPLHDGTRSVGVVQDQKMAAAKKKELGRPSTVEYYKTCVDMAPGIKELLSGAELADDVKSASDWSYTASTYHLANTRICGDAGCFIDPLFSSGYHLAITGGLSAAATIAASIRGHCDEETAGSWHSKKTVESYTRFFLAVSSATKQIRQQHVPIIQDMNEDGFQRAFDLFQPIIQGTVDTDTAGNLSQQEIGRILEFCFRAFTYVPPEKKEGLLSKLKSLGVTSEREASNGRRALGDIEKDLTPDELKVLEILRSRRMIREDPFEMDSFTLDTIDGWAPNLVRGQLGLARSEQAKIDKAHFLSPDFLAGNAPGIRDGSVHLPTSRIQLA

SEQ ID NO: 90535 - protein, 549 aa, Aspergillus oryzae
  misc_feature (1)..(549): tr|A0A1S9DKD6|A0A1S9DKD6_ASPOZ Tryptophan halogenase OS =Aspergillus oryzae OX=5062 GN=OAory_01108180 PE=4 SV=1
MSIPNRCTVLVVGGGPAGSYAAAALAREGVDTVLLEADVFPRYHIGESMLPSIRHFLRFIDLDSKFDSYGFVNKNGAAFKLNSKPEAYTDFIAAGGPGSHAWNVVRSEADQLMFKHAGENGAQVFDGVKVNSIEFEQIDGLTVDPSLSELGRPVSATWSCKATGEKGSITFEYLIDATGRAGLVSTKYMKNRRYNQGLKNVASWGYWSNAGSYGVGTPREGDPYFEAIEDGSGWVWLIPLHNGTTSIGVVMNQEAATAKKRETGATTKDLYLNTIKNTPGVWQLLDKAKLQSDLKSASDWSYNASSYASPYLRIVGDAGCFIDPFFSSGVHLALASGLSAALTIRAAQRGDCDEQAAVSWHSKKVAEGYTRFLLVVMSALKQISDREKPVLTDFDEDSFNRAFDFFRPIIQGTADVDKNLTQAEIAQTIEFCVQAFQTASTDEQDAVMTKVAAINSQNGTEGALRELHASLSADERRTLTTIQARQIIRSEDQMNIDNFTIDVIDGMVPRLERSSLGLARFVPKAQTSREDGLRATLGLPEKQKSIFSY

SEQ ID NO: 90536 - protein, 597 aa, Aspergillus awamori
  misc_feature (1)..(597): tr|A0A401KPZ1|A0A401KPZ1_ASPAW Tryptophan 2-halogenase OS=Aspergillus awamori OX=105351 GN=AAWM_04248 PE=4 SV= 1
MAVPQSCTVLVIGGGPAGSYAAAALAREGFETVLLEADKFPRYHIGESTLPSLRHFFKFIDFYDTFDAHGFYHKNGAVFRLAQAQPDAYTDFLEAGGPDAYAWNLIRSESDDLLFRHAGTCGAHIFDETKVDTIQFESHIGESSPEPDRASNGELNPGRPVSVTWVRKDGSSGSIALKYLVDASGRNGILSTKYLKNRKFNDKFKNVANWAYWKTDNLYGLGTHMEGSPYFEALDDASGWAWFMPLHDGTRSVGVVQDQKIATEQKRQLGRPSTLDFYKQCVEKAPRTRKLLSGAEIVTNVRAASDWSYTASTYHIPNARICGDAGSFIDPLFSSGVHLAVTGGLSAAATIAASIRGDCDEQTAGLWHTKKTVESYTRFFLAVSSATKQIREQYEPIIQDMEEEGFQRAFDLLRPSTDLLKHFILAPVLVLQLTKILCVLVIQGTVDVDNTGKISYTEISKALEFCFRAFTYVPPEKKDALFEKLKNLGVESGQSDTKEAKALDDIEKHLTRDELQVLEILRSRRMIREDPFEMDSFTLDTIDGLAPNLVRGKLGLVKANQAKIDKAHFFSPRFLDGKAPGIRDESIFLPTSRVRLG

SEQ ID NO: 90537 - protein, 1050 aa, Colletotrichum tanaceti
  misc_feature (1)..(1050): tr|A0A4U6XNX5|A0A4U6XNX5_9PEZI Tryptophan 2-halogenase OS=Colletotrichum tanaceti OX=1306861 GN=cmdE PE=4 SV=1
MATITQQEHALTESYELADASKQGPSRDDVPEPATRLPEAGEEEGLDKRTLLKLVAAGFSFFISGVNDGSVGPLLPYMIRDYDISTAVVSIVYGANFLGWFLAALTNTYLGQKFNLGGLLTFGAFFQLLAHALRVWRAPFPLFVVTFWLVCLGQAYQDAGANAYVASVKAAHRWLAFIHALYMAGCLVAPFVATPIASAGGGGGEASSRWYLFYIFPLAIGAVNLALTFYAFRDTIKLGREPGSPEQGGPQSQTDAGEEKKKKTKSASQLVKLTLMTKSLWMISLFFFFLLGATITASGWIVEYLVEIRHGNLGQMGYVPAGFNGGAMLGRLLLAEPTYRLGERRMVLVYVVLCIAFQLVFWLYAFPPTRSRDRSSPWVVPPADEVFHSVPNIIAASVAVSFVGFFSGPFFATGISVGSKLFSPEIQPTALSFVFVFGQVGGSIFPVITGILASRNGAGILQPVLVALIAGTGISWLLVPKPKQSGFIAPRIMSPAIPERCTVLVIGGGPGGSYAASALAREGIDVVVLEGDKFPRYHIGESMLASMRHMLRFIDLEAKFDSYGFIKKARETMDDGPPPFSPPGAAFKLNKEKRPGYTDFLAAGGPGNYAWNVVRSEADQLMFQHAGECGARVFDAVKVKSIRFEDATTVPEGEPNLRPGRPVAAVYEVTETKETGEIAFDYVVDASGRAGLLSTKYMKNRRYNQGLKNVANWGYWEGCNQYAPGTPRENSPFFEALTDESGWAWFIPLHNGKASVGVVMNQKLAAHKKQQQGGPGGSTAFYHESLKLAPELRSVLVGDGRLVSDVKSASDYSYSASSYAFPHARVVGDAGCFIDPFFSSGVHIALTGALSAATTIAASIRGDSDEAAAAEWHSKKVAAAYTRFLLVVLSAYKQMRFQGDPVLSDFDEDNFDRAFSFFRPIIQGTADAANGNLSQDELNKTLEFCAHAFEPVSPEADKEKVMKAVSGLSAAAAAAAATAPAGSEFNPDLSVEEQNAVKHIRARTMMRTEDTFNINTFGTDAIVGYVPNLVRGSLGLKKAEETNGVVVVAA

SEQ ID NO: 90538 - protein, 455 aa, Beauveria bassiana
  misc_feature (1)..(455): tr|A0A2N6NWF2|A0A2N6NWF2_BEABA Tryptophan 2-halogenase OS=Beauveria bassiana OX=176275 GN=cmdE PE=4 SV=1
MFESTEVKQILFARERENTAAVPDDDEVTVDAPRPESAIWARKNGTSGSISFKYLVDASGRQGILSTKYLKNRRVNDNFKNVANWAYWKSDNIYGPGTHMQGSPYFEALDDASGWAWFMPLHDGTRSVGIVQDQKQAARAKRDLGRPSGLEYYKLALKMAPTTQNLLAGAELASDVRSASDWSYTASTYHLPNARICGDAGSFIDPLFSSGVHLAITGGLSAAATIAASVRGDCDENTAGAWHSKKTVQSYSRFFLAVSSATKQIREKHLPILQDLNEEGFQRAFDLFRPIIQGTVDNDTRSKVTQAEILKILEFCSKSFTYVAPEQKEALFKKLTKLGVNGEDSDVSWANGLGDLQHHLTADELKVLGILQSRRLTREDPFEIDSFTLDPIDGLAPSLVRGSLGLVKSEQARIDPGCLFSPEFLDGKMPGIREGSIFHSSDEDRLNKGAVETVA

SEQ ID NO: 90539 - protein, 478 aa, Aspergillus oryzae
  misc_feature (1)..(478): tr|A0A1S9DT09|A0A1S9DT09_ASPOZ Tryptophan halogenase OS =Aspergillus oryzae OX=5062 GN=OAory_01086040 PE=4 SV=1
MSIPEQCTVLVVGGGPAGSYAAAALAREGIDTVLLEADVHPRYHIGESMLPSMRHLLRFIDYTDFIAAGGPNHFSWNVIRSEADELLFRHAAHSGAKTFEAVKVNSVTFTPSPTLDTGPGRPVSASYTQKSDGATGVVGFKYIIDASGRAGLLNTKYLKNRKYNQGPKNVAVWAYWKATGKYGEGTPRENSPYFEALTDESGWAWFIPLHDGTHSVGVVMDQGMMSQKKAVSELSTNARYLSWLKLAPRLNGYLTGGKMVADLKTASDFSYDSSSYAFPYARVAGDAGCFIDPFFSSGVHLAITGGLSAATTICAAIRGDCDEVAAARWHSTKVKEGYSHWLVIVLSAYKQMSNQAEPVLSDVGEDNFVRAFNFFKPIIQGTSDVSTKLTQAEFSHTLNFVLKAFDRKIGGDLTSEEEEKIYEDIRKTQSQNMSNIESFTMDIIDGRLPRLLRGKLGLESVAGMDEDTKHCPTATQQH

SEQ ID NO: 90540 - protein, 468 aa, Metarhizium anisopliae
  misc_feature (1)..(468): tr|A0A0B4GTC8|A0A0B4GTC8_METAF Tryptophan halogenase (F ragment) OS=Metarhizium anisopliae (strain ARSEF 549) O X=1276135 GN=MAN_00908 PE=4 SV=1
MVRLLVCSLSLVAAIHALPDVLFKDVVIVGGGASGSYAAVRLREDFGKSITLVEKDEILGGHVDSYVDTKTGTPYDFGVKAFIQAGNATGFFDRLGVPRGRSPKTPVNTTYIDFKSGKVLDFAPPPSAAQLDALADFLRVVEPWEHLLQPGYFDFPEPSHIPGELLVPFGDFVSRHGLERAMPFIYQTTGLGLGNMTKAITLFALQAFGASMARSALGLQDSFVPASGRNQDLYDSVAAVLGSDVLYASKVVNTIRTNLGVIVTVRHLKSRRLTYIAAKALLIAIEPTGDNTGPFSLDQDEKHILSRFTYTREYTGIIDNTALAAHASYFNLPSDAAPNNYLLYPEPPFTARIDYMGSGHYFRVTVIGDDKLDDKGAKALVDKDFATLVDAHVLRGSAAEKVHWVAFSTHGPMHARVSVEDVQRGFFQKLYALQGRRSTWWTGGAWSVNFQSALWQYDDIIVPMMLRG

SEQ ID NO: 90541 - protein, 540 aa, Unknown
  misc_feature (1)..(540): tr|A0A1D7SEI2|A0A1D7SEI2_9CAUD Tryptophan halogenase OS =Cyanophage S-RIM44 OX=1278485 GN=ES420910_102 PE=4 SV= 1
MKVEKIVIVGGGSSGWMTAALLAKQLPHIDLTVIEPEDIPTVGVGESTLGHINRYMKMIGILDREKEWMPYCAATYKVSIQFTDFTHIGDRYQYPFGQMDYSNDISLQDYAYIKAKHPEFEVPYANFYNPIAYLADNNKMTADSRVIRNFDFNYDTSYHFDAARFGEWLKMNICEPEGVTVIRDSVEDINVNDDGIESLVLKKDKSKITADLFIDCTGFKSLLLEQTMGSEFVSFSDVLPNDKAIATKIPYVDKKKEIHNVTDCHALSAGWVWDIPLWHRRGTGYVYSSKYISREDAETEFRAHLAKTLDPKRAEEAEFFEIDIRHGKRKRAWVKNVVGIGLSYGFLEPLESTGLFTTHENAIMLVNTLERRSGFVSKVDVDGYNYAADHIIECFKSFIQFHYSLSQREDSQYWKDQIYNTPLYYNDDPTDITLTSPRLYKEYLHAVNVANVSEDLQGLNYIAGGMGYNHVGPSETNFRLSKQYADPSRINKGMVVSRQTRDYVMRQIVNMQSTYEFLQNNVYFEYISTERKYTPKEYNF

SEQ ID NO: 90542 - protein, 359 aa, Unknown
  misc_feature (1)..(359): tr|A0A1D7SL01|A0A1D7SL01_9CAUD Tryptophan halogenase OS =Cyanophage S-RIM14 OX=1278423 GN=LIS021110_025 PE=4 SV =1
MKVAVLGKGLAGVLTALYWRHYSPKTEVELYYDEEIDTEPVGSGSFPGLTGFLADTFGWSLNWHDNPWKATPKFGIKYEGWGDKNEWFHPFNFDEVGMHLDPHLFQDFICDTGIFKVTQKHIETYDECDADYVYDCRGFPTDYTDYNIITNPLNRVMLSNMPNPDNVPWTRTVTTPDGWTFVIHLQDRVQYGYLYNGDITSDTEAEINFKEQFGVDNITATFPFRNYYAKSPIIDNRVFLNGNRYFFIEPMEATSVAGYMKWIELTMEAIWGEKPIQKIEYDMQRSIKENANFILYHYKFGSKYDTPFWDYAKSLELSDSFIQNIIDGDIRTNMVTYGFHTSQSVMNMYDNLGRIYKPV

SEQ ID NO: 90543 - protein, 379 aa, Unknown
  misc_feature (1)..(379): tr|A0A0C5AMY9|A0A0C5AMY9_9CAUD Tryptophan halogenase OS =Cyanophage P-TIM40 OX=1589733 GN=PTIM40_228 PE=4 SV=1
MIGRGSGGLITASGLITAMNLLTYNLKVDVYYDPKTSQLPVGESTTPQFASLIECTLGLTIDDLISLGLASYKKGIEFVDWGNTPHFFHKFIHADAIHFYTKTLNPFLQENLEKYKGVKFIGRRIQDLQTICNEYDFVINCSGALNNYRKEIDIPCVNSVLYFDDHKIHGHPEYTYHKAHEYGWKFSLPFPNQRISRTGYLYHREYQSHVDAEVVYSHGDLYEWTPSYAPDMIVNNRLALNGNALLFFEPLQALSLLHYDMVAKRICDYLVNGQTSEEKLLGNLWYRRMVEAYIDALAFHYQYGSAYNSGYWEKVSKKSVTRVAHKWWNDGRLIKSVAEKSMGDLSQHPDFYYAPDHTHIFGITCMEQLYAGLSGDRDL

SEQ ID NO: 90544 - protein, 409 aa, Prochlorococcus phage
  misc_feature (1)..(409): tr|R9S6K5|R9S6K5_9CAUD Tryptophan halogenase OS=Prochlo rococcus phage P-SSM5 OX=536454 GN=PRTG_00224 PE=4 SV=1
MSDSDFIVVGGGNAGCISALLLQCSFPNKKVSIIKSENIGTVGVGESSTEHFAQFCNTCGISILNVLLATKATFKGGVYFENWSDEDFMHVVNLDNVNQPIGHFFPYLQRVVAYNKPNREMNIYGAWDRKVPLKFFNDMNNSPTNQFHFDTLALNKFLIDKCLERNINIIEDELMGAIVHPESGDIVSVNGETDKYSADFFIDCSGFSRLLLEKTLGVKWKSYSEYLPLNSAISFATDEMEEYNMYTKSTARDYGWSWQIPTQGRTGNGYVFSEKFINETQAHEEMEKSYGHEIDVAKTFKFDPGRLEKAWCKNCYAVGLSQSFVEPLEATSIGSVIQQMVAFIHYYPSNSIDECNEIVNGIFDNIFDYVQAHYLVKKEDTPFWREVKNDLKITPSLQNLLDKWKKDFL

SEQ ID NO: 90545 - protein, 526 aa, Unknown
  misc_feature (1)..(526): tr|M4SQD7|M4SQD7_9CAUD Tryptophan halogenase OS=Cyanoph age P-RSM6 OX=929832 GN=CPXG_00183 PE=4 SV=1
MQVKDIVIVGGGSSGWMTAAALDVLCPHVNVTLIEDPNQGVIGVGESSLQQIRRFISLLGLKDSDWMKDIGATYKTAISFNDFWKKGESWLYPFGSPDEMESKVPWMAWFVLNATKPEKYTNDTFATTFNPVASFTKYNKLTYDTTYWKPWVDTAYHIDAIKFGQWLKNNVCKRVKHITGTVTGVIKKENGDIDCVVYNGKTLSADLFVDCSGFKSLLLGEAMDVPFESFHYNDGGCLLNDKAISISVPHENPEKEVTNTTNCTALDNGWVWDVPLWERGGLGYVYSSNFISEDEAQVELHNYLVKTRGKYRADQVSYRTIPFKMGKHKKSFVGNVIAVGLSNCFVEPLESTGLLVTHEQVIRLCNALSGRNGFIPKVEKEMINQVADHEIEGHKNFVAAHYAFSERKTDFWRTASEVVDYDFCGTDNLFMRYGSHKYINFDFLTNLGSIEYNDGPRYCAAGMGFNPINKVTLPLSRMCNEIIPEEDEQALTNAEKIIDEWHQHMLEYCETLPSSYEFLNQTIYKE

SEQ ID NO: 90546 - protein, 530 aa, Synechococcus phage
  misc_feature (1)..(530): tr|Q0QZI6|Q0QZI6_BPSYS Putative tryptophan halogenase O S=Synechococcus phage syn9 OX=382359 PE=4 SV=1
MKIESVAIVGGGSSGWMTAAALSKLCPQLEIALIEDPNIKTVGVGESTLGHFNKFLHLLDLKDEDWMPACNATYKNSIRFTNFREGKGEVFEYPFGPSLDVSFFSQTDGINTWGKLANKYPEDFPPETFARFVNSNTYLAEHNRLTRNKDNKIPNFNFDWDTAYHIDAELFGQYLKEKIALPNGVKHIQGKVTGYQKESPNNHNFKYIILDQETAIFADLYIDCTGFKSLLLGEFMGEAFSPFSKKLANDKAMATRIPYENREEEMHNVTDCHAMKNGWVWNIPLWNRIGTGYCYSSRFVSKDDAEAEFREHLGERGKDAKIFHIDIGHGKRTRAWVNNCVGIGLSYGFIEPLESTGLLTTHENIENLVYLINQRDGYVTQAERDGFNYTCDHQIDSFSDFVAMHYAYSMRTDTPYWKWCTQMCNYMPESMGPHRQKQSTWQDLSTDTIGLNTWHINHNGISFIIAGHGLRPQSYDKLSEVLLKRNNESDYYYEDIRKDWLKHYESMVEYVKTLPTHYEFLRDEIYGSAE

SEQ ID NO: 90547 - protein, 480 aa, Synechococcus phage
  misc_feature (1)..(480): tr|H8ZMV7|H8ZMV7_9CAUD Tryptophan halogenase OS=Synecho coccus phage ACG-2014c OX=1079998 GN=Syn7803C43_193 PE= 4 SV=1
MKIVIVGGGTSGWMSAAALCKTFPKWNITMISNGESIGVGESTTPHFDQYLKYMDISDEEFIAASRATFKSSSRFEDFASVGSVFHYPNGQFQPENDYNEWMIAKEYFPENLPSFAEVFMPFVTVAEQGKLPLKDPILGEYCLSKDRSFHIDAFSFVNYLKNRFCKDVKCIKGKVKKVNRSTGIDNIVVDGTKVSADLFIDCSGQNSILTNSEYIKYNTILTDTALVTRTEYTDKDKEMVSYTNAKGMTAGWQWTIPTWDFISRGYVFSSQFQSQDAAAYEFGYDDFKVVNFKNGRRVDAWVDNCISIGLSYGFIEPLESTGLFNTHHGILALLDILREGTLPARFARDRYNFNMAEHMDGWREFVEAHYYYSSRRDTRFWRAVSEVEYPIKGAHADIQQIMLSGDGFPPEHMPIVYILAGSGYTNVNKRLVEYFKPSFPIGQRKVDAWIQKYGRILRHSENLPTMHQHLSKYFYSNLGA

SEQ ID NO: 90548 - protein, 489 aa, Unknown
  misc_feature (1)..(489): tr|A0A0C5AIN6|A0A0C5AIN6_9CAUD Tryptophan halogenase OS =Cyanophage P-TIM40 OX=1589733 GN=PTIM40_46 PE=4 SV=1
MKIYIIGGGSSGWMTATTMLTKFPDADITVVESPSKPPVGVGESTTQYFRIWADYVGLKDEDWMVACDATYKISVRFSNFHDVDDTPWQYPFGAPNINLAHPDVWFWNQYKRGWSNDKFARDYWIAAECAEHNLLPIKDPNFKIKKNTGFHFDAVKFAEWLRDNKCQSVKRIIGTVDDFERVGDDIKYLWIDEKQHEADLYFDCTGFTSLLNKSEWLDYSDWLPNDTAWVTRLEYKDKQEELKSYTQCTALSSGWVWTVPTFARIGTGYVFSSKYQDHQSALKEFASFLKYDTEEFRKIHFKTGRKKEIWCGNVVSIGLSAGFIEPLESNGLLSVHEFLLKFCRMWKPRTTQMMRDTYNKAVAFAFDGFASFVALHYALTQRQDSDYWKAVSQIRYPDESMIEAAKITMMEESHNFASKLDWRNAAGDSLFCVMAGHGWNPFTDVIESEILFHGGIPEDSHLNSWTHKWNHARLGVNPLDYYNRTLYAV

SEQ ID NO: 90549 - protein, 485 aa, Prochlorococcus phage
  misc_feature (1)..(485): tr|Q58MD8|Q58MD8_BPPRM Bacterial tryptophan halogenase OS=Prochlorococcus phage P-SSM2 OX=268746 GN=PCMG_00220 PE=4 SV=1
MSDSDFIVVGGGNAGCISALLLQCSFPNKKVSIIKSENIGTVGVGESSTEHFAQFCNTCGISILNVLLATKATFKGGVYFENWSDEDFMHVVNLDNVNQPIGHFFPYLQRVVAYNKPNREMNIYGAWDRKVPLKFFNDMNNSPTNQFHFDTLALNKFLIDKCLERNINIIEDELMGAIVHPESGDIVSVNGETDKYSADFFIDCSGFSRLLLEKTLGVKWKSYSEYLPLNSAISFATDEMEEYNMYTKSTARDYGWSWQIPTQGRTGNGYVFSEKFINETQAHEEMEKSYGHEIDVAKTFKFDPGRLEKAWCKNCYAVGLSQSFVEPLEATSIGSVIQQMVAFIHYYPSNSIDECNEIVNGIFDNIFDYVQAHYLVKKEDTPFWREVKNDLKITPSLQNLLDKWKKRFPLVGDVFCRWGMFSEVNYIIILQGLKWFDSEKVMQEYKNIEHIPLIDWKDTSDRCLSMGHKNFIKELVRIHNLNKEN

SEQ ID NO: 90550 - protein, 388 aa, Synechococcus phage
  misc_feature (1)..(388): tr|E3SKR8|E3SKR8_9CAUD Tryptophan halogenase OS=Synecho coccus phage S-SSM5 OX=445685 GN=SSSM5_229 PE=4 SV=1
MKFAVVGTGTAGILSLSFLLAYAPEPIEVYSIHNPKKPILGVGESTSTQIPSVLYDAIKFSLLEDSHELDATLKLGVKFADWREKDFYGHITPVSYGMHFDNQALKGFAFRRFEEMYENFHVIHGHVDKIESRENEAAVFIDGDEYKFDYVVDCGGYPEDYSEYNICKYISLNSCLVHNTKPEEYNHTLHRATPNGWMFGIPLQSRQSFGYLYNDTITSKDEAVTNFKTYCDDIEESQLREFKFKSYSAKQFFDGRVLKNGNRAFFYEPIEAFSGFFYQSALKFLGEYLWCDVSLEKTNEHMGFIANNIELATCFIYHGGSIYDTPYWDYAKKISKEKLDTDIRWSYQVEALKGINAQTNRQLRREGIGAYPAQIWFDFDKNLNYNLF

SEQ ID NO: 90551 - protein, 540 aa, Unknown
  misc_feature (1)..(540): tr|A0A1D7SF58|A0A1D7SF58_9CAUD Tryptophan halogenase OS =Cyanophage S-RIM44 OX=1278485 GN=Np420711_102 PE=4 SV= 1
MKVEKIVIVGGGSSGWMTAALLAKQLPHINVTVIEPEDIPTVGVGESTLGHINRYMKMIGILDREKEWMPYCAATYKVSIQFTDFTHIGDRYQYPFGQMDYSNDISLQDYAYIKARHPEFEVPYANFYNPIAYLADNNKMTADSRVIRNFDFNYDTSYHFDAARFGEWLKINICEPEGVTVIRDSVENINVNNDGIESLVLKKDKSKITADLFIDCTGFKSLLLEQTMGSEFVSFSDVLPNDKAIATKIPYVDKKKEIHNVTDCHALSAGWVWDIPLWHRRGTGYVYSSKYISREDAETEFRAHLAKTLDPKRAEEAEFFEIDIRHGKRKRAWVKNVVGIGLSYGFLEPLESTGLFTTHENAIMLVNTLERRSGFVSKVDVDGYNYAADHIIECFKSFIQFHYSLSQREDSQYWKDQIHNTPLYYNDNPTDITLTSPRLYKEYLHAVNVANVSEDLQGLNYIAGGMGYNHVGPSETNFRLSKQYADPSRINKGMVVSRQTRDYVMRQIVNMQSTYEFLQNNVYFEYISTERKYTPKEYNF

SEQ ID NO: 90552 - protein, 507 aa, Synechococcus phage
  misc_feature (1)..(507): tr|Q0QZI7|Q0QZI7_BPSYS Putative tryptophan halogenase O S=Synechococcus phage syn9 OX=382359 PE=4 SV=1
MKVDSICIVGGGTAGWMAAATFTRLFPHKHITLLESDDIPTIGVGESTTQFFRGWLDFIELYDVQWMDDCDATYKYSVRFENFNRPNCPFHYPFISNPDSVKDPKDIPTWFIHQTLTGESVDGFASWIAPHMKAIEEGRIITEDFDRFVHQRDTGFHMDASKFARWLKDNICYPAGINHMSDVHITKHMKRMDGTLEWIQDKNGRKFYADLFVDCTGFKSLLINDYMKTEWEDFNEMLPNDRAWTVRLPYTNKREQMKTYTNCTALDNGWVWNVPLQNRIGTGYNYSSKFTSDAAALEEFKKHLGYPEETLCDYRNIKFKTGLSKKPWNKNVLAIGLSGGFIEPLESNGLLSVHEWLIWACQIIGDGAVRAIDINAFNYKARKNFKSFAHFVFYHYAFSKRNDTPYWKYMTEDYDALSDLHEEFLYDIRNTTTPLDKIDIHKFILHNYGGESYIAAGHDWNPFNHATLRLLESRKEIDLDSYIEISDYSHYNELIETFPYASDYYEN

SEQ ID NO: 90553 - protein, 545 aa, Unknown
  misc_feature (1)..(545): tr|A0A0C5AE39|A0A0C5AE39_9CAUD Tryptophan halogenase OS =Cyanophage P-TIM40 OX=1589733 GN=PTIM40_47 PE=4 SV=1
MQYKSFCIVGGGSSGWMAAATMKKAFPECDVSLIQPKGRDIIGVGESTLGHINRFFRFLGLKDKEWMSYCNATYKTSIAFKNFREGKGERFQYPFGRIDHNDYRSDYMTFFELQVKYPHLYPPEEFARFFNPNTILAEENRLTDGYICSEHNTWNMEQDTAYHMDSEKFGEFLAKRFPDVKTYEGIVGSCSKDATGHITSVNITEGWDEGLMIEADLYIDCTGFKSLILEGMMGSKFISFNDVLFNDTAMTARVDYSDRKNQMDSYTDCVAMSNGWCYNIPLWNRVGAGYVFSKKYIDPDIAHEEFVGYLAKRYSPKVADNADYRLINIRHGKREKAWVKNVVGIGLAYGFLEPLESTGLMTTHENLLYLVDSLKRRKKVTKIDIDSYNYTVDHAIESMKYFIGMHYVLSQRDDTKYWRDATQNTALFSNHDLTQYMNDCLGWHSMLESRREYFQLYEGLRKNFWSPDKFDGLVYIAAGQAFRPINEHSVKEAHYIFPRRKGEVEQVHKDWQRDRQAIYNAVKKLPTQYEYLRGYIYGNDFVEEN

SEQ ID NO: 90554 - protein, 480 aa, Synechococcus phage; identical to SEQ ID NO: 90547
  misc_feature (1)..(480): tr|V5UTF5|V5UTF5_9CAUD Tryptophan halogenase OS=Synecho coccus phage S-MbCM25 OX=1340811 GN=S-MbCM25_192 PE=4 S V=1

SEQ ID NO: 90555 - protein, 367 aa, Synechococcus phage
  misc_feature (1)..(367): tr|E3SLC6|E3SLC6_9CAUD Tryptophan halogenase OS=Synecho coccus phage S-SSM7 OX=445686 GN=SSSM7_209 PE=4 SV=1
MKVAIVGAGTAGLYCAVSLLESLPKFIKVDLIHSRVINPIEVGESSLVSFPHALSCGVDYVHHFDAAELGSTIKFGVQFKNWNGDPFIPFASGAYGIQFDTTKLPRFILPRLNKMYQNFSEKLKTVKEIKSLGKKVSIDGQIYDYVIDCRGYPEDYSDYIISDKVYLDSGIVVKSYTPGDWEYTYHIAHEHGWMFGIPLQERTAWGYLWNSEVTSELEAQSNLVNLLGEYQIEYFSEDCRQFKFKNYYAKSIVNEDGNIFVNGNRALFLEPIQATSLGCYGIINGMIIDKILDDKYDNDMYHHIMDEVIKFINLHYLNGSNFDTPFWQMASKGAKELYEGIDPTKCNWNYILDWNPQFRQKMFDSFL

SEQ ID NO: 90556 - protein, 499 aa, Unknown
  misc_feature (1)..(499): tr|A0A1D7SD53|A0A1D7SD53_9CAUD Tryptophan halogenase OS =Cyanophage S-RIM44 OX=1278485 GN=ES420910_101 PE=4 SV= 1
MKVNSICIVGGGTAGWMSAATFSRVFPDKKITLVESPSIATIGVGESTTQFFRKWLNFIDLDDSWMEECDATYKFSVRFENFNEEDPFHYPFTTKDSRKDPTAWFIHKAITPGLSVSDYADWYAPQMKAVNEGRIPTQDFDRFVLKRDTGFHFDATKFATWLKNNLCQNVEHIEADVISADLDESGNIESLHLDNDSLLKADLFIDCTGFRSYLINDIMKTPWETFDDMLPNDSAWTVRLPYTDKKSQMKTYTNCTALNNGWVWNVPLRNRIGTGYNYSSKFISDEDALEEFKEHLGYPKETLCEYRNIKFKTGISKKPWNKNVLAIGLSGGFIEPLESNGLLSVHEWLIYASQIIGDNAVRALDINAFNFTVTKEFKTFAYFVYYHYALSSRTDSPYWKYMTEQYDGHGDLHDEYLYKTRKATTPLNKLEYEKFTYTNYSGESFIMAGHGYNPFNLVTLRLLETENIIDKGSYISIDNYKHYESLVNTFPFAHEYYES

SEQ ID NO: 90557 - protein, 499 aa, Unknown
  misc_feature (1)..(499): tr|A0A1D7SF89|A0A1D7SF89_9CAUD Tryptophan halogenase OS =Cyanophage S-RIM44 OX=1278485 GN=Np420711_101 PE=4 SV= 1
MKVNSICIVGGGTAGWMSAATFSRVFPDKKITLVESPSIATIGVGESTTQFFRKWLNFIDLDDSWMEECDATYKFSVRFENFNEEDPFHYPFTTKDSRKDPTAWFIHKAITPGLSVSDYADWYAPQMKAVNEGRIPTQDFDRFVLKRDTGFHFDATKFATWLKNNLCQNVEHIEADVISADLDESGNIESLHLDNDSLLKADLFIDCTGFRSYLINDIMKTPWETFDDMLPNDSAWTVRLPYTDKKSQMRTYTNCTALNNGWVWNVPLRNRIGTGYNYSSKFISDEDALEEFKEHLGYPKKTLCEYRNIKFKTGISKKPWNKNVLAIGLSGGFIEPLESNGLLSVHEWLIYASQIIGDNAVRALDINAFNFTVTKEFKTFAYFVYYHYALSSRTDSPYWKYMTEQYDGHGDLHDEYLYKTRKATTPLNKLEYEKFTYTNYSGESFIMAGHGYNPFNLVTLRLLETENIIDKGSYISLDNYKHYDGLVNTFPFAHEYYES

SEQ ID NO: 90558 - protein, 478 aa, Unknown
  misc_feature (1)..(478): tr|A0A140IER1|A0A140IER1_9CAUD Tryptophan halogenase OS =Cyanophage S-RIM44 OX=1278485 GN=Np050604_203 PE=4 SV= 1
MKIVVVGGGTSGWIVTHYLSGTHHCINISTKEIPTIGVGEGTTGKFPAMIGGDKTELMIELDALPKLGIKFNGWSKTSDYFWSPIDGSGTANYYIDYSTFSQYFTGYKPLTCSQYTVLMEDGLTNYSYEKDFLVGNWDHHALHIDAYKTAEYFKKISLDSGAVHVEAKVVKVNREKNAITSLELDDGSTVTGDVFIDCSGFSRVLNSHLDWIDYSEYLPVNSAVVYSAPETEKKPYTVAQAMKYGWTWEIPTRNKTGRGYVYSDKYASEDDILDELGDVEKIKSIKFTSGRIKQFIDSNCVSIGLSSGFLEPLQATSIHCALMQLELFFYSFPTKQSLLCEDNTSRYNNLIAALYDDMRDFVSLHYSGGKTDSDFWKDITCTERVHEILNICKARLTRSFDFTHVPGTVKQESWNPILAGLGHFDKSLVMDVFASDGATMNWWMGKTDTFIQEVSGTSQNFLTPDQLNAIITQVTDGL

SEQ ID NO: 90559 - protein, 523 aa, Synechococcus phage
  misc_feature (1)..(523): tr|A0A1Z1LWL6|A0A1Z1LWL6_9CAUD Putative tryptophan halo genase OS=Synechococcus phage S-H35 OX=1983572 PE=4 SV= 1
MMKTEKIVIVGGGTAGWMTAATIVATHPYKQITVVESPDVPRIGVGESTLQLLRSWMHVVGIQDSDFMAACDATYKLSVKFTGFSNENDKTGFHYPFGSPHFFPDSYSGLNDWRMKKALYPNTPVQDFAKSYYPQMALIDAGKLDYNEEGKFGNFDVKQDSAFHVDAVKFANWLRDEYCIPRGVNHIPATVTSVDVGEEGIERIYLDDAGRFITSDVYIDCTGFKSLLIGDALGEEFVSFNDQLPNNRAWAARVPYSDKETEMKPYTDCVALSNGWVWNTPTWTRIGMGYVYSDNYVSKEDALQEFKDHLVSLGKEIDDLEFRDLSFRVGIHKRTWVKNCIAIGLSAGFMEPLEGNGLLTIHEFALKLVRILGREYITQYDRDIYNTAVFKYFSEFADFVSAHYVFSQRRDTPYWKDTAKIPLNHRGMACDGARFMGLSVLKDNPEEYYDGMNFVAIGLGYDRITPSMLKEIEFYNNINAESIVGKIDYQWNQMKAKLHEFARECPSHYQFLKDGIYANVPEE

SEQ ID NO: 90560 - protein, 359 aa, Unknown
  misc_feature (1)..(359): tr|A0A1D7SIP3|A0A1D7SIP3_9CAUD Tryptophan halogenase OS =Cyanophage S-RIM14 OX=1278423 GN=Np111211_025 PE=4 SV= 1
MKVAVLGKGLAGVLTALYWRHYSPKTEVELYYDEEIDTEPVGSGSFPGLTGFLADTFGWSLNWHDNPWKATPKFGIKYEGWGDKNEWFHPFNFDEVGMHLDPHLFQDFICDTGIFKVTQKHIETYDECDADYVYDCRGFPTDYTDYNIIANPLNRVMLSNMPNPDNVPWTRTVTTPDGWTFVIHLQDRVQYGYLYNGDITSDTEAEINFKEQFGVDNITATFPFRNYYAKSPIIDNRVFLNGNRYFFIEPMEATSVAGYMKWIELTMEAIWGEKPIQKIEYDMQRSIKENANFILYHYKFGSKYDTPFWDYAKSLELSDSFIQNIIDGDIRTNMVTYGFHTSQSVMNMYDNLGRIYKPV

SEQ ID NO: 90561 - protein, 495 aa, Synechococcus phage
  misc_feature (1)..(495): tr|E3SL43|E3SL43_9CAUD Tryptophan halogenase OS=Synecho coccus phage S-SSM7 OX=445686 GN=SSSM7_125 PE=4 SV=1
MKRIKRLVIVGGGTAGWITASWFARRWSKHFEVVIIDKSQPERIGVGEATLLSFPNVMKMMGYKPSDWMREVDATFKSGILFPGWGHEDAEIWHPFSFTSVGDTKVPLYDLWQSFQEKYDLKNISPMYNSSLKNKIETNYVHDSYAFQLDCGKLVQFLMRHTTPYCKYIQSDVVDIIRDGQSDDITKSNIKELVLDDGSRIDADIFVDCTGWKQLLVGKDNVDLSDRLYINAALAGRVKYEDYRKEQHPYTACPAQEHGWIWKIPTRSRIGTGYCFNRDINDPDEVRQAFSDHWNGRIKPDEMRLLDWKPQYVKNFWVGNVVPIGLSAGFIEPLESTGLALMIRGVEYLEESLYGGYFNSKVEAPFYDAKMKCSYESAVDYVNMHYSYCRRKGRFWDYVRSKYQKSATQKLFEEYIQDPNVRTPQTGKVGSFFDGTNYQVWLLQLMTDKINSKEYWKTDTTVIPRLDNFVENTLVQNQLNSIDQSQYITHLDTLE

SEQ ID NO: 90562 - protein, 507 aa, Unknown; identical to SEQ ID NO: 90552
  misc_feature (1)..(507): tr|M4T1E3|M4T1E3_9CAUD Tryptophan halogenase OS=Cyanoph age Syn10 OX=536472 GN=CPUG_00132 PE=4 SV=1

SEQ ID NO: 90563 - protein, 464 aa, Pelagibacter phage
  misc_feature (1)..(464): tr|M1HLT6|M1HLT6_9CAUD Tryptophan halogenase OS=Pelagib acter phage HTVC008M OX=1283076 PE=4 SV=1
MDTTAKKILVMGGGTAGWLTALYLTKTFPQHHITLMESKPIGILGAGEGSTPHLVAFLNMLGVDLNELLKECKGTIKQGISFENWNGDGEKYFHPFAVQNKYKHFSIDNLFGYDSYDYYLKHLIHRKMPLKEHTYASIQSYKNVVDTDNIDNSIHFDAHLLADYLKKITKVDKHIYDEIKTTQQDEHGNITKINNVECDLVFDCTGFRRELIGKLYKSEWKSYQDCLPIKRAIPFFLPPEDKPYTQAIAMKYGWVWKIPLQHRCGAGYIFDSDYITDEEAFAEAKEMFPDIEYTRTIKFDAGRFKQTWIKNCIAVGLSSGFTEPLEATSIWMATEQLKLLETFIDIMFTNDEDTKQDYNEVIANNNDMVMEFLHYHYMTKRDDSPFWKEFRNKNNLPDFNVKLSKIQKGNLRWYHTTGEKITSTFNLMSWLHVGEGLGLIKDISIKGYENLNPTVEEYGRHLPR

SEQ ID NO: 90564 - protein, 527 aa, Synechococcus phage
  misc_feature (1)..(527): tr|A0A1D8KSE7|A0A1D8KSE7_9CAUD Putative tryptophan halo genase OS=Synechococcus phage S-WAM1 OX=1815521 GN=P090 810_034 PE=4 SV=1
MQVRNVLIVGGGTAGWMTAAALLKLCPHIKTSLIESPNYPTIGVGESTLGQINDFFQILGLKDEMWMKDTGSTYKVNIRFNDFYKKGETWDYPFGSAQERLELCPHGWMSWFALNLLQPEKYPRRSFARLHNLVGQLAHYNKLTDQQPFQFEQDTAYHMDAIKFGQWLKNNWCLPMGLEYIQGDVEVCHKDERGWVQSLQTSDGRKLEYDLYVDCTGFKSLLLEKFMGEEFVSFHANDGGCLLNDTAVTCHMPHEDKEKEITNSTNCTAIDNGWVWDVPLWERSGVGYVHSKDFTDDPELELYNYLCKTRGSKRAGQASFKKVPFKNGKHKRSWVKNVCAVGLSNCFVEPLEATGLLTTHEQIVRLCNVLAGREGIVPRVEVDMLNLVCDLEIEGFKNFVAAHYAFSARQTKYWEEVSDHIQYDFSTGALDNLFMRYASEKHVIYEFAGDPAHNDGLRYIAAGMGYNPINKHTLHLKRLQNGLIPEVDEQEITTADLRFDEWEEEMYDWCSKLPSSYEFLKQTIYKE

SEQ ID NO: 90565 - protein, 478 aa, Unknown
  misc_feature (1)..(478): tr|A0A1D7SDE5|A0A1D7SDE5_9CAUD Tryptophan halogenase OS =Cyanophage S-RIM44 OX=1278485 GN=ES420910_208 PE=4 SV= 1
MKIVVVGGGTSGWIVTNYLSGTHHCINISTKEIPTIGVGEGTTGKFPDMLGVDKTELMIELDALPKLGIKFNGWSKTSDHFWSPIDGSATANYYIDYSTFSQYFTGALPTSCSKYSVLMEDGLTNYSYEKDFLVGNWDHHALHIDAYKTAEYFKKISLDSGAVHVEAQVVKVNREKNAITSLELDNGSIITGDVFIDCSGFSRVLNSHLDWIDYSEYLPVNSAVVYSAPETEKKPYTVAQAMKYGWTWEIPTRNKTGRGYVYCDKYASEDDILDELGDVEKIKSIKFTSGRINQFKDSNCVSIGLSSGFLEPLQATSIHCALIQLELFFYSFPTKQSLLCEDSTSRYNNLIAILYDDMRDFVSLHYSGGKTDSDFWKDITCTDRVHEILNICKARLTRSFDFPHVPGTVKQESWNPILAGLGHFDKSLVMDVFTSDGATMKWWMSKTDEFIREVADKSQNFLTPDQLNAIISSVSGRL

SEQ ID NO: 90566 - protein, 523 aa, Synechococcus phage; identical to SEQ ID NO: 90559
  misc_feature (1)..(523): tr|A0A2S1GL10|A0A2S1GL10_9CAUD Putative tryptophan halo genase OS=Synechococcus phage S-B64 OX=2163901 PE=4 SV= 1

SEQ ID NO: 90567 - protein, 491 aa, Synechococcus phage
  misc_feature (1)..(491): tr|A0A0M6VY55|A0A0M6VY55_BPSYP Tryptophan Halognenase O S=Synechococcus phage S-PM2 OX=238854 GN=S-PM2d167 PE=4 SV=1
MKIVIVGGGTAGWIASYYLSKTHQCINISSEEIPIIGVGEGTTGKFLDILAEDRIKLMIELDALPKLGIKFEGWSKTKPYFWSPIDGTLTQKYYIDYSTFASSFADLSPCHCSDYGFLLENGKTNFYIEENNLICNWDHHALHLDAYKTAEYFKKESIDNGVEYYDAKVLTTNREYGNITSIELDNGLKIDADLYVDCSGFSRVLNNHQEWIDYTYYLPVNRAVVFSIEELTPRKEYTLAKAMKYGWVWEIPTRHKVGRGYVYCDKYASEDDILFELREVYGSIEKLKSIEFSAGRINNFMDGNCLSVGLSSGFLEPLQATSIHCALIQIELFSYSFTTKDHLLDCNSVKRYNQLIARLYDDMRDFVSLHYTGGKTDTEFWSSFVHPERVQTILDLSNSRLTRSFDFEHTPGTVKQESWNPILSGLGHFPKCLISQVFAADNATIHWWLREIYNHQQSINMISPKYLSANDLNEILIKYSLGMTLKAPWSV

SEQ ID NO: 90568 - protein, 359 aa, Synechococcus phage; identical to SEQ ID NO: 90542
  misc_feature (1)..(359): tr|E3SJS9|E3SJS9_9CAUD Tryptophan halogenase OS=Synecho coccus phage S-ShM2 OX=445683 GN=SShM2_028 PE=4 SV=1

SEQ ID NO: 90569 - protein, 478 aa, Unknown
  misc_feature (1)..(478): tr|A0A1D7SHM0|A0A1D7SHM0_9CAUD Tryptophan halogenase OS =Cyanophage S-RIM44 OX=1278485 GN=W2100709_204 PE=4 SV= 1
MKIVVVGGGTSGWIVTHYLSGTHHCINISTKEIPTIGVGEGTTGKFPAMIGGDKTELMIELDALPKLGIKFNGWSKTSDYFWSPIDGSGTANYYIDYSTFSQYFTGYKPLTCSQYTVLMEDGLTNYSYEKDFLVGNWDHHALHIDAYKTAEYFKKISLDSGAVHVEAKVVKVNREKNAITSLELDDGSTVTGDVFIDCSGFSRVLNSHLDWIDYSEYLPVNSAVVYSAPETEKKPYTVAQAMKYGWTWEIPTRNKTGRGYVYSDKYASEDDILDELGDVEKIKSIKFTSGRIKQFIDSNCVSIGLSSGFLEPLQATSIHCALMQLELFFYSFPTKQSLLCEDNTSRYNNLIAALYDDMRDFVSLHYSGGKTDSDFWKDISCTERVHEILNICKARLTRSFDFTHVPGTVKQESWNPILAGLGHFDKSLVMDVFASDGATMNWWMGKTDTFIQEVSGTSQNFLTPDQLNAIITQVTDGL

SEQ ID NO: 90570 - protein, 478 aa, Prochlorococcus phage; identical to SEQ ID NO: 90558
  misc_feature (1)..(478): tr|E3SPT6|E3SPT6_9CAUD Tryptophan halogenase OS=Prochlo rococcus phage Syn1 OX=444861 GN=Syn1_205 PE=4 SV=1

SEQ ID NO: 90571 - protein, 377 aa, Unknown
  misc_feature (1)..(377): tr|A0A1B1IU55|A0A1B1IU55_9VIRU Tryptophan halogenase OS =uncultured Mediterranean phage OX=1868660 PE=4 SV=1
MPKIAVVGGGNAGCFTALYCAWRGKQTNSEVELIYNPNIPPEKVGQATVLEPPGLLWATTGFNWYNNNINATMKSGILYEGWGKVNKKVFAPFPSDSMAMHYCPWEMQKSILQSGHFKVTEGNVDPEDVDADFVFDCRGKPKDFLEYEELKNPTNACILGEPNWNTAKNPWSRHVATPDGWAFVIPTRKKSPSHQYSVGYCYNSTITPKEEAEYNFLEMFNVEVTNHIDYKNYVAKNPIKDGRIFLNGNRLFFLEPLESSSTQTYIEMARAVFDYYLQEKCSAEFVANDIKNYINQLKNFVLWHYQFGSKYDTPFWDYAKAFRFEDPTFDKFLGYSQISDCIPTSKYGGATRDKFYGQWPAYYFKVWNEGMNIKLNT

SEQ ID NO: 90572 - protein, 495 aa, Unknown
  misc_feature (1)..(495): tr|M4PSJ0|M4PSJ0_9CAUD Tryptophan halogenase OS=Cyanoph age S-SSM6a OX=682650 GN=CYVG_00298 PE=4 SV=1
MKRIKRLVIVGGGTAGWITASWFARRWSKHFEVVIIDKSQPERIGVGEATLLSFPNVMKMMGYKPSDWMREVDATFKSGILFPGWGHEDAEIWHPFSFTSVGDTKVPLYDLWQSFQEKYDLKNISPMYNSSLKNKIETNYVHDSYAFQLDCGKLVQFLMRHTTPYCKYIQSDVVDIIRDGQSDDITKSNIKELVLDDGSRIDADIFVDCTGWKQLLVGKDNVDLSDRLYINAALAGRVKYEDYRKEQHPYTACPAQEHGWIWKIPTRSRIGTGYCFNRDINDPDEVRQAFSDHWNGRIKPDEMRLLDWKPQYVKNFWVGNVVPIGLSAGFIEPLESTGLALMIRGVEYLEESLYGGYFNSKVEAPFYDAKMKCSYESAVDYVNMHYSYCRRKGRFWDYVRSKYQKSSTQKLFEEYIQDPNVRTPQTGKVGSFFDGTNYQVWLLQLMTDKINSKEYWKTDTTVIPRLDNFVENTLVQNQLNSIDQSQYITHLDTLE

SEQ ID NO: 90573 - protein, 506 aa, Halobacteriales archaeon
  misc_feature (1)..(506): tr|A0A2R6IMD8|A0A2R6IMD8_9EURY Tryptophan halogenase OS =Halobacteriales archaeon QS_4_69_31 OX=1919176 GN=BRC9 2_02380 PE=4 SV=1
MSERIDSVTVLGGGDVGLLTALALRQYNPGLDVKVIDDFSRDIPQVGKSTYKKITDILHQHLGIDEREFVTEVKPVWKASVYFRDWCDSESFHYPFDEAVKYPDEDRPDAIEWLYYHYSELYDSPDHRTANEERVEQRKSPWFYSPQQGGHDIYPHAAYHLNTERFNGYLRELCRDRGVSLVNDEVTGVDVSGARVERVRSKSQTYESDLFVDATGFNRVIRGEIDAEFREFPLPLDTAFNVRVDRDLSEVIPATVVDSGEYGWFWTIDTYDNRDRGYVFASEYVDDDAALAEFLDEVDDSVTGDDVAKYEFNSGYYPQAWEDNLVALGNAEGFVEPLQSTGLTANAHAAVRLSQFLSEHGRVNDAAVREDYNTFVRQGWESIYDFVAVHYRYGDGDTAFWEDVTTMDVSRRVELLEEAFDRRGFVGNIEAAKRRGEIDRLRVFLPRNFFLIMRQQDATSEFYEEHDFEVSHETKQQLDEYYRQMREDVETYLTTEEMYRGPLAGM

SEQ ID NO: 90574 - protein, 540 aa, Leucoagaricus sp.
  misc_feature (1)..(540): tr|A0A137QPR6|A0A137QPR6_9AGAR Tryptophan 2-halogenase OS=Leucoagaricus sp. SymC.cos OX=1714833 GN=AN958_05927 PE=4 SV=1
MSSTVPAETTVLIVGGGPAGSYAASVLARHQINVVILEAAKFPRYHIGESLLASTNYFLEYIGAREKVLSYGFVRKPGGAFKLRKDFPPAYTDFTDYNTGNHALNVNRAEYDDLLFRHAGEQGANIFDQHRVTELEFSEQDGTRPVAAKWESNVNGTKGTIQFDYLIDAAGRQGLLSTKYHKDREITKSLKNSAIWAYWKGAKRYGERTERYGAPFIEALPDNTGWCWYIPINDGTISVGFVIHEEFVQEKRTGKTLEEFYLSQFDILTEVPELKGNATMAPNKKGEGGPVYMARDYSYASEDIGRLNYRLVGDSAAFIDPFFSSGVHLAFVGALSAAVSIIAVIGGDADEESAAGFHNAELKVAYTRHAFPMYRYLHLFTHITPFHRFFMVVMAGYKQMRGGLNVDVLNDVDEQTFDRAFDIIRPVIQGTSDVGIDKRSTGDADLNEKEVQATMDFIFRLFSHPPPGQQVVPHEDDGLDGNVDDLDRDARARLKSFSLYVPLLHGHDGVMHILESAQEKMRFSMKGAAATQVKTTPAQA

SEQ ID NO: 90575 - protein, 534 aa, Leucoagaricus sp.
  misc_feature (1)..(534): tr|A0A137QI92|A0A137QI92_9AGAR Tryptophan 2-halogenase OS=Leucoagaricus sp. SymC.cos OX=1714833 GN=AN958_09430 PE=4 SV=1
MVSIPSQTKILVIGGGPSGSLAACALAREGFEVTLLEADSFPRYHIGESLLPSVRPFLQFVDAEKKVIEHGFCPKPGAAIKFNQHKREGYTDFIARGPEFGSWNVVRSEFDNIIFRHAEASGAKVFEKVKVSAIEFEKQGDPKSRPIAATYQTVDGKDGRIAFEYLVDASGRNGVMSTKYLKNRHTNESLKNIAIWGYWENFGRYKPGTNRENAIWIEALTDESGWAWFIPLADNLVSVGLVINHAQSITKRNAFREKSGNPDSTLQDFYLDQVKLSPGLWNDFIPKAKMVEKEGGPMVRQASDYSYSANGYAGIGYRLIGDAACFIDPFFSSGVHLAFTGGLSAAGTIASSIRGITSEEECAKWHDAKVSVSYTRFMLVVLGAYKQMRNQKFDILSDVGADNFDRAFDLLRPIIQGTADVNKKVTEDEVQDTMDFVKNVFAPTDPELEAAVKQRVDPKFFEGEESDIILPSQTQEMFEDEDVRHVMDVINARKPVHKMYDTQRDFGSEPINGYTLNLVRGELNLIKPEGITGA

SEQ ID NO: 90576 - protein, 355 aa, Leucoagaricus sp.
  misc_feature (1)..(355): tr|A0A137Q1J7|A0A137Q1J7_9AGAR Tryptophan 2-halogenase OS=Leucoagaricus sp. SymC.cos OX=1714833 GN=AN958_06178 PE=4 SV=1
MRHFLRYIDADDKFNSFGFSQKHGAAFKFNPRKREGFTNFVSENPNNYAWNVTRADADALLLDRARELGVQIYENHRVTEIQFSKPSAAKVNATQAQNESQEPQNLPVSVTWKNVATGQIGTIAFDWVVDASGRNGIISRALGLRKYNQSLKNIAYWGYWTGTQEYRHPACEIQLPFFEALHDESGWAWFIPLHDGKVSVGIVMDENVSKSKKASMEKKGDESLTLRHYLQELSANATKIKSFISQGTLMEYSGTKIRTASDYSYSGSSYAGLNYRIVGDAGAFIDPFFSSGVHLAISGGLSAAATIAAAMHSECTAAQAADWHNQRVATSYMRYTMRPKLCVSSAELELVRQVL

SEQ ID NO: 90577 - protein, 499 aa, Madurella mycetomatis
  misc_feature (1)..(499): tr|A0A175W668|A0A175W668_9PEZI Tryptophan 2-halogenase OS=Madurella mycetomatis OX=100816 GN=MMYC01_203701 PE= 4 SV=1
MLASIRYFLRFIGLESKFDNHGFVKKLGASFKLNDKREAFTNFVAVNGPNGYAWNVVRSESDLLMLQHASESSAHTFDGTKVESIEFESTSSSQHPKQPVAAKWSRKDGLSGTISFDYLVDASGRAGIMSTKYLKNRKFNEGLKNVATWGYWKGARTYALGTEREGQPFFEALDDLSGWCWAIPLHNDSLSVGIVMRQDESSRRKKALGSPNTVDFYKQCLNLSPIILDLLSEAELSSPIRAASDWSYSASCYAGPNLRIVGDAGCFIDPFFSSGLHLAIAAGLSAAMTIQAARRGDCDKATAAKWHSSKVTEGYTRFLLVVMMALKQIHSGSVPVLSDFDQEGFDRAFGFFTPSLADADVGGKLTQARVSETVAFCLNAYNQITPQDRNAVLDKLARVRADSYRETREDLEKLTEDELKILRTIRARQMIRTEDTLNIDHFSEDAIDGYAPRLKRGELGLDKVEQWDEIPRYTESLLDVIKEAEDGTERVVHRAEPEQ

SEQ ID NO: 90578 - protein, 456 aa, Ophiocordyceps sinensis
  misc_feature (1)..(456): tr|T5AB59|T5AB59_OPHSC Tryptophan halogenase OS=Ophioco rdyceps sinensis (strain Co18 / CGMCC 3.14243) OX=91116 2 GN=OCS_01618 PE=4 SV=1
MSARSRCTVLVVGGGPAGSFAAAALARDDIDVVLLEADSFPRYHVGESMLPSMRYFLNIIGLYDTFDAHGFTRKNGAAFRFNRSQPEAYTDFIAADKSGYAWNVIRSQADELLFRHAGKSGALTFDATKVDSVQFDSDYRDEGIIGHGGHLGRPVSAKWSRKDGSSGAISFQYMVDASGRSGLLSTKYLKNRTINPNLKNIAHWGYWKRGATFAPGTRMQGAPYFEALTDASGWCWFIPLHDGTTSVGVVQNLETAVAQKRQKGSPSTKDFYLQSLDLAPGIKELLCAATMGGDVKSASDWSYHASSYAFPHARICGDAGCFIDPLFSSGVHIALVGGLSAAVTIAASVKGHCSEARAVSWHTKKVTESYMRFFLVAPPMLMALALCLVLVKVKAIKEFEKNLTEDESREIKYILGFVEEMVNIDNFAVNSVDGLVPNLERRHLGLEAEKVKCVRL

SEQ ID NO: 90579 - protein, 567 aa, Leucoagaricus sp.
  misc_feature (1)..(567): tr|A0A137QV64|A0A137QV64_9AGAR Tryptophan 2-halogenase (Fragment) OS=Leucoagaricus sp. SymC.cos OX=1714833 GN= AN958_03150 PE=4 SV=1
HTQVLVIGGGPAGSYAASALAREGINVTLLEASKFPRYHVGESLIPSVRHYLRFIGAEDKLANYGFVRKPGSAIKFNQFKREGYTDFVALGHNNNAWNVTRSEFDQLLLNHARSSGAAVYEQTKVDSIHFDPSNPERPVSVSWTHTPPPEPSNGVGPIQGTTAFTHVIDASGRAGLMSTRYLHNRRFNASLKNIAVWGYWTGVGSYGEGTKRSGAPWFEALTHFCCYSSHLSFLDESGWAWFIPLHNGSTSVGIVVNHKVCNAKADNLPPAPFNGKQTPNAAASALAARYIANLSFAPGVVSLIGEGKLIEGSVKIASDFSYSAPFYAGSNYRIIGDAGAFIDPFFSSGVHLAMTSALSAAATICASIRGDCSEALAASWHTQRVATSYTRFQVVVLSAYKQIRSQTDGILSDIDEDNYDRAFAYLRPVIQGASEMGARLSESELQKSLDFCVKLFDPTTPEDHERASFMNGLSRDLLDVNTPIIDPDVLEKTLGVEYFTPLSEEDSGSDTEKAVETKMVLHKVNARRLIHSEYTINNMELENLEGYVVRLERGKLGLVKTSSATDN

SEQ ID NO: 90580 - protein, 529 aa, Leucoagaricus sp.
  misc_feature (1)..(529): tr|A0A137Q2Z6|A0A137Q2Z6_9AGAR Tryptophan 2-halogenase (Fragment) OS=Leucoagaricus sp. SymC.cos OX=1714833 GN= AN958_04232 PE=4 SV=1
PTQTKILVIGGGPSGSFTASALAREGFDVTLLEADSFPRYHIGESLLPSVRPFLQFIDAEKKVIEQGFCSKPGAAIKFNQHKREGYTDFIARGPEFGSWNVVRSEFDNIVFRHAAASGAKVFDKVKVSTIEFEKQGDPKSRPIAANYQTADGKEGRIAFDYLVDSSGRNGVMSTKYLKNRHTNESLKNIAIWGYWENFGRYKPGTDRENAIWIEALTDETGWAWFIPLAENLVSVGLVINHAQSITKRNAFREKAGADSTLQDFYLDQVKLSPGLYNDFIPNAKMVQKEDGPMVRQASDYSYSANGYAGIGYRLAGDAACFIDPFFSSGVHLAFTGGLSAAGTIASSIRGVASEEECAKWHDAKISISYTRFMLVVLGAYKQMRSQQIDILSDVGADNFDRAFDLLRPIIQGTADVNKKVTEDEVQDTMDFVKNVFAPTDPELEAAVKQRVDPKFFAGGESDIILPSQTQAMFEDEDVRNVMDAINARKPVHRMYDTQRDFGSEPINGYTLRLVRGELQLVKTEGIVGA

SEQ ID NO: 90581 - protein, 540 aa, Leucoagaricus sp.
  misc_feature (1)..(540): tr|A0A137Q7F2|A0A137Q7F2_9AGAR Tryptophan 2-halogenase (Fragment) OS=Leucoagaricus sp. SymC.cos OX=1714833 GN= AN958_01765 PE=4 SV=1
LTKTLQPSFSSVLVIGGGPAGSYSAACLVQEGFSVTLLEAETFPRYHVGESMLPSMRHFLRYIDADDKFVSFGFVPKHGAAFKFNAHKREGFTNFVSDSPDNYTWNVTRAEADALILDRARELGVQIYENHRVTEIQFSQPITKTSKHDDALPATATQAQNESSDPSQSLPVSATWKNVTTGQVGKITFDWIIDASGRNGLISRALGLRKYNQSLKNVAYWGYWTGTQEYRHPGCEVQPPFFEALHDESGWAWFIPLQNGKVSVGVVMDENVSKRKKTSLEKKGDESPILRHYLQEISANAPKIKSFVSEGALIEHSGGPKVRAASDYSYSGSSYAGPNYRIVGDAGVFIDPFFSSGVHLALSSGLSAAATIAATVSSECTASQAADWHNRRVGTSYTRFLMIVLSAYRQMRAQELPVLSDIDEDNFDRAFDLFRPVIQGDVDVKKGLSEDSIRKTIDFCTQAFEPASLEDWHKEGDNSKTEEDEISEETKARAAQRMADVIAAKKTLRAEDMFHIGKFVADKFNGFSIRLEKGRLGLEA

SEQ ID NO: 90582 - protein, 141 aa, Aspergillus sclerotialis
  misc_feature (1)..(141): tr|A0A3A2ZBX7|A0A3A2ZBX7_9EURO Tryptophan halogenase OS =Aspergillus sclerotialis OX=2070753 GN=PHISCL_08851 PE =4 SV=1
MAPRTKELLSEAEVVTDVKSASDWSYTASAYHLPNARICGDAGSFIDPLFSSGVQLAVTGGLSAAATIAASIRGDCDEQTAGSMHSKKTIENYTRFSLAATSATKQIREQYQPIIQDMDEEGFQRAFDSQLSLLSVASFRS

SEQ ID NO: 90583 - protein, 580 aa, Madurella mycetomatis
  misc_feature (1)..(580): tr|A0A175WGW2|A0A175WGW2_9PEZI Tryptophan 2-halogenase OS=Madurella mycetomatis OX=100816 GN=MMYC01_200772 PE= 4 SV=1
MRPSAIPEKCTVLVIGGGPGGSYAASALAREGIDVVILEGDTFPRYHIGESMLASMRHLLRFVELDSKFDAYGFTKKPGAAFKLNRHKREGYTDFLAAGGPNNYAWNVVRSESDNLMFQHAAENGARVFDGVQVKSIQFEDPTQAPEGEPNLNPGRPVAATYTVKNTGVTGTIAFDYVVDASGRVGILSTKYMKNRRYNQGLKNVANWGYWEGCGRYAPGTSRENSPYFEALQDESGWAWFIPLHDGTASVGVVMNQKLATEKKKNSPGGSMDSATFYHESLKLAPNLLAIMGEGANFRTETKVKSAADYSYSASSYAFPYARIVGDAGCFIDPYFSSGVHLALVSGLSAATTICASIRGDTDESAAADWHSKKVSDAYTRFLLVVLSAYKQIRHQEEPVLSDFDEDNFDRAFSFFRPIIQGTADAAGDRLSQEELNKTLEFCAYAFEPVNGLGDEGEEAVRKAVGKDKDVYNGTDYHPDLSPEQLKSVNHIRARKMMRTEDTMNMDSFGTDVIAGYVPRLVRGGLGLRKQPVNGTVNGNGTMSGNGVGNGNGIVNKNEMMNGNGVVNGNGKVNGNGHAA

SEQ ID NO: 90584 - protein, 908 aa, Leucoagaricus sp.
  misc_feature (1)..(908): tr|A0A137QAN7|A0A137QAN7_9AGAR Tryptophan 2-halogenase OS=Leucoagaricus sp. SymC.cos OX=1714833 GN=AN958_12776 PE=4 SV=1
MRLTVLSQNWTGSVSIFHNNVTFILQHKIDKAPNFLDDITLLGPRTCYKKPDSTYETIPKNPNIQHFILKEKEKEVMEIRKFLEIMRSPEGLTNKTKQTFLCYAGKFFVQDRKIFGPMLVGVFLNTILYGVLTVQSFIYYQTYKNDKAWIRYLVLYLFFVETLNTGFDIALIYEPLVLRFGTMEAVTNIPVMLMSVGAYSAAIGTSVTGSLTYPSLQRMSPAIITWLVSSAMADVIITASLVYHLVYSNCHLQQYRRKTGVRATDDIINRIMRLTIQTGMITALFAALDVISFLALPNTSMNFLWDFPLSKLYTNSLLSTLNARAGWNNLVVDDQHNVLFGTDNSRTMVRTMATGKSSSRTSTNPQKIITGVYELGTPSISAQAKDSADLEQGPKRTTVLVIGGGPAGSYASTLLAREGLDVVLLEALKHPREHVGESMLPSMRHYLRFIDLESEYDRRGFLHKPGAIFKFVHGARECYSDFGLLGPDKRTWHVYRAEADQVMLWHAAQQGVKVFEEVRVESIDFEGGNTNSPRPVSAAWKSKLGESGTISFDWLIDASGRQGLITTKYLKNRIYREGLRNVAAYGYWNNVPIFEEGGPRQNATWIECLTDKRGWAWFIPLHNGMTSIGVVMHQETSNQKKAAGPSGLEAHYLEQLKLAPGVLGRIGDKGIYIPGSLQSTADYSYHATSYSGDHYRIIGDAAAFVDPLFSSGVHIGMTGALSAACTILGSMKGQVTEDEARAWHDAKIGISQTRFLLVVLSAYRQMQHQGNYAALGDFNPNDFEPAFELFRPVYQGEHDVEKKLSNEELERMINFTRNFFLPITYEQYEDVNARFGHLTAINGPVMGPEDLAKVLDEDDSDAKAVLQRINALKVLSNEVGSSGFTSEAVNGYVMTMERGRLGLAKAKC

SEQ ID NO: 90585 - protein, 521 aa, Aspergillus sclerotialis
  misc_feature (1)..(521): tr|A0A3A2ZBE3|A0A3A2ZBE3_9EURO Tryptophan halogenase OS =Aspergillus sclerotialis OX=2070753 GN=PHISCL_08084 PE =4 SV=1
MPIPDKCTVLVVGAGPGGSYAASVLAREGIDTVLLEADVFPRYHIGESMLPSMRHYLDFIDLYPKFNSHGFVRKNGGAFKLNSGPPSYTDFIAAGGTENHAWNVIRSESDDLLFRYAGESGAKIFDGVKVNSIQFMRYNSGNKTKDSAAVDLGRPVSASWISKDGSSGAVRFDYLIDASGRAGLVSTKYMKNRKYNSGLRNIATWGYWENVGTYGIGTTAEDAPFFEAFQDGIGWAWTIPLHNQTSSVGVVMKQTHYATKKKQGRLSNRDIYLESIKEAPGVAKLLEAATLKSDLKSTSDWSYSASTYASPYLRIVGDAGCFIDPLFSSGVHLALTSGLSAALTVCAARRGDCTEDAALNWHTRKVAEAYTLFLLVVASALKQIGGRDEHILNNWDEYGFDRAFELFKPIIQGTVELAGKLTKPEIDKSVDFCISVLKKVGNGLPTNTANSSSASLQANALGEEAVQNIVQMRRVPDLNAFRVDVINGMAPNLKRGSLGLIPVMKRNAGRSTTTKENRHKL

SEQ ID NO: 90586 - protein, 533 aa, Leucoagaricus sp.
  misc_feature (1)..(533): tr|A0A137Q2V9|A0A137Q2V9_9AGAR Tryptophan 2-halogenase OS=Leucoagaricus sp. SymC.cos OX=1714833 GN=AN958_04392 PE=4 SV=1
MASIPTQTKILVIGGGPSGSFTASALAREGFDVTLLEADSFPRYHIGESLLPSVRPFLQFIDAEKKVIEQGFCSKPGAAIKFNQHKREGYTDFIARGPEFGSWNVVRSEFDNIVFRHAAASGAKVFDKVKVSTIEFEKQGDPKSRPIAANYQTADGKEGRIAFDYLVDSSGRNGVMSTKYLKNRHTNESLKNIAIWGYWENFGRYKPGTDRENAIWIEALTDETGWAWFIPLAENLVSVGLVINHAQSITKRNAFREKAGADSTLQDFYLDQVKLSPGLYNDFIPNAKMVQKEDGPMVRQASDYSYSANGYAGIGYRLAGDAACFIDPFFSSGVHLAFTGGLSAAGTIASSIRGVASEEECAKWHDAKISISYTRFMLVVLGAYKQMRSQQIDILSDVGADNFDRAFDLLRPIIQGTADVNKKVTEDEVQDTMDFVKNVFAPTDPELEAAVKQRVDPKFFAGGESDIILPSQTQAMFEDEDVRNVMDAINARKPVHRMYDTQRDFGSEPINGYTLRLVRGELQLVKTEGIVGA

SEQ ID NO: 90587 - protein, 603 aa, Metarhizium brunneum
  misc_feature (1)..(603): tr|A0A0B4FSQ5|A0A0B4FSQ5_METBS Tryptophan halogenase (F ragment) OS=Metarhizium brunneum (strain ARSEF 3297) OX =1276141 GN=MBR_07199 PE=4 SV=1
MAVPPSCTVLVIGGGTAGSYAAAALAREGIETVVLEADKFPRYHIGESTLPSLRHFFKFIDFYDTVDAYGFYHKNGAVFRLAQAQPDACKSPSPAYTDFLEAGGPDGYAWNLIRSEFDDLLFKHAGTCGAQIFSETRVDTIQFEPVANGLKPDNRNLEDHLNPGRPVSATWVREDGTSGSITYKYLVDASGRQGILSTKYLKNRKFNNNFKNAAIWAYWKSDNVYGPGTHMEGSPYFEALDGEFLTTGFAYILRHSLSSAGTNQQTDASGWAWFMPLHDGTRSVGIVQDQKMVTEKKHELGRPSTLDFYKQCLDMAPRIRELLSEAELIPHVRAACDWSYTASTYHLPNARICGDAGSFIDPLFSSGVHLAITGGLSAAATISASIRGDCSEAAAGSWHSKKTVESYTRFFLAVSSATKQIRTQYEPIIKDMDEKGFQRAFDLFRPIIQGTADADEAGKVSQLEISKILQFCFKAFTYVPPERKDALFDKLRKLDSKALQDDAKQVQTLNGIEKYLTADELQILEILRSRRMIREDPFEMDSFSLDTIDGMAPKLVRGSLGLVNYEQVKIDKAHFYSQDFLDGNCPGIREGSVHLPTSRVQLG

SEQ ID NO: 90588 - protein, 518 aa, Halobacteriales archaeon
  misc_feature (1)..(518): tr|A0A2R6DXU3|A0A2R6DXU3_9EURY Tryptophan halogenase OS =Halobacteriales archaeon QH_1_68_42 OX=1919146 GN=BRC6 0_08250 PE=4 SV=1
MPQENMGDEVSSVTVVGGGDAGLLAALAVRSVNPGLDVRVVDDFAESPTRVGKSTFQAVVPLLHDVLDIDEGRFLQTVRPVWKGSVCFRDWCGNDPFHYAFDVRSVKPDLDDPKSVESLYHYYETGDMSTPAEGIVDERKTPLVYSAAANAYVMYPNMAYHLSIGRFNELLRELCGERDVALVDDRVTDVRTNADDTYVERVAGEDAVYDADLYVDATGFKRLLMDRLDADYRSFDIPLDAAFHATADHDIEDTVPATVVESGEYGWFWQIDTYDHRDLGYVYSSEHVSDDEALAEFEAHREEVFADLERYEFDSGFYEDAWVGNCVATGNALGFIEPLQSTALTTHLNTSVRLSRQLAAHGHINDAGLRESFNRYVTGTWNSVYDFISVHYLFADAVNDFWADMQEIPTSDRVEQYLAYYDANGFELYDSEVVTEEGTQLGMLTFPTSSLYFLIRNMGAESTFYEEHDFSVSDEIKERWRQRNGYVTDLADQCLSYEQVYKSGVVDSYVRNDLCPTV

SEQ ID NO: 90589 - protein, 351 aa, Halobacteriales archaeon
  misc_feature (1)..(351): tr|A0A2R6H3X5|A0A2R6H3X5_9EURY Tryptophan halogenase (F ragment) OS=Halobacteriales archaeon QH_8_68_33 OX=1919 165 GN=BRC78_07100 PE=4 SV=1
MGDEVSGVTVVGGGDAGLLAALAIRRVNPGLDIRVVDDFAESPTRVGKSTFQAVVPLLHDVLGIDEGRFLQTVKPVWKGSVYFRDWCGNDPFHYAFDVRSVKPDLDDPRSVESLYHYYETGDMSTPAEGIVDERKTPLVYSAAADSYVMYPNMAYHLSIGRFNELLRELCGERDIALVDDRITDVETNAEGTYVERVAGADAVYDADLYVDATGFKRQLMDRLDADYRSFDIPLDAAFHATADHDIGDTVPATVVESGEYGWLWQIDTYDHRDLGYVYSSEHVSEDDALAEFEAHRDGEFTDLERYEFDTGFYEDAWVGNCLATGNALGFIEPLQSTALTTHLNTSVRLSR

SEQ ID NO: 90590 - protein, 513 aa, Haloferax sp.
  misc_feature (1)..(513): tr|A0A371LTZ2|A0A371LTZ2_9EURY Tryptophan halogenase OS =Haloferax sp. Atlit-4N OX=2077206 GN=C5C07_17540 PE=4 SV=1
MSDYDRTINEILVVGGGDIGLLTSLCIKKLNPDIDVAVVDDFSEDPPEVGKSTYQEIIDIFHEFLEIDEMRFLKEVKPIWKSSVFFRNWTEYGPFHYSFDDIQKYPDPNTSHFLDKAYLYYHELYSDPECQTINEWLVELGKSPINFEMTGEWSRYGPRAYHLDLNRFNEFLQTICGERGINLIDDIIETVETGDGRVTRVQSDQETYEADLYVDATGFRRVLLDEFDVPFRNFDLPLDAALSTKFERPLSEVEPATVIESGDNGWFWQIDTYEFRDVGYVYATDFVDAVSAKAEFVEYVDGDISADELECHEFQSGYYEQTWTGNLVAIGNAGGFIEPLQSTGLTSNTKNAVQLAHLLSAYGSADYPAARETYNGWVTRQWETVYDFISVHYKYANGDTPFWKQVQSMPVSERVTRIKDHFESCGYAVKIDPIQTPKTGQTPLIDSAVFPTVSYLTILRNLEVQSDFYETLDLDVSEEARTFLEEYYRGEKKDAEAFLTHEEFYKGVLFDPW

SEQ ID NO: 90591 - protein, 569 aa, Haloferax massiliensis
  misc_feature (1)..(569): tr|A0A0D6JMC9|A0A0D6JMC9_9EURY Tryptophan halogenase OS =Haloferax massiliensis OX=1476858 GN=BN996_00206 PE=4 SV=1
MERTGQTDAGNGNRQHGRRGDRGDGESPPPNSYDVVGGGSGMSASLTAMILGKHGLDVVMLEAGSHPRFAVGEAMLPQSSMWMWILGEYHGIPEIQYLSDTNEIVDNVTSSCGIKHSIGFAYHEPDRGVTADHSHQLIPPSLPFYSESHLLRSEVDQYLVAAAQRYGVEYVDETEITGVDIGRDEVSVTTERGVIEAAFYVDGTGGNSILAEKRGYRENAPELETDSRAIFTHVGGLAPFDELLDEAARPGQSNRLHDGTLHHVFDGGWMWIIPFDNFERSEANKVSVGLVLDRAQYPTDESVSAEREARRIIAEFPDIERHLESATPVRPWVRTGRLQRTASQSAGHRHYLTNNTYGFVDPLYAVGLVNTLESVFVSTNVLLDAFENGEFSATRFAPIDEMHRHQLATNDRVISNAYKSMGDFRLWNAWTQMWLGQVLFHDLYIQRHCFNYLATGRPDEFDSLLAEPSPGDGAPFVPQKSEMHRRMAEILDVYRAGDASADEAAGLLFAELRQADWLPKHIYDWGDERARHVDFSDPELVGKLIQWGKTESPDQLREGLFDFPVPEMA

SEQ ID NO: 90592 - protein, 526 aa, Halobacteriales archaeon
  misc_feature (1)..(526): tr|A0A2R6IBB8|A0A2R6IBB8_9EURY Tryptophan halogenase OS =Halobacteriales archaeon QS_5_68_33 OX=1919179 GN=BRC9 5_12065 PE=4 SV=1
MPQENMGDEVSSVTVVGGGDAGLLAALAVRSVNPGLDVRVVDDFAESPTRVGKSTFQAVVPLLHDVLDIDEGRFLQTVRPVWKGSVCFRDWCGNDPFHYAFDVRSVKPDLDDPKSVESLYHYYETGDMSTPAEGIVNERKTPLVYSAAANAYVMYPNMAYHLSIGRFNELLRELCGERDVALVDDRVTDVRTNADDTYVERVAGEDAVYDADLYVDATGFKRLLMDRLDADYRSFDIPLDAAFHATADHDIEDTVPATVVESGEYGWFWQIDTYDHRDLGYVYSSEHVSDDEALAEFEAHREEVFADLERYEFDSGFHEDAWVGNCVATGNALGFIEPLQSTALTTHLNTSVRLSRQLAAHGHINDAGLRESFNRYVTGTWNSVYDFISVHYLFADAVNDFWADMRDIPTSDRIDQYLAYYDANGFELYDSEVVTEEGTQLGMLTFPTSSLYFLIRNMGAESTFYEEHDFSVSDEIKERWRQRNGYVKDLADQCLSYEQVYKSGVVDAYVRNESAFAQAAAPDPGS

SEQ ID NO: 90593 - protein, 548 aa, Sporothrix insectorum
  misc_feature (1)..(548): tr|A0A167P1C5|A0A167P1C5_9PEZI Tryptophan halogenase OS =Sporothrix insectorum RCEF 264 OX=1081102 GN=SPI_07794 PE=4 SV=1
MSIPERTKVLVIGGGPAGSFAASALAREGIDTVVLEGDKFPRFVDLDDAFVAHGFYKKIGAAFVLNKKDPAYTDFIAAGGPNAYSWNVIRSESDDLIFRHAGKSGAQIFDGVKVSAIEFVPHDGPSTADDKTLDPGRPVSATWTRKADGVSGVIKFDYVIDASGRAGLMSTKYLKNRHFNQGLKNVASWGYWKGAGRYGVGTPQEGVPYFEALSDGSGWAWFIPLHNGTTSVGVVVNQEIATRKKKEMGSPGGKAFYLEMLKAVPRILGPMLKDATLVSDEIKSASDWSYSASSYASYNARIVGDAGCFIDPFFSSGVHLAVASGLSAAATICASVKGQCTEHEAFEWHSKKVAEGYTRFLLIVLSALKQIREHDDPVLSDWDEAGFERAFAHFRPIIQGTADVHGKLTQEEVSKTVDFCLNAFSRPVDAAMRDAVLKRVEDLKISGAARSHKELEAYLTPDELNILNTVHAREMVRSEDTLNIDTFTSDVIDGRALNMVRGSLGLISAEEAAKKVVKKSADVLAQLMGENKKFAHGDQQAVASISST

SEQ ID NO: 90594 - protein, 376 aa, Leucoagaricus sp.
  misc_feature (1)..(376): tr|A0A137Q1C6|A0A137Q1C6_9AGAR Tryptophan 2-halogenase OS=Leucoagaricus sp. SymC.cos OX=1714833 GN=AN958_06177 PE=4 SV=1
MSTVQTSTVPPSFTSVLVIGGGPSGSYTAACLAQEGISVTLLEAETFPRYHVGESMLPSMRHFLRYIDADDKFNSFGFSQKHGAAFKFNPRKREGFTNFVSENPNNYAWNVTRADADALLLDRARELGVQIYENHRVTEIQFSKPSAAKVNATQAQNESQEPQNLPVSVTWKNVATGQIGTIAFDWVVDASGRNGIISRALGLRKYNQSLKNIAYWGYWTGTQEYRHPACEIQLPFFEALHDESGWACAYRQIRAQELPVLSDIDEDNFDKAFDLFRIVIQGDIDVKKGLSENSLRQTIDFCTQAFEPESMERWHGKEGDDSEVKDSEISEEKKKEIMTVNESLRAEDMYHIGKFVADKFNGFSIRFEKGRLGLQA

SEQ ID NO: 90595 - protein, 534 aa, Leucoagaricus sp.
  misc_feature (1)..(534): tr|A0A137QID4|A0A137QID4_9AGAR Tryptophan 2-halogenase OS=Leucoagaricus sp. SymC.cos OX=1714833 GN=AN958_09344 PE=4 SV=1
MLPPFATVLVVGGGPAGSYASAVLAQEGVDVVCCEAAHFPRYHIGESLLASVKAYLQMVDVVEKIDQHGFHPKVGSAIKFRPDRPEAYTGFIAVNPNNGAWNVDRSQFDHLLLNHAVEKGAKVFQGARISNVQFSNDNCHSAQWTRDDKTGVISFNYIIDCSGRQGILSTKLFRNRHFNQSLKNIATWTYWKGETGVYGRGTRREGAIFIEGLVNGLKGWVWYIPLADKVSVGVVMHESDNTALRRDSNDLKDHYMRALSHSPDVMEMLKGAAICDEIHMASDYSYSATKYAGPGWRLAGDAGAFIDPFFSSGVHLALNGGLSSAISVLASIRKDVSEEAAAAYHDKKVSMAYTRFLLVVLSAYKQLRHQDADVLSDVASGDFDTAFDIMRPVIQGLGDVEASHDRTLTEEALEKTMDFVASVLTTPFDEVASARESGYVPAHLFDRNGDLLGPEQIAKLVTDTGADEKTERALRSINARKTLKLYDPKSNFENEEVLGMVAHLQRGSFGLRTVDLKPVVASISGVWVGHIQNI

SEQ ID NO: 90596 - protein, 549 aa, Leucoagaricus sp.
  misc_feature (1)..(549): tr|A0A137QIJ3|A0A137QIJ3_9AGAR Tryptophan 2-halogenase OS=Leucoagaricus sp. SymC.cos OX=1714833 GN=AN958_09342 PE=4 SV=1
MLPPFATVLVVGGGPAGSYASAVLAQEGVDVVCCEAAHFPRYHIGESLLASVKAYLQMVDVVEKIDQHGFHPKVGSAIKFRPDRPEAYTGFIAVNPNNGAWNVDRSQFDHLLLNHAVEKGAKVFQGARISNVQFSNDNCHSAQWTRDDKTGVISFNYIIDCSGRQGILSTKLFRNRHFNQSLKNIATWTYWKGETGVYGRGTRREGAIFIEGLVNGLKGWVWYIPLADKVSVGVVMHESDNTALRRDSNDLKDHYMRALSHSPDVMEMLKGAAICDEIHMASDYSYSATKYAGPGWRLAGDAGAFIDPFFSSGVHLALNGGLSSAISVLASIRKDVSEEAAAAYHDKKVSMAYTRFLLVVLSAYKQLRHQDADVLSDVASGDFDTAFDIMRPVIQGLGDVEASHDRTLTEEALEKTMDFVASVLTTPFDEVASARESGYVPAHLFDRNGDLLGPEQIAKLVTDTGADEKTERALRSINARKTLKLYDPKSNFENEEVLGMVAHLQRGSFGLRTVDLKPVVASISGVWVGHKSSTPSPSSSSSGGSLNEG

SEQ ID NO: 90597 - protein, 574 aa, Trametes pubescens
  misc_feature (1)..(574): tr|A0A1M2V4W8|A0A1M2V4W8_TRAPU Tryptophan 2-halogenase OS=Trametes pubescens OX=154538 GN=TRAPUB_6825 PE=4 SV= 1
MVLLVNAWNVVRSEFDHLLLQHAAACGAHVYEQTRVTDIHFEETPPSSPIHSHFDSPLSRQCQDEHTSRPLPRRRTSAVEFALNDGPNADGLGRPKSVSYETAFGGTGEITFDYLVDASGRAGLMSTKYLKNRKFNASLKNVAVWGYWKNTGMYGQGTDRENAPFFEALSDESGWAWFIPLHKGLTSVGIVMDQKQLGIRSRASSSASGSPSLGSSVRRDTLSARTSSTLAERYLSFLELAPGVLDLIGDGELVSLKTDEDQDDDADIPVARSASDYSYSASHYAGPGWRLVGDAGSFIDPFFSSGVHLAMTGALSAAASIAASIRGDCPEADAAAWYSSRVSVSYTRFLIVVLSAYKQIRCQSEGILADVDEDNFDAAFAFLRPGQCGVARFSAGLTNPHPAVIQGGADMGARLSEDEVQRALDFCVHLFDPTTPEQHESARRKIELASGLVGAAHDAAVPDADPLRLLDVRAPVVDPVHLEQLLRRQLHLQENLPTSPSGTHGGLPRPPDIATQELSMVLNKVNARRVIHSEHGNGLNSLEEEELAGYALRLHCGELGLRRVGGEKGTGVQP

SEQ ID NO: 90598 - protein, 641 aa, Pyronema omphalodes
  misc_feature (1)..(641): tr|U4LV70|U4LV70_PYROM Similar to Tryptophan 2-halogena se acc. no. Q0VZ69 OS=Pyronema omphalodes (strain CBS 1 00304) OX=1076935 GN=PCON_03510 PE=4 SV=1
MFMWATSFLSLVLLFPRHAAFSISKFFRFLDFPINRRLITRHARNDGETAFLNAANQTPLNDTDVLVVGGGIHSLIYAIHTAKLSPGRTINVVEKAGSPSYKIGESTLTTFGLWLKTIGIESPMLWRLFGPKDGLAFYYMPQNGDPENYTGFCANGPPGDFVPTLQIERKISELMLTLIAQRMGVNVWHGHSVDIDNTVLADGGSKVPVAGKQVNAKLVVDATGRFRRFASKEARLQRFDGWNTDAFWGYFECPVDESEIPLDHYESVNTNHICLPEGWAWVIRLPTWEGSSIKNLTKMINYLLDLNYAGVPADEIPSSLELARMFGLKFRWVVSIGFALRTDTEYPADLSSYGSCEAEQRFNWITAKYPKMAGLMSKHKLVRDLYGPGTTWYIRKNLTYVSPKVTGNGFIAIGDATGFTNPLYSPGINANMGTSVAAAELTASYLDSEDAKGRAESMQKYEEYCNGRVDGLHRMNVFNYVLMRSPQLGPLGPLWQYLSGTGMPGWQKMRTYDFNTAGDILKNWDWGAREPEYAEFADSVIKMLPGKPSEPVDPEIEQLILNMSDAKVKELVAGGKFKNRWAGLLRWYNDSLIRSETKIDKDILARRCSKCTNWRLLTGDRKCATCGAMNKQELSQKVMYN

SEQ ID NO: 90599 - protein, 590 aa, Aspergillus niger
  misc_feature (1)..(590): tr|A0A254UHP3|A0A254UHP3_ASPNG Tryptophan halogenase fa mily protein OS=Aspergillus niger OX=5061 GN=ATCC64974_ 42670 PE=4 SV=1
MSPPPLCHGDPHVQGTASGRLIASHVELSFWGGVDPQTGQVIDQHHPLSGHSLEGCILAIPGGRGSCSGSGVMLELLLNNRGPKAILFERREEILTLGVMVAEEMFDRAIPVITLSSDDFRRVLKLHDTYITVSDGYIFDQELPGTLHELPGCHSKGPSVLTTKIQLSDVDRALIQGEYGEAARVAMQIVLRMSELLEVRELIPVTQVHVDGCIYTGPGSLLFAEKLRDLGGHVLVPTTLNSISVDQKRWRAQGVDVAFGEAADRLAKAYMDMGARPTFTCSPYQLDSAPKLGDQVAWAESNAVVYANSVLGARTMKYPDFLDIAIALTGRAPKGGPHVDTNRRASLIIRLHDVERLHDLDDSFYPVLGYHVGTLATTQIPVIVGLESLAPNRDDLKAFGAAFATVSSAPMFHMVGITPEAETIEAAIRPGTYPACVDVQIEDLIPCWDTLNTASECQTVDLISLGNPHFSLREIRRLATLCQGHTKCEGVAVMVTCSRATYSLAGQAGLIQELERFGVRFITDTCWCMITEPIIPRSPNAIMTNSGKYAHYGPGLTGRKFYLGSLARCVDTACQGRPVDHHPSWMVEKM

SEQ ID NO: 90600 - protein, 529 aa, Penicillium sp.
  misc_feature (1)..(529): tr|A0A2H3IGH1|A0A2H3IGH1_9EURO Tryptophan halogenase OS =Penicillium sp. 'occitanis' OX=290292 GN=PENO1_041690 PE=4 SV=1
MSIPTKTTVLVIGGGPGGSYTASALAREGIDTVLLEADIFPRYHVGESMVASIRHFLRFIDLDTTFNNHGFIKKTGAAFKLNNQKTAYTDFIVAAGPDSYAWNVIRSEADDLIFRHAGKSGAKIFDGVKVTSLEFVPNKEADLPTDGTADPGRPVSATWTAKDGRTGSISFDYLVDASGRVGIVTTKYLKTRSYNQDLKNVASWGYWRGAISYGVGTPKEGQPFFEALQDGSGWVWFIPLHDGTVSVGVVMNQEMSTQKKKESTTDNGRDFYIESIKDAHGVTHLLQNAKLDTEVKHASDWSYSASEYGSPYVRVVGDAGCFIDPYFSSGVHLAFSGALSAAVSISASIRGHCDETQAWKWHSTGVRDRFTRFLLVVMSATKQIRARDAPIMNNQGEDGFDDAFTIIRPVIQGISDVTGKTTHDEVSRAVDFTTEAVAKTKPDDSANSSSQAGPQFTDTIQQGSLTKDEAKVLHMVKNVFKDFFVADVYNGYRAKLERGSLGLEKVNTEALLVGEKLSGTKTEVKEVEV

SEQ ID NO: 90601 - protein, 594 aa, Metarhizium rileyi
  misc_feature (1)..(594): tr|A0A166S0T3|A0A166S0T3_9HYPO Tryptophan halogenase OS =Metarhizium rileyi RCEF 4871 OX=1081105 GN=NOR_07920 P E=4 SV=1
MGIPQSCTVLVVGGGPAGSYAAAALAREGIDTVLLEADKFPRFVRKVCLLRFAISQSSLYFRYHIGESTLPSLRHFFQFIGFYATFDAHGFYHKNGAVFRLAKDQPEAYTDFLEAGGPDAYAWNLTRSESDDLLFRHAGTCGAYITDKTRVTDIQFEPAALGEPVDSDSNGDKTRIKNVGRPVSATWVSKDGVSGPIAFRYLVDASGRSGILSTKYLKNRRFNENFKNVASWAYWKSENIYGRGTHMEGSPYFEALDDASGWAWFMPLSDGTRSVGVVQDQKMAHGKKRELGNPSTLQFYKECLAMAPKISGLLSEAELVTEVRSASDWSYTASTYHLPYARICGDAGSFIDPLFSSGVHLAVTGGLSAAATIAASLRGDCDEQTAGSWHSKKTVESYTRFFLAVSSATKQIRNQHDPVMHEVDEEGFQRAFDLLRPIIQGTVDTDSSGKTSQSEISKILEFCFRAFSYISQEQKDLLFEKLKKLRAESGRDKGQAGNALGEIRNLLTADELQVLETLRSRRMIREDPFEMDSFSLDTIDGLAPNLVRGKLGLVPSKPAEIKENHFYSPEFLDGKAPGIREGSIHLVTSRVKLG

SEQ ID NO: 90602 - protein, 525 aa, Natrialba sp.
  misc_feature (1)..(525): tr|A0A5D5AW63|A0A5D5AW63_9EURY Tryptophan 7-halogenase OS=Natrialba sp. ESP3B_9 OX=2448032 GN=FYC77_01130 PE=4 SV=1
MANDYDGTQIGSIGVVGGGDAGLMTALALEKGLDGVDIFVVDDFDETVPEVGKSTLQFLQTFLHDRLEITPTRLVEEVKLGFKTTVYLKDWCGQEFHSPLGKPLPTVRQEEAGNWVDPTVQDEGLSAENEPVFDEFYYRYQEDEYTTVYNELAETVGKSPMVIDQQDVFNIQKGLPDASYHFNSNSFNRFLRTICGERGVELINDRIDEVTATDGWIERVAGSDGSYDADLYIDASGFRRMLMDELEVPMREFDLPVDSAVVATTDLPLSDIESATIVTSGEAGWFWQIDTVDVRDLGYVYSSDHVSDDDAVAEFLETRPEEIDPDEIRRYRFESGVLESPWKGNCLAVGNAVGFVEPLQSTALTTSARLADRLATFLGMHGRVNHQGLRELFNETTLATWEEIYDFVSLYYKYNSGMTAFWEDAREVNPGPIQQVDTYRASGFCAPQTRATLTRTGTDLNNYYLYYLVLKGLGVESVFYENLEYDPDPAVVEQVEEYTDSVHDRVDEFLSYEEFYQAFHPGFDD

SEQ ID NO: 90603 - protein, 514 aa, Halomicrobium zhouii
  misc_feature (1)..(514): tr|A0A1I6LDC3|A0A1I6LDC3_9EURY Tryptophan halogenase OS =Halomicrobium zhouii OX=767519 GN=SAMN05216559_2508 PE =4 SV=1
MDDEIGDVVVVGGGDIGLLTALSINKLNPEMDVTVVDDLQRDAPAVGKSTFKKIQDILHGTLDIDERRFIGEVRPVWKGALYFRDWCDRTAFHYPFDPEDKYPDPKNPNAVEHYYHQYADLYDSPDHLTKGEAIVEKGKSPWFFGPDGNLDRYEKVAYHLNTKRFASFLRTVCRERGISIVDDAITGVETTGAHIDGVLSEEARYEGDLYVDATGFGRVLRREQDAEFRDFGFPLDSAYTVRIDRDLSEVLPATAVDTGDHGWFWQIDTYDERDLGYVFSSEHVDDETALEEFLGHIPDVAPDSAGGDPDVDRDDVAKYEFSSGYYDRAWIENCVAIGNSQGFVEPLQSTGLTGNATAAEKLATMLSIRGGIADDRFREEYNTWVRWVWESIYDFIAIHYRYATGETAFWRDVATREYSPRVDAIVEQFDRNGLTREVVPLSEDDDLLKLSIFSLPDFYTMMRNLGAESVFYETNDFDVSEEVVRKHDEYYERIDAEVEEHLTTRELYEGLLQF

SEQ ID NO: 90604 - protein, 521 aa, Halomicrobium zhouii
  misc_feature (1)..(521): tr|A0A1I6KZX8|A0A1I6KZX8_9EURY Tryptophan halogenase OS =Halomicrobium zhouii OX=767519 GN=SAMN05216559_1702 PE =4 SV=1
MGTDVSSITVVGGGDAGLLAALTLRRVNPDVDIAVVDDFGEPPTEVGQGTFQSIIPLLHDVLGIDEGRFLREVKPVWKASSYFRDWCGYEPFHYAFDIRSVKPDVDDPNSVESLYHYYETGDMSTPAEGIAERGKTPLVYAPSQDTYAMYPNMAYHLSVGRFNEFLRTLCEERDVPLVDDRITDVETDADGTRIAAVHGASGATYEADLYVDSTGFKRLLMDELDAAYRSFDVPLDTAVRAAADRPLSEIVPATVLETGEHGWFWQIDTYDSRSLGYVFSSDHVSDEDALAEFRAHREEDLGEVDYYRFDSGFYEEPWVGNCVATGNAQGFIEPLQATSLTTHLNTALRLSRRLAARGRIVDDGFRESYNRYVRGSWNSVYDFISIHYRFADGDTAFWEEMQSIPISDRVRDYIDYYDANGFELFDSELVTEEGAPRGMLAFPTSSLYFVMRHMGAESSFYEDNDFTVSDEVRERWRQRNGYVDDLADTCLSYEQVYKSGVVDSFVRNERAFAQAAAPSGR

SEQ ID NO: 90605 - protein, 337 aa, Nitrosopelagicus brevis
  misc_feature (1)..(337): tr|A0A0A7V6I2|A0A0A7V6I2_9ARCH Dehydrogenase OS=Candida tus Nitrosopelagicus brevis OX=1410606 GN=A7X95_03530 P E=4 SV=1
MKIAVMGMGVAGSYLMARLKNSEHEVVGYERMPTERHDSICAWGTIKEELTNFCKKTGRNFDDFLIHDGKEMHVKMNDNVKFDIGLKGLCTYNKLGLIKDFIKDCNVIYGKAPRLEELEKEYDMIVDCTGFNRSYLPKMEQDFYLPTYEYKVEYENGVPYDDFYIEPFPGMSGYFWYFPLGENYAHIGAGDYNKNHIKATDEFLKKHGGKVVATKGRPIRLATPDRCKPYYSGKVVGVGESIGTVYALLGEGIIPSMQCVNIFMENMHDFKAYEKAIEKHYSVYAKVFNFVRAKIHNDFNFLKALPDFIAIFRYMKKNEDRFGMHIKIGDLLKVAKA

SEQ ID NO: 90606 - protein, 336 aa, Malbranchea aurantiaca
  misc_feature (1)..(336): sp|L0E2T7|MALD_MALAU NmrA-like family domain-containing oxidoreductase malD OS=Malbranchea aurantiaca OX=78605 GN=malD PE=1 SV=1
MDTGKRLVTVFGGTGNQGSSVVRSLLAHKDKLFHVRVITRDPTSEKAQACAKLGAELVKADGFNKSETVSAFMGSWGAFVNTNSDEEIYKIPGGRSDYDLGSTVLDATKEAGVKHVVYSSGLNLCKYTNGRVHSEGFESKYYVEQYGRRKGFQTFTPIVPASFMEAFLAESFCQSLGGFPWFKRDTGEYLLATPPYGGDERMPWVSVEDDFGDIVHGIFLDPDSYHLKTIQGSSELISFEKMVEDFMEVTGEKARYVRLKSWVDIPLDGTSCREEMRAIFHSMYSNGGKWFVPDESEIDTATTLKKEAKLAQGVTDGSLTAFKDWIHKQWERRLPN

SEQ ID NO: 90607 - protein, 590 aa, Malbranchea aurantiaca
  misc_feature (1)..(590): sp|L0E159|MALF_MALAU FAD-linked oxidoreductase malF OS= Malbranchea aurantiaca OX=78605 GN=malF PE=1 SV=1
MKYTATFALLILAIGIQTQRRSTICRCRQEDACWPTTAEWSSLNQSIDGKLRHLRPVGLPCQQSAYHKEKCDEVLAMTHNSSWRVDHPESLQLVSWESWPEKNQSCQIVREAVDGCAQGRIPLYSAAVESTKQVQQAVSFAKHRNLRLVVRNTGHDMAGRSSAPGSLQILTSGLKGINYTENFVPFITQGSAEPMGPAVTIGAGILTGELYATGSEKGFVVLGGACSTVGIAGGFIQSGGMGILSPSKGLGSDHVLQVEIVTADGSHIIANQYQNEDLFWAVRGGGGGTFGVITSVTLRAFADLPATVTGIQINTPSADAIFWAGVKTVLSILPELTDAGNSARMIVLPASSTGGASASFEGYTFNKKGAVSLLALQRALDDFGIPFKLSHDFQGNLSRFLAAPKGVDLAGISVIPGSVFLSYDLVASKDGPAKVTSALSDLRLGPGSSFSVDAFGGGQVVNNKNRINSAVHPDWRSALLSLTVGRGVPPGYTLETLKSIESELENDQLPRLRSLEGGRKGAYLAVAYPNEVYFQDSFWGKNYDRLLKVKRAWDPEDLFITRVGVGSERWDDEGMCTRADSGLWHALARF

SEQ ID NO: 90608 - protein, 500 aa, Halobacteriales archaeon
  misc_feature (1)..(500): tr|A0A2R6J2L0|A0A2R6J2L0_9EURY Tryptophan halogenase OS =Halobacteriales archaeon QS_5_70_15 OX=1919180 GN=BRC9 3_08470 PE=4 SV=1
MNGQRIETVTVVGGGDAGLISALTLDSVVPDLAVTVVDDFDEGIPEVGKSTISYIQNTFHNVLDIEKARFVSEVRPVWKASVYFTDWCGRGPFHVPFDDLTLPPSEPGRRRFEELYHRYETGNYRTLGVEIAERGTSPFVEIRPNGFFRSYDHVAYQFSTGRLNEFLRTVCRERGIDLVDDEVVEVGVEDGRIERVAGEERAYDADLYLDATGFERLLMRNLDNPFESFDLPLDAALVAKADLDLSEVVPATVVDSGEYGWFWQIDTWDWRDMGYVYSSEHASREAALAEFAETREADIAEEDVVQYRFDSGHYGKAWVGNCVAVGNALGFVEPLQSTALTLNAILTEKLSELVADHDGIDHRGVRRLYNDYARSKWENVYDFISVHYRYADGESEFWEDVRRVNDRDRLSKYVGPYRENGFNSHDELDNKHGANPRIFNQYIFYRLLRSLGVESEFYEGIDVEVSPEVQAAVERETEQIRSDAERHLSYEEVYGSGVFD

SEQ ID NO: 90609 - protein, 505 aa, Halosimplex carlsbadense
  misc_feature (1)..(505): tr|M0D5W0|M0D5W0_9EURY Tryptophan halogenase OS=Halosim plex carlsbadense 2-9-1 OX=797114 GN=C475_00897 PE=4 SV =1
MGERIEDVTVVGGGDSGLLAALALQRTNPGLDVSVVDDFDRPIPQVGKSTFLAIQQILHDSLGIDEQRFVEAVQPVWKASVYFRDWCGCDPFHYPFDQRRKFPNPEERDTGEAYYFYYAELADSDDHLSKCEQLVAQGKSPWSFEPREGGARKYENVAYHLDTERFNGFLRELCLERDISLVDDEVVTVDTAGDRIRRLRGRDRAYEADLYVDASGFSRVLRGEQDAAFREFDLPLDAALNARSEIDLSEVVPATVIDTGEAGWFWQIDTSDSRDRGYVYASEYVSESEARAEFVDHCEGIDAEDVVNYEFSSGYHDRAWIENCVAVGNAEGFVEPLQSTGLTANAKASVTLATLLSGHGRVATDAVRERYNAWVERTWESIYDFVSVHYAFADGETAFWESARGLDLSPRVELLLEDFDRNGFDAHVDPTMGHSDVDEPLFFQPLDFYALIHNMGATSEFYEAHDFEIDDETRRAVERNYGSIRDDVADHYDHREFYHGALGQH

SEQ ID NO: 90610 - protein, 505 aa, Halosimplex carlsbadense
  misc_feature (1)..(505): tr|M0CMY6|M0CMY6_9EURY Tryptophan halogenase OS=Halosim plex carlsbadense 2-9-1 OX=797114 GN=C475_14188 PE=4 SV =1
MIAGGGDVGLLTALSLRKLAPGTTVRVVDDFQREVPQVGKSTYLDIQRVLHGALDIDEIRFVSEVKPVWKASVYFRDWCESPPFQYTFDSADSFTGPQAGDLAGRSQFYYEALAGNADYESRAGELVEQAKSPWYYGRNGDLAKYDKFAYHLTTKRFNPFLRELCRERGVRLVDDEIVAVETTGSHIDAVRGEREGYEADLYVDATGFNRVLRSEQDAAFRTFDFPLDRAFNARIERPLSEVVPATVIESGDHGWFWQIDTYDNRDLGYVYASEFADEAAAREEFREFVADVAPDGVDPSVSADEMDTYEFTSGYHDRAWVDNCIAIGNAEGFVEPLQSTALTANASLGLALGEQLGGNDRVVDDGVRSAYNERVRETWESIYDFVATHYVYASGETPFWRRASSIDVSDRLERIIDLFDERGFDPAVVENPGEDLSDLAVFQPWDFFVVMRKLGASSQVHENGSRRDDGTFRRGAERYYREMREEVEASHLTTEEFYVGVLQGR

SEQ ID NO: 90611 - protein, 463 aa, Methanotorris igneus
  misc_feature (1)..(463): tr|F6BC72|F6BC72_METIK Tryptophan halogenase OS=Methano torris igneus (strain DSM 5666 / JCM 11834 / Kol 5) OX= 880724 GN=Metig_1746 PE=4 SV=1
MKIIIVGGGTSGLLSALALEKEGHDVVVLEKDEIGGLCRSEKINGYTMDIGVHAITMLNNGPLIRLLNKYARFIPNFKEYGDYYVRENNELYKIPVSMQEWMTTPLIPHKDKILITTKIMDLMTTGFTKDTSVYDVVSEMGLSDVSIKFFDTICYFLSGEDMKNTPLWRLFTGAGYIPEDDILPFIYNDLKINPMKSILVRKFSPEKIKKILSDGFLTTIKNSSKKYLNKFVNRSRYWTQGYPVGGVQSICDCILYSLNNTTIKNEEVISIEEEKNGYVVGTKEDNYYADVVIYSAPSRYLPDIAKIDEIQKLKDKLRNIKFTKSLTIWIGHDENPFSYLGSEVWINPPCWATCVTNYDKFLAPKGKHLMGFSFVNMKKEHALSAIENKLGIDVDKVDMIHVQKAIPEQASCCIGQFFVYPKIKDNFYVVGTDADPRSMGITRAAYSVEVMLSEFKCVFKNRN

SEQ ID NO: 90612 - protein, 264 aa, Malbranchea aurantiaca
  misc_feature (1)..(264): sp|L0E4F8|MALC_MALAU Short-chain dehydrogenase/reductas e malC OS=Malbranchea aurantiaca OX=78605 GN=malC PE=1 SV=1
MAPTRRSRDLLRGKNVLIIGGTSGIGFAVAQLVIEHGAMACIAGSNPTKLGKALDALKQHPDRDPIAIVQSATCDLFDVPNLEQNLDNLLKLAAGDSKIHHIVFTAADMVQPPPLASVTIEQIQRVGTIRFTAPMLVAKLLPKYMELCPENSYTLTSGSHAKQPDPGWSLVTGYCGGVEGLMRGLAVDMMPLRVNVVSPGAVLTPVLRDILGDSLEIALDAARKKSTTGRIARPEDVAEAYLYIMKDQNITGTVLETSAGMLLR

SEQ ID NO: 90613 - protein, 2345 aa, Malbranchea aurantiaca
  misc_feature (1)..(2345): sp|L0E2Z1|MALG_MALAU Nonribisomal peptide synthase malG OS=Malbranchea aurantiaca OX=78605 PE=1 SV=1
MSDDPLLSSPTEAICLNHSVTDLRLAAALKLSWTFLLAHYSGSSEIPLDIRLEYRYIDGSETNFEPFDATFEVDKKSLIEDSIGMIQNMLTPSTRPHSLSNGINSSQSDKHVPEAQVSFTFSSGSRPVLEKGATTRYAATVLELECLQGLKKEYLCRINFNRMMWNVEEATGILRQFRHIAQQIVSADVCATLSQINLMCESDIEQLKRWNSTVPDPVLACIHELFSEQAKKNPTATAVQTSEGSFDYGRLDELSSALACHLSSNGLTRGTPVPLLFDKSMWMVVATLAVLKAGATCVSICTGLPTKAIEDILEQTAAQLVLVSESQGLRLSETRTQVVSDKTMQIWHTMSGKPELPQSDPTDLACIIFTSGSTGKPKGIMLDHIALVTSIRNHGPSLGISSSSRALQFSSYAFDMSFYETYTTLLSGGCICIPSETERLNSLPQFICDHNVNWAFLTPSVLRDFHPSEFPSLRTLATGGEPVGADIANEWAGRLQLFNLWGPAEATICATGPILPGVWIPGTFGKAVGCIAWITQAENPDELVPIGAVGEVLIEGPVLAQGYSGDVEKTKASFIPFPKWRERFELTPRGRVLFRTGDLAQYNPDGTIRYVGRMGTVVKVGGQRVDIDAVEYALRRIDRSSHIAVEAVELEKETGQGPTLIAFLSSDMNGVSGSEKKRCCSIDPGSRSWEAWANIAIRLQDTLAGVLPRYMIPHLFIPVSTIPTTPSGKANKRQLQALVLGQSKAHLLQLCRQRSPDASYPEQHLTENETLLRLLVSDVLGIDRDHVAMNSRFFHLGGDSLAAVKLVALARQQGIQLKVEAILQSCSLREAAGTMISAGEKQKLQSKTSFAINKCDDKLGLLEEATVQCGISESDIEEIYPSTPLQEGLITVTSTFSASKPYVDKILFTLSATADLDRVRDAWNHVVAANDILRSRIILSPAGKAFNVVVRSEPSWQYYKTVQQYLENDNAQDMTFGKELITFNLIASHDQSASARSIGITIHHALYDNWTVSLLHKQAEDAYRGELVEPCSFSTFSHYVLQQSPDINKEFWRKQFLDLRAGTFPELPSSDYVPRANSSSQHLYKGQHQRRDFSMATNIQLAWALLLSLYTNSPDVVYGLVVNGRMAPMPGVGGLVGPTIATVPFRTTVERSMSVQAALEAIQKRVLSIVPFEQTGLQNIARMGEGPKTACNFQNLLVIQQDLEFKGEGIFCRRQNLVGAVNNFPGYGIILLCSATEHGWAFEILYSNSLIPETRARRILLQLDHLLRQLEVDPYRQLAQLELLCPSDKSKLTSWNTQLPIRVNACIPEVFGAQCLVRSERTAVSAWDGSLSYRELDRFSSIVARHLQAVGVGKGTITPILFEKSRWVVVAMLAVLKTGAAFVMLDTNQPLQRKQGICRAVRATTIATSASCAHESKVLANSIYVLDEASITKTDTNQFLPLVEVSPNDLAYVVFTSGSTGEPKGVLIEHASSCSASRAQAAKLGISPDSRVLQLSSYTFDSFAVEILASLLAGCCICIPSESESSNDIAGAVRRFSATWLCITPSVLGLTNPDEVPSLKTVVAVGESARPSQIRLWSTRVNFICGYGPSECSTGASAQLIRSAGSDPRIIGSGMGSCLWVAHTDDHNVLVPIGAIGELLIQGPIVGRGYMNSPEKTRAAFLESTAWIPEFRQVATERFYKTGDLVRQNEDGSIVYLGRKNREVKLRGQRLDLEEVENQLSAALEMDINIVAEVVKPKGVDSQPVLIAFFQVVADVELRSDNITFLELNPDIGLRLLDAEEKLRKILPPVMIPSVYLQVQRMPLTMSGKMNRQALRNKASTRTLSQLFSSGSVRHEDDYLTLQPHESTALFVCQAICGIMRDKIDDTKTLIAGKNVNLSRTGMDSIDAMMLARTISRHFGITLSIRAFLGSSVTVRDIARLIEGVKSEDNLSQFDLYAKYESIWEELRGVVRGLTPSDKPQLCDKTPAGMSVFLTGGTGFLGTHILRQILQDPRVELVTVLTRAESPAHALSKIVESAKIAQWWQESYRNRIDAWVGDLARPRLGLSDDHWARLCGYGEHKFTSIIHNGAAVHWGYDFEKLKPVNVMSTFWLLVSLFIAGPLVNFTYVSALLPECDGLTDREIALKTSDDGYSQTKYVSELLVKNFKEQLCNNPIAIVRPGLLIGSAEHGVANVGDYLWRVVSSAFSVGAYISEKGDAWIYIAAVDWVANQVIREALYESTTDLRIINVTDGLTVKEFWRAIQIASPRQLNALQSEDWLSLIRQQLDVTGKSHPLWPVISFLESSKGCLGFSHNLPPQAHSLSSMIITALIKNVRYLASLGLVSWTTTGSNCDHSVQQRIFRRVL

SEQ ID NO: 90614 - protein, 369 aa, Malbranchea aurantiaca
  misc_feature (1)..(369): sp|L0E2Y5|MALB_MALAU Prenyltransferase malB OS=Malbranc hea aurantiaca OX=78605 GN=malB PE=1 SV=1
MPSQSPYHALSRYFSFPNRDHQAWWTGKGPLLGNMLADAGYPEQQQYQYLTLFNLHLIPALGPSESHGAGIDGAEWKSLLSGSGKLEFSMTYRKSAVSLRIAFEPTSLLAGTKKDVFNKRRTQQLLGDLERLDIDIDTVLYHPLFDTLVVSDEEEAALQNAGTVIPDSSRTQQLLALNLIEGNVRADLYVYPYVKALATGTASSTLLWAAVKKIDRYNRFRDALSILKGYFETYPSSTTNPMFLSSDLAAPRNAFCRLFFSETNFSWERVQHLWTLGGTLSDKPTLKGLELAKILWDILGISTAPASPDSFPLLFTFELRPEQPYLRQKLGIPVSGLTESAIANACVAFFERLGWDDHAASYRTNLSAY

SEQ ID NO: 90615 - protein, 438 aa, Malbranchea aurantiaca
  misc_feature (1)..(438): sp|L0E2P7|MALE_MALAU Prenyltransferase malE OS=Malbranc hea aurantiaca OX=78605 GN=malE PE=1 SV=1
MTAGPMGNKSTSDIDSVLVYKSLSRYLKFSENEEGWWHKTAPLLNKILAAAKYDVHLQYRYLVFYYAACVSALGPYPQRFSSSITRSGLPVEFSVNYQNNSKPIVRIGYEPISHLSGTERDPYNHKTASEIVATLSKIQPDFDPRLFNYFVHQLSVNKAESDVLNGANVEGSEMKSQTAFGFDLVNGEISVKGYAFPAMKCQVSQQSLSQLLKAAINGLKGEFDCAFGLVDEYMERCGGYNQFSFVSWDCVVPAKSRFKVYGVHNDVTWKKIEDIWTLGGQATSGNVTKGLELLKELWTLIDLDEGERGYTGRFDDANDNGSNIQSPMVWNYELRPNNPWPLAKFYFPVHGENDMKIVKGLARFFENRGWTELARSYVQTVSSFFPDRDLNQTQRLVSWISFAYTEKTGVYLSVYYHSSADYLWISESGEKRGQGDGA

SEQ ID NO: 90616 - protein, 506 aa, Marinimicrobium koreense
  misc_feature (1)..(506): tr|A0A3N1NH11|A0A3N1NH11_9GAMM Tryptophan halogenase OS =Marinimicrobium koreense OX=306545 GN=EDC38_2964 PE=4 SV=1
MTESIGHVVIVGGGTAGWLSAAMIAAHHNGHRPDGLKVTLVESSDIPTVGVGEGTWPTMKNTLQKIGIDEKTFFASCHSTFKQGGKFIDWHTGNNDAYYHPFTVPIAYERLDLAPYINDLTHFAPETNFQHHICEAGLGPRSLTDPDFQGPCNYAYHLDAGEFAELLKQHATEKLGVHHLVDTVSNVSLSSDGFIDAITLEQTGKLEGDFFVDCTGFASRLLGQALGVPFKPMDSILFNDRAIAVQAPYPDERSPIPCHTLATAKAAGWIWDIGLTHRRGTGHVFSSDFISEDEAEFTLRQYLDLSESEADSRVIKFSSGHRACWWKKNCVAVGMSAGFVEPLEATAIMLVELSARFISENLPADRHTMAIMEKRFNQAMSYRWQRIIDFLKLHYMLNDRPEPYWRAHRDPASIPESLKEDLAVWATRGPQTADFDSALELFPAASYQYVLYGMGFRPDFSSQAWLYDQQRLAQQVFTRNQQLTRQLLDSLPSHRDLIDRWLGQAA

SEQ ID NO: 90617 - protein, 518 aa, Tahibacter aquaticus
  misc_feature (1)..(518): tr|A0A4R6Z4V5|A0A4R6Z4V5_9GAMM Tryptophan halogenase OS =Tahibacter aquaticus OX=520092 GN=DFR29_103249 PE=4 SV =1
MLRSVLIAGGGTAGWLCACYLAKTLNIRTPGAVRIQLVESPDIGILGVGEGTFPSIRGALSQIGISEARFIRETQATFKQGIRFVDWARPAGSPGRNHYFHPFNLPSSRVDGLDLVPYWLLGEAGEGMAFADAVTLQAAVADAGRAPKRRQDPDYEGPMNYAYHFDAMKVAALLAAEGRALGVDHRLATICDVTLDANGGIAGVVTREIGTLQADLYVDCTGMRAALIGKALGQPLVPVSDVLFADRAVAIQVPNAGPDTPIASHTISTAHEAGWTWDIGLQERRGVGYVYSSRHTSDDRAEAVLREHIGPAAQGLNARRLPFETGYRRVQWQHNCVAIGLSAGFLEPLEATGIGLIEMGTYLLAHLLPMDACFDRAAAHFNRMMSERYTRIVDFLKLHYCLTQRRDSAFWIDNADTASVPPSLRDRLAEWRQRAPHRLDFVTDLEMFMPASWQFILYGMEFRTDLRDQRGRYPRAEEARREFAMLRAVSQHAIRDLPAHRDLVESLAGSRTAQRATA

SEQ ID NO: 90618 - protein, 525 aa, Shewanella frigidimarina
  misc_feature (1)..(525): tr|Q085A0|Q085A0_SHEFN Tryptophan halogenase OS=Shewane lla frigidimarina (strain NCIMB 400) OX=318167 GN=Sfri_ 1312 PE=1 SV=1
MMQKPITEIIIVGGGTAGWITAGLLAAEHNVDKGVLAHSPKLNITLIESPDVATIGVGEGTWPSMRSTLSKIGIDENDFIRQCDASFKQGSRFINWCKDPQSNVADSYLHPFSLPHGHQELDLCPYWLPHAEQVSFAEAVCSQQVLTQLGLAPKSIVTAQYHFQNNYGYHLNAAKFSQLLTEHCTQKLGVTHIRDHVSQIINNQHGDIEKLITKQNGEISGQLFIDCTGAKSLLLGEHLQVPFLSQKSVLFNDRALAIQVPYSDANSPIASCTHSTAQPNGWIWDIGLPTRKGVGYVYSSSHTNDIDAQKTLFNYLGVDGAAADKLEPRQLAINPGYRAKCWQNNCIAIGMAAGFIEPLEASALALIEWTASTLAQQLPPNRMVMDTISARVNERYQQHWQQIIDFLKLHYVISQRQEDRYWRDHRESNSIPDSLQAMLELWRYQTPSQQDISYKEALFPAASFQYVLYGMSFNTQLPTHVKPSMQQLAQRLFNDNQQRTQALSKNLPTNRELLDKVAQYGFPKL

SEQ ID NO: 90619 - protein, 504 aa, Cellvibrio mixtus
  misc_feature (1)..(504): tr|A0A266Q9G0|A0A266Q9G0_9GAMM Tryptophan halogenase OS =Cellvibrio mixtus OX=39650 GN=CBP51_05795 PE=4 SV=1
MNKSIKKIVIAGGGTAGWMSAALLTKVLKQRVDIELVESEEIGIIGVGEATIPPIQTFNSVLGVDEAEFLRETKATIKMAIRFDNWKQQGHSYYHTFGAPGATIGFSAFQHHWLRARQQGLNTTIWDYDLNYLCCEAGVFGKFDGKDPMYQMPYAYHFDSALYGRYLRKRSEQAGVVRTEGKIRAAHLNPDTGFVQSLLMEDGREIHGDLFVDCSGMRGLLIQGALHTGYEDWNHWLPCDRALAVPSERFEKTLPYTRSIAHKAGWQWRIPLTHRNGNGLVYSSQYVSDDEATNTLLDNLDSAALADPKPIKFRTGRTLQQWNKNVIAVGLSSGFLEPLESTSIHLIQSAVVRLLKNFPNSGISQAQVDEYNRESKLEYETVRDFIILHYHANERDDSDFWRNLRTMDIPDRLAHKLALFRETGTLFNDHGDIFLDSSWLQVMLGQGIMPRDYHPSADILDAAQLQSMLARIAAAKRQPLTQLPTHDAFLQHYTGVVSAGVHRG

SEQ ID NO: 90620 - protein, 521 aa, Alteromonas sp.
  misc_feature (1)..(521): tr|A0A3N5Y0N1|A0A3N5Y0N1_9ALTE Tryptophan 7-halogenase OS=Alteromonas sp. U0105 OX=2259342 GN=DRW07_05665 PE=4 SV=1
MTSQIHPFRHLVIVGGGTAGWMAASLFQHAWARFGVEITVVESEKIGIIGVGEGSTPSLRHFFRTLGIAETEWMAQCHATYKCGIHFPNWSSHLSQNAYFHPFYSELDWKSGSAFIYNANLRRKGYDVEAHPDYFWLQTKLAQGKRSPVSKQASGKELDYGYHFDSAKLGAYLKCRAIKLGIRHINDTVVAVKRAKEGHVTQIQLARTGALCGDMYLDCTGFQGLLIRQALNADYVDFSSQLLNDKAIAIPSSVPLKDKVASQTTSTAMSNGWAWSIPLSNRVGNGYVYSSQHISDDSAEAELRRHIGSNVSQGEARLINMQLGRVEQHWYHNVLAVGLSQGFIEPLEATAISCIQYTIERFIDIVDEARTSGKEIASTHLQDKYNADINRIFDAVKDYITAHYRLNTRTDSQYWIDNRENQDHSSTLQALLSGWDDPDTHFEKLVHDLDAQTMYLAPSWYCLFAGKGRFPRTLRSVPLDTNYANAIDASKYCQHQSTFFNDHKKQLLKTYGQHYPEPVTF

SEQ ID NO: 90621 - protein, 515 aa, Streptomyces sp.
  misc_feature (1)..(515): tr|A0A552QUZ0|A0A552QUZ0_9ACTN Tryptophan 7-halogenase OS=Streptomyces sp. 130 OX=2591006 GN=FKN01_28370 PE=4 SV=1
MLSKVVIVGGGTSGWMTAAYLRTALGDSIDVTVVESKRIKTIGVGEATFSTVRHFFEYLGLSENEWMPKCNATYKLGIRFENWRAKGHYFYHPFERLRVVDGFPLTDWWLQQKPSDRFDQDVFLMSAICDAQRSPRYLDGKLFEQDFVERTEGSPERSTLSEQDTQFPYAYQFDASLLADFLTEFSTERGARHIEDDVLDVVRDERGWISHLRTREHGDVHGDLFIDCTGFRGLLLNQALDEPFISYQDTLPNDRAVALRVPADMEARGLRPCTTATAQDAGWIWTIPLFGRIGTGYVYSGDYTTPEEAERTLREFVGPGAEDAEANHIRMRIGRSRNSWVNNCVAIGLSSGFVEPLESTGIFFIQHGIEELVKHFPDATWDPRLRDTYNRAVADVKDGVREFLVLHYRCAARNDNAYWRDAKTRELPDGLAARLEEWQAKLPTENTIYPRYHGFESYSYLSMLLGLGGVDLKPSGAVALMDGARAAKEMQLIKDQARDLVRRLPSQYEYLAQMH

SEQ ID NO: 90622 - protein, 509 aa, Caulobacter sp.; identical to SEQ ID NO: 84038
  misc_feature (1)..(509): tr|A0A0Q6V9C6|A0A0Q6V9C6_9CAUL Tryptophan halogenase OS =Caulobacter sp. Root343 OX=1736520 GN=ASC70_03605 PE=4 SV=1

SEQ ID NO: 90623 - protein, 491 aa, Erythrobacter luteus
  misc_feature (1)..(491): tr|A0A0G9MZH6|A0A0G9MZH6_9SPHN Tryptophan halogenase OS =Erythrobacter luteus OX=1581420 GN=AAW00_10890 PE=4 SV =1
MAAAALSRLISPRREFAITLVESEAIGTVGVGEATIPPFVDFQRLLEIDEAEMMAAVQGTFKLGIQFVNWGKLGDSYIHPFGNYGYEIGGVSFHHVWHRFKGLGDNRPIQVFNAETMAAYFGKFAKTDGQQREDLPPVNYAYHINATAYAGFLRRYAEARGVVRQEGRVEHVELNGQSGFVDSIRLEGGREIAGELFVDCSGFRGLLIEQALETGYEDWTHWLPCNRAVALPCNRDDGSPPAPFTRATAHAAGWQWQVPLQHRNGNGHVYCDAFMSADEATDILLKNIAGKPTADPNHLRFVTGRRRKFWNRNVVALGLAGGFMEPLESTSIHLINTGINKLISLLSLDGVTQAQEDAFNRLTGKEYARIRDFLILHYNTTTRDDTEFWNYCRTMSVPDSLTEKVELFRQNGQIFREEDELFTETSWAAVMMGQGIQMHGHNVMADTLDPAETKRELDEMEKSIRYAVGVMPGHADFLRQYCPAPPPAPAA

SEQ ID NO: 90624 - protein, 498 aa, Pseudoalteromonas sp.
  misc_feature (1)..(498): tr|A0A4S1FAY6|A0A4S1FAY6_9GAMM Tryptophan 7-halogenase OS=Pseudoalteromonas sp. MEBiC 03607 OX=2563601 GN=E5N7 2_11955 PE=4 SV=1
MESKKITKVVIAGGGTAGWITAALLNKVLGKVLDITLIESAEIGTVGVGEASIPPILHLNGALGITEKEFIKATGATIKLGIEFENWRSQGHSYMHAFGEIGKDFPFCEFYHFWLKANQANNAPDFWDFSLNYQAAKAHKFAHLKQIPNTQLAGLHYAYHFDATRYGEFLKELAQSRGVKRIEGKIESVNQCHQSGHITSLLLKNGEQIDGDLFIDCTGLRALLIEQTLNAGFEDWSHWLPCDSAVAVQSESANDAIPYTRSIARDSGWQWQIPLQHRLGNGLVYSSRFLSDEAAKQQLLDNLPAKPLTEPRVIKFKTGRRLKQWHKNVVSVGLSSGFLEPLESTSIHLIQSAAIRLIKFFPHQGIKQSLVDEFNQQSKTEFERIRDFIILHYNITERDDSAFWRFCKGMDIPSSLKKKIELFKTSGKLVREDDELFAEVAWQQVMIGQGLIAEDHHPLTDALSDEQLNELFSNLKTLINSTVEQLPSHSQFLEKVQN

SEQ ID NO: 90625 - protein, 507 aa, Erythrobacter sp.
  misc_feature (1)..(507): tr|A0A2Z4K4Z4|A0A2Z4K4Z4_9SPHN Tryptophan halogenase OS =Erythrobacter sp. KY5 OX=2011159 GN=CD351_14245 PE=4 S V=1
MAEDAYAPLKSIVIVGGGSAGWMTAAALSDALGKSCSITLIESEAIGTVGVGEATIPPIRQFNARIGIDEATFVKETAGSFKLGIQFVDWSRLGHSYFHPFGQYGAEFDKVPFYHYWMREALNGRVEGPIDDFSMCWAMAKAGKFARPEADRRKIQSTFDYAYHFDAGLYAAFLRRVSEARGVKRIEGRVTDVIQRGEDGFIESVTLDNGTSVSGELFVDCSGFRGLLIEDTLEAGYENWQHWLPCDRAVAVPCAKQSDITPYTRSTAKAAGWQWRIPLQHRTGNGYVHCSEFISEDEATETLMGSLDREAQADPRTLRFVTGRRKKFWDKNCVAIGLSAGFMEPLESTSLHLIQYGILRLIALLPDSEMSPLLAREYNRQTADEYARIRDFLILHYKATTRDDAELWRYCSAMEIPDTLQYKIDHFRNYGLLVADERELFANPSWIAVYMGQDIMPRRAPAITEMRDNVPVPQRMQMISQAMREAVAQMPTHADFLARHCPSPLAS

SEQ ID NO: 90626 - protein, 499 aa, Caulobacter sp.; identical to SEQ ID NO: 84105
  misc_feature (1)..(499): tr|A0A0Q6UQN6|A0A0Q6UQN6_9CAUL Tryptophan halogenase OS =Caulobacter sp. Root343 OX=1736520 GN=ASC70_08310 PE=4 SV=1

SEQ ID NO: 90627 - protein, 495 aa, Pseudoalteromonas sp.
  misc_feature (1)..(495): tr|A0A4S1EZV4|A0A4S1EZV4_9GAMM Tryptophan 7-halogenase OS=Pseudoalteromonas sp. MEBiC 03607 OX=2563601 GN=E5N7 2_19845 PE=4 SV=1
MRQQSIKQVIVAGGGTAGWMTAAALAKLLNKDIKVSLVESDDIGTVGVGEATIPPIRTFHKLLGIDEKLFMKATQATFKLGISFENWHKPQSDYIHSFGMTGKECWAGEFHHFWLHAKKMGNKDDFGDYCYELQAAKQGKFGISPHNPINYAFHMDASRYAAFLREFAENLGVKRFEGKIERVNKHADNGFIKSLLLDDGTEITGDFFIDCTGFKGLLIEQALHTGYEDWSHLLPCDSAVAVQTKGTPEIAPYTRSIAHQSGWQWQIPLQNRVGNGLVYCSRYLSDHDATQLLLNNLSSETLTEPKIIKFKTGRRRKGWNKNCLALGLASGFLEPLESTSIHLIMTGIIRFMRLFPFTGITQHAIDEYNKQLQSELESIRDFIVLHYKVTDRDDSEFWQHCKTMETPKSLAHKVALFKETGRVFLDDGDIFRVDSWVQVMLGQGIMPDQYHHVASLMNDQELSRFMQGIKQQIAQRLQQLPTHRAFIEQYCPVDT

SEQ ID NO: 90628 - protein, 501 aa, Cellvibrio mixtus
  misc_feature (1)..(501): tr|A0A266QCQ6|A0A266QCQ6_9GAMM Tryptophan halogenase OS =Cellvibrio mixtus OX=39650 GN=CBP51_12060 PE=4 SV=1
MKKIVIVGGGTAGWMSALIMAREWSRQGVSICLVESPEVGIIGVGEGSTPALKLFFDRLNIAEQEWMPACNATYKCGIRFDGWSTHAGFESYFHPFSAALDRQTLPMFMHNAQARLRGANVYAQPDRFFIASRLAQQCLAPVAPEHFPFDVHYGYHFDSTLLGQFLRKKALALGVVHELGHVVAVKQHEHGDIASVQLAGDKHIAADFFVDCTGFSSLLLQKTLAVPFISYANNLLNDAAVALPSAIDEKIPSQTLATAMSCGWAWKIPLTNRYGNGYVYSSAFCSADQAEYELRAHLGLLDADVPVRHLRMKIGRVEQHLAGNCLAVGLSQGFIEPLEATALFLVQQTVAVFAEYFTRGEFTHRLRDEFNQRINNHFDGVRDYIVTHYKTSSRRDTEYWRANTANQQDVSPVMLALYRSWFEGKDLAAEINRLQIGSYYPAPSWYSIFTGMGIVPKGEQLRTATAEEACIDINAVDEFLRRCALNFSDHRAQLARWQSSE

SEQ ID NO: 90629 - protein, 500 aa, Novosphingobium sp.
  misc_feature (1)..(500): tr|A0A3B7DLD3|A0A3B7DLD3_9SPHN Tryptophan halogenase OS =Novosphingobium sp. THN1 OX=1016987 GN=C7W88_12285 PE= 4 SV=1
MSNPDLMIRSVAVIGGGTAGWMTAAALAQALRHNCSITLVESEEIGTVGVGEATIPPIRTFNETLQIDEREFVRKTKGSFKLGIEFVDWGSLGNSYFHPFGPHGRAFDIVNLHHYWLRAREAGEAAPLDEHSMAWALAKENRFAPPMPDQRNVLSTFDYAYHFDAGLYAKFLREYSEAKGVTRIEGKVASVQQNAETGFVTGVTLDDGRKIEAELFVDCSGFRGLLIEGALNAGYEEWTHWLPCDRAMAVPCENAYPLTPYTRSTAREAGWQWRIPLQHRTGNGYVFCSQFLSEDEAAEKLLSRLDGKALADPRPLRFVTGRRKSFWEKNVIAVGLSSGFMEPLESTSIHLIQAGISKLLALFPDRTFDPMVIEEYNRIAINEYERIRDFLILHYKLTTRDDSELWRYCAAMAIPDTLNTKVEHFRRYGRLVQRDADLFGAPSWLAVHIGQGNIPERTDPLADYRGIDGREWLGKLRAAMHHAALQQPTHEQFIKANCAA

SEQ ID NO: 90630 - protein, 510 aa, Marinimicrobium koreense
  misc_feature (1)..(510): tr|A0A3N1NVA1|A0A3N1NVA1_9GAMM Tryptophan halogenase OS =Marinimicrobium koreense OX=306545 GN=EDC38_2636 PE=4 SV=1
MTVGPQRIVIVGGGTAGWMSAAALARLLPSRVSLQLIESEQIGTVGVGEATIPHIRYFNALLGIDEREFIHATQATYKLAIEFVGWGRETSRYLHPFSAFGGDIDGIDFHHYWLRTRDEWPELNLDAFSLAAQAARLGRFAPPPEHSEFGYGYAFHLDASRYAGYLRAYAEQRGVTRTEGRIQSVIPRESDGGVAALTLESGERIEGDLFIDCSGFRSLLLGQTLGVPFNSWKHWLPCDRAVAIASGALSEPPSFTRSTATTTGWQWRIPLQERTGNGQVYDSRSISDDEACAQLIGSLNGAPQSDPNLIRFEAGARARSWDKNVIAIGLSSGFLEPLESTSIYLIQMAVFKLVEFFHNSKSGAVGREAFNRWMSLEYERVRDFIILHYHLNQREDSEFWQDCAHMSVPEGLQRKIALFKESATIEFYDQGLFAPPSWLAVYLGQGLNPEAIDPRVAQQPVASLKGPLEQLANHLNRTAQALPLHREVLARGGVAPSAAAPMSLYGGRYG

SEQ ID NO: 90631 - protein, 505 aa, Erythrobacter luteus
  misc_feature (1)..(505): tr|A0A0G9MZ07|A0A0G9MZ07_9SPHN Tryptophan halogenase OS =Erythrobacter luteus OX=1581420 GN=AAW00_00085 PE=4 SV =1
MTTASAPYDFVIAGGGTAGWMCAAALARFTPPGSRIALVESEAIGTVGVGEATIPQIHLFNGALGLDEAEFLRETKGSFKLGISFDGWLREGESYMHAFGNVGRALGTLPFQHYWLRAKRLGLAKPLQRYSLNELAARTMRMQRGRTQAGQEMPYAYHFDAGLYANYLRRYAEARGVERVEGVIEHVALDGESGAIAALRLDGNRELPGRFFFDCTGFRALLIGEALGTGFDDWSHVLPCDRAMAVPCAGGGDFTPFTRSIARQAGWQWRIPLQHRIGNGLVYSSAHLSDDEASATLLANLDGEPQGDLRPIRFTTGKRRVHWQANCLALGLAAGFMEPLESTSIHLVQSAISRFLAVMPAEGEASPAARDWFNGQAAFEWERIRDFLILHYTANRREGEPFWDHVRHMALPETLVAKLALWREAGFIHREHEELFTEVGWFQVLAGQGVEAEGYNPLADALPEADLAAMLAQTEAALVEQVKPMPRHLDFLADYVGAQSAKEPA

SEQ ID NO: 90632 - protein, 515 aa, Cellvibrio mixtus
  misc_feature (1)..(515): tr|A0A266Q277|A0A266Q277_9GAMM Tryptophan halogenase OS =Cellvibrio mixtus OX=39650 GN=CBP51_19270 PE=4 SV=1
MHTHEFAPDHSSEDNSITDILIVGGGTAGWMAAAALSHVYKSKPCRIRLVESDHIGTVGVGEATIPVIQKFNQMLGIDEHDFIKHTQGTFKLGIEFVNWGSLDNAYIHPFGSYGMSMGYLSFYHYWLRLADAGHTQNPGEFSIAIQAALRGRFMPPANIPNSPLSQIAYAYHFDASLYAKYLRHFAQERGVVRIEGEIAQVLLRSTDGFVDKLLLKNGESLSAQLFIDCTGFRGLLIEQAMNTGYDDWSHWLPCDTAVAVPSHNISEPRPYTRSTAHSAGWQWSIPLQHRTGNGHVFCSKYMDDEQAKKILLENIDGDALAEPRFIRFKTGMRRKFWNKNCVAIGLASGFLEPLESTSIHLIQSSISKLIALLPTADFEQSTIDKYNELLTAEFMFVRDFIILHYKVSQRTDSDFWNYCRHMPVPESLQKKLDLYESSGRLFRDNNELFDEVSWFAVMQGQGLRPRHYHPLANQVEANEFHRIMQEIKAVVQRAADAMPTHAEYIAAHCAASKNH

SEQ ID NO: 90633 - protein, 512 aa, Pseudoalteromonas sp.
  misc_feature (1)..(512): tr|A0A4S1F1M7|A0A4S1F1M7_9GAMM Tryptophan 7-halogenase OS=Pseudoalteromonas sp. MEBiC 03607 OX=2563601 GN=E5N7 2_19850 PE=4 SV=1
MSKIINNIVIIGGGAAGWLTAGLLAKEHPHLHITLIESADIGISGVGEGTWPSMRNTLQRIGVKETDFLRQCDASFKQGSKFINWRGEQQGDNYYHPFMIPEGYYEYDVHAAWKQLFSHQKYADAMNMQSFICQAALAPKQINTPQYAGVTNYGYHLDAHKFARFLTQHCVNTLNVKHIVDNVICANNDEQGYIKSVSTQHNGAITGDLFIDCSGSQGLLIAKHYQIPFLDQSHILFNNTAVAAQIPYESQSQNIASATLSTAQSAGWIWDIGLPTRRGIGYTFSDKYCDEASAIETLKSYAAQTIGTQQADTIETRTLRFTPGYREIFWHKNCVAIGMSQGFIEPLEASALAMVELSISMLSEQMPVDQDHMQLLSTRFNKRFKYRWEQVINFLKLHYVLSNRDDNGYWHANRNPNSIPLELQNLLTLWQYQAPSRFDLVENEEIFSSASYQYVLYGMGFETSLTTKLDGQKCHKAEQLYQLNRNKIAQYLQKLPTNRLLLEQLQGSKVAT

SEQ ID NO: 90634 - protein, 324 aa, Bradyrhizobium japonicum; identical to SEQ ID NO: 87666
  misc_feature (1)..(324): tr|A0A1Y2JP45|A0A1Y2JP45_BRAJP Tryptophan halogenase OS =Bradyrhizobium japonicum OX=375 GN=BSZ19_20970 PE=4 SV =1

SEQ ID NO: 90635 - protein, 347 aa, Betaproteobacteria bacterium
  misc_feature (1)..(347): tr|A0A2N2SUP7|A0A2N2SUP7_9PROT Tryptophan halogenase (F ragment) OS=Betaproteobacteria bacterium HGW-Betaproteo bacteria-17 OX=2013708 GN=CVU23_14550 PE=4 SV=1
WMSAAALSKLLPPSCRIRLIESEEIGIVGVGEATIPNIKHFNAALEIDEDEFLKATQGTFKLGIEFVNWGRLGDRYIHGFGKVGPDTSLVGFHHYWLRLKQLGKASGLDAYSINTVAPRQARFLRYRKDMPGSPLGDIVHAFHFDASLYARWLRGLAEKRGVMRTEGKVKQVLRRAEDGFIEALVMESGERIDGEFFIDCSGIRALLIGDALGVGYDDWSHWLPCDRALAVPSAPVKPLLSMTRSTAHSAGWQWRIPLQHRVGNGHVYSSRFMSDDEAASILLANLDGEKLADPRLIRFRTGMRRKLWERNCVAVGLSSGFLEPLESTSIHLIQTAVSRIATFFPHR

SEQ ID NO: 90636 - protein, 510 aa, Alteromonas sp.
  misc_feature (1)..(510): tr|A0A3N5YNB4|A0A3N5YNB4_9ALTE Tryptophan 7-halogenase OS=Alteromonas sp. U0105 OX=2259342 GN=DRW07_05660 PE=4 SV=1
MTSIVRVAIVGAGTAGWLAANHLGRTLCNRPEVQVDVIESPDVPPIGVGEGTVPNIRNTLRQFGISETEFIRRCDVTFKQSIKFVNWLDRSKHGEGNYYHHLFDRPNSHGVDATPFWLNGHYAGAYADAVGHQNQVCEAMLAPKTITTPEYEGVTGYAYHLNAAKFAALLAENAQQKYGVGHVLANVDDVVLADNGSIESLQTAQKGVLTYDFYVDCSGFNALLLGEAMNVPFVDKSDTLLIDKALAVQVPTDKDAVIPPYTVATAHQAGWIWDIALTERRGVGFVYASKYMSDEEAREKLSRYLGRSLMDLNVRHIPMKIGYRQSFWHKNCVALGLAMGFVEPLEATSILLSDFAANFLAERFPSDTSQLANLSERFNKTVGYAWDRTIDFIKLHYYLSDRADSAFWTDNRKEETVPESLKQRLALWTDYQPCAEDFFSKFEVFDLDNYLYVLYGMHYPTAPPLLSDEENHKVKQALSKQKAYAKHLVEQLPAHRALIEKIKQYGLQNV

SEQ ID NO: 90637 - protein, 515 aa, Novosphingobium sp.
  misc_feature (1)..(515): tr|A0A3B7DPK7|A0A3B7DPK7_9SPHN Tryptophan halogenase OS =Novosphingobium sp. THN1 OX=1016987 GN=C7W88_00430 PE= 4 SV=1
MIGSVKQVVIVGGGTAGWLSACLLAARRPELAITLVEAPDIPTIGVGEGTWPTMRETLATIGIHEAEFLSQCDASFKQGSRFDGWVDGSAQDSYLHPFTPPPPGDMAAMLQAWRAQSPDLPFATLMTPQAAACDENLAPRQRAMPDYAGALNYGYHLDAGKFAALLKRHATTRLGVTHISAQVTAVADDEAGNIASLSLHDGRTIAGDFFIDCSGLAAILIGDHCGVPWVDRSDVSFNDSALALQVPVEPGSAIASQTIGTAHEAGWIWDIALPTRRGIGCVFSSRFMDDARAEDVLRSYVAAKMPGTDLSALRPRKLTFSTGHRQRFWQGNCLAVGLSAGFIEPLEASAIVTIELSIKALAENFPRRAATMGLLADRFNELFRYRWDRIVEFLKLHYVLSRRPEPYWLAQRDPATIPPRLAEVLELWRDQPPSAWDFPRMDELFCAASQQYVLYGMGFPVPTGAHNAAASQTLAEVRQRSRALAAALPSNRTYLDALRPAAAADSIVMHGAAVK

SEQ ID NO: 90638 - protein, 504 aa, Marinimicrobium koreense
  misc_feature (1)..(504): tr|A0A3N1NT98|A0A3N1NT98_9GAMM Tryptophan halogenase OS =Marinimicrobium koreense OX=306545 GN=EDC38_2634 PE=4 SV=1
MDNRVRKVMIVGGGTAGWMAAAAMAKVLKNQYCDIQLVESDSIGTVGVGEATIPQIQLFNQMLGLDENEFIRRTQGTFKLGIQFVNWGHIGERYLHAFGEVGKDMEGVQFYHYWLKLFQAGEAPNIDAYTLNCQAVEQGRFMRPVDAGNSPLSRIAYAFHFDAARYAMFLRDYAMERGVRRREGKIERVSLRPDDGFIESITLDDGETLEADLFIDCSGFRGLLIEQALKTGYEKWSRWLPCDRAVAVPCAKVAEPVPYTRSTAHSAGWQWRIPLQHRTGNGHVYCSQFISDDEAADTLLKNLDGEPLADPKFIRFTTGKRLKFWNKNCVALGLASGFMEPLESTSIHLVQSGIAKLMSLFPNRNFDQEDIDEYNRQVDFEYTRIRDFLIAHYHVTQRDDSEFWNYCRTMDVPDTLKQKMNHYRKNGRIFRTNEELFNETSWLEVMHGQGLKAEGYHPIVDTLSKDEIARRLESIRNVINKSVEYMPMHSEFIAKHCAAPANTE

SEQ ID NO: 90639 - protein, 507 aa, Shewanella frigidimarina
  misc_feature (1)..(507): tr|Q083C9|Q083C9_SHEFN Tryptophan halogenase OS=Shewane lla frigidimarina (strain NCIMB 400) OX=318167 GN=Sfri_ 1786 PE=4 SV=1
MDQTRIKNIVIVGGGTSGWMTAAMLAKLFKKQLNITLIESDTIGTIGVGEATIPPLQIFNSVLGISEKDFIKATQATYKLGIEFENWHKNGDAYMHAFGNIGRDLGFTSFHHYWLSAQANCGQQDHSTFSAKGFWQYSLNYQAAKHNKFQPIQTIAQAQMSGITHAYHFDASLYANLLRQYSIQRGVVRVEGTITSTKLSNDGSIDSVTLLNGDCINGDLFIDCSGFSALLIEKALGVEYENWQHWLPCDSAYAVPCESTSPVIPYTKATAHDAGWQWRIPLQHRTGNGIVYSSQHMSDEQAKQHLLANLDGKPLAEPRKINFTTGRRVKQWHKNCVAIGLSSGFLEPLESTSLHLVQSAIIRLTKLFPRNGIQSHQIDEFNRQSQTEFEQIRDFIILHYHLNAKQSADGEHGLWQQCRDMDIPESLQRKIDLFKSTATVFRHQDELFTEAAWIQVMLGQGIIPSDYHPLTQAVSQVDLTDYLSNIRKVIATTVNQMPTHEAYIKKC

SEQ ID NO: 90640 - protein, 519 aa, Cellvibrio mixtus
  misc_feature (1)..(519): tr|A0A266Q275|A0A266Q275_9GAMM Tryptophan halogenase OS =Cellvibrio mixtus OX=39650 GN=CBP51_19255 PE=4 SV=1
MTSHTLRNVVIVGGGTAGWMTAAALAKFLPPQQYHIQLVESDAIGTVGVGEATVPHIRFFNQVLGIDENDFMQKTNATYKLGIEFSHWGKRGDRYIHPFGIYGQARNDISFHHYWLKLQQSGDPHPIGDYSVGVVAAYAEKFAYPHRDAHSLFSKYSYAFHLDASLYASFLRDYSTTRGVTRVEGKIIRVEQHPDSGFIRAVELDSGAQLAGDLFIDCSGFRGLLISDTLKTDFEEWSHWLPCDRAIAVPSSKTSEPLPYTKAIACTAGWQWRIPLQNRTGNGQVYSSHHISDDEVAHNLLHNLDGEPLANLHYLRFKAGRRVQSWNKNCVAIGLSSGFLEPLESTSIYLIQIAIMTLVECFPDAAMEETNRHEFNRTMANEYERIRDFLILHYHATQRDDSAFWNDCRTMNIPESLHYKIQLFREQGHVERYKQGMFLEPSWVAVYMGQGIIPTTYHPAVNALDIQHLRDYFHSLRNTIATGVNAMPSHTNSIQRYCNNPHSETTWPPAAMSLYGVFS

SEQ ID NO: 90641 - protein, 509 aa, Sphingopyxis sp.
  misc_feature (1)..(509): tr|A0A0W1DX42|A0A0W1DX42_9SPHN Tryptophan halogenase OS =Sphingopyxis sp. H050 OX=1759072 GN=ATE67_01315 PE=4 S V=1
MAQKVERVVIVGGGTAGWLAASLLAVSRRAKAAPLSVTLVEAPDVPIVGVGEGTWPTMRATLAAIGLDEGDFLSACDGAFKQASRFDGWVDGSADDSYLHPFTTPPAVPTGELLAAWQVAAPDQPYATAMSAQAAVCSEHLAPRQRAMPGYQGAANYAYHFDAGKFAALLATHATRELGVTHALAHVTGVERAANGDISALTVRDGAAITGDLFIDCTGFAGLLIGRALDIEWIDRGGQLFNDRAIASQVPVPPGSPIASQTIATAHEAGWIWDIGLPSRRGIGCVYSSRFMEPDAAEAVLRAHIARELPDAPEVPFRHIDFRTGHRARFWEKNCIAVGLSAGFIEPLEASAIVLIELSLRALTDNFPADRTAMDIHAARFNTLFRYRWDRIVEFLKLHYVLSRRDEPYWRAHREPSHIPPHLAEMLELWRSQPPSTWDFPYVDEIFSAESHQYILYGMGFPAPAGWSTSDRAMTALAEIRQRARMLTAGLPTNRSYLDALAAERIAAE

SEQ ID NO: 90642 - protein, 509 aa, Stenotrophomonas maltophilia
  misc_feature (1)..(509): tr|T5L763|T5L763_STEMA Tryptophan halogenase OS=Stenotr ophomonas maltophilia MF89 OX=1333853 GN=L681_05535 PE= 4 SV=1
MDTESTPAGRIRKVVIAGGGTAGWLAGCALAHQFRDQLQITLVESEQIGTVGVGESTVPPIRTFHRFLQIDEQEFLREVAGTFKLSISFENWRLPGDRFFHPFGTIGHGTWAAPFHHFWLDSLRRGMPSDLGDFCLESIASRGDRFSLRTQPQASYAYHFDASLYARFLRGRAEANGLRRIEGRIAQVRQHAHDGSVQALVLDDGQVIEGDLFIDCTGFRGLLIEQALGTGYEDWHEWLPCDRAVAVQTEAVAPPVPYTRAIAHEAGWRWHIALQHRVGCGLVYDSRHLSDDEAAAKLLRDAGAPPLRDPWNVPFRSGRRLKAWNSNVVSLGLASGFIEPLESTSIHLTISAVVRLIQLFPFDGISASLVQLYNDVSRQEMEHVRDFIILHYHATQRTEPMWKACREMSVPGSLQQRLQAWRERAHAWQDPGELFRIESWTSVLLGQGIPPGPPHPLARAVSDADLRTLLKGIQQPVHHAAARMPTQAEFIAQYCRSGVDVWRSTAANA

SEQ ID NO: 90643 - protein, 503 aa, Alteromonas sp.
  misc_feature (1)..(503): tr|A0A3N5YEA9|A0A3N5YEA9_9ALTE Tryptophan 7-halogenase OS=Alteromonas sp. U0105 OX=2259342 GN=DRW07_00960 PE=4 SV=1
MQHALRSICIVGGGTAGWMAATLLSNLLQRANIQITLIESPDIDTVGVGESTVPSIMDFLRACQIDLKEFVQSTSASFKLGIRFDDWLREDHQYFHPFGRVGHHINGFDFYQAWLQTKQAGVQTTWTEHSPCAQMAELGRFILRPRQPKSWTEDSIAHAIHLDALQAARYLRTQATEKGVIRSENTVTQVHQNAEGFIESLSLSDGSKLQSDFFIDCTGFNGLLINQALQVGYQDWSKYLPCNRAVVVQTENIATPQPFTVAKAQAAGWTWKIPLQHRTGNGYVFSSDYCSDDEAVQTLLSGLEGKPLNTPRFIPFTTGKRDKIWHKNCLALGLAAGFIEPLESTAIHIIYKTLIHFITHFPDRDFEHYNEAQFNRKVDADFEEIRDFIVMHYCTSERNDSEFWRRCTQSPLPASLQEKLSLFKQRGQLPPGVDELFTHESWYSVLEGMQYRPKKVHPLMATFNQQKLSDMMHANVKGIKEEVATMPSLHDFIQQHCPAKSAL

SEQ ID NO: 90644 - protein, 506 aa, Xanthomonas floridensis
  misc_feature (1)..(506): tr|A0A1A9MIC4|A0A1A9MIC4_9XANT Tryptophan halogenase OS =Xanthomonas floridensis OX=1843580 GN=A7D17_00725 PE=4 SV=1
MTQAQIRKVVIAGGGTAGWIAACALSHQFRDLLDITLVESEQIGTVGVGESTVPPIRTFHRFLQIDEQEFLREVAGTFKLSISFEHWLRQGDRYIHPFGITGQSTLVCAFHHLWLESQRRGMGGSFGDYCLETVASRVDRFALPREPAVNYAYHLDAALYARFLRTRSEACGVTRIEGRIQQVTVHPDSGDVASLVLEDGQVIAGDLFIDCSGFRGLLIEQTLHTGYEDWSHWLPCDRAVAVQTEALGPPVPYTRAIAHEAGWRWHIPLQHRVGNGLVFSSRHLSDDEAHAKLLRDVAAPAVKDPWMVPFRTGRRLKAWNKNVVSLGLASGFIEPLESTSIHLTISAVVRLLTLFPAQGIAPSQVQLFNDVSRAEMEHVRDFVTLHYHATQRKEPLWRQCREMELPESLAVRLRAWRERAHAWQAADELFRVDSWTHVLMGQGLMPEQHHPLTRAFSDQDLQRLLDGIAQPIQHAVEQFPSQQAFIERYCKARPEVWGARTPVMAR

SEQ ID NO: 90645 - protein, 511 aa, Alteromonas sp.
  misc_feature (1)..(511): tr|A0A3N5Y4Q6|A0A3N5Y4Q6_9ALTE Tryptophan 7-halogenase OS=Alteromonas sp. U0105 OX=2259342 GN=DRW07_01710 PE=4 SV=1
MTDEQVREIVIVGGGTAGWMTAAALAKSFYKKGRRIRLVESDEIGTVGVGEATIPAIRTFNEVLGIDENAFVRATKGTFKLGIEFVNWGNIGEKYIHPFGVYGSPMADNIPFHHYWLKLRDAGYDRPLSSFSLAIAAAKRGRFSRPQNIPNSPLAQMAYAFQFDAGLYAKFLREFAEKREVQRIEGKVDSVALSQTDGSIESVTLASGQVIHGDLFIDCTGFRGLLIEEALQTGYEDWSHWLPCDRAVAVPCESNGPPIPYTRATAHTAGWQWRIPLQHRTGNGHVYCSKYMTDNEATNILLKNLDGKPIADPKPLRFKTGRRKAFWHKNCVAIGLSSGFLEPLESTSIHLIQTGITKLLSLFPDKRFSQSLVERYNKITAWEYERVRDFLILHYKVNQRTDSDFWIQCRNMPIPDELQNKLDLYITGGHIFRDNEELFGIPSWLAVMEGQNAHATGHHPLAESREAERLHQHLTKMQQVIAHCAESLPTHADFISRHCASESWPRNKMGE

SEQ ID NO: 90646 - protein, 494 aa, Marinimicrobium koreense
  misc_feature (1)..(494): tr|A0A3N1P260|A0A3N1P260_9GAMM Tryptophan halogenase OS =Marinimicrobium koreense OX=306545 GN=EDC38_2314 PE=4 SV=1
MQNTSVRRVVIAGGGTAGWVAAAALSHQLGKLIDVVLVESDQIGTVGVGEATIPPMKAFHKLLGIDEQEFMCATEAVFKLGIEFKNWGQVGEQYFHPFGATGQSSYLADFQNFWLYGKSKGIHAGFEEYSLAAQAAKANKFAISKKGSLNYAYHLDATRYAQFLRQFSEKLGAKRVEGKIQHVQQHMNGDIKALQLESGEVVEGDLFIDCTGFTGLLIDKTMKVPYEDWTHWLPCDSAIAVQTESVESPRPYVTCTAHKAGWQWHIPLQHRVGNGNVFCSKFMSGDEATQHLLDNVQGEVRTEPRVIKYKTGRRKVFWTKNCVALGLSSGFVEPLESTSIYMFMIGVIRLMRMFPFNGITQPIIDEYNQQNIAELENVRDFIILHYHATSREDSEFWRYCKHMDIPQSLSHRIELFKENALVFLGENELFRLSSWLHVMLGQGIMPKRYHSIFSTMSDEELVGHLSNTRKTISDAVNKIPTHQEFINHYCKSRC

SEQ ID NO: 90647 - protein, 496 aa, Marinimicrobium koreense
  misc_feature (1)..(496): tr|A0A3N1NRU6|A0A3N1NRU6_9GAMM Tryptophan halogenase OS =Marinimicrobium koreense OX=306545 GN=EDC38_2198 PE=4 SV=1
MNHSIKNVLIVGGGSSGWMAAAVLARFFSKQIQIQLVESSEIGTVGVGEATIPPIRTFNDVLGIKEADFLKQTMGTIKLGIQFENWSQPGDSYMHAFGEIGRNLGIAGFHHYWLKARQAGVAEDFWRYSLNEQAARHNRFAPMETIPGTQFPGLTHAYHLDAGLYAQMLRAYSEKLGVKRIDGKIQTVDKDSESGDIAAVQLESGERLEADLFIDCSGFRALLIGEALDVDFEDWSHWLPCDRALAVPSEAAETITPYTRAIAHEGGWQWRIPLQHRTGNGLVYSHRHLSDDEATHTLLSNLDTPALADPRPIRFKTGRRVQQWCQNVVSLGLSSGFLEPLESTSLHLVQQGLTRLIKLFPRNGIQPSDIEEYNRQSQIEFEKIRDFIILHYHLNSKTDSPFWRMCREAPKPESLLRRIDLFAGSGRVFREQDELFSETAWEQVMIGQGITPQDYHPLVDNLEDHQLREFMNSWQRIVDKTVAQMPSHNDFIASLK

SEQ ID NO: 90648 - protein, 480 aa, Marinimicrobium koreense
  misc_feature (1)..(480): tr|A0A3N1NR99|A0A3N1NR99_9GAMM Tryptophan halogenase OS =Marinimicrobium koreense OX=306545 GN=EDC38_2635 PE=4 SV=1
MDKANLEHLVVVGNGLVAAGTVVTLARFLSRYGARVTWIRTGEDDVSPVEVAQPPFLEWLAMVGLPERDLMVRAQGLFSLGVLGQGTKGEFFMPYGRHGIPAAPASFEHEFFRACAPDKQARFNEHFLATQAARRGRFDFPVNDPRSVKSTLRYGMNLDKGAMRTLLAEYADSLGVSAVRCTRLSVEADPQFGIQRLRLDDDESVQGDFYLDATGDEALLIGQGLGVPLEEASALWSYHWVGRGGTTLDWMPYSTLTQQVWGWQRAVDTQQSGVVERWVSPGETAEQATAKMQSQDCDWVKYPLQWGQRETPWRHNCLALGRAAGQPGELLCSEWHRACQSLLLWLELLPDAAGRPALRSEFNRRDRALFESWRELHELLILAGDPRSEAVTESLRWRLQVFESFGRLWRRDQEPLPDETQLALLIGLGWRSASADNLLAEASPEDLRRKHQRIYDTLVSAAERMPTLKQVIQHHCPAVV

SEQ ID NO: 90649 - protein, 503 aa, Sphingopyxis sp.
  misc_feature (1)..(503): tr|A0A0W1DWX8|A0A0W1DWX8_9SPHN Tryptophan halogenase OS =Sphingopyxis sp. H050 OX=1759072 GN=ATE67_00940 PE=4 S V=1
MSQSAAEPLHVVILGGGSAGWMTAALFGHHWRAHPVRITVVESPDIGIIGVGEGSTPQLKAFFDTLGIAESDWMPACDATYKLGIGFEGWSLADGYQRYFHPFPGPLDVHTEGDFFRNAALRRSGVDVEANPDSFYLAARVAARGGGPHGGETFPFDLGYGYHFDAHKLGTYLRGHAVGQGAEHLARTVERVEIAANGDVAALILDGGERLEGDFFIDCSGFRAMIAQQALGARFLPFAENLFNDRAVVAPTAHPATGPVVTATRSIAMSAGWRWSIPLTTRVGNGYVYSSRYLDRDAAEAELRAALGLGDADAPLRHLDMKVGRLATSWTANCLAMGLAQGFIEPLEATALHIVIATIQEFLAAYEGGNFTARHRDMFNARIGARYDGIRDYIVAHYRMNRRGGSGYWHDASTMDALSDNLKTLITAWFTGADLGEAIDDLGVGGYYPNLSWHCLFAGYGTFPAVTALRAPVAADRAANGDQIERFLARAAANFSSPGGPTA

SEQ ID NO: 90650 - protein, 505 aa, Erythrobacter nanhaisediminis
  misc_feature (1)..(505): tr|A0A1I5NP83|A0A1I5NP83_9SPHN Tryptophan halogenase OS =Erythrobacter nanhaisediminis OX=604088 GN=SAMN0448806 0_2003 PE=4 SV=1
MTDQETFDICIAGGGTAGWMAAALLARFLPATHRVTLVESAEIGTVGVGEATIPQIHLLNNALGLDEAEFLRETRATFKLGIEFDGWKREGEAYMHAFGPVGRAHGLLPFHHYWLRANQAGWAKPLANYSLNEMAARALKMRRGPRIAHTPAMPYAYHFDAGLYAAFLRRYSEQRGVTRVEGTIARVEQNGESGTITALDLGDDRRIEADFFIDCTGFRGLLIEQALETGFDDWSRFLPCDRAMAVPCENGGDFTPYTRSIAHRAGWQWRIPLQHRIGNGLVYSSSHLDDNEAVRLLLGNLDGSPQADPKPIRFTTGKRCKHWHGNCLALGLAAGFMEPLESTSIHLVQSAVSRFLSVLPAKTPDPAIVDWFNDQAQFEWTRIRDFLVLHYSANEREGEPFWDAVRHMSLPDTLAAKLENWRATGFIHREHEELFTEVGWFQVFAGQGVEPRDYNRLADALSDDDLRKLLDGTEAALVEEARQMPSHRDFLTRFANLSPQQEASA

SEQ ID NO: 90651 - protein, 518 aa, Caulobacter sp.; identical to SEQ ID NO: 84040
  misc_feature (1)..(518): tr|A0A0Q6UFL0|A0A0Q6UFL0_9CAUL Tryptophan halogenase OS =Caulobacter sp. Root343 OX=1736520 GN=ASC70_22200 PE=4 SV=1

SEQ ID NO: 90652 - protein, 506 aa, Caulobacter sp.; identical to SEQ ID NO: 84076
  misc_feature (1)..(506): tr|A0A0Q6UQC2|A0A0Q6UQC2_9CAUL Tryptophan halogenase OS =Caulobacter sp. Root343 OX=1736520 GN=ASC70_07785 PE=4 SV=1

SEQ ID NO: 90653 - protein, 522 aa, Caulobacter sp.; identical to SEQ ID NO: 87659
  misc_feature (1)..(522): tr|A0A0Q6V1T0|A0A0Q6V1T0_9CAUL Tryptophan halogenase OS =Caulobacter sp. Root343 OX=1736520 GN=ASC70_02035 PE=4 SV=1

SEQ ID NO: 90654 - protein, 505 aa, Alteromonas sp.
  misc_feature (1)..(505): tr|A0A3N5XZD0|A0A3N5XZD0_9ALTE Tryptophan 7-halogenase OS=Alteromonas sp. U0105 OX=2259342 GN=DRW07_16110 PE=4 SV=1
MHQDTLHIVILGGGTAGWMTANLMAARWKDKNIHLTLVESPDVAVVGVGEGSTPSMQNFFQEIGVAESEWMPECSATYKNGITFEGWSSMPGFEAYCHPFPSQMDTFTFPQFETNCQLRRHHFDVDTHPDRFFLGAYLSQNSKSPKANYAFPFDHPHGYHFDAGLLGKFLRKKAMQRKVKYVQQHVERVIQRENGDIASIEFRDGGTLEGDVFVDCTGFSALLMQKTLKVPYIALDDVLFNDTAVVVSTPVDMKHLPSETRCTALKYGWVWDIPLTSRTGNGYVFSSRYCTLDNAETELRQHLGLLDADVECRSVKWKQGRLQKGWTHNCLAVGLSQGFLEPIEAMSLHLVYCSIGHFITEFEKGKFTTQYQNEYNRLIDSAFDSVTDYIVAHYRLNSRRDTEYWKDNAANPHISNAFRAIVASWMGASQNSLADALKRYDTSHYFPLTSWLILFAGYGVFPAQAQAQPLQAGMQSTDMQALDNFIKRCASNFDTHQATVSAYHS

SEQ ID NO: 90655 - protein, 224 aa, Novosphingobium sp.
  misc_feature (1)..(224): tr|A0A258XPA7|A0A258XPA7_9SPHN Tryptophan halogenase (F ragment) OS=Novosphingobium sp. 16-62-11 OX=1970405 GN= B7Y31_05275 PE=4 SV=1
GVVYCSDFLGHDVALEKLLSSVEGEKLVKPNHIRFRTGARRKQWHRNCVAVGLSGGFMEPLESTSIHLIQRAILRIVRMLPAGAISQRDIDEFNDQQFTDMEQIRDFLVLHYKVTDRRDTPFWRHVSAMDVPESLTHKIELFRETGRVFRKNEELFAENSWVQVMMGQGIMPQSHHPVAAKLRDEEMAHLFGTLRDQVARTVAALPVHGDYVVRYCGADVPVAA

SEQ ID NO: 90656 - protein, 248 aa, Novosphingobium sp.
  misc_feature (1)..(248): tr|A0A258WM29|A0A258WM29_9SPHN Tryptophan halogenase (F ragment) OS=Novosphingobium sp. 16-62-11 OX=1970405 GN= B7Y31_12910 PE=4 SV=1
MTTPHHPRRIVIAGGGTAGWMTAAALARTLGPVAQVTLVESEQIGTVGVGESTIPPLVAYNRILGIAEADFMRATQATFKLGINFENWRVAGESYFHSFGGTGKDHWSAGFQHFWMNGLTRGHTVPYSEYCLELKAAEAGRFAHLPEDRMNYAYQLDSGLYARFLRGMAEADGTKRIEGKIAQVQLDGETGNIAALLLESGKRIEGDLFIDCTGFRALLIEGALRVGYDDWTHWLPCDSAIAIQTASV

SEQ ID NO: 90657 - protein, 525 aa, Salinisphaeraceae bacterium
  misc_feature (1)..(525): tr|A0A2D4SC77|A0A2D4SC77_9GAMM Tryptophan halogenase OS =Salinisphaeraceae bacterium OX=2026789 GN=CMN28_08675 PE=4 SV=1
MGGLAAGKIASLELTQSHNTPRSILIVGGGTAGWMAAVLFAKAWGRQDCRITLMESSDIGTIGVGEGSTPRMRDFFRQLDIPESEWMPACNATYKCGIRFPDWSTRPGYPSYYHPFFTLSDNEFVRSFFNNVTLRNHKRAKVHAHPDAFFVSQYLAKSRRAPLAPDGIEYQTDYAYHFDAGLLGEFLKQKALAWGVDHRIDTVTAVNQADDGAIASVDTEGSGALAADLFVDCTGFAGLLIGKTLDEPFVSYSDSLLNDRAVALPTPPEQDQGLPSETLSTALKYGWAWKIPLTGRFGNGYVYSSTYCEPEQAEAELREHIGQHDASVQARHLKMRIGRRERCWARNCLAVGLSQGFIEPLEATALMLVQETIEDFIEHQPRDGADGRAREALNATIAAKFDGVRDYVFMHYKLNTRADTAYWRDCRDLPPCSDLVAELLRTWDRGGDIVELLKQNSQRVVYSPTSWLCILAGMGRFPSNPKKPKKNQRVADPDIVRQHCEALLGHFPDHRSAVEGLRTSGSAAS

SEQ ID NO: 90658 - protein, 497 aa, Alteromonas sp.
  misc_feature (1)..(497): tr|A0A3N5YP58|A0A3N5YP58_9ALTE Tryptophan 7-halogenase OS=Alteromonas sp. U0105 OX=2259342 GN=DRW07_08695 PE=4 SV=1
MNDTIKKVVVVGGGTAGWLSAALLKKVLGQTVELELVESESIGTVGVGEATIPPIRMLNNVLGLNEADVIRETKATIKLAIKFENWRVKGEGYFHTFGSPGRSYAFCHFHHFLNRARQQLGESSSIWDYDLNYLSAIEGRFAKMDVTDPILDMPFAYHFDASLYAKFLRKVAEQAGAVRTEGTIVDVTQHPGSGYIQGVRLANGREVTGDLFIDCSGFRGLLIQQQLNTGYIDWSHWLPCDRAIAIPSERHEHTLPYTRSIAHTAGWQWRIPLQHRNGNGHVYCSNYMSDDEALAVLKNNLDTAPLADPNFIKFKTGRRRKQWNKNVIAIGLSSGFLEPLESTSIHLIQSAIVRLLHLFPHQGINDSIMSEYNAQSALEFEQIRDFIILHYHVNERDDSQFWRDVRNMDVPERLRHKIDLFRQNGRLFNEHNDLFLDASWLQVMQGQGITPQDYHPMAKSIPQDKLIDMLKTIRKIKQDPVAQLPTHDEFLAKVCGN

SEQ ID NO: 90659 - protein, 517 aa, Streptomyces sp.; identical to SEQ ID NO: 87601
  misc_feature (1)..(517): tr|A0A1C4KCS3|A0A1C4KCS3_9ACTN Tryptophan halogenase OS =Streptomyces sp. Termitarium-T10T-6 OX=1839775 GN=GA01 15253_1010510 PE=4 SV=1

SEQ ID NO: 90660 - protein, 504 aa, Erythrobacter nanhaisediminis
  misc_feature (1)..(504): tr|A0A1I5MEP0|A0A1I5MEP0_9SPHN Tryptophan halogenase OS =Erythrobacter nanhaisediminis OX=604088 GN=SAMN0448806 0_1321 PE=4 SV=1
MTDPVRKILIVGGGSAGWMAAAYLSRALSDTVAIELVESEAVGTVGVGEATIPPIREFNRMAGIDEVEFVKATDATFKVGIEFENWGVPGDRYLHAFGHVGQELDAMVRLHHWWLLGKQAGGPDYPQWQELFLGRAAADLDRFAIDQRPGSELSRLLPHAYHFDSLSYGKYLRKVAESRGVKRTEGKIVAVHRASDTGEVTGIGLDDGATLEADFFIDCSGFRSLVLGEAMEVPFDDWSHWLPADRALVVQTENVGETISPMTRAIAHSVGWQWRIPLRSRTGNGHVFSSAFSSGDEATERLLATISGDLRGDPRIITFRTGRRQDAWSGNVVGIGLAAGFLEPLESTSIHLVQASLERLVELFPTKAIDPVLRDRFNAQTQQEWEQVRDFVIAHYAVMQRDDSEFWRHCRTMELPDTLSTILELWRSHGSVAIDGGHLFQLGSWTSLLLGQNLEPDRPHPATARAQPQPIADRIAHIAASLRKSAEGLPDHGQFLARMAGTAS

SEQ ID NO: 90661 - protein, 517 aa, Caulobacter sp.; identical to SEQ ID NO: 87664
  misc_feature (1)..(517): tr|A0A0Q6UTY9|A0A0Q6UTY9_9CAUL Tryptophan halogenase OS =Caulobacter sp. Root343 OX=1736520 GN=ASC70_08180 PE=4 SV=1

SEQ ID NO: 90662 - protein, 521 aa, Sphingomonas sanguinis
  misc_feature (1)..(521): tr|A0A147J166|A0A147J166_9SPHN Tryptophan halogenase OS =Sphingomonas sanguinis OX=33051 GN=SB4_04420 PE=4 SV=1
MTGRAERTDGPVRRVVVVGGGSAGWIAACRLAAQSRRTGGDVRVTLVESRNVPTVGVGEGTWPTMRNTLAKIGISETDFIRSCDAAFKQGARFVGWTDGTADDGYYHPLNPPAGATEIDLAPHWLHRSEMGASFADWVDYQAMLCDAGLAPKSIVAPEYAGHANYAYHMDAGKFATLLRDHGVGQLGVEHVLGDVVRVAVADNGDIAHLELADGGTVAGDLFVDCTGFAALLIGGVYDVPFRRCGDVLFADRAIALQVPYAQPDDPITCHTVSTAQESGWIWDIGLWTRRGVGHVYSSAHTSDDAAEAALRAYIGPAAEGLSARRITIYAGHRTRFWQNNCVAVGLSAGFIEPLEASALMLIETAMDAIADRLPRTRAAMDVMARQFNATFTHHWMRIIEFLKLHYVLTKRTDTDFWRDNVAASSIPDGLAERLELWRHHSPGPQDFDHAREVFSWPSYQYVLHGMGFESHRPPVDPAAPDAVLAERFVGRTARAKDELRARAPVHRDLLRAIREHGLQRV

SEQ ID NO: 90663 - protein, 500 aa, Alteromonas sp.
  misc_feature (1)..(500): tr|A0A3N5Y2M9|A0A3N5Y2M9_9ALTE Tryptophan 7-halogenase OS=Alteromonas sp. U0105 OX=2259342 GN=DRW07_00945 PE=4 SV=1
MNVSPSSKQHSILIVGGGTAGWIAANLIACKLPDFDVTVIESDDIGIIGVGEGSTPHLKLFFETIGIADHEWMPQCNATYKNGITFSGWSHKPGYDSYFHPFETQVDDPFTVPLFFKNIQARMQGFDVDARPDRYFLESFLSQHHLGPLPDDSFPFGVAFGYHFDSGLLGKFLTETAKKRGVKRVEGKISHVLTSASGAIHQVVLENGESITADMFIDCSGFRSLLLQDTLHVEFKSFKENLFNDAAVVLATPISSPLPVETKATALSNGWAWKIPLQNRFGNGYVYSSDYINSTQAEHELRAHLGMLDSDTEARHLSMKVGRVEKHWHKNCVAVGLSQGFIEPLEATAIALSLNTVLQFINCYQEGGFTNQYEDVFNQDINKRFDGIRDYVVCHYKANQRSDTEYWRDNAANPHISERLKAILHLWQNSGNFAAEMYQRNLYGSYNPKSWACLLAGYGVFPNQPLRQVPDPKSYQLELDNVADFLRRCGLNFKPHSALL

SEQ ID NO: 90664 - protein, 505 aa, Cellvibrio mixtus
  misc_feature (1)..(505): tr|A0A266QDW9|A0A266QDW9_9GAMM Tryptophan halogenase OS =Cellvibrio mixtus OX=39650 GN=CBP51_13010 PE=4 SV=1
MQKNTLGSICIVGGGTAGWMAASLLSSALQGSRIKITVVESPDIATIGVGESTVPTIMDFLRSCQINLKEFVEATSATFKLGIRFDDWLKPGEQFFHPFGRIGQDVNGFEFYQVWLKTLRDGHATRWLDHSPCAIMAENQRFMLRPPQQQNWVLNSYSHALHLDAILAARYLRELCKTRGIERVEATVNKVMVDERQFIRSLELDNGTTLASDFFIDCTGFKGLLIEGALNIGYEDWTHYLPCNRAVAVQTENASGLHPFTVATARDAGWTWKIPLQHRTGNGYVFSSQYCTDDQAIDTLRKAVSGKLLNEPRVIPFTTGRRKKIWHNNCLALGLASGFLEPLESTAIHLVHKTLVHFVRHFPDRDFESYTEQAFNQKINIDYQEIRDFIILHYCTSGRDDTEFWRWCQAMPVPDSLYEKISLFRERGQIEHIPGQFFTIDSWCSILDGMKVSPKKYHPLVNEFDKQYLATLMQESARSVRETVMKMPGHEEYIQQHCAVKKPSV

SEQ ID NO: 90665 - protein, 523 aa, Cellvibrio mixtus
  misc_feature (1)..(523): tr|A0A266Q769|A0A266Q769_9GAMM Tryptophan halogenase OS =Cellvibrio mixtus OX=39650 GN=CBP51_01040 PE=4 SV=1
MADHVTRVVIVGGGSAGWLAAGIIAATSPNHVQVSLIESPDVAPIGVGEGTWPTMRATLQSMGILETDFFRECDASFKQGSKFSRWTSLSPNDDYYHPFTLPAKYHEINLAPFWLPFKEKIPFANAVCPQAAVCDFGYAPKQITSPEFSAVLNYGYHLDAGKFAPFLHKHCVEKLGVNYISANVTVINSHENGDIRSVSTDTQGEVVGDLFVDCTGLSSMLLGKHYKVPFVSQQHILFNDSALAVQIPYIENADAIASHTLSTAQTSGWIWDIGLQSRRGIGHVFSSRYTTDELAERELRNYIAPSVGEKMAEELSVRKISFNPGHRDKFWHKNCVAIGLAAGFIEPLEATALVLIEISAKMIAEQFPVNRSTMDIVAKRFNNTLGHHWKRIIDFLKLHYVLTKRTDTEYWRDNCLAGTIPDSLQELLALWKMQSPWLHDEMRREEMFPSASYQYVYYGMKGMTEAADGNRYDPGGKPLHDRNLRKAEALFMENSQKIQQLRKILQPNRELIEKIKLYGLQTI

SEQ ID NO: 90666 - protein, 501 aa, Pelagimonas varians
  misc_feature (1)..(501): tr|A0A238L427|A0A238L427_9RHOB Flavin-dependent tryptop han halogenase RebH OS=Pelagimonas varians OX=696760 GN =rebH_2 PE=4 SV=1
MRLAIVGGGSAGWMTAVYLDRTLNGTNGPKRVQITVIESPKIDRIGVGEATVPTILKTLQDMGISEKEFMSEADATFKQAIKFVDWNKGRDSNAYYHCFDRYQTSGRDNFSLRWALSGRDKPFAYTVSAQPYICDQNRAPKRPSDKEYQGRLPYAYHMDAEKFAEFLAKTGVERGIAHISDTVTDVNTDPKGIRSVVLEHGGEMAFDFFIDCTGFARLLMSQLPGYGIRSFSDKLLCDRAVAIQVPHDPEHPEILSSTESTAVENGWIWNISLQSRKGYGYVYSSAHCSDEDAETRLRSFIGPRSESVAARRLSFQSGVLKNPWVGNCVAVGLSAGFVEPMESTGIYFVEYAARMFAELFPIFGNNLLLQSRFNELIHSRYDEVLDFIVAHYVLSDRDDTAFWKEARKQEKATEKLQDLLKIWQHKMVSASDFANSHQLFGHLNYEYCVYGSNYLPDKIRIHQSHNGAIVNKAIQTAVQSFSECLPRNSEYFSSKSPGNED

SEQ ID NO: 90667 - protein, 504 aa, Cellvibrio mixtus
  misc_feature (1)..(504): tr|A0A266QAP8|A0A266QAP8_9GAMM Tryptophan halogenase OS =Cellvibrio mixtus OX=39650 GN=CBP51_08010 PE=4 SV=1
MHDNNIRRIAIVGGGTAGWMTAAALSKLIKPDYCQIRLIESEDIGTVGVGEATIPQIQLFNKLLDLDENEFVRKTQGTFKLGIQFVNWKKIGHKYIHAFGEVGKDMEGVQFYHYWLKMLAQGKAEELDNYTIGGLASDRGKFMRPIDAGNSPLSNIAYAFHFDAGLYARFLREYSEARGVLRTEGKIVDTILRASDGFIESVQLASGERVEADFFIDCSGFRGLLIEQALNTGYEDWAHWLPCDRAWAVPCESVGEPTPYTRSTAHSAGWQWRIPLQHRIGNGHVFSSRFMSEDEACSILLNNLDGKPLAEPRLLKFVTGKRKKVWNKNCVAIGLASGFMEPLESTSLHLVQSTIARLMSFFPNKSFDQEDIDEFNRQTSFEVEKIRDFLILHYHATERNDSDFWNYCRTMSIPEDLTQKIEQFKKNGRIYRNNTEMFNELSWFEVMHGQGIHPRAYHPLVDRMSNDEIAKRLEGIRGVIEKSVDYMPTHAEFIAEHCKAIKIY

SEQ ID NO: 90668 - protein, 497 aa, Cellvibrio mixtus
  misc_feature (1)..(497): tr|A0A266Q2P2|A0A266Q2P2_9GAMM Tryptophan halogenase OS =Cellvibrio mixtus OX=39650 GN=CBP51_19000 PE=4 SV=1
MSMSSKPVSHIVIAGGGTAGWMTAAYLANWLENTNIRVTLVESELIGTVGVGEATVPGIHQFIKDLNIRESEFIKATNATFKLGIEFENWVAPNQSFFHPFAGYGVPIEDRPFHKTWWAAKQQGYSAALAEFCLCTQLAKAGKFAQPSFDPDSRLAWYNYAYHFDATLFAKYLRGYAEARQVKRIEGKINQVQLDPDSGFICSLHLESGEQISGDLFVDCSGISALLIGKTLGVGYEDWSQWLLSDSALAVQTQSVTEPDPFTRSTARTAGWQWHIPLQHRVGNGYVFSSQFITEDQARAELLANLRGEGVTEPRLIRFTTGMRQDFWHKNCVAIGLSSGFLEPLESTSISLIQTGINKLAAFLVDYEIQEKQVAEANRLNRLEYERIRDFIILHYKLNGRTEPLWQHVRDMEIPATLEEKIATFKASGDIQLLEIESFTEHSWISMYAGFAVNPTGLAPSPEPGKMQAVMDKMRAAVGKGRDYAPSHAEFLQTLEP

SEQ ID NO: 90669 - protein, 493 aa, Marinimicrobium koreense
  misc_feature (1)..(493): tr|A0A3N1NZW6|A0A3N1NZW6_9GAMM Tryptophan halogenase OS =Marinimicrobium koreense OX=306545 GN=EDC38_2319 PE=4 SV=1
MNKPVRKVVIAGGGTAGWVCAAALSSQLGDLLNIVLVESEDIGTVGVGEASIPPMRNFHRLIGVDEQQFMAATGATFKLGIAFENWARDGDHYIHSFGKTGKETWMADFQHFWLRAREQGFGGELGEYCMEHEAAREGKFATSPNGSLNYAYHLDATRYAAFLRSKSESEGVTRIEGKIQQVHLNPDSGHIESLEMASGDVVEGDLFIDCTGFRGLLIEQALHTGYEDWSHWLPCDSALAVQTESVGPPPPYTLSSAHDSGWRWRIPLQHRVGNGLVYCSRYLSDEAARDRLLSSIEGEPLTEPRLIRFRTGRRRQTWNKNCVAVGLSSGFVEPLESTSIHLIMISMTRLIQLFPFDGITPSLVSHYNRIAEDELEKIRDFIILHYHATERSDSPFWRHCGGMSIPDSLRERIALFREQGHAYQSPNELFRLDSWVQVMLGQRINPERYHPIVRAMGDERLKKTLDDFRRQVSLGVERLPPHGAFVEEYCREG

SEQ ID NO: 90670 - protein, 518 aa, Cellvibrio mixtus
  misc_feature (1)..(518): tr|A0A266Q8S6|A0A266Q8S6_9GAMM Tryptophan halogenase OS =Cellvibrio mixtus OX=39650 GN=CBP51_03020 PE=4 SV=1
MSNSIKKIIIVGGGTAGWLAAGLLAAEFKHAESSIEITLIESPDVNTIGVGEGTWPSMRATLRKIGISETELVRECFVSFKQGSKFVGWRTGASDDVYHHPFSIPHGYAESNLAAAWQAKFADHPFAEIVSSQFVVAEHGCAPKQVATPEYAGVLNYGYHLDAGKFAVILQRHCTANLGVKHILDHVTKVVSADNGDIAAVDTKATGIISGDLFIDCSGLSCLLLGQHFGVPFVDKKHLSLNDTALAMQVPYPEKNSPIESCTVATAQSAGWTWDIGLSSRRGVGYVFSSGYISEEQAERELRAHIAKSVGAAVADSLSSKKLSIRAGHRQEFWHKNCVAVGMSAGFIEPLEASALALVELSMNMICEEFPVDRSAMSVVAKRFNEVFCYRWERIIDFLKLHYALTERRDSDYWRDMSSPEALPDRLRELLVLWKSRPPHRNDFIQVEEIFPSASYQYVLYGMGFKMDASALPRTSDNLPTALARIRETAEKTRKFLSGLPSNRALIDHVMLHGMPLI

SEQ ID NO: 90671 - protein, 503 aa, Pseudoalteromonas sp.
  misc_feature (1)..(503): tr|A0A4S1F8R4|A0A4S1F8R4_9GAMM Tryptophan 7-halogenase OS=Pseudoalteromonas sp. MEBiC 03607 OX=2563601 GN=E5N7 2_13435 PE=4 SV=1
MIKKIAIVGGGTAGWLAANHLGHALLHSGIEITLIESPNIASIGVGEGTVPSMRNSLQKFGISESDFINECDVTFKQSIKFVNWLDKHKHGANFYHHLFDHPHIFGEELTQQWLADGNGNDYAEFVSKQHVCCEKNLAPKTIATPQYAGINGYAYHFDAKKFASFLGSHATQHFSVKHLFAEIKDITCDQQGFITHLIDSEGNALEFDFIIDCSGFSAAFIGQKLGVGFVDKSDSLLTDTAITLQVPTQSEDEIPPYTIATAHQAGWIWDIALTERRGVGFVYSSKYMSDEQANEKLHRYLGNKFEHLTPRKIPMKVGHREKMWHKNCVAIGLSQGFVEPLEATAILIADFSAGLLAKRFPRSRDDIKLVADDYNQHVNYVWQQTFDFIKMHYCISDRTDSAFWRDNKKTEQLSEKLKNNLTRWQRFTPVREDFASKFDLFDLENYLYVLFGMHYVPAKQQSKQNDNQHVAEFKQQRVKQLLNELPKHRELLDKIKKFGLQKN

SEQ ID NO: 90672 - protein, 520 aa, Novosphingobium sp.
  misc_feature (1)..(520): tr|A0A3B7DQM8|A0A3B7DQM8_9SPHN Tryptophan halogenase OS =Novosphingobium sp. THN1 OX=1016987 GN=C7W88_19850 PE= 4 SV=1
MVRAVRDVVIVGGGTAGWLTAAIIAAKHKARIGHDFSVTLVESPNVPIIGVGEGTWPTLRSTLKSVGISETDFFRECDAAFKQGALFAKWTTGADDDAYYHPLVLPQRFGQLNLAPHWLAGSLNEGGDNGETFCDAVCPQGRLCDENLAPKSMVNAEYEGQANYAYHLDAGKFAPFMQRHCTEKLGVRHVLADMRQVLQDERGDIRAIATEQAGEIGGDLFIDCTGMRSLLLGQTLGVGFKDCNDVLFCDTALAMQVPYPSPDAPVATHTISTAQSAGWIWDIGLPTRRGVGHVYSSRHISREDAEEELRAYVGPAAEGLSVRKIDIRSGHREIFWKNNCVAVGLAAGFLEPLEASAIVLIELSAKMIADQMPPVREVMDVVARRYNEKTLYRWGRIIDFLKLHYVLSKRRDTAFWRDNMEPASIPERLQELMALWQYQGPYMHEEFDRVDEVFPSASYQYVLYGMGFRTEVSARTLEPEVREARRARAENADITARMLSGLPKHRDLIDRIVKYGLQPV

SEQ ID NO: 90673 - protein, 324 aa, Bradyrhizobium japonicum
  misc_feature (1)..(324): tr|A0A1L3FF94|A0A1L3FF94_BRAJP Tryptophan halogenase OS =Bradyrhizobium japonicum OX=375 GN=BKD09_RS26930 PE=4 SV=1
MSPLVQPVLRQLGLWTTFLAQGFAPSHRTLTSWDQAGLTSSELLLEARGPSWRVDRMAFDGWLTAAGCRAAERVDAKVCHLAREADGWSVACDDGNSHSARLIIDATGRARALADRQGSRAKAQDRLIAAYAEATTSGPAAPELLVEAFEDGWWYTMALDQGRRAFACMTDADLARGLRLNTPDGWRRALARTQFVSALASKIIRLEPPRLIPAGSRYAATTAGFHFLCAGDAASAFDPISGHGVVKAMRSGVFAAYAACDCLARGDAAALDRYGAWIAREAAAYATTLSEHYGSVSRWSERPFWRRRHADAPSPNPSSSLLEQ

SEQ ID NO: 90674 - protein, 516 aa, Pseudoxanthomonas sp.
  misc_feature (1)..(516): tr|A0A4V2HD82|A0A4V2HD82_9GAMM Tryptophan 7-halogenase OS=Pseudoxanthomonas sp. NML171202 OX=2480817 GN=EA661_ 16625 PE=4 SV=1
MDEAIRHVVIVGGGSAGWLTAGLIAAEHRDRHGPTLRVSVLESPDVPAIGVGEGTWPTMRDTLRRIGVGEADFVRACDATFKQGSQFIGWVDGGAHDRYTHPFTLPKGYGETQLAVAWAAQGEVPFAHLACFQPHLCDAGRGPKQFATPEFAAVANYAYHLDATRLGAFLRQHCVERLGVQHVVGHMDAVVSHENGDIAALKVRDQPALEGDLFVDCTGLRALLLGAHYGIAPVGVEDILFNDRALALQVPYADPNAPIACQTLSTAQRAGWIWDIGLSARRGVGHVYSSAFTSDEEAEADLRAYIEATGGPAAATLPPARRIELQPGYRPTAWHRNCVAVGLASGFVEPLEASSLVLVELAAARLADEMPATRAQMDLLAARFNETFAYRWQRVIEFLKLHYVLSRRPTPYWQAHREDASLSPRLRELLQLWRHQAPSRSDFPRSEEIFPSASWQYILYGMGARPHSRPARRSEELQAAQACFAESAALVQRMLPALPSHRALVEHIKAHGLPRL

SEQ ID NO: 90675 - protein, 518 aa, Marinimicrobium koreense
  misc_feature (1)..(518): tr|A0A3N1P4P3|A0A3N1P4P3_9GAMM Tryptophan halogenase OS =Marinimicrobium koreense OX=306545 GN=EDC38_2306 PE=4 SV=1
MRRAFFVLMQNSLNSLCIVGGGTAGWMAASVLSSALQGSGIKITVIESPDIASVGVGESTVPSILDFLRACRIDLNAFIKATSASFKLGIRFDDWREVGEHYFHPFGRVGQDINGFEFYQAWLKTLSEGQATRWLDQSPGAIMAEHSRFMLRPPRSNDWALRNYSYALHLDAVLVARYLRDLCLARGVARIEATVNDVAVDDRQFIRSVSLDSGARVTSDFYIDCTGFRGRLIDRALNVGYRDWSDYLPCDRAVVVQTRNTEDPVPYTQATARAAGWSWRIPLQHRTGNGYVFSSRYCSDEQAIQTLLTTVNGEALNEPRVIPFVTGRREKIWHHNCLALGLASGFLEPLESTAIHLVYKTLIHFIRHFPDRDFDPGIEQAFNRKINTDYHEIRDFIILHYCTADRRDTPFWQNCQNLPVPDSLWEKIRRFRERGELESNSGDFFSRDSWCSIFEGMNIRPRKYHPLMDAFDCQRLAAQLRQQADHIRTTVMKMPSHGDYIRQHCGVESRVRTSGEVS

SEQ ID NO: 90676 - protein, 505 aa, Pseudoxanthomonas sp.; identical to SEQ ID NO: 85982
  misc_feature (1)..(505): tr|A0A4Q8LL16|A0A4Q8LL16_9GAMM Tryptophan 7-halogenase OS=Pseudoxanthomonas sp. NML171202 OX=2480817 GN=EA661_ 06515 PE=4 SV=1

SEQ ID NO: 90677 - protein, 505 aa, Pseudoxanthomonas sp.
  misc_feature (1)..(505): tr|A0A4Q8LMJ7|A0A4Q8LMJ7_9GAMM Tryptophan 7-halogenase OS=Pseudoxanthomonas sp. NML171202 OX=2480817 GN=EA661_ 06625 PE=4 SV=1
MSVSSIRNIVIVGGGTAGWMAAAAFARVLGPTYNVTLVESEQIGTVGVGEATVPHIKAFNNLLGVDEAEFVRQTQGTFKLGIEFVDWHHVGDRYFHGFGSEIGHPLGLLPFHQYWIKARRAGWAKPLGHYTLNTVAAPQGRFMTSASDVPPGSPLANIAYAYHFDAALYARFLRSYAEQRGVRRIEGIVETVHQHPESGDVIAVTLQDDTRVGGDLFVDCSGFRGLLIEQALHTGYEDFTHWLPCDRALAVPCEKVGPPVPYTRSTARAAGWQWRIPLQHRTGNGYVYSSAHLSVDEAAATLLANLDGKPVGEPRPLRFTTGRRRKCWNKNVVALGLASGFMEPLESTSIHLIQSGISKLLELFPREGLSPVLRQRYNDRLAFEFDRIRDFLVLHYKATTRSDSSFWRQCSDMAIPDTLQTALDLFADSGRFYRNGEEMFAEISWVQVMIGQGILPASYHPLVDQIPDADLKGFLVSIERTIAHCAHAMPPHEAFIARTCAAAVS

SEQ ID NO: 90678 - protein, 521 aa, Caulobacter sp.; identical to SEQ ID NO: 84048
  misc_feature (1)..(521): tr|A0A0Q6UQA4|A0A0Q6UQA4_9CAUL Tryptophan halogenase OS =Caulobacter sp. Root343 OX=1736520 GN=ASC70_07790 PE=4 SV=1

SEQ ID NO: 90679 - protein, 500 aa, Novosphingobium sp.
  misc_feature (1)..(500): tr|A0A3B7DGX1|A0A3B7DGX1_9SPHN Tryptophan halogenase OS =Novosphingobium sp. THN1 OX=1016987 GN=C7W88_00415 PE= 4 SV=1
MTASHLPRRIVIAGGGTAGWMAAAALARTLGPVAQVTLVESEQIGTIGVGESTIPPLVTYNRLLGINEAEFMRATQATFKLGINFENWRVEGENYFHSFGGTGKDHWSAGFQHFWLHGLERGHTEPYGEYCLELKAAEAGKFAHLPDDRMNYAYQLDSGLYAKFLRTMAEADGTMRIEGKIARVELDGESGDIAALVLEGDRRIEGDLFIDCTGFRALLIEGALRAGYDDWTHWLPCDSAIAIQTSSVRPPVPYTRAIAHEAGWQWRIPLQHRQGNGVVYCSDYLSHEAALEKLLSTVEGEKLVKPNHIRFRTGARRKQWHRNCVAVGLSGGFMEPLESTSIHLIQRAILRIVRMLPAGVISQRDIDEFNDQQFTDMEQIRDFLVLHYKATDRRDTPFWRHCASMEVPASLEHKMELFRETGRVFRKNEELFAENSWVQVMMGQGINPQSHHPVAAKLRDEELRHLLGSLREQVSRTVAALPSHGDYVARYCGAQVPAAA

SEQ ID NO: 90680 - protein, 510 aa, Shewanella sp.
  misc_feature (1)..(510): tr|A0A2N7DP41|A0A2N7DP41_9GAMM Tryptophan halogenase OS =Shewanella sp. 10N.286.48.B5 OX=1880834 GN=BCU57_01345 PE=4 SV=1
MKVQKIVIIGGGTAGWLAANHIGKAVQSLADVSVTLIESPDIPPIGVGEGTVPAIRQSLQSFGISETEFIQQCDVSFKQSIQFRNWLDKTKHGADNRYHHLFDVPSPLGDDLSAFWNQTATEDMAYSAMVSPQHYICEALKAPKSITTPEYAGSVSYAYHLNAAKFAQLLATNATSKYAVEHIKANVLDAAIDDVGNISRLKTDKLGELAFDFYIDCSGFESILLAKKLNVGFVDKSHQLLVNKAIVAQVPTDITEAIAPFTIATAHQAGWIWDIALPERRGTGFVYSDNHMTSAQAEQKFNRYLGGKLNQLHHREIPMKVGYREQFWAKNCVALGLAQGFLEPIEATSILLTDFAAGYLAKRLPQTLAQMPALSERFNHTIGYAWERVVEFAKLHYCISDRTDSDFWLDNQKPETIPESLQQKLQLWQSFSPITDDLFSRYEVFNIDNYLYVLYGMHYQTKNVSLEAQYLKSAQQQANKIQQIGHKLALDLPEHRALLDKINRYGLQKV

SEQ ID NO: 90681 - protein, 500 aa, Erythrobacter sp.
  misc_feature (1)..(500): tr|A0A2Z4K2W6|A0A2Z4K2W6_9SPHN Tryptophan halogenase OS =Erythrobacter sp. KY5 OX=2011159 GN=CD351_14260 PE=4 S V=1
MSNTSVKKLVIVGGGTAGWITAAAFSRLMGRALSIELVESDAIGTVGVGEATIPQIIRLNTILGLDEHDFIKRTNGTFKLGIEFVDWGKVGSRYLHTFGDAGMNLASVPFHHYWKRAAASGSGHSLWHYSLHQLAASHAKFGKLDRVGNTPMTGLAYAYHFDASLYAAYLRAYSEQKGVTRTEGIVQCVARDGESGDITSITLDNGHEVEGDFFIDCTGFRALLLGQELGVGYQDWSKWLPCDSAQAVPSERLETLVPFTRATAKTAGWQWRIPLQHRTGNGHVYCSDFISDEEAGAALLEGLDTKPLADPRPIRFTTGRREKFWSHNCAAIGLSSGFLEPLESTSIHLIQSHVSRLLQLFPTNNRSDVERAEYNRRCEAEFEQIRDFLILHYHQTERDDSEFWRYCKNMDVPDSLTHKQELFASSGRVGRDADDLFREASWVQVMLGQGVVPQSHDVMANGLSDAQLSEFLRNVRTLIERAVGTLPTHEDYLARHCAAG

SEQ ID NO: 90682 - protein, 504 aa, Pseudoalteromonas sp.
  misc_feature (1)..(504): tr|A0A426VLH4|A0A426VLH4_9GAMM Tryptophan 7-halogenase OS=Pseudoalteromonas sp. J010 OX=998465 GN=EAG18_15195 PE=4 SV=1
MKSQKIVILGGGTAGWMAANMMAKSWADKAIEITVVESSSIGIIGVGEGSTPQFKGFMDYLGISEAQWMPACNATYKNGIRFIDWSTKTGFSSYFHPFPAQPDDYSAPAFFHNSFVRRKAIDVEGHPDHFFLATHLANTNKSPIAAQNFPFEINYGYHFDSSLLGEFLAREAEKRNVKHIDATISDVRKHVNGDIAALVTSQGVEIAGDIFVDCSGFKSLLLQQALDVGFESFGNNLFNDAAVVLATKQGDIIRSETQSVARKYGWSWHIPLTNRIGNGYVYSQRYCDRDQAETELRAALGLLDSDVEARHIKMKVGQVETHWKNNCIAVGLSQGFIEPLEATALHIVQETVQSFIECYQEAGFTDGNRDKHNHSIATRYQAIRDYIVAHYRVNSRTDTQYWLDNTNNNNLSRSLFNVLQTWVSGNNLSDELARQNIDQYYPSVSWHCLLAGYGVYPDQAQLKPGNALAKQYNIEKIEDYLRRCGLNFKAHRLELDALASTFHK

SEQ ID NO: 90683 - protein, 503 aa, Caulobacter sp.; identical to SEQ ID NO: 84080
  misc_feature (1)..(503): tr|A0A0Q6VAM3|A0A0Q6VAM3_9CAUL Tryptophan halogenase OS =Caulobacter sp. Root343 OX=1736520 GN=ASC70_03620 PE=4 SV=1

SEQ ID NO: 90684 - protein, 523 aa, Marinimicrobium koreense
  misc_feature (1)..(523): tr|A0A3N1P1R6|A0A3N1P1R6_9GAMM Flavin-dependent dehydro genase OS=Marinimicrobium koreense OX=306545 GN=EDC38_2 115 PE=4 SV=1
MSVHNNPVEHVVIVGGGTAGWLTAGLLAADARLDSRPNRRITLLESPDIATIGVGEGTWPSMLETLRTIGLSESEFIRECDVSFKQGSRFQNWCRGDGDRYDHPFTLPAGYGRLNLAEHWRYAHRDLPFAYAVSPQSAVCDDGRAPKQLATPEYAFNLNYGYHLDAGKFTRLLQRHCVEHLGVVHYLGEVTGVQPRDNGDIKHLHLKSGETLAGDLFIDCTGMASRLLGQHYQVPWVSQRPVLFNDSALAVQVPYSSELSPVASQTLSTAHPDGWIWDIALPTRRGVGAVFSSAHIDKDRVYERLEAYVRGTDSGATLDELSPRLIQFDPGHRERFWQNNCVAIGLSAGFIEPLEATALVLVERSAQFLVQQMPENREEMSVVARRFNRRFCRHWDNIIGFLKLHYVLSTREDSDYWRAHRAEESVPDELAEQLLLWRSRSPWTCDSLYRDELFPSASYQYILYGMRPEYTAPEALERRVRSSGAAAQTAFHENGVQTRKLLQGLPDNRSLINHIRRHGLHTV

SEQ ID NO: 90685 - protein, 503 aa, Marinimicrobium koreense
  misc_feature (1)..(503): tr|A0A3N1P2T4|A0A3N1P2T4_9GAMM Tryptophan halogenase OS =Marinimicrobium koreense OX=306545 GN=EDC38_2449 PE=4 SV=1
MDNSAVNQVVILGGGTAGWMAAASLARYFEGRQAQITLVESADIGTVGVGEATIPSIRDFNASLGVDERDFIRATDATFKLGIEFCDWRAPGSAFFHPFADFGQPLNGVAFHHYLNRLQGEEAGQSLEDYCFAVQLARRGRFAQPHEQPPTPLADYGYAYHFDAGRYANFLRQYAEARGVIRREGKVTRVEQNPDNGFITALHLDDGARAEGQLFVDCSGFRGVLIEQTLQAGHEDWRQWLPCDSAIAVPGAAMPEPTPYTRCTALDAGWQWRIPLQSRTGNGYVYSQAFVSDEQAKQTLLKQMAESPLKDPKTFRFVAGPRKSIWEKNCFALGLASGFLEPLESTSISLIQTGIAKLLRLFPESGFHEVDRAEANRQHHHEFERIRDFLVLHYKTTQRSDTAFWRHCQTMPIPDSLAHKLKLFRHRGELVQMEPEAFEHDSWLAIYSGMGVQPNHYDIRANKIPETALTDELGRMRAMIAQAAEQAPSHSAFIRQHELDRQP

SEQ ID NO: 90686 - protein, 41 aa, Mycobacterium ulcerans
  misc_feature (1)..(41): tr|X8FHE9|X8FHE9_MYCUL Tryptophan halogenase domain pro tein OS=Mycobacterium ulcerans str. Harvey OX=1299332 G N=I551_2014 PE=4 SV=1
MKQKQRHLVETLPSNYEYLLKLHGKDMEPNDPMEPEVTFVA

SEQ ID NO: 90687 - protein, 477 aa, Streptomyces pluripotens
  misc_feature (1)..(477): tr|A0A221NTP8|A0A221NTP8_9ACTN Tryptophan halogenase OS =Streptomyces pluripotens OX=1355015 GN=LK07_03775 PE=4 SV=1
MTDITETDVVVVGGGPGGSTVATLVARQGHRAVLLEKERFPRYQIGESLLPSTVQGVCRLLGVSEELKEAGFPVKRGGTFRWGSNPEPWTFDFGISPQFAGTAAPAYQVERMKFDQILLNNAMRNGVDVHEEHTVTDVIEENGRVCGVSCTDAAGVRREFRGRYVVDASGNLSRIHSRVGGKRQYSEYFRNLALFGYFTGGKRMPAPTSGNILAVAFSAGWFWYIPLSDELTSVGAVVHREALDRVQGDREQALNELIAECPMIADFLSDAQRVTSGPYGEIRVRKDYSYIQEKFSRPGLVLVGDAAGFIDPVFSSGVHLATYGGLLVARSLNTALRPTTESGMDEKTLFEEYEARYRQEYMRFHDFLVSFYDMHSDEESYFWKAKRVTGNTASELQSFVSLVGGGSSDERALVNAGSYGDRQDVEEAIWSVAQAGANIQVQAATGGTIDEQVPVRDGGLVPSADGMHWALPATAAA

SEQ ID NO: 90688 - protein, 422 aa, Shewanella frigidimarina
  misc_feature (1)..(422): tr|Q088W0|Q088W0_SHEFN Tryptophan halogenase OS=Shewane lla frigidimarina (strain NCIMB 400) OX=318167 GN=Sfri_ 0342 PE=4 SV=1
MPFSHSHTVSNMDVDVAIIGAGPSGAIAASLLRQQGHQVVVIEKQHFPRFSIGESLLPCCMQFLEQAGMLDAVNQAGFQFKNGAAFQHQGRYTTFDFTDKFTPGPGTTFQVQRADFDKLLADTAISQGVEIRFGHQVDAIDLTHNPRLTVTNDQGAQYQVNAKFVLDASGFGRVLPRLLNLEQPSNLPPRSAIFTHIEDNIRDPHFDRNKILISVHPQHKDIWYWLIPFSNNRCSIGVVAEPHLLEHLSGSLEQQLLAVINEEPELKKLLSNANIVQPCATLKGYSANVTTLATNKFALLGNAGEFLDPVFSSGVTIAMQSASMAVACLHKQLNGQTVDWDSEYSAPLMQGVNTFRTYVQAWYDGRFQDVIFYQQADNKIKQMICSILAGYAWDMSNPFVKESERRLNTIVELCQEPKPNVA

SEQ ID NO: 90689 - protein, 530 aa, Caulobacter sp.; identical to SEQ ID NO: 87670
  misc_feature (1)..(530): tr|A0A0Q6VD43|A0A0Q6VD43_9CAUL Tryptophan halogenase OS =Caulobacter sp. Root343 OX=1736520 GN=ASC70_22870 PE=4 SV=1

SEQ ID NO: 90690 - protein, 498 aa, Cellvibrio mixtus
  misc_feature (1)..(498): tr|A0A266Q9K4|A0A266Q9K4_9GAMM Tryptophan halogenase OS =Cellvibrio mixtus OX=39650 GN=CBP51_05790 PE=4 SV=1
MDKPVRLVILGGGTAGWMAANLFAKRWSRTQVHITLMESPEIPIIGVGEGSTPSLKRFFKQLDLTEQEWMPACHATYKTNIRFVGWSPASGVQEYSHPFYSQPDVFNERTFFTNCRTRRLGLDVITDPEKFFINGELARQGKMPIAPPNFPFQMEYGYHFDSQLLGHYLASVARARGVVHHQAKLAEVLRNDRGEITALQTDAGDLLAGDFFIDCTGFASLLMQKALAVPFHSYQQQLFNDSAVVMPTPALARPPVETRSTALSAGWCWQIPLTHRTGNGYVYSSQFISRDQAETEFRAHIGMSNSSESCRHLSMRVGQLAQHWSHNCVGLGLSQGFIEPLEATALHLVQLTVEALMDAWDDHQFTSNGRDHFNRTVANHFDGVRDYIIAHYKLNTRGLNNTQGSDYWRANRDNTQLPESLLQILDVWYRCGDLTAELAQRTIKPAFNSASWHCLLAGYGAFPPLATNQPGQGKGDLYRECKVADFVEGCAMNFPLFL

SEQ ID NO: 90691 - protein, 501 aa, Marinimicrobium koreense
  misc_feature (1)..(501): tr|A0A3N1NSK2|A0A3N1NSK2_9GAMM Tryptophan halogenase OS =Marinimicrobium koreense OX=306545 GN=EDC38_2450 PE=4 SV=1
MIRHTLKQLVIVGGGTAGWMTAARLARHFRKTDIRITLVESSDIGTVGVGEATIPTLRQFYADLGMTDKEVMRATQATVKLGIQFEQWREPGSDFIHPFGVFGQKANGIDFHHYWLKLRQRGDTSELADYSLGLQLARHHRFTPPSLQPPSELSVFDWALHFDAAAFGRLMRDYAERHGVERLDARIESVKQHPETGNIEALYLDSGNLVGGDLFIDCSGFRALLIEQTLNTGYCDWSEWLHCDRAVAVQSERFGEAPPYTVSRAQTAGWQWRIPLQTRQGNGYVYCSDQVSDDEATSTLVDHIDGPLLNDPKPFRFTAGRRRRAWNRNCIAVGLSAGFLEPLESTSIALVETAIHKIRRAFQKPWYTQADIDRFNEDTALEYERVRDFIILHYKLNGRTDSPFWERCRAMPIPDTLREKVEAFRAQGELLRYRAEIFGPASWLAIYSGLGLLPERYHPGVDRLDFQYLKDALIAMRQSVADAVAQAQTHNDYLQSLNRTG

SEQ ID NO: 90692 - protein, 502 aa, Cellvibrio mixtus
  misc_feature (1)..(502): tr|A0A266QED3|A0A266QED3_9GAMM Tryptophan halogenase OS =Cellvibrio mixtus OX=39650 GN=CBP51_09520 PE=4 SV=1
MKANAIHKVVIVGGGTAGWMAAAALSKILGKTLDISLVESDEISTVGVGEATVPPLINFHGLLGIKEQEFMSACQGTIKLGISFEHWKEQDDKYIHAFGKTGKDHWAAGFWHCWLKGLRNGISDGYGDYCVEHLAARAGKFTILPSSRDGHNYQVNYAYHFDAALYAKFLRKIAENSGVKRAEGKITHVTTNADTGFIESVSLASGRLIEGDLFIDCSGFAALLIEQTLHTGYEDWSHWLPCDSAVAVQTTLVGPPVPYTRAIARDFGWQWRIPLQHREGSGLVYCSRYLSDDDAKKTLLQNVDGDPFFEPRVIKFRSGQRLKHWNKNCVALGLASGFIEPLESTSIHLVQQGILRLVSLFPSGGIQQFDIDEFNAQTKIETNNVRDFIILHYNTTQRTDTPFWRYCRNMTVPDSLKHKLELFRESGKIFKVPGELFGENNWVQVLLGQGIMPKQYHQIVDMMSDEELAAFLYSIKMSAQNLVKQLPSHSDFLESYCKASNM

SEQ ID NO: 90693 - protein, 505 aa, Caulobacter sp.; identical to SEQ ID NO: 87682
  misc_feature (1)..(505): tr|A0A0Q6VE28|A0A0Q6VE28_9CAUL Tryptophan halogenase OS =Caulobacter sp. Root343 OX=1736520 GN=ASC70_03615 PE=4 SV=1

SEQ ID NO: 90694 - protein, 495 aa, Shewanella frigidimarina; identical to SEQ ID NO: 83248
  misc_feature (1)..(495): tr|Q085A3|Q085A3_SHEFN Tryptophan halogenase OS=Shewane lla frigidimarina (strain NCIMB 400) OX=318167 GN=Sfri_ 1309 PE=4 SV=1

SEQ ID NO: 90695 - protein, 493 aa, Cellvibrio mixtus
  misc_feature (1)..(493): tr|A0A266QAW6|A0A266QAW6_9GAMM Tryptophan halogenase OS =Cellvibrio mixtus OX=39650 GN=CBP51_05725 PE=4 SV=1
MSQTIKKVVIAGGGTSGWCAAVALSRQFGTLLDITLIESAEIGTVGVGEATFPTICSFHKIHGIDEQEFLSATKGSIKLAISFENWARKGDRYIHPFGSFGNASWIGDFYHYWLAAKARGYDGELDDICFELQAAKSHKFAITENPKLNYAYHFDAALYAKFLRKLSEEKGVHRIEGKIVQVKQHLDNGFIESVVLESGVAIEGDLFIDCTGFRGLLIEETLNAGYETWGQWLRNDSAVALQTEFSGDIPPYTRAIAHDSGWQWKIPLQHRQGTGHVYSSAYISDEDARNTLLQNLDGDIRAELRLLKFNTGRRKQAWVKNCVAIGLAGGFVEPLESTSIHLIQIGVHRLLRLFPFEGCNEYLIRRYNELSRIEYENIRDFIILHYKATERDDTPYWRDCRDMAIPDSLAERLELFRATGYVHYNSDEVFGVTSWLKVMTGQRIVPQGYHHFPHVISDEKIFSGLISMKEKIANAVKKMPSHTDFLKAYCTVK

SEQ ID NO: 90696 - protein, 502 aa, Marinimicrobium koreense
  misc_feature (1)..(502): tr|A0A3N1NPK4|A0A3N1NPK4_9GAMM Tryptophan halogenase OS =Marinimicrobium koreense OX=306545 GN=EDC38_3099 PE=4 SV=1
MTQTNNFVRRIAIVGGGTAGWMMAAALSKTLSRHPCEVVLIESPDIPTVGVGEATIPPIQLFNRLLQIDEHEFLRETRGTYKLGIEFVDWFKQGQTYFHPFGRYGADIHNVPFHQYWRKLHQLGEGGSLGEYSLPTVAAYRGTFSPPDDNPRSVLSKMAYAYHLDAGLYADYLRRYAEARGVQRLARRVQGATVRPDDGFIESVVFDDNSRLEADFFIDCSGLRGLLIEETLHTGYEDWRHWLPCDRAVAMPCEAPEAPRPYTRSTAREAGWQWRIPLQHRLGNGYVYCSDYLTDDAAESTLLANLEGAPLADPKRLRFTTGRRKQAWNKNCLAVGLSAGFMEPLESTSIHMIQTAIARLMTLFPDNAFDPVDIAEYNRLSDIEYERIRDFLILHYKATARDDSELWRYTRDMAIPDSLQHKLDLYQSRARVFRYDEELFADTSWIAVFEGQGVVPRRYDPLVDTYDLEQLRAVAARMRQTIIAGADSLPRHEEYLARHCTA

SEQ ID NO: 90697 - protein, 501 aa, Marinimicrobium koreense
  misc_feature (1)..(501): tr|A0A3N1P2I6|A0A3N1P2I6_9GAMM Tryptophan halogenase OS =Marinimicrobium koreense OX=306545 GN=EDC38_1571 PE=4 SV=1
MNTDDRRLRRIVIVGGGSAGWMSAAALANATQGQCAITLVESDAIGTVGVGEATIPPIRLFNRVLGLDEREFLRRTKGTFKLGIQFVDWAHQGHSYFHPFGPHGRNFDTVSLHHHWLRSRESGETSTPLHEHSMAWAAASRNRFAPPVQDPRNVRSTYDYAYHFDAGLYAAFLREYSEAKGVERREGTVTDVLLNPENGFVESVQMASGDRIEGDLFIDCSGFRALLIGEAMKVGYRDWSDWLPCDRAVTVASAPGELTPYTRSTAHAAGWQWRIPLQHRTGNGYVYCSRHISSDEAAATLLKHLDGERLGEPRELAFTTGRREKFWEKNVVAVGLSSGFMEPLESTSLHLVQAAISRLLGFFPDRDFDSAVIDEYNRITINEFERIRDFLILHYKLTERDDAPLWRECRDMSVPTPLENKLYHFGAYGRLIADGADLFGPDSWLAVHVGQNHWPKRVDPLLAFRTVDGGTWLEKLRAAVTAAADQMPEHQAFIHKYCSGG

SEQ ID NO: 90698 - protein, 514 aa, Novosphingobium sp.
  misc_feature (1)..(514): tr|A0A3B7DVH5|A0A3B7DVH5_9SPHN Tryptophan 7-halogenase OS=Novosphingobium sp. THN1 OX=1016987 GN=C7W88_07050 P E=4 SV=1
MGQPIRNITIVGGGTTGWLAALFLVTRLQGAVRRGELDIHLIESDRIPIIGVGESLSPSMATTLEQLGIPEDDFIRDTDATFKVAGYFVGWDEADDGRPLSWVNPFVGFMTAGWEFERYELTGAPYGDGPDYARVVSPCREAIELRKSPKMRGQKPFEHVLRYAYHTNAAAFAPFLRKHAEARGVRRTGADVVGATRDPRGHISAIKLEDGREVPVELVIDASGFSSVLHHKVMGVPLVDYSHILLNDRAVVTQLAHANPDEPLEPATRATALPHGWAFRVPLYHRTGNGFIYSSQHCSDEAAANEFAGYLGGNARVEDMRVIPMRVGRTQRSWEGNCIALGLAAGFVEPLEASAIFTVETSVKWLLHYFPDSDWEPALRDRYNSRVTDLYDEVADYIALHYRLSRREDTSYWRAQRHEMKVSDRLEQNLSIWRHTLPVRADFASTNYFDENTYIAALFGKGFYRGRELQPMREVDARNWAGLKQNITSAHARALGMLPDHRAVLTEIRARASG

SEQ ID NO: 90699 - protein, 488 aa, Erythrobacter luteus
  misc_feature (1)..(488): tr|A0A0G9MW67|A0A0G9MW67_9SPHN Tryptophan halogenase OS =Erythrobacter luteus OX=1581420 GN=AAW00_00105 PE=4 SV =1
MSEGKKPSIVVLGGGSAGWITACLLHHRWGGEVTVVESPEIGIIGVGEGSTPQLKALFDHLGIAEAEWMAACDATFKLGIRFTGWSERPGFGSYFHPFPGPVDLHTEPGFTHNAMLARRGFDVPALPDDWFLAARLASEGKGPHPSASFPFAPSYGYHFDAYKLGAFLRDWARPRGVVHREAKVAEVELTDGGDVAALVCEGGERIAGDLFVDCSGFRALIAEGALGAKFLPFDSNLFADRAVVMPTERDAHYLPQTEAVAMKAGWRWRIPLTTRVGNGYVYASRYLADEEAEAELRAATGSTGEARFLRMKVGRLEDSWTRNCLAAGLAQGFIEPLEATALHIVIATALEFAEAFEEGGFSARHRDRFNRQIAARYESVRDYIVAHYRMNQRTDTAFWRDNAANQALSNNLRAMVTAWFTHGDMAEVNASTYAEPAYAAMSWHALFAGYGTFPPAARMQPPPPGVAVADVEAARAMLAACAENFAPL

SEQ ID NO: 90700 - protein, 508 aa, Cellvibrio mixtus
  misc_feature (1)..(508): tr|A0A266Q9P8|A0A266Q9P8_9GAMM Tryptophan halogenase OS =Cellvibrio mixtus OX=39650 GN=CBP51_04780 PE=4 SV=1
MIRRIAIVGAGTAGWLAANHLGFELRNDKEIEITVIESADVPSIGVGEGTVPYIKKSLEKFGISELDLLVKCDATFKQGIKFVDWLNPELHGLGNYYYHPFSAPYPGGFDVTPYWLTGHHHFDFHSLTEQAVLCNAGYSPKRISSPPYQGEVEYAYHFDAAKFALLLAGNAVEKYNVKRLVKTIVGAVLDDDGYIDHLSDVSGEVLRFDFYIDCSGFSSLLIDSVLQVPFVGVSSQLLTDSALALQVPMTGQEAIPPYTIATAHKNGWIWDIALQQRRGTGFVYSSAHLSDEEAMVEFSNYLNVDLDKIEPRKIPMKVGYRNKFWEKNCVAIGLSQGFVEPLEATSILVTDYSAEYLARSFPRSREEMPLLELRFNRVVGYIWERTIDFIKLHYCLSDRVDSAFWQDNRDLSSISTTLAERIELWRSNHPKKSDFFSRFDLFDAENYLYILYGMKFSTRVPSLSAFEVEASANQLRLLEQRTKNLQKDLIGHREWLEKLKAAVASRSN

SEQ ID NO: 90701 - protein, 501 aa, Pseudoxanthomonas sp.
  misc_feature (1)..(501): tr|A0A4Q8LCH6|A0A4Q8LCH6_9GAMM Tryptophan 7-halogenase OS=Pseudoxanthomonas sp. NML171202 OX=2480817 GN=EA661_ 16640 PE=4 SV=1
MTDSSQPRPVKRVVIAGGGTAGWMAAAALSRTLGKVLDITLVESEEIGTVGVGEATIPTLVTFHRLLDIDEQAFMAATGATIKLGIQFEGWREPGQDYIHSFGTTGKDHWTAGFQHFWMKGRQRGLARDYGDYCLELRAAQEQRFAHLARNGMNYAFHLDAGLYGRFLRRFSEGFGARRIEGRIATVQTSVQGDIDALVMEDGTRVEGDLFIDCTGFRALLLGQTLGVAFQDWSHWLFADSALAVQTESVAPPVPYTRSMAGPAGWQWRIPLQHRVGNGIVYSSRFMDQEAARAALLDNLEGPPLFEPRPLRFTPGQRQVTWKRNCVALGLASGFLEPLESTNIHLVSRNLTRLLQSFPHVIRQVDIDEYNAQTEAEMVHIRDFVILHYHVTRRRDTPFWQACAQMDIPATLRHRIDLFAQTGRVFHVPNELFAENSWIQVMLGQGIAPAQYHPVADLMDDAELARFLDGIHQQVEQTVARLPTHADYLRSYCAQPRPAMA

SEQ ID NO: 90702 - protein, 506 aa, Sphingomonas melonis
  misc_feature (1)..(506): tr|A0A0D1L056|A0A0D1L056_9SPHN Tryptophan halogenase OS =Sphingomonas melonis OX=152682 GN=SR41_02125 PE=4 SV=1
MAGERQRTTRVVIVGGGTAGWMTAAAIARLLPHCAEVHLVESEAIGVVGVGEATLPHIRAFNERLGIPEAEFMARTRATFKLGIEFRDWGAIGDSYIHPFGTFGTGSGAVDFHHYYMRLLREGAELPPLDRLSYACALAREGRFAMPETGRRSLAGTFGYAYQFDALLFAPYLRGLAEEMGARRSEGIVVDVERDVESGDIVAVTLADGTRIEGDLFVDCSGFRSLLLGEALGEPFEDWSRWLPADRAVAMPCRTETAVTPYTSAIAMPAGWRWRIPLQHRTGNGYVYASDFLSDDAAAAALRGVVEGEALADPRPLRFKAGRRRHSWSHNCVGIGLASGFLEPLESTSIYLVQQAITLLIELFPDGRPSAADRDEFNRVIDLEYDRIRDFLILHYHATTRSDSPFWDYVRTMPIPDSLSEKLELWRRRGRVVKYREGVFLDASWIAVYMGQGIVPQGWDPRADAAPDGDLRRGIGGLAEQIAADVARRPGHRAFIDGYCPMAEAA

SEQ ID NO: 90703 - protein, 406 aa, Streptomyces achromogenes
  misc_feature (1)..(406): tr|C0LTS4|C0LTS4_STRAH Phospho-2-dehydro-3-deoxyheptona te aldolase OS=Streptomyces achromogenes OX=67255 GN=to mC PE=3 SV=1
MSRYPFPGAGHDPLIASMVAALPARQQPQWPEPSRLAPVHERLARESPLVSYTSVRELRGLLARAAEGEFCLIQAGDCVELTTECEPCDVERKVEMLDVLGDVMRTGSGLPVVRVGRMAGQFAKPRSDDWETVPGGRLPVFRGPVVNAPDACEEARTPDPSRVITGLEAARCAVTALDRLGRGEGAAPEERVWTSHEALLLDYELPQVRRHTDGGSYLASTHWPWIGERTRQADFAHVRLMTELDNPVACKVGPEATVDEVLDLCAVLDPHRTPGRLTLIARFGADRVAALAPLVRAVRQAGHPVLWMCDPMHGNTVKTPDGLKTRRLDTIMSEIRQCVDVLAENGERCAGLHLEASPDDICECEGAGRVPVRGPGYRSLCDPRLSLVQAVAAVAHWRLPVGAAAV

SEQ ID NO: 90704 - protein, 533 aa, Streptomyces achromogenes
  misc_feature (1)..(533): tr|C0LTS7|C0LTS7_STRAH Putative phenol-2-monoxygenase o xygenase component OS=Streptomyces achromogenes OX=6725 5 GN=tomF PE=4 SV=1
MTDTRHSTGATGAPGTGTTGSAGATGDAAPRRTTRPMTGDEYLESIRDGREIWAYGERVDDVTKHPAFRNTARMTARLYDALHDPEHHDTLTTPTDTGSDGYTHKFYRVPRSVEDLVGDRDAIACWARMTYGWMGRSPDYKASFLVTLGADPDYYGEFADNARRWYAEAQERVLFWNHAVINPPVDRNRAPDEVGDVFVHVEKECDDGLVVSGAKVVATGSALTHFNFVAHYGLPVKKKEFALVATLPMDAPGVKLICRQSYELAANRMGSPFDYPLSSRLDENDTVFILDKVKIPWENVFIYGDTAKAGTFLNTSGFTHRLTFHGVTRLAVKLDFLAGLLLKGLDVTGTKDFRGIQTRVGEVLAWRNMFWGLSDAMAHNPNAWHDGGLLPNLDYGMAYRWFMTIGYPRVREIILQDLSSGLIYLNSHAKDFQNPELRPHLDRYMRGSNGYDSVERVKLMKLIWDSVGTEFGGRHELYERNYSGNHENVRIELLMAQTASGLVDGYRGFAEECMSEYDLDGWTAPDLIGPDQA

SEQ ID NO: 90705 - protein, 634 aa, Streptomyces achromogenes
  misc_feature (1)..(634): tr|C0LTS2|C0LTS2_STRAH Putative nonribosomal peptide sy nthetase TomA OS=Streptomyces achromogenes OX=67255 GN= tomA PE=4 SV=1
MESNSPSLSTEESTEKLEAALRAGSPPTQDPPLVLTTLFARTVRLHGGAVALADGAERFTYDRLNRRANRMARHLQGRGVGRGDRVGVHMHRSPDLYAVILAVLKAGGCVVPLDPAHPTQYLARILREARPSPVICDDPDDLPSEARAGALSRDDLVRGSEGLPDGDPDPGTGPEDTAFLMYTSGSTGRPKGVRIAHRGLARLGPHSGPLDIGPPDGLTQSAAFSFAASTIEIWLAFLHGATLLPMPPGLPSLPVLREAVEERGATVLSLPCGLFNALVDQEPECLRSVRIVLLSGDFPSPDHLRRALAHTDAVVYNGYGCTENSSITALHPLTSPDDVDGTGVVPIGRPLPTVTLEVYDPSMRPCDAGEVGELCVGGAGVALGYADQPELTAEKFTRDPDGDGLLYRTGDLARRNDNGDIVLVGRGDSMVKIRGFRVETSAVTLAVRALDGVADAAVKAFEDEDTHEKRLVAFYTTGDGCPADPADLVRRLSADLPSHMVPSAFRHLEKMPTNVNGKIDRTALTVESRKNRKIRNNRNEKSEKGEKTMQNPLEAVVLQSWIEISGMDDFSTTDSFLGHGGNSLHFVQLASRLQKIFGIEITTESVFRHGTVEQLARFIEESRDQAATTSSSHG

SEQ ID NO: 90706 - protein, 677 aa, Streptomyces achromogenes
  misc_feature (1)..(677): tr|C0LTS5|C0LTS5_STRAH Putative phenazine biosynthesis protein PhzE OS=Streptomyces achromogenes OX=67255 GN=t omD PE=4 SV=1
MTAPPATTAAPAQAHDALLPPPGHPFAVLHRSGAGRAAPVEILSGPVRREDDLDALGLDRPGGAKRSTDGGADAPDTLVLAPYRQIRERGFAHPDDGEPLLAMEVREHRRVPLDRLLACLPDRAPRVEDTRFDVDDDGYAAAVDGIVHREIHRGEGSNFVLARSLHGRIRAFDRTAALAVLRGLMTAETGAYWTFLIFTGDRYLIGSTPEQQVRVRGDLVEMNPISGTYRYPRTGADLPGLLRFLRDPKETDELYMVVDEELKMMAALCGDEVRVSGPSLKWMSRLAHTEYYLSGRSDRPLTEILRTTMPAPTVTGSPVENACRVIERYEPRGRGYYSGVIALLGREGGQRRLDAALMLRMADLGADGTVRLTAGATVVRESVPAHETAETTAKLSGLLDALSGRRSAKAPVPASAAGLAEAGPVRGALAARNDGLAAFWLRGTGDVRAARAVAGADVTIVDAEDGFTSMLAYQLRSLGCSVRVVPWHRTAGGVAGAPGVVLLGPGPGDPRDTADPRVRALRATARERLTARLPLAAVCLGHQVVCTLLGLRVARLPDPAQGRRLRVPLWGRPRRAGFYNSYAARADGDRLHPPLGDGPVQVQRVGDEVIALRGPALSTIQFHAESFLTEDGPGILADLLTGALAPAAAPRPGVHDSDGAGVHDTGLRESRGTHEHA

SEQ ID NO: 90707 - protein, 66 aa, Streptomyces achromogenes
  misc_feature (1)..(66): tr|C0LTT5|C0LTT5_STRAH Putative tautomerase OS=Streptom yces achromogenes OX=67255 GN=tomN PE=1 SV=1
MPLIRVTLLEGRSPQEVAALGEALTAAAHETLGTPVEAVRVIVEETPPERWFVGGRSVAERRASPS

SEQ ID NO: 90708 - protein, 1542 aa, Streptomyces achromogenes
  misc_feature (1)..(1542): tr|C0LTS3|C0LTS3_STRAH Putative nonribosomal peptide sy nthetase TomB OS=Streptomyces achromogenes OX=67255 GN= tomB PE=4 SV=1
MTSAVLDLARRTLGSPGLRPDEAFSDHCGDPALLEQLGAVLRAVFAVDPPAGERLGAQSAAAVAERLARGRSGSGGQELTAGSAPRDGATTEASFGQSGIWLIDQYLPTPQAYNGPFLTRLPFRLDGERLRRAVAGVLRRQEVLRTTYALRDARLLQVVSDDDTVFHYGVEHYGDDKELDALARRVANTRLDLEHGPVVSVTCALGPGAESAIVCNIHHIASDAASAGIFLRELLDAYDRTGRGLPVEAVPGRPQYADFAEWHRRHLTPERTTRLLDEWADRLAGDLPVLALPSDRPRPAAQEHRGGTVPLRVPAGVTEKLERLAEREGVTLFMALLAVYGTFLAKLSRQERVLIGSPVSLRDDPQTKDLVGYFVNMVVLRQDVTGAMTVREVLGRAREEVAGALRLKWAPFDKVVERLRPDRTGAHTPVVQTMLVLTDPGSAQVMHGATSLTIRRDMAHGAKYDLSVVFAREAAGLLGSLEYDAHLFDEATARSMGERLGRLLTRFAEAAPDTPVRDLGLLAADEEREVLAHDDRVDRSAPPVPVAELFERQAAATPDAVAVTDGAHGWTYRELDERAERLARVLREEGAAAGRRVAIALPRSVEMVAGLLAVVKSGASYVPLDPSHPPERVAYVLDDAEALLVLTDSATADQLPPGKRLLEIDREADRIAAADPAPLGPTRTPDDEIYVIHTSGSTGAPKGVVIRDRTVGNLVAAQHRISPCGATGTTLQYMTLSFDVSVMEILGTLCVGGTLALIPGELQKDLHRLAAFVAEHDVTRLYLPYIALQRFAALAVAEDLRCDALREVTSVGEALVVSPQIREFFARHPRARLLNMYGPSETHLATWHELSGDPADWPEAAPIGRAVDGMRLRVLGPDRELLPPGVTGELYIGGPYLSPGYRGRLEETARRFLPDPYGGDGEVIYRTGDLVRWNARGDLEYLGRADDQIKIRGYRVEPSEVEAALDALDGVRDSAVVAVEFGPGDRRLVAAVTGDGADDTVRLRAALAERLPEYLVPAHLVRLDRLPTTPSGKIDRGGLAGRLAAEVRDRGADAGAKTAQPPRTGTERAIADAWADILGGGVPGRDGDFFTLGGNSIIATELVYRLRTLFEVDIPLRTLFDNPTVAGMAARIDERRAGDTTAFTEPTADLRADVTLPDTVHPGDRTPVPPDAATRFLLTGATGFLGCWLLRELATVPGHTVTCLVRADDADAALARLHTTADRYGITGGIDWERVRAVPGDLARPRMGLSDADHDELAESVEAVHHAAAHINFVLPYASVKPANVDGLRSVLEFAATGRLKHVHHMSTVAVFAPGREGGTITEEAVPDRCEGLGIGYTQSKWVAEGIARLARERGMPVTVYRIGRISGDSVTGACQADDFLWRQIKSFIELGSAPPAEELTTDLLPVDFVGRAVAALSREPSADGATYHLFHPRGSDFTPVHAAVRDCGHPLDTVPAEEWLTRLEESARRPGGNALAAAVPLFREGALELGENTYGNERTTRLLDRLGLRWPDIDRRSLARMIRWFEAAGELDDRALARQGA

SEQ ID NO: 90709 - protein, 783 aa, Streptomyces achromogenes
  misc_feature (1)..(783): tr|C0LTT4|C0LTT4_STRAH Putative UvrA-drug resistance pu mp OS=Streptomyces achromogenes OX=67255 GN=tomM PE=4 S V=1
MVSIRKPPLRARKVLTMAAHRKNHSGDFIVLSEARQNNLKGVDLRIPKGKLTVFTGVSGSGKSSVVFDTLAIESQRQLNETLPAFVRHRMPKYERPDAGVMENLSTAIVVDQRQVGGNARSTVGTMTEILPMLRVLFSRAGTPSAGPSHMYSPNDPRGMCEECQGLGTTVRLELDKLLDEDKSLNEGAIRFPSFAVGTFQWQLYGESGLFDPDKRLRDFSAKDRELLLHGKGFTVDRAGRNGVYKNEYEGVVERFTRRYITPGLDHAKSKERAEIERVVTQGPCPVCHGGRLNKAALASRIDGDNIADFSAMEITDLIERLARIDAPAVKPVVAGARAALERIQAVGLGYLSLGRQTRTLSGGEAQRLKMVRHLGSSLTGLTYIFDEPSVGLHPRDVRRMNDILLALRDKGNTVLVVEHDRDVIAIADHVVDMGPGAGRDGGEVTFEGTPAGLRRSGTVTGKQLRSVTGLKEEVRSPTGELTVRAAKLHNLRDVTVGFPTGVLTAVTGVAGSGKSTLVSKVFTAQYPDAVVIDQSSVGISARSNPATYTDIMGSLRQRFARASGEKPGLFSFNSEGACPQCGGKGVIETDLAFMDPVTTVCEACDGRRFNDEALRHTVGGRTVVDVLAMTAEEASDFFDDAPVRRKLALLTEVGLGYLTLGQPLSTLSGGERQRLKLAHRLKETGTVYVFDEPTTGLHMSDTRRLLDLFDRLVDGGNTVLVIEHDLDVVKHADWVVDLGPEAGSQGGRVVFEGTPAELARAKGSHTGRSLAADLRTAREHSSS

SEQ ID NO: 90710 - protein, 637 aa, Streptomyces achromogenes
  misc_feature (1)..(637): tr|C0LTT7|C0LTT7_STRAH Putative anthranilate synthase O S=Streptomyces achromogenes OX=67255 GN=tomP PE=4 SV=1
MRPTTDAEVLERLYGADVPPFALLRRQRPDAPGPAPVELLFGDVDTGKSMGSSGSLDNAETAGSLDGAGPPGAAPGPGLLALLPFRHLAEHGLPCRDDGTPVRVLRVREHHVLPADAFTDPRLPGAGPLEWRDAGFTTTDTQYEDLVRGFVASDAARGGLNVLLRRDWTARLPDFRPAAAVDLFRRLLTAESGAYWTFVLHTGGARPLTLVGATPQGHVGVEGGRVVMNPLCGTYRLPPEGPDAGDLLAFLTDRKESEELATTVDAELAVLCGLSGPGVRVEGPFLRRMSHLLHTQCRISGPAAAGARETLARALFASTVVGSPYADACRAIHRHETTGRGYYGGVLALIGRDAAGAEELDSAAVIRTLVVDHRGEARLSVGATVGGRSSPEAEAAETRTKARTVLTALTAQPPAAAQTPAPRAPVLDAAVRDALDRRHAALSSFWTEGTVAPPVGAAPVLVLDPGGDPVAALAALLHLVTAVHGPAVVVRYDAPGAAETLVRHAGPVLLASGPGRPDDPGCVRMAALRRTAASLVRERPPGGPPVAGVGLGFQLLALAALPEARVVPRTGGTGLAREVEVFGRPVTAAFRNAHAIVSGPDGHEVVALGEQTVRGVQFRPESVLTTDGAGVLRRLLG

SEQ ID NO: 90711 - protein, 287 aa, Streptomyces achromogenes
  misc_feature (1)..(287): tr|C0LTT2|C0LTT2_STRAH TomK OS=Streptomyces achromogene s OX=67255 GN=tomK PE=4 SV=1
MIAYEIVDMFTDTPYGGCALGVVPDAAALSTADMLAVARETALTETAFVVPPALPGSTYGVRVMTPDGESPYGGHSAVGTASALVRAGRLAAGEAVQECGGRQLAVTAGADGSTLSVAGEPLLRPEWDPGPLLTACGLTDTDLTGTPRLTGFGPAFHVLPVGAKALTRAAADLTDPVWADCPDAVLVAWDQAGRTARVRVFAPGYGMPEDPACASAALGLGAWLAEEKALPGADGRHAYQVRQGEGLGRPATLSCTVDLTGGRATAATVHGRVTLTASGRMTPPGRP

SEQ ID NO: 90712 - protein, 206 aa, Streptomyces achromogenes
  misc_feature (1)..(206): tr|C0LTS6|C0LTS6_STRAH Putative phenol-2-monoxygenase r eductase component OS=Streptomyces achromogenes OX=6725 5 GN=tomE PE=4 SV=1
MPERGGVDTAPRPIDPRALRSCMGQFATGVTVITCRRGDLVHGTTVNAFTSVSLDPPLALVALDRRSRAGALLRENGDYVVNILDASQRDLAMHFAGRPMAEPVPWVDEDGPHPRLAGTVAHLVCRPWQIHDGGDHTLHIGSVEEFESRPGRPLLFHGGAFPELAPDDSAVAWSLCLDGMNPVTHLPVPEEPDEPDRTDRTDRTGD

SEQ ID NO: 90713 - protein, 577 aa, Streptomyces achromogenes
  misc_feature (1)..(577): tr|C0LTT3|C0LTT3_STRAH Putative gamma-glutamyltransfera se OS=Streptomyces achromogenes OX=67255 GN=tomL PE=4 S V=1
MLFRPELHGTRGAVASTHWLASQTGMSMLDRGGNAFDAATAAAFVIQVVEPHLNGPGGDVPILAHRSGTGSVDVVCGQGPMPAAATPEAFTERGLAVVPGSGLLPAVVPGAFGAWLRLLKEYGTLPLEDVLEPAIGYAEHGYPVLPKCAAMIGALTELFRDTWTESGRTYLRNGVAPRAGERVTNPALARTYRRLVAEAKASARDREGQIDAATEAFYTGFVAEAVDTYLAKAEEMDSTGRRNSGLLTGADLAAWRPRVERPLSLDHRDLTVHKAGPWSQGPVFLQQLALLADADLAATGPESSEYVHTVVEAAKLAFADREAWYGDPDHADVPVGALLDPAYTATRRALLGAEASYELRPGRPGGREPLLPPLHDESVAPADPAWLGELEQGIPAIMKLTAATGDTCCVSVTDAAGNMVVATPSGGWLKSSPVVPGLGFPLGTRGQMATLTPGHPNTVAPGKRPRNHAEPDLGPAGRPAVPGVRDAGAATSRTSGRSASSCTTPSTGRARRRRGGSRRAPSTPITCPPPSPRAGSGRAPSSWRAAGPRRRSRRSGGAGTRWTWCPTTRSARCAPPG

SEQ ID NO: 90714 - protein, 234 aa, Streptomyces achromogenes
  misc_feature (1)..(234): tr|C0LTS8|C0LTS8_STRAH Putative O-methyltransferase OS= Streptomyces achromogenes OX=67255 GN=tomG PE=4 SV=1
MTQHQWSAVDGYFDTVLGDEDPALAAAAQAHIGFDLPDIGVSRSQGKLLHLLALVQRAERILEIGTFGGYSTIWLARALPPGGRLVTIEWERSFAETAAGHLARAGVADRVDQRVGRALDILPDLAKTGEQPFDLVFIDANKPDTPEYFDWALELSRPGGVIVVDNVVLGGAVADSDDPDGGVRGMRRFHEKVAAEPRVSATTIQTVGAKGYDGFTLAVILPAPDDRPEAPAPR

SEQ ID NO: 90715 - protein, 319 aa, Streptomyces achromogenes
  misc_feature (1)..(319): tr|C0LTT1|C0LTT1_STRAH Putative F-420 dependent reducta se OS=Streptomyces achromogenes OX=67255 GN=tomJ PE=4 S V=1
MRHGVVILPERRWSRAREQWVLAERLGFDHAWTYDQLMWRWLRDEPWFACVPTFAAAAAVTSRITLGTMVATPTYRHPVTLAKEVMSLEDVAGGRFVCGLGAGAGGLDDRVVDPTERTPRERADRFAEFVEALDLLLTERSASYAGEHYAFDDVPVNPGCLTRPRVPFAVAATGPRGMRLAARRADTWVTAGPPGRFDALPYEKALPDIARQLDELDAACEATGRDPATLDRLLLTGALVGGVLDSVESFRDAVGRFGELGVTDLVVHWPRASFPYEGDPRVLEAVAEEVLLPGREAAPQTGPVSPRPGSAPSGEGERR

SEQ ID NO: 90716 - protein, 482 aa, Streptomyces achromogenes
  misc_feature (1)..(482): tr|C0LTT8|C0LTT8_STRAH Putative flavin-containing amine oxidase OS=Streptomyces achromogenes OX=67255 GN=tomQ PE=4 SV=1
MREATQTEVRRAFDSGLPGLRPPRSVIVVGAGLAGLAVAHELAARDCEVTVLEASDRAGGRAYTLREPFADGLHAEAGAMTLTPHCHYAMHYLRELGVETETADLFDTTFSYFARGRFFTPDPESVAEAGLGLHPHEKDLGVGGMIERYVSAVADGLQPDLNAPDWAVTQRLAPYDHLSVHEVLTERGASQAAIDLMEPLFLEMRGGDLKTASALSWLRHEASPHSLGNADPRWAKVKHGTDRFPQAFAERLKSRIHYRRPVVRVEQDAERARVTVLAHGRMQTLEAERVVVTVPFSAIRHIDFTDAGLTDAKHDVMRRVKYSSVVRVYLQMRRQFWPQRNASFSTDLPIRWIRDATPRLPGPRKILECLMTGWRARAVSVMTEEERLDFVLDEVERMLPGAREHYETSTSVCWDQRPYAEGAYILPERGHSALMPVIRRPEGRIHFAGDHAGFEPNGGSMTFALESAARTLVELGAAADAS

SEQ ID NO: 90717 - protein, 394 aa, Streptomyces achromogenes
  misc_feature (1)..(394): tr|C0LTT6|C0LTT6_STRAH Putative NADH-dependent flavin o xidoreductase OS=Streptomyces achromogenes OX=67255 GN= tomO PE=4 SV=1
MRIAIIGAGPGGLYTAALVKRLRPGSEIDVWEANAPDVTFGFGVVFSEGALGGIEAADPPLFAALGARCAHWSRIDVHHRGRTSRNGGYRFSAIGRRALLALLRARCADLGVTVRHGTRAPDADELARTYDLVVAADGVNSATRDARREEFGTETTRRGSRYLWLGTERAFTALTFAVAETDHGLLHAHAYPYAPGLSTFIAEVDDRVWEAAGFTEGDAGEPDASGRSDTDRLADLFADVLDGHDLRTNRSRWGRFVSVRNGRWSHGRIALLGDSAHTTHFSVGSGTRLAMEDALALALALDDHGSVPEALAAYEAERLPEVAAVQRTARTSQEWFEELDQYADLEPEAFNAHLITRSGRLTRDDLASWSPDRVERVRERFARADRSPRGAAVR

SEQ ID NO: 90718 - protein, 145 aa, Streptomyces achromogenes
  misc_feature (1)..(145): tr|C0LTS9|C0LTS9_STRAH Putative L-DOPA-2,3-dioxygenase OS=Streptomyces achromogenes OX=67255 GN=tomH PE=4 SV=1
MGVQTDDLDNCAAWYEEFFGCRTNWTLDTFSDLTLSRLPGITRLTEVTVAGLRFHLFERTGHDGAVPGANTRQFQHVCLATGSPEELRAWRERWFRLYESGRFTFAGDEEPTDIVIDDDGVQSCYVLDVNGLEFEFTYVPPGGDR

SEQ ID NO: 90719 - protein, 318 aa, Streptomyces achromogenes
  misc_feature (1)..(318): tr|C0LTT0|C0LTT0_STRAH Putative tyrosine hydroxylase OS =Streptomyces achromogenes OX=67255 GN=tomI PE=4 SV=1
MSMRAPRTVTELPVPDGWDFGDFPYGLEPLTLPEPPTPGTETAISDVLPADTSRVRSARPCPRTGPALAAEEISHQLFWFRWITGHQATFAIWQLTAHALHQARSRSDPAPSLRAMTDLTDAYTAMLLYTSSCPTDVYGTVIRPSMYLQHRSFSGTWAPDFVPVRSLLRGKKTEWEGTPEAERLKKAVQMYHRVHAGVAAKLVPGGRSLLQESAAEVAPTRPETQALIYDHYFLTLRAPVDATELVGQLRSRLRAITQDVATNGLYPGLSPQEDVAFPEELRGDEVRQGYEEGFASVLGRIDAAAGQLRPRVLHHSAP

SEQ ID NO: 90720 - protein, 2559 aa, Emericella nidulans
  misc_feature (1)..(2559): sp|Q5AR54|ASQK_EMENI Nonribosomal peptide synthetase as qK OS=Emericella nidulans (strain FGSC A4 / ATCC 38163 / CBS 112.46 / NRRL 194 / M139) OX=227321 GN=asqK PE=1 SV=1
MAVSYTNFTNLPAKLYLVYRACTFTPLHAENLASNITQAMKQLLAQPDACVKDIDIFSPFNEITVSRWNAEIQEAPDASLLEVIRGHSRYRPSHTAIHAWDGTVSYSELDVTSTKWAIYLQSQGVKAGCLVPIMMDHSKWAVIGQLAILKAGGAFVPLDPGQPLFRLENIVRLTTESHISLSSPHLANRLHGLVETVLVISDERTESLPKANAHHDAADISPVVNNGPAYVLFTSGSTGRPKGCVVGYGALSDVVNQTTALKIGPDSRVLQFASYTYGMSLIEIYCTLAAGATICVPSEDDRLNALSSILLSMQVTWAILTPSTTISIADAVVCLNTLVVAGEALTMDRLHSLADKTEVIQAFGLTEWAGICCVSQRITSETDLRVIGRSHTARLRLVDPANYNRLAPVGAVAELLIEGPAMADGYLGDPEQTARAFPKTSTGGRFYRTGDLVQYAADGSLRYVSRKDSQVKIRGMRVELTEVEYQIRRAFPGVEEVVVEAAAPKNSSGIPILVAFLCPEDLSGLVCTIKETMKRSLPDYMRPSVYVPLEFIPKTISRKVDRKALRHLVQSSTRHELERYTQASLPSLVGPRTNIEQLVHELVADMLRLDPLSLGMRQNFISLGGDSVTAMLLVNKLRRKGYKITVAAILRAQSLLDVASLVHYPAGLEPSAQKSTPGDLKLVPRAIHRISDSGTVEQSFSQARIWFLQTLRPSSTWLLLPSATRLRGSLRVDALETAFSALVERHETLRTTFEDREGSGVQVVAPFHPYQLEIIEIPSGSDADLITALHGQQIRPMDLTKECWRATLFRLSPDEHVLNIVLHHIICDGWSFDIFLKTLQIYYAAALQGHSPLEGVEPLPIQYRDFSIWQRQNKARTSVEQLAYWVRQLDGSQPAEFLCDKKRPHMLSGKAGSQPVKIDVCLYHDVKRFCSMKHVTPFTVLFAAFRATHYRLTGASDATIGIPSVSRPQAELEELIGYFGNVQCIRTKVESCSSSFQLLVHQVQSSITAAFENQDVPFDQIVSKLLKDRDVSRHPLVQVAFILHTQAQFGKLRLEGLESEQLPLPHVSRLDLEFHLYPGEGGGDLQGEVLYSMDLFHAETINAMVLVFYDILREGIRKPDTSIDSLPFPGGYSILNERGLIYPQQSRSLSIIDLFDEQVRAQTDEVAVKDINGHLTYSELHKRSSMLSAWLKNSYSFAEETPVGVYASRSCESIVAILGILRAGLAYIRLDIDAPKARTEMILSCLPNCRLVLVASGLEPPRVCVQGVQFAYIADSCKETVTDVHDFLKTCTPPGPMSLAYIVFTSGTTGTPKGVMIEHHGVANLAKEPDIIAHAVNSRIASHMLNPSFDASGFEIYATLLNGGTLVCIDNSVVFDFPALGATFIQHGIRRAFMTPAILKQTLASCNSLLRMLDILYVGGDKLDPGDVAKVQRLTTGRVQIFNCYGPTENSIVSTKYRVPVDEEGVNGVPIGRSISNIGAYVVDRSLRLLPLGVLGELVVTGPALARGYIDPKHDIGRFIELDISEEVAPMRAYRTGDMVRYRPRDAQLEFFGRMDQQVKVRGYRVELAEIDNTLLLSPFISAAVTVARQDQELVSFVTVSDMASGFNDRAETEHVDSWLDVVEGEDYYGSVGTIEPHSLGADFLGWISMYDGEPIDKNDMREWLQDTITAILSCSPSSVLEIGTGSGMILFNIIGSIQKYVGLEPSPRAVDFVRRAVHWVPEAAGKVNIKCGTASDIGRLQDMGTLDLAVINSVAQYFPSLDYLRNTIKDLVRQGVKSIFLGDIRSYALYQEFQVSKVLRLYGRGLTITRFRQHMAEIARLEKELLVDPAFFTSLPAELPGMIEHVEIWPKRMKATNELSCYRYTAVLHVKRAEQPLLIREVKEISWADFQAKGWDYNSLSQMLEISDASTVLAVENIPFKKTIVERDMVRLLQELPEDTGSVSWSSNARGPKRALAPIDLFDVAKKTGWDIEISWARQRSQRGGLDAVFHRQGPRVLFRFPVDPYIPGACSNDPLSPQRNRLLEKHLLEYMSTKLPTYMVPKLIHVLDKMPINNIGKVDRHVLAQRAAITSATISESESLFRREIEPAFTSEIERAVWEEFTGVLGREVGVADSFFRNGGHSLMAIRLVSRINKRLSSALSVSELFRYPTVSGLAQHLQGLGALETRAVTVYAPFSLLDRPYDPSEVRLPPEADIVDVTPVTECQAWFLQCWSLVSHSFIIHGVLDVDRLRAACQAVVRHHPPLRTVFTEFQTQLVQAFDGVSLSAILYDIARAYGNSASPLSNAVPFSHHLHMCRSTRPDALAFWKAYLRDAVLTEVPRPEEVNATNEKPLEIIQQEALGEVSLPSTVDITFSTLVNAAIALALARLVQRNDVIFACVMTSRGVLAELAESVVGPCVNRCLLRVKVPDDSNPDSTALDFCRNLRDNQAQVSGHGHLGFRDVVENCTSWASLGVDVGRIAFVTHLPAETALETFSLTLLDSPVSYDSTNVTINPGNQILVRSAITDEQQACIQVLSSSNVMGAEKALFLANRILMIAQRLSVSVSGGRSPRLLELDK

SEQ ID NO: 90721 - protein, 566 aa, Emericella nidulans
  misc_feature (1)..(566): sp|Q5AR50|ASQG_EMENI FAD-dependent monooxygenase asqG O S=Emericella nidulans (strain FGSC A4 / ATCC 38163 / CB S 112.46 / NRRL 194 / M139) OX=227321 GN=asqG PE=3 SV=1
MAAFTVIIIGGSISGLTLANVLEKYGIKYILLEKRPSIGPQLGATVVVHPSGLHLLSQLGLRERVEELATPVELQKAIGPDGTFVLNIAATNQCDRTIADALSTGYMPMFIARQDLIKVLYDNLQDKFRVHASLGLRELEWAGDKVKVTTTDGTSVVGDIVVGADGANSRTRAEIWKIADVEDPSYGSQQLAKSIACTYRCVFGMVDDGDSSLARTAYLAFQYNRAYTYLPTDSGRAYFLAFFKNPAKTVNDAIPRYSDQDEDADVAAHANDIIVPGLTFGDLYKRRTRCTLVPLQEYLLDKCFYKRVVLIGDAVHKLNPITGRGANLAIEGAALLGDLIKHALEKSLQPTDEMLQTAFFTYQQCTKSRAPSQIDDAHRVQSLAALENPLLKFMSLKLLKRATADKLALGVAVDFSTGHSMRYLPQLPQRGMVPLNKDVVANPEHRPASSTVLWIILMLGMASLGAVWQKHQRAEEDQPIHGYTLLTLSTFYNLMILFASAVHGSLGRRAVNLSFSDDSGMVPFYAVGHAPDKYRPTTPSRRVGLLVPGPSYLGSGGHFNGLLEVA

SEQ ID NO: 90722 - protein, 416 aa, Emericella nidulans
  misc_feature (1)..(416): sp|Q5AR53|ASQJ_EMENI Iron/alpha-ketoglutarate-dependent dioxygenase asqJ OS=Emericella nidulans (strain FGSC A 4 / ATCC 38163 / CBS 112.46 / NRRL 194 / M139) OX=22732 1 GN=asqJ PE=1 SV=1
MGYPKAFTSSDSEPEPDLSRDLGNPVMGNPGVVSRSSSTVAQHSVRNNPTGPDGRLAGLWNARALLRFPAEVNGVRLDFKSVSSRRPTSRLSLLPYSLCSICPSSQATMTSKDHVKSQIPRLSAINDLHKIWPTVEEHGAAIIESFLSLDIVRRLNEEVDPFVKIEPIPAAKTKDHPNHVLSTTTRLVNVLAPISKAYREDVLNSKVLHRICSDAFHVYGDYWVLMGAVMELAPSNPAQPLHRDMRFSHPIVEYLKPDAPATSINFLVALSPFTAENGATHVILGSHKWQNLSNVSMDATVRALMNPGDALLITDSTIHCGGAETTGTETRRLLTITMGISQLTPLESNLAVPRPVIESLTPLAQRLLGWASQRSAAPRDIGLLTIRGNSIEKTMNLKAEQPLHDDEAEPLCRETI

SEQ ID NO: 90723 - protein, 575 aa, Emericella nidulans
  misc_feature (1)..(575): sp|Q5AR49|ASQF_EMENI FAD-linked oxidoreductase asqF OS= Emericella nidulans (strain FGSC A4 / ATCC 38163 / CBS 112.46 / NRRL 194 / M139) OX=227321 GN=asqH PE=3 SV=1
MALFRLSAAIVVIFLYIWSPSQRIQCRCRSFERCWPSQQDWSALNNSISGHLVNPRPVAYVCHDPDFDHDACEHVRYMANNSLWRASMPGALQNTVWESSLVSTQTCLPFSAREQPCNQGRIPLYAAVVESKKEVQTAVRFARKYNLRLVIRNTGHDGAGSSSGPESFQIFTHRLNSILYHSNFCPGGSHSKYQTCAGPAVSIGAGVMFRDLYARGAERGFVVTGGDSGTVGAAGGFIQGGGVPAFMGYTWGLAVDNVLEFEVVVATGQLVIANADENADLFWALRGGGGGSFGIVVRVTMRTYPDLPTLKGELTVSGNRHDPSFWTEDIAGLLNALRAFNHLDAPGVFRLIQTSAKGSISAVLEVYLLNRTLAEDLTRMMGPILGTSRRKYNISPITVGKISSFANPNEPTITEFFGSTILSRNFFESPNGPLVMAKRMAAINLDPGDGLLTSNLGGRINNENSDLPLHPAWRSSAHLVSLVVNVDTSLRARERAMVRLTDELMPMLYAIDSSQWVSYSNMGNPNEPDFKERYWGMRNYRRLVSIKKKWDPKDLFIARVGVRSDGWDSEGMCRT

SEQ ID NO: 90724 - protein, 271 aa, Emericella nidulans
  misc_feature (1)..(271): sp|Q5AR48|ASQE_EMENI Short chain dehydrogenase asqE OS= Emericella nidulans (strain FGSC A4 / ATCC 38163 / CBS 112.46 / NRRL 194 / M139) OX=227321 GN=asqE PE=3 SV=1
MTQAPWSLARKTAIVTGGSRGIGRAIAIHLTCKGLSKLAITYISNLAAAESTLDECRKNGLGMGIAIKADLLDPNIGHGLVQQALAGLETPTIDILVNNAAYLDPSEAASVEELTLPVFQKVMQANAFAPISIISATMPHLPVSGGRVINISSAAAKLANPGPVMTYGASKAALDSFTRSLAAEFATDKAATFNTVCVGPTVTDGFHVVGKLYPEGFMEELAKAFTAAQRVGMPQDIAFIVGFLAGEEARWVNGACMSANGGFREVLPALS

SEQ ID NO: 90725 - protein, 478 aa, Emericella nidulans
  misc_feature (1)..(478): sp|Q5AR55|ASQL_EMENI Cytochrome P450 monooxygenase asqL OS=Emericella nidulans (strain FGSC A4 / ATCC 38163 / CBS 112.46 / NRRL 194 / M139) OX=227321 GN=asqL PE=3 SV =1
MSNGAPFPLDYRGTRNYGPRFIPDRYSTFVSSARKSPRTPPGGSDQVVHVNDAGVYKRTFAVASPFPKSEFFYSSVGVGDAIGAMTDTKKHRVRRSILGPRLRAKAIAPYTPSLQKLVIACMDIMAGKARQGKVINLLRYTRALTVDVISDFTFGRPMGVVNEAEEMPDLLNDLEVFGRHFHILKHFPISRKLLDIIPESFARKLMPLPGFFELREKATTAVNEAVVERQAGKTISNNTDGASFLDLLLNQIDENPSVLVDEGCAFITGGSDTTGFTMENATYLILSHPHILQSLLQELDTSPHIRDTFDLDHILRLPFLTAIIKETLRLYTPAPSPLPRTVPAEGIDVHGHFLPGGTILTHSLYLIHHNPVLFADPKSFKPERWLGTQGKVLEQYYVPFSKGSRSCIGMALAYHEVYTYLSLLFSRFEMEIFETSQSDMDWREHFFVKRNGQLRIRIVRDRWTGEAFPTRAVEADLR

SEQ ID NO: 90726 - protein, 387 aa, Emericella nidulans
  misc_feature (1)..(387): sp|Q5AR47|ASQD_EMENI O-methyltransferase asqD OS=Emeric ella nidulans (strain FGSC A4 / ATCC 38163 / CBS 112.46 / NRRL 194 / M139) OX=227321 GN=asqD PE=3 SV=1
MPVENEFPRELPNHSLISSKSQMTLQSIWLFRYPVSSIVCVQFPTDFPKPVLALSARIAIDLGLFTHIVQKCPITSRSLAAITGAEELLITRILRLLSTAHFAEETSTGTWAPTPITKTMAKEEIAAGYRFICHMVVPALQSAPGYFQHHGYSCPTDAKDGLVQHALQTKKTSFEYIMSDPHLLKDFNLFMGNGMGARKSWLDWYPVQSNILDGADADPDKALIVDVGGGKGHDLIAFHKRYPNAGRLVLEDLPAAFDDLGQYSMVIEKVPHDFLAEAQPVKGAKAYLCHHILHDWPDNYCVRILEGISSAMTPGYSKLLLHEGIVPEKGVCQFQAMSDIATMACNGGMERTREQWRTLLHMAGLQLIRFWNSPDEGGDGIIEAAKV

SEQ ID NO: 90727 - protein, 289 aa, Emericella nidulans
  misc_feature (1)..(289): sp|Q5AR57|ASQN_EMENI O-methyltransferase asqN OS=Emeric ella nidulans (strain FGSC A4 / ATCC 38163 / CBS 112.46 / NRRL 194 / M139) OX=227321 GN=asqN PE=3 SV=1
MRVLVNKHVFMQPQPGHYAHTRMSMLLLKPKTKDLLSHRLDDVFRSASREADALAAARYREPERGAPTGFNLAFNTDKNFWEYITNDDPQRGERFARAMHAVNINSLDVIPRLYPFDSLVVDGGLIVDVGGGQGQVAKRILEYFPSSGLRCIVQDRYVVNASSPGPAVVEMQQHDFFEAQPVKGAAAYFFRHIFHDWPDKACAAILKQTARAMDKDRSRILICDQVLQDDVPAEASLLYDIDMMSLFGGKERSLAEWKYLIASAEESLHIVNVIFSTESEAAILDVRIK

SEQ ID NO: 90728 - protein, 1057 aa, Emericella nidulans
  misc_feature (1)..(1057): sp|Q5AR52|ASQI_EMENI Tyrosinase family protein asqI OS= Emericella nidulans (strain FGSC A4 / ATCC 38163 / CBS 112.46 / NRRL 194 / M139) OX=227321 GN=asqI PE=3 SV=1
MTCTLRDLNSLLEICCRCPAHNPSTAFAPTTKVRVSSDVRGIFALPVQKDHKPYNGLSPEHLETMKAVSLMLDAAGPKLEDGISKAKELLEERINPELMRDALGIYLTHSKDAQQRKIFPPPLKNHPFFSTKTRRPANVAGEICTADTLHGHALLSYWRDDYDLNDSHYYWHMVYRGAGGDNSKNVGDFDRHGEVFLYVHSQMVARYETESLCWSLPLVRPWNQYDDFLENGYAPISSLIEHYGGYPPFSTWYSIRNPDMPDTLNVTIPRARLEEWRDNIYAAIRKGQFETTSKDKPLVLTRDNCLNFVGGILDAQYPSLNKLLGGCSLDEERYGNLHNYGLGKFAEMAYRNKPGEKSPYGLTISNFGAPRDPCFWRWYKHLQYYGRLAATRYPQDITAHRAEVVLSNLVVRLQDRSSPHYLDGHITTFLGPPAVNFMESKAKLGHEPYEWNVQVKSCRRSPPSKENPQTLTLRLFIAAEDLMNDYHSWIEMDRATVQLTDESAITKVRLDTDSSVARKMGNYGEPDPRYASAVFRHGWPQNLMLPVGKVEGMPFVAFCIATDDGIPDPAPAPPFHHYHDPRGMGYPFNRAWTQLTEDSTGKASIRTIISNAELYPFITSTTFKIYRTTKFETKQIIQPTTVTWFNTIRGYFKDADRACMRSEYGYDLYNYDHVMLHADAILDATASKRMPLQMALTSSVLLTAALAHENGKVAYPFRLFNGTSSVEEISQQDQMDAPKIMPHVNATTFEWWYFDAVSTTSQNESLTVMFENMGPEGLGAPYPGGPLAVQISGSFSNGTAFTIITAATKGAVLEWGGGGVRGEWRGAGSSFAGKDHREYTVSIANPGIGYWSQFNPKCLKVSPPRYPCDVKERRASEQLIPNMYLANSQPDAIVEVDFNINESTLKFSGIGYHDLSWGSAPLESSVHSWYWGHGRLGRYSLVWFDVMGRDGKEYFSAWITEAGNVILCGCEPDSVLVRPWGENSGFPPGRGTPAPSGYSLRYDLGQNQIFIANFTREVNIIDNDFTKHIIGLFSGGFEGGEQYEGRAMADQFQFGDL

SEQ ID NO: 90729 - protein, 421 aa, Emericella nidulans
  misc_feature (1)..(421): sp|C8VJQ0|ASQH2_EMENI Prenyltransferase asqH2 OS=Emeric ella nidulans (strain FGSC A4 / ATCC 38163 / CBS 112.46 / NRRL 194 / M139) OX=227321 GN=asqH2 PE=3 SV=1
MDRNSFTAYGPATGAITESGEQENDHTKPHTWKTFAKYACFESEAERQWWNDSGALIARFLSLTNGDIDQQYQCLLFVRQVLIPALGPYPPVRRCCINTTEIGMELSLNFQGPGEPVFRVSIDPVSRMTGTPMDPLNINTVNNMITRLASMGIKGFDRTLHHHFTREFCMSEQSMQSYQRDSGEAIAWSQTILAFDFKGGDVVTKQYIWTRHAARASGLHPHSLIRRAISRVENQMHCSAAVELVLEYMETFNADIPVPFFSWDLVDPTQSRFKIYGISWQWSWAKAEEVCTLGGKLNHHDIDLLKKLWHILKLDEFTPTMGFTWNYEIRPGQPKPEVRLYLAICDRSDEEVAQAVVQWFELLGWHERAQSYPETLRYLHKTKSAHTWLSVTVSEKGVYTSLYYHPLGNGSDDFKIRENWF

SEQ ID NO: 90730 - protein, 443 aa, Emericella nidulans
  misc_feature (1)..(443): sp|Q5AR56|ASQM_EMENI Monooxygenase asqM OS=Emericella n idulans (strain FGSC A4 / ATCC 38163 / CBS 112.46 / NRR L 194 / M139) OX=227321 GN=asqM PE=3 SV=1
MLRQSDFKIAIVGAGPAGLTLASRLTASSHSFDFTVFERRDKPDPSQVSVPCANLDLHRELGLRAIKGCGLYPQFLEVQSACTEQTRILDITGTVLSDTTGDGERPEISRNALIQLLLESIPEERIRWNTKVLDITPANCSRSKGKECLRFTDTSIATTPISEEIYDLIVGADGAWSRIRAAIPNAPKPIYSGVCYMTMYLRISREQYPDMDNMIGSGTFAVVGDNKLLLAQRAIHGTLRVCLFLHSKCLAAVRKELLASMHNHNTGPCPLLNPDDLINSLPSNPKTLQELLLTHDDFFASWSEDIKRLLRIAFESQVADAEIITRPMYMLPLVPYPYAHQRGIALVGDAASLMTPFAGRGVNVAMADSLDLAEELERLHLVTVSSSASTPAAIFADKLEGALSAYERTAYTRAKDAMELTWRNLCLSFSEKASDLFAAVMAS

SEQ ID NO: 90731 - protein, 451 aa, Emericella nidulans
  misc_feature (1)..(451): sp|C8VJQ1|ASQH1_EMENI Prenyltransferase asqH1 OS=Emeric ella nidulans (strain FGSC A4 / ATCC 38163 / CBS 112.46 / NRRL 194 / M139) OX=227321 GN=asqH1 PE=3 SV=1
MLCKTGGCVEGRAAEDQSTRKVHWGQEGSGQSPEARPRALDMISRLEPSRGPSHAHWWHIISPQLAVMLEETGYPVEKQLEILTFLYHWVIPYLAPVAAGNAASSCNWKSLLPSAIVPLEYSWKWDSSGKAREPEIRLTIEVFGELSGTQFDPLNQAPAMELLYRLSSILPGVNQILASHFRCKFFDHDNVKYMEEPRLDTLPRSTMLTYMTPRKLGQQGFAPLSEYVSAIQALGQASGRTLDTLTNFLSTSPEGVHLHPFGLAFDNVEPSSSRLKLYFFSNRTSYNSMREVLTLGGRIYSESYDMEEKLRTIYSLAQLLMGCPENNAEDADIPLLPITHSQHTAAERATLLSGFQYYFDVAPGADLPSVKFYIPVRKEHANDRAVGSALTGWFREQGRGKFCDNYMRMLERLAGGLELGECRGLHSFISCMIGGDGEIEVTSYLLPGSEA

SEQ ID NO: 90732 - protein, 347 aa, Emericella nidulans
  misc_feature (1)..(347): sp|Q5AR46|ASQC_EMENI Terpene cyclase asqC OS=Emericella nidulans (strain FGSC A4 / ATCC 38163 / CBS 112.46 / N RRL 194 / M139) OX=227321 GN=asqC PE=3 SV=1
MRPAILAAFSTLPAAAKATYPFAPETFDGSYKDIGLPTIYDLSATQSTNYNGSWATGSWITSVSGGQYFVVSHYVNDGIHDVYRSSILDLSSLKYRYFFQAGNGSYTASPPSHLKAGVGKGNGFEGISNDNYTTMRVQSSHPNVTFDLTYHATTKPLINGGAGVVMLGASESKQWSLPACWTNGFLIVGDEQIPIDPKRSLTWYDRQWGTGGLTNWTWYGLHIPKTGHVLSIWTGDTDADRAAPITPVRFATVRNAYGAQTVCNITWIPDLSHIFHSDSTNKSYPLAWTVEIPSYDAIIKVKSRTENQLNTGSHGSEPEAYNGFVTFAGQFQGTETEGFGIVEIVYL

SEQ ID NO: 90733 - protein, 138 aa, Emericella nidulans
  misc_feature (1)..(138): sp|Q5AR45|ASQB_EMENI Isochorismatase-like protein asqB OS=Emericella nidulans (strain FGSC A4 / ATCC 38163 / C BS 112.46 / NRRL 194 / M139) OX=227321 GN=asqB PE=3 SV= 1
MSSQSFRQIIGLAPSTATITDSTLIIVDAQNEYAQGLLRVQEVDQSRKVIADLLSRYRYMAHVCVSTTARTGAELGYDVLVVRDGVSDRAIPGVEANVLVDVALKEVTDAFGTVIASGEIKGVIYPVIFLYLYIQDLI

SEQ ID NO: 90734 - protein, 565 aa, Emericella nidulans
  misc_feature (1)..(565): sp|Q5AR44|ASQA_EMENI Transcription factor asqA OS=Emeri cella nidulans (strain FGSC A4 / ATCC 38163 / CBS 112.4 6 / NRRL 194 / M139) OX=227321 GN=asqA PE=4 SV=1
MPKRVLKGAAKRAREAKHARDAAKARRLSSFLNVRLNQEHIPHEILPNSASDDKLLDRPVTGADLFAPSSGPSSNSVYPSLLQEEYFWNYFWQTYHVSLCPILDDAQFKQHYQSLLIADGKGRKPSALVDIVVAACMQYHISTLPLGSQSGLVEGKDASVAGRWHYWRGQTLLTYELESLSISTLQCHVLCSIYLCGGSFHNMMDTAMAQAVRTAYILGLHRDLPSTLPEAKREMRRRLWWTVYFMDTRATMKLGRSFMLSESHSMPALCIDSLRVAASSGSTFVPADEDMTWLSFNLRQITLCRTFRAAYTSFHNTDFHLQEGQPIWDRPDALQAGAEIIAKHIPSLDAWCDSVPDALKLKRQDSNSRPFSTDGARVVLELSAPEWLQRQRMLLENTYHHVCVNLFRSMICFPYQPASQVHISENSLPGELATRCAAHAIALTKLTHQVLEETSLLDGWHEAFYCQWDAVMTLIGFVLAYPGSGTVTLEAKSAIHLAIAVSENFGFKFAVGTSASKIVQGLCAKSETLTANEYASAYIGASTQNANIYRIYGGQICGVIDWQNS

SEQ ID NO: 90735 - protein, 393 aa, Streptosporangium sibiricum
  misc_feature (1)..(393): tr|C0LTN1|C0LTN1_9ACTN Kynureninase OS=Streptosporangiu m sibiricum OX=457432 GN=sibQ PE=3 SV=1
MESTRGWAEKEASADPLAVFAKDFLIPEGTLALNGNSLGPPAAAVPIALSNAVRQWSEHLIRGWWDDGWWDAPERVGDRIGRLMGAGPGQVVVGESASVQLFNALTAAVRLVPERRVLIADAGNFPTDRYLAASVARLLGLRLVETSMNDLPGALARHAGQVGAVLCGAVDFRTGELWDVPGLTTAIHQAGGVSVWDLSHAAGAVPVQADAAGVDLAVGCGYKYLSGGPGAPAFLYAARRHHHALDFAVTGWHGHADPFAMSASFVPADGITRARTGTPQILSLLALEAALEPLEAAGMAAVRAKSLRLADYLFALVADLDSVEIVTPRDPHRRGNHVTLRLPDAVAVAESLARRGVIVDERPPDLLRICLNGLYISWTDVYDAVTHLREVLR

SEQ ID NO: 90736 - protein, 261 aa, Streptosporangium sibiricum
  misc_feature (1)..(261): tr|C0LTN0|C0LTN0_9ACTN Tryptophan 2,3-dioxygenase OS=St reptosporangium sibiricum OX=457432 GN=sibP PE=3 SV=1
MNDANPYVDYARMDALHALQLPVTDSPFEMQFILLSQVKELLFRMVHLELEQARTRICEDRPEAACRALSRAVRHQRTLIGCWESMNAMPVDEFLPFRDTLGEASGTQSYMYRLLEFTLGNRVSAMVRPTDFTRFPQLSAELQRPSLYDEVLRHLARTGLPVPEHILTRDVTGPYVPDDAVEDVWATVYRSPDKYRAAYDLAEQLLEVAYQFSRWRATHLLVVERMIGGKRGLGGTDGAAWLRKINEHRFFAELWTARSAL

SEQ ID NO: 90737 - protein, 331 aa, Streptosporangium sibiricum
  misc_feature (1)..(331): tr|C0LTM3|C0LTM3_9ACTN Glucose-1-phosphate thymidylyltr ansferase OS=Streptosporangium sibiricum OX=457432 GN=s ibI PE=3 SV=1
MKGIIMAGGSGSRLKPLTGVLSKQLLPVYNKPMIYYPLSVLMLAGVTEVLIISSPQHLPLFRAMLGDGDRLGMRLTYAEQHRPAGIAEAFLIGAGHIGDDSVSLVLGDNIFHGPGFSALLREQARRVDGCTLFGYPVRDPHRYGVAVVDSGGHLTDIEEKPDRPRSELAVTGLYMYDNDVVGIARGLRPSARGELEVTDINRAYLERGKARLVQLGRGFVWLDTGTHEALLEAGQYVHILEQRQSVRIACLEEIAFRMGFIDRAALQRLGREHADTDYGAYLTEIADKPPATWSVSDGTSAPAAMTDPIGLPEHTGDTKPLVPTPAGLFRS

SEQ ID NO: 90738 - protein, 344 aa, Streptosporangium sibiricum
  misc_feature (1)..(344): tr|C0LTM6|C0LTM6_9ACTN SibL OS=Streptosporangium sibiri cum OX=457432 GN=sibL PE=1 SV=1
MSSELSALVPVLFGHAAFQQLNAGCQLGLFELLHERGPLSAEEVADALRLPRRSADILLLGTTALGLSTVTDGGYRNGAPIGAAFRDGLWPVLRDIVQYQDKIAYQPAADYVESLRTGQNAGIRHFPGTTRDLYSRLAAVPGLEELFYRGMHAWSQLSNPVLLAQPDFTRVHRVLDVGGGDAVNAVALARAHPSLRVTVLDRPGALEVARKTIAEAGLEERVRTHAADIFTDSYPAGHDCVLFAHQLVIWSPEQNLTLLRKAYDAVEPGGRVLVFNAFTDDDRTGPLYAALDNVYFTTLPFRHSTIHRWADCESWLREAGFTDVGRTAPPGWTPHGVVSGSRPR

SEQ ID NO: 90739 - protein, 596 aa, Streptosporangium sibiricum
  misc_feature (1)..(596): tr|C0LTL9|C0LTL9_9ACTN SibE OS=Streptosporangium sibiri cum OX=457432 GN=sibE PE=3 SV=1
MSALPSLRVPTLPVAFEAAARAAGDRIALEYGSSSITYRELDAAANRFARRLLREGVTPGSRVGLHMTRCLELYIAMIGLLKAGAVVVPLNPSHPVTVRRSVVREADLPLTLRDVPAGLSSVTVERDVHELLAAGADLDDTSPGLCTDPESTAFILFTSGSTGRPRGVRIAHRGIARVASYNGEVEVRPDDCFLQLAPYSFAASTTDIWLSLLHGARVVVLPSQLPSLPKLAHTIKEYGVTFLNLPGGLMNLLIDAHPEAFAKVRTVIVSGDFPSAPHLARVMKAVPGTVYNAFGCTENSALTAVHPMTPEDLQLGVVPIGLPLPGVGLHVLGEDMTPCAPGEVGEMHISGAGLAQGYLGLPEETAAKFPTVDGVRMLRTGDWARTTPAGEVVLVGRTDQMVKIRGFRVELREVELAADQSGLVEKAVVRAVDATDGQKELVLFCTTATGEAPSIEALLADLKSRLPDYMLPARVHHLAELPVNVNGKLDRMALREPRAVLVEPDGTAQQQPVVRDIIATTVTRLLAVVTGREPIGVSDSFLASGANSLQVIQLAASLHDVMGVDVRPEDIFQLDNAESLAGHIRALRQGHREVPA

SEQ ID NO: 90740 - protein, 351 aa, Streptosporangium sibiricum
  misc_feature (1)..(351): tr|C0LTM1|C0LTM1_9ACTN SibG OS=Streptosporangium sibiri cum OX=457432 GN=sibG PE=4 SV=1
MRILVNGGGPAGMAFAMFAARSGRGDEITVRDWTGPGDTYGFGVILPPAAVEVFRDAEPDLADELNSHITAWDRLSVHRHGRTASIPAPRLGAMDRRTLLKVLRRRCAERGVRFEHGAVDPALGDHDLVVAADGARSVTRRHRAAAFGTTTREIGPAYIWLGADRALEHLRFLVAETPDGPAVAHAYPYSPDRSTFLVEADGAPPPAVLAEWFAGPLGGARLLENRSRWSRFQEIHNRTWSAGNVVLIGDAAHTAHYSIGSGTRLALDDARALADALCAQPRLADALKGYEDARRPIVEHTQRIGRLSATWFTRLPDVPMERLLDDLATRGGQISWRDLATEGSGAVPVRG

SEQ ID NO: 90741 - protein, 476 aa, Streptosporangium sibiricum
  misc_feature (1)..(476): tr|C0LTL7|C0LTL7_9ACTN SibC OS=Streptosporangium sibiri cum OX=457432 GN=sibC PE=4 SV=1
MSATPPKAVIVGAGPVGCLLAVELRRRDFDVEIYEKCDADTVLRPGVGRSFNLTLTHRGLSVLHPWLRDRVYEIGSVLRQRIVHHTDGTLTRQPYGISDDQHLLSVPRRELQRILLAEARASGARMFFGHSCVGADAHRGEAMFVDPRGTVRHAAGDILIGCDGANSALRYELSKGGARMQVHQRYIAHGHVELTLTPEGSAALAPDGMHLWPRSDHFLQAQPNRDGSTTTTLFMPVGNEGGELRFRSLTGTEAVREHFEREYPDIAPHLPLAADEVIRARPALLKVVDCAPYNYGRAVLVGDSAHTIVPFFGQGINCSFEDADILCRLLDKYWRSGVDRHEAIRAAGAEFSEQRVAAGQAISQLSMDNLHELSKSIDDAGFHRRQRLERMLHEYRPAEFTQLYQLVAFTRTPYDEIIRRSRIDKLALDTLCELYDPDTEAETIISSYAEVRRGLDEHDTREPALALTATPAKGEH

SEQ ID NO: 90742 - protein, 298 aa, Streptosporangium sibiricum
  misc_feature (1)..(298): tr|C0LTL5|C0LTL5_9ACTN SibA OS=Streptosporangium sibiri cum OX=457432 GN=sibA PE=4 SV=1
MAEGLRDDVARHNYSVDIATTGRAVLEAFTSYDLILLDTDLPDLDGVSVSRAIRQTSMIPIIAFASADEVDQVLLLETGCDDCIERPYRSRDVVARINAVLRRTAPITSPVPFASPVPFASPVPFASPAADLDSVVRARPRGVPPLAAVGEDLVLGEEQGQLIRVGNRLVIDPALREARLGGELLTLTRKEYELLHLLASAPGRIFDRTELMIKIWDYPAGKPVNAQASRTIDTHVSSLRRKLGHRDWIANLRGVGFRLDVPGPRRGGRQAPSRLVAADPEEAPRHGWIRAEGAIESA

SEQ ID NO: 90743 - protein, 299 aa, Streptosporangium sibiricum
  misc_feature (1)..(299): tr|C0LTN3|C0LTN3_9ACTN SibS OS=Streptosporangium sibiri cum OX=457432 GN=sibS PE=4 SV=1
MTVSFEIVGIFGTEPGGGSPLAVVHDAGGLSTEQMRWIAGRLRADETVFVLPPATSGATYRVRVFTAAGESPYGGHSAVGTAVSLVRRGDIRPGTVVQECGGRQLTLRAGADRAEFAATGTPRVESLPADPVLDAIGLAAADLAGEPVLAGFGPLFRMVPVRQEALGRARPDFPAMTRHELPEIFLFAWDGPAASAEARLFAPGWAIPRDPACASVALAFGAWLADRQGRPDAPRPFLIRQGAELGRPALLSGTLGAGSGDAEITVTVGGPAPGELAGQITASPPDASQPNVLRTSSAA

SEQ ID NO: 90744 - protein, 389 aa, Streptosporangium sibiricum
  misc_feature (1)..(389): tr|C0LTM8|C0LTM8_9ACTN SibN OS=Streptosporangium sibiri cum OX=457432 GN=sibN PE=3 SV=1
MTVAPTVPFHVPHTARHQAEYMSSALVSGDLDGNGDYSARASALIQRITGAGQVLLTPSCTAALEIAALLLDLAPGDEVVMPSFTFAPTASAFALRGAVPVFVDCHPETLNLDEKALEEAITERTRAIIAVHYAGVACEMDEIMRIAERHGIPVLEDNAHGLGASYRDRPLGSIGRLAAQSFHATKNVHSAKGGALLVNDDGMVDRATIIRDRGTNRHQYFLGQVDKYRWVDLGSSYILPELLAALLAAQLEEHDAVQRQRRAVWYRYHEGLAEWAGDQRVQLPAVPADRVHSAHLYHLVLPEPADRAAFLNHLRARGVTATIHFVPLHNSPAGQRYGRTVPGGCPITEHVADRLVRLPLHTGLTPAQVEQVVDAVVSFRTSESRGSQP

SEQ ID NO: 90745 - protein, 193 aa, Streptosporangium sibiricum
  misc_feature (1)..(193): tr|C0LTM4|C0LTM4_9ACTN SibJ OS=Streptosporangium sibiri cum OX=457432 GN=sibJ PE=4 SV=1
MKTRELAVDGALELTLPVFPDERGMFCPIYQDGALSVPFPIRRSALSVNRAGAARGIHYAPGGDGPTKIVHCVSGSAIDFVVDVRVGSPTFGHWDTILLDADLPRAVYLPAGLGHGFVALTGGTVVSYLMTTAYQAGDEQPVSLLDPALGLPLPAAQELVMSPADRAAPTLAEALGRGLLPPYRTGPAEEDET

SEQ ID NO: 90746 - protein, 1503 aa, Streptosporangium sibiricum
  misc_feature (1)..(1503): tr|C0LTL8|C0LTL8_9ACTN SibD OS=Streptosporangium sibiri cum OX=457432 GN=sibD PE=4 SV=1
MSDVLLTVVRDRWRTSSGRPEILAAELADILGRAVDPEDIAAAGSPESLVARLTTGSVPAVGTPGTELRSAPAWPATPGQTGIWYLSEFGEARTAYNSPILLRVPGALDPEALRAALEHVVRRHESLRTTFEMRDGTLTQLVAAEPRFGFRTAAVGSAGEAGRLAAELAAEHLDLTDGPLLRAVCVDVGGDNTILLVSVHHAVFDGFSWSVLLSEWLTAYRRAAAGERLPHDAPPVQFRQAVAALRPAGEAGLAYWTGHLAGVPVLDLPLDHPAGPRGRVAAASVHTRLTASEVVRLRRQAASHGATPAVALLAAYALLMHRHTGQPDLTVGLPVSLRDRSADQHVIGHLVNTVVLRHRVTPGSTGTDLLTATRDEVRAALAHKNVPFEQIVERLAPDRADGRPPLFQTMVTIMPAERRDLRHLGLGADAWQHLGSTPKFDLALVVEEAAEHLGLTFEYDPAVLGHDTVTRMAARFRTVLAALMDDPDQRVHDLPWIPEDELRELRAAWSGPVDERPARQSLPQMFEARVREHPDRTAVRSSAGELTYRQLNSAANRLARALRRHGARRGTRVALRLERGPDAVVGLLAVLKSGASFVPLDPAYPPQRLALMLRDANPEVLLVHGGSPVEVPAGTTVVDFGSVELPADDTDPAGQRAADDEMYVVYTSGSTGRPKGVIINDITITNLVHRQDDLSGLGETARTLQYMSISFDVSFMEIFCTLCAGGTVVVPDEQMRTDLRRLAGHLREQRVNRIFLPYVALQELATVLTREDIHLPDLAEVYTTGEALVVTAQIRDMFRRCTPAVLINAYGPSEAHLVSARRLPGDPSSWPERPAIGEVAGNVRAYVLDQQQRPVPFGVRGELYVGGPVVGRGYLHLPDQTRERFRPDPYAGRPGGRMYRTGDLVMLTAPAGLVHLGRADEQIKIRGYRVEPGEVEGALNDLPGITASAVVAAELEAGGRDLVAFVCTGSTLIDPRQVRDRLRASLPAYMVPSRIVTLDRLPVAPSGKTDRAALAALASRSPDRPADVSDDRPLGETEQRVAALWAGLLPGGGIGPDTDFYSAGGHSLLAVRLRQAVEDEFGMELPLSALLATPTVAGMAARVDAVRAGHDEVDGPDLWADTRLLDGLRLGTTRAADARTSRTVLLTGVTGFLGSYLLRVLQQTGHEVHCLVRADGEEQGRARIAEACRRYRVDANLADVRVVAGDLALERFGLHPADYEDLAGRIGAVYHAAAHINFSAPYASVRSSNVDGFVRIAEFCADTVLKPLHHMSTLAVFSPAEPPRTVDEDSIPSTAEGLGISYAQSKWVAERLALAARAHGVPVTVYRIGRIGPDSVTGACRTDDFFWLQIKSFVRLGVVPADLGRPVDLLPVDMVADAVVRLGGSARARNRTVHIFHPTGIDWQTTLAALAAAGHHPRPVTTEEWLAALETAPAGADGNSLASLVPLFREGVMNLSEHRYVNDRTVRDLAALGLEIPAAEPGWITSMIEYFTETGQLAPTSAP

SEQ ID NO: 90747 - protein, 770 aa, Streptosporangium sibiricum
  misc_feature (1)..(770): tr|C0LTM0|C0LTM0_9ACTN SibF OS=Streptosporangium sibiri cum OX=457432 GN=sibF PE=4 SV=1
MAADRQHIVVTGARTNNLKGIDLRIPLGKLTVVTGVSGSGKSSLVFGTIAVESQRQLNEVFPAFIRNRLPRYERPEFELIENLSPAIVVDQKAVGGGNRSTVGTMTEVSPILRVMFSRYGEPSAGPSNFYSFNDPQGMCPECEGLGATLQLDVERLLDKNLSLNEGAIQHPNFAVGTNYWKRYAQVARFEAGKARGADLEPLFDANKPLARYTKSEMDLLLYGEGFQTTRPDEFNNVAVNDYEGLVLRFTRRFVKPGLDSLKDKERKATEKVVTEQVCPACEGARLSPAAVASRIDGHNIADFCAMEIGDLVTELVRLEKRWPGPVVPAALASLRRIESVGLGYLTLNRPTRTLSGGEGQRLKTVRHLGSSLTGMTYIFDEPSVGLHAHDVDRLNQLLTALRDKGNTVLIVEHNRDVIEIADHVIDVGPGPGASGGEIIFTGTVKQLAASDTLTGRSFKALPGLKPETRTPTGSLPIRKATLHNLRGVDVDFPTGVLTVVTGVAGSGKSTLASKVFAAEYPYAIVLDQSAVGINPRSTPATYTGVWDLVRKQFAVAHHVDISLFSFNAKGACPECKGRGTITTDLAFMDPVTVVCEVCGGTRYRQDVLEHRIDGLNIAEVLDLTVEESREWFDDRAIVKRLEPLREVGLGYLTLGRPLSMLSGGERQRLKLADRLHESGSVYLFDEPTTGLHMADVQNLLALLDRLVDAGNTVIAIEHDLDVVKHSDWVIDIGPGAGEHGGQVVFTGTPADMAEKGRTRTADYLRAALPR

SEQ ID NO: 90748 - protein, 491 aa, Streptosporangium sibiricum
  misc_feature (1)..(491): tr|C0LTN7|C0LTN7_9ACTN SibW OS=Streptosporangium sibiri cum OX=457432 GN=sibW PE=4 SV=1
MISRRGFLGASAVAVVGFDLFGHRWVTAAEAAAGPSFAKAPPLSGELAVDAAAREAVGTDLGNIVHRRPAAVLRPGSAADIAAMIRFCSAHGIPVSARGQAHTTYGQGLSTGLVIEMRHLNRIHRINDRFAEVDAGILWKDLAGAAYEQSPPLTPPVLTGYTGLSVGGTLSVGGVGGIVGGLRTGLQVDHVQELEVVTGAGVIERCSRQRKPDLFDAVLGGLGQCAVITKAVIQLVPAPQRARNFVLQYSDNAAFFRDLRLLIDRTQVDHVYAEFTAPDPEPVYKIHATAFYDAPATPDAAAILAGVSAVAVVEDTPYLDYVLTIDRLIDFLRETEDWDRLVKPWYDVWLSDSTIEQYLAELVPSLTPRDIGPYGAGLIYPQRRELTTRPAPRRPAPDGSSFVYVVDVNTVSSAPGPDPAFSAEMLERNKRLYARARRSYGAVLYPIGSVPFTEQDWRDHYGSAWPAFRAAKRRYDPAGVLTSGPGIFRRS

SEQ ID NO: 90749 - protein, 392 aa, Streptosporangium sibiricum
  misc_feature (1)..(392): tr|C0LTM2|C0LTM2_9ACTN SibH OS=Streptosporangium sibiri cum OX=457432 GN=sibH PE=4 SV=1
MRYLFTAMPVASHFMPLVPLAHAALSGGHDVLVATSGPATRTAVAAGLVTADAGGSRQARQPYDDLLDMLARGEAGVAPDDPTSLAVHGRQFGEVGARQLDDIVTIARDWRADAVVYLGIHAAALVAARAAGIPAVLHGYGTPLPTFEPSLEHLAPHAARFGVDTVTEAEFEIDVLPPSLANFTDVPTTIGKPQHTLAMRYGCFNNGGTLPHWALRRGDVPRVVATCGSAPAMTLDGRLYRDIVTATERLGAELILLTADADLPELPSELPPHVRSERWLPLRALLNTTDAVVHHGGSGTFLSTLAAGLPQVTLPMPGTVNMTNARSLTARGTGPTVNLSEVSPDTLTAALEAVLRDPGPRRAAEEVAAEMATMPTTASVINRISQLIQDSR

SEQ ID NO: 90750 - protein, 250 aa, Streptosporangium sibiricum
  misc_feature (1)..(250): tr|C0LTN2|C0LTN2_9ACTN SibR OS=Streptosporangium sibiri cum OX=457432 GN=sibR PE=4 SV=1
MVARCAAPRCPVTVTAGSPLCPACVARLGRDLRRLPSLYQQCGERHPHSTAPAWQAPPRAGRPGPTVPLHAGATDARHAIETVLASWAGMIAQATGAAPPRRVVADLARFLLARFGLLQRHPAAGDLAAEVAVLVADAERVLRPERGRPLGGCVVPGCKGRLTGGTQPQNLQVTCDADAAHRWDGPEVLMMRDGTPAPAEAVWLDASAITALWGLSRGSVYRLASENGWRRRRRDGRTHYAADDVRSTLG

SEQ ID NO: 90751 - protein, 245 aa, Streptosporangium sibiricum
  misc_feature (1)..(245): tr|C0LTM9|C0LTM9_9ACTN SibO OS=Streptosporangium sibiri cum OX=457432 GN=sibO PE=4 SV=1
MNRLGLTMGEEAYEHALRSDDTREFELLDRTWTQLSGVVGGEYNYATGLFASSLPYDGVHSMLEMGCGCGVAAVLGALAGVPRVTALDINPAAVRTAQLNAERHGVADRVTALVSDLFSAVPEDTAYDLIFWNSPFIQVPADHALDSDLAYHFFDPGYTMHERFLREARRRLTPAGRLFLGFSFAMGSGDRLHDAAAAAGLDVRIHVQESFAAAPEELGTSPVYREHAGDDARVHIDFTLLELVR

SEQ ID NO: 90752 - protein, 416 aa, Streptosporangium sibiricum
  misc_feature (1)..(416): tr|C0LTM7|C0LTM7_9ACTN SibM OS=Streptosporangium sibiri cum OX=457432 GN=sibM PE=4 SV=1
MTTEIAKSVTTCRVCGAADWQEVISFGSVPLANAYLDKPGPEEAYPLELISCRSCRLLSLTAVVDPQALYRDYAYVTSESETMTHHMRDVVRLCRERIDAGGLVVELGSNTGNQLQLFQQAGHPVLGVDPAQNLAAIAERRGVPTVADYFNEKVATAIAGEHGRASLILGRHVFAHIDDLADVLRGVKALLTDDGLFAIEVPYACDLLERVAFDTIYHEHLSYFLISTLDRLFTRHGLRAIDVRRLAVHGGSVLVTAARMGSRWETDERVGELIAYEKSERLDTDARYEQFAARVHALRRELTELVRKEAANGKRVAGYGASAKGTTLLNICELTSTEVRFCTDTTPQKQGRFVPGTQIPIVAPGDVSEQPDLYLLLAWNYAEEILQREAAFLDAGGAFIIPVPEPAVYARQKVRQ

SEQ ID NO: 90753 - protein, 292 aa, Streptosporangium sibiricum
  misc_feature (1)..(292): tr|C0LTN4|C0LTN4_9ACTN SibT OS=Streptosporangium sibiri cum OX=457432 GN=sibT PE=4 SV=1
MRHGVLILPEHHWPRARNRWMLAERLGFAHAWTYDHLMWRWFAERPWFSAVPTLAAAAAVTGRIGLGTLVASPHFRHPVSFAKELVSLDDIAPGRMVCGVGAGAPGFDESLQGGPVLSPRERADRFDEFTSLLHRLLHEERTTYTGRWFSAHDAVVLPKPRAMPLAVAAAGPRGMALAARHADIWVTSGPPNVFEQDRFDRVAPLLKAQTAALDEACAAIGRDPAGLRRLLLTDGAVGGVLESTGSYADASGLFADLGFTDLVVHWPRPAPPFEGDEQVLLDFASAHLQGDG

SEQ ID NO: 90754 - protein, 273 aa, Streptosporangium sibiricum
  misc_feature (1)..(273): tr|C0LTM5|C0LTM5_9ACTN SibK OS=Streptosporangium sibiri cum OX=457432 GN=sibK PE=4 SV=1
MTSVRTELDRQLSPSTVARDAPVTLARYRLRSQAARRDLVHHADLRYGSHPAEVLHHFPPRRPGSPLLIFIHGGHWQESSKEDACFPAPGLIAAGFGYLALGYGLAPQRSLPEMTASVRRGLTWVLDHAEELGGRPDAVFAAGSSAGAHLAAMAADLPLAGLFLLSGLYDLSPVIGSYVNNALGLTAEEAARLSPMLRPPPAVPVLLAVGEHETREYHGQQRRYAAALRLAATPVTELVVAGRDHFDLPFDLGDPATVLGAAVVRAAQPKGAP

SEQ ID NO: 90755 - protein, 151 aa, Streptosporangium sibiricum
  misc_feature (1)..(151): tr|C0LTN6|C0LTN6_9ACTN SibV OS=Streptosporangium sibiri cum OX=457432 GN=sibV PE=4 SV=1
MPLRAHHVGVQTADLDNSVRWYTEFFGARVAWELDRFSDLTLSRLPGIRRLVEVSMEGLCVHLIDRAGHTGQLPPAEGYQFQHVCLQVSEPEQLEVLRDHWIELYESGRFSFARTDPPTDIVVDADGVSSVYLFDPNGLEYELTHVPDGPR

SEQ ID NO: 90756 - protein, 336 aa, Streptosporangium sibiricum
  misc_feature (1)..(336): tr|C0LTP0|C0LTP0_9ACTN SibZ OS=Streptosporangium sibiri cum OX=457432 GN=sibZ PE=4 SV=1
MREWQDFQLSGMPQLISAMHLCQAVHALAETGLLAELRAGLSREHIDSLSGLDPELVRGFLSYLVVRGVVDDLPDGYRLSRRGELLTTDVSLARLGVYAGAYGAVTARTGDLLTGRARYGVDVHRDGGALGRHCATLFEVFHSETIRTATERRGIRTMLDAGCGAGQLLIDACRRDERLTGIGLDNSPEAIAVAEKLAREHGVADRIQFFVADAFEPETWPEACRDADAMCIVSALHEHFRHGEDAVIELLRRYAGALPALEMLLVGEPELLYEDRENHDDFLLVHVLTGQGLPRDRNAWLPVFEKAGLRCEHIYMRPGAGPRLCFYDLNPRTQRH

SEQ ID NO: 90757 - protein, 390 aa, Streptosporangium sibiricum
  misc_feature (1)..(390): tr|C0LTN8|C0LTN8_9ACTN SibX OS=Streptosporangium sibiri cum OX=457432 GN=sibX PE=4 SV=1
MSGEDHQRQGLLHAALDRLRCRLPSLAAATVQAVRRHGDAPPAPAADGALRTIVHHAALWVLEAVDDRTDPAHIGEAGLLNRTHHSLTAPLVSQACNDMCRRTWQALVQEATAEEGQLLLERSARYLAASTELVEHVLTEQSAAAGSETRLREMATRLLNGERPPASLSAEGGTADTYAVLAVPTQRPGEIAGIAARHHWLSAEQPGAVTVLVPVGGPGRRADGRARARHAFHALCPQHPVGLGLPADVEGIPAAVADAWEAVATLRRLGRHEPGLFQLDDVLLEAMLCRAPELAARLAGRLRPVTRCQPYLLDTLAAFLDNDGDRRELARQLYIHPNTLNHRLRRVSELTGLSLANAGDLCLLKAALTAWQVTNAAAGAGTGRPAFRAA

SEQ ID NO: 90758 - protein, 597 aa, Streptosporangium sibiricum
  misc_feature (1)..(597): tr|C0LTN9|C0LTN9_9ACTN SibY OS=Streptosporangium sibiri cum OX=457432 GN=sibY PE=4 SV=1
MLSRPELHGTYGAVSSTHWLASAAGAAMFDRGGNAFDAAVAAAFVIQVVEPHVNGPAAEAPIMVHDASSGEVTVVAGQGPMPRRASIETFRRLGLGYVPGSGLLAACVPGAFGAWMTVLLRHGRLRLADVLEPAIGYAEGGYPLLAPAAAIIEALTPLFREEWTETGRIYLDRGAAPRAGSLVRNPDLAATFRRIVREASAPGRARESEIEAAVDVFYEGFVAEAIDAFMCSAEMLDATGKRHRGLLRGEDLAAWRPAVEAPVTAGYRGRLIHKPGPWTQGPVFLQQLALLEGFDLGSMRHLGPDHIHTVVEAAKLAFGDREAWYGDPGHVDVPLRELLSPGYTEQRRALIGDRAAAGLRPGSPLGREPWLPPLPDETAPLEPEWMNQLAHGIPAVVRRTSQNRDTTCISATDRDGNMVVATQSGGWFSSSPAVPGLGFALSTRGQMAWLVEGHPNSLAPGKRPRTTLSPTIVQDGSGEPLLAFGTPGGDQQDQWTLNFALNSIDFAMTPQAAVEALTFHTGHVPSSFMPRQTPPPVVVVEEGLPAETIAALEGRGHRLQQVAARSLGKVCATGHTGDGLVFAAASQRGQQAYGIVR

SEQ ID NO: 90759 - protein, 317 aa, Streptosporangium sibiricum
  misc_feature (1)..(317): tr|C0LTN5|C0LTN5_9ACTN SibU OS=Streptosporangium sibiri cum OX=457432 GN=sibU PE=4 SV=1
MTGVMLLDDRVQAWDFGDFPYGLEPLTMPLAGKARALAGVVAPEVPPCDVDHVCAELRLLDGGTRDAGRFDLASPATYEQLFWFRWITGHQVTFALWRLMGALLAEHPTDGAPPGPDVLERLETYVHGYGAMLLYSGSCPRDLYSTLIRPAMFRQHRGFSGTWAPDFHQVRSLLRGRSRGWLRERSAAGVRAAVEAHCAIHEEVAARLVPEGRSLLQESIGEAPVRPSQRTAVLYDNFFMTLRAPISDGTVAVQLLRRLRAVALDLAANGLYPLGRDAAVDETPAAAAMVAHGERRLGRVVTAIASYAAEVAWRQGT

SEQ ID NO: 90760 - protein, 93 aa, Streptosporangium sibiricum
  misc_feature (1)..(93): tr|C0LTL6|C0LTL6_9ACTN SibB OS=Streptosporangium sibiri cum OX=457432 GN=sibB PE=4 SV=1
MTRTASPVTVMSTPSPRTFVPVSIVQSGLARMLCIFCSVGRAQNHRAPSCQAPATGVTWGVAGGRTVVSQYNWAPSSRVRVASQSSGSAPGWL

SEQ ID NO: 90761 - DNA, 44 bp, Anoxybacillus sp.
  misc_feature (1)..(44): JRLC01000047.1/9312-9355 Anoxybacillus sp. BCO1 LR68_co ntig000047, whole genome shotgun sequence.
gtaggagaggttctagaacaccctctataaaaaactagggatcg

SEQ ID NO: 90762 - DNA, 45 bp, Clostridium chauvoei
  misc_feature (1)..(45): CBML010000006.1/1314853-1314809 Clostridium chauvoei JF 4335, WGS project CBML01000000 data, contig: 00001
ctgggagaggttcgtaaccatccctctataaaaaactaggaatat

SEQ ID NO: 90763 - DNA, 45 bp, Fictibacillus arsenicus
  misc_feature (1)..(45): CP016761.1/3921388-3921432 Fictibacillus arsenicus stra in G25-54, complete genome.
tatttcgcggttcgaaaactcccgcgttaacaaaactaggaggaa

SEQ ID NO: 90764 - DNA, 48 bp, Carnobacterium divergens
  misc_feature (1)..(48): JQBS01000003.1/57754-57801 Carnobacterium divergens DSM 20623 NODE_8, whole genome shotgun sequence.
ataaacgtggttcattcataccatcccacgaaaaaaaactaggaggaa

SEQ ID NO: 90765 - DNA, 66 bp, Pasteurella multocida
  misc_feature (1)..(66): AE004439.1/209165-209100 Pasteurella multocida subsp. m ultocida str. Pm70, complete genome.
ttcatagtggttcgtaaccctcccacttgaacaaccaacaattgttcgaaacaaaactaggaaaat

SEQ ID NO: 90766 - DNA, 45 bp, Clostridium fallax
  misc_feature (1)..(45): FQVM01000030.1/26156-26200 Clostridium fallax strain DS M 2631 genome assembly, contig: Ga0131101_130
tgtgaagaggttcgtaaccatccctctataaaaaactaggaattt

SEQ ID NO: 90767 - DNA, 45 bp, Bacillus selenatarsenatis
  misc_feature (1)..(45): BASE01000106.1/10275-10319 Bacillus selenatarsenatis SF -1 DNA, contig: BSSF00106.
aataacgtggttcgtaaccatcccacgtaaaaaaactaggagaga

SEQ ID NO: 90768 - DNA, 46 bp, Gilliamella apicola
  misc_feature (1)..(46): CP007445.1/2046578-2046623 Gilliamella apicola strain w kB1, complete genome.
ctaaccgtggttcgtaatccatcccacgaaaaaaaactaggaatta

SEQ ID NO: 90769 - DNA, 44 bp, Bacillus pseudalcaliphilus
  misc_feature (1)..(44): LFJO01000005.1/1361271-1361228 Bacillus pseudalcaliphil us strain DSM 8725 super9, whole genome shotgun sequenc e.
ctacaagaggttcgcaaactccctctataaaaaactatacaagg

SEQ ID NO: 90770 - DNA, 46 bp, Clostridium botulinum
  misc_feature (1)..(46): CP001056.1/3123202-3123157 Clostridium botulinum B str. Eklund 17B, complete genome.
gtgggagaggttcgaagaccatccctctataaaaaactaggcaatt

SEQ ID NO: 90771 - DNA, 46 bp, Gilliamella sp.
  misc_feature (1)..(46): FMAQ01000013.1/12884-12839 Gilliamella sp. R-53248 geno me assembly, contig: Ga0061081_113
ctaaccgtggttcgtaacccatcccacgtaaaaaaactaggaatat

SEQ ID NO: 90772 - DNA, 45 bp, Bacillus marisflavi
  misc_feature (1)..(45): LGUE01000001.1/1495503-1495459 Bacillus marisflavi stra in JCM 11544 scaffold1, whole genome shotgun sequence.
acccgagaggttctagcacaaccctctataaaaaactaaggaaaa

SEQ ID NO: 90773 - DNA, 47 bp, Staphylococcus haemolyticus
  misc_feature (1)..(47): AP006716.1/2221258-2221304 Staphylococcus haemolyticus JCSC1435 DNA, complete genome.
tcaaaagaggttcctagctgaaaccctctataaaaaactagacaata

SEQ ID NO: 90774 - DNA, 47 bp, Bacillus sp.
  misc_feature (1)..(47): ABCF01000007.1/14091-14045 Bacillus sp. SG-1 1101501000 790, whole genome shotgun sequence.
gcaggagaggttcatagcccaaaccctctataaaaaactatggatga

SEQ ID NO: 90775 - DNA, 45 bp, Ruminococcus sp.
  misc_feature (1)..(45): LFIL01000002.1/32430-32386 Ruminococcus sp. DSM 100440 contig00002, whole genome shotgun sequence.
cccggactggttcgtgaacttcccagtataaaaaaccaagtatct

SEQ ID NO: 90776 - DNA, 47 bp, Lysinibacillus odysseyi
  misc_feature (1)..(47): JPVP01000056.1/195877-195831 Lysinibacillus odysseyi 34 hs-1 = NBRC 100172 contig5, whole genome shotgun sequen ce.
acgggagaggttcatagctgataccctctataaaaaactatggaaac

SEQ ID NO: 90777 - DNA, 44 bp, Paenibacillus sp.
  misc_feature (1)..(44): CP009282.1/4222420-4222377 Paenibacillus sp. FSL R5-091 2, complete genome.
gcaggagaggttcgcaaactccctctataaaaaactaagaccgc

SEQ ID NO: 90778 - DNA, 45 bp, Bacillus cereus
  misc_feature (1)..(45): AE016877.1/1559911-1559955 Bacillus cereus ATCC 14579, complete genome.
aataacgtggttcgaaaccatcccacgtaaaaaaactaaggagat

SEQ ID NO: 90779 - DNA, 45 bp, Granulicatella adiacens
  misc_feature (1)..(45): GG694016.1/216936-216892 Granulicatella adiacens ATCC 4 9175 genomic scaffold SCAFFOLD2, whole genome shotgun s equence.
gccgatgaggttcgaaaccatccctcaataaaaaactaggaggca

SEQ ID NO: 90780 - DNA, 44 bp, Bacillus thuringiensis
  misc_feature (1)..(44): AAJM01000029.1/17647-17690 Bacillus thuringiensis serov ar israelensis ATCC 35646 sq1905, whole genome shotgun sequence.
gcgggagaggttcgcgaactccctctataaaaaactatggaaac

SEQ ID NO: 90781 - DNA, 45 bp, Avibacterium paragallinarum
  misc_feature (1)..(45): CBMK010000031.1/173196-173240 Avibacterium paragallinar um JF4211, WGS project CBMK01000000 data, contig: 20-24 -9
attatcgtggttcgcaaccctcccacgcaaaaaaactaggacaat

SEQ ID NO: 90782 - DNA, 44 bp, Paenibacillus sp.
  misc_feature (1)..(44): CP009284.1/3824304-3824261 Paenibacillus sp. FSL R7-033 1, complete genome.
gcaggagaggttcgcgaactccctctataaaaaactatttagta

SEQ ID NO: 90783 - DNA, 45 bp, [Haemophilus] felis
  misc_feature (1)..(45): MUYB01000002.1/172-216 [Haemophilus] felis strain CCUG 31170 31170T_ctg_0000002, whole genome shotgun sequence .
cggtacgtggttcgcaaccctcccacgcaaaaaaactaaggacac

SEQ ID NO: 90784 - DNA, 45 bp, Wohlfahrtiimonas chitiniclastica
  misc_feature (1)..(45): KB372778.1/431567-431523 Wohlfahrtiimonas chitiniclasti ca SH04 genomic scaffold scaffold_00001, whole genome s hotgun sequence.
cgcttcgtggttcgcaaacctcccacgcaaaaaaactaaggaatt

SEQ ID NO: 90785 - DNA, 45 bp, Bacillus atrophaeus
  misc_feature (1)..(45): CP002207.1/900902-900946 Bacillus atrophaeus 1942, comp lete genome.
gcgggagaggttctagctacaccctctataaaaaactaaggacga

SEQ ID NO: 90786 - DNA, 45 bp, Bacillus glycinifermentans
  misc_feature (1)..(45): LECW02000036.1/117956-118000 Bacillus glycinifermentans strain GO-13 contig_41, whole genome shotgun sequence.
gcgggagaggttctagcaaaaccctctataaaaaactaaggaaag

SEQ ID NO: 90787 - DNA, 45 bp, Oceanobacillus oncorhynchi
  misc_feature (1)..(45): CDGG01000001.1/2184112-2184068 Oceanobacillus oncorhync hi strain Oc5 genome assembly, contig: CONTIG000001
ttcaacgtggttcgtaaccatcccacgctaaaaaactaggaggaa

SEQ ID NO: 90788 - DNA, 45 bp, Enterococcus faecalis
  misc_feature (1)..(45): KE351687.1/62481-62437 Enterococcus faecalis 13-SD-W-01 genomic scaffold Scaffold953, whole genome shotgun seq uence.
cttggactggttcgtaaacttcccaggataaaaaactaagtatct

SEQ ID NO: 90789 - DNA, 45 bp, Listeria grayi
  misc_feature (1)..(45): GL538352.1/285633-285677 Listeria grayi DSM 20601 genom ic scaffold SCAFFOLD1, whole genome shotgun sequence.
ataacagtggttcgagaacctcccactcaaaaaaactaaggagaa

SEQ ID NO: 90790 - DNA, 45 bp, Lactobacillus amylophilus
  misc_feature (1)..(45): AYYS01000009.1/134720-134676 Lactobacillus amylophilus DSM 20533 = JCM 1125 strain DSM 20533 NODE_16, whole ge nome shotgun sequence.
cacactgtggttcgtaaccaccccacaataaaaaactaaggagaa

SEQ ID NO: 90791 - DNA, 45 bp, Lactobacillus saniviri
  misc_feature (1)..(45): JQCE01000020.1/23922-23878 Lactobacillus saniviri JCM 1 7471 = DSM 24301 NODE_21, whole genome shotgun sequence .
aaacatgtggttcgcaaccatcccacataaaaaaactaggagaga

SEQ ID NO: 90792 - DNA, 44 bp, Bacillus smithii
  misc_feature (1)..(44): CP012024.1/1122365-1122408 Bacillus smithii strain DSM 4216, complete genome.
gcgggagaggttcgcgaactccctctataaaaaactaaggagag

SEQ ID NO: 90793 - DNA, 45 bp, Sporosarcina sp.
  misc_feature (1)..(45): LPUT01000012.1/69668-69624 Sporosarcina sp. HYO08 scaff old_2, whole genome shotgun sequence.
cacaacgtggttcgaaaccatcccacgataaaaaactaaggagaa

SEQ ID NO: 90794 - DNA, 44 bp, Lactobacillus hayakitensis
  misc_feature (1)..(44): AZGD01000037.1/74702-74745 Lactobacillus hayakitensis D SM 18933 = JCM 14209 strain DSM 18933 NODE_93, whole ge nome shotgun sequence.
atgatactggttcgaaaaatcccagttaaaaaaactagaaagag

SEQ ID NO: 90795 - DNA, 44 bp, Thermobacillus composti
  misc_feature (1)..(44): CP003255.1/4203402-4203445 Thermobacillus composti KWC4 , complete genome.
ccgggagaggttcgcgaactccctctataaaaaactaaggctga

SEQ ID NO: 90796 - DNA, 45 bp, Bacillus sp.
  misc_feature (1)..(45): KQ758686.1/14716-14760 Bacillus sp. SGD-V-76 genomic sc affold Scaffold60, whole genome shotgun sequence.
taagacgtggttcggaaccatcccacgtaaaaaaactaaggagag

SEQ ID NO: 90797 - DNA, 45 bp, Rodentibacter rarus
  misc_feature (1)..(45): MLHJ01000085.1/12689-12733 Rodentibacter rarus strain C CUG17206 contig_85, whole genome shotgun sequence.
aacgttgtagttcgcaaacctcctacataaaaaaactaggtacaa

SEQ ID NO: 90798 - DNA, 44 bp, Paenibacillus sp.; identical to SEQ ID NO: 90777
  misc_feature (1)..(44): JUEI01000026.1/31987-31944 Paenibacillus sp. IHB B 3415 contig_026, whole genome shotgun sequence.

SEQ ID NO: 90799 - DNA, 45 bp, Sediminibacillus halophilus
  misc_feature (1)..(45): FNHF01000001.1/1070030-1069986 Sediminibacillus halophi lus strain CGMCC 1.6199 genome assembly, contig: Ga0079 860_101
taataagaggttctagctacaccctctataaaaaactaaggaatg

SEQ ID NO: 90800 - DNA, 45 bp, Viridibacillus arenosi
  misc_feature (1)..(45): ASQA01000009.1/152539-152583 Viridibacillus arenosi FSL R5-213 Contig009, whole genome shotgun sequence.
tataacgtggttcgtaaccatcccacgaaaaaaaactagggggaa

SEQ ID NO: 90801 - DNA, 45 bp, Lactobacillus composti
  misc_feature (1)..(45): AZGA01000088.1/168616-168660 Lactobacillus composti DSM 18527 = JCM 14202 strain DSM 18527 NODE_225, whole gen ome shotgun sequence.
ttcggactggttcgcaaacttcccaggataaaaaaccaagtactt

SEQ ID NO: 90802 - DNA, 45 bp, Clostridium sp.
  misc_feature (1)..(45): LBBT01000340.1/3369-3325 Clostridium sp. JC272 contig36 6, whole genome shotgun sequence.
ttgggacttgttcgagaacctccaagtataaaaaactaaggtaat

SEQ ID NO: 90803 - DNA, 46 bp, Kingella kingae
  misc_feature (1)..(46): GL891964.1/12204-12249 Kingella kingae ATCC 23330 genom ic scaffold SCAFFOLD6, whole genome shotgun sequence.
ccaaccgcggttcgtaaccatcccgcgataacaaaactaggaaaat

SEQ ID NO: 90804 - DNA, 45 bp, Pontibacillus yanchengensis
  misc_feature (1)..(45): AVBF01000064.1/3980-3936 Pontibacillus yanchengensis Y3 2 contig26, whole genome shotgun sequence.
acgggagaggttctagctcaaccctctataaaaaactaagggaca

SEQ ID NO: 90805 - DNA, 46 bp, Cardiobacterium valvarum
  misc_feature (1)..(46): JH417937.1/1845-1800 Cardiobacterium valvarum F0432 gen omic scaffold Scfld509, whole genome shotgun sequence.
gcccctgtggttcgcaacccatcccacataaaaaaactaggaaacc

SEQ ID NO: 90806 - DNA, 45 bp, Gilliamella sp.
  misc_feature (1)..(45): NAST01000006.1/24717-24673 Gilliamella sp. N-G2 NODE_6, whole genome shotgun sequence.
aattacgtggttcgtgaacctcccacgctaaaaaactaaggaaaa

SEQ ID NO: 90807 - DNA, 45 bp, Halobacillus halophilus
  misc_feature (1)..(45): HE717023.1/1018382-1018338 Halobacillus halophilus DSM 2266 complete genome
acaggagaggttctagctacaccctctataaaaaactaaggatgg

SEQ ID NO: 90808 - DNA, 47 bp, Caryophanon tenue
  misc_feature (1)..(47): MASJ01000002.1/47355-47401 Caryophanon tenue strain DSM 14152 DSM_14152_R1_001_contig_10, whole genome shotgun sequence.
ttgggagaggttcatagcaaataccctctataaaaaactatggaaac

SEQ ID NO: 90809 - DNA, 44 bp, Bacillus sp.
  misc_feature (1)..(44): LFZU01000001.1/3225829-3225786 Bacillus sp. FJAT-27231 Scaffold1, whole genome shotgun sequence.
gcaggagaggttcgcgaactccctctataaaaaactatgagaga

SEQ ID NO: 90810 - DNA, 45 bp, Lysinibacillus manganicus
  misc_feature (1)..(45): JPVN01000002.1/167760-167804 Lysinibacillus manganicus DSM 26584 contig2, whole genome shotgun sequence.
cgcaccgtggttcgtaaccatcccacgaaaaaaaactaaggagaa

SEQ ID NO: 90811 - DNA, 47 bp, Lysinibacillus sphaericus; identical to SEQ ID NO: 90776
  misc_feature (1)..(47): KB933398.1/2664014-2663968 Lysinibacillus sphaericus OT 4b.31 genomic scaffold Ls31_scaffold1, whole genome sho tgun sequence.

SEQ ID NO: 90812 - DNA, 44 bp, Paenibacillus rhizosphaerae
  misc_feature (1)..(44): MRTP01000001.1/1332557-1332600 Paenibacillus rhizosphae rae strain FSL R5-0378 NODE_1_length_2436333_cov_1.2696 6_ID_3960, whole genome shotgun sequence.
gcgggagaggttcgcgaactccctctataaaaaactaagactgc

SEQ ID NO: 90813 - DNA, 46 bp, Bhargavaea cecembensis
  misc_feature (1)..(46): AOFT01000008.1/83034-83079 Bhargavaea cecembensis DSE10 contig000008, whole genome shotgun sequence.
ccccgcgcggttcgtaaccatcccgcgataacaaaactaagggaga

SEQ ID NO: 90814 - DNA, 44 bp, Domibacillus antri
  misc_feature (1)..(44): MSDU01000005.1/56076-56119 Domibacillus antri strain XD 80 WGS_contig_5, whole genome shotgun sequence.
gcgggagaggttcgcgaactccctctataaaaaactaagaaaaa

SEQ ID NO: 90815 - DNA, 45 bp, Lautropia mirabilis
  misc_feature (1)..(45): GL636062.1/2737320-2737276 Lautropia mirabilis ATCC 515 99 genomic scaffold SCAFFOLD1, whole genome shotgun seq uence.
gcccccgtggttcgaaaaacgcccacgttaaaaaactagggaaga

SEQ ID NO: 90816 - DNA, 45 bp, Clostridiales bacterium
  misc_feature (1)..(45): KV441331.1/115204-115248 Clostridiales bacterium KLE161 5 genomic scaffold Scaffold383, whole genome shotgun se quence.
tgcctactggttcgaaaccctcccagtataaaaaactaggctgat

SEQ ID NO: 90817 - DNA, 47 bp, Sediminibacillus halophilus
  misc_feature (1)..(47): FNHF01000001.1/994012-993966 Sediminibacillus halophilu s strain CGMCC 1.6199 genome assembly, contig: Ga007986 0_101
tcgggagaggttcttagcgtaaaccctctataaaaaactaaggacat

SEQ ID NO: 90818 - DNA, 48 bp, Lactobacillus animalis
  misc_feature (1)..(48): JMHU01000001.1/73363-73316 Lactobacillus animalis strai n 381-IL-28 NODE_1_length_157441_cov_30.456526, whole g enome shotgun sequence.
atattggtggttcgcaaccatcccaccgtaataaaaaactaggagaga

SEQ ID NO: 90819 - DNA, 44 bp, Lactobacillus composti
  misc_feature (1)..(44): AZGA01000002.1/310318-310275 Lactobacillus composti DSM 18527 = JCM 14202 strain DSM 18527 NODE_6, whole genom e shotgun sequence.
agcgtggtggttcgcaaaatcccacctaaaaaaactaaggagga

SEQ ID NO: 90820 - DNA, 45 bp, Garciella nitratireducens
  misc_feature (1)..(45): FUWV01000007.1/5007-5051 Garciella nitratireducens DSM 15102 genome assembly, contig: BP36DRAFT_scaffold00007. 7
cttggactggttcgaaaccatcccagtataaaaaactaaggagat

SEQ ID NO: 90821 - DNA, 45 bp, Bacillus cereus
  misc_feature (1)..(45): CP000764.1/1428621-1428665 Bacillus cereus subsp. cytot oxis NVH 391-98, complete genome.
aatcacgtggttcgaaaccatcccacgtaaaaaaactaaggagtt

SEQ ID NO: 90822 - DNA, 45 bp, Gilliamella apicola
  misc_feature (1)..(45): JAIO01000005.1/34660-34616 Gilliamella apicola SCGC AB- 598-P17 SCG598P17_12932, whole genome shotgun sequence.
aattacgtggttcgtaaacctcccacgctaaaaaactaaggaaaa

SEQ ID NO: 90823 - DNA, 47 bp, Lysinibacillus massiliensis; identical to SEQ ID NO: 90776
  misc_feature (1)..(47): JPVQ01000012.1/7277-7323 Lysinibacillus massiliensis 44 00831 = CIP 108448 = CCUG 49529 contig12, whole genome shotgun sequence.

SEQ ID NO: 90824 - DNA, 45 bp, Lactobacillus sakei
  misc_feature (1)..(45): CR936503.1/1598027-1597983 Lactobacillus sakei strain 2 3K complete genome.
aaaaacgtggttcgtaaccatcccacgctaaaaaactaggaggat

SEQ ID NO: 90825 - DNA, 45 bp, Rodentibacter heylii
  misc_feature (1)..(45): MLAA01000010.1/28914-28870 Rodentibacter heylii strain 1998236014 contig_10, whole genome shotgun sequence.
atgcttgtagttcgcaaacctcctacataaaaaaactaggtacat

SEQ ID NO: 90826 - DNA, 45 bp, Epulopiscium sp.
  misc_feature (1)..(45): LJDB01000044.1/32218-32174 Epulopiscium sp. SCG-B11WGA- EpuloA1 SCGB11WGA_4, whole genome shotgun sequence.
ctaacactggttcgagagcctcccagaataaaaaactaaggtatt

SEQ ID NO: 90827 - DNA, 44 bp, Anoxybacillus flavithermus; identical to SEQ ID NO: 90761
  misc_feature (1)..(44): JPZO01000112.1/14590-14633 Anoxybacillus flavithermus s train 25 c115, whole genome shotgun sequence.

SEQ ID NO: 90828 - DNA, 45 bp, Jeotgalibacillus malaysiensis
  misc_feature (1)..(45): CP009416.1/1720011-1720055 Jeotgalibacillus malaysiensi s strain D5, complete genome.
ggtaaagaggttcgcgaccatccctctataaaaaactaggccaat

SEQ ID NO: 90829 - DNA, 45 bp, Paenibacillus larvae
  misc_feature (1)..(45): CP003355.1/533952-533996 Paenibacillus larvae subsp. la rvae DSM 25430, complete genome.
atgggagaggttcgagatcttccctctataaaaaactaaggagct

SEQ ID NO: 90830 - DNA, 46 bp, Neisseria zoodegmatis
  misc_feature (1)..(46): MTBM01000012.1/18898-18943 Neisseria zoodegmatis strain DSM 21643 NODE_12_length_84918_cov_34.1738_ID_23, whol e genome shotgun sequence.
ttcaacgcggttcgaaatcctcccgcgataccaaaactaggaacca

SEQ ID NO: 90831 - DNA, 45 bp, Weissella paramesenteroides
  misc_feature (1)..(45): GG697128.1/280499-280455 Weissella paramesenteroides AT CC 33313 genomic scaffold SCAFFOLD1, whole genome shotg un sequence.
atatcagtggttcgtaaccatcccactcaaaaaaactaggagtag

SEQ ID NO: 90832 - DNA, 45 bp, Bacillus amyloliquefaciens; identical to SEQ ID NO: 90785
  misc_feature (1)..(45): CP000560.1/1312567-1312611 Bacillus amyloliquefaciens F ZB42, complete genome.

SEQ ID NO: 90833 - DNA, 44 bp, Paenibacillus sp.
  misc_feature (1)..(44): LMSP01000023.1/394075-394118 Paenibacillus sp. Soil787 contig_3, whole genome shotgun sequence.
atacaagaggttcgcaaactccctctctaaaaaactatgaaatg

SEQ ID NO: 90834 - DNA, 46 bp, Gilliamella sp.
  misc_feature (1)..(46): NAST01000024.1/27869-27824 Gilliamella sp. N-G2 NODE_24 , whole genome shotgun sequence.
ctaaccgtggttcgtaatccatcccacgaaaaaaaactaggaaaga

SEQ ID NO: 90835 - DNA, 46 bp, Haemophilus parasuis
  misc_feature (1)..(46): CP001321.1/1370609-1370564 Haemophilus parasuis SH0165, complete genome.
tcaaccgtggttcgcaaacctcccacgcaaaaaaaactaaggaaca

SEQ ID NO: 90836 - DNA, 44 bp, Paenibacillus sp.
  misc_feature (1)..(44): LMRV01000024.1/145689-145732 Paenibacillus sp. Soil522 contig_12, whole genome shotgun sequence.
ccgggagaggttcgcgaactccctctataaaaaactatgcgaaa

SEQ ID NO: 90837 - DNA, 32 bp, Paenibacillus uliginis
  misc_feature (1)..(32): LT840184.1/4831446-4831477 Paenibacillus uliginis N3/97 5 genome assembly, chromosome: I
agaggttcgtgaactccctctataaaaaacta

SEQ ID NO: 90838 - DNA, 45 bp, Tetragenococcus muriaticus
  misc_feature (1)..(45): JPVT01000171.1/1502-1546 Tetragenococcus muriaticus 3MR 10-3 WGS_Sequence171_159, whole genome shotgun sequence .
cctggactggttcggaaacttcccagaataaaaaaccaagaactt

SEQ ID NO: 90839 - DNA, 47 bp, Enterococcus hirae
  misc_feature (1)..(47): CP003504.1/520705-520659 Enterococcus hirae ATCC 9790, complete genome.
acagctgcggttcatcaaccatcccgcattaaaaaaactaggagaaa

SEQ ID NO: 90840 - DNA, 63 bp, Pelistega indica
  misc_feature (1)..(63): AYSV01000107.1/4017-3955 Pelistega indica strain HM-7 C ontig59, whole genome shotgun sequence.
agtgccgtggttcgaaatcctcccacgcagtaccgttaagtactaaaacaaaactaaggaaaa

SEQ ID NO: 90841 - DNA, 45 bp, [Clostridium] sordellii
  misc_feature (1)..(45): LN681234.1/1955506-1955462 [Clostridium] sordellii stra in JGS6382 genome assembly, chromosome: 1
ctaggacttgttcgagaacctccaagtataaaaaactaaggtatt

SEQ ID NO: 90842 - DNA, 45 bp, Dorea longicatena
  misc_feature (1)..(45): FR898326.1/7582-7538 Dorea longicatena CAG:42 genomic s caffold, scf110
tttgaactggttcgcaaacctcccagtataaaaaactaggcaaag

SEQ ID NO: 90843 - DNA, 45 bp, Lactobacillus fuchuensis
  misc_feature (1)..(45): AZEX01000025.1/4706-4662 Lactobacillus fuchuensis DSM 1 4340 = JCM 11249 strain DSM 14340 NODE_30, whole genome shotgun sequence.
gaaaacgtggttcgtaaccatcccacgtaaaaaaactaggaggca

SEQ ID NO: 90844 - DNA, 47 bp, Catenibacterium sp.
  misc_feature (1)..(47): FR898786.1/632-586 Catenibacterium sp. CAG:290 genomic scaffold, scf47
tgagaactggttcgagagccaaacccagtataaaaaactaagaacat

SEQ ID NO: 90845 - DNA, 44 bp, Paenibacillus sp.
  misc_feature (1)..(44): BBIW01000006.1/256902-256945 Paenibacillus sp. TCA20 DN A, contig: PspTCA2nb06.
atgggagaggttcgcgaactccctctataaaaaactatacagat

SEQ ID NO: 90846 - DNA, 44 bp, Bacillus hemicellulosilyticus
  misc_feature (1)..(44): BAUU01000014.1/125880-125923 Bacillus hemicellulosilyti cus JCM 9152 DNA, contig:contig_14.
aagaaagaggttcgcgaactccctctataaaaaactaaggtgat

SEQ ID NO: 90847 - DNA, 45 bp, Clostridium intestinale
  misc_feature (1)..(45): KI273145.1/516303-516347 Clostridium intestinale URNW g enomic scaffold scaffold1, whole genome shotgun sequenc e.
ctaggagaggttcgtaaccatccctctataaaaaactaggaatta

SEQ ID NO: 90848 - DNA, 44 bp, Paenibacillus dendritiformis
  misc_feature (1)..(44): AHKH01000127.1/2662-2705 Paenibacillus dendritiformis C 454 PDENDC1000127, whole genome shotgun sequence.
gcgggagaggttcgcaatctccctctataaaaaactaaggctga

SEQ ID NO: 90849 - DNA, 44 bp, Paenibacillus sp.
  misc_feature (1)..(44): CP001656.1/4969025-4968982 Paenibacillus sp. JDR-2, com plete genome.
tcaggagaggttcgcgaactccctctataaaaaactaagaactg

SEQ ID NO: 90850 - DNA, 47 bp, Coprobacillus sp.
  misc_feature (1)..(47): GL636577.1/280301-280255 Coprobacillus sp. 29_1 genomic scaffold supercont1.1, whole genome shotgun sequence.
tatgaactggttcgagagccaaacccagtataaaaaactaaggacat

SEQ ID NO: 90851 - DNA, 45 bp, Bacillus pumilus
  misc_feature (1)..(45): CP000813.3/1324513-1324557 Bacillus pumilus SAFR-032, c omplete genome.
acgggagaggttctagcaaaaccctctataaaaaactaaggactt

SEQ ID NO: 90852 - DNA, 45 bp, Bacillus sp.
  misc_feature (1)..(45): CP008855.1/2520824-2520780 Bacillus sp. X1(2014), compl ete genome.
gataaagtggttcgaaaccatcccactataaaaaactaaggagaa

SEQ ID NO: 90853 - DNA, 45 bp, Haemophilus paracuniculus
  misc_feature (1)..(45): MUYA01000012.1/1715-1759 Haemophilus paracuniculus stra in CCUG 43573 43573T_ctg_0000012, whole genome shotgun sequence.
caacctgtggttcgcaatcctcccacataaaaaaactaaggaact

SEQ ID NO: 90854 - DNA, 45 bp, Paenibacillus curdlanolyticus
  misc_feature (1)..(45): AEDD01000004.1/159608-159652 Paenibacillus curdlanolyti cus YK9 ctg109, whole genome shotgun sequence.
aaggtagaggttcgcaaacttccctctctaaaaaactaagcataa

SEQ ID NO: 90855 - DNA, 45 bp, Listeriaceae bacterium
  misc_feature (1)..(45): JNEZ01000034.1/143400-143444 Listeriaceae bacterium FSL A5-0209 contig000034, whole genome shotgun sequence.
gtttccgtggttcgggacaatcccacgtaaaaaaactaaggagtg

SEQ ID NO: 90856 - DNA, 45 bp, Gallibacterium salpingitidis
  misc_feature (1)..(45): JTJL01000005.1/36014-35970 Gallibacterium salpingitidis strain F150 contig000005, whole genome shotgun sequenc e.
attgtcgtggttcgcaaacctcccacgttaaaaaactaggaacat

SEQ ID NO: 90857 - DNA, 46 bp, Neisseria mucosa
  misc_feature (1)..(46): GL635795.1/101202-101157 Neisseria mucosa C102 genomic scaffold supercont1.3, whole genome shotgun sequence.
aatcacgcggttcgcaaacctcccgcgttaacaaaactaggaattt

SEQ ID NO: 90858 - DNA, 45 bp, Lysinibacillus sphaericus
  misc_feature (1)..(45): KB933398.1/1000723-1000679 Lysinibacillus sphaericus OT 4b.31 genomic scaffold Ls31_scaffold1, whole genome sho tgun sequence.
agcaccgtggttcgtaaccatcccacgaaaaaaaactaaggagaa

SEQ ID NO: 90859 - DNA, 46 bp, Enterococcus haemoperoxidus
  misc_feature (1)..(46): KB946315.1/486377-486422 Enterococcus haemoperoxidus AT CC BAA-382 genomic scaffold acvJN-supercont1.2, whole g enome shotgun sequence.
ctcgacaaggttcatcaaccatcccttgtaaaaaaactaggagaaa

SEQ ID NO: 90860 - DNA, 44 bp, Paenibacillus sp.
  misc_feature (1)..(44): MDER01000072.1/7058-7101 Paenibacillus sp. TI45-13ar co ntig00072, whole genome shotgun sequence.
gcgggagaggttcgcgaactccctctataaaaaactatcaatcc

SEQ ID NO: 90861 - DNA, 45 bp, Bacillus sp.
  misc_feature (1)..(45): LJIZ01000016.1/244798-244842 Bacillus sp. FJAT-25509 sc affold2, whole genome shotgun sequence.
ttttacgtggttcgaaaacctcccacgaaaaaaaactaaggagaa

SEQ ID NO: 90862 - DNA, 44 bp, Bacillus endophyticus
  misc_feature (1)..(44): CP011974.1/989489-989532 Bacillus endophyticus strain H be603, complete genome.
atgggagaggttcgcaaactccctcgataaaaaactaagcaaca

SEQ ID NO: 90863 - DNA, 44 bp, Domibacillus iocasae
  misc_feature (1)..(44): MAMP01000001.1/11573-11530 Domibacillus iocasae strain DSM 29979 DSM29979_contig_1, whole genome shotgun seque nce.
gcgggagaggttcgcgaattccctctataaaaaactaatgatca

SEQ ID NO: 90864 - DNA, 45 bp, Jeotgalibacillus campisalis
  misc_feature (1)..(45): JXRR01000014.1/535132-535176 Jeotgalibacillus campisali s strain SF-57 contig00014, whole genome shotgun sequen ce.
taagaagaggttcgcgaccatccctctataaaaaactagggacaa

SEQ ID NO: 90865 - DNA, 43 bp, Bacillus sp.
  misc_feature (1)..(43): CCXR01000001.1/1997282-1997324 Bacillus sp. B-jedd geno me assembly, contig: CONTIG000001
gcggtagaggttctagctaccctctttaaaaaactaaggaaac

SEQ ID NO: 90866 - DNA, 45 bp, Aerococcus urinae
  misc_feature (1)..(45): CP002512.1/463370-463414 Aerococcus urinae ACS-120-V-Co l10a, complete genome.
gtgtgcgttgttcgaaaccatccaacgtaaaaaaactaggaggaa

SEQ ID NO: 90867 - DNA, 48 bp, Virgibacillus necropolis
  misc_feature (1)..(48): CP022437.1/1333602-1333649 Virgibacillus necropolis str ain LMG 19488 chromosome, complete genome.
acgggagaggttcttagcttttaaccctctataaaaaactaaggacag

SEQ ID NO: 90868 - DNA, 46 bp, Clostridium cavendishii
  misc_feature (1)..(46): FQZB01000003.1/427992-427947 Clostridium cavendishii DS M 21758 genome assembly, contig: EJ30DRAFT_scaffold0000 1.1
ttagtagaggttcatgaaccatccctctataaaaaactaggactgt

SEQ ID NO: 90869 - DNA, 45 bp, Bacillus coagulans
  misc_feature (1)..(45): CP003056.1/3182588-3182632 Bacillus coagulans 36D1, com plete genome.
caacccgtggttcgaaaccatcccacgtaaaaaaactaaggagag

SEQ ID NO: 90870 - DNA, 45 bp, Frischella perrara
  misc_feature (1)..(45): CP009056.1/860507-860551 Frischella perrara strain PEB0 191, complete genome.
tattctgtggttcgaaatcctcccacataaaaaaactaaggaagt

SEQ ID NO: 90871 - DNA, 44 bp, Bacillus anthracis
  misc_feature (1)..(44): AE017334.2/1298894-1298937 Bacillus anthracis str. 'Ame s Ancestor', complete genome.
acgggagaggttcgcgaactccctctataaaaaactatggaaac

SEQ ID NO: 90872 - DNA, 45 bp, Lactobacillus pobuzihii
  misc_feature (1)..(45): JQCN01000008.1/21069-21025 Lactobacillus pobuzihii stra in NBRC 103219 NODE_10, whole genome shotgun sequence.
ataatggtggttcgtaaacatcccacctaaaaaaactaggaggtt

SEQ ID NO: 90873 - DNA, 46 bp, Frischella perrara
  misc_feature (1)..(46): CP009056.1/306674-306719 Frischella perrara strain PEB0 191, complete genome.
gatatcgtggttcgtaatccatcccacgtaaaaaaactaggagtta

SEQ ID NO: 90874 - DNA, 45 bp, Enterococcus pallens
  misc_feature (1)..(45): KB946311.1/776563-776607 Enterococcus pallens ATCC BAA- 351 genomic scaffold acvKb-supercont1.7, whole genome s hotgun sequence.
ctcggactggttcggaaacttcccagaataaaaaactaagaatct

SEQ ID NO: 90875 - DNA, 43 bp, Bacillus infantis
  misc_feature (1)..(43): CP006643.1/2402996-2402954 Bacillus infantis NRRL B-149 11, complete genome.
acggtagaggttctagctaccctctcaaaaaaactaaggaaaa

SEQ ID NO: 90876 - DNA, 45 bp, Bacillus thermoamylovorans
  misc_feature (1)..(45): CCRF01000028.1/24730-24686 Bacillus thermoamylovorans g enome assembly, strain 1A1, contig: A1A_CC28
ttgtccgtggttcgaaaccatcccacgtaaaaaaactaaggaaag

SEQ ID NO: 90877 - DNA, 44 bp, Bacillus cereus
  misc_feature (1)..(44): CP000764.1/1180651-1180694 Bacillus cereus subsp. cytot oxis NVH 391-98, complete genome.
atgggagaggttcgcgaactccctctataaaaaactatgagaac

SEQ ID NO: 90878 - DNA, 45 bp, Haemophilus influenzae
  misc_feature (1)..(45): L42023.1/1258303-1258259 Haemophilus influenzae Rd KW20 , complete genome.
ccccccgtagttcgcaaacctcctacaataaaaaactaggtaaaa

SEQ ID NO: 90879 - DNA, 46 bp, Novibacillus thermophilus
  misc_feature (1)..(46): CP019699.1/668203-668158 Novibacillus thermophilus stra in SG-1, complete genome.
acgtgagaggttcttagcttaaccctctataaaaaactaaggacat

SEQ ID NO: 90880 - DNA, 44 bp, Bacillus okhensis
  misc_feature (1)..(44): JRJU01000009.1/81853-81810 Bacillus okhensis strain Kh1 0-101 contig09, whole genome shotgun sequence.
agacaagaggttcgcaaactccctctataaaaaactaaggtgtt

SEQ ID NO: 90881 - DNA, 45 bp, Bacilli bacterium
  misc_feature (1)..(45): LAZH01000027.1/40092-40048 Bacilli bacterium VT-13-104 contig027, whole genome shotgun sequence.
aaatccgtggttcgaaagcctcccacgtaaaaaaactaaggagag

SEQ ID NO: 90882 - DNA, 45 bp, Lysinibacillus sp.
  misc_feature (1)..(45): JPUW01000028.1/5750-5706 Lysinibacillus sp. BF-4 contig 00028, whole genome shotgun sequence.
ctcaacgtggttcgtaaccatcccacgaaaaaaaactaaggagaa

SEQ ID NO: 90883 - DNA, 45 bp, Mannheimia haemolytica
  misc_feature (1)..(45): CP005383.1/2520941-2520897 Mannheimia haemolytica M4254 8, complete genome.
ttatttgtggttcgtaaacctcccacacaaaaaaactaaggacac

SEQ ID NO: 90884 - DNA, 45 bp, Lactobacillus aviarius
  misc_feature (1)..(45): AYYZ01000030.1/48087-48131 Lactobacillus aviarius subsp . araffinosus DSM 20653 NODE_76, whole genome shotgun s equence.
atatgagtggttcgcgaaaatcccacttaaaaaaactagaaagag

SEQ ID NO: 90885 - DNA, 45 bp, Neisseria shayeganii
  misc_feature (1)..(45): JH164926.1/1695886-1695930 Neisseria shayeganii 871 gen omic scaffold SCAFFOLD1, whole genome shotgun sequence.
tctaccgtggttcgcaaacctcccacgtaaaaaaactaggacact

SEQ ID NO: 90886 - DNA, 45 bp, Ruminococcus obeum
  misc_feature (1)..(45): FR896737.1/2108-2064 Ruminococcus obeum CAG:39 genomic scaffold, scf61
tcataactggttcgaaaccctcccagtataaaaaactaggtcatg

SEQ ID NO: 90887 - DNA, 45 bp, Lactobacillus salivarius
  misc_feature (1)..(45): CP000233.1/1599957-1600001 Lactobacillus salivarius UCC 118, complete genome.
cttggactggttcgtaaacttcccagtataaaaaaccaagaatct

SEQ ID NO: 90888 - DNA, 45 bp, Neisseria mucosa
  misc_feature (1)..(45): ACDX02000014.1/67281-67325 Neisseria mucosa ATCC 25996 N_mucosa-1.0.2_Cont13.1, whole genome shotgun sequence.
cccttcgtggttcgaaaacctcccacattaaaaaactaaggaaac

SEQ ID NO: 90889 - DNA, 45 bp, Bacillus subtilis; identical to SEQ ID NO: 90785
  misc_feature (1)..(45): AL009126.3/1439274-1439318 Bacillus subtilis subsp. sub tilis str. 168 complete genome.

SEQ ID NO: 90890 - DNA, 45 bp, Streptococcus sp.
  misc_feature (1)..(45): KQ969395.1/10147-10191 Streptococcus sp. DD11 genomic s caffold scaffold00004, whole genome shotgun sequence.
tttggactggttcgagaacttcccagaataaaaaactaagtcgct

SEQ ID NO: 90891 - DNA, 46 bp, Jeotgalibaca dankookensis
  misc_feature (1)..(46): CP019728.1/1709028-1708983 Jeotgalibaca dankookensis st rain EX-07, complete genome.
aagctcgtggttcgttgaccatcccacgtaaaaaaactaggaggag

SEQ ID NO: 90892 - DNA, 45 bp, Neisseria mucosa
  misc_feature (1)..(45): GL635794.1/437147-437103 Neisseria mucosa C102 genomic scaffold supercont1.2, whole genome shotgun sequence.
caccccgtggttcgaaaacctcccacattaaaaaactaaggaaac

SEQ ID NO: 90893 - DNA, 45 bp, Bacillus endophyticus
  misc_feature (1)..(45): CP011974.1/2991292-2991336 Bacillus endophyticus strain Hbe603, complete genome.
attaccgtggttcgtaaccctcccacgctaaaaaactaaggagaa

SEQ ID NO: 90894 - DNA, 46 bp, Gilliamella apicola; identical to SEQ ID NO: 90834
  misc_feature (1)..(46): JAIO01000027.1/9773-9728 Gilliamella apicola SCGC AB-59 8-P17 SCG598P17_12314, whole genome shotgun sequence.

SEQ ID NO: 90895 - DNA, 45 bp, Virgibacillus soli
  misc_feature (1)..(45): LGPD01000021.1/7639-7683 Virgibacillus soli strain PL20 5 scaffold000021, whole genome shotgun sequence.
gaggacgtggttcgaaaccatcccacgataaaaaactaaggggag

SEQ ID NO: 90896 - DNA, 45 bp, Clostridium perfringens
  misc_feature (1)..(45): BA000016.3/2295327-2295283 Clostridium perfringens str. 13 DNA, complete genome.
ttggtagaggttcgtaaccatccctctataaaaaactaagggctg

SEQ ID NO: 90897 - DNA, 45 bp, Avibacterium paragallinarum; identical to SEQ ID NO: 90781
  misc_feature (1)..(45): LAEN01000054.1/1662-1706 Avibacterium paragallinarum st rain CL AvpgCL_contig_54, whole genome shotgun sequence .

SEQ ID NO: 90898 - DNA, 44 bp, Sporosarcina psychrophila
  misc_feature (1)..(44): CP014616.1/2006254-2006211 Sporosarcina psychrophila st rain DSM 6497, complete genome.
aaaaaagaggttcgaaaactccctctctaaaaaactaaggagat

SEQ ID NO: 90899 - DNA, 46 bp, Lactobacillus nasuensis
  misc_feature (1)..(46): AZDJ01000032.1/112734-112689 Lactobacillus nasuensis JC M 17158 NODE_122, whole genome shotgun sequence.
gcacatgtggttcgcaatccatcccacaataaaaaactaggaggac

SEQ ID NO: 90900 - DNA, 45 bp, Paeniclostridium sordellii; identical to SEQ ID NO: 90841
  misc_feature (1)..(45): APWR01000098.1/3959-3915 Paeniclostridium sordellii ATC C 9714 gcs9714.contig.98, whole genome shotgun sequence .

SEQ ID NO: 90901 - DNA, 45 bp, Bacillus sp.
  misc_feature (1)..(45): JAQV02000024.1/18875-18831 Bacillus sp. SJS contig_24, whole genome shotgun sequence.
acgggagaggttctagcacaaccctctataaaaaactaaggacag

SEQ ID NO: 90902 - DNA, 45 bp, Blautia sp.
  misc_feature (1)..(45): CBJJ010000264.1/8316-8272 Blautia sp. CAG:37, WGS proje ct CBJJ01000000 data, contig: 336
tccggactggttcgtgaacttcccagtataaaaaaccaagtatct

SEQ ID NO: 90903 - DNA, 44 bp, Streptococcus lutetiensis
  misc_feature (1)..(44): CP003025.1/1391820-1391863 Streptococcus lutetiensis 03 3, complete genome.
tttggactggttcgaaaactcccagaataaaaaactagctatct

SEQ ID NO: 90904 - DNA, 45 bp, Gracilibacillus boraciitolerans
  misc_feature (1)..(45): BAVS01000036.1/10574-10618 Gracilibacillus boraciitoler ans JCM 21714 DNA, contig:contig_36.
gcaggagaggttctagctacaccctctataaaaaactaaggataa

SEQ ID NO: 90905 - DNA, 44 bp, Jeotgalicoccus sp.
  misc_feature (1)..(44): CCSE01000001.1/2015811-2015768 Jeotgalicoccus sp. 13MG4 4_air genome assembly, contig: CONTIG000001
ttaaaacaggttcgcaaactccctgtcaaaaaaactaaggagaa

SEQ ID NO: 90906 - DNA, 66 bp, Pasteurella multocida; identical to SEQ ID NO: 90765
  misc_feature (1)..(66): ALBY01000294.1/348-283 Pasteurella multocida subsp. mul tocida str. Anand1_cattle contig294, whole genome shotg un sequence.

SEQ ID NO: 90907 - DNA, 47 bp, Enterococcus faecium
  misc_feature (1)..(47): CP003583.1/2341515-2341469 Enterococcus faecium DO, com plete genome.
ataaccgcggttcatcaaccatcccgcgttaaaaaaactaggagaaa

SEQ ID NO: 90908 - DNA, 45 bp, Weissella viridescens
  misc_feature (1)..(45): JQBM01000001.1/304813-304769 Weissella viridescens stra in DSM 20410 Scaffold1, whole genome shotgun sequence.
aatcacgtggttcgtaaccatcccacgcaaaaaaactaggagtct

SEQ ID NO: 90909 - DNA, 48 bp, Lactobacillus ceti
  misc_feature (1)..(48): JQBZ01000008.1/12699-12652 Lactobacillus ceti DSM 22408 NODE_34, whole genome shotgun sequence.
tcactggtggttcgtaaacatcccaccataataaaaaactaggaagaa

SEQ ID NO: 90910 - DNA, 45 bp, Caryophanon tenue
  misc_feature (1)..(45): MASJ01000038.1/118403-118447 Caryophanon tenue strain D SM 14152 DSM_14152_R1_001_contig_5, whole genome shotgu n sequence.
ttctacgtggttcgtaaccatcccacgaaaaaaaactaaggagaa

SEQ ID NO: 90911 - DNA, 47 bp, Lysinibacillus sinduriensis
  misc_feature (1)..(47): JPVO01000055.1/675393-675439 Lysinibacillus sinduriensi s BLB-1 = JCM 15800 contig1, whole genome shotgun seque nce.
tcgggagaggttcatagctgataccctctataaaaaactatggaaac

SEQ ID NO: 90912 - DNA, 47 bp, Virgibacillus sp.
  misc_feature (1)..(47): CP022315.1/2242038-2242084 Virgibacillus sp. LM2416 chr omosome, complete genome.
acagaagaggttcttagggttaaccctctataaaaaactaaggacag

SEQ ID NO: 90913 - DNA, 45 bp, Neisseria gonorrhoeae
  misc_feature (1)..(45): AE004969.1/1637046-1637090 Neisseria gonorrhoeae FA 109 0, complete genome.
cgccccgtggttcgaaaacctcccacactaaaaaactaaggaaac

SEQ ID NO: 90914 - DNA, 48 bp, Oceanobacillus iheyensis
  misc_feature (1)..(48): BA000028.3/2885876-2885829 Oceanobacillus iheyensis HTE 831 DNA, complete genome.
gcaggagaggttcgcgatttaaatccctctataaaaaactaaggagat

SEQ ID NO: 90915 - DNA, 45 bp, Actinobacillus minor
  misc_feature (1)..(45): ACQL01000093.1/20533-20577 Actinobacillus minor NM305 C ontig_17, whole genome shotgun sequence.
catctcgtggttcgaaaacctcccacgcaaaaaaactaaggatac

SEQ ID NO: 90916 - DNA, 45 bp, Carnobacterium iners
  misc_feature (1)..(45): FXBJ01000002.1/420355-420311 Carnobacterium iners strai n LMG26642 genome assembly, contig: Ga0073236_12
aaatatgtggttcgtaaccatcccacagaaaaaaactaggaggaa

SEQ ID NO: 90917 - DNA, 45 bp, Solibacillus silvestris
  misc_feature (1)..(45): AP012157.1/3570017-3570061 Solibacillus silvestris StLB 046 DNA, complete genome.
ctttgcgtggttcgtaaccatcccacgttaaaaaactaggaggaa

SEQ ID NO: 90918 - DNA, 47 bp, Oceanobacillus oncorhynchi
  misc_feature (1)..(47): CDGG01000001.1/2347912-2347958 Oceanobacillus oncorhync hi strain Oc5 genome assembly, contig: CONTIG000001
caggcagaggttcttagcttaaaccctctataaaaaactaaggacaa

SEQ ID NO: 90919 - DNA, 45 bp, Lactobacillus salivarius
  misc_feature (1)..(45): CP000233.1/1530666-1530622 Lactobacillus salivarius UCC 118, complete genome.
tccacactggttcgtaaacatcccagttaaaaaaactagaaagca

SEQ ID NO: 90920 - DNA, 45 bp, Bacillus licheniformis; identical to SEQ ID NO: 90786
  misc_feature (1)..(45): CP000002.3/1501859-1501903 Bacillus licheniformis ATCC 14580, complete genome.

SEQ ID NO: 90921 - DNA, 45 bp, Lysinibacillus contaminans
  misc_feature (1)..(45): LGRV01000007.1/217560-217516 Lysinibacillus contaminans strain DSM 25560 Scaffold2, whole genome shotgun seque nce.
aacaccgtggttcgtaaccatcccacgaaaaaaaactaaggagaa

SEQ ID NO: 90922 - DNA, 47 bp, Staphylococcus epidermidis
  misc_feature (1)..(47): CP000029.1/370924-370878 Staphylococcus epidermidis RP6 2A, complete genome.
ataacagaggttcctagccgaaaccctctataaaaaactagacatga

SEQ ID NO: 90923 - DNA, 45 bp, Bacillus enclensis
  misc_feature (1)..(45): KQ758483.1/339837-339881 Bacillus enclensis strain SGD- 1123 genomic scaffold Scaffold2, whole genome shotgun s equence.
tcccgagaggttctagcacaaccctctataaaaaactaagggaaa

SEQ ID NO: 90924 - DNA, 44 bp, Bacillus wakoensis; identical to SEQ ID NO: 90880
  misc_feature (1)..(44): BAUT01000002.1/56118-56161 Bacillus wakoensis JCM 9140 DNA, contig:contig_2.

SEQ ID NO: 90925 - DNA, 47 bp, Oceanobacillus iheyensis
  misc_feature (1)..(47): BA000028.3/2245805-2245759 Oceanobacillus iheyensis HTE 831 DNA, complete genome.
ttgttagaggttcttagcttcaaccctctataaaaaactaaggacaa

SEQ ID NO: 90926 - DNA, 47 bp, Clostridium spiroforme
  misc_feature (1)..(47): DS562851.1/112565-112519 Clostridium spiroforme DSM 155 2 Scfld_02_8 genomic scaffold, whole genome shotgun seq uence.
aataaactggttcgaaagccaaacccagtataaaaaactaagaataa

SEQ ID NO: 90927 - DNA, 44 bp, Paenibacillus popilliae; identical to SEQ ID NO: 90848
  misc_feature (1)..(44): BALG01000101.1/10725-10768 Paenibacillus popilliae ATCC 14706 DNA, contig: contig101.

SEQ ID NO: 90928 - DNA, 44 bp, Paenibacillus sp.
  misc_feature (1)..(44): GG695985.1/74109-74066 Paenibacillus sp. oral taxon 786 str. D14 genomic scaffold supercont1.16, whole genome shotgun sequence.
acgggagaggttcgagaactccctctataaaaaactataaatgc

SEQ ID NO: 90929 - DNA, 44 bp, Cohnella sp.
  misc_feature (1)..(44): JXAL01000001.1/418153-418110 Cohnella sp. VKM B-2846 B2 846_01, whole genome shotgun sequence.
tcaggagaggttcgcgaactccctctataaaaaactaaggaaaa

SEQ ID NO: 90930 - DNA, 45 bp, Bacillus bataviensis
  misc_feature (1)..(45): AJLS01000054.1/43769-43813 Bacillus bataviensis LMG 218 33 contig54, whole genome shotgun sequence.
tttaacgtggttcgagaacctcccacgtaaaaaaactaaggagaa

SEQ ID NO: 90931 - DNA, 45 bp, Bacillus sp.
  misc_feature (1)..(45): MLYQ01000038.1/46242-46286 Bacillus sp. MUM 13 38, whol e genome shotgun sequence.
actaacgtggttcgtgaccctcccacgcaaaaaaactaaggagaa

SEQ ID NO: 90932 - DNA, 45 bp, Clostridiales bacterium
  misc_feature (1)..(45): FCNS01000008.1/180796-180752 Clostridiales bacterium CH KCI001 isolate CHKC1 genome assembly, contig: {contig8}
tttggactggttcgtaaacttcccagaataaaaaactaagatgaa

SEQ ID NO: 90933 - DNA, 46 bp, Trichococcus sp.
  misc_feature (1)..(46): FJNB01000004.1/46001-46046 Trichococcus sp. R210 isolat e Trichococcus_R210 genome assembly, contig: TR210DRAFT _scaffold-4
gagcacgtggttcgtcgaccatcccacggaaaaaaactagggggtt

SEQ ID NO: 90934 - DNA, 45 bp, Ruminococcus sp.
  misc_feature (1)..(45): HF993610.1/7610-7566 Ruminococcus sp. CAG:17 genomic sc affold, scf209
ccgaaactggttcgaaaacctcccagtataaaaaactaggcaaag

SEQ ID NO: 90935 - DNA, 44 bp, Bacillus sp.
  misc_feature (1)..(44): KQ758702.1/8670-8713 Bacillus sp. SGD-V-76 genomic scaf fold Scaffold76, whole genome shotgun sequence.
gcgggagaggttcgtaaactccctctataaaaaactaagatcat

SEQ ID NO: 90936 - DNA, 47 bp, Lentibacillus amyloliquefaciens
  misc_feature (1)..(47): CP013862.1/3563841-3563887 Lentibacillus amyloliquefaci ens strain LAM0015, complete genome.
acgggagaggttcttagcttaaaccctctataaaaaactaaggacag

SEQ ID NO: 90937 - DNA, 45 bp, Actinobacillus succinogenes
  misc_feature (1)..(45): CP000746.1/2223340-2223384 Actinobacillus succinogenes 130Z, complete genome.
ttcatcgtggttcgcaaacctcccacgcaaaaaaactaaggaaat

SEQ ID NO: 90938 - DNA, 44 bp, Paenibacillus sp.
  misc_feature (1)..(44): MRTD01000003.1/164798-164841 Paenibacillus sp. FSL A5-0 031 NODE_3_length_466146_cov_1.36898_ID_5123, whole gen ome shotgun sequence.
tcgggagaggttcgcgaactccctctataaaaaactatgcgaaa

SEQ ID NO: 90939 - DNA, 45 bp, Pasteurella bettyae
  misc_feature (1)..(45): AJSX01000047.1/96755-96799 Pasteurella bettyae CCUG 204 2 contig00004, whole genome shotgun sequence.
ttaatcgtggttcgagaacctcccacgcaaaaaaactaaggaaaa

SEQ ID NO: 90940 - DNA, 45 bp, Bacillus sp.
  misc_feature (1)..(45): LAYY01000023.1/52477-52521 Bacillus sp. SA2-6 scf718000 0001101, whole genome shotgun sequence.
cccggcgtggttcgtaaccctcccacgaaaaaaaactaaggagag

SEQ ID NO: 90941 - DNA, 48 bp, Leuconostoc gelidum
  misc_feature (1)..(48): CP003839.1/1020529-1020482 Leuconostoc gelidum JB7, com plete genome.
ttgatagcggttcatcaaccatcccgcttataaaaaaactaggagatt

SEQ ID NO: 90942 - DNA, 45 bp, Lactobacillus sakei
  misc_feature (1)..(45): CR936503.1/819401-819357 Lactobacillus sakei strain 23K complete genome.
cttggactggttcggaaacttcccagaataaaaaactaaggatct

SEQ ID NO: 90943 - DNA, 45 bp, Neisseria animaloris
  misc_feature (1)..(45): MTBN01000001.1/292025-291981 Neisseria animaloris strai n DSM 21642 NODE_1_length_568283_cov_40.5228_ID_1, whol e genome shotgun sequence.
cactctgtggttcgcaaacctcccacattaaaaaactaaggaact

SEQ ID NO: 90944 - DNA, 44 bp, Bacillus cereus; identical to SEQ ID NO: 90780
  misc_feature (1)..(44): AE016877.1/1318959-1319002 Bacillus cereus ATCC 14579, complete genome.

SEQ ID NO: 90945 - DNA, 44 bp, Paenibacillus sp.
  misc_feature (1)..(44): FPIU01000012.1/186098-186141 Paenibacillus sp. UNCCL117 genome assembly, contig: FG16DRAFT_scaffold00011.11
ccgggagaggttcgcgaactccctctataaaaaactaaggcaat

SEQ ID NO: 90946 - DNA, 45 bp, Bacillus cereus; identical to SEQ ID NO: 90778
  misc_feature (1)..(45): CM000735.1/1446398-1446354 Bacillus cereus Rock4-18 chr omosome, whole genome shotgun sequence.

SEQ ID NO: 90947 - DNA, 48 bp, Lactobacillus saerimneri
  misc_feature (1)..(48): ANAG01000014.1/101002-101049 Lactobacillus saerimneri 3 0a contig00019, whole genome shotgun sequence.
acacaggtggttcgcaaccatcccacctttataaaaaactaaggagag

SEQ ID NO: 90948 - DNA, 45 bp, Enterococcus sp.
  misc_feature (1)..(45): NGKU01000001.1/947937-947981 Enterococcus sp. 8G7_MSG33 16 scaffold00001, whole genome shotgun sequence.
cttggactggttcgaaaacttcccaggtaaaaaaactaagtatct

SEQ ID NO: 90949 - DNA, 43 bp, Bacillus sp.
  misc_feature (1)..(43): LIUR01000001.1/4435528-4435570 Bacillus sp. FJAT-22058 super1, whole genome shotgun sequence.
gcggaagaggttctagctaccctctcaaaaaaactaaggagaa

SEQ ID NO: 90950 - DNA, 44 bp, Planococcus rifietoensis
  misc_feature (1)..(44): CP013659.2/1039490-1039447 Planococcus rifietoensis str ain M8, complete genome.
ataaaagaggttcgcaaactccctctctaaaaaactaaggagct

SEQ ID NO: 90951 - DNA, 45 bp, Lysinibacillus odysseyi
  misc_feature (1)..(45): JPVP01000053.1/73128-73172 Lysinibacillus odysseyi 34hs -1 = NBRC 100172 contig8, whole genome shotgun sequence .
aaacacgtggttcgcaaccatcccacgcaaaaaaactaggaggat

SEQ ID NO: 90952 - DNA, 46 bp, Jeotgalicoccus sp.
  misc_feature (1)..(46): CCSE01000001.1/1105304-1105349 Jeotgalicoccus sp. 13MG4 4_air genome assembly, contig: CONTIG000001
tacgaagaggttcttagccataccctcttaaaaaaactaagacaca

SEQ ID NO: 90953 - DNA, 46 bp, Lactobacillus suebicus
  misc_feature (1)..(46): AZGF01000037.1/2797-2752 Lactobacillus suebicus DSM 500 7 = KCTC 3549 strain DSM 5007 Scaffold37, whole genome shotgun sequence.
cccggactggttcgtaaacttcccagttataaaaaaccaagaactt

SEQ ID NO: 90954 - DNA, 44 bp, Paenibacillus pini
  misc_feature (1)..(44): BAVZ01000004.1/93866-93909 Paenibacillus pini JCM 16418 DNA, contig: contig00004.
atggaagaggttcgcgaactccctctataaaaaactaagactgc

SEQ ID NO: 90955 - DNA, 45 bp, Gilliamella apicola
  misc_feature (1)..(45): JAIM01000002.1/41981-41937 Gilliamella apicola SCGC AB- 598-B02 SCG598B02_13272, whole genome shotgun sequence.
tgtctcgtggttcgtgaacctcccacgctaaaaaactaaggaaaa

SEQ ID NO: 90956 - DNA, 44 bp, Paenibacillus selenitireducens
  misc_feature (1)..(44): MSZX01000011.1/156512-156469 Paenibacillus selenitiredu cens strain ES3-24 ES3-24_scaffold11, whole genome shot gun sequence.
atgggagaggttcgcgaactccctctataaaaaactaatggcgc

SEQ ID NO: 90957 - DNA, 46 bp, Enterococcus faecalis
  misc_feature (1)..(46): KE351671.1/16641-16596 Enterococcus faecalis 13-SD-W-01 genomic scaffold Scaffold642, whole genome shotgun seq uence.
aggtccgcggttcatcaaccatcccgcgcaaaaaaactaggagaaa

SEQ ID NO: 90958 - DNA, 46 bp, Bacillus sp.
  misc_feature (1)..(46): LFEL01000003.1/137476-137521 Bacillus sp. LL01 scaffold 3.1, whole genome shotgun sequence.
tcaggagaggttctagcaaataccctctataaaaaactaaggacag

SEQ ID NO: 90959 - DNA, 43 bp, Bacillus sp.; identical to SEQ ID NO: 90949
  misc_feature (1)..(43): LIUR01000001.1/4441541-4441583 Bacillus sp. FJAT-22058 super1, whole genome shotgun sequence.

SEQ ID NO: 90960 - DNA, 44 bp, Paenibacillus antarcticus
  misc_feature (1)..(44): LVJI01000001.1/139836-139879 Paenibacillus antarcticus strain CECT 5836 PBAT01, whole genome shotgun sequence.
atggaagaggttcgcgaactccctctataaaaaactattcacct

SEQ ID NO: 90961 - DNA, 44 bp, Paenibacillus sp.
  misc_feature (1)..(44): LYPA01000038.1/54925-54968 Paenibacillus sp. 1DrF-4 sca ffold1, whole genome shotgun sequence.
ccgggagaggttcgcgaactccctctataaaaaactaaacgaaa

SEQ ID NO: 90962 - DNA, 46 bp, Enterococcus canis
  misc_feature (1)..(46): JXKH01000003.1/214159-214204 Enterococcus canis strain DSM 17029 Scaffold3, whole genome shotgun sequence.
gtgaccgcggttcgtaaccatcccgcgacaacaaaactaggaggag

SEQ ID NO: 90963 - DNA, 44 bp, Bacillus sp.
  misc_feature (1)..(44): BAWA01000018.1/42267-42224 Bacillus sp. JCM 19045 DNA, contig: contig00018.
aatgaagaggttcgcgaactccctctataaaaaactatttagtt

SEQ ID NO: 90964 - DNA, 45 bp, Rummeliibacillus stabekisii
  misc_feature (1)..(45): CP014806.1/3266606-3266562 Rummeliibacillus stabekisii strain PP9, complete genome.
aaacacgtggttcgagaccatcccacgtaaaaaaactagggggaa

SEQ ID NO: 90965 - DNA, 46 bp, Jeotgalibaca sp.
  misc_feature (1)..(46): CP019433.1/1929437-1929482 Jeotgalibaca sp. PTS2502, co mplete genome.
gagcacgtggttcgttgaccatcccacgtaaaaaaactaggaggag

SEQ ID NO: 90966 - DNA, 44 bp, Clostridium sp.
  misc_feature (1)..(44): AUPA01000071.1/20865-20908 Clostridium sp. BL8 Contig15 5, whole genome shotgun sequence.
gcgggactggttcgagaactcccagtataaaaaactaaggattt

SEQ ID NO: 90967 - DNA, 47 bp, Virgibacillus massiliensis
  misc_feature (1)..(47): CCDP010000002.1/115044-114998 Virgibacillus massiliensi s genome assembly, contig: 000002
gcaggagaggttcgaaattccatccctctataaaaaactaaggagat

SEQ ID NO: 90968 - DNA, 46 bp, Carnobacterium inhibens
  misc_feature (1)..(46): CP006812.1/225399-225444 Carnobacterium inhibens subsp. gilichinskyi strain WN1359, complete genome.
taaaacgtggttcgttgaccatcccacgaaaaaaaactaggaggaa

SEQ ID NO: 90969 - DNA, 45 bp, Lysinibacillus sp.
  misc_feature (1)..(45): LKIE01000028.1/74583-74539 Lysinibacillus sp. F5 Contig 18, whole genome shotgun sequence.
agcaccgtggttcgtaaccatcccacgcaaaaaaactaaggagaa

SEQ ID NO: 90970 - DNA, 45 bp, Lactobacillus hayakitensis
  misc_feature (1)..(45): AZGD01000037.1/54038-53994 Lactobacillus hayakitensis D SM 18933 = JCM 14209 strain DSM 18933 NODE_93, whole ge nome shotgun sequence.
aacggactggttcttaaacttcccagaataaaaaactaagaatct

SEQ ID NO: 90971 - DNA, 45 bp, Bacillus sp.
  misc_feature (1)..(45): ABCF01000001.1/139145-139189 Bacillus sp. SG-1 11015010 00768, whole genome shotgun sequence.
gcaggagaggttctagcttaaccctctataaaaaactaaggaaac

SEQ ID NO: 90972 - DNA, 45 bp, Bacillus sp.
  misc_feature (1)..(45): CP012602.1/5095084-5095128 Bacillus sp. FJAT-18017 geno me.
aaccgcgtggttcgagaacctcccacgataaaaaactaaggagag

SEQ ID NO: 90973 - DNA, 45 bp, Enterococcus durans; identical to SEQ ID NO: 90942
  misc_feature (1)..(45): KE136516.1/160217-160173 Enterococcus durans ATCC 6056 genomic scaffold acyDB-supercont2.4, whole genome shotg un sequence.

SEQ ID NO: 90974 - DNA, 45 bp, Bacillus sp.
  misc_feature (1)..(45): LUFJ01000023.1/140412-140368 Bacillus sp. KCTC 13219 sc affold3.1, whole genome shotgun sequence.
tacaccgtggttcgcaaccatcccacgcaaaaaaactaggaggaa

SEQ ID NO: 90975 - DNA, 45 bp, Stoquefichus sp.
  misc_feature (1)..(45): KQ970880.1/82810-82766 Candidatus Stoquefichus sp. KLE1 796 genomic scaffold Scaffold92, whole genome shotgun s equence.
tgaaaactggttcgagataaccccagtataaaaaactaagaatgt

SEQ ID NO: 90976 - DNA, 45 bp, Gilliamella apicola; identical to SEQ ID NO: 90955
  misc_feature (1)..(45): CP007445.1/943178-943222 Gilliamella apicola strain wkB 1, complete genome.

SEQ ID NO: 90977 - DNA, 45 bp, Cetobacterium ceti
  misc_feature (1)..(45): FUWX01000016.1/22898-22854 Cetobacterium ceti strain AT CC 700028 genome assembly, contig: EI52DRAFT_scaffold00 013.13
taaagagatgttcggaaacctccatctataaaaaactaggcttat

SEQ ID NO: 90978 - DNA, 45 bp, Clostridium nexile
  misc_feature (1)..(45): FR888624.1/5945-5901 Clostridium nexile CAG:348 genomic scaffold, scf72
tctggactggttcgaaaacttcccagaataaaaaactaaggattg

SEQ ID NO: 90979 - DNA, 45 bp, Lactonifactor longoviformis
  misc_feature (1)..(45): FQVI01000024.1/18038-17994 Lactonifactor longoviformis DSM 17459 genome assembly, contig: EJ64DRAFT_scaffold00 024.24
tctggactggttcgcgaacttcccagtataaaaaaccaagtatct

SEQ ID NO: 90980 - DNA, 45 bp, Bacillus sp.
  misc_feature (1)..(45): MAYV01000017.1/55358-55402 Bacillus sp. FJAT-27986 scaf folf6, whole genome shotgun sequence.
ctaaacgtggttcgtaaccatcccacgataaaaaactaagggaga

SEQ ID NO: 90981 - DNA, 44 bp, Paenibacillus bovis
  misc_feature (1)..(44): CP013023.1/1909861-1909818 Paenibacillus bovis strain B D3526, complete genome.
gcgggagaggttcgcgaactccctctataaaaaactaaaaccgc

SEQ ID NO: 90982 - DNA, 47 bp, Sporosarcina psychrophila
  misc_feature (1)..(47): CP014616.1/4423872-4423918 Sporosarcina psychrophila st rain DSM 6497, complete genome.
taacacgtggttcgtcaaccatcccacgctaaaaaaactaggaggaa

SEQ ID NO: 90983 - DNA, 46 bp, Snodgrassella alvi
  misc_feature (1)..(46): CP007446.1/639021-638976 Snodgrassella alvi wkB2, compl ete genome.
aaccacgtggttcgcaatccatcccacgaaaaaaaactaggagccc

SEQ ID NO: 90984 - DNA, 45 bp, Listeriaceae bacterium
  misc_feature (1)..(45): JNFA01000011.1/536185-536229 Listeriaceae bacterium FSL A5-0281 contig000011, whole genome shotgun sequence.
gtttccgtggttcgaaactatcccacgataaaaaactaaggagtg

SEQ ID NO: 90985 - DNA, 44 bp, Bacillus gaemokensis
  misc_feature (1)..(44): JOTM01000014.1/70172-70215 Bacillus gaemokensis strain JCM 15801 contig14, whole genome shotgun sequence.
atgggagaggttcgcgaactccctctataaaaaactaagggaac

SEQ ID NO: 90986 - DNA, 44 bp, Salinicoccus alkaliphilus
  misc_feature (1)..(44): FRCF01000003.1/45285-45242 Salinicoccus alkaliphilus DS M 16010 genome assembly, contig: EJ97DRAFT_scaffold0000 2.2
accccacaggttcgcaaactccctgtataaaaaactaaggagaa

SEQ ID NO: 90987 - DNA, 45 bp, Lactobacillus graminis; identical to SEQ ID NO: 90942
  misc_feature (1)..(45): AYZB01000035.1/114730-114774 Lactobacillus graminis DSM 20719 NODE_43, whole genome shotgun sequence.

SEQ ID NO: 90988 - DNA, 44 bp, Bacillus sp.; identical to SEQ ID NO: 90836
  misc_feature (1)..(44): MAQX01000011.1/119008-118965 Bacillus sp. FJAT-26390 sc affold2, whole genome shotgun sequence.

SEQ ID NO: 90989 - DNA, 44 bp, Paenibacillus darwinianus
  misc_feature (1)..(44): KK082192.1/7518-7561 Paenibacillus darwinianus strain B r genomic scaffold scaffold69, whole genome shotgun seq uence.
gcgggagaggttcgcgaactccctctataaaaaactaagaccag

SEQ ID NO: 90990 - DNA, 44 bp, Paenibacillus sp.
  misc_feature (1)..(44): LMSD01000001.1/580732-580689 Paenibacillus sp. Soil750 contig_1, whole genome shotgun sequence.
atagaagaggttcgcaaactccctctctaaaaaactatgaaatg

SEQ ID NO: 90991 - DNA, 45 bp, Enterococcus cecorum
  misc_feature (1)..(45): KI535313.1/967535-967491 Enterococcus cecorum DSM 20682 = ATCC 43198 genomic scaffold adfme-supercont2.1, whol e genome shotgun sequence.
cttggactggttcgagaacttcccaggataaaaaactaagaatct

SEQ ID NO: 90992 - DNA, 46 bp, Paenibacillus sp.
  misc_feature (1)..(46): CP009279.1/1403331-1403376 Paenibacillus sp. FSL H7-073 7, complete genome.
taagccgcggttcgtaaccatcccgcgtaaacaaaactaggaggag

SEQ ID NO: 90993 - DNA, 47 bp, Sharpea azabuensis
  misc_feature (1)..(47): FNYK01000002.1/35927-35973 Sharpea azabuensis strain DS M 20406 genome assembly, contig: Ga0059086_1002
caagcactggttcgagagccaaacccagtataaaaaactaagaacat

SEQ ID NO: 90994 - DNA, 47 bp, Lysinibacillus sp.; identical to SEQ ID NO: 90776
  misc_feature (1)..(47): LKIE01000051.1/50847-50893 Lysinibacillus sp. F5 Contig 39, whole genome shotgun sequence.

SEQ ID NO: 90995 - DNA, 45 bp, Blautia sp.
  misc_feature (1)..(45): HF998991.1/15468-15512 Blautia sp. CAG:257 genomic scaf fold, scf22
aataaactggttcgaaaccctcccagtataaaaaactaggttctt

SEQ ID NO: 90996 - DNA, 47 bp, Bacillus sp.
  misc_feature (1)..(47): LITN01000017.1/128519-128565 Bacillus sp. FJAT-21945 su per33, whole genome shotgun sequence.
tcgggagaggttcatagcttataccctctataaaaaactatggatac

SEQ ID NO: 90997 - DNA, 45 bp, Clostridiales bacterium; identical to SEQ ID NO: 90816
  misc_feature (1)..(45): MNRE01000168.1/24107-24063 Clostridiales bacterium 41_2 1_two_genomes Ley3_66761_scaffold_831, whole genome sho tgun sequence.

SEQ ID NO: 90998 - DNA, 45 bp, Streptococcus agalactiae
  misc_feature (1)..(45): AE009948.1/545597-545553 Streptococcus agalactiae 2603V /R, complete genome.
ctcggactggttcgaaaacttcccagaataaaaaactaagtgact

SEQ ID NO: 90999 - DNA, 47 bp, Bacilli bacterium
  misc_feature (1)..(47): LAZH01000014.1/8043-7997 Bacilli bacterium VT-13-104 co ntig014, whole genome shotgun sequence.
gcaggagaggttcgaaattccatccctctataaaaaactaaggagct

SEQ ID NO: 91000 - DNA, 44 bp, Brevibacillus choshinensis
  misc_feature (1)..(44): LJJB01000010.1/470741-470784 Brevibacillus choshinensis strain DSM 8552 scaffold2, whole genome shotgun sequen ce.
atgggagaggttcgcgaactccctctataaaaaactaaggtgta

SEQ ID NO: 91001 - DNA, 45 bp, Weissella confusa
  misc_feature (1)..(45): CAGH01000009.1/54494-54450 Weissella confusa LBAE C39-2 , WGS project CAGH01000000 data, contig: WeissC39_1_con tig00009
aagttagtggttcgtaaccatcccactcaaaaaaactaggagaga

SEQ ID NO: 91002 - DNA, 32 bp, Paenibacillus sp.; identical to SEQ ID NO: 90837
  misc_feature (1)..(32): CP001793.1/1695578-1695547 Paenibacillus sp. Y412MC10, complete genome.

SEQ ID NO: 91003 - DNA, 45 bp, Brevibacillus borstelensis
  misc_feature (1)..(45): APBN01000020.1/8663-8619 Brevibacillus borstelensis AK1 seq_num_020, whole genome shotgun sequence.
acccacgtggttcgaaaccatcccacgataaaaaactaaggagct

SEQ ID NO: 91004 - DNA, 45 bp, Tetragenococcus halophilus
  misc_feature (1)..(45): AP012046.1/1888148-1888192 Tetragenococcus halophilus N BRC 12172 DNA, complete genome.
cttggactggttcgcaaacttcccagaataaaaaaccaagaactt

SEQ ID NO: 91005 - DNA, 45 bp, Gilliamella apicola
  misc_feature (1)..(45): JAIN01000026.1/15087-15131 Gilliamella apicola SCGC AB- 598-I20 SCG598I20_12798, whole genome shotgun sequence.
tattacgtggttcgtgaacctcccacgctaaaaaactaaggaaaa

SEQ ID NO: 91006 - DNA, 45 bp, Pediococcus cellicola
  misc_feature (1)..(45): JQBR01000009.1/4936-4892 Pediococcus cellicola strain D SM 17757 Scaffold9, whole genome shotgun sequence.
aggttcgtggttcgcaattatcccacacaaaaaaactaaggaggt

SEQ ID NO: 91007 - DNA, 47 bp, Lysinibacillus odysseyi; identical to SEQ ID NO: 90776
  misc_feature (1)..(47): JPVP01000054.1/165402-165448 Lysinibacillus odysseyi 34 hs-1 = NBRC 100172 contig7, whole genome shotgun sequen ce.

SEQ ID NO: 91008 - DNA, 45 bp, Bacillus sp.
  misc_feature (1)..(45): LFZV01000001.1/3432111-3432155 Bacillus sp. FJAT-27916 Scaffold1, whole genome shotgun sequence.
gtaaacgtggttcgtaaccatcccacgataaaaaactaaggagag

SEQ ID NO: 91009 - DNA, 48 bp, Lactobacillus oligofermentans
  misc_feature (1)..(48): AZFE01000032.1/107206-107253 Lactobacillus oligoferment ans DSM 15707 = LMG 22743 strain DSM 15707 NODE_92, who le genome shotgun sequence.
tcgttggtggttcgtaaccatcccaccagataaaaaaactagggagaa

SEQ ID NO: 91010 - DNA, 45 bp, Bacillus vireti
  misc_feature (1)..(45): ALAN01000008.1/80969-80925 Bacillus vireti LMG 21834 co ntig08, whole genome shotgun sequence.
tttaacgtggttcgagatcctcccacgaaaaaaaactaaggagaa

SEQ ID NO: 91011 - DNA, 44 bp, Paenibacillus sp.
  misc_feature (1)..(44): CP009279.1/3644889-3644846 Paenibacillus sp. FSL H7-073 7, complete genome.
gcaggagaggttcgcgaactccctctataaaaaactaagagtat

SEQ ID NO: 91012 - DNA, 43 bp, Bacillus sp.
  misc_feature (1)..(43): GL635754.1/300045-300087 Bacillus sp. 2_A_57_CT2 genomi c scaffold supercont1.5, whole genome shotgun sequence.
acggtagaggttctagctaccctctttaaaaaactaaggaaaa

SEQ ID NO: 91013 - DNA, 46 bp, Listeria aquatica
  misc_feature (1)..(46): AOCG01000008.1/144836-144881 Listeria aquatica FSL S10- 1188 c7, whole genome shotgun sequence.
aaaaacgtagttcgaaaccatcctacgtaaaaaaaactagggagag

SEQ ID NO: 91014 - DNA, 45 bp, Clostridium collagenovorans
  misc_feature (1)..(45): FQXP01000003.1/563277-563233 Clostridium collagenovoran s DSM 3089 genome assembly, contig: EJ35DRAFT_scaffold0 0001.1
aatactgcagttcgtaaacctcctgcataaaaaaactaggtacct

SEQ ID NO: 91015 - DNA, 44 bp, Bacillus cereus
  misc_feature (1)..(44): CM000733.1/1012851-1012808 Bacillus cereus Rock3-44 chr omosome, whole genome shotgun sequence.
atgggagaggttcgtgaactccctctataaaaaactatggaaac

SEQ ID NO: 91016 - DNA, 47 bp, Lysinibacillus manganicus
  misc_feature (1)..(47): JPVN01000017.1/5303-5257 Lysinibacillus manganicus DSM 26584 contig19, whole genome shotgun sequence.
atgggagaggttcatagctgataccctctataaaaaactatggaaac

SEQ ID NO: 91017 - DNA, 45 bp, Listeria fleischmannii
  misc_feature (1)..(45): AGUG01000065.1/2552-2596 Listeria fleischmannii subsp. coloradonensis strain TTU M1-001 Contig065, whole genom e shotgun sequence.
aaacacgtagttcgaaaccatcctacgtaaaaaaactagggagtg

SEQ ID NO: 91018 - DNA, 45 bp, Jeotgalibacillus soli
  misc_feature (1)..(45): JXRP01000018.1/637102-637146 Jeotgalibacillus soli Cunh a et al. 2012 strain P9 contig00018, whole genome shotg un sequence.
acagaagaggttcgcgaccatccctctataaaaaactagggactt

SEQ ID NO: 91019 - DNA, 45 bp, Wohlfahrtiimonas chitiniclastica
  misc_feature (1)..(45): KB372783.1/44322-44366 Wohlfahrtiimonas chitiniclastica SH04 genomic scaffold scaffold_00006, whole genome sho tgun sequence.
tttcccgtggttcgcaatcctcccacacaaaaaaactaaggagtt

SEQ ID NO: 91020 - DNA, 44 bp, Paenibacillus ferrarius
  misc_feature (1)..(44): MBTG01000028.1/56424-56381 Paenibacillus ferrarius stra in CY1 CY1_scaffold34, whole genome shotgun sequence.
gtagaagaggttcgcaaactccctctctaaaaaactatgaaatg

SEQ ID NO: 91021 - DNA, 45 bp, Pasteurellaceae bacterium
  misc_feature (1)..(45): MQVI01000066.1/6590-6546 Pasteurellaceae bacterium 15-0 36681 NODE_66_length_10372_cov_71.6484, whole genome sh otgun sequence.
ttgaacgtggttcgtaaacctcccacgcaaaaaaactaaggaaaa

SEQ ID NO: 91022 - DNA, 48 bp, Staphylococcus sp.
  misc_feature (1)..(48): KE150417.1/204486-204439 Staphylococcus sp. HGB0015 gen omic scaffold aczIz-supercont1.1, whole genome shotgun sequence.
attaaagaggttcctagcttccaaccctctataaaaaactagacacct

SEQ ID NO: 91023 - DNA, 45 bp, Bacillus sp.
  misc_feature (1)..(45): LIUR01000001.1/2531596-2531640 Bacillus sp. FJAT-22058 super1, whole genome shotgun sequence.
ctgcacgtggttcgtaaccatcccacgataaaaaactagggagag

SEQ ID NO: 91024 - DNA, 45 bp, Enterococcus columbae
  misc_feature (1)..(45): KE136496.1/77567-77523 Enterococcus columbae DSM 7374 = ATCC 51263 genomic scaffold acyDG-supercont2.6, whole genome shotgun sequence.
cttggactggttcggaaacttcccaggttaaaaaactaagaatct

SEQ ID NO: 91025 - DNA, 45 bp, Lactobacillus manihotivorans
  misc_feature (1)..(45): AZEU01000031.1/194-238 Lactobacillus manihotivorans DSM 13343 = JCM 12514 strain DSM 13343 NODE_44, whole geno me shotgun sequence.
gctggcgtggttcgtaaacttcccacgataaaaaaccaagaactt

SEQ ID NO: 91026 - DNA, 45 bp, Bacillus sp.
  misc_feature (1)..(45): LFZW01000001.1/439699-439655 Bacillus sp. FJAT-27997 Sc affold1, whole genome shotgun sequence.
ggctacgtggttcgcaaccatcccacgataaaaaactagggagag

SEQ ID NO: 91027 - DNA, 43 bp, Bacillus sp.
  misc_feature (1)..(43): CP005586.1/2228864-2228906 Bacillus sp. 1NLA3E, complet e genome.
tataaagaggttctagctaccctctcaaaaaaactaaggaaaa

SEQ ID NO: 91028 - DNA, 45 bp, Lactobacillus fabifermentans
  misc_feature (1)..(45): KK036465.1/48719-48763 Lactobacillus fabifermentans T30 PCM01 genomic scaffold scaffold11, whole genome shotgun sequence.
cagcacgtggttcgtaaccatcccacgtaaaaaaactaggaggat

SEQ ID NO: 91029 - DNA, 44 bp, [Bacillus] aminovorans; identical to SEQ ID NO: 90814
  misc_feature (1)..(44): LQWY01000017.1/35621-35664 [Bacillus] aminovorans strai n DSM 1314 DSM1314_contig_24, whole genome shotgun sequ ence.

SEQ ID NO: 91030 - DNA, 45 bp, Lysinibacillus macroides
  misc_feature (1)..(45): LGCI01000002.1/154763-154807 Lysinibacillus macroides s train DSM 54 Scaffold3, whole genome shotgun sequence.
agcaccgtggttcgagaacctcccacgcaaaaaaactaaggagaa

SEQ ID NO: 91031 - DNA, 44 bp, Paenibacillus sp.; identical to SEQ ID NO: 90836
  misc_feature (1)..(44): MRTK01000025.1/28969-28926 Paenibacillus sp. FSL H8-054 8 NODE_25_length_93061_cov_1.48596_ID_11316, whole geno me shotgun sequence.

SEQ ID NO: 91032 - DNA, 47 bp, Staphylococcus capitis
  misc_feature (1)..(47): CVUF01000026.1/80798-80844 Staphylococcus capitis strai n CR03 genome assembly, contig: BN1517_Contig_4
taaaaagaggttcctagccgaaaccctctataaaaaactagacgagt

SEQ ID NO: 91033 - DNA, 45 bp, Lactobacillus coryniformis
  misc_feature (1)..(45): AKFP01000034.1/11546-11502 Lactobacillus coryniformis s ubsp. coryniformis CECT 5711 COR000034, whole genome sh otgun sequence.
tcagtggtggttcgtgaccatcccaccgaaaaaaactaggaggct

SEQ ID NO: 91034 - DNA, 46 bp, Bacillus manliponensis
  misc_feature (1)..(46): JOTN01000003.1/232023-232068 Bacillus manliponensis str ain JCM 15802 contig3, whole genome shotgun sequence.
tatttcgtggttcgaaaccatcccacgtaaaaaaaactaaggagat

SEQ ID NO: 91035 - DNA, 45 bp, Bacillus anthracis; identical to SEQ ID NO: 90778
  misc_feature (1)..(45): AE017334.2/1542522-1542566 Bacillus anthracis str. 'Ame s Ancestor', complete genome.

SEQ ID NO: 91036 - DNA, 45 bp, Snodgrassella alvi
  misc_feature (1)..(45): JFZW01000008.1/38950-38906 Snodgrassella alvi strain wk B12 wkB12_scaf008, whole genome shotgun sequence.
taccctgtggttcgtaaacctcccacattaaaaaactaggaaatc

SEQ ID NO: 91037 - DNA, 45 bp, Clostridium cadaveris
  misc_feature (1)..(45): FOOE01000015.1/41626-41670 Clostridium cadaveris strain NLAE-zl-G419 genome assembly, contig: Ga0070261_115
gtgggagaggttcgtaaccatccctctataaaaaactagggaaaa

SEQ ID NO: 91038 - DNA, 47 bp, Staphylococcus saprophyticus
  misc_feature (1)..(47): AP008934.1/2076124-2076170 Staphylococcus saprophyticus subsp. saprophyticus ATCC 15305 DNA, complete genome.
tataaagaggttcctagctgataccctctataaaaaactagacacat

SEQ ID NO: 91039 - DNA, 45 bp, Bacillus vietnamensis
  misc_feature (1)..(45): LIXZ01000001.1/277735-277691 Bacillus vietnamensis stra in UCD-SED5 scaffold_0, whole genome shotgun sequence.
tcccgagaggttctagcacaaccctctataaaaaactaaggaaaa

SEQ ID NO: 91040 - DNA, 45 bp, Epulopiscium sp.
  misc_feature (1)..(45): LNZR01000087.1/12411-12367 Epulopiscium sp. Nele67-Bin0 05 Nele67M_MBin00288, whole genome shotgun sequence.
tgctcactggttcgagaacctcccagtataaaaaactaaggcaca

SEQ ID NO: 91041 - DNA, 45 bp, Gracilibacillus halophilus
  misc_feature (1)..(45): APML01000048.1/14029-14073 Gracilibacillus halophilus Y IM-C55.5 contig_48, whole genome shotgun sequence.
gcaggagaggttctagccaaaccctctataaaaaactaaggagaa

SEQ ID NO: 91042 - DNA, 45 bp, Neisseria sp.
  misc_feature (1)..(45): KB291115.1/8945-8989 Neisseria sp. oral taxon 020 str. F0370 genomic scaffold Scfld344, whole genome shotgun s equence.
caaactgtggttcgcaatccccccacaataaaaaactaaggaaac

SEQ ID NO: 91043 - DNA, 45 bp, Bacillus sp.
  misc_feature (1)..(45): KV837565.1/22328-22284 Bacillus sp. HMSC76G11 genomic s caffold Scaffold287, whole genome shotgun sequence.
gcgggagaggttctagcacaaccctctataaaaaactaagtatga

SEQ ID NO: 91044 - DNA, 45 bp, Psychrobacillus sp.
  misc_feature (1)..(45): LJIY01000016.1/53146-53102 Psychrobacillus sp. FJAT-219 63 super31, whole genome shotgun sequence.
tcaaacgtggttcgtgaacctcccacttaaaaaaactaaggagaa

SEQ ID NO: 91045 - DNA, 45 bp, Lachnospiraceae bacterium
  misc_feature (1)..(45): GL890571.1/293291-293335 Lachnospiraceae bacterium 9_1_ 43BFAA genomic scaffold supercont1.1, whole genome shot gun sequence.
tctggactggttcgtgaacttcccagtataaaaaaccaagtatct

SEQ ID NO: 91046 - DNA, 46 bp, Lactobacillus camelliae
  misc_feature (1)..(46): AYZJ01000002.1/82020-82065 Lactobacillus camelliae DSM 22697 = JCM 13995 strain DSM 22697 NODE_6, whole genome shotgun sequence.
ggagtcgtggttcgcaatccatcccacgtaaaaaaactaggaggtc

SEQ ID NO: 91047 - DNA, 47 bp, Caryophanon tenue
  misc_feature (1)..(47): MASJ01000017.1/28873-28827 Caryophanon tenue strain DSM 14152 DSM_14152_R1_001_contig_24, whole genome shotgun sequence.
tcaggagaggttcatagcgcataccctctataaaaaactatggatac

SEQ ID NO: 91048 - DNA, 45 bp, Oceanobacillus iheyensis
  misc_feature (1)..(45): BA000028.3/467676-467632 Oceanobacillus iheyensis HTE83 1 DNA, complete genome.
atcaccgtggttcgtaaccatcccacgcaaaaaaactaggaagga

SEQ ID NO: 91049 - DNA, 45 bp, Weissella halotolerans
  misc_feature (1)..(45): JQAX01000001.1/208491-208535 Weissella halotolerans DSM 20190 Scaffold1, whole genome shotgun sequence.
atgtatgtggttcgtaaccatcccacacaaaaaaactaggagatt

SEQ ID NO: 91050 - DNA, 47 bp, Coprobacillus sp.
  misc_feature (1)..(47): GL636577.1/70635-70681 Coprobacillus sp. 29_1 genomic s caffold supercont1.1, whole genome shotgun sequence.
attgcactggttcgagagccaaacccagtataaaaaactaaggacat

SEQ ID NO: 91051 - DNA, 45 bp, Chelonobacter oris
  misc_feature (1)..(45): JSUM01000010.1/192918-192962 Chelonobacter oris strain 1662 contig000009, whole genome shotgun sequence.
atcaacgtggttcgtaaccctcccacgcaaaaaaactaggataaa

SEQ ID NO: 91052 - DNA, 45 bp, Enterococcus faecalis
  misc_feature (1)..(45): AE016830.1/2504809-2504853 Enterococcus faecalis V583, complete genome.
ctcggactggttcggaaacttcccagaataaaaaactaagtatct

SEQ ID NO: 91053 - DNA, 45 bp, Bacillus cibi
  misc_feature (1)..(45): JNVC02000001.1/552380-552424 Bacillus cibi strain DSM 1 6189 Contig01, whole genome shotgun sequence.
gcgggagaggttctagcacaaccctctataaaaaactaagatcaa

SEQ ID NO: 91054 - DNA, 45 bp, Enterococcus hermanniensis
  misc_feature (1)..(45): JXKQ01000003.1/147908-147864 Enterococcus hermanniensis strain DSM 17122 Scaffold3, whole genome shotgun seque nce.
cttggactggttcgtaaacttcccaggtaaaaaaactaagtatct

SEQ ID NO: 91055 - DNA, 45 bp, Kurthia sp.
  misc_feature (1)..(45): CP013217.1/2567808-2567852 Kurthia sp. 11kri321, comple te genome.
ttcaacgtggttcgtaaccatcccacgaaaaaaaactaaggagaa

SEQ ID NO: 91056 - DNA, 45 bp, Lactobacillus plantarum
  misc_feature (1)..(45): AL935263.2/2519559-2519515 Lactobacillus plantarum WCFS 1 complete genome
gctggcctggttcgtaaacttcccaggataaaaaaccaagaactt

SEQ ID NO: 91057 - DNA, 46 bp, Neisseria dentiae
  misc_feature (1)..(46): MTBO01000005.1/59475-59520 Neisseria dentiae strain DSM 19151 NODE_5_length_90746_cov_19.8067_ID_9, whole geno me shotgun sequence.
tgcattgtggttcgcaaacctcccacattaaaaaaactaaggaact

SEQ ID NO: 91058 - DNA, 44 bp, Bacillus megaterium
  misc_feature (1)..(44): CP001983.1/1262740-1262783 Bacillus megaterium QM B1551 , complete genome.
acgggagaggttcgaaaactccctctataaaaaactaagatcat

SEQ ID NO: 91059 - DNA, 45 bp, Clostridium sp.
  misc_feature (1)..(45): FR889797.1/1681-1725 Clostridium sp. CAG:58 genomic sca ffold, scf167
tccccactggttcgtgaacctcccagtataaaaaactaggcataa

SEQ ID NO: 91060 - DNA, 47 bp, Lysinibacillus sp.
  misc_feature (1)..(47): JPUW01000042.1/1418-1464 Lysinibacillus sp. BF-4 contig 00042, whole genome shotgun sequence.
taaaaagaggttcatagcagataccctctataaaaaactatggaatg

SEQ ID NO: 91061 - DNA, 44 bp, Aeribacillus pallidus
  misc_feature (1)..(44): LWBR01000072.1/51284-51241 Aeribacillus pallidus strain 8m3 NODE_7, whole genome shotgun sequence.
acgggagaggttctagcacaccctctataaaaaactaaggaaaa

SEQ ID NO: 91062 - DNA, 44 bp, Planomicrobium glaciei
  misc_feature (1)..(44): FNDC01000010.1/113014-112971 Planomicrobium glaciei str ain CGMCC 1.6846 genome assembly, contig: Ga0070170_110
aaaaaagaggttcgcaaactccctctctaaaaaactaaggagat

SEQ ID NO: 91063 - DNA, 45 bp, Bacillus shackletonii
  misc_feature (1)..(45): LJJC01000015.1/535886-535930 Bacillus shackletonii stra in LMG 18435 super49, whole genome shotgun sequence.
taatacgtggttcgaaaccatcccacgataaaaaactaagggaga

SEQ ID NO: 91064 - DNA, 44 bp, Bacillus sp.
  misc_feature (1)..(44): LXGJ01000139.1/5993-6036 Bacillus sp. WF146 contig139, whole genome shotgun sequence.
atgggagaggttcgcgaactccctctataaaaaactaaggtgaa

SEQ ID NO: 91065 - DNA, 45 bp, Pediococcus argentinicus
  misc_feature (1)..(45): JQCQ01000030.1/570-614 Pediococcus argentinicus strain DSM 23026 Scaffold30, whole genome shotgun sequence.
aaaaccgtggttcgcaattatcccacgtaaaaaaactaaggagta

SEQ ID NO: 91066 - DNA, 45 bp, Bacillus gobiensis
  misc_feature (1)..(45): CP012600.1/4521414-4521370 Bacillus gobiensis strain FJ AT-4402 chromosome.
caggacgtggttcgtaaccatcccacgataaaaaactaaggagag

SEQ ID NO: 91067 - DNA, 45 bp, Neisseria bacilliformis
  misc_feature (1)..(45): GL878494.1/1663561-1663605 Neisseria bacilliformis ATCC BAA-1200 genomic scaffold SCAFFOLD1, whole genome shot gun sequence.
tccagtgtggttcgcaaccctcccacaataaaaaactaaggaaac

SEQ ID NO: 91068 - DNA, 45 bp, Lactobacillus algidus
  misc_feature (1)..(45): AZDI01000006.1/73873-73917 Lactobacillus algidus DSM 15 638 Scaffold6, whole genome shotgun sequence.
aaaaacgtggttcgtaaccatcccacgctaaaaaactaagggagt

SEQ ID NO: 91069 - DNA, 45 bp, Wohlfahrtiimonas chitiniclastica
  misc_feature (1)..(45): KB372780.1/107356-107312 Wohlfahrtiimonas chitiniclasti ca SH04 genomic scaffold scaffold_00003, whole genome s hotgun sequence.
tgagcagaggttctagcgcaaccctctataaaaaactaaggagat

SEQ ID NO: 91070 - DNA, 43 bp, Bacillus selenatarsenatis
  misc_feature (1)..(43): BASE01000035.1/55850-55892 Bacillus selenatarsenatis SF -1 DNA, contig: BSSF00035.
acggaagaggttctagctaccctctcaaaaaaactaagggaaa

SEQ ID NO: 91071 - DNA, 44 bp, Paenibacillaceae bacterium
  misc_feature (1)..(44): LT629764.1/1970393-1970350 Paenibacillaceae bacterium G AS479 genome assembly, chromosome: I
tcgggagaggttcgcgaactccctctataaaaaactacagcaca

SEQ ID NO: 91072 - DNA, 44 bp, Bacillus azotoformans
  misc_feature (1)..(44): AJLR01000147.1/11210-11253 Bacillus azotoformans LMG 95 81 contig147, whole genome shotgun sequence.
atggcagcagttcgaaaaatcctgctttaaaaaactaaggagat

SEQ ID NO: 91073 - DNA, 45 bp, Bacillus gaemokensis
  misc_feature (1)..(45): JOTM01000005.1/127501-127457 Bacillus gaemokensis strai n JCM 15801 contig5, whole genome shotgun sequence.
aatcacgtggttcgaaaccatcccacgtaaaaaaactaaggagat

SEQ ID NO: 91074 - DNA, 45 bp, Bacillus sp.
  misc_feature (1)..(45): AP013294.1/1241564-1241520 Bacillus sp. OxB-1 DNA, comp lete genome.
ttgcccgtggttcgaaaccatcccacgtaaaaaaactaggaggaa

SEQ ID NO: 91075 - DNA, 44 bp, Bacillus sp.
  misc_feature (1)..(44): MAQW01000001.1/55474-55431 Bacillus sp. FJAT-27264 scaf fold1, whole genome shotgun sequence.
gtaggagaggttcgcaaactccctctataaaaaactaagaccct

SEQ ID NO: 91076 - DNA, 44 bp, [Clostridium] purinilyticum
  misc_feature (1)..(44): LGSS01000003.1/9849-9806 [Clostridium] purinilyticum st rain DSM 1384 CLPU_3c, whole genome shotgun sequence.
atgggactggttcgagaactcccagtataaaaaactaaggattt

SEQ ID NO: 91077 - DNA, 45 bp, Halobacillus karajensis,
  misc_feature (1)..(45): CCDI010000002.1/585815-585771 Halobacillus karajensis, HD-03, WGS project CCDI01000000 data, contig: 000002
gcaggagaggttctagctacaccctctataaaaaactaaggatgg

SEQ ID NO: 91078 - DNA, 45 bp, Gilliamella sp.
  misc_feature (1)..(45): FMAQ01000001.1/2206-2162 Gilliamella sp. R-53248 genome assembly, contig: Ga0061081_101
tgttacgtggttcgtaaacctcccacgctaaaaaactaaggaaca

SEQ ID NO: 91079 - DNA, 44 bp, Paenibacillus wynnii
  misc_feature (1)..(44): JQCR01000003.1/1157348-1157305 Paenibacillus wynnii str ain DSM 18334 unitig_3_1r, whole genome shotgun sequenc e.
gcaggagaggttcgaaaactccctctataaaaaactaagaccgc

SEQ ID NO: 91080 - DNA, 46 bp, Bacillus sp.
  misc_feature (1)..(46): MAQW01000023.1/68499-68544 Bacillus sp. FJAT-27264 scaf fold3, whole genome shotgun sequence.
ggaaccgcggttcgtaaccatcccgcgtaaacaaaactaggaggag

SEQ ID NO: 91081 - DNA, 45 bp, Enterococcus sp.
  misc_feature (1)..(45): LHOX01000016.1/200445-200489 Enterococcus sp. RIT-PI-f contig_6, whole genome shotgun sequence.
cttggactggttcgaaaacttcccaggttaaaaaactaagtatct

SEQ ID NO: 91082 - DNA, 45 bp, Bacillus sp.
  misc_feature (1)..(45): JAQV02000022.1/108751-108795 Bacillus sp. SJS contig_22 , whole genome shotgun sequence.
tcggtcgtggttcgaaatcctcccacgaaaaaaaactaaggagca

SEQ ID NO: 91083 - DNA, 45 bp, Bacillus koreensis
  misc_feature (1)..(45): LILC01000013.1/210877-210833 Bacillus koreensis strain DSM 16467 scaffold2, whole genome shotgun sequence.
cacggcgtggttcgtaaccatcccacgtaaaaaaactaaggagaa

SEQ ID NO: 91084 - DNA, 44 bp, Paenibacillus macerans
  misc_feature (1)..(44): KN125580.1/5604621-5604664 Paenibacillus macerans strai n 8244 genomic scaffold scaffold1, whole genome shotgun sequence.
atgggagaggttcgagaactccctctataaaaaactataaaacg

SEQ ID NO: 91085 - DNA, 45 bp, Bacillus sp.
  misc_feature (1)..(45): MLYR01000019.1/80008-80052 Bacillus sp. MUM 116 19, who le genome shotgun sequence.
ttaaacgtggttcgaaaacctcccacgaaaaaaaactaaggagag

SEQ ID NO: 91086 - DNA, 44 bp, Streptococcus sp.; identical to SEQ ID NO: 90903
  misc_feature (1)..(44): CM002131.1/1293088-1293131 Streptococcus sp. HSISB1 chr omosome, whole genome shotgun sequence.

SEQ ID NO: 91087 - DNA, 43 bp, Bacillus sp.
  misc_feature (1)..(43): CP008855.1/261175-261133 Bacillus sp. X1(2014), complet e genome.
gcgggagaggttctagctaccctctataaaaaactaaggaaaa

SEQ ID NO: 91088 - DNA, 45 bp, Mannheimia succiniciproducens
  misc_feature (1)..(45): AE016827.1/1848390-1848434 Mannheimia succiniciproducen s MBEL55E, complete genome.
taattcgtggttcgaaaacctcccacgcaaaaaaactaaggaaaa

SEQ ID NO: 91089 - DNA, 44 bp, Paenibacillus sp.
  misc_feature (1)..(44): CP009241.1/4345416-4345373 Paenibacillus sp. FSL H7-035 7, complete genome.
gcaggagaggttcgcaaactccctctataaaaaactaagacatc

SEQ ID NO: 91090 - DNA, 48 bp, Bacillus shackletonii
  misc_feature (1)..(48): LJJC01000015.1/392571-392524 Bacillus shackletonii stra in LMG 18435 super49, whole genome shotgun sequence.
acgggagaggttcatagcacaaaaccctctataaaaaactatggatac

SEQ ID NO: 91091 - DNA, 45 bp, Bacillus sp.
  misc_feature (1)..(45): MPHG01000178.1/51018-51062 Bacillus sp. VT-16-70 Bacill us_obstructivus_contig183, whole genome shotgun sequenc e.
tcaaacgtggttcgaaaccatcccacgataaaaaactaaggagag

SEQ ID NO: 91092 - DNA, 45 bp, Pontibacillus chungwhensis
  misc_feature (1)..(45): AVBG01000008.1/29242-29198 Pontibacillus chungwhensis B H030062 contig7, whole genome shotgun sequence.
gcaggagaggttctagctacaccctctataaaaaactaaggatcg

SEQ ID NO: 91093 - DNA, 44 bp, Paenibacillus polymyxa
  misc_feature (1)..(44): CP002213.2/1292324-1292281 Paenibacillus polymyxa SC2, complete genome.
atgggagaggttcgcgaactccctctataaaaaactaacgatgc

SEQ ID NO: 91094 - DNA, 45 bp, Salegentibacter echinorum
  misc_feature (1)..(45): FQVT01000014.1/7964-7920 Salegentibacter echinorum stra in DSM 24579 genome assembly, contig: Ga0131147_114
agaccagtggttcgaaattctcccacattaaaaaactaaaaaagg

SEQ ID NO: 91095 - DNA, 45 bp, Bacillus subterraneus
  misc_feature (1)..(45): JXIQ01000016.1/29800-29756 Bacillus subterraneus strain MITOT1 contig_16, whole genome shotgun sequence.
aatatcgtggttcgtaaccatcccacgtaaaaaaactaggagaga

SEQ ID NO: 91096 - DNA, 44 bp, Brevibacillus sp.
  misc_feature (1)..(44): AKKB01000097.1/6317-6360 Brevibacillus sp. CF112 PMI08_ contig_122.122, whole genome shotgun sequence.
gcgggagaggttcgcgaactccctctataaaaaactaaggtgga

SEQ ID NO: 91097 - DNA, 44 bp, Bacillus halodurans
  misc_feature (1)..(44): BA000004.3/2373342-2373299 Bacillus halodurans C-125 DN A, complete genome.
gtgagagaggttcgcgaactccctctataaaaaactaaggcaag

SEQ ID NO: 91098 - DNA, 47 bp, Bacillus galactosidilyticus
  misc_feature (1)..(47): LGPB01000135.1/6871-6825 Bacillus galactosidilyticus st rain PL133 scaffold000135, whole genome shotgun sequenc e.
gcagaagaggttcgcaattccatccctctataaaaaactaaggagac

SEQ ID NO: 91099 - DNA, 45 bp, Bacillus megaterium
  misc_feature (1)..(45): CP001983.1/465480-465524 Bacillus megaterium QM B1551, complete genome.
gtttacgtggttcgtaaccatcccacgttaaaaaactaaggagag

SEQ ID NO: 91100 - DNA, 47 bp, Bacillus bataviensis
  misc_feature (1)..(47): AJLS01000114.1/179237-179283 Bacillus bataviensis LMG 2 1833 contig114, whole genome shotgun sequence.
acgggagaggttcatagctgataccctctataaaaaactatggatat

SEQ ID NO: 91101 - DNA, 45 bp, Salinicoccus halodurans
  misc_feature (1)..(45): CP011366.1/2734534-2734490 Salinicoccus halodurans stra in H3B36, complete genome.
ttatcacaggttcgagatcctccctgtataaaaaactaaggagat

SEQ ID NO: 91102 - DNA, 44 bp, Paenibacillus yonginensis
  misc_feature (1)..(44): CP014167.1/547933-547890 Paenibacillus yonginensis stra in DCY84 chromosome, complete genome.
atgggagaggttcgagaactccctctataaaaaactaatcagca

SEQ ID NO: 91103 - DNA, 44 bp, Neisseria wadsworthii
  misc_feature (1)..(44): JH165159.1/2343808-2343851 Neisseria wadsworthii 9715 g enomic scaffold SCAFFOLD1, whole genome shotgun sequenc e.
ttccctgtggttcgcaaactcccacattaaaaaactaaggaatc

SEQ ID NO: 91104 - DNA, 46 bp, Leuconostoc mesenteroides
  misc_feature (1)..(46): CP000414.1/1235047-1235002 Leuconostoc mesenteroides su bsp. mesenteroides ATCC 8293, complete genome.
ataatagcggttcatcaaccatcccgcttaaaaaaactaggagata

SEQ ID NO: 91105 - DNA, 45 bp, Clostridium sulfidigenes
  misc_feature (1)..(45): JPMD01000024.1/4709-4753 Clostridium sulfidigenes strai n 113A c24, whole genome shotgun sequence.
gtgggagaggttcgtaaccatccctctataaaaaactagggaata

SEQ ID NO: 91106 - DNA, 45 bp, Bacillus thuringiensis; identical to SEQ ID NO: 90778
  misc_feature (1)..(45): AAJM01000043.1/9570-9526 Bacillus thuringiensis serovar israelensis ATCC 35646 sq1897, whole genome shotgun se quence.

SEQ ID NO: 91107 - DNA, 48 bp, Paraliobacillus sp.
  misc_feature (1)..(48): CTEI01000001.1/286297-286344 Paraliobacillus sp. PM-2 g enome assembly, contig: CONTIG000001
acgggagaggttcttagcaataaaccctctataaaaaactaaggacat

SEQ ID NO: 91108 - DNA, 48 bp, Lactobacillus ghanensis
  misc_feature (1)..(48): AZGB01000018.1/77495-77542 Lactobacillus ghanensis DSM 18630 NODE_39, whole genome shotgun sequence.
tgccgggtggttcgtaaacatcccaccgtaataaaaaactaggaggaa

SEQ ID NO: 91109 - DNA, 44 bp, Bacillus manliponensis
  misc_feature (1)..(44): JOTN01000003.1/19603-19646 Bacillus manliponensis strai n JCM 15802 contig3, whole genome shotgun sequence.
acgggagaggttcgcgaactccctctataaaaaactaaggagaa

SEQ ID NO: 91110 - DNA, 45 bp, Enterococcus ratti
  misc_feature (1)..(45): JXLB01000023.1/1700-1656 Enterococcus ratti strain DSM 15687 Scaffold23, whole genome shotgun sequence.
tttggactggttcgaaaacttcccagaataaaaaactaagtatct

SEQ ID NO: 91111 - DNA, 45 bp, Enterococcus faecium
  misc_feature (1)..(45): CP003583.1/2007885-2007929 Enterococcus faecium DO, com plete genome.
cttggactggttcggaaacttcccagaataaaaaactaagtatct

SEQ ID NO: 91112 - DNA, 45 bp, Enterococcus villorum; identical to SEQ ID NO: 91111
  misc_feature (1)..(45): KB946287.1/678420-678464 Enterococcus villorum ATCC 700 913 genomic scaffold acvIF-supercont1.8, whole genome s hotgun sequence.

SEQ ID NO: 91113 - DNA, 46 bp, Lactobacillus plantarum
  misc_feature (1)..(46): AL935263.2/482228-482273 Lactobacillus plantarum WCFS1 complete genome
caatacgtggttcgtaaccatcccacgttaaaaaaactaggaggaa

SEQ ID NO: 91114 - DNA, 45 bp, Streptococcus ictaluri
  misc_feature (1)..(45): AEUX02000001.1/125491-125447 Streptococcus ictaluri 707 -05 Contig1217055106, whole genome shotgun sequence.
cctggactggttcgaaaacttcccagaataaaaaactaagtaacc

SEQ ID NO: 91115 - DNA, 45 bp, Eubacterium limosum
  misc_feature (1)..(45): CP002273.2/2056081-2056125 Eubacterium limosum KIST612, complete genome.
aacggagaggttcgtaaccatccctctataaaaaactaaggaaag

SEQ ID NO: 91116 - DNA, 44 bp, Brevibacillus parabrevis; identical to SEQ ID NO: 91096
  misc_feature (1)..(44): LQQV01000079.1/7777-7734 Brevibacillus parabrevis strai n CN1 contig_47, whole genome shotgun sequence.

SEQ ID NO: 91117 - DNA, 45 bp, Bacillus gobiensis
  misc_feature (1)..(45): CP012600.1/839124-839168 Bacillus gobiensis strain FJAT -4402 chromosome.
acgggagaggttctagaaaaaccctctataaaaaactaaggactc

SEQ ID NO: 91118 - DNA, 44 bp, Bacillus akibai
  misc_feature (1)..(44): BAUV01000036.1/7316-7359 Bacillus akibai JCM 9157 DNA, contig:contig_36.
aggaaagaggttcgcaaactccctctataaaaaactaaggtagt

SEQ ID NO: 91119 - DNA, 46 bp, Simonsiella muelleri
  misc_feature (1)..(46): JH815302.1/51976-51931 Simonsiella muelleri ATCC 29453 genomic scaffold supercont1.3, whole genome shotgun seq uence.
caaaacgcggttcgcaaccctcccgcgataacaaaactaaggaatt

SEQ ID NO: 91120 - DNA, 47 bp, Listeria floridensis
  misc_feature (1)..(47): AODF01000021.1/21107-21153 Listeria floridensis FSL S10 -1187 c19, whole genome shotgun sequence.
aaaaacgtagttcgaaaccatcctacgtaaaaaaaaactagggagag

SEQ ID NO: 91121 - DNA, 44 bp, Paenibacillus sp.
  misc_feature (1)..(44): AFDH01000025.1/178849-178892 Paenibacillus sp. HGF7 con tig00140, whole genome shotgun sequence.
atgggagaggttcgcgaactccctctataaaaaactaaggaaaa

SEQ ID NO: 91122 - DNA, 44 bp, Paenibacillus sp.
  misc_feature (1)..(44): JRNV01000013.1/53982-54025 Paenibacillus sp. P1XP2 CM49 _contig000013, whole genome shotgun sequence.
ccgggagaggttcgcgaactccctctataaaaaactaaggtcgc

SEQ ID NO: 91123 - DNA, 45 bp, Bacillus cereus; identical to SEQ ID NO: 91073
  misc_feature (1)..(45): CM000733.1/1293517-1293473 Bacillus cereus Rock3-44 chr omosome, whole genome shotgun sequence.

SEQ ID NO: 91124 - DNA, 45 bp, Streptococcus sinensis
  misc_feature (1)..(45): JPEN01000012.1/34343-34299 Streptococcus sinensis strai n HKU4 scaffold1, whole genome shotgun sequence.
tttggactggttcgcaaacttcccagtataaaaaactaagtaccc

SEQ ID NO: 91125 - DNA, 47 bp, Virgibacillus soli; identical to SEQ ID NO: 91098
  misc_feature (1)..(47): LGPD01000028.1/6630-6584 Virgibacillus soli strain PL20 5 scaffold000028, whole genome shotgun sequence.

SEQ ID NO: 91126 - DNA, 45 bp, Clostridium celatum
  misc_feature (1)..(45): KB291616.1/58316-58360 Clostridium celatum DSM 1785 gen omic scaffold Scfld23, whole genome shotgun sequence.
ctgagagaggttcgtaaccatccctctataaaaaactaggaccct

SEQ ID NO: 91127 - DNA, 45 bp, Neisseria sp.
  misc_feature (1)..(45): JTDO01000005.1/62727-62683 Neisseria sp. KH1503 contig5 , whole genome shotgun sequence.
gcacttgtggttcgagaacctcccacataaaaaaactaaggaaat

SEQ ID NO: 91128 - DNA, 44 bp, Bacillus pseudofirmus
  misc_feature (1)..(44): CP001878.2/2145499-2145456 Bacillus pseudofirmus OF4, c omplete genome.
gtgaaagaggttcgcaaactccctctataaaaaactataaatga

SEQ ID NO: 91129 - DNA, 44 bp, Saccharibacillus sacchari
  misc_feature (1)..(44): KK073875.1/886565-886608 Saccharibacillus sacchari DSM 19268 genomic scaffold SacsacDRAFT_Scaffold1.1, whole g enome shotgun sequence.
acgggagaggttcgagaactccctctataaaaaactaatcgctg

SEQ ID NO: 91130 - DNA, 44 bp, Bacillus alcalophilus
  misc_feature (1)..(44): ALPT02000006.1/78699-78656 Bacillus alcalophilus ATCC 2 7647 = CGMCC 1.3604 strain AV1934 contig00006, whole ge nome shotgun sequence.
ccataagaggttcgcaaactccctctataaaaaactatacaaga

SEQ ID NO: 91131 - DNA, 46 bp, Paenibacillus sp.
  misc_feature (1)..(46): CP009284.1/1381743-1381788 Paenibacillus sp. FSL R7-033 1, complete genome.
ataaccgcggttcgtaaccatcccgcgtaaccaaaactaggaggat

SEQ ID NO: 91132 - DNA, 47 bp, Coprobacillus sp.
  misc_feature (1)..(47): HF995054.1/55493-55447 Coprobacillus sp. CAG:235 genomi c scaffold, scf160
caaagactggttcgagagccaaacccagtataaaaaactaagaataa

SEQ ID NO: 91133 - DNA, 43 bp, Bacillus ginsengihumi; identical to SEQ ID NO: 91012
  misc_feature (1)..(43): JRUN01000001.1/134866-134824 Bacillus ginsengihumi stra in M2.11 NODE_1, whole genome shotgun sequence.

SEQ ID NO: 91134 - DNA, 44 bp, Bacillus clausii
  misc_feature (1)..(44): AP006627.1/2249570-2249527 Bacillus clausii KSM-K16 DNA , complete genome.
aaagaagaggttcgcgaactccctctataaaaaactaaccaatt

SEQ ID NO: 91135 - DNA, 45 bp, Lactobacillus floricola
  misc_feature (1)..(45): AYZL01000020.1/26121-26077 Lactobacillus floricola DSM 23037 = JCM 16512 strain DSM 23037 NODE_63, whole genom e shotgun sequence.
aattttgtggttcgaaaccatcccacataaaaaaactaggagtga

SEQ ID NO: 91136 - DNA, 44 bp, Bacillus cereus
  misc_feature (1)..(44): CM000735.1/1161457-1161414 Bacillus cereus Rock4-18 chr omosome, whole genome shotgun sequence.
atgggagaggttcgcgaactccctctataaaaaactatggaaac

SEQ ID NO: 91137 - DNA, 44 bp, Bacillus koreensis
  misc_feature (1)..(44): LILC01000002.1/377693-377736 Bacillus koreensis strain DSM 16467 scaffold1, whole genome shotgun sequence.
gcgggagaggttcgcgaactccctctataaaaaactatagaaag

SEQ ID NO: 91138 - DNA, 47 bp, Salinicoccus halodurans
  misc_feature (1)..(47): CP011366.1/439004-439050 Salinicoccus halodurans strain H3B36, complete genome.
tatgaagaggttcttagcccaaaccctctataaaaaactaagccacg

SEQ ID NO: 91139 - DNA, 47 bp, Oceanobacillus picturae,
  misc_feature (1)..(47): CCAX010000001.1/1797810-1797764 Oceanobacillus picturae , S1, WGS project CCAX01000000 data, contig: 000001
atgcgagaggttcttagcttaaaccctctataaaaaactaaggacag

SEQ ID NO: 91140 - DNA, 47 bp, Stoquefichus sp.
  misc_feature (1)..(47): KQ970938.1/11447-11493 Candidatus Stoquefichus sp. KLE1 796 genomic scaffold Scaffold420, whole genome shotgun sequence.
atgacactggttcgagagccaaacccagtataaaaaactaaggacat

SEQ ID NO: 91141 - DNA, 45 bp, Lactobacillus coryniformis
  misc_feature (1)..(45): AKFP01000001.1/86634-86590 Lactobacillus coryniformis s ubsp. coryniformis CECT 5711 COR000001, whole genome sh otgun sequence.
tctggactggttcggaaacttcccagaataaaaaaccaagtatct

SEQ ID NO: 91142 - DNA, 44 bp, Paenibacillus beijingensis
  misc_feature (1)..(44): CP011058.1/2709642-2709685 Paenibacillus beijingensis s train DSM 24997, complete genome.
ccgggagaggttcgcgaactccctctataaaaaactaagacaac

SEQ ID NO: 91143 - DNA, 46 bp, Clostridium taeniosporum
  misc_feature (1)..(46): CP017253.1/2613466-2613421 Clostridium taeniosporum str ain 1/k, complete genome.
gtggtagaggttcgaagaccatccctctataaaaaactaggcaatt

SEQ ID NO: 91144 - DNA, 47 bp, Clostridium celatum
  misc_feature (1)..(47): KB291645.1/153593-153547 Clostridium celatum DSM 1785 g enomic scaffold Scfld77, whole genome shotgun sequence.
ctaggagaggttcgtatgaccatccctctataaaaaactaggcttag

SEQ ID NO: 91145 - DNA, 48 bp, Listeria monocytogenes
  misc_feature (1)..(48): AL591824.1/907926-907973 Listeria monocytogenes EGD-e, complete genome
ccacacgtggttcattcataccatcccacgtaaaaaaactaggaggaa

SEQ ID NO: 91146 - DNA, 44 bp, Bacillus lehensis
  misc_feature (1)..(44): CP003923.1/2072394-2072351 Bacillus lehensis G1, comple te genome.
aagaaagaggttcgcgaactccctctataaaaaactatgcaagt

SEQ ID NO: 91147 - DNA, 44 bp, Planococcus sp.
  misc_feature (1)..(44): CP009129.1/1124724-1124681 Planococcus sp. PAMC 21323, complete genome.
gttaaagaggttcgcaaactccctctctaaaaaactaaggagtg

SEQ ID NO: 91148 - DNA, 45 bp, Bacillus cellulosilyticus
  misc_feature (1)..(45): CP002394.1/2569718-2569762 Bacillus cellulosilyticus DS M 2522, complete genome.
gcagcagaggttctagctacaccctctataaaaaactaaggagac

SEQ ID NO: 91149 - DNA, 45 bp, Mycobacterium abscessus; identical to SEQ ID NO: 91052
  misc_feature (1)..(45): CSXB01000058.1/14666-14622 Mycobacterium abscessus stra in PAP053 genome assembly, contig: ERS075544SCcontig000 058

SEQ ID NO: 91150 - DNA, 45 bp, Pontibacillus chungwhensis
  misc_feature (1)..(45): AVBG01000002.1/389881-389837 Pontibacillus chungwhensis BH030062 contig4, whole genome shotgun sequence.
tcgggagaggttctagctaaaccctctataaaaaactaaagaaca

SEQ ID NO: 91151 - DNA, 45 bp, Geobacillus sp.
  misc_feature (1)..(45): CP002293.1/2878510-2878466 Geobacillus sp. Y4.1MC1, com plete genome.
atgggagaggttctagaacaaccctctataaaaaactagggacag

SEQ ID NO: 91152 - DNA, 44 bp, [Actinobacillus] muris
  misc_feature (1)..(44): JWIZ01000061.1/319-362 [Actinobacillus] muris strain Ac kerman80-443D cont61, whole genome shotgun sequence.
ttgttcgtggttcgtgaacctcccacgcaaaaaactaaggatat

SEQ ID NO: 91153 - DNA, 46 bp, Pontibacillus yanchengensis
  misc_feature (1)..(46): AVBF01000040.1/32900-32855 Pontibacillus yanchengensis Y32 contig47, whole genome shotgun sequence.
gtaggagaggttctagctcacaccctctataaaaaactaaggatat

SEQ ID NO: 91154 - DNA, 45 bp, Bacteroidetes bacterium
  misc_feature (1)..(45): JZQW01000050.1/35890-35846 Bacteroidetes bacterium OLB8 UZ08_BCD00100CONTIG0000050, whole genome shotgun seque nce.
aaagacgtggttcgaaatcctcccacgataaaaaactaaggtgtg

SEQ ID NO: 91155 - DNA, 44 bp, Paenisporosarcina sp.
  misc_feature (1)..(44): KE150423.1/241555-241512 Paenisporosarcina sp. HGH0030 genomic scaffold acAqH-supercont1.3, whole genome shotg un sequence.
taggaagaggttcgcaaactccctctataaaaaactaaggtgaa

SEQ ID NO: 91156 - DNA, 45 bp, Weissella cibaria
  misc_feature (1)..(45): JWHU01000034.1/164526-164570 Weissella cibaria strain M G1 contig000034, whole genome shotgun sequence.
aggttagtggttcgtaaccatcccactcaaaaaaactaggagaat

SEQ ID NO: 91157 - DNA, 45 bp, Lysinibacillus sinduriensis
  misc_feature (1)..(45): JPVO01000048.1/31385-31341 Lysinibacillus sinduriensis BLB-1 = JCM 15800 contig9, whole genome shotgun sequenc e.
tttaccgtggttcgagaacctcccacgcaaaaaaactaaggagaa

SEQ ID NO: 91158 - DNA, 45 bp, Melissococcus plutonius; identical to SEQ ID NO: 90874
  misc_feature (1)..(45): AP012200.1/1198494-1198450 Melissococcus plutonius ATCC 35311 DNA, complete genome.

SEQ ID NO: 91159 - DNA, 45 bp, Pontibacillus marinus
  misc_feature (1)..(45): AVPF01000027.1/14696-14740 Pontibacillus marinus BH0300 04 = DSM 16465 strain BH030004 contig29, whole genome s hotgun sequence.
tcgggagaggttctagctcaaccctctataaaaaactaagggacg

SEQ ID NO: 91160 - DNA, 46 bp, Leuconostoc lactis
  misc_feature (1)..(46): LJIV01000009.1/103850-103805 Leuconostoc lactis strain WIKIM21 contig00023, whole genome shotgun sequence.
ttattagcggttcatcaaccatcccgcttaaaaaaactaggagatt

SEQ ID NO: 91161 - DNA, 44 bp, Bacillus azotoformans
  misc_feature (1)..(44): AJLR01000040.1/54654-54697 Bacillus azotoformans LMG 95 81 contig40, whole genome shotgun sequence.
acggtagaggttcttagctaccctctctaaaaaactaagaagga

SEQ ID NO: 91162 - DNA, 45 bp, Enterococcus sp.
  misc_feature (1)..(45): NGMO01000003.1/100583-100627 Enterococcus sp. 10A9_DIV0 425 scaffold00003, whole genome shotgun sequence.
cttggactggttcggaaacttcccagaataaaaaactaagtgtct

SEQ ID NO: 91163 - DNA, 45 bp, Snodgrassella alvi
  misc_feature (1)..(45): JAIL01000256.1/50865-50821 Snodgrassella alvi SCGC AB-5 98-O02 SCG598O02_12461, whole genome shotgun sequence.
gtccctgtggttcgcaaacctcccacattaaaaaactaggaaatc

SEQ ID NO: 91164 - DNA, 44 bp, Clostridium difficile
  misc_feature (1)..(44): AM180355.1/1956412-1956455 Clostridium difficile 630 co mplete genome
tctgtacttgttcgagaactccaagtataaaaaactaaggaatt

SEQ ID NO: 91165 - DNA, 46 bp, Snodgrassella alvi
  misc_feature (1)..(46): JAIK01000393.1/4676-4631 Snodgrassella alvi SCGC AB-598 -O11 SCG598O11_11285, whole genome shotgun sequence.
aaccacgtggttcgcaatccatcccacgaaaaaaaactaggagcct

SEQ ID NO: 91166 - DNA, 45 bp, Bacillus methanolicus
  misc_feature (1)..(45): CP007739.1/400420-400376 Bacillus methanolicus MGA3, co mplete genome.
tcgaacgtggttcgaaaccatcccacgataaaaaactaaggagag

SEQ ID NO: 91167 - DNA, 44 bp, Paenibacillus sp.
  misc_feature (1)..(44): FXAZ01000011.1/35141-35184 Paenibacillus sp. 11 genome assembly, contig: Ga0139009_111
gcgggagaggttcgcaatctccctctataaaaaactaaggtcta

SEQ ID NO: 91168 - DNA, 45 bp, Dichelobacter nodosus
  misc_feature (1)..(45): CP000513.1/859945-859989 Dichelobacter nodosus VCS1703A , complete genome.
ccgcttgtggttcgaaaacttcccacactaaaaaactaggaaaaa

SEQ ID NO: 91169 - DNA, 45 bp, Anoxybacillus amylolyticus
  misc_feature (1)..(45): CP015438.1/1227076-1227120 Anoxybacillus amylolyticus s train DSM 15939, complete genome.
gcgggagaggttctagaacaaccctctataaaaaactagggaaag

SEQ ID NO: 91170 - DNA, 46 bp, Lactobacillus manihotivorans
  misc_feature (1)..(46): AZEU01000151.1/8631-8586 Lactobacillus manihotivorans D SM 13343 = JCM 12514 strain DSM 13343 NODE_221, whole g enome shotgun sequence.
aacgtcgtggttcgtgatccatcccacgtaaaaaaactaggaggct

SEQ ID NO: 91171 - DNA, 45 bp, Bacillus sporothermodurans
  misc_feature (1)..(45): LQYN01000169.1/9946-9990 Bacillus sporothermodurans str ain B4102 NODE_312, whole genome shotgun sequence.
aaagacgtggttcgaaaccatcccacgataaaaaactaaggagag

SEQ ID NO: 91172 - DNA, 45 bp, Streptococcus dysgalactiae
  misc_feature (1)..(45): AP011114.1/205619-205575 Streptococcus dysgalactiae sub sp. equisimilis RE378 DNA, complete genome.
cctggactggttcgaaaacttcccagaataaaaaactaagtaaca

SEQ ID NO: 91173 - DNA, 48 bp, Lactobacillus rennini
  misc_feature (1)..(48): AYYI01000009.1/22832-22785 Lactobacillus rennini DSM 20 253 NODE_9, whole genome shotgun sequence.
ttaatggtggttcgtgactatcccaccataataaaaaactaggaggcc

SEQ ID NO: 91174 - DNA, 45 bp, Lysinibacillus sp.
  misc_feature (1)..(45): JPUW01000030.1/19339-19295 Lysinibacillus sp. BF-4 cont ig00030, whole genome shotgun sequence.
gagtaagaggttcgtaaccatccctctataaaaaactaaggagat

SEQ ID NO: 91175 - DNA, 45 bp, Gracilibacillus kekensis
  misc_feature (1)..(45): FRCZ01000001.1/30828-30784 Gracilibacillus kekensis str ain CGMCC 1.10681 genome assembly, contig: Ga0079828_10 1
gcaggagaggttctagctacaccctctataaaaaactaaggatga

SEQ ID NO: 91176 - DNA, 66 bp, Haemophilus sputorum
  misc_feature (1)..(66): ALJP01000009.1/510122-510187 Haemophilus sputorum HK 21 54 ctg120006325159, whole genome shotgun sequence.
ttttccgtggttcgagaccttcccacggctagtcaatatttgactagaaaacaaaactaaggatgt

SEQ ID NO: 91177 - DNA, 45 bp, Listeriaceae bacterium
  misc_feature (1)..(45): JNFA01000002.1/72649-72693 Listeriaceae bacterium FSL A 5-0281 contig000002, whole genome shotgun sequence.
gaaaacgtagttcgaaaccatcctacgtaaaaaaactaagggagt

SEQ ID NO: 91178 - DNA, 45 bp, Listeriaceae bacterium
  misc_feature (1)..(45): JNEZ01000044.1/213430-213386 Listeriaceae bacterium FSL A5-0209 contig000044, whole genome shotgun sequence.
gaaaacgtagttcgaaaccatcctacgtaaaaaaactaaggggag

SEQ ID NO: 91179 - DNA, 45 bp, Rodentibacter myodis
  misc_feature (1)..(45): MLHQ01000011.1/95599-95643 Rodentibacter myodis strain Ac151 contig_11, whole genome shotgun sequence.
ccatttgtagttcgcaaacctcctacataaaaaaactaggtatca

SEQ ID NO: 91180 - DNA, 45 bp, Rodentibacter heidelbergensis; identical to SEQ ID NO: 90797
  misc_feature (1)..(45): MLHH01000003.1/93079-93123 Rodentibacter heidelbergensi s strain Ac69 contig_3, whole genome shotgun sequence.

SEQ ID NO: 91181 - DNA, 46 bp, Lactobacillus brantae
  misc_feature (1)..(46): AYZQ01000005.1/22373-22328 Lactobacillus brantae DSM 23 927 Scaffold5, whole genome shotgun sequence.
acccttgtggttcgaaattccgcccacaataaaaaactaggaggca

SEQ ID NO: 91182 - DNA, 45 bp, Lactobacillus acidipiscis
  misc_feature (1)..(45): JQBK01000021.1/19599-19555 Lactobacillus acidipiscis st rain DSM 15353 Scaffold21, whole genome shotgun sequenc e.
taaatggtggttcgtaaacatcccaccgaaaaaaactaggaggtt

SEQ ID NO: 91183 - DNA, 45 bp, Bacillus sp.; identical to SEQ ID NO: 90785
  misc_feature (1)..(45): LSBA01000040.1/101243-101287 Bacillus sp. NRRL B-41092 Bacillus-sp-B-41092_contig_9, whole genome shotgun sequ ence.

SEQ ID NO: 91184 - DNA, 45 bp, Basilea psittacipulmonis
  misc_feature (1)..(45): CP009238.1/64400-64444 Basilea psittacipulmonis DSM 247 01, complete genome.
tgttcagtggttcgtaaccatcccactataaaaaactaaggaatg

SEQ ID NO: 91185 - DNA, 46 bp, Bacillus sp.
  misc_feature (1)..(46): LBMD01000019.1/19428-19383 Bacillus sp. CHD6a contig19, whole genome shotgun sequence.
taaggagaggttctagcaaataccctctataaaaaactaaggacag

SEQ ID NO: 91186 - DNA, 44 bp, Domibacillus enclensis
  misc_feature (1)..(44): FTLX01000005.1/265586-265629 Domibacillus enclensis str ain NIO-1016 genome assembly, contig: Ga0061089_105
gcgggagaggttcgcgaattccctctataaaaaactaataatca

SEQ ID NO: 91187 - DNA, 45 bp, Lactobacillus fabifermentans
  misc_feature (1)..(45): KK036513.1/23562-23518 Lactobacillus fabifermentans T30 PCM01 genomic scaffold scaffold59, whole genome shotgun sequence.
tctggcctggttcgtaaactgcccaggataaaaaaccaagaactt

SEQ ID NO: 91188 - DNA, 45 bp, Neisseria zoodegmatis
  misc_feature (1)..(45): MTBM01000006.1/128334-128290 Neisseria zoodegmatis stra in DSM 21643 NODE_6_length_154384_cov_38.1093_ID_11, wh ole genome shotgun sequence.
ttccctgtggttcgaaaacctcccacattaaaaaactaaggaata

SEQ ID NO: 91189 - DNA, 45 bp, Clostridium sp.
  misc_feature (1)..(45): MBSV01000056.1/4883-4927 Clostridium sp. W14A NODE_35, whole genome shotgun sequence.
cccgcactggttcgagaacctcccagtataaaaaactaaggattg

SEQ ID NO: 91190 - DNA, 44 bp, Paenibacillus sabinae
  misc_feature (1)..(44): CP004078.1/2942048-2942005 Paenibacillus sabinae T27, c omplete genome.
gcaggagaggttcgcaaactccctctataaaaaactaagatccg

SEQ ID NO: 91191 - DNA, 45 bp, Bizionia argentinensis
  misc_feature (1)..(45): AFXZ01000008.1/10710-10754 Bizionia argentinensis JUB59 contig00009, whole genome shotgun sequence.
ggacacgtggttcgtaattctcccacgttaaaaaactatgaaacg

SEQ ID NO: 91192 - DNA, 45 bp, Gallibacterium anatis
  misc_feature (1)..(45): CP002667.1/567923-567967 Gallibacterium anatis UMN179, complete genome.
ttcaccgtggttcgcaaacctcccacgcaaaaaaactaggaatat

SEQ ID NO: 91193 - DNA, 45 bp, Aggregatibacter actinomycetemcomitans
  misc_feature (1)..(45): CP001733.2/995079-995035 Aggregatibacter actinomycetemc omitans D11S-1, complete genome.
ttttctgtagttcgcaaacctcctacataaaaaaactaggtatca

SEQ ID NO: 91194 - DNA, 45 bp, Snodgrassella alvi
  misc_feature (1)..(45): CP007446.1/34780-34824 Snodgrassella alvi wkB2, complet e genome.
caccctgtggttcgtaaacctcccacataaaaaaactaggaaatc

SEQ ID NO: 91195 - DNA, 46 bp, Lactobacillus vini
  misc_feature (1)..(46): AYYX01000006.1/18880-18835 Lactobacillus vini DSM 20605 Scaffold6, whole genome shotgun sequence.
gtcctggtggttcgaaaccatcccaccataaaaaaactagggggaa

SEQ ID NO: 91196 - DNA, 47 bp, Fructobacillus sp.
  misc_feature (1)..(47): LDUY01000013.1/26173-26127 Fructobacillus sp. EFB-N1 FE FB_c000013, whole genome shotgun sequence.
caattagcggttcatcaaccatcccgcttaaacaaaactaggagtac

SEQ ID NO: 91197 - DNA, 45 bp, Ornithinibacillus halophilus
  misc_feature (1)..(45): FQVW01000003.1/36059-36103 Ornithinibacillus halophilus strain IBRC-M 10683 genome assembly, contig: Ga0104432 _1003
caacacgtggttcgaaaccatcccacgataaaaaactaagggaga

SEQ ID NO: 91198 - DNA, 43 bp, Bacillus shackletonii
  misc_feature (1)..(43): LJJC01000004.1/2513548-2513506 Bacillus shackletonii st rain LMG 18435 super11, whole genome shotgun sequence.
gcggtagaggttctagctaccctcttaaaaaaactaagggaaa

SEQ ID NO: 91199 - DNA, 45 bp, Lysinibacillus massiliensis
  misc_feature (1)..(45): JPVQ01000001.1/185771-185727 Lysinibacillus massiliensi s 4400831 = CIP 108448 = CCUG 49529 contig1, whole geno me shotgun sequence.
tacaccgtggttcgtaaccatcccacgaaaaaaaactaaggagaa

SEQ ID NO: 91200 - DNA, 48 bp, Lactobacillus apodemi
  misc_feature (1)..(48): AZFT01000018.1/12769-12722 Lactobacillus apodemi DSM 16 634 = JCM 16172 strain DSM 16634 NODE_40, whole genome shotgun sequence.
aatcaggtggttcgcaaccatcccaccttaataaaaaactaggagaga

SEQ ID NO: 91201 - DNA, 45 bp, Salegentibacter echinorum
  misc_feature (1)..(45): FQVT01000013.1/14669-14625 Salegentibacter echinorum st rain DSM 24579 genome assembly, contig: Ga0131147_113
ggacacgtggttcgaaactctcccacattaaaaaactaagaaaag

SEQ ID NO: 91202 - DNA, 87 bp, Neotoma lepida
  misc_feature (1)..(87): LZPO01055223.1/74398-74484 Neotoma lepida isolate 417 s caffold_2013, whole genome shotgun sequence.
  misc_feature (69)..(69): n is a, c, g, or t
ctggaactggttcaaacaccactttcccagttttgtttccaaatatatgaaattggtggcttagtgggnaaaaaaaactaggaaaat

SEQ ID NO: 91203 - DNA, 78 bp, Snodgrassella alvi
  misc_feature (1)..(78): JAIL01000253.1/27085-27162 Snodgrassella alvi SCGC AB-5 98-O02 SCG598O02_11502, whole genome shotgun sequence.
ttcttcgtggttcgaaaacctcccacgtcagatcgatagacaaggttttgtctgctctgaaatcaaaactaggaaacg

SEQ ID NO: 91204 - DNA, 44 bp, Bacillus badius
  misc_feature (1)..(44): JXLP01000003.1/302367-302410 Bacillus badius strain MTC C 1458 Contig3, whole genome shotgun sequence.
gcaggagaggttcgcgaactccctctataaaaaactaagggaaa

SEQ ID NO: 91205 - DNA, 45 bp, Sphingobacterium faecium; identical to SEQ ID NO: 91052
  misc_feature (1)..(45): FUKX01000034.1/158391-158435 Sphingobacterium faecium P CAi_F2.5 genome assembly, contig: Scaffold8

SEQ ID NO: 91206 - DNA, 45 bp, Bacillus sp.
  misc_feature (1)..(45): LITN01000019.1/355661-355705 Bacillus sp. FJAT-21945 sc affold3, whole genome shotgun sequence.
gctcacgtggttcgagaacctcccacggaaaaaaactaaggagag

SEQ ID NO: 91207 - DNA, 45 bp, Firmicutes bacterium
  misc_feature (1)..(45): FR888930.1/78583-78539 Firmicutes bacterium CAG:466 gen omic scaffold, scf176
gtcggactggttcgtgaacttcccagtataaaaaaccaagtatct

SEQ ID NO: 91208 - DNA, 44 bp, Paenibacillus sp.
  misc_feature (1)..(44): LSFN01000001.1/42494-42537 Paenibacillus sp. LPB0068 PN BC_01, whole genome shotgun sequence.
atggaagaggttcgcgaactccctctataaaaaactatttacct

SEQ ID NO: 91209 - DNA, 44 bp, Paenibacillus pectinilyticus; identical to SEQ ID NO: 90990
  misc_feature (1)..(44): LYPC01000030.1/5864-5821 Paenibacillus pectinilyticus s train KCTC13222 scaffold7, whole genome shotgun sequenc e.

SEQ ID NO: 91210 - DNA, 44 bp, Paenibacillus sp.; identical to SEQ ID NO: 90961
  misc_feature (1)..(44): MXQD01000006.1/318351-318308 Paenibacillus sp. MY03 con tig6, whole genome shotgun sequence.

SEQ ID NO: 91211 - DNA, 45 bp, Ruminococcus gnavus; identical to SEQ ID NO: 91045
  misc_feature (1)..(45): HF997184.1/16271-16315 Ruminococcus gnavus CAG:126 geno mic scaffold, scf110

SEQ ID NO: 91212 - DNA, 45 bp, Neisseria weaveri
  misc_feature (1)..(45): AFWQ01000022.1/35544-35500 Neisseria weaveri LMG 5135 N W5135.2_22, whole genome shotgun sequence.
tctactgtggttcgaaaacctcccacattaaaaaactaaggaatt

SEQ ID NO: 91213 - DNA, 45 bp, Bacillus galactosidilyticus; identical to SEQ ID NO: 90895
  misc_feature (1)..(45): LGPB01000086.1/12207-12163 Bacillus galactosidilyticus strain PL133 scaffold000086, whole genome shotgun seque nce.

SEQ ID NO: 91214 - DNA, 45 bp, Tetragenococcus halophilus
  misc_feature (1)..(45): AP012046.1/1895612-1895656 Tetragenococcus halophilus N BRC 12172 DNA, complete genome.
cctggactggttcgtaaacttcccagaataaaaaaccaagaactt

SEQ ID NO: 91215 - DNA, 46 bp, Snodgrassella alvi
  misc_feature (1)..(46): JFZW01000007.1/6045-6000 Snodgrassella alvi strain wkB1 2 wkB12_scaf007, whole genome shotgun sequence.
aaccacgtggttcgcaatccatcccacgctaaaaaactaggagcct

SEQ ID NO: 91216 - DNA, 45 bp, Cardiobacterium hominis
  misc_feature (1)..(45): GG694025.1/159470-159426 Cardiobacterium hominis ATCC 1 5826 genomic scaffold SCAFFOLD1, whole genome shotgun s equence.
gcccctgtggttcgcaaacctcccacaataaaaaactaggaaatc

SEQ ID NO: 91217 - DNA, 44 bp, Brevibacillus brevis
  misc_feature (1)..(44): AP008955.1/4851673-4851716 Brevibacillus brevis NBRC 10 0599 DNA, complete genome.
acgggagaggttcgcgaactccctctataaaaaactaagctgga

SEQ ID NO: 91218 - DNA, 43 bp, Bacillus sporothermodurans
  misc_feature (1)..(43): LQYN01000129.1/33546-33504 Bacillus sporothermodurans s train B4102 NODE_155, whole genome shotgun sequence.
gcggtagaggttctagctaccctctttaaaaaactaaggaaaa

SEQ ID NO: 91219 - DNA, 46 bp, Salimicrobium flavidum
  misc_feature (1)..(46): FTOC01000002.1/6205-6160 Salimicrobium flavidum strain DSM 23127 genome assembly, contig: Ga0111645_102
tataaagaggttcttagcctaaccctctctaaaaaactaaggacga

SEQ ID NO: 91220 - DNA, 45 bp, Pediococcus claussenii
  misc_feature (1)..(45): CP003137.1/230097-230141 Pediococcus claussenii ATCC BA A-344, complete genome.
aatcccgtggttcgcaattatcccacgtaaaaaaactaaggagga

SEQ ID NO: 91221 - DNA, 47 bp, Lysinibacillus xylanilyticus
  misc_feature (1)..(47): LFXJ01000005.1/1202925-1202879 Lysinibacillus xylanilyt icus strain DSM 23493 Scaffold1, whole genome shotgun s equence.
acgggagaggttcatagctaataccctctataaaaaactatggaaac

SEQ ID NO: 91222 - DNA, 43 bp, Bacilli bacterium
  misc_feature (1)..(43): LAZH01000032.1/116095-116137 Bacilli bacterium VT-13-10 4 contig032, whole genome shotgun sequence.
taggtagaggttctagctaccctctataaaaaactaagaaaac

SEQ ID NO: 91223 - DNA, 32 bp, Paenibacillus sp.; identical to SEQ ID NO: 90837
  misc_feature (1)..(32): BAUO01000016.1/5785-5816 Paenibacillus sp. JCM 10914 DN A, contig: contig_16.

SEQ ID NO: 91224 - DNA, 47 bp, Granulicatella elegans
  misc_feature (1)..(47): KI391971.1/1478131-1478085 Granulicatella elegans ATCC 700633 genomic scaffold supercont2.1, whole genome shot gun sequence.
acgctcgaggttcgcaaccatccctcgattcaaaaaactaggaggaa

SEQ ID NO: 91225 - DNA, 45 bp, Bacillus sp.
  misc_feature (1)..(45): CVRB01000002.1/327923-327967 Bacillus sp. LF1 genome as sembly, contig: CONTIG000002
ttaaacgtggttcgagaacctcccacggaaaaaaactaaggagaa

SEQ ID NO: 91226 - DNA, 45 bp, Haemophilus parahaemolyticus
  misc_feature (1)..(45): AJSW01000004.1/5244-5288 Haemophilus parahaemolyticus H K385 contig00007, whole genome shotgun sequence.
tttcttgtggttcgagaacctcccacataaaaaaactaaggatac

SEQ ID NO: 91227 - DNA, 47 bp, Enterococcus durans; identical to SEQ ID NO: 90907
  misc_feature (1)..(47): KE136514.1/212747-212793 Enterococcus durans ATCC 6056 genomic scaffold acyDB-supercont2.2, whole genome shotg un sequence.

SEQ ID NO: 91228 - DNA, 45 bp, Lysinibacillus xylanilyticus
  misc_feature (1)..(45): LFXJ01000010.1/91329-91285 Lysinibacillus xylanilyticus strain DSM 23493 Scaffold2, whole genome shotgun seque nce.
cttcacgtggttcgtaaccatcccacgtaaaaaaactaaggagaa

SEQ ID NO: 91229 - DNA, 44 bp, Bacillus coahuilensis
  misc_feature (1)..(44): LDYG01000028.1/69479-69436 Bacillus coahuilensis p1.1.4 3 ABFP000028, whole genome shotgun sequence.
acaggagaggttcgagaactccctctataaaaaactacaagaaa

SEQ ID NO: 91230 - DNA, 44 bp, Paenibacillus sp.
  misc_feature (1)..(44): MRTH01000018.1/82993-83036 Paenibacillus sp. FSL H7-033 1 NODE_18_length_160074_cov_0.923132_ID_12113, whole ge nome shotgun sequence.
gcaagagaggttcgaaaactccctctataaaaaactaaagaact

SEQ ID NO: 91231 - DNA, 45 bp, Anoxybacillus sp.
  misc_feature (1)..(45): CP015436.1/180360-180404 Anoxybacillus sp. B7M1, comple te genome.
gcgggagaggttctagaacaaccctctataaaaaactagggaagg

SEQ ID NO: 91232 - DNA, 47 bp, Lactobacillus cacaonum
  misc_feature (1)..(47): AYZE01000017.1/65100-65146 Lactobacillus cacaonum DSM 2 1116 NODE_52, whole genome shotgun sequence.
tcaatggtggttcgcaaaaatcccaccaaataaaaaactagaaagag

SEQ ID NO: 91233 - DNA, 44 bp, Paenibacillus sp.
  misc_feature (1)..(44): LMLV01000030.1/503610-503653 Paenibacillus sp. Leaf72 c ontig_4, whole genome shotgun sequence.
acaggagaggttcgcgaactccctctataaaaaactaaggaaaa

SEQ ID NO: 91234 - DNA, 45 bp, Pontibacillus halophilus
  misc_feature (1)..(45): AVPE01000001.1/412816-412860 Pontibacillus halophilus J SM 076056 = DSM 19796 strain JSM 076056 contig1, whole genome shotgun sequence.
gcgggagaggttctagcgacaccctctataaaaaactaaggatgt

SEQ ID NO: 91235 - DNA, 45 bp, Lactobacillus agilis
  misc_feature (1)..(45): AYYP01000060.1/24447-24403 Lactobacillus agilis DSM 205 09 NODE_211, whole genome shotgun sequence.
aacacagtggttcgcaattatcccactaaaaaaaactaaggagcg

SEQ ID NO: 91236 - DNA, 45 bp, Bacillus circulans
  misc_feature (1)..(45): LDPH01000042.1/13788-13832 Bacillus circulans strain RI T379 contig42, whole genome shotgun sequence.
gataacgtggttcgagaccatcccacgtaaaaaaactaagggaga

SEQ ID NO: 91237 - DNA, 45 bp, Neisseria elongata
  misc_feature (1)..(45): CP007726.1/1259853-1259809 Neisseria elongata subsp. gl ycolytica ATCC 29315, complete genome.
caaactgtggttcgcaatcctcccacaataaaaaactaaggaatt

SEQ ID NO: 91238 - DNA, 45 bp, Terribacillus aidingensis
  misc_feature (1)..(45): CP008876.1/283920-283964 Terribacillus aidingensis stra in MP602, complete genome.
ctgggagaggttctagcacaaccctctataaaaaactaaggaact

SEQ ID NO: 91239 - DNA, 44 bp, Sporosarcina sp.
  misc_feature (1)..(44): LPUT01000023.1/309630-309673 Sporosarcina sp. HYO08 sca ffold_3, whole genome shotgun sequence.
aaacaagaggttcgcaaactccctctataaaaaactaaggagat

SEQ ID NO: 91240 - DNA, 44 bp, Bacillaceae bacterium
  misc_feature (1)..(44): JWIR02000016.1/21963-21920 Bacillaceae bacterium MTCC 8 252 Contig16, whole genome shotgun sequence.
gcaggagaggttcgcgaactccctctataaaaaactacgaaaag

SEQ ID NO: 91241 - DNA, 47 bp, Pontibacillus halophilus
  misc_feature (1)..(47): AVPE01000001.1/14853-14899 Pontibacillus halophilus JSM 076056 = DSM 19796 strain JSM 076056 contig1, whole ge nome shotgun sequence.
tcgggagaggttctctagctcaaccctctataaaaaactaagggaat

SEQ ID NO: 91242 - DNA, 45 bp, Neisseria meningitidis
  misc_feature (1)..(45): AE002098.2/329220-329176 Neisseria meningitidis MC58, c omplete genome.
ccgcccgtggttcgaaaacctcccacattaaaaaactaaggaaac

SEQ ID NO: 91243 - DNA, 48 bp, Carnobacterium maltaromaticum
  misc_feature (1)..(48): HE999757.2/642665-642712 Carnobacterium maltaromaticum LMA28 complete genome
actgacgtggttcactaataccatcccacgaaaaaaaactaggaggaa

SEQ ID NO: 91244 - DNA, 44 bp, Clostridiales bacterium
  misc_feature (1)..(44): KE993490.1/45180-45137 Clostridiales bacterium oral tax on 876 str. F0540 genomic scaffold Scaffold44, whole ge nome shotgun sequence.
gcaggactggttcgagaactcccagtataaaaaactaaggattt

SEQ ID NO: 91245 - DNA, 45 bp, Enterococcus hirae; identical to SEQ ID NO: 91111
  misc_feature (1)..(45): CP003504.1/1670343-1670299 Enterococcus hirae ATCC 9790 , complete genome.

SEQ ID NO: 91246 - DNA, 45 bp, Bibersteinia trehalosi
  misc_feature (1)..(45): CP003745.1/835644-835600 Bibersteinia trehalosi USDA-AR S-USMARC-192, complete genome.
tactcagtggttcgaaaacctcccacgctaaaaaactaaggaaca

SEQ ID NO: 91247 - DNA, 44 bp, Sporosarcina psychrophila
  misc_feature (1)..(44): CP014616.1/1659215-1659172 Sporosarcina psychrophila st rain DSM 6497, complete genome.
tcgggagaggttcatagcgaccctctataaaaaactatggatga

SEQ ID NO: 91248 - DNA, 45 bp, Lactobacillus pobuzihii
  misc_feature (1)..(45): JQCN01000007.1/13832-13876 Lactobacillus pobuzihii stra in NBRC 103219 NODE_9, whole genome shotgun sequence.
tatcaggtggttcgtaaccatcccacctaaaaaaactaggaggtc

SEQ ID NO: 91249 - DNA, 44 bp, Paenibacillus riograndensis; identical to SEQ ID NO: 90777
  misc_feature (1)..(44): LN831776.1/4341332-4341289 Paenibacillus riograndensis SBR5 isolate SBR5(T) genome assembly, chromosome: I

SEQ ID NO: 91250 - DNA, 45 bp, Roseburia sp.; identical to SEQ ID NO: 90902
  misc_feature (1)..(45): FR904113.1/15934-15978 Roseburia sp. CAG:100 genomic sc affold, scf107

SEQ ID NO: 91251 - DNA, 45 bp, Bacillus sp.
  misc_feature (1)..(45): CCXR01000001.1/318554-318510 Bacillus sp. B-jedd genome assembly, contig: CONTIG000001
gcccgcgtggttcgagaacctcccacgataaaaaactaaggagag

SEQ ID NO: 91252 - DNA, 46 bp, Oceanobacillus oncorhynchi
  misc_feature (1)..(46): CDGG01000001.1/3527407-3527452 Oceanobacillus oncorhync hi strain Oc5 genome assembly, contig: CONTIG000001
gtagaagaggttctagctaacaccctctataaaaaactaaggatac

SEQ ID NO: 91253 - DNA, 47 bp, Virgibacillus massiliensis
  misc_feature (1)..(47): CCDP010000002.1/869448-869402 Virgibacillus massiliensi s genome assembly, contig: 000002
attggagaggttcttagctataaccctctataaaaaactaaggacaa

SEQ ID NO: 91254 - DNA, 44 bp, Paenibacillus stellifer
  misc_feature (1)..(44): CP009286.1/3127258-3127215 Paenibacillus stellifer stra in DSM 14472, complete genome.
gcgggagaggttcgcaaactccctctataaaaaactaagaacga

SEQ ID NO: 91255 - DNA, 45 bp, Lactobacillus acidipiscis
  misc_feature (1)..(45): JQBK01000002.1/36743-36787 Lactobacillus acidipiscis st rain DSM 15353 Scaffold2, whole genome shotgun sequence .
tacatggtggttcgtgaccatcccacctaaaaaaactaggaggtt

SEQ ID NO: 91256 - DNA, 45 bp, Carnobacterium sp.
  misc_feature (1)..(45): CP010796.1/2093552-2093596 Carnobacterium sp. CP1, comp lete genome.
gaatatgtggttcgcaaccatcccacataaaaaaactaggaggat

SEQ ID NO: 91257 - DNA, 48 bp, Lactobacillus oeni
  misc_feature (1)..(48): AZEH01000020.1/72536-72489 Lactobacillus oeni DSM 19972 NODE_43, whole genome shotgun sequence.
aaaatggtggttcgcaaacatcccaccgtaataaaaaactagaaagaa

SEQ ID NO: 91258 - DNA, 45 bp, Bacillus subtilis; identical to SEQ ID NO: 90785
  misc_feature (1)..(45): AL009126.3/1439274-1439318 Bacillus subtilis subsp. sub tilis str. 168 complete genome.

SEQ ID NO: 91259 - DNA, 45 bp, Bacillus sp.; identical to SEQ ID NO: 90858
  misc_feature (1)..(45): AAXV01000007.1/14855-14899 Bacillus sp. B14905 11011590 07471, whole genome shotgun sequence.

SEQ ID NO: 91260 - DNA, 45 bp, Streptococcus agalactiae; identical to SEQ ID NO: 90998
  misc_feature (1)..(45): AL766846.1/39196-39152 Streptococcus agalactiae NEM316 complete genome, segment 4

SEQ ID NO: 91261 - DNA, 46 bp, Leuconostoc mesenteroides; identical to SEQ ID NO: 91104
  misc_feature (1)..(46): CP000414.1/1235047-1235002 Leuconostoc mesenteroides su bsp. mesenteroides ATCC 8293, complete genome.

SEQ ID NO: 91262 - DNA, 45 bp, Clostridium perfringens; identical to SEQ ID NO: 90896
  misc_feature (1)..(45): ABDX01000003.1/184506-184550 Clostridium perfringens CP E str. F4969 gcontig_1106202596996, whole genome shotgu n sequence.

SEQ ID NO: 91263 - DNA, 45 bp, Bacillus thuringiensis; identical to SEQ ID NO: 90778
  misc_feature (1)..(45): AE017355.1/1568663-1568707 Bacillus thuringiensis serov ar konkukian str. 97-27, complete genome.

SEQ ID NO: 91264 - DNA, 45 bp, Dorea longicatena
  misc_feature (1)..(45): AAXB02000001.1/142227-142271 Dorea longicatena DSM 1381 4 D_longicatena-MSIQ_Cont368, whole genome shotgun sequ ence.
cttgaactggttcgaaaacctcccagtataaaaaactaggcaaag

SEQ ID NO: 91265 - DNA, 45 bp, Neisseria meningitidis; identical to SEQ ID NO: 90913
  misc_feature (1)..(45): AM421808.1/1884627-1884671 Neisseria meningitidis serog roup C FAM18 complete genome

SEQ ID NO: 91266 - DNA, 45 bp, Lactobacillus sakei; identical to SEQ ID NO: 90824
  misc_feature (1)..(45): CR936503.1/1598027-1597983 Lactobacillus sakei strain 2 3K complete genome.

SEQ ID NO: 91267 - DNA, 48 bp, Listeria innocua; identical to SEQ ID NO: 91145
  misc_feature (1)..(48): AL596166.1/191853-191900 Listeria innocua Clip11262 com plete genome, segment 4/12

SEQ ID NO: 91268 - DNA, 45 bp, Bacillus licheniformis; identical to SEQ ID NO: 90786
  misc_feature (1)..(45): AE017333.1/1501710-1501754 Bacillus licheniformis DSM 1 3, complete genome.

SEQ ID NO: 91269 - DNA, 47 bp, Staphylococcus epidermidis; identical to SEQ ID NO: 90922
  misc_feature (1)..(47): CP000029.1/370924-370878 Staphylococcus epidermidis RP6 2A, complete genome.

SEQ ID NO: 91270 - DNA, 45 bp, Ruminococcus gnavus; identical to SEQ ID NO: 91045
  misc_feature (1)..(45): AAYG02000018.1/120313-120357 Ruminococcus gnavus ATCC 2 9149 R_gnavus-1.0.1_Cont103, whole genome shotgun seque nce.

SEQ ID NO: 91271 - DNA, 45 bp, Mannheimia haemolytica; identical to SEQ ID NO: 90883
  misc_feature (1)..(45): AASA01000045.1/1296-1252 Mannheimia haemolytica PHL213 Ctg156, whole genome shotgun sequence.

SEQ ID NO: 91272 - DNA, 47 bp, Staphylococcus saprophyticus; identical to SEQ ID NO: 91038
  misc_feature (1)..(47): AP008934.1/2076124-2076170 Staphylococcus saprophyticus subsp. saprophyticus ATCC 15305 DNA, complete genome.

SEQ ID NO: 91273 - DNA, 45 bp, Paenibacillus larvae; identical to SEQ ID NO: 90829
  misc_feature (1)..(45): AARF01000079.1/5363-5319 Paenibacillus larvae subsp. la rvae BRL-230010 Ctg01.80, whole genome shotgun sequence .

SEQ ID NO: 91274 - DNA, 45 bp, Bacillus sp.; identical to SEQ ID NO: 90971
  misc_feature (1)..(45): ABCF01000001.1/139145-139189 Bacillus sp. SG-1 11015010 00768, whole genome shotgun sequence.

SEQ ID NO: 91275 - DNA, 45 bp, Mannheimia succiniciproducens; identical to SEQ ID NO: 91088
  misc_feature (1)..(45): AE016827.1/1848390-1848434 Mannheimia succiniciproducen s MBEL55E, complete genome.

SEQ ID NO: 91276 - DNA, 45 bp, Ruminococcus obeum; identical to SEQ ID NO: 90886
  misc_feature (1)..(45): AAVO02000002.1/275638-275594 Ruminococcus obeum ATCC 29 174 R_obeum-MSIQ_Cont105, whole genome shotgun sequence .

SEQ ID NO: 91277 - DNA, 48 bp, Listeria monocytogenes
  misc_feature (1)..(48): AARM02000383.1/1741-1694 Listeria monocytogenes FSL J2- 003 cont3.383, whole genome shotgun sequence.
ccacacgtggttcattcataccatcccacgtaaaaaaactaaggagga

SEQ ID NO: 91278 - DNA, 45 bp, Enterococcus faecium; identical to SEQ ID NO: 91111
  misc_feature (1)..(45): AAAK03000099.1/1629-1673 Enterococcus faecium DO ctg550 , whole genome shotgun sequence.

SEQ ID NO: 91279 - DNA, 45 bp, Oceanobacillus iheyensis; identical to SEQ ID NO: 91048
  misc_feature (1)..(45): BA000028.3/467676-467632 Oceanobacillus iheyensis HTE83 1 DNA, complete genome.

SEQ ID NO: 91280 - DNA, 45 bp, Neisseria meningitidis; identical to SEQ ID NO: 91242
  misc_feature (1)..(45): AE002098.2/329220-329176 Neisseria meningitidis MC58, c omplete genome.

SEQ ID NO: 91281 - DNA, 45 bp, Lactobacillus salivarius; identical to SEQ ID NO: 90887
  misc_feature (1)..(45): CP000233.1/1599957-1600001 Lactobacillus salivarius UCC 118, complete genome.

SEQ ID NO: 91282 - DNA, 45 bp, Actinobacillus succinogenes; identical to SEQ ID NO: 90937
  misc_feature (1)..(45): CP000746.1/2223340-2223384 Actinobacillus succinogenes 130Z, complete genome.

SEQ ID NO: 91283 - DNA, 44 bp, Bacillus halodurans; identical to SEQ ID NO: 91097
  misc_feature (1)..(44): BA000004.3/2373342-2373299 Bacillus halodurans C-125 DN A, complete genome.

SEQ ID NO: 91284 - DNA, 44 bp, Bacillus thuringiensis; identical to SEQ ID NO: 90871
  misc_feature (1)..(44): AE017355.1/1321429-1321472 Bacillus thuringiensis serov ar konkukian str. 97-27, complete genome.

SEQ ID NO: 91285 - DNA, 46 bp, Lactobacillus plantarum; identical to SEQ ID NO: 91113
  misc_feature (1)..(46): X99978.2/10136-10181 Lactobacillus plantarum subsp. pla ntarum citrulline biosynthetic gene cluster (carAB oper on and argC, J, B, D, F-ccl operon) and usg and dsg par tial sequences

SEQ ID NO: 91286 - DNA, 44 bp, Bacillus clausii; identical to SEQ ID NO: 91134
  misc_feature (1)..(44): AP006627.1/2249570-2249527 Bacillus clausii KSM-K16 DNA , complete genome.

SEQ ID NO: 91287 - DNA, 47 bp, Staphylococcus haemolyticus; identical to SEQ ID NO: 90773
  misc_feature (1)..(47): AP006716.1/2221258-2221304 Staphylococcus haemolyticus JCSC1435 DNA, complete genome.

SEQ ID NO: 91288 - DNA, 45 bp, Lactobacillus plantarum; identical to SEQ ID NO: 91056
  misc_feature (1)..(45): AL935263.2/2519559-2519515 Lactobacillus plantarum WCFS 1 complete genome

SEQ ID NO: 91289 - DNA, 45 bp, Dichelobacter nodosus; identical to SEQ ID NO: 91168
  misc_feature (1)..(45): CP000513.1/859945-859989 Dichelobacter nodosus VCS1703A , complete genome.

SEQ ID NO: 91290 - DNA, 44 bp, Bacillus cereus; identical to SEQ ID NO: 90877
  misc_feature (1)..(44): CP000764.1/1180651-1180694 Bacillus cereus subsp. cytot oxis NVH 391-98, complete genome.

SEQ ID NO: 91291 - DNA, 43 bp, Bacillus sp.; identical to SEQ ID NO: 90875
  misc_feature (1)..(43): AAOX01000006.1/21305-21347 Bacillus sp. NRRL B-14911 10 99999053146, whole genome shotgun sequence.

SEQ ID NO: 91292 - DNA, 66 bp, Pasteurella multocida; identical to SEQ ID NO: 90765
  misc_feature (1)..(66): AE004439.1/209165-209100 Pasteurella multocida subsp. m ultocida str. Pm70, complete genome.

SEQ ID NO: 91293 - DNA, 97 bp, Streptococcus sp.
  misc_feature (1)..(97): AZMH01000358.1/5861-5765 Streptococcus sp. DORA_10 Q617 _SPSC00358, whole genome shotgun sequence.
tgtgctatactagtaaggttgattcaagcaacccttggtgcttagcttctttcaccaagcatattatacgcgggaaaccgccaaaggagaaaagatg

SEQ ID NO: 91294 - DNA, 113 bp, Trichuris trichiura,
  misc_feature (1)..(113): CBXK010000731.1/16622-16734 Trichuris trichiura, WGS pr oject CBXK01000000 data, contig: TTRE_731
tgtgctatacttttaagcgttgtgcaaacaacccttgacgcttagttccctttcgtcaagcatattatagacgtgaagagttgtcgctctttaacgttaaaggagaaaatttt

SEQ ID NO: 91295 - DNA, 120 bp, Streptococcus dysgalactiae
  misc_feature (1)..(120): CM001076.1/692240-692359 Streptococcus dysgalactiae sub sp. dysgalactiae ATCC 27957 chromosome, whole genome sh otgun sequence.
tgtggtacaatgtaaccgttgtttagcaacccttggtgcttagttccctttcaccaagcatattagacacgtaaagagttaggtttgactaactgctttgacgttaaaggagaaaaaatg

SEQ ID NO: 91296 - DNA, 114 bp, Streptococcus cuniculi
  misc_feature (1)..(114): MSJM01000013.1/11472-11359 Streptococcus cuniculi strai n NED12-00049-6B 13, whole genome shotgun sequence.
tcccctatttttcgttcggttttttcacggcttcacatctgcacaacccttggcacttccttcctttagccaagcatattacacgcggtttagccgccaaaggagagttatatg

SEQ ID NO: 91297 - DNA, 97 bp, Lactococcus piscium
  misc_feature (1)..(97): LN774769.1/1930552-1930456 Lactococcus piscium MKFS47 g enome assembly, chromosome: I
tttgctatactagatattgcttgtaatgagcccttcgtactttctcactttgacggagcatattaaaatcgcgggagcgataaaggagattcatttg

SEQ ID NO: 91298 - DNA, 107 bp, Lactococcus lactis
  misc_feature (1)..(107): ATBB01000646.1/1429-1323 Lactococcus lactis subsp. crem oris TIFN6 scaffold6.1_8, whole genome shotgun sequence .
tctgttaaaataaaaacgttgctcaattgcgagtcaacccttgagccttcttccctttgctcaagcatattaaacgcgacattttgtcgccaaaggagagtattttg

SEQ ID NO: 91299 - DNA, 137 bp, Streptococcus henryi
  misc_feature (1)..(137): FMXP01000013.1/3540-3404 Streptococcus henryi strain A- 4 genome assembly, contig: IE83DRAFT_scaffold00012.12
tttgctataataggaaagttgtttcgagcaacccttggtacttgtattcttgagaggatgaaaaacttttaaggataaattcccctttgaccaagcatattataggtgataacaatcactaaagaggagtctaaatg

SEQ ID NO: 91300 - DNA, 107 bp, Streptococcus sp.
  misc_feature (1)..(107): CM002128.1/378252-378358 Streptococcus sp. HSISM1 chrom osome, whole genome shotgun sequence.
tatgctatacttgaaaggttgaagaaatcaaaccttcaacccttggtgcttaagatcctttcgccaagcatattagacgcgggaaaaccgctaaaggagaataaatg

SEQ ID NO: 91301 - DNA, 224 bp, Streptococcus sp.
  misc_feature (1)..(224): CP014699.1/1326974-1326751 Streptococcus sp. TA 26, com plete genome.
tatgatacaataagcaagttgtttatgcaacccttggtgcttagcttctttcaccaagcatattagaagcgtgaaataaagtggtggcattctatttagacagtgccgacttcattgtttttgctggctagtcttctatgacagtcaaaacggtgatttctgaacaggcttgtctgacagaataccaaggctcttttattttgacgctaaaggagaattaaatg

SEQ ID NO: 91302 - DNA, 98 bp, Mycobacterium abscessus
  misc_feature (1)..(98): FSGV01000016.1/46069-45972 Mycobacterium abscessus subs p. abscessus strain 57 genome assembly, contig: ERS2448 15SCcontig000016
tgtgctatacttgtaaagttgacttgctcaacccttggtgcttagcttctttcaccaagcatattacacgtggcaaagccgctaaaggagaaaatatg

SEQ ID NO: 91303 - DNA, 112 bp, Streptococcus lutetiensis
  misc_feature (1)..(112): CP003025.1/629989-630100 Streptococcus lutetiensis 033, complete genome.
tgtgctatacttttaagcgttgtcttgacgacccttggtgcttagttccctttcaccaagcatattacaaacgttggaagctagcctttcaaacgtcaaaggagaaaaaatg

SEQ ID NO: 91304 - DNA, 112 bp, Streptococcus sp.
  misc_feature (1)..(112): CM002131.1/602348-602459 Streptococcus sp. HSISB1 chrom osome, whole genome shotgun sequence.
tgtgctatactttaaagcgttgtctctacaacccttggcgctttttccctttcgccaagcatattagaaacgtagaaggggctaactttctaacgttaaaggagaagaattt

SEQ ID NO: 91305 - DNA, 98 bp, Peptoniphilus lacrimalis
  misc_feature (1)..(98): JRNL01000008.1/35095-35192 Peptoniphilus lacrimalis DNF 00528 contig008, whole genome shotgun sequence.
tgtgctatactaacaaagttgacttgttcaacccttggtgcttaacttctttcaccaagcatattaaacgcggtggagccgctaaaggagaaaacatg

SEQ ID NO: 91306 - DNA, 106 bp, Lactococcus lactis
  misc_feature (1)..(106): AE005176.1/802553-802658 Lactococcus lactis subsp. lact is Il1403, complete genome.
tctgctaaaataaaaacgttgctcaatagtgagttaacccttgagccttcatccctttgctcaagcatattataggcgaattttgtcgccaaaggagaaccttttg

SEQ ID NO: 91307 - DNA, 97 bp, Streptococcus pneumoniae
  misc_feature (1)..(97): ALBB01000005.1/454112-454208 Streptococcus pneumoniae 2 070335 gspj15.contig.4, whole genome shotgun sequence.
tgtgctatactagtaaggttgaatgaatcaacccttggtgcttagcttctttcaccaagcatattacacgcggataaccgccaaaggagaaaagatg

SEQ ID NO: 91308 - DNA, 106 bp, Lactococcus garvieae
  misc_feature (1)..(106): AP009333.1/564603-564708 Lactococcus garvieae Lg2 DNA, complete genome.
attgatataatatacaagttgcaatttatcagcaatcctcaggacttttaacctttgcctgagcatattacaggcggtattcagccgctaaaggagaaaaaaattg

SEQ ID NO: 91309 - DNA, 99 bp, Lactobacillus casei
  misc_feature (1)..(99): CP000423.1/2043279-2043181 Lactobacillus casei ATCC 334 , complete genome.
acaccaaaactgaaaacggaaggcaatccttccacgacgatacttactttcctttgatcgtcgttactactggcatagccacaaaggagaacaaacatg

SEQ ID NO: 91310 - DNA, 115 bp, Streptococcus phocae
  misc_feature (1)..(115): LHQM01000030.1/221-335 Streptococcus phocae strain ATCC 51973 contig_33, whole genome shotgun sequence.
tatgttacaatagaatagttgtttggcaacccttgatgcttagttccctttcatcaagcatattacacacgtagcaaggttaagtccttgttttgacgttaaaggagaaaacatg

SEQ ID NO: 91311 - DNA, 100 bp, Lactococcus raffinolactis
  misc_feature (1)..(100): HE999887.1/4737-4836 Lactococcus raffinolactis 4877 gen omic scaffold, Scaffold1608
tgaaacaagccttatgtgcttaattaattcaagccctctgtactttctcactttgacagagcgtatcacactcgcaaatgcgataaaggagacttttatg

SEQ ID NO: 91312 - DNA, 110 bp, Streptococcus iniae
  misc_feature (1)..(110): AOCT02000021.1/49-158 Streptococcus iniae IUSA1 contig0 21, whole genome shotgun sequence.
tatgctacaataagactgttgctcagcaacccttggtgcttagttccctttcaccaagcatattagacacgtcgttttgagttaaaaacagacgtcaaaggagaaaaatg

SEQ ID NO: 91313 - DNA, 100 bp, Streptococcus sobrinus
  misc_feature (1)..(100): KI259672.1/32796-32895 Streptococcus sobrinus W1703 gen omic scaffold Scaffold17, whole genome shotgun sequence .
tatgctatactagaacagctggtttccagcccttggtgcttagctcttttcaccaagcatattttaagcggtcgccccgctaaaggagaatcatcacatg

SEQ ID NO: 91314 - DNA, 110 bp, Streptococcus intermedius
  misc_feature (1)..(110): CP003857.1/745574-745683 Streptococcus intermedius B196 , complete genome.
tgtgctatacttgaaaggctgtattaatgttatcaatacagtccttggcgcttagtttcctttcgccaagcatattatacgcggttatagccgccaaaggagaaaaaatg

SEQ ID NO: 91315 - DNA, 97 bp, Streptococcus mutans
  misc_feature (1)..(97): AE014133.2/1474191-1474095 Streptococcus mutans UA159, complete genome.
tatgctatactggataagttgtctgacaacccttggtgcttatttccctttcaccaagcatattacaaacggtagatccgttaaaggagaaacaatg

SEQ ID NO: 91316 - DNA, 131 bp, Streptococcus sp.
  misc_feature (1)..(131): AFQU01000001.1/1873926-1874056 Streptococcus sp. oral t axon 056 str. F0418 Noncontiguous_Finished_Chromosome, whole genome shotgun sequence.
tgtgctatactagatgagttgtcaaacgagcaggctagatcatctttgcctcatgttgcgcaacccttggtgcttagcttctttcgccaagcatattacacgcggtaaaaccgccaaaggagaattttatg

SEQ ID NO: 91317 - DNA, 97 bp, Streptococcus sp.
  misc_feature (1)..(97): MOWR01000002.1/248662-248758 Streptococcus sp. 'caviae' strain Cavy grass 6 NODE_2_length_346008_cov_216.281, whole genome shotgun sequence.
tatgctatactgaataagttgctcagcaacccttggtgcttacttccctttcaccaagcatattataaacgggacaaccgtcaaaggagaaataatg

SEQ ID NO: 91318 - DNA, 95 bp, Streptococcus sp.
  misc_feature (1)..(95): CTEN01000004.1/229855-229761 Streptococcus sp. FF10 gen ome assembly, contig: CONTIG000004
tctttgagtattaaaaagtaggaacaacccttggcgcttcttccctttagccaagcatattacaagcggtttatccgccaaaggagaattatatg

SEQ ID NO: 91319 - DNA, 98 bp, Streptococcus ratti
  misc_feature (1)..(98): AOCD01000041.1/13825-13922 Streptococcus ratti FA-1 = D SM 20564 Contig074, whole genome shotgun sequence.
tatgctatactgaataagctgcgctcagcagcccttggtgcttatgtcctttcaccaagcatattacaaacggtagagccgtcaaaggagaactgatg

SEQ ID NO: 91320 - DNA, 98 bp, Streptococcus agalactiae
  misc_feature (1)..(98): ANQC01000134.1/19644-19547 Streptococcus agalactiae LMG 14747 ctg7180000010258, whole genome shotgun sequence.
tatgatacactagaaaagctgttttagcaacccttggcgcttctttcctttcgccaagcatattacaaacggtacaaccgttaaaggagatctttatg

SEQ ID NO: 91321 - DNA, 143 bp, Streptococcus sp.
  misc_feature (1)..(143): KQ969157.1/232238-232380 Streptococcus sp. DD10 genomic scaffold scaffold00001, whole genome shotgun sequence.
tgtgctatactagtaaggttgaatggcttaacttttctaaatagttttactatttagaaattctttaactcaatcaacccttggtgcttagcttctttcaccaagcatattacatgcggaaaaccgctaaaggagaaaacatg

SEQ ID NO: 91322 - DNA, 114 bp, Streptococcus uberis
  misc_feature (1)..(114): JRQN01000019.1/23931-23818 Streptococcus uberis strain CAIM 1894 contig_019, whole genome shotgun sequence.
tatgctataataatggagttgcaaagcaaccttggtgcttaagttcctttcaccaagcatattatacgcgcactgaagtatcaactttatgtgacgccaaaggagaaaataatg

SEQ ID NO: 91323 - DNA, 111 bp, Streptococcus sp.
  misc_feature (1)..(111): KQ969393.1/469908-470018 Streptococcus sp. DD11 genomic scaffold scaffold00002, whole genome shotgun sequence.
tatgctatacttgaaatgctgtgtaatttgaatccatgcagcccttgacgcttagcttctttcgtcaagcatagtagaagcggtttggccgctaaaggagaatctcttatg

SEQ ID NO: 91324 - DNA, 98 bp, Streptococcus infantis
  misc_feature (1)..(98): AEDY01000119.1/6069-6166 Streptococcus infantis SK1302 contig73, whole genome shotgun sequence.
tgtgctatacttgaaaggttgacttgctcaacccttggtgcttagcttctttcaccaagcatattttacgcgggttaatcgctaaaggagaaaacatg

SEQ ID NO: 91325 - DNA, 119 bp, Streptococcus equi
  misc_feature (1)..(119): FM204884.1/1311057-1310939 Streptococcus equi subsp. zo oepidemicus H70, complete genome
tatggtacaatgtaggcgttgcttagcaacccttggtgcttagttccctttcaccaagcatattacaaacgtggcggagctgtttatgctctagtctgacgtcaaaggagaaacacatg

SEQ ID NO: 91326 - DNA, 99 bp, Streptococcus infantis
  misc_feature (1)..(99): AFUT01000001.1/415821-415919 Streptococcus infantis SK9 70 ctg1129914002308, whole genome shotgun sequence.
tgtgctataattgtaaagttgatttttatcaacccttggtgcttagcttctttcaccaagcatattagatgcgggatagccgctaaaggagaaaacatg

SEQ ID NO: 91327 - DNA, 114 bp, Streptococcus urinalis
  misc_feature (1)..(114): AEUZ02000001.1/848814-848927 Streptococcus urinalis 228 5-97 final_molecule, whole genome shotgun sequence.
tgtggtataatgtaaactgtcgtaaaacgacccttggtgcttagttccctttcaccaagcatattagaaacgtaaatgatccttagattatttggcgttaaaggagaaaaaatg

SEQ ID NO: 91328 - DNA, 99 bp, Lactobacillus ginsenosidimutans
  misc_feature (1)..(99): CP012034.1/1198175-1198077 Lactobacillus ginsenosidimut ans strain EMML 3041, complete genome.
ccaagtagaatgtactgaggtgcaaaatgcatcactgcgatacttatttcctttgatcgtagttatttagtggcgattgccataaaggagctaataatg

SEQ ID NO: 91329 - DNA, 135 bp, Streptococcus gordonii
  misc_feature (1)..(135): CP000725.1/1440073-1439939 Streptococcus gordonii str. Challis substr. CH1, complete genome.
tatgctatactagttgagttgccgagtttgtaagggaaaggcatgtctttcttcttattcctagcaacccttggctcttagcttctttcgccaagcatattacacgcggtaaaaccgccaaaggagaatttgatg

SEQ ID NO: 91330 - DNA, 115 bp, Streptococcus parauberis
  misc_feature (1)..(115): AEUT02000001.1/217880-217994 Streptococcus parauberis N CFD 2020 Noncontiguous_Finished_Chromosome chromosome, whole genome shotgun sequence.
tatgctataataattgagttgccgtgcaacccttggtgcttaagttcctttcaccaagcatattatacgcgagataaagaagtatctttattttacgccaaaggagaatcttatg

SEQ ID NO: 91331 - DNA, 103 bp, Streptococcus suis
  misc_feature (1)..(103): CP000407.1/1534158-1534056 Streptococcus suis 05ZYH33, complete genome.
tatgctatactaatcaacgttgttgataaattcaatgacccttggggcttgctcactttacccaagcatattttaagctttttcgctaaaggagaattttatg

SEQ ID NO: 91332 - DNA, 113 bp, Streptococcus gallolyticus
  misc_feature (1)..(113): CP013688.1/1209373-1209261 Streptococcus gallolyticus s train ICDDRB-NRC-S1, complete genome.
tgtgctatacttttaagcgttgtgaaaacaacccttgacgcttagttccctttcgtcaagcatattagagacgtgaagaattgtcgctctttaacgttaaaggagaaaaaatt

SEQ ID NO: 91333 - DNA, 114 bp, Streptococcus pseudoporcinus
  misc_feature (1)..(114): AEUY02000003.1/47857-47970 Streptococcus pseudoporcinus LQ 940-04 Contig1216510748, whole genome shotgun seque nce.
tgtggtataatgaaaaggttgccatgcaacccttggtgcttagttccctttcgccaagcatattacaaatgttattagcaaagattcctgatagcattaaaggagaaaatgatg

SEQ ID NO: 91334 - DNA, 102 bp, Streptococcus ictaluri
  misc_feature (1)..(102): AEUX02000006.1/511000-510899 Streptococcus ictaluri 707 -05 Contig1217055107, whole genome shotgun sequence.
tgtgctagaatgaagaagttgcctagcaatccttggtgcttagttcctttcaccaagcatattatacgcgtaaaaaatgacaccaaaggagagataccaatg

SEQ ID NO: 91335 - DNA, 97 bp, Streptococcus sp.
  misc_feature (1)..(97): MKIR01000001.1/290038-289942 Streptococcus sp. DF1 DF1_ Contig1, whole genome shotgun sequence.
tatggtaagatacttattggtctatgaccccttgccacttattcacctttgggcaagcatattacactcgcaaaaagcgataaaggagaaatatatg

SEQ ID NO: 91336 - DNA, 117 bp, Streptococcus uberis
  misc_feature (1)..(117): AM946015.1/624185-624301 Streptococcus uberis 0140J com plete genome
tatgctacaataataaagttgcttagcaacccttggtgcttagttccctttcgccaagcatattacaaacggcatcaatcattttcaattgatgtatcgttaaaggagaaaaaaatg

SEQ ID NO: 91337 - DNA, 101 bp, Streptococcus sp.
  misc_feature (1)..(101): KQ969506.1/799880-799780 Streptococcus sp. DD13 genomic scaffold scaffold00001, whole genome shotgun sequence.
tctgctatacttaacaacgttgcatctgcaacccttgacccttcccttctttggtcaagcatattagaagcgaaacaatcgctaaaggagatttttacatg

SEQ ID NO: 91338 - DNA, 114 bp, Streptococcus agalactiae
  misc_feature (1)..(114): AE009948.1/847184-847297 Streptococcus agalactiae 2603V /R, complete genome.
tgtgatatacttagtaagttgttttacacaacccttgatgcttagttccctttcatcaagcatattacaaacgttagaagtgttaactatctaaacgttaaaggagaaattatg

SEQ ID NO: 91339 - DNA, 125 bp, Lactobacillus rhamnosus
  misc_feature (1)..(125): AEYM01000577.1/1324-1200 Lactobacillus rhamnosus MTCC 5 462 contig1517, whole genome shotgun sequence.
aaaagtaaactgaaaacattgtaagaactattaactgaatcggaaccgccccgcgcgcttccacgacgatacttatttcctttgatcgtcgttattactggcaaagccacaaaggagaaacaata

SEQ ID NO: 91340 - DNA, 116 bp, Streptococcus pyogenes
  misc_feature (1)..(116): AE004092.2/610434-610549 Streptococcus pyogenes M1 GAS, complete genome.
tatggtacaatgtaaccgttgctttgcaacccttggtgcttagttccctttcaccaagcatattagaaacgtagatagcttttgagagttatccagacgttaaaggagaaaaaatg

SEQ ID NO: 91341 - DNA, 120 bp, Streptococcus dysgalactiae
  misc_feature (1)..(120): AP011114.1/708700-708819 Streptococcus dysgalactiae sub sp. equisimilis RE378 DNA, complete genome.
tgtggtacaatgtaaccgttgcttagcaacccttggtgcttagttccctttcaccaagcatattagacacgtaaagagttaggtttgactaactgctttgacgttaaaggagaaaaaatg

SEQ ID NO: 91342 - DNA, 95 bp, Streptococcus sinensis
  misc_feature (1)..(95): JPEN01000022.1/6252-6346 Streptococcus sinensis strain HKU4 scaffold52, whole genome shotgun sequence.
catttcttactgttagtgatggatacagcccttgacgcttagcttctttcgtcaagcatattttaagcgggaaaaccgctaaaggagaaaaaatg

SEQ ID NO: 91343 - DNA, 97 bp, Streptococcus pneumoniae; identical to SEQ ID NO: 91307
  misc_feature (1)..(97): AE007317.1/904161-904257 Streptococcus pneumoniae R6, c omplete genome.

SEQ ID NO: 91344 - DNA, 101 bp, Pilibacter termitis
  misc_feature (1)..(101): FUXI01000005.1/90928-91028 Pilibacter termitis strain A TCC BAA-1030 genome assembly, contig: EI49DRAFT_scaffol d00005.5
tccgttatactatttctcgtggttcaatccaccctttgacacttcctcactttggtcaaagcatattacactcgggtttcgccgataaaggagagtttatt

SEQ ID NO: 91345 - DNA, 98 bp, Streptococcus macacae
  misc_feature (1)..(98): AEUW02000001.1/978484-978387 Streptococcus macacae NCTC 11558 final_molecule, whole genome shotgun sequence.
tatgctatactagatgagttgctttagcagcccttgacacttcctgcctttggtcaagcatattataagcggttaagccgctaaaggagaaaagaatg

SEQ ID NO: 91346 - DNA, 97 bp, Streptococcus pneumoniae
  misc_feature (1)..(97): ABAA01000002.1/167005-167101 Streptococcus pneumoniae S P6-BS73 ctg865, whole genome shotgun sequence.
tgtgctatactagtagggttgaataaagcaacccttggtgtttagcttctttcaccaagcatattacacgcgggcaaccgccaaaggagaaaagatg

SEQ ID NO: 91347 - DNA, 137 bp, Streptococcus sanguinis
  misc_feature (1)..(137): CP000387.1/1493033-1492897 Streptococcus sanguinis SK36 , complete genome.
tatgctatactagttgggttgccaaatctgtgggggaatcaactaatgatgctcctctcatgtgatgcaacccttggcgcttagcttctttcgccaagcatattacacgcggtaaagccgctaaaggagaaaacatg

SEQ ID NO: 91348 - DNA, 97 bp, Streptococcus pneumoniae; identical to SEQ ID NO: 91307
  misc_feature (1)..(97): ABAC01000009.1/939-843 Streptococcus pneumoniae SP11-BS 70 ctg363_SP11-v3, whole genome shotgun sequence.

SEQ ID NO: 91349 - DNA, 107 bp, Lactococcus lactis; identical to SEQ ID NO: 91298
  misc_feature (1)..(107): CP000425.1/786495-786601 Lactococcus lactis subsp. crem oris SK11, complete genome.

SEQ ID NO: 91350 - DNA, 114 bp, Streptococcus agalactiae; identical to SEQ ID NO: 91338
  misc_feature (1)..(114): CP000114.1/925396-925509 Streptococcus agalactiae A909, complete genome.

SEQ ID NO: 91351 - DNA, 97 bp, Streptococcus pneumoniae; identical to SEQ ID NO: 91307
  misc_feature (1)..(97): CP001033.1/966317-966413 Streptococcus pneumoniae CGSP1 4, complete genome.

SEQ ID NO: 91352 - DNA, 103 bp, Streptococcus suis; identical to SEQ ID NO: 91331
  misc_feature (1)..(103): CP000407.1/1534158-1534056 Streptococcus suis 05ZYH33, complete genome.

SEQ ID NO: 91353 - DNA, 116 bp, Streptococcus pyogenes; identical to SEQ ID NO: 91340
  misc_feature (1)..(116): CP000003.1/587341-587456 Streptococcus pyogenes MGAS103 94, complete genome.

SEQ ID NO: 91354 - DNA, 116 bp, Streptococcus pyogenes; identical to SEQ ID NO: 91340
  misc_feature (1)..(116): CP000260.1/602445-602560 Streptococcus pyogenes MGAS102 70, complete genome.

SEQ ID NO: 91355 - DNA, 97 bp, Streptococcus mutans; identical to SEQ ID NO: 91315
  misc_feature (1)..(97): AE014133.2/1474191-1474095 Streptococcus mutans UA159, complete genome.

SEQ ID NO: 91356 - DNA, 106 bp, Lactococcus lactis; identical to SEQ ID NO: 91306
  misc_feature (1)..(106): AM406671.1/1746216-1746111 Lactococcus lactis subsp. cr emoris MG1363, complete genome

SEQ ID NO: 91357 - DNA, 137 bp, Streptococcus sanguinis; identical to SEQ ID NO: 91347
  misc_feature (1)..(137): CP000387.1/1493033-1492897 Streptococcus sanguinis SK36 , complete genome.

SEQ ID NO: 91358 - DNA, 99 bp, Lactobacillus casei; identical to SEQ ID NO: 91309
  misc_feature (1)..(99): CP000423.1/2043279-2043181 Lactobacillus casei ATCC 334 , complete genome.

SEQ ID NO: 91359 - DNA, 97 bp, Streptococcus pneumoniae
  misc_feature (1)..(97): FQ312029.1/941296-941392 Streptococcus pneumoniae INV20 0 genome.
tgtgctatactagtaaggttgaatgaatcaacccttggtgcttagcttctttcaccaagcatattacacgcgggcaaccgccaaaggagaaaagatg

SEQ ID NO: 91360 - DNA, 114 bp, Streptococcus agalactiae
  misc_feature (1)..(114): AAJR01000052.1/12937-13050 Streptococcus agalactiae COH 1 s_agalactiae_coh1_6, whole genome shotgun sequence.
tgtgatatacttagtaagttgttttacacaacccttgatgcttagttccctttcatcaagcatattacaaacgttagaagtgttaactgtctaaacgttaaaggagaaattatg

SEQ ID NO: 91361 - DNA, 97 bp, Streptococcus pneumoniae
  misc_feature (1)..(97): FQ312042.1/2132413-2132509 Streptococcus pneumoniae SPN 033038 draft genome.
tgtgctatactagtagggttgaataaagcaacccttggtgcttagcttctttcaccaagcatattacacgcgggcaaccgccaaaggagaaaagatg

SEQ ID NO: 91362 - DNA, 101 bp, Faecalibacterium prausnitzii
  misc_feature (1)..(101): GG697151.2/327995-327895 Faecalibacterium prausnitzii A 2-165 genomic scaffold Scfld2, whole genome shotgun seq uence.
gagcaacttaggattttaggctccccggcgtgtctcgaaccatgccgggccaaacccatagggctggcggtccctgtgcggtcaaaattcatccgccggag

SEQ ID NO: 91363 - DNA, 104 bp, Faecalibacterium prausnitzii
  misc_feature (1)..(104): CYYL01000008.1/39071-39174 Faecalibacterium prausnitzii strain 2789STDY5608869 genome assembly, contig: SCcont ig000008
gagcaacttaggattttaggctcccccgtgcggactcgaaaccgcgccgggctaaacccacaggagctggcggttcctgtgcggtcaaaatcaaaccgctggag

SEQ ID NO: 91364 - DNA, 103 bp, Faecalibacterium sp.
  misc_feature (1)..(103): FR889011.1/4425-4527 Faecalibacterium sp. CAG:82 genomi c scaffold, scf61
gagcaacttaggattttaggctccccggtgtgtctcgaaccacgccgggccaaacccgcaggaactggcggtccctgcgcggtcaaaattcattccgccggag

SEQ ID NO: 91365 - DNA, 102 bp, Faecalibacterium prausnitzii
  misc_feature (1)..(102): FP929045.1/1765647-1765748 Faecalibacterium prausnitzii L2/6 draft genome.
gagcaacttaggattttaggctccccggcgtgtctcgaaccatgccgggccaaacccacgggggctggcggtccccgcgcggtcaaaatcaaaccgctggag

SEQ ID NO: 91366 - DNA, 103 bp, Faecalibacterium sp.; identical to SEQ ID NO: 91364
  misc_feature (1)..(103): MNSO01000038.1/2228-2126 Faecalibacterium sp. CAG:82-re lated_59_9 Ley3_66761_scaffold_31584, whole genome shot gun sequence.

SEQ ID NO: 91367 - DNA, 101 bp, Faecalibacterium cf.
  misc_feature (1)..(101): AECU01000177.1/7590-7690 Faecalibacterium cf. prausnitz ii KLE1255 F_prausnitziiKLE1255.K95-1.0_Cont551.2, whol e genome shotgun sequence.
gagcaacttaggattttaggctccccggcgtgtctcgaaccatgccgggccaaacccacaggggctggcggccctgtgcggtcaaaatcatcccgctggag

SEQ ID NO: 91368 - DNA, 101 bp, Subdoligranulum sp.
  misc_feature (1)..(101): MNTR01000025.1/7338-7238 Subdoligranulum sp. 60_17 Ley3 _66761_scaffold_782, whole genome shotgun sequence.
gagcaacttaggattttaggctccgctgccggctgctggtcggcagcgcaaaccccgcaaggctggcggtcttgcgagtggtcaaaatctatccgccggag

SEQ ID NO: 91369 - DNA, 102 bp, Faecalibacterium prausnitzii
  misc_feature (1)..(102): FP929046.1/562024-562125 Faecalibacterium prausnitzii S L3/3 draft genome.
gagcaacttaggattttaggctccccggtgccactcgagcggcgctgggcaaaacccacaggagctggcggttcctgtgcggtcaaaatcaaaccgctggag

SEQ ID NO: 91370 - DNA, 96 bp, Subdoligranulum variabile
  misc_feature (1)..(96): GG704769.1/449620-449525 Subdoligranulum variabile DSM 15176 genomic scaffold Scfld0, whole genome shotgun seq uence.
gagcaacttaggattttaggctccgccgcagcttccgcggcgcaaaccggtgtcaggctggcggtctggcatgcggtcaaaatctatccgccggag

SEQ ID NO: 91371 - DNA, 101 bp, Faecalibacterium prausnitzii; identical to SEQ ID NO: 91362
  misc_feature (1)..(101): ACOP02000046.1/22370-22270 Faecalibacterium prausnitzii A2-165 F_prausnitzii-1.0.1_Cont2.6, whole genome shotg un sequence.

SEQ ID NO: 91372 - DNA, 101 bp, Unknown; identical to SEQ ID NO: 91367
  misc_feature (1)..(101): ADJS01009870.1/10212-10312 Uncultured Faecalibacterium sp. TS28_contig03264, whole genome shotgun sequence.

SEQ ID NO: 91373 - DNA, 94 bp, Unknown
  misc_feature (1)..(94): ADJS01013861.1/2134-2227 Uncultured Faecalibacterium sp . TS28_contig197612, whole genome shotgun sequence.
gagcaacttaggattttaggctccgcctggttttcaggcgcaaacccacccaagcctggcggtcttgggcgcggtcaaaatctatccgccggag

SEQ ID NO: 91374 - DNA, 102 bp, Unknown; identical to SEQ ID NO: 91369
  misc_feature (1)..(102): ADJS01011583.1/9082-9183 Uncultured Faecalibacterium sp . TS28_contig160857, whole genome shotgun sequence.

SEQ ID NO: 91375 - DNA, 96 bp, Unknown
  misc_feature (1)..(96): ADJS01012726.1/612-517 Uncultured Faecalibacterium sp. TS28_contig185429, whole genome shotgun sequence.
gagcaacttaggattttaggctccaccgcggcttgctgcggtgcaaaccccgcaagcctggcggtcttgcgcgcggtcaaaatctatccgccggag

SEQ ID NO: 91376 - DNA, 101 bp, Faecalibacterium cf.; identical to SEQ ID NO: 91367
  misc_feature (1)..(101): AECU01000177.1/7590-7690 Faecalibacterium cf. prausnitz ii KLE1255 F_prausnitziiKLE1255.K95-1.0_Cont551.2, whol e genome shotgun sequence.

SEQ ID NO: 91377 - DNA, 101 bp, Unknown
  misc_feature (1)..(101): BABA01018694.1/413-513 Human gut metagenome DNA, contig sequence: F2-Y_018694.
  misc_feature (84)..(84): BABA01018694.1/413-513 Human gut metagenome DNA, contig sequence:F2-Y_018694
gagcaacttaggattttaggctccgctgccggctgctggtcggcagcgcaaaccccgcaaggctggcggtcttgcgcgtggtcnaaatctatccgccggag

SEQ ID NO: 91378 - DNA, 102 bp, Unknown; identical to SEQ ID NO: 91369
  misc_feature (1)..(102): BAAX01000750.1/3091-2990 Human gut metagenome DNA, cont ig sequence: F2-V_000750.

SEQ ID NO: 91379 - DNA, 101 bp, Unknown
  misc_feature (1)..(101): BABG01013292.1/257-357 Human gut metagenome DNA, contig sequence: In-R_013292.
gagcaacttaggattttaggctccccggtgcgtctcgaaccgcgccgggccaaacccacaggggctggcggtcctgtgcggtcaaaatctttccgctggag

SEQ ID NO: 91380 - DNA, 83 bp, Unknown
  misc_feature (1)..(83): BAAU01020333.1/1-83 Human gut metagenome DNA, contig se quence: F1-S_020333.
ggctccgctgtcggctgctggtcggcagcgcaaaccccgcaaggctggcggtcttgcgtgtggtcaaaatctatccgccggag

SEQ ID NO: 91381 - DNA, 101 bp, Unknown
  misc_feature (1)..(101): BABD01012433.1/319-419 Human gut metagenome DNA, contig sequence: In-D_012433.
gagaaacttaggattttaggctccgctgccggctgctggtcggcagcgcaaaccccgcaaggctggcggtcttgcgcgtggtcaaaatctatccgccggag

SEQ ID NO: 91382 - DNA, 102 bp, Unknown
  misc_feature (1)..(102): BAAY01002983.1/1264-1163 Human gut metagenome DNA, cont ig sequence: F2-W_002983.
gagcaacttaggattttaggctccccggcgtgtctcgaaccatgccgggccaaacccacgggggctggcggtccccgcgtggtcaaaatcaaaccgctggag

SEQ ID NO: 91383 - DNA, 101 bp, Unknown; identical to SEQ ID NO: 91362
  misc_feature (1)..(101): BAAY01013224.1/926-826 Human gut metagenome DNA, contig sequence: F2-W_013224.

SEQ ID NO: 91384 - DNA, 102 bp, Faecalibacterium prausnitzii; identical to SEQ ID NO: 91369
  misc_feature (1)..(102): ABED02000027.1/116756-116655 Faecalibacterium prausnitz ii M21/2 F_prausnitzii_M212-2.0.1_Cont749, whole genome shotgun sequence.

SEQ ID NO: 91385 - DNA, 101 bp, Unknown; identical to SEQ ID NO: 91362
  misc_feature (1)..(101): BAAX01000347.1/2947-2847 Human gut metagenome DNA, cont ig sequence: F2-V_000347.

SEQ ID NO: 91386 - DNA, 101 bp, Unknown; identical to SEQ ID NO: 91367
  misc_feature (1)..(101): BABA01010993.1/1076-1176 Human gut metagenome DNA, cont ig sequence: F2-Y_010993.

SEQ ID NO: 91387 - DNA, 101 bp, Unknown
  misc_feature (1)..(101): BAAZ01007046.1/1247-1147 Human gut metagenome DNA, cont ig sequence: F2-X_007046.
gcaacttaggattttaggctccccgtgcgtgtctcgaaccatgccgggccaaacccacgggggctggcggtccccgtgcggtcaaaatcaaaccgctggag

SEQ ID NO: 91388 - DNA, 94 bp, Unknown; identical to SEQ ID NO: 91373
  misc_feature (1)..(94): ADJT01007369.1/6381-6474 Uncultured Faecalibacterium sp . TS29_contig137076, whole genome shotgun sequence.

SEQ ID NO: 91389 - DNA, 101 bp, Unknown
  misc_feature (1)..(101): ADJT01005830.1/328-228 Uncultured Faecalibacterium sp. TS29_contig03376, whole genome shotgun sequence.
gagcaacttaggattttaggctccccggcgtgtctcgaaccatgctgggccaaacccatagggctggcggtccctgtgcggtcaaaattcatccgccggag

SEQ ID NO: 91390 - DNA, 102 bp, Unknown
  misc_feature (1)..(102): ADJS01009939.1/10976-11077 Uncultured Faecalibacterium sp. TS28_contig03403, whole genome shotgun sequence.
gagcaacttaggattttaggctccgccgtctcccctgcgggaggcggcgcaaaccccgcaaggctggcggtcttgcgtgcggtcaaaatctatccgccggag

SEQ ID NO: 91391 - DNA, 102 bp, Faecalibacterium prausnitzii; identical to SEQ ID NO: 91365
  misc_feature (1)..(102): FP929045.1/1765647-1765748 Faecalibacterium prausnitzii L2/6 draft genome.

SEQ ID NO: 91392 - DNA, 96 bp, Subdoligranulum variabile; identical to SEQ ID NO: 91370
  misc_feature (1)..(96): ACBY02000013.1/114529-114434 Subdoligranulum variabile DSM 15176 S_variabile-1.0.1_Cont0.20, whole genome shot gun sequence.

SEQ ID NO: 91393 - DNA, 102 bp, Faecalibacterium prausnitzii; identical to SEQ ID NO: 91369
  misc_feature (1)..(102): FP929046.1/562024-562125 Faecalibacterium prausnitzii S L3/3 draft genome.

SEQ ID NO: 91394 - DNA, 101 bp, Unknown
  misc_feature (1)..(101): BABA01026116.1/736-636 Human gut metagenome DNA, contig sequence: F2-Y_026116.
gagcaacttaggattttaggctccccggtgcgtctcgaaccgcgctgggccaaacccacaggggctggcggccctgtgcggtcaaaatcaaaccgctggag

SEQ ID NO: 91395 - DNA, 101 bp, Unknown; identical to SEQ ID NO: 91362
  misc_feature (1)..(101): ADJS01012663.1/5165-5065 Uncultured Faecalibacterium sp . TS28_contig184996, whole genome shotgun sequence.

SEQ ID NO: 91396 - DNA, 102 bp, Unknown; identical to SEQ ID NO: 91365
  misc_feature (1)..(102): BAAX01019688.1/382-483 Human gut metagenome DNA, contig sequence: F2-V_019688.

SEQ ID NO: 91397 - DNA, 101 bp, Unknown; identical to SEQ ID NO: 91362
  misc_feature (1)..(101): BAAV01004919.1/1075-1175 Human gut metagenome DNA, cont ig sequence: F1-T_004919.

SEQ ID NO: 91398 - DNA, 101 bp, Unknown; identical to SEQ ID NO: 91367
  misc_feature (1)..(101): BAAY01002380.1/1139-1039 Human gut metagenome DNA, cont ig sequence: F2-W_002380.

SEQ ID NO: 91399 - DNA, 1471 bp, Azotobacter vinelandii
  misc_feature (1)..(1471): NR_041039.1 Azotobacter vinelandii strain IAM 15004 16S ribosomal RNA
ggctcagattgaacgctggcggcaggcctaacacatgcaagtcgagcggcagcgggaccttcgggttgccggcgagcggcggacgggtgagtaatgcctaggaatctgcctgttagtgggggataacgcggggaaactcgcgctaataccgcatacgtcctacgggagaaagtgggggaccctcgggcctcacgctaacagatgagcctaggtcggattagctagttggtggggtaaaggcccaccaaggcgacgatccgtaactggtctgagaggatgatcagtcacactggaactgagacacggtccagactcctacgggaggcagcagtggggaatattggacaatgggcgaaagcctgatccagccatgccgcgtgtgtgaagaaggtcttcggattgtaaagcactttaagttgggaggaagggcgctcggtgaatacccaagcgtcttgacgttaccgacagaataagcaccggctaacttcgtgccagcagccgcggtaatacgaagggtgcaagcgttaatcggaattactgggcgtaaagcgcgcgtaggtggttcggcaagttggatgtgaaagccccgggctcaacctgggaaccgcatccaaaactactgggctagagtacggtagagggtggtggaatttcctgtgtagcggtgaaatgcgtagatataggaaggaacaccagtggcgaaggcgaccacctggaccgatactgacactgaggtgcgaaagcgtggggagcaaacaggattagataccctggtagtccacgccgtaaacgatgtcgactagccgttgggctccttgagagcttagtggcgcagctaacgcattaagtcgaccgcctggggagtacggccgcaaggttaaaactcaaatgaattgacgggggcccgcacaagcggtggagcatgtggtttaattcgaagcaacgcgaagaaccttacctggccttgacatcctgcgaactttcaagagattgatgggtgccttcgggagcgcagagacaggtgctgcatggctgtcgtcagctcgtgtcgtgagatgttgggttaagtcccgtaacgagcgcaacccttgtccttagttaccagcgattcggtcgggcactctaaggagactgccggtgacaaaccggaggaaggtggggatgacgtcaagtcatcatggcccttacggccagggctacacacgtgctacaatggtcggtacaaagggttgccaagtcgcgaggcggagctaatcccagaaaaccgatcgtagtccggatcgcagtctgcaactcgactgcgtgaagtcggaatcgctagtaatcgcgaatcagaatgtcgcggtgaatacgttcccgggccttgtacacaccgcccgtcacaccatgggagtgggttgctccagaagtagctagtctaaccctcgggaggacggttaccacggagtgattcatgactggggtgaagtcg

SEQ ID NO: 91400 - DNA, 1411 bp, Bacillus megaterium
  misc_feature (1)..(1411): MN641873.1 Bacillus megaterium strain CT03 16S ribosoma l RNA gene
gcgaactgattagaagcttgcttctatgacgttagcggcggacgggtgagtaacacgtgggcaacctgcctgtaagactgggataacttcgggaaaccgaagctaataccggataggatcttctccttcatgggagatgattgaaagatggtttcggctatcacttacagatgggcccgcggtgcattagctagttggtgaggtaacggctcaccaaggcaacgatgcatagccgacctgagagggtgatcggccacactgggactgagacacggcccagactcctacgggaggcagcagtagggaatcttccgcaatggacgaaagtctgacggagcaacgccgcgtgagtgatgaaggctttcgggtcgtaaaactctgttgttagggaagaacaagtacagagtaactgctgtaccttgacggtacctaaccagaaagccacggctaactacgtgccagcagccgcggtaatacgtaggtggcaagcgttatccggaattattgggcgtaaagcgcgcgcaggcggtttcttaagtctgatgtgaaagcccacggctcaaccgtggagggtcattggaaactggggaacttgagtgcagaagagaaaagcggaattccacgtgtagcggtgaaatgcgtagagatgtggaggaacaccagtggcgaaggcggctttttggtctgtaactgacgctgaggcgcgaaagcgtggggagcaaacaggattagataccctggtagtccacgccgtaaacgatgagtgctaagtgttagagggtttccgccctttagtgctgcagctaacgcattaagcactccgcctggggagtacggtcgcaagactgaaactcaaaggaattgacgggggcccgcacaagcggtggagcatgtggtttaattcgaagcaacgcgaagaaccttaccaggtcttgacatcctctgacaactctagagatagagcgttccccttcgggggacagagtgacaggtggtgcatggttgtcgtcagctcgtgtcgtgagatgttgggttaagtcccgcaacgagcgcaacccttgatcttagttgccagcatttagttgggcactctaaggtgactgccggtgacaaaccggaggaaggtggggatgacgtcaaatcatcatgccccttatgacctgggctacacacgtgctacaatggatggtacaaagggctgcaagaccgcgaggtcaagccaatcccataaaaccattctcagttcggattgtaggctgcaactcgcctacatgaagctggaatcgctagtaatcgcggatcagcatgccgcggtgaatacgttcccgggccttgtacacaccgcccgtcacaccacgagagtttgtaacacccgaatcggtggagtaaccgtaaggagctagccgcctaa

SEQ ID NO: 91401 - DNA, 1550 bp, Bacillus subtilis
  misc_feature (1)..(1550): NR_112116.2 Bacillus subtilis strain IAM 12118 16S ribo somal RNA
ttatcggagagtttgatcctggctcaggacgaacgctggcggcgtgcctaatacatgcaagtcgagcggacagatgggagcttgctccctgatgttagcggcggacgggtgagtaacacgtgggtaacctgcctgtaagactgggataactccgggaaaccggggctaataccggatggttgtttgaaccgcatggttcaaacataaaaggtggcttcggctaccacttacagatggacccgcggcgcattagctagttggtgaggtaacggctcaccaaggcaacgatgcgtagccgacctgagagggtgatcggccacactgggactgagacacggcccagactcctacgggaggcagcagtagggaatcttccgcaatggacgaaagtctgacggagcaacgccgcgtgagtgatgaaggttttcggatcgtaaagctctgttgttagggaagaacaagtaccgttcgaatagggcggtaccttgacggtacctaaccagaaagccacggctaactacgtgccagcagccgcggtaatacgtaggtggcaagcgttgtccggaattattgggcgtaaagggctcgcaggcggtttcttaagtctgatgtgaaagcccccggctcaaccggggagggtcattggaaactggggaacttgagtgcagaagaggagagtggaattccacgtgtagcggtgaaatgcgtagagatgtggaggaacaccagtggcgaaggcgactctctggtctgtaactgacgctgaggagcgaaagcgtggggagcgaacaggattagataccctggtagtccacgccgtaaacgatgagtgctaagtgttagggggtttccgccccttagtgctgcagctaacgcattaagcactccgcctggggagtacggtcgcaagactgaaactcaaaggaattgacgggggcccgcacaagcggtggagcatgtggtttaattcgaagcaacgcgaagaaccttaccaggtcttgacatcctctgacaatcctagagataggacgtccccttcgggggcagagtgacaggtggtgcatggttgtcgtcagctcgtgtcgtgagatgttgggttaagtcccgcaacgagcgcaaccctggatcttagttgccagcattcagttgggcactctaaggtgactgccggtgacaaaccggaggaaggtggggatgacgtcaaatcatcatgccccttatgacctgggctacacacgtgctacaatggacagaacaaagggcagcgaaaccgcgaggttaagccaatcccacaaatctgttctcagttcggatcgcagtctgcaactcgactgcgtgaagctggaatcgctagtaatcgcggatcagcatgccgcggtgaatacgttcccgggccttgtacacaccgcccgtcacaccacgagagtttgtaacacccgaagtcggtgaggtaaccttttaggagccagccgccgaaggtgggacagatgattggggtgaagtcgtaacaaggtagccgtatcggaaggtgcggctggatcacctccttt

SEQ ID NO: 91402 - DNA, 1533 bp, Pantoea allii
  misc_feature (1)..(1533): NR_115258.1 Pantoea allii strain BD 390 16S ribosomal R NA
agagtttgatcctggctcagattgaacgctggcggcaggcctaacacatgcaagtcggacggtagcacagagagcttgctctcgggtgacgagtggcggacgggtgagtaatgtctggggatctgcccgatagagggggataaccactggaaacggtggctaataccgcataacgtcgcaagaccaaagagggggaccttcgggcctctcactatcggatgaacccagatgggattagctagtaggcggggtaacggcccacctaggcgacgatccctagctggtctgagaggatgaccagccacactggaactgagacacggtccagactcctacgggaggcagcagtggggaatattgcacaatgggcgcaagcctgatgcagccatgccgcgtgtatgaagaaggccttcgggttgtaaagtactttcagcggggaggaaggcattgtggttaataaccgcagtgattgacgttacccgcagaagaagcaccggctaactccgtgccagcagccgcggtaatacggagggtgcaagcgttaatcggaattactgggcgtaaagcgcacgcaggcggtctgttaagtcagatgtgaaatccccgggcttaacctgggaactgcatttgaaactggcaggcttgagtctcgtagaggggggtagaattccaggtgtagcggtgaaatgcgtagagatctggaggaataccggtggcgaaggcggccccctggacgaagactgacgctcaggtgcgaaagcgtggggagcaaacaggattagataccctggtagtccacgccgtaaacgatgtcgacttggaggttgttcccttgaggagtggcttccggagctaacgcgttaagtcgaccgcctggggagtacggccgcaaggttaaaactcaaatgaattgacgggggcccgcacaagcggtggagcatgtggtttaattcgatgcaacgcgaagaaccttacctactcttgacatccagagaacttagcagagatgctttggtgccttcgggaactctgagacaggtgctgcatggctgtcgtcagctcgtgttgtgaaatgttgggttaagtcccgcaacgagcgcaacccttatcctttgttgccagcgattcggtcgggaactcaaaggagactgccggtgataaaccggaggaaggtggggatgacgtcaagtcatcatggcccttacgagtagggctacacacgtgctacaatggcgcatacaaagagaagcgacctcgcgagagcaagcggacctcacaaagtgcgtcgtagtccggatcggagtctgcaactcgactccgtgaagtcggaatcgctagtaatctgtggatcagaatgccacggtgaatacgttcccgggccttgtacacaccgcccgtcacaccatgggagtgggttgcaaaagaagtaggtagcttaacctccgggagggcgcttaccactttgtgattcatgactggggtgaagtcgtaacaaggtaaccgtaggggaacctgcggctggatcacctcctt

SEQ ID NO: 91403 - DNA, 1373 bp, Rhizobium radiobacter
  misc_feature (1)..(1373): AM157353.1 Rhizobium radiobacter partial 16S rRNA gene
tggcagacgggtgagtaacgcgtgggaacataccctttcctgcggaatagctccgggaaactggaattaataccgcatacgccctacgggggaaagatttatcggggaaggattggcccgcgttggattagctagttggtggggtaaaggcctaccaaggcgacgatccatagctggtctgagaggatgatcagccacattgggactgagacacggcccaaactcctacgggaggcagcagtggggaatattggacaatgggcgcaagctgatccagccatgccgcgtgagtgatgaaggccttagggttgtaaagctctttcaccgatgaagataatgacggtagtcggagaagaggccccggctaacttcgtgccagcagccgcggtaatacgaagggggctagcgttgttcggaattactgggcgtaaagcgcacgtaggcggatatttaagtcaggggtgaaatcccgcagctcaactgcggaactgcctttgatactgggtatcttgagtatggaagaggtaagtggaattccgagtgtagaggtgaaattcgtagatattcggaggaacaccagtggcgaaggcggcttactggtccattactgacgctgaggtgcgaaagcgtggggagcaaacaggattagataccctggtagtccacgccgtaaacgatgaatgttagccgtcgggcagtatactgttcggtggcgcactaacgcattaaacattccgcctggggagtacggtcgcaagattaaaactcaaaggaattgacgggggcccgcacaagcggtggagcatgtggtttaattcgaagcaacgcgcagaaccttaccagctcttgacattcggggtatgggcattggagacgatgtccttcagttaggctggccccagaacaggtgctgcatggctgtcgtcagctcgtgtcgtgagatgttgggttaagtcccgcaacgagcgcaaccctcgcccttagttgccagcatttagttgggcactctaaggggactgccggtgataagccgagaggaaggtggggatgacgtcaagtcctcatgccttacgggctgggctacacacgtgctacaatggtggtgacagtgggcagcgagacagcgatgtcgagctaatctccaaaagccatcccagttcggattgcactctgcaactcgagtgcatgaagttggaatcgctagtaatcgcagatcagcatgctgcggtgaatacgttcccgggccttgtacacaccgcccgtcacaccatgggagttggttttacccgaaggtagtgcgctaaccgcaaggaggcagctaaccatggtagggtcagcgactggggtgaagtcgtaacaaggtagccgtaggg

SEQ ID NO: 91404 - DNA, 1435 bp, Bacillus subtilis
  misc_feature (1)..(1435): AY864812.1 Bacillus subtilis subsp. natto 16S ribosomal RNA gene
cagatgggagcttgctccctgatgttagcggcggacgggtgagtaacacgtgggtaacctgcctgtaagactgggataactccgggaaaccggggctaataccggatggttgtttgaaccgcatggttcaaacataaaaggtggcttcggctaccacttacagatggacccgcggcgcattagctagttggtgaggtaacggctcaccaaggcgacgatgcgtagccgacctgagagggtgatcggccacactgggactgagacacggcccagactcctacgggaggcagcagtagggaatcttccgcaatggacgaaagtctgacggagcaacgccgcgtgagtgatgaaggttttcggatcgtaaagctctgttgttagggaagaacaagtaccgttcgaatagggcggtaccttgacggtacctaaccagaaagccacggctaactacgtgccagcagccgcggtaatacgtaggtggcaagcgttgtccggaattattgggcgtaaagggctcgcaggcggtttcttaagtctgatgtgaaagcccccggctcaaccggggagggtcattggaaactggggaacttgagtgcagaagaggagagtggaattccacgtgtagcggtgaaatgcgtagagatgtggaggaacaccagtggcgaaggcgactctctggtctgtaactgacgctgaggagcgaaagcgtggggagcgaacaggattagataccctggtagtccacgccgtaaacgatgagtgctaagtgttagggggtttccgccccttagtgctgcagctaacgcattaagcactccgcctggggagtacggtcgcaagactgaaactcaaaggaattgacgggggcccgcacaagcggtggagcatgtggtttaattcgaagcaacgcgaagaaccttaccaggtcttgacatcctctgacaatcctagagataggacgtccccttcgggggcagagtgacaggtggtgcatggttgtcgtcagctcgtgtcgtgagatgttgggttaagtcccgcaacgagcgcaacccttgatcttagttgccagcattcagttgggcactctaaggtgactgccggtgacaaaccggaggaaggtggggatgacgtcaaatcatcatgccccttatgacctgggctacacacgtgctacaatggacagaacaaagggcagcgaaaccgcgaggttaagccaatcccacaaatctgttctcagttcggatcgcagtctgcaactcgactgcgtgaagctggaatcgctagtaatcgcggatcagcatgccgcggtgaatacgttcccgggccttgtacacaccgcccgtcacaccacgagagtttgtaacacccgaagtcggtgaggtaaccttttaggagccagccgccgaaggtgggacagatgattggggtgaagtcg

SEQ ID NO: 91405 - DNA, 1414 bp, Streptomyces achromogenes
  misc_feature (1)..(1414): MK377246.1 Streptomyces achromogenes strain E91CS4 16S ribosomal RNA gene
gctggcggcgtgcttaacacatgcaagtcgaacgatgaacctccttcgggaggggattagtggcgaacgggtgagtaacacgtgggcaatctgcccttcactctgggacaagccctggaaacggggtctaataccggatacgagcctccaaggcatcttggaggttggaaagctccggcggtgaaggatgagcccgcggcctatcagcttgttggtgaggtaatggctcaccaaggcgacgacgggtagccggcctgagagggcgaccggccacactgggactgagacacggcccagactcctacgggaggcagcagtggggaatattgcacaatgggcgaaagcctgatgcagcgacgccgcgtgagggatgacggccttcgggttgtaaacctctttcagcagggaagaagcgaaagtgacggtacctgcagaagaagcgccggctaactacgtgccagcagccgcggtaatacgtagggcgcaagcgttgtccggaattattgggcgtaaagagctcgtaggcggcttgtcacgtcgggtgtgaaagcccggggcttaaccccgggtctgcattcgatacgggctagctagagtgtggtaggggagatcggaattcctggtgtagcggtgaaatgcgcagatatcaggaggaacaccggtggcgaaggcggatctctgggccattactgacgctgaggagcgaaagcgtggggagcgaacaggattagataccctggtagtccacgccgtaaacggtgggaactaggtgttggcgacattccacgtcgtcggtgccgcagctaacgcattaagttccccgcctggggagtacggccgcaaggctaaaactcaaaggaattgacgggggcccgcacaagcagcggagcatgtggcttaattcgacgcaacgcgaagaaccttaccaaggcttgacatacaccggaaagcattagagatagtgccccccttgtggtcggtgtacaggtggtgcatggctgtcgtcagctcgtgtcgtgagatttgggttaagtcccgcaacgagcgcaacccttgttctgtgttgccagcatgcccttcggggtgatggggactcacaggagaccgccggggtcaactcggaggaaggtggggacgacgtcaagtcatcatgccccttatgtcttgggctgcacacgtgctacaatggccggtacaaagagctgcgataccgtgaggtggagcgaatctcaaaaagccggtctcagttcggattggggtctgcaactcgaccccatgaagtcggagttgctagtaatcgcagatcagcattgctgcggtgaatacgttcccgggccttgtacacaccgcccgtcacgtcacgaaagttggtaacacccgaagccggtggcccaaccccttgtgggagggagct

SEQ ID NO: 91406 - DNA, 291 bp, Emericella nidulans
  misc_feature (1)..(291): KC443045.1 Emericella nidulans strain BAB-2648 18S ribo somal RNA gene
ttgaaaagagagttaaacagcacgtgaaattgttgaaagggaagcgcttgcgaccagactcggccccggggttcagccagcactcgtgctggtgtacttccccgggggcgggccagcgtcggtttgggcggccggtcaaaggccccaggaatgtatcgccctccggggttgtcttatagcctggggtgcaatgcggccagcccggaccgaggaacgcgcttcggcacggacgctggcgtaatggtcgcaaacgacccgtcttgaaacacggaccaagactcgcgtcgtttg

SEQ ID NO: 91407 - protein, 252 aa, [Curtobacterium] plantarum
  misc_feature (1)..(252): tr|A0A3M7UJL3|A0A3M7UJL3_9GAMM 2,3-dihydro-2,3-dihydrox ybenzoate dehydrogenase OS=[Curtobacterium] plantarum O X=221276 GN=dhbA PE=4 SV=1
MSHTFDFSGKIVWVTGAGQGIGYHTALAFHQAGAQVEAFDQRFKGHDYPFPCHTMDVADPAQVKTICQRVLAVQPRIDVLVNAAGILRIGATDELSFADWQACLNVNAGGAFNLFQQTLPRFREQRAGAIVTVASNSAHAPRIGMSAYGASKAALRSLCQTVGLEMAPYGVRCNIVSPGSTDTDMQRSLWHTPTGEQEMIAGFPDQFKLGIPLGKIAQPQEIAATVLFLASDLASHVTLQDIVVDGGATLGA

SEQ ID NO: 91408 - protein, 238 aa, Achromobacter piechaudii
  misc_feature (1)..(238): tr|D4XHL6|D4XHL6_9BURK Oxidoreductase, short chain dehy drogenase/reductase family protein OS=Achromobacter pie chaudii ATCC 43553 OX=742159 GN=entA PE=4 SV=1
MSNERNAGLAVVTGASGGIGLAIAQRLLQAGWRVAGLDIGPAAVQHAAYRHVTVDLCDADATGAALEMLKAGGAQVDALVHAAGILRVGPLAQLDPLDGERMWKLHVDVAVRLAQVLAPEMATRGAGRVVLVGSRVAQGMPGRSQYAASKAALVALARSWAAELAPQGVTVNVVSPAATQTGMLQDPARVASAPRLPPIGRLIQPDEIAALVQFLLSPEAAAITGQDIAICGGASLPR

SEQ ID NO: 91409 - protein, 248 aa, Achromobacter sp.
  misc_feature (1)..(248): tr|A0A0M7NXH5|A0A0M7NXH5_9BURK 2,3-dihydro-2,3-dihydrox ybenzoate dehydrogenase OS=Achromobacter sp. ATCC35328 OX=1806490 GN=entA PE=4 SV=1
MDFSGKNVWVTGAGKGIGYATALAFVEAGAKVTGFDQAFTQEQYPFATEVMDVADAAQVAQVCQRLLAETERLDALVNAAGILRMGATDQLSKEDWQQTFAVNVGGAFNLFQQTMNQFRRQRGGAIVTVASDAAHTPRIGMSAYGASKAALKSLALSVGLELAGSGVRCNVVSPGSTDTDMQRTLWVSDDAEEQRIRGFGEQFKLGIPLGKIARPQEIANTILFLASDLASHITLQDIVVDGGSTLGA

SEQ ID NO: 91410 - protein, 260 aa, Achromobacter sp.
  misc_feature (1)..(260): tr|A0A0M7G0J7|A0A0M7G0J7_9BURK 2,3-dihydro-2,3-dihydrox ybenzoate dehydrogenase OS=Achromobacter sp. OX=134375 GN=dhbA PE=3 SV=1
MDLQLAGKRVLITGASKGIGLACAIAFAREGADPILVARDDAALHQATASIREQSGRDTRAVTMDLAVPGAAEKLAKETGPIDILVNNAGAVPGGALDQVQDERWRAGWELKVHGYISLARHYYPHMRDAGAGVIANIIGMAGAAPRADYICGAAANASLIAFTRALGGEAPRHGVRVFGVNPSRTRTDRVLTLARQRAHARWGDESRWQETLSDLPFSRLMEPEEVADMIVFGASPRAGYLSGTVIDLDGGEQYANHAR

SEQ ID NO: 91411 - protein, 234 aa, Achromobacter spanius
  misc_feature (1)..(234): tr|A0A448C108|A0A448C108_9BURK 2,3-dihydro-2,3-dihydrox ybenzoate dehydrogenase OS=Achromobacter spanius OX=217 203 GN=entA PE=4 SV=1
MSNNPAGALAVVTGATGGIGLAIVQRLLDAGWQVAGLDIGPAVARHAAYRHITVDLCDEAATRQALVGCKHARALVHAAGIMRVGPLAQLDPADGERMWKLHVDVAVRLAQMLAPEMAERGGGRVVLVGSRTAQGMPGRSQYAASKAALVALARSWAAELAPQGVTVNVVSPAATQTGMLQDPARAASAPRMPPIGRLIQPEEVAALVEFLLSPQAAAITGQDIAICGGASLPR

SEQ ID NO: 91412 - protein, 256 aa, Acinetobacter baumannii
  misc_feature (1)..(256): tr|D0C790|D0C790_ACIB2 2,3-dihydroxybenzoate-2,3-dehydr ogenase OS=Acinetobacter baumannii (strain ATCC 19606 / DSM 30007 / CIP 70.34 / JCM 6841 / NBRC 109757 / NCIMB 12457 / NCTC 12156 / 81) OX=575584 GN=HMPREF001
MRSTIVVTGAARGIGAAIAKQLLDQGYHVIGIDCQKNPEQWDISKTMTSDQSSQWQGISQDITHQQETQTLISELLEKYEITGLVNAAGVLIMRSMLEAKTEDWETLFAVNVMAPIAISQQFAKHFCAKRRGSIVTISSNSARMPRMQLGMYATTKAALSHFCRNLALEIAPYQVRLNIVSPGSTLTQMQQQLWTDNAPPPAVIDGDLSQYRTGIPLRKLAQPDDIANTVNFLLSDRAAQITMQEIVVDGGATLGV

SEQ ID NO: 91413 - protein, 263 aa, Acinetobacter baumannii
  misc_feature (1)..(263): tr|A0A0J1CVL4|A0A0J1CVL4_ACIBA 2,3-dihydro-2,3-dihydrox ybenzoate dehydrogenase OS=Acinetobacter baumannii MRSN 3527 OX=1409923 GN=T630_4005 PE=4 SV=1
MKEAETQEKSPTLTHSADTKIAWVTGVNQGMGAEIMQRLIAQHIYVVGFDLSTNNIVESDRYEVHQCDVRDAVQISSLCQKLLKTSPPDYFINTAGVLHLDEHDTLPEDAWLQTFEVNTFAPFYFLKHLSPYFREKRNGNIVMVSSNSAHVPRMKMAAYGASKAALTSFSKTVGLELAEYGIRVNIVSPGSTATPMLRQLWKDASGEKQTIHGNLAQYKVGIPLQKIALTEDIAHAVMFLISDQASHITMHDLVIDGGATLGQ

SEQ ID NO: 91414 - protein, 287 aa, Acinetobacter baumannii
  misc_feature (1)..(287): tr|A0A0E1PTI7|A0A0E1PTI7_ACIBA 2,3-dihydroxybenzoate-2, 3-dehydrogenase OS=Acinetobacter baumannii NCGM 237 OX= 1401639 GN=entA PE=4 SV=1
MNFYIHLLLIRMIIICNYIYRFLYNINWSIHMRSTIVVTGAARGIGAAIAKQLLDQGYHVIGIDCQKNPEQWDISKTMTSDQSSQWQGISQDITHQQETQTLISELLEKYEITGLVNAAGVLIMRSMLEAKTEDWETLFAVNVMAPIAISQQVAKHFCAKRRGSIVTISSNSARMPRMQLGMYATTKAALSHFCRNLALEIAPYQVRLNIVSPGSTLTQMQQQLWTDNAPPPAVIDGDLSQYRTGIPLRKLAQPDDIANTVSFLLSDRAAQITMQEIVVDGGATLGV

SEQ ID NO: 91415 - protein, 256 aa, Acinetobacter baumannii
  misc_feature (1)..(256): tr|A0A0D5YHL1|A0A0D5YHL1_ACIBA 2,3-dihydro-2,3-dihydrox ybenzoate dehydrogenase OS=Acinetobacter baumannii OX=4 70 GN=dhbA PE=4 SV=1
MRSTIVVTGAARGIGAAIAKQLLDQGYHVIGIDCQKNPEQWDISKTMTSDQSSQWQGISQDITHQQETQTLISELLEKYEITGLVNAAGVLIMRSMLEAKTEDWETLFAVNVMAPIAISQQVAKHFCAKRRGSIVTISSNSARMPRMQLGMYATTKAALSHFCRNLALEIAPYQVRLNIVSPGSTLTQMQQQLWTDNAPPPAVIDGDLSQYRTGIPLRKLAQPDDIANTVSFLLSDRAAQITMQEIVIDGGATLGV

SEQ ID NO: 91416 - protein, 256 aa, Acinetobacter baumannii
  misc_feature (1)..(256): tr|A0A385EVI0|A0A385EVI0_ACIBA 2,3-dihydro-2,3-dihydrox ybenzoate dehydrogenase OS=Acinetobacter baumannii WM99 c OX=945555 GN=dhbA PE=4 SV=1
MRSTIVVTGAARGIGAAIAKQLLDQGYHVIGIDCQKNPEQWDISKTMTSDQSSQWQGISQDITHQQETQTLISELLEKYEITGLVNAAGVLIMRSMLEAKTEDWETLFAVNVMAPIAISQQVAKHFCAKRRGSIVTISSNSARMPRMQLGMYATTKAALSHFCRNLALEIAPYQVRLNIVSPGSTLTQMQQQLWTDNAPPPAVIDGDLSQYRTGIPLRKLAQPDDIANTVSFLLSDRAAQITMQEIVVDGGATLGV

SEQ ID NO: 91417 - protein, 261 aa, Acinetobacter baylyi
  misc_feature (1)..(261): tr|Q6F8U7|Q6F8U7_ACIAD 2,3-dihydro-2,3-dihydroxybenzoat e dehydrogenase OS=Acinetobacter baylyi (strain ATCC 33 305 / BD413 / ADP1) OX=62977 GN=entA PE=4 SV=1
MTMTQINSEVLDINLVKKIAWVTGVNQGIGAQIMQQLIAQNIYVVGFDLSIRNFMTSDHYEVHQCNVGDSSQVFDLCQKLLNTSPPDYFINTAGVLHLDGHDALPIEAWRQTFEVNTFAPFYFLKNLSPHFRNKREGSIVMVSSNSARVPRIEMAAYGASKAALTSFSKTVALELAEYGVRVNIVSPGSTVTPMLRQLWNDASGEQKTIHGNLAQYKVGIPLQKIALTQDIANAVMFLISDQASHITMHDLVVDGGATLGQ

SEQ ID NO: 91418 - protein, 256 aa, Acinetobacter calcoaceticus
  misc_feature (1)..(256): tr|A0A380VN72|A0A380VN72_ACICA Dehydrogenase OS=Acineto bacter calcoaceticus OX=471 GN=dhbA PE=4 SV=1
MRSTIVVTGAARGIGAAIAKQLLDQGYHVIGIDCQKNPEQWDISKTMTSNQSSQWQGISQDITHQQETQTLISELLEKYEITGLVNAAGVLIMRSMLEAKMEDWETLFAVNVMAPIAISQQVAKHFCAKRRGSIVTISSNSARMPRMQLGMYATTKAALSHFCRNLALEIAPYQVRLNIVSPGSTLTQMQQQLWTDNAPPPAVIDGDLSQYRTGIPLRKLAQPDDIANTVSFLLSDRAAQITMQEIVVDGGATLGV

SEQ ID NO: 91419 - protein, 256 aa, Acinetobacter calcoaceticus
  misc_feature (1)..(256): tr|D0RXX6|D0RXX6_ACICA 2,3-dihydroxybenzoate-2,3-dehydr ogenase OS=Acinetobacter calcoaceticus RUH2202 OX=57558 5 GN=HMPREF0012_01028 PE=4 SV=1
MSSTIVVTGAARGIGAAIAKQLLQQGYQVIGIDRQENPEQWEISKNLTSDECLRWQGISQDITQQQATQKLIADLLEKHNITGLVNAAGVLIMRSMLEAKTEDWETLFAVNVMAPIAISQQLAKHFCEKKQGSIVTISSNSSRMPRIQLGMYATSKAALSHYCRNLALEIAPHQVRLNIVSPGSTLTQMQQQLWTDNTPPPAVMDGDLSQYRTGIPLRKLAQPEDIANTVSFLLSDQAAQITMQEIVVDGGATLGV

SEQ ID NO: 91420 - protein, 250 aa, Acinetobacter haemolyticus
  misc_feature (1)..(250): tr|D4XRW4|D4XRW4_ACIHA Oxidoreductase, short chain dehy drogenase/reductase family protein OS=Acinetobacter hae molyticus ATCC 19194 OX=707232 GN=entA PE=4 SV=1
MNMTEKKIAWVVGVNQGIGLEVMQRLYAENIQVVGIDKAKDQVPEHFKEMIHVCDIRDEQQIAKLCRTLLLESPPDYFIHVAGVLHLGEHDEISFAQWRETFEVNLFSPFHFFRHLSPYFKKKKMGNVVIISSNSTKVPRMNMSAYGASKSALTYFTKTVALELAQYGVRVNIISPGSTATAMQYQLWENAQGEQNTILGNLSQFKVGIPLKKIAKVSDIANAVLFFIGEQSSHITMHDLVIDGGATLGS

SEQ ID NO: 91421 - protein, 248 aa, Acinetobacter haemolyticus
  misc_feature (1)..(248): tr|A0A380UJS5|A0A380UJS5_ACIHA 2,3-dihydroxybenzoate-2, 3-dehydrogenase OS=Acinetobacter haemolyticus OX=29430 GN=entA PE=4 SV=1
MTEKKIAWVVGVNQGIGLEVMQRLYAENIQVVGIDKAKDQVPEHFKEMIHVCDIRDEQQIAKLCRTLLLESPPDYFIHVAGVLHLGEHDEISFAQWRETFEVNLFSPFHFFRHLSPYFKKKKMGNVVIISSNSTKVPRMNMSAYGASKSALTYFTKTVALELAQYGVRVNIISPGSTATAMQYQLWENAQGEQNTILGNLSQFKVGIPLKKIAKVSDIANAVLFFIGEQSSHITMHDLVIDGGATLGS

SEQ ID NO: 91422 - protein, 77 aa, Acinetobacter nosocomialis
  misc_feature (1)..(77): tr|A0A2T7FEK5|A0A2T7FEK5_ACINO 2,3-dihydro-2,3-dihydrox ybenzoate dehydrogenase (Fragment) OS=Acinetobacter nos ocomialis OX=106654 GN=DC362_24405 PE=4 SV=1
ELAGSGVRCNVVSPGSTDTDMQRTLWVSDDAEEQRIRGFGEQFKLGIPLGKIARPQEIANTILFLASDLASHITLQD

SEQ ID NO: 91423 - protein, 256 aa, Acinetobacter sp.
  misc_feature (1)..(256): tr|A0A013TW25|A0A013TW25_9GAMM 2,3-dihydro-2,3-dihydrox ybenzoate dehydrogenase OS=Acinetobacter sp. 826659 OX= 1310764 GN=dhbA PE=4 SV=1
MRSTIVVTGAARGIGAAIAKQLLDQGYHVIGIDRQENPKQWDISKTITPDQTSQWQGISQDITHQQETQTLISELLERYEITGLVNAAGVLIMRSMLEAKTEDWETLFAVNVMAPIAISQQVAKHFCAKRRGSIVTISSNSARMPRMQLGMYATTKAALSHFCRNLALEIAPYQVRLNIVSPGSTLTQMQQQLWTDNAPPPAVIDGDLSQYRTGIPLRKLAQPDDIANTVIFLLSDQAAQITMQEIVVDGGATLGV

SEQ ID NO: 91424 - protein, 256 aa, Acinetobacter sp.
  misc_feature (1)..(256): tr|A0A2U3MZ77|A0A2U3MZ77_9GAMM 2,3-dihydro-2,3-dihydrox ybenzoate dehydrogenase OS=Acinetobacter sp. KPC-SM-21 OX=2126983 GN=entA PE=4 SV=1
MIKKGMNIVVDKKIAWVVGVNQGIGAEIMQRLISDGIHVVGIDKSKENIPNELQEFSHICDIRDDGQVNQICQNLLRSSPPDYFIHVAGVLHMGGHEEISPEKWRETFAVNLFSPFYFLQHLSPYFKAKMSGNVVVISSNAAHVPRMYMSAYGASKAALTYFTKTVALELASYGVRVNVISPGSTATPMQYQLWKDSQGEQHTILGNLGQFKVGIPLKKIAKVKDIANSVMFLISDQASHITMHDLVIDGGATLGC

SEQ ID NO: 91425 - protein, 326 aa, Actinoalloteichus hoggarensis
  misc_feature (1)..(326): tr|A0A221W7W4|A0A221W7W4_9PSEU 2,3-dihydro-2,3-dihydrox ybenzoate dehydrogenase OS=Actinoalloteichus hoggarensi s OX=1470176 GN=entA PE=4 SV=1
MTNNQRTEFRSGFTAESTADEVLTGVDLDGKTALVTGGYSGLGLETTRALVKAGARVLVPARRPEVARARLHDLHRVTVVPMDLADLASVRTAGERLAESEARLDIAIAAAGVMASPERRVGPGWESHFAINHLGHFVLINLLLPLLSRADGARVVSYSSAGHHLSDIRWNDPHFDDGYDKWLAYGQSKTANVLFTVHLDAIAKDDGIRAFSLHPGAVITELQRDMTAAEQIERGWIDAAGDIVGAGFKSPSQGAATGLWAATSALLEGRGGVYCEDCDIAPLAGPEGSMETGGVRDYAVDPESAERLWQVSARITGVHPYERSTA

SEQ ID NO: 91426 - protein, 261 aa, Actinobacillus pleuropneumoniae
  misc_feature (1)..(261): tr|A0A4U9TNM7|A0A4U9TNM7_ACTPL 3-ketoacyl-ACP reductase OS=Actinobacillus pleuropneumoniae OX=715 GN=fabG_1 PE =3 SV=1
MESTGIRGKVALVTGAAQGIGEAVARALARQGAVVAACDRKEAELLRLTADLSGSGVHAAAYKTDVSRSAEVEAMVERVEDELGPIEILVNVAGVLRVGGVESLTDEDWQAHFNVNTHGLFYTSRSVVRRMASRHSGAIVTVGSNASKVPRSQMSAYAASKAASTMFTKCLGLEYARHQIRCNVVSPGSTDTEMQRLLWKEDHGARSIIEGTPDSFRLGIPLGKIALPSDIADAVVFLVSDRAGHMTMQDVCVDGGATLGC

SEQ ID NO: 91427 - protein, 283 aa, Actinobacteria bacterium
  misc_feature (1)..(283): tr|A0A0N1G3J8|A0A0N1G3J8_9ACTN 2,3-dihydro-2,3-dihydrox ybenzoate dehydrogenase OS=Actinobacteria bacterium OK0 74 OX=1592327 GN=OK074_5942 PE=4 SV=1
MSAHPHHRQTRPRGPGVPVSADGELDGRLALVTGAGRGIGAAVVAGLADAGARVLATDLDTEGVTALSAKYGERVLARPLDVTDAAAVEALVTEAERTLGPLDIAVNVAGILRPSPVLDLTDADWAATFAVNAGGVLHVSRSAARRMAERGRGSIVTVASNAAGVPRAGMAAYAASKAAAVMFTKCLGLEVAAHGVRCNTVCPGSTLTDMQRALWAASGERDEVAAARRVVRGDLAAHRTGIPLGRIADPDDIADAVVFLASDRARHITLHDLYVDGGATLRA

SEQ ID NO: 91428 - protein, 256 aa, Actinobacteria bacterium
  misc_feature (1)..(256): tr|A0A0N1FM03|A0A0N1FM03_9ACTN 2,3-dihydro-2,3-dihydrox ybenzoate dehydrogenase OS=Actinobacteria bacterium OV4 50 OX=1592328 GN=OV450_5088 PE=3 SV=1
MEGKIALVTGAAGGIGEAIVRALASRGVRVAAVDRDADRLRDVAKSVGEEGGRVDPFPADVTASADVESLVDDVEALVGPLDFLVNAAGVLRLAEARKLTDQEWSTTFAVNTTGVFFVSRAVVNRMVPRRRGAIVTIASNAAGTARTEMSAYAASKAAATMFTKCLGLEVAKFGIRANLVAPGSTDTPMLNSMWQDESSARASIDGVPDAYRVGIPLGKLARPEDVAEAVVFLLSDKAAHITMHDLTVDGGAALGA

SEQ ID NO: 91429 - protein, 258 aa, Actinobacteria bacterium
  misc_feature (1)..(258): tr|A0A538N7A6|A0A538N7A6_9ACTN 2,3-dihydro-2,3-dihydrox ybenzoate dehydrogenase OS=Actinobacteria bacterium OX= 1883427 GN=E6F99_09935 PE=4 SV=1
MTTGIAGRVAVVTGAAGGIGAAVTRALAAHGAIVAALDVDGSGVEKVAAELPEGVGHGYRVDVRDAAAVDAAVTRIEDELGPVRILVTVAGILRTGPFTGSTTADWHEVFAVNLHGVVHCCRAVAGRMVARRSGVIVTVGSNAAGVPRMDMAAYAASKAAVAHFVRCLGLELAGFGIRCNVVAPGSTDTPMQRSMWACDADAAAVVEGSLSRYKVGIPLGRLAHPCDVADAVVFLASEQARHITMQQLYVDGGAALRD

SEQ ID NO: 91430 - protein, 252 aa, Actinokineospora spheciospongiae
  misc_feature (1)..(252): tr|W7JCZ1|W7JCZ1_9PSEU 2,3-dihydro-2,3-dihydroxybenzoat e dehydrogenase of siderophore biosynthesis OS=Actinoki neospora spheciospongiae OX=909613 GN=UO65_0789 PE=4 SV =1
MGGETGLTGKVAVVTGAARGIGAAIAGALAREGATVAAVDIEAGVAGGAVVPFAADVADPAAIARVVDEVERDLGPIDIGVCAAGVLRPASVCDTRDEDWAATFAVNATGVLTVLREVSRRMVPRGRGALVTVGSNAVGVPRAGMAAYAASKAAATMLTRCLGLELAGSGVRCNVVSPGSTDTEMQRALWTGGNGPERVIAGDAERFRVGIPLGRIADPDDIADAVVFLVSDRARHITMQNLYVDGGATLCA

SEQ ID NO: 91431 - protein, 265 aa, Actinomadura parvosata
  misc_feature (1)..(265): tr|A0A2P9I155|A0A2P9I155_9ACTN 2,3-dihydro-2,3-dihydrox ybenzoate dehydrogenase of siderophore biosynthesis OS= Actinomadura parvosata subsp. kistnae OX=1955414 GN=KIS 93_01036 PE=4 SV=1
MGEWGVSSRPSSLAQQSALVTGAAGGIGAAVASALARAGAAVTAFDLDWTRLRHVAAEITAAGHTVTARRLDVTNPWAVEAALALAEAEHGPPDVLVNVAGILHRGSTVSFSEEWWRRLFAVNTDGVFHVSRAAARRMVPRHGGAIITVTSNAAIVPRAQLAGYAASKAAATMFTRCLGLELAAFGIRCNVVAPGSTDTPMLRQAGHDASSAVEGVPEEFRLGIPLGRIASPSDIADAVLFLASDQARHITMHVMPVDGGAGLSA

SEQ ID NO: 91432 - protein, 260 aa, Actinomadura sp.
  misc_feature (1)..(260): tr|A0A5C4JLJ4|A0A5C4JLJ4_9ACTN 2,3-dihydro-2,3-dihydrox ybenzoate dehydrogenase OS=Actinomadura sp. 14C53 OX=25 08997 GN=ETD83_02930 PE=4 SV=1
MPESWPGVAGKNALVTGAGRGIGAAVASALADAGATVAAVDVDTEGLTRLAARCADRVMPFPADVTDVAAVDAMIAAAEDRLGPVDIGVSVAGILRPATVCETSDEDWAATFAVNVTGVFTVLRELARRMTGRQRGALVTVGSNAAGVPRTGMAAYAASKAAATMLTRCLGLEVAGAGVRCNAVSPGSTDTAMLRLLWTDEDAESRVLHGDPDRFRVGIPLGRVAEPADIADAVLFLASDHARHITMQNIYVDGGATLRA

SEQ ID NO: 91433 - protein, 256 aa, Actinomadura sp.
  misc_feature (1)..(256): tr|A0A2P4UF86|A0A2P4UF86_9ACTN 2,3-dihydro-2,3-dihydrox ybenzoate dehydrogenase OS=Actinomadura sp. 5-2 OX=1926 885 GN=dhbA PE=4 SV=1
MDGIDGTTALVTGAGGGIGAAVARALAAAGASVAALDRDADAAERTAADLPGPALALPADVADPAAVEAAVDRAERDLGPLGVLVNTAGILRPAPVLDLADADWAATFAVNATGVLLASRAVARRMVPRRAGAIVTVGSNAARVPRARIAAYAAAKAAAVQFTKCLGLELAAHGIRCNVVSPGSTGTAMQRDLWPDPAAGERAAVRGDLAEHRTGIPLGRIADPADVADAVVFLASDRARHITLHDLYVDGGASLR

SEQ ID NO: 91434 - protein, 254 aa, Actinomadura sp.
  misc_feature (1)..(254): tr|A0A4R5AZ18|A0A4R5AZ18_9ACTN 2,3-dihydro-2,3-dihydrox ybenzoate dehydrogenase OS=Actinomadura sp. H3C3 OX=253 0368 GN=E1298_29200 PE=4 SV=1
MANMDEGVAVVTGAAGGIGAATVAALASTGRPVAALDVNGRALHELCDGLREKGCAIEAHLVDICDAAAVETVFDAVESVFGPVTEVVNVAGVLLPSSVVATSDGDWATTFAVNTTGVFVVSRAAARRMAGRGHGAIVTVGSNAGGIPRTGMAAYAASKAAAAHFTRCLGLELAPYGVRCNVVSPGSTDTPMLRELGAGDVIGGDPAAYRTGIPLGRVADPDDIADAVLFLLSERARHITMHELYVDGGATLRA

SEQ ID NO: 91435 - protein, 252 aa, Actinomadura sp.
  misc_feature (1)..(252): tr|A0A4R4L7Y8|A0A4R4L7Y8_9ACTN 2,3-dihydro-2,3-dihydrox ybenzoate dehydrogenase OS=Actinomadura sp. KC216 OX=25 30370 GN=E1264_39125 PE=4 SV=1
MAPNGIAVVTGAAGGIGAATVEALAGNDRRVAALDLDADRVRALADQAGERGLDVTGHAVDVGDAPAVEAVFDKVEAELGPVTELVNVAGLLRPAAVLDTTDADWAATFAVNVTGVFVVSRAAARRMRRRRRGAIVTVGSNAGGVPRCGMAAYAASKAAAAHLTRCLGLEMAPHGVRCNIVSPGSTDTPMLRALGAGDVIAGDAAAFRTGIPLGRIAAPADIADAVLFLLSERARHITMHELYVDGGATLRA

SEQ ID NO: 91436 - protein, 261 aa, Actinomadura sp.
  misc_feature (1)..(261): tr|A0A372GFP2|A0A372GFP2_9ACTN 2,3-dihydro-2,3-dihydrox ybenzoate dehydrogenase OS=Actinomadura sp. LHW52907 OX =2303421 GN=D0T12_18890 PE=3 SV=1
MELTGIESTVALVTGAAQGIGAAVAATLAGAGAHVAAVDRNADRLTTTVAKLEAEGGTARGYTVDVRDSAAVDALVRRVEDELGPIGILVNAAGVLHTGRVVELPDRQWDETFSVNAGGVFNVSRAVARRMIDRRRGAVVTVASNAAGVPRVEMAAYAASKAASAQFTRCLGLELSGYGIRCNVVSPGSTDTPMLRSMLGEEGDPRQVVEGSPAAYRVGIPLRKLARPRDVAEAVAYLVSDQAGHVTMHDLYVDGGAALHV

SEQ ID NO: 91437 - protein, 255 aa, Actinomadura syzygii
  misc_feature (1)..(255): tr|A0A5D0TZM0|A0A5D0TZM0_9ACTN 2,3-dihydro-2,3-dihydrox ybenzoate dehydrogenase OS=Actinomadura syzygii OX=1427 538 GN=FXF65_30275 PE=4 SV=1
MRDRVTAVTGAAGGIGAATVAALVSAGRPVAALDIDQDGLRALCGDLQERRPNEAHTVQAHTVDIRDRAAVEAALDKVEAGLGPVTGLVNVAGVLRPSPVVSTTDDDWAATFAVNTTGVFVACRAAARRMAERGQGAIVTVGSNAGGVPRTGMAAYAASKAAAAHFTRCLGLELAPHGVRCNIVSPGSTDTPMLRALGAGDVVEGDLASFRTGIPLGRVADPRDVAEAVLFLLSEKARHITMHELYVDGGAALRA

SEQ ID NO: 91438 - protein, 249 aa, Aeromonas caviae
  misc_feature (1)..(249): tr|A0A2X4NPA2|A0A2X4NPA2_AERCA 2,3-dihydroxybenzoate-2, 3-dehydrogenase OS=Aeromonas caviae OX=648 GN=entA PE=4 SV=1
MAFDFTGKRVWVTGAGRGIGREVATQFVAAGATVVGLDLAFPDAGYPYATRLLDIGDSKAVNACCAALLADGGLDVLVNGAGVLRLGPTETLSDDDWHDCMTVNASGVFYLLRALVPHFKGQRRGAIVTIGSNAAHVPRMQMAAYCASKAAVTSLTQTVGLELAPFGVRANLVSPGSTDTPMLRGMLSSEEAMARTIAGLPEQFKLGIPLRKVATPAEIAHTVLFLASDLASHITLQDLVVDGGATLSA

SEQ ID NO: 91439 - protein, 248 aa, Aeromonas diversa
  misc_feature (1)..(248): tr|N9V506|N9V506_9GAMM 2,3-dihydroxybenzoate-2,3-dehydr ogenase OS=Aeromonas diversa CDC 2478-85 OX=1268237 GN= G114_18436 PE=4 SV=1
MRWQFDGKRVWVTGAGRGIGRAVAEQFVAAGATVVGLDLHFPEPPYTYGVRELDLRDGAAVSRCAAELLEEGLDVLVNAAGVLRLGSLEHLSDEDWHDCMGVNAGAVFSLLRAVTPHFKGLGRGSIVTVSSNAAHVPRMQMAAYCASKAAVSSLTRTAGLELAPFGVRVNLVSPGSTDTPMLRGMLPDEGALSRTIAGLPEQFKLGIPLAKLANTAEVAAAVLFLASDLASHITLQDLVVDGGATLGA

SEQ ID NO: 91440 - protein, 260 aa, Aeromonas encheleia
  misc_feature (1)..(260): tr|A0A448KV91|A0A448KV91_9GAMM 2,3-dihydroxybenzoate-2, 3-dehydrogenase OS=Aeromonas encheleia OX=73010 GN=entA PE=4 SV=1
MGTKMKQEQSKVAFDFSGKRVWVTGAGRGIGREVAEQFVAAGASVVGLDRDFPHGTYPYAIRTLDIRDPQVVNACCERLLADGGLDVLVNGAGVLRLGPTETLSDADWDDCMAVNASGVFYLLRALVPHFKAQRRGAIVTIGSNAAHVPRMQMAAYCASKAAVTSLTQTVGLELAPFGVRANLVSPGSTDTEMLRGMLPDEAALARTIAGLPAQFKLGIPLRKIATPSEIAHTVLFLASDLASHITLQDLVVDGGATLSA

SEQ ID NO: 91441 - protein, 261 aa, Aeromonas hydrophila
  misc_feature (1)..(261): tr|V9ZWR2|V9ZWR2_AERHY 2,3-dihydroxybenzoate-2,3-dehydr ogenase OS=Aeromonas hydrophila 4AK4 OX=1354302 GN=AH4A K4_1751 PE=4 SV=1
MVMGKMTKDQQKMAFDFTGKRVWVTGAGRGIGREVAMQFVAAGASVVGLDLAFPEADYPYATRLLDIGDSKAVNACCAALLADGGLDVLVNGAGVLRLGPTDALSDDDWHDCMMVNASGVFYLLRALVPHFKGQQRGAIVTIGSNAAHVPRMQMAAYCASKAAVTSLTQTVGLELAPFGVRANLVSPGSTDTPMLRGMLPSEEAMARTIAGLPEQFKLGIPLRKVATPAEIAHTVLFLASDLASHITLQDLVVDGGATLSA

SEQ ID NO: 91442 - protein, 249 aa, Aeromonas hydrophila
  misc_feature (1)..(249): tr|A0A4P7IWE8|A0A4P7IWE8_AERHY 2,3-dihydro-2,3-dihydrox ybenzoate dehydrogenase OS=Aeromonas hydrophila OX=644 GN=dhbA PE=4 SV=1
MAFDFTGKRVWVTGAGRGIGREVATQFVAAGAIVVGLDLAFPEADYPYATRLLDIGDSKAVNACCAALLADGGLDVLVNGAGVLRLGPTDALSDDDWHDCMTVNASGVFYLLRALVPHFKGQQRGAIVTIGSNAAHVPRMQMAAYCASKAAVTSLTQTVGLELAPFGVRANLVSPGSTDTPMLRGMLPSEEAMARTIAGLPEQFKLGIPLRKVATPAEIAHTVLFLASDLASHITLQDLVVDGGATLSA

SEQ ID NO: 91443 - protein, 249 aa, Aeromonas hydrophila
  misc_feature (1)..(249): tr|A0KL38|A0KL38_AERHH 2,3-dihydro-2,3-dihydroxybenzoat e dehydrogenase OS=Aeromonas hydrophila subsp. hydrophi la (strain ATCC 7966 / DSM 30187 / JCM 1027 / KCTC 2358 / NCIMB 9240) OX=380703 GN=AHA_2475 PE=4 SV=1
MAFDFTGKRVWVTGAGRGIGCEVATQFVAAGAAVVGLDLAFLEADYPYATRLLDIGDSKAVNACCAALLADGGLDVLVNGAGVLRLGPTETLSDDDWHDCMTVNASGVFYLLRALVPHFKEQRRGAIVTIGSNAAHVPRMQMAAYCASKAAVTSLTQTVGLELAPFGVRANLVSPGSTDTPMLRGMLPSEEAMARTIAGLPEQFKLGIPLRKVATPAEIAHTVLFLASDLASHITLQDLVVDGGATLSA

SEQ ID NO: 91444 - protein, 249 aa, Aeromonas hydrophila
  misc_feature (1)..(249): tr|A0A2R4TV03|A0A2R4TV03_AERHY 2,3-dihydro-2,3-dihydrox ybenzoate dehydrogenase OS=Aeromonas hydrophila subsp. hydrophila OX=196023 GN=dhbA PE=4 SV=1
MAFDFTGKRVWVTGAGRGIGREVAMQFVAAGACVVGLDLAFPEADYPYATRLLDIGDSKAVNACCAALLADGGLDVLVNGAGVLRLGPTDALSDDDWHDCMTVNASGVFYLLRALVPHFKGQRRGAIVTIGSNAAHVPRMQMAAYCASKAAVTSLTQTVGLELAPFGVRANLVSPGSTDTPMLRGMLPNEEAMARTIAGLPEQFKLGIPLRKVATPAEIAHTVLFLASDLASHITLQDLVVDGGATLSA

SEQ ID NO: 91445 - protein, 255 aa, Aeromonas jandaei
  misc_feature (1)..(255): tr|A0A3N6WPA7|A0A3N6WPA7_AERJA 2,3-dihydro-2,3-dihydrox ybenzoate dehydrogenase OS=Aeromonas jandaei OX=650 GN= dhbA PE=4 SV=1
MSEWQGRTVWVTGAAQGIGHAVARTFAEAGASVVAFDLQLAEALPGNVKRVVIDVSDSEAVTRCCEQLLDEGLGPDVLVNVAGVLATGGLDEVDDALLQRTFAINTFAPFYLMRALTPWFQGRRRGAIVNVSSNAGRVPRVGMGIYGASKAALTSLTQTAGLELAPYGVRCNLVSPGSTRTPMLYGMWQEGEAEQQEGELRTIAGLPGQFKLGIPLGKLGTPDEVAACVLFLASDAASHITLQDLVVDGGATLGV

SEQ ID NO: 91446 - protein, 249 aa, Aeromonas molluscorum
  misc_feature (1)..(249): tr|R1H5I7|R1H5I7_9GAMM 2,3-dihydroxybenzoate-2,3-dehydr ogenase OS=Aeromonas molluscorum 848 OX=1268236 GN=G113 _17916 PE=4 SV=1
MAFDFTGKRVWVTGAGRGIGREVATQFVAAGACVVGLDLAFPEADYPYATRLLDIGDSKAVNACCAALLADGGLDVLVNGAGVLRLGPTETLSDDDWHDCMTVNASGVFYLLRALVPHFKGQRRGAIVTIGSNAAHVPRMQMAAYCASKAAVTSLTQTVGLELAPFGVRANLVSPGSTDTPMLRGMLPSEEAMARTIAGLPEQFKLGIPLRKLATPAEIAHTVLFLASDLASHITLQDLVVDGGATLSA

SEQ ID NO: 91447 - protein, 249 aa, Aeromonas salmonicida
  misc_feature (1)..(249): tr|A0A1Z1NMJ9|A0A1Z1NMJ9_AERSA 2,3-dihydro-2,3-dihydrox ybenzoate dehydrogenase OS=Aeromonas salmonicida OX=645 GN=O23A_p1131 PE=4 SV=1
MAFDFSGKRVWVTGAGRGIGREVAEQFVAAGAAVVGLDLAFPEVGYPYATRLIDIGDAAAVNACCSALLADGGLDVLVNGAGVLRLSPTENLSDQDWHDCMTVNATGVFYLLRALVPHFKGQRRGAIVTIGSNAAHVPRMQMAAYCASKAAVTSLTQTVGLELAPFGVRVNLVSPGSTDTPMLRGMLPDEGAMARTIAGLPDQFKLGIPLRKIATPAEIANTVLFLASDLASHITLQDLVVDGGATLSA

SEQ ID NO: 91448 - protein, 256 aa, Aeromonas salmonicida
  misc_feature (1)..(256): tr|T0PPZ3|T0PPZ3_AERSA 2,3-dihydro-2,3-dihydroxybenzoat e dehydrogenase EntA OS=Aeromonas salmonicida subsp. pe ctinolytica 34mel OX=1324960 GN=entA PE=4 SV=1
MSKEQQAVAFDFSGKRVWVTGAGRGIGREVAMQFVAAGASVVGLDLAFPEAGYPYATRLLDIGDSKAVKACCAALLADGGLDVLVNGAGVLRLGPTENLSDQDWHDCMTVNATGVFYLLRALVPHFKAQRCGAIVTIGSNAAHVPRMQMAAYCASKAAVTSLTQTVGLELAPFGVRVNLVSPGSTDTPMLRGMLPDEGAMTRTIAGLPDQFKLGIPLRKIATPAEIANTVLFLASDLASHITLQDLVVDGGATLSA

SEQ ID NO: 91449 - protein, 249 aa, Aeromonas salmonicida
  misc_feature (1)..(249): tr|A0A4U7JUV4|A0A4U7JUV4_AERSA 2,3-dihydro-2,3-dihydrox ybenzoate dehydrogenase OS=Aeromonas salmonicida subsp. salmonicida OX=29491 GN=dhbA PE=4 SV=1
MAFDFSGKRVWVTGAGRGIGREVAEQFVAAGAAVVGLDLAFPEADYPYATRLLDIGDAAAVNACCAALLADGGLDVLVNGAGVLRLGPTENLSDQDWHDCMTVNATGVFYLLRALVPHFKTQRRGAIVTIGSNAAHVPRMQMAAYCASKAAVTSLTQTVGLELAPFGVRVNLVSPGSTDTPMLRGMLPDEGAMARTIAGLPDQFKLGIPLRKIATPAEIANTVLFLASDLASHITLQDLVVDGGATLSA

SEQ ID NO: 91450 - protein, 249 aa, Aeromonas sp.
  misc_feature (1)..(249): tr|A0A369SQY8|A0A369SQY8_9GAMM 2,3-dihydro-2,3-dihydrox ybenzoate dehydrogenase OS=Aeromonas sp. ARM81 OX=17473 84 GN=ASJ36_12940 PE=4 SV=1
MAFDFTGKRVWVTGAGRGIGREVATQFVAAGACVVGLDLAFPEADYPYATRLLDIGDSKAVNACCAALLADGGLDVLVNGAGVLRLGPTDALSDDDWHDCMTVNASGVFYLLRALVPHFKGQQRGAIVTIGSNAAHVPRMQMAAYCASKAAVTSLTQTVGLELAPFGVRANLVSPGSTDTPMLRGMLPSEEAMARTIAGLPEQFKLGIPLRKVATPAEIAHTVLFLASDLASHITLQDLVVDGGATLSA

SEQ ID NO: 91451 - protein, 249 aa, Aeromonas taiwanensis
  misc_feature (1)..(249): tr|A0A5F0K9D6|A0A5F0K9D6_9GAMM 2,3-dihydro-2,3-dihydrox ybenzoate dehydrogenase OS=Aeromonas taiwanensis OX=633 417 GN=DRM93_13620 PE=4 SV=1
MAFDFTGKRVWVTGAGRGIGREVATQFVAAGACVVGLDLAFPEADYPYATRLLDIGDSKAVNACCAALLADGGLDVLVNGAGVLRLGPTETLSDDDWHDCMTVNASGVFYLLRALVPHFKEQQRGAIVTIGSNAAHVPRMQMAAYCASKAAVTSLTQTVGLELAPFGVRANLVSPGSTDTPMLRGMLPSEEAMARTIAGLPEQFKLGIPLRKVATPAEIAHTVLFLASDLASHITLQDLVVDGGATLSA

SEQ ID NO: 91452 - protein, 255 aa, Aeromonas veronii
  misc_feature (1)..(255): tr|A0A0E2LE71|A0A0E2LE71_9GAMM 2,3-dihydroxybenzoate-2, 3-dehydrogenase OS=Aeromonas veronii Hm21 OX=1347420 GN =M001_16850 PE=4 SV=1
MSEWQGRTVWVTGAAQGIGHAVAGTFAEAGASVVAFDLQLAEALPGNVKGVVIDVSDSEAVTRCCEQLLDEGLGPDVLVNVAGILATGRLDEVDDALLQRTFAINTFAPFYLMRALTPWFQGRRRGAIVNVSSNAGRVPRVGMGIYGASKAALTSLTQTVGLELAPYGVRCNLVSPGSTRTPMLYGMWQEGEAAQQEGELRTIAGLPGQFKLGIPLGKLGTPDEVAACVLFLASDAASHITLQDLVVDGGATLGV

SEQ ID NO: 91453 - protein, 253 aa, Aeromonas veronii
  misc_feature (1)..(253): tr|A0A3A9INI6|A0A3A9INI6_9GAMM 2,3-dihydro-2,3-dihydrox ybenzoate dehydrogenase OS=Aeromonas veronii OX=654 GN= dhbA PE=4 SV=1
MSEWQGRTVWVTGAAQGIGHAVARTFAEAGASVVALDLQLAEALPGNVKGLVIDVSDSEAVTRCCEQLLDEGLGPDVLVNVAGVLATGRLDEVDDALLQRTFAINTFAPFYLMRALTPWFQGRHRGAIVNVSSNAGRVPRVGMGIYGASKAALTSLTQTAGLELAPYGVRCNLVSPGSTRTPMLYGMWQEGEQREGEIRTIAGLPGQFKLGIPLGKLGTPDEVAACVLFLASDAASHITLQDLVVDGGATLGG

SEQ ID NO: 91454 - protein, 251 aa, Agrobacterium deltaense
  misc_feature (1)..(251): tr|A0A1S7U4P7|A0A1S7U4P7_9RHIZ 2,3-dihydro-2,3-dihydrox ybenzoate dehydrogenase OS=Agrobacterium deltaense NCPP B 1641 OX=1183425 GN=entA PE=4 SV=1
MTQQRFTGRRVLVTGTAQGIGRRIAERFIEEGAEVIGLDLLADMAEAPFRQIALDITDAAAVETTCKAIESEWGGLDILVNAAGILRLGDSESLTPADWKACMDVNAAGPFYMLRQWSSTFKRQRRGAIVNVGSNAAVVPRIGMMAYCASKAALVSLSHCAALELAPYGVRCNVVSPGSTDTPMLAGMLSDPSGKDRLVAGLPEQFKLGIPLGKIARPDDIADTVLFLASDQAGHVTMQQIVVDGGATLAA

SEQ ID NO: 91455 - protein, 251 aa, Agrobacterium deltaense
  misc_feature (1)..(251): tr|A0A1S7QK27|A0A1S7QK27_9RHIZ 2,3-dihydro-2,3-dihydrox ybenzoate dehydrogenase OS=Agrobacterium deltaense RV3 OX=1183426 GN=entA PE=4 SV=1
MTQQRFTGRRVLVTGTAQGIGRRIAERFIEEGAEVIGLDLLADTAEAPFRQIALDITDAAAVETACKAIESEWGGLDILVNAAGILRLGDSESLTPEDWKACMDVNAAGPFYMLRQWSGTFKRQGRGAIVNVGSNAAVVPRIGMMAYCASKAALVSLSHCAALELAPYGVRCNVVSPGSTDTPMLAGMLSDPSGKDRLVAGLPDQFKLGIPLGKIARPDDIADTVLFLASDQAGHVTMQQIVVDGGATLAA

SEQ ID NO: 91456 - protein, 251 aa, Agrobacterium deltaense
  misc_feature (1)..(251): tr|A0A1S7RGY0|A0A1S7RGY0_9RHIZ 2,3-dihydro-2,3-dihydrox ybenzoate dehydrogenase OS=Agrobacterium deltaense Zutr a 3/1 OX=1183427 GN=entA PE=4 SV=1
MTQQRFTGRRVLVTGTAQGIGRRIADRFIEEGAEVIGLDLLADTVEAPFRQIALDITDAAAVETTCKAIESEWGGLDILVNAAGILRLGDSESLTPADWKACMDVNAAGPFYMLRQWSGAFKRQRRGAIVNVGSNAAVVPRIGMMAYCASKAALVSLSHCAALELAPYGVRCNVVSPGSTDTPMLAGMLSDPSGKERLVAGLPEQFKLGIPLGKIARPDDIADTVLFLASDQAGHVTMQQIVVDGGATLAA

SEQ ID NO: 91457 - protein, 251 aa, Agrobacterium genomosp.
  misc_feature (1)..(251): tr|A0A1S7RUH7|A0A1S7RUH7_9RHIZ 2,3-dihydro-2,3-dihydrox ybenzoate dehydrogenase OS=Agrobacterium genomosp. 3 st r. CFBP 6623 OX=1183432 GN=entA PE=4 SV=1
MTQQRFTGRRVLVTGTAQGIGHRIAERFIEEGAEVIGLDLLAGTTEAPFRQIALDITDAAAVERVCKAIESEWGGLDILVNAAGILRLGDSESLTPEDWKACMDVNAAGPFYLLRQWSGVFKRQRRGAIVNVGSNAAVVPRIGMMAYCASKAALVSLSHCAALELAPYGVRCNVVSPGSTDTPMLAGMLSDPTGKERLVAGLPEQFKLGIPLGKIARPDDIADTVLFLASDQAGHVTMQQIVVDGGATLAA

SEQ ID NO: 91458 - protein, 251 aa, Agrobacterium genomosp.
  misc_feature (1)..(251): tr|A0A1S7RHY6|A0A1S7RHY6_9RHIZ 2,3-dihydro-2,3-dihydrox ybenzoate dehydrogenase OS=Agrobacterium genomosp. 5 st r. CFBP 6626 OX=1183435 GN=entA PE=4 SV=1
MTQRRFTERRVLVTGAAQGIGRRIAERFTEEGAEVIGLDLIADATDATFRHITLDITDAAAVEAVSKAIEKEWGGLDILVNAAGILRLGDSESLTPEDWRACMDVNAAGPFYLLRQWSGVFKRQRRGAIVNVSSNAAVVPRIGMMAYCASKAALVSLSHCAALELAPYGVRCNVVSPGSTDTPMLAGMLSDPAGKDRLVAGLPEQFKLGIPLGKIARPDDIADTVLFLASDQAGHVTMQQIVVDGGATLAA

SEQ ID NO: 91459 - protein, 251 aa, Agrobacterium radiobacter
  misc_feature (1)..(251): tr|W1LC72|W1LC72_RHIRD 2,3-dihydroxybenzoate-2,3-dehydr ogenase OS=Agrobacterium radiobacter DSM 30147 OX=13367 45 GN=L902_06655 PE=4 SV=1
MTQQRFTGRRVLVTGTAQGIGRRIAERFIEEGAEVIGLDLLARTTEAPFRQIALDITDARAVEKACKAIESEWGGLDILVNAAGILRLGDSESLTPADWKACMDVNAAGPFYMLRQWSSIFKRQRRGAIVNVGSNAAVVPRIGMMAYCASKAALVSLSHCAALELAPYGVRCNVVSPGSTDTPMLAGMLSDPAGKERLVAGLPEQFKLGIPLGKIARPDDIADTVLFLASDQAGHVTMQQIVVDGGATLAA

SEQ ID NO: 91460 - protein, 251 aa, Agrobacterium rhizogenes
  misc_feature (1)..(251): tr|A0A546XAP3|A0A546XAP3_AGRRH 2,3-dihydro-2,3-dihydrox ybenzoate dehydrogenase OS=Agrobacterium rhizogenes OX= 359 GN=dhbA PE=4 SV=1
MTQQRFTGRRVLVTGTAQGIGRRIAERFIEEGAEVIGLDLLAGTEEAPFRQIALDITDAAAVEGVCKAIESEWGGLDILVNAAGILRLGDSESLTPEDWKACMDVNAAGPFHLLRQWSGAFKRQRRGAIVNVGSNAAVVPRIGMMAYCASKAALVSLSHCAALELAPYGVRCNVVSPGSTDTPMLAGMLSDPTGKERLVAGLPEQFKLGIPLGKIARPDDIADTVLFLASDQAGHVTMQQIVVDGGATLAA

SEQ ID NO: 91461 - protein, 251 aa, Agrobacterium salinitolerans
  misc_feature (1)..(251): tr|A0A546WM68|A0A546WM68_9RHIZ 2,3-dihydro-2,3-dihydrox ybenzoate dehydrogenase OS=Agrobacterium salinitolerans OX=1183413 GN=dhbA PE=4 SV=1
MTQQRFTGRRALVTGAARGIGRRIAERFIEEGAEVIGLDLLADTVESPFRQIALDITQAEAVETTCKAIESEWGGLDILVNAAGILRLGDSESLTPADWKTCMDVNAAGPFYMLRQWSGTFKRQRRGAIVNIGSNAAVVPRIGMMAYCASKAALVSLSHCAALELAPYGVRCNVVSPGSTDTPMLAGMLSDPAGKDRLVAGLPEQFKLGIPLGKIARPDDIADTVLFLASDQAGHVTMQQIVVDGGATLAA

SEQ ID NO: 91462 - protein, 263 aa, Agrobacterium salinitolerans
  misc_feature (1)..(263): tr|A0A1S7U7F2|A0A1S7U7F2_9RHIZ 2,3-dihydro-2,3-dihydrox ybenzoate dehydrogenase OS=Agrobacterium salinitolerans str. Hayward 0363 OX=1183434 GN=entA PE=4 SV=1
MKSGSQPERTDKMTQQRFTGRRVLVTGTAQGIGRRIAERFIEEGAEVIGLDLLADAAEAPLRQIALDITDAAAVETVCKAIESEWGGLDILVNAAGILRLGDSESLTPADWKACMDVNAAGPFYMLRQWSGTFKRQRRGAIVNVGSNAAVVPRIGMMAYCASKAALVSLSHCAALELAPYGVRCNVVSPGSTDTPMLAGMLSDPSGKDRLVAGLPEQFKLGIPLGKIARPDDIADTVLFLASDQAGHVTMQQIVIDGGATLAA

SEQ ID NO: 91463 - protein, 251 aa, Agrobacterium sp.
  misc_feature (1)..(251): tr|A0A5D9CP92|A0A5D9CP92_9RHIZ 2,3-dihydro-2,3-dihydrox ybenzoate dehydrogenase OS=Agrobacterium sp. B1(2019) O X=2607032 GN=dhbA PE=4 SV=1
MTQQRFTGRRVLVTGTAQGIGRRIAERFIEEGAEVIGLDLLADAAEAPLRQIALDITDAAAVETVCKAIESEWGGLDILVNAAGILRLGDSESLTPADWKACMDVNAAGPFYMLRQWSGTFKRQRRGAIVNVGSNAAVVPRIGMMAYCASKAALVSLSHCAALELAPYGVRCNVVSPGSTDTPMLAGMLSDPSGKDRLVAGLPEQFKLGIPLGKIARPDDIADTVLFLASDQAGHVTMQQIVIDGGATLAA

SEQ ID NO: 91464 - protein, 251 aa, Agrobacterium sp.
  misc_feature (1)..(251): tr|A0A437KUU0|A0A437KUU0_9RHIZ 2,3-dihydro-2,3-dihydrox ybenzoate dehydrogenase OS=Agrobacterium sp. CNPSo 2736 OX=2499627 GN=dhbA PE=4 SV=1
MTQQRFTGRRVLVTGTAQGIGRRIAERFIEEGAEVIGLDLLADTVEAPFRQIALDITDAAAVETTCKEIESEWGGLDILVNAAGILRLGDSESLTPADWKACMDVNAAGPFYMLRQWSGAFKRQRRGAIVNVGSNAAVVPRIGMMAYCASKAALVSLSHCAALELAPYGVRCNVVSPGSTDTPMLAGMLSDPSGKDQLVAGVPEQFKLGIPLGKIARPDDIADTVLFLASDQAGHVTMQQIVVDGGATLAA

SEQ ID NO: 91465 - protein, 251 aa, Agrobacterium sp.
  misc_feature (1)..(251): tr|A0A0X6ZNL6|A0A0X6ZNL6_9RHIZ 2,3-dihydroxybenzoate-2, 3-dehydrogenase OS=Agrobacterium sp. D14 OX=1336743 GN= L901_12400 PE=4 SV=1
MTQQRFTGRRVLVTGTAQGIGRRIAERFIEEGAEVIGLDLLADTVGAPFRQIALDITDSAAVEAACKAIESEWGGLDILVNAAGILRLGDSESLTPADWKACMDVNAAGPFYMLRQWSGTFKRQRRGAIVNVGSNAAVVPRIGMMAYCASKAALVSLSHCAALELAPYGVRCNVVSPGSTDTPMLAGMLSDPSGKDRLVAGLPEQFKLGIPLGKIARPDDIADTVLFLASNQAGHVTMQQIVVDGGATLAA

SEQ ID NO: 91466 - protein, 251 aa, Agrobacterium sp.
  misc_feature (1)..(251): tr|A0A3R9DME1|A0A3R9DME1_9RHIZ 2,3-dihydro-2,3-dihydrox ybenzoate dehydrogenase OS=Agrobacterium sp. FDAARGOS_5 25 OX=2420311 GN=dhbA PE=4 SV=1
MTQQRFTGRRVLVTGTAQGIGRRIAERFIEEGADLIGLDLQARTAEAPFRQIALDITDAAAVERACKAIETEWGGLDILVNAAGILRLGDSESLTPADWKACMDVNAAGPFHMLRQWSATFKRQRRGAIVNIGSNAAVVPRIGMMAYCASKAALVSLSHCAALELAPYGVRCNVVSPGSTDTPMLAGMLSDPAGKDRLVAGLPEQFKLGIPLGKIARPDDIADTVLFLASDQAGHVTMQQIVVDGGATLAA

SEQ ID NO: 91467 - protein, 251 aa, Agrobacterium sp.; identical to SEQ ID NO: 91457
  misc_feature (1)..(251): tr|A0A4U6ASA9|A0A4U6ASA9_9RHIZ 2,3-dihydro-2,3-dihydrox ybenzoate dehydrogenase OS=Agrobacterium sp. LC34 OX=16 43810 GN=dhbA PE=4 SV=1

SEQ ID NO: 91468 - protein, 251 aa, Agrobacterium sp.
  misc_feature (1)..(251): tr|A0A0X6ZZQ6|A0A0X6ZZQ6_9RHIZ 2,3-dihydroxybenzoate-2, 3-dehydrogenase OS=Agrobacterium sp. LY4 OX=477195 GN=L 904_25300 PE=4 SV=1
MTQQRFTGRRVLVTGTAQGIGRRIAERFIEEGAEVIGVDLLADTVEAPFRQIALDITDAAAVETTSKAIESEWGGLDILVNAAGILRLGDSESLTPADWKACMDVNAAGPFYMLRQWSSTFKRQRRGAIVNVGSNAAVVPRIGMMAYCASKAALVSLSHCAALELAPYGVRCNVVSPGSTDTPMLAGMLSDPSGKDRLVAGLPEQFKLGIPLGKIARPDDIADTVLFLASDQAGHVTMQQIVVDGGATLAA

SEQ ID NO: 91469 - protein, 251 aa, Agrobacterium sp.
  misc_feature (1)..(251): tr|A0A328ERZ5|A0A328ERZ5_9RHIZ 2,3-dihydro-2,3-dihydrox ybenzoate dehydrogenase OS=Agrobacterium sp. MS2 OX=134 5498 GN=DOU54_23685 PE=4 SV=1
MTQQRFTGRRVLVTGTAQGIGRRIAERFIEEGADLIGLDLQARTAEAPFRQIALDITDAAAVERASKAIETEWGGLDILVNAAGILRLGDSESLTPADWKACMDVNAAGPFHMLRQWSATFKRQRRGAIVNIGSNAAVVPRIGMMAYCASKAALVSLSHCAALELAPYGVRCNVVSPGSTDTPMLAGMLSDPAGKDRLVAGLPEQFKLGIPLGKIARPDDIADTVLFLASDQAGHVTMQQIVVDGGATLAA

SEQ ID NO: 91470 - protein, 250 aa, Agrobacterium tumefaciens
  misc_feature (1)..(250): tr|H0HGB0|H0HGB0_RHIRD 2,3-dihydroxybenzoate-2,3-dehydr ogenase OS=Agrobacterium tumefaciens 5A OX=1107544 GN=A T5A_23565 PE=4 SV=1
MQNRFNGRRVLVTGAAQGIGRRIAERFTEEGAEVIGLDLIADATDATFRQITLDITDAAAVEAASKAIEKEWGGLDILVNAAGILRLGDSESLTPQDWNACMDVNAAGPFYLLRQWSGVFKRQRRGAIVNIASNAAVVPRIGMLAYCASKAALVSLSHCAALELAPYGVRCNVVSPGSTDTPMLAGMLNDPSGKQRLVAGLPEQFKLGIPLGKIARPDDIADTVLFLASDQAGHVTMQQIVVDGGATLAA

SEQ ID NO: 91471 - protein, 251 aa, Agrobacterium tumefaciens
  misc_feature (1)..(251): tr|M8B5T7|M8B5T7_RHIRD 2,3-dihydroxybenzoate-2,3-dehydr ogenase OS=Agrobacterium tumefaciens str. Cherry 2E-2-2 OX=1281779 GN=H009_07736 PE=4 SV=1
MTQQRFTGRRVLVTGTAQGIGRRIAERFIEEGAEVIGLDLLADTADAPFRQIALDITDAAAVETTCKAIESEWGGLDILVNAAGILRLGDSESLTPADWKACMDVNAAGPFYMLRQWSGTFKRQRRGAIVNVGSNAAVVPRIGMMAYCASKAALVSLSHCAALELAPYGVRCNVVSPGSTDTPMLAGMLSDPSGKDRLVAGLPEQFKLGIPLGKIARPDDIADTVLFLASDQAGHVTMQQIVVDGGATLAA

SEQ ID NO: 91472 - protein, 251 aa, Agrobacterium tumefaciens
  misc_feature (1)..(251): tr|A0A1S7R3R1|A0A1S7R3R1_RHIRD 2,3-dihydro-2,3-dihydrox ybenzoate dehydrogenase OS=Agrobacterium tumefaciens st r. Kerr 14 OX=1183424 GN=entA PE=4 SV=1
MTQQRFTGRRVLVTGTAQGIGRRIAERFIEEGAEVIGLDLLARTTEAPFRQIALDITDATAVETACKAIESEWGGLDILVNAAGILRLGDSESLTPADWKACMDVNAAGPFYMLRQWSGIFKRQRRGAIVNVGSNAAVVPRIGMMAYCASKAALVSLSHCAALELAPYGVRCNVVSPGSTDTPMLAGMLSDPSGKERLVAGLPEQFKLGIPLGKIARPDDIADTVLFLASDQAGHVTMQQIVVDGGATLAA

SEQ ID NO: 91473 - protein, 257 aa, Alcaligenaceae bacterium
  misc_feature (1)..(257): tr|A0A4S1EGR5|A0A4S1EGR5_9BURK 2,3-dihydro-2,3-dihydrox ybenzoate dehydrogenase OS=Alcaligenaceae bacterium 429 OX=2562948 GN=dhbA PE=4 SV=1
MYPEFQQQHVLISGAASGIGENVAQQLLALGARLTIIDLHADALNALAAQYPEHVLALGCDVGDFDAVANVVSQAEARFGSIDKLVCAAGRLQMGDITDLSAEQWQKTFTTNTNGVFNLCHHVGLRMKAQKRGAIVNISSNAATSPRMSMGAYAASKAAVTQMSRCLALELAAYNVRVNVVSPGSTDTPMQQAMWQQGSSRETVIAGSGPHYRLGIPLQKIATPAEIANGVLYLLSDQASHITLHDLRIDGGATLDQ

SEQ ID NO: 91474 - protein, 269 aa, Alcaligenaceae bacterium
  misc_feature (1)..(269): tr|A0A4Q4AX51|A0A4Q4AX51_9BURK 2,3-dihydro-2,3-dihydrox ybenzoate dehydrogenase OS=Alcaligenaceae bacterium OX= 2021368 GN=EON54_10750 PE=4 SV=1
MRCPVVIKAPAPRHDFTDACVLVSGAASGIGAALTENLLSQGARVIALDQDEAGLARLAKRWPDTQVHAAVVDVSQAGEVSAAVAAGQDKLGAIDKLACVAGVLQMGKIVDLSDEQWSRTFDVNVTGTFNVCRSVAQGMIQRRSGAIVTVSSNAATTPRASMGAYAASKAAVTQMTRCLALELAEYGIRCNIVSPGSTDTEMQRAMWRQGSSAETVIEGSLPNFRLGIPLRKIATPEEIVESILFLLSDRASHITLHDMRIDGGATLDQ

SEQ ID NO: 91475 - protein, 269 aa, Alcaligenaceae bacterium
  misc_feature (1)..(269): tr|A0A516WCB6|A0A516WCB6_9BURK 2,3-dihydro-2,3-dihydrox ybenzoate dehydrogenase OS=Alcaligenaceae bacterium SJ- 26 OX=2593958 GN=FMZ60_12815 PE=3 SV=1
MQLTPHPDTEFSGRHVLVTGAASGIGRALSLRLLALGARVSALDLDTSALAGLAWNADGIGEPDALCLQSVDVGDAAAVETAIAAAEQQHGPVQYLSCVAGVLQMGRIVDLTDAQWLRVFNINTTGVFNVCRRVARSMIEQGRGAIVNVSSNAAGTPRAGMGAYAASKAAVTQMSACLALELAPHGIRVNVVSPGSTDTEMQRAMWRQGSSLDTVLQGDAAQFRLGIPLGKIATPDDIADAILFLLSKRAGHITLHDLRVDGGATLDQR

SEQ ID NO: 91476 - protein, 260 aa, Alcaligenes aquatilis
  misc_feature (1)..(260): tr|A0A3R8ZMP8|A0A3R8ZMP8_9BURK 2,3-dihydro-2,3-dihydrox ybenzoate dehydrogenase OS=Alcaligenes aquatilis OX=323 284 GN=EGK70_09055 PE=4 SV=1
MSTQEFAGECVAVTGAARGIGASVTKLLLERGASIIALDLDVEGLTQLSQSEYSDRVSCHLVDISQADAVDAALAQGQEKLGPIQRLACVAGVLQMGRITELSNEQWDRTFAINTTGVFNVCRNVAKGMIERKQGAIVNVSSNSAATPRIAMGAYAASKAAVTQLSRCLGLELAPHGIRVNIISPGSTDTPMQQAMWAQGSSRETVIAGSGENYRLGIPLQKIATPEEIAEAVLFLLSDRASHITLSDLRVDGGATLDQG

SEQ ID NO: 91477 - protein, 262 aa, Alcaligenes faecalis
  misc_feature (1)..(262): tr|A0A3G6HIZ3|A0A3G6HIZ3_ALCFA 2,3-dihydro-2,3-dihydrox ybenzoate dehydrogenase OS=Alcaligenes faecalis OX=511 GN=EGY22_06020 PE=4 SV=1
MSTSAQEFAGECIAVTGAARGIGAAVTHLLLERGASVIALDLDVEGLTQLSQSEYSDRVSCHLVDISQADAVDAALAQGQEKLGPIHRLACVAGVLQMGRITELSNEQWDRTFAINTTGVFNVCRNVAKGMIERKQGAIVNVSSNSAATPRIAMGAYAASKAAVTQLSRCLGLELAPHGIRVNIISPGSTDTPMQQAMWAQGSSRETVIAGSGENYRLGIPLQKIATPEEIAEAVLFLLSDRASHITLSDLRVDGGATLDQG

SEQ ID NO: 91478 - protein, 234 aa, Alcaligenes xylosoxydans
  misc_feature (1)..(234): tr|A0A0D6I027|A0A0D6I027_ALCXX 2,3-dihydro-2,3-dihydrox ybenzoate dehydrogenase OS=Alcaligenes xylosoxydans xyl osoxydans OX=85698 GN=entA PE=4 SV=1
MSTDPTPGHAVVTGATGGIGQAIVQRLLDGRWRVTGLDLGPAVTRHPAYRHVTVDLCDDAATHRALQGLDNATALVHAAGLLRVAPLAQSESADGELMWKLHVDAAVRLTRDLAPAMVAQGGGRVVLVGSRVAQGMPGRGQYAASKAALVALAHSWGAELAGQGVTVNVVSPAATQTGMLEDPARAVSPARMPPIGRLIQPGEIAALVAFLLSAEAAAITGQDIAICGGASLPR

SEQ ID NO: 91479 - protein, 266 aa, Aliikangiella sp.
  misc_feature (1)..(266): tr|A0A545UCB8|A0A545UCB8_9GAMM 2,3-dihydro-2,3-dihydrox ybenzoate dehydrogenase OS=Aliikangiella sp. M105 OX=25 92383 GN=dhbA PE=3 SV=1
MYDFNEQVVIVSGAAQGIGLSVVTRLAQSGAKVIALDTQSVKAKASQDAGKGSANLGSVDLETIDWRIVDVSDSKAVKKIVQDCFNKFGRIDVLINVAGILRLGAVENLNDDDWNACFNVNTFGVFNLCRAVIPFMKEQRSGAIVTVGSNAAHVPRTDMAAYAASKSATRMFCQCLALELAPYGVRCNQVSPGSTDTPMQRNMWQDKTGEQKVIQGFPESYKVGIPLGKIAKPDEITNAILFFASSQATHIIMQDLVVDGGASLGA

SEQ ID NO: 91480 - protein, 257 aa, Alphaproteobacteria bacterium
  misc_feature (1)..(257): tr|A0A2S6QAP0|A0A2S6QAP0_9PROT 2,3-dihydro-2,3-dihydrox ybenzoate dehydrogenase OS=Alphaproteobacteria bacteriu m MarineAlpha11_Bin1 OX=2013106 GN=dhbA PE=4 SV=1
MELSGIQDAGIVITGAAQGIGEAIARHLAAGGAQLALIDRQANAVGQVAAELSATAIEADQTDETSVNAAIDIAEKKLAGGISGMVNVAGIQKLNPLIDQSTEDFDNHFAVNLRGTWLATRAAARYMAKRKSGAIVTISSNAARVPRVRQGAYCASKAGISHLMRVFALELGPLGIRVNTVAPGATETPMIHRMMEDMGFGKVLLEGDLDNFRAGVPLGRIASVDDVADAVTFLLSDQSRYITMHEMVVDGGAALGA

SEQ ID NO: 91481 - protein, 263 aa, Alphaproteobacteria bacterium
  misc_feature (1)..(263): tr|A0A2S6UMI2|A0A2S6UMI2_9PROT 2,3-dihydro-2,3-dihydrox ybenzoate dehydrogenase OS=Alphaproteobacteria bacteriu m MarineAlpha2_Bin1 OX=2013066 GN=dhbA PE=3 SV=1
MAIKTNLNNKTAIITGGSKGIGWETAKLMISDGMNVVLISRSEKLLQSRLDELGQFRRQIRIFPCDLTIPNSTEEIAKYCFSEFKVIDVLVNSAGAAKGGIFSEILDKDWEDSFNLKFFGTIRIIRSVVPYMKDQRDGRIVNVIGDTGKKPNKLMLPGSSVNAALLSLTKGLAEELGEYGIRINAVSPGPTKTERIVNMFNSLAKSTNKTIKEIEAEFLNENIIKKLADPKEIANLILFLSSDVSSNITGTTITSDGGRSKYI

SEQ ID NO: 91482 - protein, 251 aa, Alphaproteobacteria bacterium
  misc_feature (1)..(251): tr|A0A2S6TUI6|A0A2S6TUI6_9PROT 2,3-dihydro-2,3-dihydrox ybenzoate dehydrogenase OS=Alphaproteobacteria bacteriu m MarineAlpha4_Bin2 OX=2013075 GN=entA PE=4 SV=1
MSYAAIVTGSASGIGEAPSSDLLADGWAVYGIDMSEDALSATSERLANKKFYPMVCDVRSADRVQAVFSEIGERTGKINALIASADVIRVGALSDMSVNDFDAIFNVNVRGLWLTARDAIPMLKRALALGELARIVMLSSVSALRPKIEGGAYAASKIAVSQLAGVMGVECAGDGILVNAVAPATTDMPMVRNADTSGNWRSSGPSPLGRIAETQDVVRVIRFLLSEESAYVNGTTIPVDSGTRAAYVPLT

SEQ ID NO: 91483 - protein, 255 aa, Altererythrobacter sp.
  misc_feature (1)..(255): tr|A0A420EAB9|A0A420EAB9_9SPHN 2,3-dihydro-2,3-dihydrox ybenzoate dehydrogenase OS=Altererythrobacter sp. HN-Y7 3 OX=2320269 GN=D6851_16345 PE=4 SV=1
MGFSGRIAFVTGAGGGIGQAMVRLLLAEGARVVASDLAVPVFPGDPNQVADTLWCAALDVGDSQAVTDLVDRVEEEWGPIDFAVNVAGVLSTDTVLEMSDAEWHRTFDVNCHGVFHVGRAVARHMVERGRGAMVTVGSNAAGVPRHAMSAYAASKAAAHMFTRCLGIELAPHGIRCNIVAPGSTMTPMQTGMWADDQGAARVIAGQPEQFKAGIPLGKLAEPEDIAEAALFLLSDRAGHITMADLYVDGGATLRA

SEQ ID NO: 91484 - protein, 249 aa, Amycolatopsis japonica
  misc_feature (1)..(249): tr|A0A075UVV4|A0A075UVV4_9PSEU 2,3-dihydro-2,3-dihydrox ybenzoate dehydrogenase OS=Amycolatopsis japonica OX=20 8439 GN=dhbA PE=4 SV=1
MEGIEGKVALVTGGARGIGAAVVDGLAEAGAIVAAVDLAESASRGGVTSFVADVGDPAAVARVVGEVENELGPIGIGASVAGVLKPGSVCDTSDEDWAATFAVNSTGVFTVLREISRRMLPRRSGVLVTVGSNAAGVPRSGMAAYAASKAAATMLTRCLGLELAGSGIRCNIVSPGSTDTDMQRLLWTDENGADRVIAGNPEQYRVGIPLGRIAEPADIADAVLFLASDRARHITMQNLYVDGGATLRA

SEQ ID NO: 91485 - protein, 254 aa, Amycolatopsis sp.
  misc_feature (1)..(254): tr|A0A178WYU4|A0A178WYU4_9PSEU 2,3-dihydro-2,3-dihydrox ybenzoate dehydrogenase OS=Amycolatopsis sp. M39 OX=182 5094 GN=entA PE=4 SV=1
MDITGNTVFIPGSTSGIGLALALELRAKGNTVIVGGRRTELLARIAADHPGLDTVQIDTTDPASIETAAEEVLAKHPDLNVLVPMAGIMRVEDWHRPESFLDSAEATLTTNVLGPIRLIAAFVEHLQTRPDATILTVSSGLAFAPLKATPSYNASKAAIHLLSESLRLQLADTSVKVVELEPPSVRTALLPGQEESEFAMPLDAFVSEVMTLLETQPDATEIQVENVKFLRHGEARGDYHEVVAMLNAADPHGK

SEQ ID NO: 91486 - protein, 258 aa, Ancylobacter aquaticus
  misc_feature (1)..(258): tr|A0A3S0G676|A0A3S0G676_ANCAQ 2,3-dihydro-2,3-dihydrox ybenzoate dehydrogenase OS=Ancylobacter aquaticus OX=10 0 GN=EJV44_20605 PE=4 SV=1
MRDSGLKGKVALVTGAAGGIGAAVVRQLVEQGARVIATDRDEAGVKALAEELGAAVMPAVLDVRSTEAVDALVARVECEVGPVDLLAHVAGVLSYEPVTSLSDAEWERVLDINATGVFRVARAVARVMQPRHRGAMVVVSSNAAGIPRHAMAAYAASKAAATMFTRCLGLELAPYGIRCNIVAPGSTLTPMQTGMWADEHGAARVIAGTPATFKSGIPLGKLANPDDIADAVLFLLSDRAGHVTMADLYVDGGATLRG

SEQ ID NO: 91487 - protein, 261 aa, Anoxybacillus flavithermus
  misc_feature (1)..(261): tr|A0A150LKE9|A0A150LKE9_9BACI 2,3-dihydro-2,3-dihydrox ybenzoate dehydrogenase OS=Anoxybacillus flavithermus O X=33934 GN=B4168_3637 PE=3 SV=1
MEHWGLQGKIALVTGAAQGIGEAVTRSFVKHGVSVAAVDRNGERLAALVSDLQSNGYDVQAFCADVANSAEIDEIVAQIEDNMGPIEILVNVAGILRTGLIESFMDEDWEEVFKVNTAGVFYVSRSVSRRMIPRRSGAIVTVSSNAATIPRMFMAAYAASKAAATMFTKCLGLELAWYHIRCNVVSPGSTETEMQRGLWTDENGANKVITGSMEEFRLGIPLQKLAQPSDIADAVLFLVSEQSRHITMHDLRVDGGATLDA

SEQ ID NO: 91488 - protein, 261 aa, Anoxybacillus sp.
  misc_feature (1)..(261): tr|A0A160F7P2|A0A160F7P2_9BACI 2,3-dihydro-2,3-dihydrox ybenzoate dehydrogenase OS=Anoxybacillus sp. B7M1 OX=14 90057 GN=GFC29_2988 PE=3 SV=1
MDQCGIAGKVALVTGAAQGIGEAVIRAFVKHGVLVAAVDRNGERLDALVSELQGQGHRVQSFLADVANRTQVDEVVEKVEQSLGPIEILVNVAGILRTGPVSSLTDQDWEEVFKVNATGVFYVSRAVSRRMIPRRSGAIVTVSSNAATTPRMSMSAYAASKAAATMFTKCLGLELAPYHIRCNVVSPGSTETDMQRAMWTDDNGANKVIAGSLEEYRLGIPLKKLAQPSDIADAVLFLASEQSRHITLHDLRVDGGATLDS

SEQ ID NO: 91489 - protein, 255 aa, Aquimixticola soesokkakensis
  misc_feature (1)..(255): tr|A0A1Y5T679|A0A1Y5T679_9RHOB 2,3-dihydro-2,3-dihydrox ybenzoate dehydrogenase OS=Aquimixticola soesokkakensis OX=1519096 GN=dhbA PE=4 SV=1
MQLTGFEGQAAFVAGAGGGIGRAIVAALADSGAQVFASDLEAALEDAPKMAGVTWAALDVTDPVAVAAAVAQAQALYGPLRHGIFAAGILGGADMLGTSAQDWQRVVNVNLNGGFFVTTELARAMVVQGRGAIVAVGSNSADIPRLAMGAYPASKAALHMHMRCLGLEVAPKGIRCNIVAPGSTLTPMQTGMWADASGARAVIAGNLAIHKTGIPLGKLATPQDIAQSVMFLLSDQAGHITMADLYVDGGATLKA

SEQ ID NO: 91490 - protein, 326 aa, Ascidiaceihabitans donghaensis
  misc_feature (1)..(326): tr|A0A2R8BHP2|A0A2R8BHP2_9RHOB 2,3-dihydro-2,3-dihydrox ybenzoate dehydrogenase OS=Ascidiaceihabitans donghaens is OX=1510460 GN=entA PE=4 SV=1
MAASDQQPTNAGFPAKTSALDVLDGIDLSGKTAVVTGGYSGIGLETVKALAAKGAKVIVPVRSPQKAQDALAQVNGDVTSAAMDLADITSVRRFAADVLTQTDTLDLLINNAGIMACPETRVGPGWEAQFGVCHMGHFALTQDLMPALQKASGARVVALSSTGHKLSDIRWDDVHYTDEPYDKWQAYGQAKTANALFANALARRLKDSGGHAFSVHPGGIFTPLQRHLPKEEMIALGWLGADGEPSELAKQGFKTPEQGASTTVWAATAAVLDGKAGVYCEDCDVAAVTDPDSPTARFSGVNAHACDDDSAERLWALSQDLLAHTH

SEQ ID NO: 91491 - protein, 249 aa, Atlantibacter hermannii
  misc_feature (1)..(249): tr|A0A447LRS8|A0A447LRS8_ATLHE 2,3-dihydroxybenzoate-2, 3-dehydrogenase OS=Atlantibacter hermannii OX=565 GN=en tA PE=4 SV=1
MAGLFDGKTVWVTGAGKGIGYAAALAFHQQGATVVGLDVAFDGAYPFAIEQLDIADARQVEQVCARLFAASPRLDVLVNAAGILRMGATDALSHADWQQTFAVNVGGAFHLYQQVMPRFRAQRSGAIVTVASDAAHTPRIGMSAYGASKAALKSLTLTVGLELAPFGVRVNLVSPGSTDTDMQRTLWTTDDAEQRRIAGFAEQFKLGIPLGKIARPHEIASVITFLASEQASHITLQDIVIDGGSTLGA

SEQ ID NO: 91492 - protein, 249 aa, Atlantibacter subterranea
  misc_feature (1)..(249): tr|A0A427USG8|A0A427USG8_9ENTR 2,3-dihydro-2,3-dihydrox ybenzoate dehydrogenase OS=Atlantibacter subterranea OX =255519 GN=dhbA PE=4 SV=1
MAGMFDGKTVWVTGAGKGIGYAAALAFQQQGATVIGLDRAFNGDYPFATEQLDIADAGQVAEVCERLLAAQPRLDVLVNAAGILRMGPTDALSLADWQQTFAVNVGGAFNLYQRLMPVFRTQRGGAIVTVASDAAHTPRIGMSAYGASKAALKSLTLTVGLELASFGVRVNLVSPGSTDTDMQRTLWTTDDAEQRRIAGFAEQFKLGIPLGKIAKPQEIASTILFLASDQASHITLQDIVIDGGSTLGA

SEQ ID NO: 91493 - protein, 256 aa, Azoarcus sp.
  misc_feature (1)..(256): tr|A0A4V3WBU0|A0A4V3WBU0_9RHOO 2,3-dihydro-2,3-dihydrox ybenzoate dehydrogenase OS=Azoarcus sp. CC-YHH838 OX=25 65930 GN=E6C76_10655 PE=4 SV=1
MRLTGFDGTVALVTGAGGGIGAALVRLLRASGSVVVATDLYAPVLEEQSGTPAAFAEALDVTDSTAVDALVARVEREAGPIGFGINVAGVLQTGTVDTIDDAEWRRVFAVNADGVFHVSRALARVMAPRRQGAIVTVSSNAAGVPRHGMAAYAASKAAATMFMRCLGLELAPLGIRCNIVAPGSTLTPMQTGMWADDSGARRVIEGLPQIYKAGIPLGKLALPEDVAHAVMFLLSEQAGHVAMSDLYVDGGATLRA

SEQ ID NO: 91494 - protein, 253 aa, Azoarcus sp.
  misc_feature (1)..(253): tr|A0A4S4AAJ0|A0A4S4AAJ0_9RHOO 2,3-dihydro-2,3-dihydrox ybenzoate dehydrogenase OS=Azoarcus sp. CC-YHH848 OX=25 65932 GN=E6O51_20580 PE=4 SV=1
MNGKLAIVSGAAQGIGAAIVDALVVRGARVAALDVQGGPLEEMAARHGGRVRPYAVDLRASREVERTVAAVENGMGEIGMLAHSAGILRLGGVTALSDRDWEDTFAVNVHGVFYLARAVARHMVPRRRGAIVTVGSNAAAVPRTGMAAYAASKAAVCHFTKCLGLELAGFGIRCNVVSPGSTDTAMQRQLWQSEDDAARVIAGTPAEFRTGIPLGRIARPQDIAEAVLFLLGDGARHITMHELCVDGGATLGV

SEQ ID NO: 91495 - protein, 255 aa, Azospirillum brasilense
  misc_feature (1)..(255): tr|A0A0P0FBQ6|A0A0P0FBQ6_AZOBR 2,3-dihydro-2,3-dihydrox ybenzoate dehydrogenase OS=Azospirillum brasilense OX=1 92 GN=D3868_24815 PE=4 SV=1
MTDVAGRTVWVTGAGQGIGRAVADLFHARGAIVVAFDRHWHDGGEDSGERPYRAVPLDIADAGAVAGTCEALFAEGTRIDVLANVAGILRMGPVEAMTDADWHDSFAVNVAGPFHMMRAVIPAFKNGGKGGAIVSVSSNAAHVPRIGMAAYGASKAALTSLTMAVGLELAPHGVRCNVVSPGSTDTPMQRALWSGPDGAAQTIRGNPGQHKLGIPLGKLATPRDVAETVVFLASPAAGHITLADLLVDGGATLGR

SEQ ID NO: 91496 - protein, 250 aa, Azospirillum brasilense
  misc_feature (1)..(250): tr|G8AWH7|G8AWH7_AZOBR 2,3-dihydro-2,3-dihydroxybenzoat e dehydrogenase OS=Azospirillum brasilense Sp245 OX=106 4539 GN=entA PE=4 SV=1
MTDFAGRTAWVTGAGQGIGRAVADLFHARGAIVVAFDRHWHDSGERPYRAVTLDIADADAVAETCRALFAEGTRIDALANVAGILRMGPVEATTDADWSDSFAVNVAGPFHMMRAVIPAFKSGGSGAIVSVSSNAAHVPRIGMAAYGASKAALTSLTMTVGLELAPYGVRCNVVSPGSTDTPMQRALWSGPDGAAQTIQGNPGQHKLGIPLGKLATPRDVAETVVFLASPAAGHITLADLLVDGGATLGR

SEQ ID NO: 91497 - protein, 256 aa, Azospirillum doebereinerae
  misc_feature (1)..(256): tr|A0A433J5N7|A0A433J5N7_9PROT 2,3-dihydro-2,3-dihydrox ybenzoate dehydrogenase OS=Azospirillum doebereinerae O X=92933 GN=dhbA PE=4 SV=1
MTDHTTAQAFLGQTVWVTGVNQGIGLAVAETFTAQGAEVIGFDLRHDETVERPFRRLALDVTDAEAVARTCEELFAAGTGIDALVNVAGILRLGALETLGLDDWQQSFAVNAAGPFHLMRAVVPVLKRQGKGCIVSVSSNAAHVPRARMAVYGASKAALTSLTMTAGLELAPFGIRCNVVSPGSTDTPMLRGMWSDADGAARTIAGNHAQHRIGIPLGKLATPQDIANTVVFLASPAAGHITMMDVLVDGGATLGK

SEQ ID NO: 91498 - protein, 256 aa, Bacillus aerius
  misc_feature (1)..(256): tr|A0A3A9DLJ8|A0A3A9DLJ8_9BACI 2,3-dihydro-2,3-dihydrox ybenzoate dehydrogenase OS=Bacillus aerius OX=293388 GN =D7Y08_04280 PE=3 SV=1
MKGKVALVTGASQGIGKEVALSLAERGVFVAAADRNRKGLLELEAELERKDLQGSGFAADVGDSAAVDQLVAHVEREIGPIDMLVNVAGVLRTGLIHSLSDEDWEKTFSANSTGVFNVSRAVARRMISRRTGAIVTVGSNAAAVPRMHMAAYAASKAAALMFTKCLGLELAEYNIRCNIVSPGSTDTPMQRSLWQGEEAAQGVIEGSLETFKTGIPLGKLASPADIADAVVFLLSDGARHITMHDLRVDGGATLGA

SEQ ID NO: 91499 - protein, 256 aa, Bacillus albus
  misc_feature (1)..(256): tr|A0A4V1LLY1|A0A4V1LLY1_9BACI 2,3-dihydro-2,3-dihydrox ybenzoate dehydrogenase OS=Bacillus albus OX=2026189 GN =dhbA PE=4 SV=1
MNLGEFDGKTVLVTGAAQGIGSVVAKMFLDRGATVIAVDQNEEGLNKLLTEIHMKTFCLDVSDSTAVEQMVNDIENEIAPIDILVNVAGILRMGAIHSLSDEDWNKTFSVNSTGVFYMSRAVSKYMMQRKSGTIVTVGSNAANTPRMEMAAYAASKAATTMFMKCLGLELAAYNIRCNLVSPGSTETEMQRLLWADENGEKNIIAGSQSTYRLGIPLQKIAQPSEVAEAVLFLASDKASHITMHNLCVDGGATLGV

SEQ ID NO: 91500 - protein, 261 aa, Bacillus altitudinis
  misc_feature (1)..(261): tr|A0A5D4PT34|A0A5D4PT34_9BACI 2,3-dihydro-2,3-dihydrox ybenzoate dehydrogenase OS=Bacillus altitudinis OX=2933 87 GN=FZC69_05990 PE=3 SV=1
MKQSGLSHKIALITGAGQGIGQAVAKRLADEGAIIAAVDTNEDQLQSTVQQLNDKGIRAFAYPGDITDQASVRHIVDQIEKQLGPIYLLVNVAGILRISSIDQLSSDDWHQTFAVNTHGLFYVSQAVSKYMMKRSEGVIVTVSSNAGAIPRMNMAAYAASKAAATSFTKTLGLELATYGIRCNVVSPGSTATPMQWALWTDEQGADQVIKGSLETYKTGIPLQKIADPQQIADAVIFFASEQSSHITMQNLTIDGGATLGI

SEQ ID NO: 91501 - protein, 261 aa, Bacillus amyloliquefaciens
  misc_feature (1)..(261): tr|A0A5C8IT32|A0A5C8IT32_BACAM 2,3-dihydro-2,3-dihydrox ybenzoate dehydrogenase OS=Bacillus amyloliquefaciens O X=1390 GN=FVD42_10600 PE=3 SV=1
MTALGMKGKTAVVTGAAQGIGEATALALAEQGVNVAAIDTNEGLLLGLTDRLRQKGVQAQAFAADVSDSAAVNDIIAAVEHDMGPIEILANVAGVLRPGPVHSLSDEDWAQTFSVNTTGVFHVSRAVSRYMMERKKGAIVTVGSNAAGVPRASMAAYAASKAAAVMFTKCLGLELSAYHIRCNIVSPGSTETEMQRAMWQDENGARDVIRGSLDTYKTGIPLQKLAKPSDIANAVLFLASEQANHITMHDLCVDGGATLGV

SEQ ID NO: 91502 - protein, 261 aa, Bacillus amyloliquefaciens
  misc_feature (1)..(261): tr|I2C9N9|I2C9N9_BACAM 2,3-dihydro-2,3-dihydroxybenzoat e dehydrogenase OS=Bacillus amyloliquefaciens Y2 OX=112 6211 GN=dhbA PE=3 SV=1
MDALGMKGKTAVVTGAAQGIGEATALALAEQGVNVAAIDTNEDLLLGLTDRLRKKGVQAQGFAADVSDSAAVNDIIAAVERDMGPIEILANVAGVLRPGPVQSLSDEDWDQTFSVNTTGVFHVSRAVSRYMIERQKGAIVTVGSNAAGVPRASMAAYAASKAAAVMFTKCLGLELAAHHIRCNIVSPGSTETDMQRALWQDENGARDVIRGSLDTYKTGIPLQKLAKPSDIANAVLFLASEQANHITMHDLCVDGGATLGV

SEQ ID NO: 91503 - protein, 258 aa, Bacillus anthracis
  misc_feature (1)..(258): tr|A0A0F7RJ47|A0A0F7RJ47_BACAN 2,3-dihydro-2,3-dihydrox ybenzoate dehydrogenase OS=Bacillus anthracis OX=1392 G N=entA PE=4 SV=1
MNVGEFDGKTVLVTGAAQGIGSVVAKMFLERGATVIAVDQNGEGLNVLLNQNETRMKIFHLDVSDSNAVEDTVKRIENDIAPIDILVNVAGVLRMGAIHSLSDEDWNKTFSVNSTGVFYMSRAVSKHMMQRKSGAIVTVGSNAANTPRVEMAAYAASKAATTMFMKCLGLELAAYNIRCNLVSPGSTETEMQRLLWADENGAKNIIAGSQNTYRLGIPLQKIAQPSEITEAVLFLASDKASHITMHNLCVDGGATLGV

SEQ ID NO: 91504 - protein, 261 aa, Bacillus atrophaeus
  misc_feature (1)..(261): tr|A0A0H3E388|A0A0H3E388_BACA1 2,3-dihydroxybenzoate-2, 3-dehydrogenase OS=Bacillus atrophaeus (strain 1942) OX =720555 GN=BATR1942_13820 PE=3 SV=1
MDVMGIKGKTALVTGAAQGIGEEVARALAELGARVAAVDLNAEKLNGLTAGLRADGHQAEAFPVDVGDSSAVDEITARIEREIGPIDILVNVAGVLRPGLIESISDHDWEATFSVNSTGVFNVSRSVSKYMMNRRSGSIVTVGSNAAAMPRTSMAAYASSKAAAAMFTKCLGLELAEYNIRCNVVSPGSTETEMQWSLWPDENGGQAVIAGSLETFKTGIPLKKIAKPSDIANAVLFLVSDRAGHITMHDLRVDGGATLGV

SEQ ID NO: 91505 - protein, 261 aa, Bacillus atrophaeus; identical to SEQ ID NO: 91504
  misc_feature (1)..(261): tr|A0A080UKM2|A0A080UKM2_BACAT 2,3-dihydro-2,3-dihydrox ybenzoate dehydrogenase OS=Bacillus atrophaeus OX=1452 GN=DK44_969 PE=3 SV=1

SEQ ID NO: 91506 - protein, 261 aa, Bacillus bacterium
  misc_feature (1)..(261): tr|A0A506QLK1|A0A506QLK1_9BACI 2,3-dihydro-2,3-dihydrox ybenzoate dehydrogenase OS=Bacillus bacterium OX=205351 2 GN=dhbA PE=3 SV=1
MNLGEFDGKTVLVTGAAQGIGNVVAKMFLERGATVIAVDQNEEGLQVLLKQNELNKTRMKTFRLDVSDSAAVEDMINHIANEIAPIDILVNVAGVLRMGAIHSLSDEDWNKTFSVNSTGVFYMSRAVSKHMMQRKSGAIVTVGSNAANTPRMEMAAYAASKAATTMFMKCLGLELASYNIRCNVVSPGSTETEMQRLLWADENGAKNIIAGSQSSYRLGIPLQKIAQPSEIAEAVLFLASDKASHITMHNLCVDGGATLGI

SEQ ID NO: 91507 - protein, 261 aa, Bacillus cereus
  misc_feature (1)..(261): tr|B7IW60|B7IW60_BACC2 2,3-dihydro-2,3-dihydroxybenzoat e dehydrogenase OS=Bacillus cereus (strain G9842) OX=40 5531 GN=bacA PE=3 SV=1
MNLGEFDGKTVLVTGAAQGIGSVVAKMFLERGATVIAVDQNEEGLNVLLNQNELNKTRMKTFRLDVSDSTAVEDIVNHIANEIAPIDILVNVAGVLRMGAIHSLSDEDWNKTFSVNTTGVFNMSRAVSKNMMLRKSGAIVTVGSNAANTPRMEMAAYAASKAATTMFMKCLGLELAAYNIRCNLVSPGSTETEMQRLLWADENGAKNIIAGSQNTYRLGIPLQKIAQPSEVAEAVLFLASDRASHITMHNLCVDGGATLGV

SEQ ID NO: 91508 - protein, 258 aa, Bacillus cereus
  misc_feature (1)..(258): tr|Q63BJ9|Q63BJ9_BACCZ 2,3-dihydro-2,3-dihydroxybenzoat e dehydrogenase OS=Bacillus cereus (strain ZK / E33L) O X=288681 GN=entA PE=4 SV=1
MNVGEFDGKTVLVTGAAQGIGSVVAKMFLERGATVIAVDQNGEGLNVLLNQNETRMKIFHLDVSDSNAVEDTVKRIENDIAPIDILVNVAGVLRMGAIHSLSDEDWNKTFSVNSTGVFYMSRAVSKHMMQRKSGAIVTVGSNAANTPRMEMAAYAASKAATTMFMKCLGLELAAYNIRCNLVSPGSTETEMQRLLWADENGAKNIIAGSQNTYRLGIPLQKIAQPSEIAEAVLFLASDKASHITMHNLCVDGGATLGV

SEQ ID NO: 91509 - protein, 258 aa, Bacillus cereus
  misc_feature (1)..(258): tr|B3ZJ09|B3ZJ09_BACCE 2,3-dihydro-2,3-dihydroxybenzoat e dehydrogenase OS=Bacillus cereus 03BB108 OX=451709 GN =AK40_973 PE=4 SV=1
MNVGEFDGKTVLVTGAAQGIGSVVAKMFLERGATVIAVDQNGEGLNVLLNQNETRMKIFHLDVSDSNAVEDTVKRIENDIAPIDILVNVAGVLRMGAIHSLSDEVWNKTFSVNSTGVFYMSRAVSKHMMQRKSGAIVTVGSNAANTPRVEMAAYAASKAATTMFMKCLGLELAAYNIRCNLVSPGSTETEMQRLLWADENGAKNIIAGSQNTYRLGIPLQKIAQPSEIAEAVLFLASDKASHITMHNLCVDGGATLGV

SEQ ID NO: 91510 - protein, 261 aa, Bacillus cereus
  misc_feature (1)..(261): tr|B5UTZ0|B5UTZ0_BACCE 2,3-dihydro-2,3-dihydroxybenzoat e dehydrogenase OS=Bacillus cereus AH1134 OX=405533 GN= bacA PE=3 SV=1
MNLGEFDGKTVLVTGAAQGIGSVVAKMFLERGATVIAVDQNEEGLNVLLNQNELNNTRMKTFRLDVSDSAAVEDMVNHIANEIAPIDILINVAGVLRMGPIHSLSDEDWTKTFSVNTTGVFNMSRAVSKNMMLRKSGAIVTVGSNAANTPRMEMAAYAASKAATTMFMKCLGLELAAYNIRCNLVSPGSTETEMQRLLWADENGAKNIIAGSQNTYRLGIPLQKIAQPSEVAEAVLFLASDRASHITMHNLCVDGGATLGV

SEQ ID NO: 91511 - protein, 211 aa, Bacillus cereus
  misc_feature (1)..(211): tr|A0A4V5TW55|A0A4V5TW55_BACCE 2,3-dihydro-2,3-dihydrox ybenzoate dehydrogenase (Fragment) OS=Bacillus cereus O X=1396 GN=dhbA PE=4 SV=1
QNELNNTRMKTFRLDVSDSAAVEDMVNHIANEIAPIDILINVAGVLRMGPIHSLSDEDWNKTFSVNTTGVFNMSRAVSKNMMLRKSGAIVTVGSNAANTPRMEMAAYAASKAATTMFMKCLGLELAAYNIRCNLVSPGSTETEMQRLLWADENGAKNIIAGSQNTYRLGIPLQKIAQPSEVAEAVLFLASDRASHITMHNLCVDGGATLGV

SEQ ID NO: 91512 - protein, 258 aa, Bacillus cereus
  misc_feature (1)..(258): tr|D8GX09|D8GX09_BACAI 2,3-dihydroxybenzoate-2,3-dehydr ogenase OS=Bacillus cereus var. anthracis (strain CI) O X=637380 GN=entA PE=4 SV=1
MNVGEFDGKTVVVTGAAQGIGSVVAKMFLERGATVIAVDQNGEGLNVLLNQNETRMKIFHLDVSDSNAVEDTVKRIENDIAPIDILVNVAGVLRMGAIHSLSDEDWNKTFSVNSTGVFYMSRAVSKHMMQRKSGAIVTVGSNAANTPRVEMAAYAASKAATTMFMKCLGLELAAYNIRCNLVSPGSTETEMQRLLWADENGAKNIIAGSQNTYRLGIPLQKIAQPSEIAEAVLFLASDKASHITMHNLCVDGGATLGV

SEQ ID NO: 91513 - protein, 259 aa, Bacillus endophyticus
  misc_feature (1)..(259): tr|A0A3N6B4M6|A0A3N6B4M6_9BACI 2,3-dihydro-2,3-dihydrox ybenzoate dehydrogenase OS=Bacillus endophyticus OX=135 735 GN=FH5_00588 PE=3 SV=1
MGEGKPSVALITGAAQGIGKEVARRFAQEGFFVALLDQNVQNLHAVEESLKSEHYQAKAFSVDITKSKDVEEIIDDIERNIGPIECLANVAGVLRMGKTVELSDEDWAATFAVNTTGVFVMSRTVSRYMINRRRGSIVTVSSNAGHMPRTDMAAYASSKAAATMFTKCLGLELAQFGIRCNIVAPGSTNTEMLKLLWQDEKGEENLIKGSLETYKTGIPLHKIATPSDIAEAVLFLSSDKAGHITMNSLCVDGGATLGV

SEQ ID NO: 91514 - protein, 256 aa, Bacillus glycinifermentans
  misc_feature (1)..(256): tr|A0A1C3SJH7|A0A1C3SJH7_9BACI 2,3-dihydro-2,3-dihydrox ybenzoate dehydrogenase OS=Bacillus glycinifermentans O X=1664069 GN=dhbA PE=4 SV=1
MKGKVALVTGAAQGIGEAVARALAESGVSVAAVDQNERGLRSIVTDLEKKGLHAKAFAADVGNSAAVEETVGMIERDIGPIDYLVNVAGVLRTGLITSLSDEDWEKTFSVNTAGVFHVSRSVAGRMITRRNGSIVTVGSNAACVPRMQMAAYAASKAAALMFTKCLGLELAEYNIRCNIVSPGSTDTPMQRSMWSGRDGAQAVIDGSPEAFKTGIPLGRLALPADIANAVLFLLSESSRHITMHDLRVDGGATLGV

SEQ ID NO: 91515 - protein, 256 aa, Bacillus licheniformis; identical to SEQ ID NO: 91498
  misc_feature (1)..(256): tr|A0A3S4I9U7|A0A3S4I9U7_BACLI 2,3-dihydroxybenzoate-2, 3-dehydrogenase OS=Bacillus licheniformis OX=1402 GN=dh bA PE=3 SV=1

SEQ ID NO: 91516 - protein, 261 aa, Bacillus megaterium
  misc_feature (1)..(261): tr|A0A5D4KX08|A0A5D4KX08_BACME 2,3-dihydro-2,3-dihydrox ybenzoate dehydrogenase OS=Bacillus megaterium OX=1404 GN=FZC66_06145 PE=3 SV=1
MSFMNLEGQVALVTGGAQGIGEATVRALCESGAVVAAVDHNSEKLCSLIKELKGQGYKAEAFPADVSDSKAVDRVVETIERDMGPIEVLVNVAGVLRMGLAQSLTDEEWEQTFAVNSTGVFHVSRSVSKHMITRKKGSIVTVGSNAARVPRVSMAAYAASKASAVMFTKCLGLELAQYNIRCNVVSPGSTDTEMQWALWKDENGAQGAIAGAPESFKVGIPLKKIATPSNIVDAILFFISDQANHITMSDLCVDGGATLGV

SEQ ID NO: 91517 - protein, 261 aa, Bacillus mobilis
  misc_feature (1)..(261): tr|A0A386V046|A0A386V046_9BACI 2,3-dihydro-2,3-dihydrox ybenzoate dehydrogenase OS=Bacillus mobilis OX=2026190 GN=MLA2C4_12190 PE=3 SV=1
MNLGEFDGKTVLVTGAAQGIGSVVAKMFLERGATVIAADQNEEGLNVLLNQNELNETRLKTFRLDVSDSTAVKDMVNSIENDIAPIDILVNVAGVLRMGAIHSLSDEDWNKTFSVNSTGVFYMSRAVSKYMMQRKSGAIVTVGSNAANTPRMEMAAYAASKAATTMFMKCLGLELAACNIRCNLVSPGSTETEMQRLLWADENGAKNIIAGSQSTYRLGIPLQKIAKPSEIAEAVLFLASDKASHITMHNLCVDGGATLGV

SEQ ID NO: 91518 - protein, 261 aa, Bacillus mycoides
  misc_feature (1)..(261): tr|A0A4Q9ZC52|A0A4Q9ZC52_BACMY 2,3-dihydro-2,3-dihydrox ybenzoate dehydrogenase OS=Bacillus mycoides OX=1405 GN =dhbA PE=3 SV=1
MNLGEFDGKTVLVTGAAQGIGSVVAKMFLERGATVIAVDQNAEGLNMFLNHYASNESRIKTFHLDVSDSVTVEEVVERIENDIAPIDILVNVAGVLRMGAIHSLSDEEWNKTFSVNTTGVFYMSRAVSKHMMLRKSGAIVTVGSNAANTPRMEMAAYAASKAATTMFMKCLGLELAAYNIRCNLVSPGSTETEMQRLLWADENGAKNIIAGSQNTYRLGIPLQKIAQPSEIAEAVLFLASDKASHITMHNLCVDGGATLGA

SEQ ID NO: 91519 - protein, 256 aa, Bacillus pacificus
  misc_feature (1)..(256): tr|A0A1J9ZMG6|A0A1J9ZMG6_9BACI 2,3-dihydro-2,3-dihydrox ybenzoate dehydrogenase OS=Bacillus pacificus OX=202618 7 GN=dhbA PE=4 SV=1
MNLGEFDGKTVLVTGAAQGIGSVVAKMFLERGATVIAVDQNEEGLNELLNEIHLKTFCLDVSDSTAVEQMVNDIENEIAPIDILVNVAGVLRMGAIHSLSDEDWNKTFSVNSTGVFYMSRAVSKHMMQRKSGAIVTVGSNAANTPRMEMAAYAASKAATTMFMKCLGLELAAYNIRCNVVSPGSTETEMQRLLWADENGEKNIIAGSQSTYRLGIPLQKIAQPSEIAEAVLFLASDKASHITMHNLCVDGGATLGV

SEQ ID NO: 91520 - protein, 256 aa, Bacillus paranthracis
  misc_feature (1)..(256): tr|A0A4U1D6W6|A0A4U1D6W6_9BACI 2,3-dihydro-2,3-dihydrox ybenzoate dehydrogenase OS=Bacillus paranthracis OX=202 6186 GN=dhbA PE=4 SV=1
MNLGEFDGKTVLVTGAAQGIGSVVAKMFLERGATVIAVDQNEEGLNELLNEIHLKTFCLDVSDSTAVEQMVNDIENEIAPIDILVNVAGVLRMGAIHSLSDEDWNKTFSVNSTGVFYMSRAVSKHMMQRKSGAIVTVGSNAANTPRMEMAAYVASKAATTMFMKCLGLELAAYNIRCNVVSPGSTETEMQRLLWADENGEKNIIAGSQSTYRLGIPLQKIAQPSEIAEAVLFLASDKASHITMHNLCVDGGATLGV

SEQ ID NO: 91521 - protein, 261 aa, Bacillus pumilus
  misc_feature (1)..(261): tr|A0A498U4K8|A0A498U4K8_BACPU 2,3-dihydro-2,3-dihydrox ybenzoate dehydrogenase OS=Bacillus pumilus OX=1408 GN= dhbA PE=3 SV=1
MKHNGLSQKIALITGAGQGIGQAVAKRLAEEGAIIAAVDANEEQLQSTVQQMKDEGIRAFAYPGDITDQASVQHIVDQIEKQLGSIYLLVNVAGILRISSIDKLSADDWQQTFAVNTHGVFYVSQAVSKYMMKRSEGVIVTVSSNAGAIPRMNMAAYAASKAAATSFTKTLGLELAAYGIRCNVVSPGSTATPMQWALWSDEQGENQVIKGSLETYKTGIPLQKIADPQNIADAVIFFASEQSSHITMQNLTIDGGATLGI

SEQ ID NO: 91522 - protein, 261 aa, Bacillus safensis
  misc_feature (1)..(261): tr|A0A5C0WGI6|A0A5C0WGI6_9BACI 2,3-dihydro-2,3-dihydrox ybenzoate dehydrogenase OS=Bacillus safensis OX=561879 GN=dhbA PE=3 SV=1
MKYNGLSQKISLITGAGQGIGQAVAKRLAEEGAIIAAVDANEEQLQSTVQQMKDEGIRAFAYPGDITDQASVQHIVDQIEKQLGSIYLLVNVAGILRISSIDQLSADDWQQTFAVNTHGVFYVSQAVSKYMMKRSEGVIVTVSSNAGAIPRMNMAAYAASKAAATSFTKTLGLELAAYGIRCNVVSPGSTATPMQWALWPDEQGENQVIKGSLETYKTGIPLQKIADPQNIADAVIFFASEQSSHITMQNLTIDGGATLGI

SEQ ID NO: 91523 - protein, 256 aa, Bacillus sonorensis
  misc_feature (1)..(256): tr|M5P054|M5P054_9BACI 2,3-dihydroxybenzoate-2,3-dehydr ogenase OS=Bacillus sonorensis L12 OX=1274524 GN=BSONL1 2_17164 PE=3 SV=1
MKGKVALVTGASQGIGEAVARALAESGASVAAIDQNEEGLHSLVEDVKKQGLQAGAFAADVGDSASVDKTVDRIEREVGPIDMLVNVAGVLRTGLITSFSDADWEKTFSVNATGVFNVSRSVAGRMITRKEGAIVTVGSNAAAVPRMQMAAYAASKAAALMFTKCLGLELAQYNIRCNIVSPGSTDTPMQRSMWSDQNGAQAAIAGSLETFKTGIPLGRLALPADIAEAVLFLLSERARHITMHDLRVDGGATLGV

SEQ ID NO: 91524 - protein, 261 aa, Bacillus sp.
  misc_feature (1)..(261): tr|A0A3B0AIM5|A0A3B0AIM5_9BACI 2,3-dihydro-2,3-dihydrox ybenzoate dehydrogenase OS=Bacillus sp. S66 OX=1842608 GN=dhbA PE=3 SV=1
MNLGEFDGQTVLVTGAAQGIGSVVAKMFLERGATVIAVDQNEEGLNVLLNQNELNKTRMKTFRLDVSNSAAVEDMVNHIANEIAPIDILINVAGVLRMGPIHSLSDEDWNKTFSVNTTGVFNMSRAVSKNMMLRKSGAIVTVGSNAANTPRMEMAAYAASKAATTMFMKCLGLELAAYNIRCNLVSPGSTETEMQRLLWADENGAKNIIAGSQNTYRLGIPLQKIAQPSEVAEAVLFLASDRASHITMHNLCVDGGATLGV

SEQ ID NO: 91525 - protein, 261 aa, Bacillus sp.; identical to SEQ ID NO: 91524
  misc_feature (1)..(261): tr|A0A5C1F001|A0A5C1F001_9BACI 2,3-dihydro-2,3-dihydrox ybenzoate dehydrogenase OS=Bacillus sp. SH8-8 OX=221783 0 GN=DN405_11140 PE=3 SV=1

SEQ ID NO: 91526 - protein, 256 aa, Bacillus sp.
  misc_feature (1)..(256): tr|A0A0F5RUZ9|A0A0F5RUZ9_9BACI 2,3-dihydroxybenzoate-2, 3-dehydrogenase OS=Bacillus sp. UMTAT18 OX=1565146 GN=O A45_00711 PE=4 SV=1
MNLGEFDGKTVLVTGAAQGIGSVVAKMFLERGATVIAVDQNEEGLNELLNEIHLKTFCLDVSDSTAVEQMVNDIENEIAPIDILVNVAGVLRMGAIHSLSDEDWNKTFSVNSTGVFYMSRAVSKHMMQRKSGAIVTVGSNAANTPRMEMAAYAASKAATTMFMKCLGLELAAYNIRCNVVSPGSTETEMQRLLWADENGEKNIIAGSQNTYRLGIPLQKIAQPSEIAEAVLFLASDKASHITMHNLCVDGGATLGV

SEQ ID NO: 91527 - protein, 261 aa, Bacillus sp.
  misc_feature (1)..(261): tr|A0A3S1EQA4|A0A3S1EQA4_9BACI 2,3-dihydro-2,3-dihydrox ybenzoate dehydrogenase OS=Bacillus sp. VKPM B-3276 OX= 2499077 GN=dhbA PE=3 SV=1
MNLGEFDGKTVLVTGAAQGIGSVVAEMFLERGATVIAVDQNEEGLNVLLNQNELNKTRMKTFRLDVSDSTAVEDIVNHIANEIAPIDILVNVAGVLRMGAIHSLSDEDWNKTFSVNTTGVFNMSRAVSKNMMLRKSGAIVTVGSNAANTPRMEMAAYAASKAATTMFMKCLGLELAAYNIRCNLVSPGSTETEMQRLLWADENGAKNIIAGSQNTYRLGIPLQKIAQPSEVAEAVLFLASDRASHITMHNLCVDGGATLGV

SEQ ID NO: 91528 - protein, 261 aa, Bacillus sp.
  misc_feature (1)..(261): tr|A0A410R7H6|A0A410R7H6_9BACI 2,3-dihydro-2,3-dihydrox ybenzoate dehydrogenase OS=Bacillus sp. WR11 OX=2448811 GN=D9C22_17170 PE=3 SV=1
MNAKGLEGKIAFITGAAQGIGEAVARTLASQGAHIAAVDYNPEKLEKVVSSLKAEGRHAEAFPADVRDSAAIDEITARIEREMGPIDILVNVAGVLRPGLIHSLSDEEWEATFSVNSTGVFNASRSVSKYMMDRRSGSIVTVGSNAAGVPRTSMAAYASSKAAAVMFTKCLGLELAEYNIRCNIVSPGSTETDMQWSLWADENGAEQVIKGSLETFKTGIPLKKLAKPSDIADAVLFLVSGQAGHITMHNLCVDGGATLGV

SEQ ID NO: 91529 - protein, 261 aa, Bacillus stratosphericus
  misc_feature (1)..(261): tr|A0A4Y9JSC0|A0A4Y9JSC0_9BACI 2,3-dihydro-2,3-dihydrox ybenzoate dehydrogenase OS=Bacillus stratosphericus OX= 293386 GN=E4T85_16950 PE=3 SV=1
MKHNGLSQKIALITGAGQGIGQAVAKRLAEEGAIIAAVDANEEQLQSTVQQMKDEGIRAFAYPGDITDQASVQHIVDQIEKQLGPIYLLVNVAGILRMGSIDQLSADDWQQTFAVNTHGVFYVSQAVSKYMMKRSEGVIVTVSSNAGAIPRMNMAAYAASKAAATSFTKTLGLELAAYGIRCNVVSPGSTATPMQWALWSDEQGENQVIKGLLETYKTGIPLQKIADPQNIADAVIFFASEQSSHITMQNLTIDGGATLGI

SEQ ID NO: 91530 - protein, 261 aa, Bacillus subtilis
  misc_feature (1)..(261): sp|P39071|DHBA_BACSU 2,3-dihydro-2,3-dihydroxybenzoate dehydrogenase OS=Bacillus subtilis (strain 168) OX=2243 08 GN=dhbA PE=1 SV=3
MNAKGIEGKIAFITGAAQGIGEAVARTLASQGAHIAAVDYNPEKLEKVVSSLKAEGRHAEAFPADVRDSAAIDEITARIEREMGPIDILVNVAGVLRPGLIHSLSDEEWEATFSVNSTGVFNASRSVSKYMMDRRSGSIVTVGSNAAGVPRTSMAAYASSKAAAVMFTKCLGLELAEYNIRCNIVSPGSTETDMQWSLWADENGAEQVIKGSLETFKTGIPLKKLAKPSDIADAVLFLVSGQAGHITMHNLCVDGGATLGV

SEQ ID NO: 91531 - protein, 261 aa, Bacillus subtilis
  misc_feature (1)..(261): tr|A0A410ZKV0|A0A410ZKV0_BACIU 2,3-dihydro-2,3-dihydrox ybenzoate dehydrogenase OS=Bacillus subtilis OX=1423 GN =ETK61_17590 PE=3 SV=1
MNAKGIEGKIAFITGAAQGIGEAVARTLASQGAHIAAVDYNPEKLEKVVSSLKAEGRHAEAFPADVRDSAAIDEITVRIEREMGPIDILVNVAGVLRPGLIHSLSDEEWEATFSVNSTGVFNASRSVSKYMMDRRSGSIVTVGSNAAGVPRTSMAAYASSKAAAVMFTKCLGLELAEYNIRCNIVSPGSTETDMQWSLWADENGAEQVIKGSLETFKTGIPLKKLAKPSDIADAVLFLVSGQAGHITMHNLCVDGGAILGV

SEQ ID NO: 91532 - protein, 261 aa, Bacillus subtilis
  misc_feature (1)..(261): tr|E0TZZ2|E0TZZ2_BACPZ 2,3-dihydroxybenzoate-2,3-dehydr ogenase OS=Bacillus subtilis subsp. spizizenii (strain ATCC 23059 / NRRL B-14472 / W23) OX=655816 GN=dhbA PE=3 SV=1
MNAMGIKGKIAFITGAAQGIGEAVARKLADQGAHIAAVDYNPEKLEKVVSSLKAEGCHAEAFPADVRDSAAIDEITARIEREMGPIEILVNVAGVLRPGLIHSLSDEEWEATFSVNSTGVFNASRSVSKYMMDRRSGSIVTVGSNAAGVPRTSMAAYASSKAAAVMFTKCLGLELAEYNIRCNIVSPGSTETDMQWSLWADENGAEQVIKGSLETFKTGIPLKKLAQPSDIANAVLFLVSGQAGHITMHNLCVDGGATLGV

SEQ ID NO: 91533 - protein, 261 aa, Bacillus subtilis
  misc_feature (1)..(261): tr|G4P089|G4P089_BACPT 2,3-dihydro-2,3-dihydroxybenzoat e dehydrogenase OS=Bacillus subtilis subsp. spizizenii (strain TU-B-10) OX=1052585 GN=GYO_3491 PE=3 SV=1
MNAMGIKGKIAFITGAAQGIGEAVARKLADQGAHIAAVDYNPEKLEKVVSSLKAEGCRAEAFPADVRDSAAIDEITARIEREMGPIDILVNVAGVLRPGLIHSLSDEEWEATFSVNSTGVFNASRSVSKYMMDRRSGSIVTVGSNAAGVPRTSMAAYASSKAAAVMFTKCLGLELAEYNIRCNIVSPGSTETDMQWSLWADENGAEQVIKGSLETFKTGIPLKKLAQPSDIANAVLFLVSGQAGHITMHNLCVDGGATLGV

SEQ ID NO: 91534 - protein, 272 aa, Bacillus subtilis
  misc_feature (1)..(272): tr|G4ERP6|G4ERP6_BACIU 2,3-dihydroxybenzoate-2,3-dehydr ogenase OS=Bacillus subtilis subsp. subtilis str. SC-8 OX=1089443 GN=BSSC8_10260 PE=3 SV=1
MAFRAKKGIDDMNAKGIEGKIAFITGAAQGIGEAVARTLASQGAHIAAVDYNPEKLEKVVSSLKAEGRHAEAFPADVRDSAAIDEITARIEREMGPIDILVNVAGVLRPGLIHSLSDEEWEATFSVNSTGVFNASRSVSKYMMDRRSGSIVTVGSNAAGVPRTSMAAYASSKAAAVMFTKCLGLELAEYNIRCNIVSPGSTETDMQWSLWADENGAEQVIKGSLETFKTGIPLKKLAKPSDIADAVLFLVSGQAGHITMHNLCVDGGATLGV

SEQ ID NO: 91535 - protein, 261 aa, Bacillus subtilis
  misc_feature (1)..(261): tr|M4KYK1|M4KYK1_BACIU 2,3-dihydroxybenzoate-2,3-dehydr ogenase OS=Bacillus subtilis XF-1 OX=1233100 GN=dhbA PE =3 SV=1
MNAKGIEGKIAFITGAAQGIGEAVARTLASQGAHIAAVDYNPEKLDKVVSSLKAEGRHAEAFPADVRDSAAIDEITARIEREMGPIDILVNVAGVLRPGLIHSLSDEEWEATFSVNSTGVFNASRSVSKYMMDRRSGSIVTVGSNAAGVPRTSMAAYASSKAAAVMFTKCLGLELAEYNIRCNIVSPGSTETDMQWSLWADENGAEQVIKGSLETFKTGIPLKKLAKPSDIADAVLFLVSGQAGHITMHNLVVDGGATLGV

SEQ ID NO: 91536 - protein, 256 aa, Bacillus swezeyi
  misc_feature (1)..(256): tr|A0A5D4QIB6|A0A5D4QIB6_9BACI 2,3-dihydro-2,3-dihydrox ybenzoate dehydrogenase OS=Bacillus swezeyi OX=1925020 GN=FZC77_08670 PE=3 SV=1
MKGKVALVTGASQGIGEEVARALAELGVFVAAIDQNGEGLLELVKDLRKNGLQAADFVVDVGDSTAVDQLVDKIERDLGPIDMLVNVAGILRTGLITSFSDEDWVKTFRVNSTGVFNVSRSVAGRMIPRRNGSIVTVGSNAAAVPRMQMAAYAASKASALMFTKCLGLELAEYNIRCNIVSPGSTDTPMQRSLWRGQDAAQSVIAGSLKTFKTGIPLGKLAMPADIANAVVFLLSDSARHITMHDLRVDGGATLGV

SEQ ID NO: 91537 - protein, 261 aa, Bacillus tequilensis
  misc_feature (1)..(261): tr|A0A2X0X1E2|A0A2X0X1E2_9BACI 2,3-dihydroxybenzoate-2, 3-dehydrogenase OS=Bacillus tequilensis OX=227866 GN=dh bA PE=3 SV=1
MNTMGIKGKIALITGAAQGIGEAVARTLAGQGAHIAAVDYNPEKLEKAVSSLKAEGSQAKAFPADVRDSAAIDEITARIEREMGPIDILVNVAGVLRPGLIHSLSDEEWEATFSVNSTGVFNASRSVSKYMMDRRSGSIVTVGSNAAGVPRTSMAAYASSKAAAVMFTKCLGLELAEYNIRCNIVSPGSTETDMQWSLWADDNGAEQVIKGSLETFKTGIPLKKLAQPSDIADAVLFLVSGQAGHITMHNLCVDGGATLGV

SEQ ID NO: 91538 - protein, 261 aa, Bacillus thuringiensis
  misc_feature (1)..(261): tr|A0A1C9BTD0|A0A1C9BTD0_BACTU 2,3-dihydro-2,3-dihydrox ybenzoate dehydrogenase DhbA OS=Bacillus thuringiensis Bt18247 OX=1423143 GN=dhbA PE=3 SV=1
MNLGEFDGKTVLVTGAAQGIGSVVAKMFLERGATVIAVDQNEEGLNVLLNQNELNNTRMKTFRLDVSDSAAVEDMVNHIANEIAPIDILVNVAGILRMGPIHSLSDEDWNKTFSVNTTGVFNMSRAVSKNMMLRKSGAIVTVGSNAANTPRMEMAAYAASKAATTMFMKCLGLELAAYNIRCNLVSPGSTETEMQRLLWADENGAKNIIAGSQNTYRLGIPLQKIAQPSEVAEAVLFLASDRASHITMHNLCVDGGATLGV

SEQ ID NO: 91539 - protein, 261 aa, Bacillus thuringiensis; identical to SEQ ID NO: 91527
  misc_feature (1)..(261): tr|J3ZWR7|J3ZWR7_BACTU 2,3-dihydroxybenzoate-2,3-dehydr ogenase OS=Bacillus thuringiensis HD-771 OX=1218175 GN= BTG_08320 PE=3 SV=1

SEQ ID NO: 91540 - protein, 261 aa, Bacillus thuringiensis
  misc_feature (1)..(261): tr|A0A1B1L5G5|A0A1B1L5G5_BACTU 2,3-dihydro-2,3-dihydrox ybenzoate dehydrogenase DhbA OS=Bacillus thuringiensis OX=1428 GN=dhbA PE=3 SV=1
MNLGEFDGQTVLVTGAAQGIGSVVAKMFLERGATVIAVDQNEEGLNILLNQNELNKTRMKTFRLDVSNSAAVEDMVNHIANEIAPIDILINVAGVLRMGPIHSLSDEDWNKTFSVNTTGVFNMSRAVSKNMMLRKSGAIVTVGSNAANTPRMEMAAYAASKAATTMFMKCLGLELAAYNIRCNLVSPGSTETEMQRLLWADENGAKNIITGSQNTYRLGIPLQKIAQPSEVAEAVLFLASDRASHITMHNLCVDGGATLGV

SEQ ID NO: 91541 - protein, 261 aa, Bacillus thuringiensis
  misc_feature (1)..(261): tr|A0A0D1R550|A0A0D1R550_BACTU Contig0003, whole genome shotgun sequence OS=Bacillus thuringiensis Sbt003 OX=1 235825 GN=C797_04771 PE=3 SV=1
MNLGEFDEQTVLVTGAAQGIGSVVAKMFLERGAKVIAVDQNEEGLNVLLNQNELNNTRMKTFRLDVSNSAAVEDMVNHIANEIAPIDILINVAGVLRMGPIHSLSDEDWNKTFSVNTTGVFNMSRAVSKNMMLRKSGAIVTVGSNAANTPRMEMAAYAASKAATTMFMKCLGLELAAYNIRCNLVSPGSTETEMQRLLWADENGAKNIIAGSQNTYRLGIPLQKIAQPSEVAEAVLFLASDRASHITMHNLCVDGGATLGV

SEQ ID NO: 91542 - protein, 261 aa, Bacillus thuringiensis; identical to SEQ ID NO: 91507
  misc_feature (1)..(261): tr|Q3ENX5|Q3ENX5_BACTI 2,3-dihydro-2,3-dihydroxybenzoat e dehydrogenase OS=Bacillus thuringiensis serovar israe lensis ATCC 35646 OX=339854 GN=RBTH_03421 PE=3 SV=1

SEQ ID NO: 91543 - protein, 261 aa, Bacillus thuringiensis
  misc_feature (1)..(261): tr|M1QL48|M1QL48_BACTU 2,3-dihydro-2,3-dihydroxybenzoat e dehydrogenase OS=Bacillus thuringiensis serovar thuri ngiensis str. IS5056 OX=1286404 GN=H175_ch2301 PE=3 SV= 1
MNLGEFDGQTVLVTGAAQGIGSVVAKMFLERGATVIAVDQNEEGLNVLLNQNELNKTRMKTFRLDVSNSAAVEDMVNHIANEIAPIDILINVAGVLRMGPIHSLSDEDWNKTFSVNTTGVFNMSRAVSKNMMLRKSGAIVTVGSNAANTPRMEMAAYAASKAATTMFMKCLGLELAAYNIRCNLVSPGSTETEMQRLLWADENGAKNIITGSQNTYRLGIPLQKIAQPSEVAEAVLFLASDRASHITMHNLCVDGGATLGV

SEQ ID NO: 91544 - protein, 256 aa, Bacillus thuringiensis
  misc_feature (1)..(256): tr|F0PP82|F0PP82_BACT0 2,3-dihydroxybenzoate-2,3-dehydr ogenase OS=Bacillus thuringiensis subsp. finitimus (str ain YBT-020) OX=930170 GN=YBT020_12025 PE=4 SV=1
MNLGEFDGKTVLVTGAAQGIGSVVAKMFLERGATVIAVDQNEEGLNELLNEIHLKTFCLDVSDSTAVEQMVNDIENEIAPIDILVNVAGVLRMGAIHSLSDEDWNKTFSVNSTGVFYMSRAVSKHMMQRKSGTIVTVGSNAANTPRMEMAAYAASKAATTMFMKCLGLELAAYNIRCNVVSPGSTETEMQRLLWADENGEKNIIAGSQSTYRLGIPLQKIAQPSEIAEAVLFLASDKASHITMHNLCVDGGATLGV

SEQ ID NO: 91545 - protein, 258 aa, Bacillus thuringiensis
  misc_feature (1)..(258): tr|Q6HJ06|Q6HJ06_BACHK 2,3-dihydro-2,3-dihydroxybenzoat e dehydrogenase OS=Bacillus thuringiensis subsp. konkuk ian (strain 97-27) OX=281309 GN=entA PE=4 SV=1
MNVGEFDGKTVLVTGAAQGIGSVVAKMFLERGATVIAVDQNGEGLNVLLNQNETRMKIFHLDVSDSNAVEDTVKRIENDIAPIDILVNVAGVLRMGAIHSLSDEDWNKTFSVNSTGVFYMSRAVSKHMMQRKSGAIVTVGSNAANTPRVEMAAYAASKAATTMFMKCLGLELAAYNIRCNLVSPGSTETEMQRLLWADENGAKNIIAGSQNTYRLGIPLQKIAQPSEIAEAVLFLASDKASHITMHNLCVDGGATLGV

SEQ ID NO: 91546 - protein, 261 aa, Bacillus thuringiensis
  misc_feature (1)..(261): tr|A0A0F6FRC4|A0A0F6FRC4_BACTK 2,3-dihydro-2,3-dihydrox ybenzoate dehydrogenase OS=Bacillus thuringiensis subsp . kurstaki OX=29339 GN=BG08_3464 PE=3 SV=1
MNLGEFDGKTVLVTGAAQGIGSVVAKMFLERGATVIAVDQNEEGLNVLLNQNELNNTRMKTFRLDVSDSAAAEDMVNHIANEIAPIDILINVAGVLRMGPIHSLSDEDWNKTFSVNTTGVFNMSRAVSKNMMLRKSGAIVTVGSNAANTPRMEMAAYAASKAATTMFMKCLGLELAAYNIRCNLVSPGSTETEMQRLLWADENGAKNIIAGSQNTYRLGIPLQKIAQPSEVAEAVLFLASDRASHITMHNLCVDGGATLGV

SEQ ID NO: 91547 - protein, 261 aa, Bacillus thuringiensis; identical to SEQ ID NO: 91543
  misc_feature (1)..(261): tr|A0A0F6JB46|A0A0F6JB46_BACTU 2,3-dihydro-2,3-dihydrox ybenzoate dehydrogenase OS=Bacillus thuringiensis T01-3 28 OX=1324966 GN=BTCBT_002143 PE=3 SV=1

SEQ ID NO: 91548 - protein, 261 aa, Bacillus thuringiensis; identical to SEQ ID NO: 91543
  misc_feature (1)..(261): tr|V5M951|V5M951_BACTU Uncharacterized protein OS=Bacil lus thuringiensis YBT-1518 OX=529122 GN=YBT1518_12760 P E=3 SV=1

SEQ ID NO: 91549 - protein, 261 aa, Bacillus toyonensis
  misc_feature (1)..(261): tr|A0A2B7CWD8|A0A2B7CWD8_9BACI 2,3-dihydro-2,3-dihydrox ybenzoate dehydrogenase OS=Bacillus toyonensis OX=15532 2 GN=dhbA PE=4 SV=1
MNAGEFDGKTVFVTGAAQGIGSVVAKMFLERGATVIAVDQNEEGLNVLLNHDASYETRMKTFHLDVSDSNAVEEVVNRIENDIAPIDILVNVAGVLRMGAINSLSDEDWHKTFSVNTTGVFYISRSVSKRMMVRKSGAIVTVGSNAANTPRMEMAAYAASKAATTMFMKCLGLELASYNIRCNLVSPGSTETEMQRLLWADENGAKNIIAGSQNTYRLGIPLQKIAQPSEIAEAVLFLASDKASHITMHNLCVDGGATLGV

SEQ ID NO: 91550 - protein, 261 aa, Bacillus tropicus
  misc_feature (1)..(261): tr|A0A4Y6EWM4|A0A4Y6EWM4_9BACI 2,3-dihydro-2,3-dihydrox ybenzoate dehydrogenase OS=Bacillus tropicus OX=2026188 GN=dhbA PE=3 SV=1
MNLGEFDGKTVLVTGAAQGIGSVVAKMFLERGATVIAVDQNEERLQVLLKQNELNKTRMKTFRLDVSDSAAVEDMINHIANDIAPIDILVNVAGVLRMGAIHSLSDEDWNKTFSVNSTGVFYMSRAVSKHMMQRKSGAIVTVGSNAANTPRVEMAAYAASKAATTMFMKCLGLELAAYNIRCNLVSPGSTETEMQRLLWADENGAKNIIAGSQSTYRLGIPLQKIAQPSEIAEAVLFLASDKASHITMHNLCVDGGATLGV

SEQ ID NO: 91551 - protein, 261 aa, Bacillus velezensis
  misc_feature (1)..(261): tr|A7Z8B0|A7Z8B0_BACVZ 2,3-dihydro-2,3-dihydroxybenzoat e dehydrogenase OS=Bacillus velezensis (strain DSM 2311 7 / BGSC 10A6 / FZB42) OX=326423 GN=RBAM_029050 PE=3 SV =2
MDALGMKGKTAVVTGAAQGIGEATALALAEQGVNVAAIDTNEDLLLGLTDRLRQKGVQAQGFAADVSDSAAVNDIIAAVERDMGPIEILANVAGVLRPGPVQSLSDEDWDQTFSVNSTGVFHVSRAVSRYMIERKKGAIVTVGSNAAGVPRASMAAYAASKAAAVMFTKCLGLELAAHHIRCNIVSPGSTETDMQRALWQDENGARGVIRGSLDTYKTGIPLQKLAKPSDIANAVLFLASEQANHITMHDLCVDGGATLGV

SEQ ID NO: 91552 - protein, 261 aa, Bacillus velezensis
  misc_feature (1)..(261): tr|A0A5C2MGL9|A0A5C2MGL9_9BACI 2,3-dihydro-2,3-dihydrox ybenzoate dehydrogenase OS=Bacillus velezensis OX=49267 0 GN=ETZ92_010365 PE=4 SV=1
MDALGMKGKTAVVTGAAQGIGEATALALAEQGVNVAAIDTNEDLLLGLTDRLRQKGVQAQGFAADVSDSAAVNNIIAAVERDMGPIEILANVAGVLRPGPVQSLSDEDWDQTFSVNTTGVFHVSRAVSRYMIERKKGAIVTVGSNAASVPRASMAAYAASKAAAVMFTKCLGLELAAHHIRCNIVSPGSTETDMQRALWQDENGARDVIRGSLDTYKTGIPLQKLAKPSDIANAVLFLASEQANHITMHDLCVDGGATLGV

SEQ ID NO: 91553 - protein, 261 aa, Bacillus velezensis
  misc_feature (1)..(261): tr|S6FZ65|S6FZ65_9BACI 2,3-dihydro-2,3-dihydroxybenzoat e dehydrogenase OS=Bacillus velezensis UCMB5033 OX=1338 518 GN=dhbA PE=3 SV=1
MDALGMKGKTAVVTGAAQGIGEATALALAEQGVNVAAIDTNQDLLLGLTDRLRQKGVQAQGFAADVSDSAAVNDIIAAVERDMGPIEILANVAGVLRPGPVQSLSDEDWDQTFSVNTTGVFHVSRAVSRYMIERQKGAIVTVGSNAAGVPRASMAAYAASKAAAVMFTKCLGLELAAHHIRCNIVSPGSTETDMQRALWQDGNGARDVIRGSLDTYKTGIPLQKLAKPSDIANAVLFLASEQANHITMHDLCVDGGATLGV

SEQ ID NO: 91554 - protein, 261 aa, Bacillus wiedmannii
  misc_feature (1)..(261): tr|A0A0G8BZ48|A0A0G8BZ48_9BACI 2,3-dihydro-2,3-dihydrox ybenzoate dehydrogenase OS=Bacillus wiedmannii OX=18903 02 GN=B4147_1996 PE=4 SV=1
MNIGEFDGKTVLVTGAAQGIGSVVANMFLERGATVIGADQTEEGLNVLLNENELNETRVKTFHLDVSDSAAVEEVVERIENDIAPIDILVNVAGVLRMGAIHSLSDEDWNKTFSVNSTGVFYMCRAVSKYMMQRKSGAIVTVGSNAANTPRMEMAAYAASKAATTMFMKCLGLELAAYNIRCNLVSPGSTETEMQRLLWADENGAENIIAGSQNTYRLGIPLQKIAQPSEIAEAVLFLASDKASHITMHNLCVDGGATLGV

SEQ ID NO: 91555 - protein, 252 aa, Unknown
  misc_feature (1)..(252): tr|A0A0J8YSH7|A0A0J8YSH7_9GAMM 2,3-dihydroxybenzoate-2, 3-dehydrogenase OS=bacteria symbiont BFo1 of Franklinie lla occidentalis OX=1628855 GN=AI28_10410 PE=4 SV=1
MSCRFDFSGKQVWVTGAGQGIGYHSALAFVAAGATVVGFDKQFSQSHYPFQRAIVDIANADQVKRVCQRLLSDTQRLDVLVNAAGILRTGATDELAVEDWQACMAVNAGGAFNLFQQTLPLFRQQRAGAIVTVASNAAHAPRIGMSAYGASKAALRSLCLTVGLEMAPYGVRCNIVSPGSTDTAMQRSLWSRPEDEQQMIAGYPEQYKLGIPLQKIAQPEEIANAVLFLASDSASHIVLQDIVIDGGATLGA

SEQ ID NO: 91556 - protein, 251 aa, Unknown
  misc_feature (1)..(251): tr|A0A0J8YWC0|A0A0J8YWC0_9GAMM 2,3-dihydroxybenzoate-2, 3-dehydrogenase OS=bacteria symbiont BFo2 of Franklinie lla occidentalis OX=1628856 GN=AI29_01505 PE=4 SV=1
MISMDFRDKYVWVTGAGQGIGYNAACAFHQAGAVVIGFDKQFSGEHYPFHCTVMDVADPQQVADVCQAQLAQQPRLDVLVNAAGILRIGTTDALSFEDWQACFNVNAGGAFNLFSQTLPLFRQQGFGAIVSVASNSAHAPRLGLSAYGASKAALRSLCQTVGLEMAPYGVRCNIVSPGSTDTAMQRSLWHTPEAEQEMINGFPDQFKLGIPLKKIAKPHEITNAILFLASDLASHIVLQDIVIDGGATLGA

SEQ ID NO: 91557 - protein, 296 aa, Unknown
  misc_feature (1)..(296): tr|A0A1V5J8E4|A0A1V5J8E4_9BACT 2,3-dihydro-2,3-dihydrox ybenzoate dehydrogenase OS=bacterium ADurb.BinA028 OX=1 866933 GN=entA PE=4 SV=1
MSWTVDEIPDQSGRVVLITGANSGIGLESASVLADRGAHVILGCRDPHKGAAAQRQIAGSTEVLTIDLSSLASVSEAAEALGGRQIDVLVNNAGIMAVPQEASVDGHELQFATNVLGPFALTSLLLDQITDRVVWVSSMMHRAGKLDLADPSFRHHRYNAWRAYSASKLADLMLSYELQRRLTLAGSTVRSYAAHPGYAQTGLQRHTAVLSWPMVHQLESLLKVAQSADQGALPILYAATAPDLPPGSYVGPAGFGEMSGPPRIVGSSAASHDRDAQRTLWSLCEGLTGTSPGLPG

SEQ ID NO: 91558 - protein, 227 aa, Unknown
  misc_feature (1)..(227): tr|A0A2H6ELI8|A0A2H6ELI8_9BACT 2,3-dihydro-2,3-dihydrox ybenzoate dehydrogenase OS=bacterium BMS3Abin04 OX=2005 712 GN=entA PE=4 SV=1
MKSYILIFGSQGNLGKGITKILTEKEFTKVYLFNRHFSRVKSSNNKIVQIKVNDLTNEDNVISSFRRVKIERSAEYHLISTVGMYMGGQTITDMKYEDWLKVHSTNLNISFLIAKHFSKLVKNVKGGSIWFISAVTSLNPEVEKAAYGSSKNSLNYLVKSLALEGKKINLSSNAIAPFIIDTKQNREWITDKTLMVSPKSIGILLYSLIKNYKILSGNIFELPGTFI

SEQ ID NO: 91559 - protein, 252 aa, Unknown
  misc_feature (1)..(252): tr|A0A4S1I468|A0A4S1I468_9BACT 2,3-dihydro-2,3-dihydrox ybenzoate dehydrogenase OS=bacterium M00.F.Ca.ET.141.01 .1.1 OX=2563898 GN=EN784_08760 PE=4 SV=1
MQLTGFEGRVALVTGAAGGIGEALVRLLVEVGCIVVATDREAPRVADSRATSLTLDVTNSAAVDALVDQVESSIGPIMLAASVAGVLHVGSVAETGDADWRRVFAVNADGVFHVGRALARVMSPRRRGAIVTVSSNAAGVPRHGMAAYAASKAAATMFTRCLGLELAPLGIRCNIVAPGSTLTPMQTGMWQDEHGAERVIAGSPEIYKAGIPLRKLATPEDIAHSVMFLLSEQAGHVAMSDLYVDGGATLRG

SEQ ID NO: 91560 - protein, 252 aa, Unknown; identical to SEQ ID NO: 91559
  misc_feature (1)..(252): tr|A0A4S0Z9R0|A0A4S0Z9R0_9BACT 2,3-dihydro-2,3-dihydrox ybenzoate dehydrogenase OS=bacterium M00.F.Ca.ET.163.01 .1.1 OX=2563906 GN=EN806_03210 PE=4 SV=1

SEQ ID NO: 91561 - protein, 251 aa, Unknown
  misc_feature (1)..(251): tr|A0A4S1HC42|A0A4S1HC42_9BACT 2,3-dihydro-2,3-dihydrox ybenzoate dehydrogenase OS=bacterium M00.F.Ca.ET.168.01 .1.1 OX=2563907 GN=dhbA PE=4 SV=1
MTQQRFTGRRVLVTGTAQGIGRRIAERFIEEGADLIGLDLQARTAEAPFRQIALDITDAAAVETACKAIETEWGGLDILVNAAGILRLGDSESLTPADWKACMDVNAAGPFHMLRQWSATFKRQRRGAIVNIGSNAAVVPRIGMMAYCASKAALVSLSHCAALELAPYGVRCNVVSPGSTDTPMLAGMLSDPAGKDRLVAGLPEQFKLGIPLGKIARPDDIADTVLFLASDQAGHVTMQQIVVDGGATLAA

SEQ ID NO: 91562 - protein, 252 aa, Unknown; identical to SEQ ID NO: 91559
  misc_feature (1)..(252): tr|A0A4S0RES9|A0A4S0RES9_9BACT 2,3-dihydro-2,3-dihydrox ybenzoate dehydrogenase OS=bacterium M00.F.Ca.ET.177.01 .1.1 OX=2563908 GN=EN820_03210 PE=4 SV=1

SEQ ID NO: 91563 - protein, 251 aa, Unknown; identical to SEQ ID NO: 91561
  misc_feature (1)..(251): tr|A0A4S0N425|A0A4S0N425_9BACT 2,3-dihydro-2,3-dihydrox ybenzoate dehydrogenase OS=bacterium M00.F.Ca.ET.179.01 .1.1 OX=2563909 GN=dhbA PE=4 SV=1

SEQ ID NO: 91564 - protein, 251 aa, Unknown; identical to SEQ ID NO: 91561
  misc_feature (1)..(251): tr|A0A4S0GT19|A0A4S0GT19_9BACT 2,3-dihydro-2,3-dihydrox ybenzoate dehydrogenase OS=bacterium M00.F.Ca.ET.194.01 .1.1 OX=2563912 GN=dhbA PE=4 SV=1

SEQ ID NO: 91565 - protein, 252 aa, Unknown; identical to SEQ ID NO: 91559
  misc_feature (1)..(252): tr|A0A4S0FQ94|A0A4S0FQ94_9BACT 2,3-dihydro-2,3-dihydrox ybenzoate dehydrogenase OS=bacterium M00.F.Ca.ET.199.01 .1.1 OX=2563913 GN=EN842_08025 PE=4 SV=1

SEQ ID NO: 91566 - protein, 279 aa, Unknown
  misc_feature (1)..(279): tr|A0A5J4E8P8|A0A5J4E8P8_9BACT 2,3-dihydro-2,3-dihydrox ybenzoate dehydrogenase OS=bacterium MnTg04 OX=2080454 GN=entA PE=4 SV=1
MAGDYNKSVLVTGCSSGIGRATADLLKDEGFRVFATARTREDIDELTHAGFETISLDVSDPQSVRNCMVEVDQACDGKLFGLVNNAGVGQPGALEDISRETLEKQFQVNVFGCHQLTRHALRMMRVQGAGRIVQISSMLGFVAIPYIGAYNASKYALEGLSDTLRLELMGSGIFVSLVEPGPIESHFRNTATSLFTEEITAAGSAHQQAYQKMHERYQSGQSVSKFALGPEKVAAVVLKAMTSTRPKARYRVTTPATLAAVLKRLLPTRWLDQAMLRLG

SEQ ID NO: 91567 - protein, 259 aa, Bartonella grahamii
  misc_feature (1)..(259): tr|A0A336NE22|A0A336NE22_BARGR 2,3-dihydro-2,3-dihydrox ybenzoate dehydrogenase OS=Bartonella grahamii OX=33045 GN=entA PE=4 SV=1
MSHSFVDIVNNPAYNEKSLALVVAGTAEIARNVIDSLINGGYFVVFTWFSNETAVSDMKHRYQSAVLPVRLDLTSEQDVVQFCAALENVRIEIAIYCAGYNPACLCDELEPENINAITRLNYLSAVLIFNMVVKTMKQYKENETKLVFISSVAAKKIRVGNSLYGSTKAAMERYLSGIALEMGRFNIRTLCVSPGYIKTKMLQDYCAKEGRSIASIEKTIPMRKMLAAEDVANAVNAFINGKIITTGVSLTIGNGEGII

SEQ ID NO: 91568 - protein, 170 aa, Beijerinckiaceae bacterium
  misc_feature (1)..(170): tr|A0A539CYC9|A0A539CYC9_9RHIZ 2,3-dihydro-2,3-dihydrox ybenzoate dehydrogenase OS=Beijerinckiaceae bacterium O X=1978229 GN=dhbA PE=4 SV=1
MYRADPMDGIAWVTGASSGIGRAVALELARRGYKVAATARRGAELEALAAESQNIFSFPGDVTDRAGMAGLAGEIKASHGQIALAFINAGVYFVAEQEKFSADVVWCTFEINVSGTVNCLDPVLAAMQRRGRGQVALNASLAGRRHRRIASLWLDQGRLDLYGRSLETHL

SEQ ID NO: 91569 - protein, 249 aa, Bhargavaea cecembensis
  misc_feature (1)..(249): tr|M7P4D6|M7P4D6_9BACL 2,3-dihydro-2,3-dihydroxybenzoat e dehydrogenase OS=Bhargavaea cecembensis DSE10 OX=1235 279 GN=dhbA PE=4 SV=1
MSQLTSKVIAVTGAGGGMGQQVVKDLLRNGATVVGLDINTEALSSIEDKNLRSKNIDLLDEASIVNVFKEIYEEFGRLDGLVNIAGIAQAAKSITNVEVSEWHKLMDINATAVFLTSREAVRYMKEKNQGSIVNVGSVSVTRPRPGLQSYVASKGAVEAFTKALALETAPFNIRANVVHPGPADTNMLGKFSAQENEKIEMNKDVFAKSVPLGRLIEPSDIAPTVIHLLSDGARMITGSVIHVDGGRSI

SEQ ID NO: 91570 - protein, 253 aa, Blastochloris viridis
  misc_feature (1)..(253): tr|A0A0H5BPD9|A0A0H5BPD9_BLAVI 2,3-dihydro-2,3-dihydrox ybenzoate dehydrogenase OS=Blastochloris viridis OX=107 9 GN=dhbA PE=4 SV=1
MRASGLADRFVVVTGAAGGIGRAVVESFLDEGAHVVATDLDVGTFRPSDVLHPLALDVTDAGAVEAVIDTVEATLGPIHAGVSVAGMLATGLVSETRDEDWHRMFAVNTHGVFHFGRALARRMVKRRGGSIVVVSSNAAGVPRHAMAAYASSKAAATMFTRCLGLELAGHGIRCNVVAPGSTLTPMQTGMWADERGAAAVIAGSPATFKAGIPLGKLATSQDVADAVVFLASDRAAHITMTDLYVDGGATLRG

SEQ ID NO: 91571 - protein, 244 aa, Bordetella ansorpii
  misc_feature (1)..(244): tr|A0A157SHE4|A0A157SHE4_9BORD Short-chain dehydrogenas e/reductase OS=Bordetella ansorpii OX=288768 GN=entA_2 PE=4 SV=1
MSNDEASGGAGPRSADHGLAVVTGAAGGIGLAIVRHLLADGWRVAGLDLGASSLAHPAYRHVAVDLCDADATARTLQGLQDARALVHCAGVLRVGTLRDLNPADGLRMWTLHVDAAVRLAQGLLPALSGSGRGRVVLIGSRVAQGMPGRSLYAASKAALVALARSWAAELAASGVTVNVVSPAATQTGMLADPARAASAPRLPPIGRLIQPDEIAATVGFLLSDAVAAITGQDLAVCGGSSLPR

SEQ ID NO: 91572 - protein, 259 aa, Bordetella bronchiseptica
  misc_feature (1)..(259): tr|A0A4U9RI76|A0A4U9RI76_BORBO 2,3-dihydro-2,3-dihydrox ybenzoate dehydrogenase OS=Bordetella bronchiseptica OX =518 GN=dhbA_2 PE=3 SV=1
MDLQLAGKRVLITGASKGIGLACALSFAREGATPVLVARDAQALARAADAVREQTGKAAETHAQDLALPGAAQALAARAGEIDILVNNAGAVPGGALDQVEDERWRAGWELKVHGYINLARVYYPRMRAAGAGVIANVIGMAASSPRYDYVCGAAANAALVAFTRALGGEGPRHGVRVFGVNPSRTRTDRVLGLAQQRAQARWNDPDRWQETLGGLPFDRLMEPAEVADVVVFGCSPRAGYLSATVIDLDGGEQYRGAA

SEQ ID NO: 91573 - protein, 238 aa, Bordetella hinzii
  misc_feature (1)..(238): tr|A0A0H4W9B3|A0A0H4W9B3_9BORD 2,3-dihydro-2,3-dihydrox ybenzoate dehydrogenase OS=Bordetella hinzii OX=103855 GN=entA PE=4 SV=1
MNDFMNLAGKRILLLGATADIGRAIALNARDLGAEVQGIVRQDPGDMGFPVEALDLLDALAVEAYVRRLDTPLDGLVYCIGDSIKAPLSSLTPDVVHRAVDVNLNTLIVMLRALVMARKLKRGASVVLVSSVSAYLGVRGMAPYAMTKSALLVATRTFSNELMRHGVRVNSVSPVMVRTRMFEPEQQAWLEEMSKRHYPQGLGEPVDVAAPVLFLLSDEASAINGTDIILSAGAMTTA

SEQ ID NO: 91574 - protein, 259 aa, Bordetella pertussis
  misc_feature (1)..(259): tr|A0A381A9Z6|A0A381A9Z6_BORPT 2,3-dihydro-2,3-dihydrox ybenzoate dehydrogenase OS=Bordetella pertussis OX=520 GN=dhbA PE=3 SV=1
MDLQLAGKRVLITGASKGIGLACALSFAREGATPVLVARDAQALARAADAVREQTGQAAETHAQDLALPGAAQALAARAGAIDILVNNAGAVPGGALDQVEDERWRAGWELKVHGYINLARVYYPRMRAAGAGVIANVIGMAASSPRHDYVCGAAANAALVAFTRALGGEGPRHGVRVFGVNPSRTRTDRVLGLAQQRAQARWNDPDRWQETLSGLPFDRLMEPAEVADVVVFGCSPRAGYLSATVIDLDGGEQYRGAA

SEQ ID NO: 91575 - protein, 237 aa, Bordetella pseudohinzii
  misc_feature (1)..(237): tr|A0A0J6C8U1|A0A0J6C8U1_9BORD 2,3-dihydro-2,3-dihydrox ybenzoate dehydrogenase OS=Bordetella pseudohinzii OX=1 331258 GN=entA PE=4 SV=1
MSAAPFMSLEGKRLWVVGAGSDIGKAAARHARALGAKVQGVARQPQDDPAVAVADLLNDEDLKRCLRELEHPLDGMVFCIGHALLVPAHMLGRDAVRRVMEINVASFIAVLTGLLRARKLKAGASVVVLSSISAHTATEGVAPYAMSKAALSAAVRNIALELQRREIRVNAVSPAMVRTKMTASGDVFSLDEMARERYPMGVAAPEDVAALVLFLLSDEARMFTGWDTLMTGGVVEV

SEQ ID NO: 91576 - protein, 251 aa, Bradyrhizobium lupini; identical to SEQ ID NO: 91466
  misc_feature (1)..(251): tr|K5C2P8|K5C2P8_RHILU 2,3-dihydroxybenzoate-2,3-dehydr ogenase OS=Bradyrhizobium lupini HPC(L) OX=1229491 GN=C 241_09986 PE=4 SV=1

SEQ ID NO: 91577 - protein, 232 aa, Bradyrhizobium sp.
  misc_feature (1)..(232): tr|A0A4Y9LCA8|A0A4Y9LCA8_9BRAD 2,3-dihydro-2,3-dihydrox ybenzoate dehydrogenase OS=Bradyrhizobium sp. CNPSo 342 4 OX=2560056 GN=E4K66_09195 PE=4 SV=1
MVKALLRKGANVIATDVAVDALAELACGNLLARPLDVTDSAEVERLIEEAAVQCGGIDFGINIAGVLSTTAVVDTSDAEWERVFAVNTGGVFHVSRALARHMAPRGKGSIVTVSSNAAGVPRKDMAAYAASKAAATMFTRCLGLELAEYGIRCNIVAPGSTLTPMQTGMWSDARGGERVIEGSLANFKTGIPLRKLATPEDVVNAVLFLLSEKAGHITMAELYVDGGATLHA

SEQ ID NO: 91578 - protein, 254 aa, Bradyrhizobium sp.
  misc_feature (1)..(254): tr|A0A4Y9PGC2|A0A4Y9PGC2_9BRAD 2,3-dihydro-2,3-dihydrox ybenzoate dehydrogenase OS=Bradyrhizobium sp. CNPSo 342 6 OX=2560054 GN=E4K64_05655 PE=4 SV=1
MVSDFEGRTAFLTGAAGGIGLAMVKALLREGANVIATDLAVDALAELACDNLLPRPLDVTDSAEVERLIQDAAARCGGIDFGINIAGVLSTTAVVDTSDAEWERVFAVNTAGVFHVSRALARHMAPRRKGSIVTVSSNAAGVPRKDMAVYAASKAAATMFTRCLGLELAEYGIRCNIVAPGSTLTPMQTGMWSDARGGERVIEGSLANFKTGIPLRKLATPEDVVNAVLFLLSEKAGHITMAELYVDGGATLHA

SEQ ID NO: 91579 - protein, 254 aa, Bradyrhizobium sp.
  misc_feature (1)..(254): tr|A0A5E8VN07|A0A5E8VN07_9BRAD 2,3-dihydro-2,3-dihydrox ybenzoate dehydrogenase OS=Bradyrhizobium sp. LVM 105 O X=2341115 GN=D6B98_00500 PE=4 SV=1
MVSDFEGRTAFLTGAAGGIGLAMVKALLREGANVIATDLAVDALAELACDNLLPRPLDVTDSAEVERLIEEAAVQCGGIDFGINIAGVLSTTAVVDTSDAEWERVFAVNTGGVFHVSRALARHMAPRGKGSIVTVSSNAAGVPRKDMAAYAASKAAATMFTRCLGLELAEYGIRCNIVAPGSTLTPMQTGMWSDARGGERVIEGSLANFKTGIPLRKLATPEDVVNAVLFLLSEKAGHITMAELYVDGGATLHA

SEQ ID NO: 91580 - protein, 256 aa, Brenneria goodwinii
  misc_feature (1)..(256): tr|A0A0G4JZQ3|A0A0G4JZQ3_9GAMM 2,3-dihydro-2,3-dihydrox ybenzoate dehydrogenase of siderophore biosynthesis OS= Brenneria goodwinii OX=1109412 GN=BN1221_03838 PE=4 SV= 1
MEKTQRLQMDFTGKQIWVTGAGRGIGEQIARAFIGLGAEVVGFDREFPNADLPYHCELLDIQRPEQVKNVCQQRLVQVPRLDVLVNAAGILRLGEVEMLSDDDWHQCLNVNAAGAFYLFRAVIPHFKRQRRGAIVTVGSNAAHVPRMQMAAYCASKAALTSLNHCVALELAEYGVRCNLVSPGSTDTAMLRNMWCDASGEQQTIRGFPERYKLGIPLGKIARAEDIANTVVFLASELASHITMQDIVVDGGATLAA

SEQ ID NO: 91581 - protein, 256 aa, Brenneria rubrifaciens
  misc_feature (1)..(256): tr|A0A4V1F9F6|A0A4V1F9F6_9GAMM 2,3-dihydro-2,3-dihydrox ybenzoate dehydrogenase OS=Brenneria rubrifaciens OX=55 213 GN=dhbA PE=4 SV=1
MMSSPQLQLDFSGQCVWVTGAARGIGEQIARHFVVLGAQVIGFDREFHRQDYPFACVTLDISQPERVAAVCRQQLAQSAALDVLVNAAGILRLGEIDALSVEDWHQCINVNASGAFYLLHALLPHFKRQRRGAIVCVGSNAAHVPRMQMAAYCASKAALTSLTYCAGLELAPFGVRCNLVSPGSTDTPMQRGMWQSEDAEQRTIEGFPRQYKLGIPLGKIARPEEVANTVVFLASDLASHITMQDLVVDGGATLTA

SEQ ID NO: 91582 - protein, 252 aa, Brenneria sp.
  misc_feature (1)..(252): tr|G7LSL4|G7LSL4_9GAMM 2,3-dihydro-2,3-dihydroxybenzoat e dehydrogenase OS=Brenneria sp. EniD312 OX=598467 GN=B rE312_3952 PE=4 SV=1
MSARFDFSGKQVWVTGAGRGIGYETACRFVEAGAGVVGFDLAFPDTALPFTPCQLDIRDAAAVAERCGALLSQTPRLDVLVNGAGILRMGATEKLSQQDWQDCLAVNAGGVFNLLQAAIPQFQRQRAGAIVTVASNAAHVPRVGMAAYCASKAAVRSLCLTAGLELAPYGVRCNLISPGSTDTPMLRGMWASPAGEQSTIDGFPEQFKLGIPLGKIARPQDIADAILFMASDVAGHITLQDIVIDGGATLGA

SEQ ID NO: 91583 - protein, 252 aa, Brenneria sp.
  misc_feature (1)..(252): tr|A0A5J5G3R8|A0A5J5G3R8_9GAMM 2,3-dihydro-2,3-dihydrox ybenzoate dehydrogenase OS=Brenneria sp. L3-3HA OX=2590 031 GN=dhbA PE=4 SV=1
MSRGFDFSGRQVWVSGAGSGIGYRTACRFQQAGAQVVGFDIAFPAGEVPFSVRELDVSDPQAVADCCRETLAGCPELDVLVIGAGILRLGATESLPFADWQRCLAVNAGGAFNLFQAVIPQFRRQRRGAIVTVASNAAHVPRSGMSAYCASKAALRSLSLSVGLELAPFGVRCNLISPGSTDTPMLRSMWRSPAARRQVIDGAPAQFRLGIPLGKLATVDDIADAILFMASDMASHITLQDVVIDGGATLGA

SEQ ID NO: 91584 - protein, 261 aa, Brevibacillus sp.
  misc_feature (1)..(261): tr|A0A553KKG3|A0A553KKG3_9BACL 2,3-dihydro-2,3-dihydrox ybenzoate dehydrogenase OS=Brevibacillus sp. LEMMJ03 OX =2595056 GN=FOI68_12740 PE=3 SV=1
MEVAGITGKVALVTGAAQGIGRTVAAALAERGALVAAVDQHAEGVRDLVAELRAGGHQAAAFPADVSDSAAVEAMVDQIEREVGPVEILVNVAGLLRTGPIESLSDEDWAATFAVNASGVFYVSRAVARRMAPRRSGSIVTVGSNAAGVPRMQMSAYAASKAAATMFTKCLGLEYARHNIRCNVVSPGSTDTAMQRALWADDDGAQAVIAGNLEEYRLGIPLGRLALPSDIADAVVFLVSDRARHITMHDLRVDGGATLGM

SEQ ID NO: 91585 - protein, 256 aa, Brevundimonas diminuta
  misc_feature (1)..(256): tr|A0A1R4G8N6|A0A1R4G8N6_BREDI 2,3-dihydro-2,3-dihydrox ybenzoate dehydrogenase of siderophore biosynthesis OS= Brevundimonas diminuta 3F5N OX=1255603 GN=FM111_10460 P E=4 SV=1
MRDSGLSGRLALVTGAGGGIGASVVRLLVEEGARVVATDLPSTALSGLAFLNGVRVEPLDVSDGAAVEALFERIEAEDGPIDFVASVAGVLSNVTVDQTSDAEWRRVFAVNADGVFHLGREVSRRMGERGKGAFVTVSSNAAGVPRHAMAAYAASKAAATMFTRCLGLELGPKGVRCNIVAPGSTLTPMQTGMWADEDGAARVIAGSPETFKAGIPLQKLATPEDIAEAVVFLLSDRAAHITMTDLYVDGGATLRA

SEQ ID NO: 91586 - protein, 261 aa, Brevundimonas diminuta
  misc_feature (1)..(261): tr|A0A246KB07|A0A246KB07_BREDI 2,3-dihydro-2,3-dihydrox ybenzoate dehydrogenase OS=Brevundimonas diminuta OX=29 3 GN=dhbA PE=4 SV=1
MRDSGLSGRLALVTGAGGGIGAAVVRLLVEEGARVVATDLPSTALSGLAFLNGVRVEPLDVSDGAAVEALFDRIEAEDGPIDFVASVAGVLSNVTVDQTSDAEWRRVFAVNADGVFHLGRAASRRMGERGPKDKKSRAFVTVSSNAAGVPRHAMAAYAASKAAATMFTRCLGLELGPKGVRCNIVAPGSTLTPMQTGMWADEDGAARVIAGSLETFKAGIPLQKLATPEDIAEAVVFLLSDRAAHITMTDLYVDGGATLRA

SEQ ID NO: 91587 - protein, 256 aa, Brevundimonas naejangsanensis
  misc_feature (1)..(256): tr|A0A172Y3C6|A0A172Y3C6_9CAUL 2,3-dihydro-2,3-dihydrox ybenzoate dehydrogenase OS=Brevundimonas naejangsanensi s OX=588932 GN=DA69_02425 PE=4 SV=1
MRDSGLSGRLALVTGAGGGIGAAVVRLLVEEGARVVATDLPSTALSGLAFLKGVRIEPLDVSDGAAVEALFERIEGEDGPIDLVASVAGVLSNVTVDQTSDAEWRRVFAVNTDGPFHLGREVSRRMGERGKGAFVTVSSNAAGVPRHAMAAYAASKAAATMFTRCLGLELGPKGVRCNIVAPGSTLTPMQTGMWADEDGAARVIAGSPETFKAGIPLQKLATPEDIAEAVVFLLSDRAAHITMTDLYVDGGATLRA

SEQ ID NO: 91588 - protein, 256 aa, Brevundimonas sp.
  misc_feature (1)..(256): tr|A0A3R8ZIU2|A0A3R8ZIU2_9CAUL 2,3-dihydro-2,3-dihydrox ybenzoate dehydrogenase OS=Brevundimonas sp. 357 OX=255 5782 GN=EGK63_11530 PE=4 SV=1
MRDSGLSGRLALVTGAGGGIGAAVVRLLVEEGARVVATDLPSTALSGLAFLNGVRVEPLDVSDGAAVEALFDRIEAEDGPIDLVASVAGVLSNVTVDQTSDAEWRRVFAVNADGVFHLGRAASRRMGERGEGAFVTVSSNAAGVPRHAMAAYAASKAAATMFTRCLGLELGPKGVRCNIVAPGSTLTPMQTGMWADEDGAARVIAGSPDTFKAGIPLQKLATPEDIAEAVVFLLSDRAAHITMTDLYVDGGATLRA

SEQ ID NO: 91589 - protein, 256 aa, Brevundimonas sp.
  misc_feature (1)..(256): tr|A0A399UNR8|A0A399UNR8_9CAUL 2,3-dihydro-2,3-dihydrox ybenzoate dehydrogenase OS=Brevundimonas sp. LPMIX5 OX= 2305887 GN=D1604_04615 PE=4 SV=1
MRDSGLSGRLALVTGAGGGIGAAVVRLLVEEGARVVATDLPSTALSGLAFLNGVRVEALDVSDGAAVETLFERIEAEDGPIDLVASVAGVLSNVTVDQTSDAEWRRVFAVNTDGPFHLGREVARRMGERGKGAFVTVSSNAAGVPRHAMAAYAASKAAATMFTRCLGLELGPKGVRCNIVAPGSTLTPMQTGMWADDDGAARVIAGSPETFKTGIPLQKLATPEDIAEAVVFLLSDRAAHITMTDLYVDGGATLRA

SEQ ID NO: 91590 - protein, 261 aa, Brevundimonas vancanneytii
  misc_feature (1)..(261): tr|A0A4P1KE10|A0A4P1KE10_9CAUL 2,3-dihydro-2,3-dihydrox ybenzoate dehydrogenase OS=Brevundimonas vancanneytii O X=1325724 GN=dhbA PE=4 SV=1
MRDSGLSGRLALVTGAGGGIGAAVVRLLVEEGARVVATDLPSTALSGLAFLNGVRVEPLDVSDGAAVEALFDRIEAEDGPIDFVASVAGVLSNVTVDQTSDAEWRRVFAVNADGVFHLGRAASRRMGERGPKDKKNRAFVTVSSNAAGVPRHAMAAYAASKAAATMFTRCLGLELGPKGVRCNIVAPGSTLTSMQTGMWADEDGAARVIAGSPETFKAGIPLQKLATPEDIAEAVVFLLSDRAAHITMTDLYVDGGATLRA

SEQ ID NO: 91591 - protein, 258 aa, Brucella abortus
  misc_feature (1)..(258): tr|Q2YL97|Q2YL97_BRUA2 Short-chain dehydrogenase/reduct ase SDR:Blood group Rhesus C/E and D polypeptide:Glucos e/ribitol dehydrogenase OS=Brucella abortus (strain 230 8) OX=359391 GN=BAB2_0012 PE=4 SV=1
MVEAKSYPASWRFAGKRVIVTGAAQGIGRRVAEHFLAEGATVIGLDRQAGEADAPFRLIRLDITDAAEVRAVSDGLKAEGKPLDILVNVAGVLKLGNSDRLSAEDWKTCMDVNASGPFHLLSQWVPVFRDQRHGAIVNVASNAAHVPRLNMAAYCASKAALASFSHCVALELAPYGVRCNVVSPGSTRTAMLGAMLNDPSGEAQLVRGLPEQFKLGIPLGKIAMPDDIANVILFLASDQAGHVTMQDIVVDGGATLGA

SEQ ID NO: 91592 - protein, 258 aa, Brucella abortus; identical to SEQ ID NO: 91591
  misc_feature (1)..(258): tr|Q93FY3|Q93FY3_BRUAO 2,3-dihydro-2,3-dihydroxybenzoat e dehydrogenase OS=Brucella abortus OX=235 GN=entA PE=4 SV=1

SEQ ID NO: 91593 - protein, 271 aa, Brucella melitensis
  misc_feature (1)..(271): tr|Q8YDU5|Q8YDU5_BRUME 2,3-dihydro-2,3-dihydroxybenzoat e dehydrogenase OS=Brucella melitensis biotype 1 (strai n 16M / ATCC 23456 / NCTC 10094) OX=224914 GN=BMEII0080 PE=4 SV=1
MGPDRNKAEGSRLMVEAKSYPASWRFAGKRVIVTGAAQGIGRRVAEHFLAEGATVIGLDRQAGEADAPFRLIRLDITDAAEVRAVSDGLKAEGKPLDILVNVAGVLKLGNSDRLSAEDWKTCMDVNASGPFHLLSQWVPVFRDQRHGAIVNVASNAAHVPRLNMAAYCASKAALASFSHCVALELAPYGVRCNVVSPGSTRTAMLGAMLNDPSGEAQLVRGLPEQFKLGIPLGKIAIPDDIANVILFLASDQAGHVTMQDIVVDGGATLGA

SEQ ID NO: 91594 - protein, 258 aa, Brucella melitensis
  misc_feature (1)..(258): tr|A0A4P6KNM0|A0A4P6KNM0_BRUML 2,3-dihydro-2,3-dihydrox ybenzoate dehydrogenase OS=Brucella melitensis OX=29459 GN=dhbA PE=4 SV=1
MVEAKSYPASWRFAGKRVIVTGAAQGIGRRVAEHFLAEGATVIGLDRQAGEADAPFRLIRLDITDAAEVRAVSDGLKAEGKPLDILVNVAGVLKLGNSDRLSAEDWKTCMDVNASGPFHLLSQWVPVFRDQRHGAIVNVASNAAHVPRLNMAAYCASKAALASFSHCVALELAPYGVRCNVVSPGSTRTAMLGAMLNDPSGEAQLVRGLPEQFKLGIPLGKIAIPDDIANVILFLASDQAGHVTMQDIVVDGGATLGA

SEQ ID NO: 91595 - protein, 258 aa, Brucella neotomae
  misc_feature (1)..(258): tr|A0A381C163|A0A381C163_BRUNE 2,3-dihydroxybenzoate-2, 3-dehydrogenase OS=Brucella neotomae OX=29460 GN=entA P E=4 SV=1
MVEAKSYPASWRFAGKRVIVTGAAQGIGRRVAERFLAEGATVIGLDRQAGEADAPFRLIRLDITDAAEVRAVSDGLKAEGKLLDILVNVAGVLKLGNSDRLSAEDWKTCMDVNASGPFHLLSQWVPVFRDQRHGAIVNVASNAAHVPRLNMAAYCASKAALASFSHCVALELAPYGVRCNVVSPGSTRTAMLGAMLNDPSGEAQLVRGLPEQFKLGIPLGKIAMPDDIANVILFLASDQAGHVTMQDIVVDGGATLGT

SEQ ID NO: 91596 - protein, 258 aa, Brucella ovis
  misc_feature (1)..(258): tr|A0A0H3ASL5|A0A0H3ASL5_BRUO2 2,3-dihydro-2,3-dihydrox ybenzoate dehydrogenase OS=Brucella ovis (strain ATCC 2 5840 / 63/290 / NCTC 10512) OX=444178 GN=entA PE=4 SV=1
MVEAKSYPASWRFAGKRVIVTGAAQGIGRRVAERFLAEGATVIGLDRQAGEADAPFRLIRLDITDAAEVRAVSDGLKAEGKPLDILVNVAGVLKLGNSDRLSAEDWKTCMDVNASGPFHLLSQWVPVFRDQRHGAIVNVASNAAHVPRLNMAAYCASKAALASFSHCVALELAPYGVRCNVVSPGSTRTAMLGAMLNDPSGEAQLVRGLPEQFKLGIPLGKIAMPDDIANVILFLASDQAGHVTMQDIVVDGGATLGA

SEQ ID NO: 91597 - protein, 258 aa, Brucella suis; identical to SEQ ID NO: 91596
  misc_feature (1)..(258): tr|A0A0H3G9U9|A0A0H3G9U9_BRUSU 2,3-dihydroxybenzoate-2, 3-dehydrogenase OS=Brucella suis biovar 1 (strain 1330) OX=204722 GN=entA PE=4 SV=1

SEQ ID NO: 91598 - protein, 258 aa, Brucella suis; identical to SEQ ID NO: 91596
  misc_feature (1)..(258): tr|A0A4Z0F0M6|A0A4Z0F0M6_BRUSS 2,3-dihydro-2,3-dihydrox ybenzoate dehydrogenase OS=Brucella suis OX=29461 GN=dh bA PE=4 SV=1

SEQ ID NO: 91599 - protein, 250 aa, Burkholderia cenocepacia
  misc_feature (1)..(250): tr|A0A1V2XYP3|A0A1V2XYP3_9BURK Ketoreductase OS=Burkhol deria cenocepacia OX=95486 GN=entA_1 PE=4 SV=1
MQSFDNKVVLITGGGAGIGLAAAVAFAREGARVVITGRREDALSAAARSAPGIDYVVADAGDPADAARTIDEAVALAGRLDVLVNNAGAGAILPLGSATFEAISAIFSVNTLGPSMLATAALPHLKAARGSIVNVSSTFGHKAAALLSHYAASKAALEHLTRCWALELASAGVRVNAVAAGPTETDFLSERMKLSAPDIEAIKAQERTRIPLGRRGEPADVANWIVSLASPLAAWMTGQVITVDGGLDAT

SEQ ID NO: 91600 - protein, 263 aa, Burkholderia multivorans
  misc_feature (1)..(263): tr|B9B883|B9B883_9BURK 2,3-dihydro-2,3-dihydroxybenzoat e dehydrogenase OS=Burkholderia multivorans CGD1 OX=513 051 GN=BURMUCGD1_1523 PE=3 SV=1
MSRGTDMTFPAGVAVVTGAARGIGAAVARALVARGVDVAAFDADGDTLARAIEDCPAAGRIHPFTVDVADASAVRAAVERVETTVGPIGMLANVAGVLRLAAATSLTDDDWAHCFAVNTHGVFHLSRAVAARMIARRTGSIVTVGSNAALVPRTQMAAYAASKAAAHQFSRCLGLELAGHGIRCNIVAPGSTDTPMQRQLWRDPEGAAGVIAGSLETYRTGIPLGRIAVPDDVADTVLFLLSDAARHVTLHTLCVDGGATLGV

SEQ ID NO: 91601 - protein, 263 aa, Burkholderia multivorans
  misc_feature (1)..(263): tr|A0A1W0Y5Q0|A0A1W0Y5Q0_9BURK 2,3-dihydro-2,3-dihydrox ybenzoate dehydrogenase OS=Burkholderia multivorans OX= 87883 GN=UA18_03749 PE=4 SV=1
MSGPAGRRFADRNVIVTGGARGIGEEVARQLAAEGAHVQVLDVAAQALHAWCGELDPDTAGRIRAHVADIRDASAIGELVAVLDDERPVDGLVNAAGVLTTGAFLSTDAQSWRHMLDVNAYGTLVVTQAVAARMVARRRGAIVTVASNAGATPRSGLTAYCASKAAATMLTRCAGLELARYGIRCNVVSPGSTDTPMLSEVAGAGPEREARSIAGDPSVFRAGIPLGKIAVPRDIAQSVAFLLSDDAGHITMRELVVDGGATF

SEQ ID NO: 91602 - protein, 264 aa, Burkholderia pyrrocinia
  misc_feature (1)..(264): tr|A0A4R4FS70|A0A4R4FS70_BURPY 2,3-dihydro-2,3-dihydrox ybenzoate dehydrogenase OS=Burkholderia pyrrocinia OX=6 0550 GN=EVG18_19850 PE=3 SV=1
MSREPEMTFPAGVAVVTGAARGIGAAVVRALAARGVDVAAFDADGDALARATGDRPPAPGRVHPFTVDVADAHAVRAAIEHVEAAVGPIGMLANVAGVLRLATATSLSDDDWAHCFAVNAHGVFHLSRAVAQRMIERRAGSIVTVGSNAALVPRTQMAAYAASKAAAHQFTRCLGLELAGYGIRCNIVAPGSTDTPMQRQLWRGPEGPAGVIAGSLETYRTGIPLGRIATPDDVAGTVLFLLSDAARHVTLHTLCVDGGATLGV

SEQ ID NO: 91603 - protein, 263 aa, Burkholderia singularis
  misc_feature (1)..(263): tr|A0A103E3E3|A0A103E3E3_9BURK 2,3-dihydro-2,3-dihydrox ybenzoate dehydrogenase OS=Burkholderia singularis OX=1 503053 GN=BSIN_2629 PE=3 SV=1
MSGTFPEFPGTVAVVSGAAQGIGAAVARALAARGVSVAALDVRADALAQLAADAGSAGARIHPFAVDVANADAVRAAVERIDATLGPIGMLANVAGILRVADASTLSDDDWAHSFAVNTSGVFYLSRAVAQRMIPLRAGSIVTVGSNAALVPRMRMAAYAASKAAAHQFTKCLGLELAEYGIRCNIVAPGSTDTQMQRQLWTDARSADAVIDGSLPAFRTGIPLRRIADPDDVAAAVLFLLSNASRHVALHSFTVDGGATLGA

SEQ ID NO: 91604 - protein, 258 aa, Burkholderia sp.
  misc_feature (1)..(258): tr|A0A3N8B7D9|A0A3N8B7D9_9BURK 2,3-dihydro-2,3-dihydrox ybenzoate dehydrogenase OS=Burkholderia sp. Bp9125 OX=2 184569 GN=DIE18_37145 PE=4 SV=1
MTFPGKVAVVSGAAQGIGAAVARALAAGGIEVAAFDVDGDALSRNAADSAAFGARIHPFTVDVADAAAVNDAVASVEATVGPIGLLANVAGVLRLAAATSLSDADWAHCFAVNTNGVFHLSRAVAQRMVPRRAGSIVTVGSNAALVPRMQMAAYAASKAAAHQFTRCLGLELAPHGIRCNIVAPGSTDTPMQRQLWTGPEGPAAVIGGSLDTYRTGIPLGRIAAPDDVAETVLFLLSDASRHVTLHSLCVDGGATLGV

SEQ ID NO: 91605 - protein, 258 aa, Burkholderia sp.
  misc_feature (1)..(258): tr|A0A0D0GVG8|A0A0D0GVG8_9BURK KY49.ctg7180000000014_qu iver, whole genome shotgun sequence OS=Burkholderia sp. MSHR3999 OX=1542965 GN=KY49_3538 PE=4 SV=1
MRFPGTVAVVSGAAQGIGAAVARALAARGIEVAAFDVDGDALARHAADSTAFGARIHPFTVDVADAAAVQRAVARVEETVGPIGMLANVAGVLRLAAATSLSDADWAHCFAVNAHGVFHLSRAVAQRMVARRAGSIVTVGSNAALVPRMQMAAYAASKAAAHQFTRCLGLELAGHGIRCNIVAPGSTDTPMQRQLWDGPAGPAGVIAGSLDTYRTGIPLGRIAAPDDVAETVLFLLSDASRHVTLHSLCVDGGATLGV

SEQ ID NO: 91606 - protein, 264 aa, Burkholderia stabilis
  misc_feature (1)..(264): tr|A0A4Q2ALV5|A0A4Q2ALV5_9BURK 2,3-dihydro-2,3-dihydrox ybenzoate dehydrogenase OS=Burkholderia stabilis OX=954 85 GN=D1006_00105 PE=3 SV=1
MSRETEMTFPAGVAVVTGAARGIGAAVVRALAARGVDVAAFDADGDALARATEDRPPAPSRVHPFAVDVADARAVRVAIERVEATVGPIGMLANVAGVLRLAAATSLTDDDWAHCFAVNTHGVFHLSRAVAQRMIERRAGSIVTVGSNAALVPRTQMAAYAASKAAAHQFTRCLGLELAGYGIRCNIVAPGSTDTPMQRQLWRGPEGPAGVIAGSLETYRTGIPLGRIAAPDDVADTVLFLLSDAARHVTLHTLCVDGGATLGV

SEQ ID NO: 91607 - protein, 258 aa, Burkholderia stagnalis
  misc_feature (1)..(258): tr|A0A3P0E1R7|A0A3P0E1R7_9BURK 2,3-dihydro-2,3-dihydrox ybenzoate dehydrogenase OS=Burkholderia stagnalis OX=15 03054 GN=DF145_07115 PE=3 SV=1
MTFPGTVAVVSGAAQGIGAAVVRALAARGIEVAAFDIDGAALSRNAADSAAFGARIHPFTVDVADAAAVNDAVARVEAALGPIGMLANVAGVLRLAAATSLSDADWAHCFAVNTHGVFHLSRAVAQRMVARRAGSIVTVGSNAALVPRMQMAAYAASKAAAHQFTRCLGLELAPHGIRCNIVAPGSTDTPMQRQLWTGPEGPAAVIGGSLDTYRTGIPLGRIAAPDDVAETVLFLLSDASRHVTLHSLCVDGGATLGA

SEQ ID NO: 91608 - protein, 262 aa, Burkholderia ubonensis
  misc_feature (1)..(262): tr|A0A3N7Q965|A0A3N7Q965_9BURK 2,3-dihydro-2,3-dihydrox ybenzoate dehydrogenase OS=Burkholderia ubonensis OX=10 1571 GN=DF011_07875 PE=4 SV=1
MSFPGTVAVVSGAAQGIGAAVARALAARGIEVAAFDVDGDALARHAADSAADGASFGARIHPFTVDVADAAGVRDAVARVEETVGPIGMLANVAGVLRLAAATSLSDADWAHCFAVNTHGVFHLSRAVAQRMVARRAGSIVTVGSNAALVPRMQMAAYAASKAAAHQFTRCLGLELAGHGIRCNIVAPGSTDTPMQRQLWDGPGGPAGVIAGSLDTYRTGIPLGRIAAPDDVAETVLFLLSDASRHVTLHSLCVDGGATLGV

SEQ ID NO: 91609 - protein, 250 aa, Buttiauxella agrestis
  misc_feature (1)..(250): tr|A0A085GIG1|A0A085GIG1_9ENTR 2,3-dihydro-2,3-dihydrox ybenzoate dehydrogenase OS=Buttiauxella agrestis ATCC 3 3320 OX=1006004 GN=entA PE=4 SV=1
MKIDFSGKTVWVTGAGKGIGYHTARAFSDAGATVVGLDLAFPLEVYPFETEVLNVADAEQVAAVTQRLLSNEPQLDVLVNAAGILRMGATDALALQDWQDTFAVNVGGAFNLFRAVMPRFREQRSGAIVTVASDAAHTPRTGMSAYGASKAALKSLALTVGLELAPFGVRCNVVSPGSTDTDMQRTLWKTPDAEQQRIQGFPDQFKLGIPLGKIARPQEIASTILFLASSHASHITLQDIVIDGGATLGA

SEQ ID NO: 91610 - protein, 260 aa, Buttiauxella agrestis
  misc_feature (1)..(260): tr|A0A381CAW0|A0A381CAW0_9ENTR 2,3-dihydro-2,3-dihydrox ybenzoate dehydrogenase OS=Buttiauxella agrestis OX=829 77 GN=entA PE=4 SV=1
MGAAVAGFLRVNIDFSGKTVWVTGAGKGIGYHTARAFSDAGATVVGFDLAFPLEVYPFATEVLNVADAEQVAAVTQRLLSDEPQLDVLVNAAGILRMGATDALALQDWQDTFAVNVGGAFNLFRAVMPHLREQQSGAIVTVASDAAHTPRTGMSAYGASKAALKSLALTVGLELAPFGVRCNVVSPGSTDTDMQRTLWKTPDAEQQRIQGFPDQFKLGIPLGKIARPQEIASTILFLASSHASHITLQDIVIDGGATLGA

SEQ ID NO: 91611 - protein, 250 aa, Buttiauxella brennerae
  misc_feature (1)..(250): tr|A0A1B7IVN1|A0A1B7IVN1_9ENTR 2,3-dihydro-2,3-dihydrox ybenzoate dehydrogenase OS=Buttiauxella brennerae ATCC 51605 OX=1354251 GN=M975_0513 PE=4 SV=1
MNIDFSGKQVWVTGAGRGIGYHTARAFSDAGATVTGFDLTFPLEIYPFAIEVVNVADADQVASITERILSDGQPLDVLVNAAGILRMGATDALALQDWQDTFAVNVGGAFNMFRAVMPRMREQRSGAIVTVASDAAHTPRTGMSAYGASKAALKSLALTVGLELAPFGVRCNVVSPGSTDTDMQRTLWKTPDAEQQRIQGFPEQFKLGIPLGKIARPQEIASTILFLASMHASHITLQDIVIDGGATLGA

SEQ ID NO: 91612 - protein, 250 aa, Buttiauxella gaviniae
  misc_feature (1)..(250): tr|A0A1B7HRQ5|A0A1B7HRQ5_9ENTR 2,3-dihydro-2,3-dihydrox ybenzoate dehydrogenase OS=Buttiauxella gaviniae ATCC 5 1604 OX=1354253 GN=M977_03214 PE=4 SV=1
MNIDFSGKQVWVTGAGRGIGYHTARAFSDAGATVVGFDLAFPLDIYPFATEVVNVADADQVGRVTQRILSDEQQLDVLVNAAGILRMGATDALALQDWQDTFAVNVGGAFNMFRAVMPRMREQRSGAIVTVASDAAHTPRTGMSAYGASKAALKSLALTVGLELAPFGVRCNVVSPGSTDTDMQRTLWKTPDAEQQRIQGFPEQFKLGIPLGKIACPQEIASTILFLASTHASHITLQDIVIDGGATLGA

SEQ ID NO: 91613 - protein, 250 aa, Buttiauxella izardii
  misc_feature (1)..(250): tr|A0A3A5K0J5|A0A3A5K0J5_9ENTR 2,3-dihydro-2,3-dihydrox ybenzoate dehydrogenase OS=Buttiauxella izardii OX=8299 1 GN=dhbA PE=4 SV=1
MNIDFTGKRVWVTGAGKGIGYDTARAFSEAGATVIGFDLAFPLEVYPFATEVLNVADAEQVSTVTQRLLSDEPQLDVLVNAAGILRMGATDALALQDWQDTFAVNVGGAFNLFRAVMPHLREQQSGAIVTVASDAAHTPRTGMSAYGASKAALKSLALTVGLELAPFGVRCNVVSPGSTDTDMQRTLWKTPDAEQQRIKGFPEQFKLGIPLGKIARPQEIANTILFLASPLASHITLQDIVIDGGATLGA

SEQ ID NO: 91614 - protein, 250 aa, Buttiauxella noackiae
  misc_feature (1)..(250): tr|A0A1B7I104|A0A1B7I104_9ENTR 2,3-dihydro-2,3-dihydrox ybenzoate dehydrogenase OS=Buttiauxella noackiae ATCC 5 1607 OX=1354255 GN=M979_0230 PE=4 SV=1
MNIDFSGRQVWVTGAGKGIGYHTACAFSEAGATVIGFDLAFPLDVYPFATQVLNVADADQVGSVTQRILSDERHLDVLVNAAGILRMGATDALALQDWQDTFAVNVGGAFNLFRAVMPRMREQRSGAIVTVASDAAHTPRTGMSAYGASKAALKSLALTVGLELAPFGVRCNVVSPGSTDTDMQRTLWKTPDAEQQRIKGFPDQFKLGIPLGKIARPQEIASTILFLASQHASHITLQDIVIDGGATLGA

SEQ ID NO: 91615 - protein, 248 aa, Buttiauxella sp.
  misc_feature (1)..(248): tr|A0A3G2IMV9|A0A3G2IMV9_9ENTR 2,3-dihydro-2,3-dihydrox ybenzoate dehydrogenase OS=Buttiauxella sp. 3AFRM03 OX= 2479367 GN=dhbA PE=4 SV=1
MDFSGKTVWVTGAGKGIGYHTARAFSEAGATVIGFDLAFPLEIYPFATQVLNVADAEQVAAVTQRLLSDKQQLDVLVNAAGILRMGATDALALQDWQDTFAVNVGGAFNMFRAVMPHMREQRSGAIVTVASDAAHTPRTGMSAYGASKAALKSLALTVGLELAPFGVRCNVVSPGSTDTDMQRTLWKTPDAEQQRIQGFPEQFKLGIPLGKIARPQEIASTILFLASTHASHITLQDIVIDGGATLGA

SEQ ID NO: 91616 - protein, 250 aa, Buttiauxella sp.
  misc_feature (1)..(250): tr|A0A5C5DA69|A0A5C5DA69_9ENTR 2,3-dihydro-2,3-dihydrox ybenzoate dehydrogenase OS=Buttiauxella sp. B2 OX=25878 12 GN=dhbA PE=4 SV=1
MNIDFSGKRVWVTGAGKGIGYHTARLFSEAGAKVTGFDVAFPLDDYPYATEMLNVADTDQVASVCQRLLSDEPQLDVLVNAAGILRMGATDALALQDWQDTFAVNVGGAFNMFRVVIPRMREQRSGAIVTVASDAAHTPRTGMSAYGASKAALKNLSLTVGLELAPFGVRCNVVSPGSTDTDMQRTLWTSPDAEQQRIKGFPEQFKLGIPLGKIARPHEIASTIMFLASQHASHITLQDIVIDGGATLGA

SEQ ID NO: 91617 - protein, 250 aa, Buttiauxella warmboldiae
  misc_feature (1)..(250): tr|A0A3N5E3V2|A0A3N5E3V2_9ENTR 2,3-dihydro-2,3-dihydrox ybenzoate dehydrogenase OS=Buttiauxella warmboldiae OX= 82993 GN=dhbA PE=4 SV=1
MNIDFTGKRVWVTGAGKGIGYDTARAFSEAGATVIGFDLSFPLEVYPFATEVLNVADAEQVSALTQRLLSDEPQLDVLVNAAGILRMGATDALALQDWLDTFAVNVGGAFNLFRAVMPRLRKQQSGAIVTVASDAAHTPRTGMSAYGASKAALKSLALTVGLELAPFGVRCNVVSPGSTDTDMQRTLWKTPDAEQQRIKGFPEQFKLGIPLGKIARPQEIANTILFLASPLASHITLQDIVIDGGATLGA

SEQ ID NO: 91618 - protein, 89 aa, Accumulibacter sp.
  misc_feature (1)..(89): tr|A0A011MUW3|A0A011MUW3_9PROT 2,3-dihydro-2,3-dihydrox ybenzoate dehydrogenase OS=Candidatus Accumulibacter sp . SK-11 OX=1454000 GN=dhbA PE=4 SV=1
MQLDGAVAIVTGAAQNIGRCIAVALAEAGCRVAAIDLDGERLETLADERIDVLAGDVADPEQAARVVDTSTSLPAMLPIPSRRRASSTR

SEQ ID NO: 91619 - protein, 236 aa, Aminicenantes sp.
  misc_feature (1)..(236): tr|A0A1V5JXQ2|A0A1V5JXQ2_9BACT 2,3-dihydro-2,3-dihydrox ybenzoate dehydrogenase OS=Candidatus Aminicenantes bac terium ADurb.Bin508 OX=1852832 GN=entA PE=4 SV=1
MADKLFQIRSIRAPLEENLKGFEGKVLVCFGAGKGIGREVVQRAEGLGARVYGTSLSTGTDVCDYKSVRGFLEGVLLQEGRIDFVVNTAGLLGMGKVADREIETMRREIEVNYLGALNVLKASVAPLRASRGSLVLFTSSSYTRGRALYSVYSSCKAAVVNLMQGAAEELLGDGVRVNVINPERTATPMRRENFGLEDPRTLLDPREVAEATLQTLLSPLTGQVVDVKRGERVGEP

SEQ ID NO: 91620 - protein, 300 aa, Saccharimonas sp.
  misc_feature (1)..(300): tr|R4PY11|R4PY11_9BACT Putative 2,3-dihydro-2,3-dihydro xybenzoate dehydrogenase OS=Candidatus Saccharimonas aa lborgensis OX=1332188 GN=L336_0953 PE=4 SV=1
MGANSELISHIDPSYRNLVVISGARRGIGHAVADRFLQSYNTAVIGVDNHPDIVEQFPERQGRNFWPVQLDICDTDGVKELFGEVIAAPQPLDAVVHAAGHIVAGTDYHRHVRDYPTETARQQVKRLREVNGQAAIHFVSQAVGALSAQENGGCVIGISSSKADFPDPYRKEYMLAKARFSEAMAIQRTKLPPSIRLIDVQPGNTQTDIDGGEWIDGSDPDTARAVQAVNEWWRTHFGTPVKTIAEAIYDIAQDPRERRAVIPLGRDALLGSYMSRLPGWHTVSNTAARGVYTAVRLTSR

SEQ ID NO: 91621 - protein, 280 aa, Streptomyces sp.
  misc_feature (1)..(280): tr|A0A367FBT8|A0A367FBT8_9ACTN 2,3-dihydro-2,3-dihydrox ybenzoate dehydrogenase OS=Candidatus Streptomyces phil anthi OX=371608 GN=DTL70_05560 PE=4 SV=1
MSTAHRTAPGAARPRTPGYAPELDGRLALVTGAARGIGAAVVQALVTQGAHVLATDLDPAGVEQLAAEHPGQVTARPLDVTDAAAVEALLTESDRLLGPLDIVANVAGILRAAAVTELSDADWAATFAVNTGGVFHVSRAAARRMSERGSGSIVTVASNAAGVPRTGMAAYAASKAATVMFTKCLGLEVAGRGVRCNTVSPGSTLTDMQRACWGPGADDETAAARRVVEGDLATYRTGIPLGRIADPADVAEAVVFLASDRARHITLHDLYVDGGATLRA

SEQ ID NO: 91622 - protein, 267 aa, Capnocytophaga canimorsus
  misc_feature (1)..(267): tr|A0A0B7IK96|A0A0B7IK96_9FLAO 2,3-dihydro-2,3-dihydrox ybenzoate dehydrogenase OS=Capnocytophaga canimorsus OX =28188 GN=entA PE=3 SV=1
MSKIVLITGATSGIGRATAQWLSENGYVVYGTGRSVAQEDLPFKLIRMDVRDGQCVIEAVQRVVAQEKRIDVLINNAGVGITGAVEELPEEALQNVFQTNLFGAIRVIQAVLPYMRNQKSGLIINITSIAGYMGLPFRGGYSASKGALVLISEALRMELKNTGIHVTTIAPGDYATDIASRRYHAPVKANSPYREVYQKSLDLMNQHVDSGGNPIEMAKKIHRIIETKHPKVHYSQGSFLQKFSVILKRILPAKWYEKMLMNHYQLD

SEQ ID NO: 91623 - protein, 273 aa, Capnocytophaga ochracea
  misc_feature (1)..(273): tr|A0A2X2RN31|A0A2X2RN31_CAPOC 2,3-dihydro-2,3-dihydrox ybenzoate dehydrogenase OS=Capnocytophaga ochracea OX=1 018 GN=entA PE=3 SV=1
MNKTVLITGATSGIGKETALLLTSKGFLVYGTARNVEGKNLPFRLLPMDVRNEASIKEAVQQILTEVGRIDILINNAGVGITGAIEELPTEQLHNVFATNLYGAITVIQQVLPAMRSQGSGLIINIASIAGYMGLPFRGAYSASKGALLLMSEALRMEVKSFGIEVCTISPGDYATDIASRRYHTPVNEGSPYAEVYEKQLRLMNEHVDSGGDPKEMADKILKVINTKHLKVHYKQGSFLQKFSIVLKRLLPSNSYEKMLMKHYQLGANRTGN

SEQ ID NO: 91624 - protein, 252 aa, Chania multitudinisentens
  misc_feature (1)..(252): tr|W0L951|W0L951_9GAMM 2,3-dihydroxybenzoate-2,3-dehydr ogenase OS=Chania multitudinisentens RB-25 OX=1441930 G N=Z042_04145 PE=4 SV=1
MNNGHDFAGQRVWVTGAGAGIGYQTALAFVQAGAEVIGFDLHFGEQHYPFHTEVLDIADGAAVDSVCQRLLVEQPELDVLVNGAGILRMGLADETSSADWLACMAVNAGGAFNMFRHTLPIFRHQRRGAIVSVASNAAHVPRVGMAAYCASKAALRSLCQTVGLEMAPYGVRCNLVSPGSTNTPMQRGMWQDESGERKTINGFPEQFKLGIPLGKIAQPQEIADAILFLASERASHITMQDIVIDGGATLAA

SEQ ID NO: 91625 - protein, 259 aa, Chitinimonas sp.
  misc_feature (1)..(259): tr|A0A516SK11|A0A516SK11_9MICO 2,3-dihydro-2,3-dihydrox ybenzoate dehydrogenase OS=Chitinimonas sp. R3-44 OX=25 94795 GN=FNU76_20220 PE=4 SV=1
MEFQGKVALVTGAAQGIGASVAMALARGGAAVAVLDLQAEAVAGTAAALRDLGRPALGLAVDVARTDAVEAAVAQVEQELGAIDILVNVAGLLRMGNILTLSDEDWDRTFAVNVGGVFRVSRAVANRMAPRKRGAIVTVGSNASAVPRQQMAAYAASKAASAHFSRCLALEMAQHGIRCNVVSPGSTDTAMQRQLWTSPASEQAVIAGSLDSYRLGIPLGRIAAPDDIAEAVCFLASDRARHITMQDLCVDGGATLGAR

SEQ ID NO: 91626 - protein, 254 aa, Chromobacterium sp.
  misc_feature (1)..(254): tr|A0A5C1DCV7|A0A5C1DCV7_9NEIS 2,3-dihydro-2,3-dihydrox ybenzoate dehydrogenase OS=Chromobacterium sp. 257-1 OX =2605945 GN=dhbA PE=4 SV=1
MIGLDFTGQCVWVTGAAQGIGQEVAQRFVEAGARVVALDLQFEQAAAHCGVLRELPLDIRDAEAVAALCRRLAEEDTLPDVLVNAAGVLRLGAFDALSIDDWQQCLAVNVSGPFYLLRALLPHFKARRAGAIVNVASNAAHVPRIAMAAYGASKAAMASLSHNAALELAPYGVRCNVVSPGSTDTPMLRAMWQDEHGAARTIAGKPEAFRLGIPLGKLATPADVAGAVLYLASDLAGHVTMQDIVVDGGATLAA

SEQ ID NO: 91627 - protein, 254 aa, Chromobacterium violaceum
  misc_feature (1)..(254): tr|Q7NXZ4|Q7NXZ4_CHRVO 2,3-dihydro-2,3-dihydroxybenzoat e dehydrogenase OS=Chromobacterium violaceum (strain AT CC 12472 / DSM 30191 / JCM 1249 / NBRC 12614 / NCIMB 91 31 / NCTC 9757) OX=243365 GN=entA PE=4 SV=1
MVGLDFTGQCVWVTGAAQGIGQEVARRFVEAGARVIALDLKFNSPAARGGVLRELPLDIRDADAVAALCRRLAEEDALPDVLVNAAGVLRLGAFDALSIDDWQQCLAVNVSGPFYLLRALMPHFKARRAGAIVNVASNAAHVPRIDMAAYGASKAAMASLSHNAALELAPYGVRCNVVSPGSTDTPMLRGMWQDEHGAARTIAGKPEAFRLGIPLGKLATPADVAGAVLYLASDLAGHVTMQDIVVDGGATLAA

SEQ ID NO: 91628 - protein, 144 aa, Chromobacterium violaceum
  misc_feature (1)..(144): tr|A0A447T9Q1|A0A447T9Q1_CHRVL 2,3-dihydro-2,3-dihydrox ybenzoate dehydrogenase OS=Chromobacterium violaceum OX =536 GN=entA_2 PE=4 SV=1
MVGLDFTGQCVWVTGAAQGIGQEVARRFVEAGARVIALDLKFNSPAARGGVLRELPLDIRDANAVAALCRRLAEEDALPDVLVNAAGVLRLGAFDALSIDDWQQCLAVNVSGPFYLLRALMPHFKARRAGAIVNVASNAATCRA

SEQ ID NO: 91629 - protein, 255 aa, Ciceribacter sp.
  misc_feature (1)..(255): tr|A0A4Q2TV34|A0A4Q2TV34_9RHIZ 2,3-dihydro-2,3-dihydrox ybenzoate dehydrogenase OS=Ciceribacter sp. F8825 OX=25 09717 GN=EUU22_02370 PE=4 SV=1
MQLTGLAGKAAFVTGAAGGIGRAVVDGLVASGVRVFATDRQIDPAWSAAEGPVQGAALDISDEGAVQRVIAEADTEMGGFDFGVNVAGILDTTPVADLKGDVWRRVFDVNCHGAFFVCRALAARMAERRQGSIVVVGSNAAGIPRKNMAAYAASKAAATMFVRCLGLEVAEHGVRCNVVAPGSTLTPMQTGMWTTPASQERVIEGDLASYRTGIPLKKLAMPEDIANAVLFLLSDQAGHITMADLYVDGGATLRG

SEQ ID NO: 91630 - protein, 251 aa, Citrobacter amalonaticus
  misc_feature (1)..(251): tr|A0A515AE94|A0A515AE94_CITAM 2,3-dihydro-2,3-dihydrox ybenzoate dehydrogenase OS=Citrobacter amalonaticus OX= 35703 GN=dhbA PE=4 SV=1
MAGFDFHGKTVWVTGAGKGIGYATALAFVEAGAQVTGFDREFALQDYPFVTEVMDVADAGQVAEVCQRLLVQTDRLDVLVNAAGILRMGATDALSPHDWQQTFAVNVGGAFNLFQQTMAQFRHQRGGAIVTVASDAAHTPRIGMSAYGASKAALKSLALTVGLELAGSGVRCNLVSPGSTDTDMQRTLWVSDDAEQQRIRGFGEQFKLGIPLGKIARPQEIANTILFLASDLASHITLQDIVVDGGSTLGA

SEQ ID NO: 91631 - protein, 251 aa, Citrobacter amalonaticus
  misc_feature (1)..(251): tr|A0A0F6RE00|A0A0F6RE00_CITAM 2,3-dihydroxybenzoate-2, 3-dehydrogenase OS=Citrobacter amalonaticus Y19 OX=1261 127 GN=F384_02635 PE=4 SV=1
MAGFDFRGKTVWVTGAGKGIGYATALAFVEAGAQVTGFDCEFALQDYPFTTEVMDVADAGQVAEVCQRVLAHTERLDVLVNAAGILRMGATDALSSHDWQQTFAVNVGGAFNLFQQTMAQFRRQQGGAIVTVASDAAHTPRIGMSAYGASKAALKSLALTVGLELAGSGVRSNLVSPGSTDTDMQRTLWVREDAEQQRIRGFGEQFKLGIPLGKIARPQEIANTILFLASDLASHITLQDIVVDGGSTLGA

SEQ ID NO: 91632 - protein, 251 aa, Citrobacter braakii
  misc_feature (1)..(251): tr|A0A1R0G0L2|A0A1R0G0L2_CITBR 2,3-dihydro-2,3-dihydrox ybenzoate dehydrogenase OS=Citrobacter braakii OX=57706 GN=dhbA PE=4 SV=1
MSGFDFAGKTVWVTGAGKGIGYTTALAFVKAGAEVTGFDREFSQNNYPFATEVLDVANAEQVAEVCQRVLQTRERLDVLVNAAGILRMGATDALSIEEWQQTFAVNVGGAFNLFQQTMAQFRRQQGGAIVTVASDAAHTPRIGMSAYGASKAALKNLALTVGLELAGSGVRCNVVSPGSTDTDMQRTLWVSDDAEQQRIRGFGEQFKLGIPLGKIARPQEIANTILFLASDLASHITLQDIVVDGGSTLGA

SEQ ID NO: 91633 - protein, 251 aa, Citrobacter freundii
  misc_feature (1)..(251): tr|A0A381GQN4|A0A381GQN4_CITFR 2,3-dihydroxybenzoate-2, 3-dehydrogenase OS=Citrobacter freundii OX=546 GN=entA PE=4 SV=1
MSGFDFAGKTVWVTGAGKGIGYTTALAFVKAGAEVTGFDREFSQDNYPFVTEVLDVANAGQVAEVCQRLLQTRERLDVLVNAAGILRMGATDALSIEEWQQTFAVNVGGAFNLFQQTMAQFRRQQGGAIVTVASDAAHTPRIGMSAYGASKAALKNLALTVGLELAGRGVRCNVVSPGSTDTDMQRTLWVSDDAEQQRIRGFGEQFKLGIPLGKIARPQEIANTILFLASDLASHITLQDIVVDGGSTLGA

SEQ ID NO: 91634 - protein, 251 aa, Citrobacter gillenii
  misc_feature (1)..(251): tr|A0A3E2KW01|A0A3E2KW01_9ENTR 2,3-dihydro-2,3-dihydrox ybenzoate dehydrogenase OS=Citrobacter gillenii OX=6782 8 GN=DZA29_05465 PE=4 SV=1
MVGFDFTGKTVWVTGAGKGIGYTTALAFVDAGARVTGFDLAFDGEAYPFATEVMNVADAPQVAQVCERLLANTERLDVLVNAAGILRMGPTDALSAEDWQQTFAVNVGGAFNLFQHTMAQFRRQQGGAIVTVASDAAHTPRIGMSAYGASKAALKSLALTVGLELATSGVRCNVVSPGSTDTDMQRTLWVSDDAEQQRIRGFGEQFKLGIPLGKIARPQEIANTVLFLASDLASHITLQDIVVDGGSTLGA

SEQ ID NO: 91635 - protein, 158 aa, Citrobacter koseri
  misc_feature (1)..(158): tr|A0A381GZQ8|A0A381GZQ8_CITKO Short chain dehydrogenas e OS=Citrobacter koseri OX=545 GN=dhbA PE=4 SV=1
MGKLTGKTALITGASQGIGEGIARVFARHGANLILLDISDEAEKLADELGGRGHRCTAIKADVRDFASVAAAVARAKKIEGKIDILVNNAGVCRLGNFLDMSEEDRDFHIDINIKGVWNVTKAVLPEMVERQRWAYRHDVLRDRGYGGRSRRNGLCPV

SEQ ID NO: 91636 - protein, 247 aa, Citrobacter pasteurii
  misc_feature (1)..(247): tr|A0A0A1RK68|A0A0A1RK68_9ENTR 2,3-dihydro-2,3-dihydrox ybenzoate dehydrogenase [enterobactin] siderophore OS=C itrobacter pasteurii OX=1563222 PE=4 SV=1
MHIDLTGKKALVTGASRGLGRAIALSLAKAGADVVITYEKSAEKAQAVADEITALGRHGEAIQANSADAQAIQNAVNRTVQSLGGLDILVNNAGIARGGPLESLSLEDIDALINVNIRGVVVAIQAALPHLPEGGRIINIGSCLANRVAQPGIAVYAMTKSALNSLTRGLARDLGPRGITVNLVHPGPTDSDMNPADGEQAESQRQLIATGHYGTPEDVAAAVTFLASPEAGQISGTGLDVDGGLNA

SEQ ID NO: 91637 - protein, 251 aa, Citrobacter portucalensis
  misc_feature (1)..(251): tr|A0A5B0T583|A0A5B0T583_9ENTR 2,3-dihydro-2,3-dihydrox ybenzoate dehydrogenase OS=Citrobacter portucalensis OX =1639133 GN=dhbA PE=4 SV=1
MAGFDFAGKTVWVTGAGKGIGYTTALAFANAGAEVTGFDREFPQDNYPFATEVLDVANAGQVAKVCQRVIKARERLDVLVNAAGILRMGATDALSAEEWQQTFAVNVGGAFNLFQQTMAQFRRQQGGAIVTVASDAAHTPRIGMSAYGASKAALKSLALTVGLELAGSGVRCNVVSPGSTDTDMQRTLWVSDDAEQQRIRGFGEQFKLGIPLGKIARPQEITNTILFLASDLASHITLQDIVVDGGSTLGA

SEQ ID NO: 91638 - protein, 251 aa, Citrobacter rodentium
  misc_feature (1)..(251): tr|D2TMN5|D2TMN5_CITRI 2,3-dihydro-2,3-dihydroxybenzoat e dehydrogenase OS=Citrobacter rodentium (strain ICC168 ) OX=637910 GN=entA PE=4 SV=1
MAGFDFRGKTVWVTGAGKGIGYATARAFAEAGAQVTGFDRAFVLSDYPFACEVMDVADAEQVSDVCQRLLAQTERLDVLVNAAGILRMGATDALSQDDWQQTLAVNVGGAFNLFQQTMAQFRRQQGGAIVTVASDAAHTPRIGMSAYGASKAALKSLALSVGLELAGSGVRCNVVSPGSTDTDMQRTLWQSDDAEQQRIRGFGEQFKLGIPLGKIARPQEIASTIMFLASDLASHITLQDIVVDGGSTLGA

SEQ ID NO: 91639 - protein, 251 aa, Citrobacter rodentium; identical to SEQ ID NO: 91638
  misc_feature (1)..(251): tr|A0A482PUV7|A0A482PUV7_CITRO 2,3-dihydro-2,3-dihydrox ybenzoate dehydrogenase OS=Citrobacter rodentium OX=678 25 GN=dhbA PE=4 SV=1

SEQ ID NO: 91640 - protein, 251 aa, Citrobacter sp.
  misc_feature (1)..(251): tr|A0A0V9JZ23|A0A0V9JZ23_9ENTR 2,3-dihydro-2,3-dihydrox ybenzoate dehydrogenase OS=Citrobacter sp. 50677481 OX= 1736699 GN=APU02_00765 PE=4 SV=1
MAGFDFQGKTVWITGAGKGIGYTTALAFTKAGAQVTGFDREFALDDYPFVTETLDVANAGQVAEVCQRLLAQTERLDVLVNAAGILRMGATDALSADDWQQTFAVNVGGAFNLFQQTMAQFRRQQGGAIVTVASDAAHTPRIGMSAYGASKAALKSLALTVGLELSGNGVRCNVVSPGSTDTDMQRTLWISDDAEQQRIRGFGEQFKLGIPLGKIARPQEIANTILFLASDLASHITLQDIVVDGGSTLGA

SEQ ID NO: 91641 - protein, 251 aa, Citrobacter sp.
  misc_feature (1)..(251): tr|A0A4Y5ZDX1|A0A4Y5ZDX1_9ENTR 2,3-dihydro-2,3-dihydrox ybenzoate dehydrogenase OS=Citrobacter sp. CF971 OX=256 6012 GN=dhbA PE=4 SV=1
MAGFDFAGKTVWVTGAGKGIGYTTALAFANAGAEVTGFDREFPQDNYPFTTEVLDVANAGQVAEVCQRVLKARERLDVLVNAAGILRMGATDALSAEEWQQTFAVNVGGAFNLFQQTMAQFRRQQGGAIVTVASDAAHTPRIGMSAYGASKAALKSLALTVGLELAGSGVRCNVVSPGSTDTDMQRTLWVSDDAEQQRIRGFGEQFKLGIPLGKIARPQEITNTILFLASDLASHITLQDIVVDGGSTLGA

SEQ ID NO: 91642 - protein, 251 aa, Citrobacter sp.
  misc_feature (1)..(251): tr|A0A4P6WH31|A0A4P6WH31_9ENTR 2,3-dihydro-2,3-dihydrox ybenzoate dehydrogenase OS=Citrobacter sp. LY-1 OX=2546 350 GN=dhbA PE=4 SV=1
MVGFDFTGKTVWVTGAGKGIGYTTALAFANAGAEVTGFDREFPQDNYPFATEVLDVANAGQVAEVCQRVLQARERLDVLVNAAGILRMGATDALSVEEWQQTFAVNVGGAFNLFQQTMAQFRRQQGGAIVTVASDAAHTPRIGMSAYGASKAALKSLALTVGLELAGSGVRCNVVSPGSTDTDMQRTLWVSDDAEQQRIRGFGEQFKLGIPLGKIARPQEITNTILFLASDLASHITLQDIVVDGGSTLGA

SEQ ID NO: 91643 - protein, 251 aa, Citrobacter sp.
  misc_feature (1)..(251): tr|A0A4U6DYG7|A0A4U6DYG7_9ENTR 2,3-dihydro-2,3-dihydrox ybenzoate dehydrogenase OS=Citrobacter sp. wls830 OX=25 76411 GN=dhbA PE=4 SV=1
MAGFEFAGKTVWVTGAGKGIGYTTALAFVKAGAQVTGFDREFPQDNYPFATEVLDVADAGQVAEVCQRVLKACERLDVLVNAAGILRMGATDALSVEEWQQTFAVNVGGAFNLFQQTMAQFRRQQGGAIVTVASDAAHTPRIGMSAYGASKAALKSLALTVGLELAGSGVRCNVVSPGSTDTDMQRTLWVSDDAEQQRIRGFGEQFKLGIPLGKIARPQEIANTILFLASDLASHITLQDIVVDGGSTLGA

SEQ ID NO: 91644 - protein, 251 aa, Citrobacter sp.; identical to SEQ ID NO: 91632
  misc_feature (1)..(251): tr|A0A4V6BJT0|A0A4V6BJT0_9ENTR 2,3-dihydro-2,3-dihydrox ybenzoate dehydrogenase OS=Citrobacter sp. wls831 OX=25 76410 GN=dhbA PE=4 SV=1

SEQ ID NO: 91645 - protein, 251 aa, Citrobacter werkmanii
  misc_feature (1)..(251): tr|A0A4V1VFH5|A0A4V1VFH5_9ENTR 2,3-dihydro-2,3-dihydrox ybenzoate dehydrogenase OS=Citrobacter werkmanii OX=678 27 GN=dhbA PE=4 SV=1
MAGFDFAGKTIWVTGAGKGIGYTTALAFVKAGAQVTGFDREFPQDNYPFATEVLNVADAGQVAEVCQRVLKACERLDVLVNAAGILHMGATDALSVEEWQQTFAVNVGGAFNLFQQTMARFRRQQGGAIVTVASDAAHTPRIGMSAYGASKAALKSLALTVGLELAGSGVRCNVVSPGSTDTDMQRTLWVSDDAEEQRIRGFGEQFKLGIPLGKIARPQEIANTILFLASDLASHITLQDIVVDGGSTLGA

SEQ ID NO: 91646 - protein, 251 aa, Citrobacter youngae
  misc_feature (1)..(251): tr|D4BCM9|D4BCM9_9ENTR 2,3-dihydroxybenzoate-2,3-dehydr ogenase OS=Citrobacter youngae ATCC 29220 OX=500640 GN= CIT292_08243 PE=4 SV=1
MGEFDFAGKTVWVTGAGKGIGYTTALAFVDAGAKVIGFDREFSRQAYPFATEVLDVADADAVAEVCQRVLQTSERLDVLVNAAGILRMGATDALSAEEWLQTFAVNVGGAFNLFQQTMAQFRRQQGGAIVTVASDAAHTPRIGMSAYGASKAALKSLALTVGLELAGCGVRCNVVSPGSTDTDMQRTLWHSDDAEQQRIRGFGEQFKLGIPLGKIARPQEIANTILFLASDLASHITLQDIVVDGGSTLGA

SEQ ID NO: 91647 - protein, 251 aa, Citrobacter youngae
  misc_feature (1)..(251): tr|A0A549UKM1|A0A549UKM1_9ENTR 2,3-dihydro-2,3-dihydrox ybenzoate dehydrogenase OS=Citrobacter youngae OX=13344 8 GN=dhbA PE=4 SV=1
MAGFDFTGKTVWITGAGKGIGYTTALAFVDAGAQVTGFDREFALAEYPFATEVMDVANAQQVAQVCERLLANTGRLDILVNAAGILRMGPTDALSVEDWQQTFAVNVGGAFNLFQQTMAQFRRQRGGAIVTVASDAAHTPRIGMSAYGASKAALKSLALTVGLELAGSGVRCNVVSPGSTDTDMQRTLWVSDDAEQQRIRGFGEQFKLGIPLGKIARPQEIANTILFLASDLASHITLQDIVVDGGSTLGA

SEQ ID NO: 91648 - protein, 254 aa, Clostridioides difficile
  misc_feature (1)..(254): tr|A0A4V6KGF6|A0A4V6KGF6_CLODI Short-chain dehydrogenas e OS=Clostridioides difficile OX=1496 GN=dltE PE=4 SV=1
MNLTGNTIFIPGATSGIGLALATRLHDKGNTVIVGGRRTELLDRIREDHPGLHTVAIDIADPAGVDAAARQVIAEHPDLDVLIAMAGIMRVEDWSSPAGFLDTAEATITTNLLGPIRLVAAFIDHLQTRPAATIMTVSSGLAFAPLRVTPTYNATKAAIHMLSESLRLQFAGTSVEVIELVPPAVRTDLMPGQRDSDFAMPLDEFADEVIDLIGTQPDATELLVERVKFLRWGEARGDYAGVVATLNDHDPHGS

SEQ ID NO: 91649 - protein, 248 aa, Clostridium beijerinckii
  misc_feature (1)..(248): tr|A0A1S8PPD4|A0A1S8PPD4_CLOBE 2,3-dihydro-2,3-dihydrox ybenzoate dehydrogenase OS=Clostridium beijerinckii OX= 1520 GN=dhbA PE=3 SV=1
MVLITGASKGIGLKVVEKYLASGETVVATDREIENLNKYSDSHRIHWLKMDVTNRTEVKRVIDKVESEIGEINIFVNVAGIFKSCPVEDTTIEEWTKIFEVNTTGVFNVTQAVSDRMKSRKKGSIIVVSSNASKYPRVGMGAYAASKAATSMYTKCLALELSEYGIRCNIVSPGSTNTDMQKQLWNGSKIVPKSILNGDLKTYRLGIPLHKIAEPEDIAEVIFFLASDKAGHITMEEVTVDGGATMGV

SEQ ID NO: 91650 - protein, 317 aa, Clostridium chromiireducens
  misc_feature (1)..(317): tr|A0A1V4INJ9|A0A1V4INJ9_9CLOT 2,3-dihydro-2,3-dihydrox ybenzoate dehydrogenase OS=Clostridium chromiireducens OX=225345 GN=entA PE=4 SV=1
MKKSEEWININIPKQHSRSVIITGTGGLGYETALVLVRAGAEVIFAGRNEKKGAESVNKIRTIVPSANIRFESIDLADLASIEAFGARIKNQRQSLDLLINNAGVMTPPKRKVTKDGFELQFGTNYLGHFALTAHLMPLLRKGNKPRVVTVSSMANRERKAKINFDDLQSERNYHSMDAYDQSKLADLMFTLELQRRSDAAGWGIMSIASHPGISSTDLMANGPGEKSLLARMLNIFTFMRQSAQNGALPSLYAAAAPNAEGGGYYGPGGFYEIKGLPGQAKIPTKAQDVNVAKRLWEVSKQLTSVDFDKIASMCEK

SEQ ID NO: 91651 - protein, 251 aa, Clostridium sporogenes
  misc_feature (1)..(251): tr|A0A1V9ISD9|A0A1V9ISD9_CLOSG 2,3-dihydro-2,3-dihydrox ybenzoate dehydrogenase OS=Clostridium sporogenes OX=15 09 GN=NCTC13020_03625 PE=4 SV=1
MSKNHKFDKHFNNLNEENQEKYIEEMHEMADKAAKKNNLIFGAVVIPIVIVCILVVKQMVSFSFNLAKDDNGAKNNNTEITKDVKNNNKGTDKKAENKEIALNEKIAKYIQDKNNRQKSLKDAVSINKGSEKGVSVIFISQLYRNNGYDIPKNTISTKGLLEDLKKKNWTKETDYTKLQKGDICFTTVDNAGSPSHAYIFMGWVKEGKTDYAYVCDGQTSDYDDTLHKRNLSVSTAKKDKIAFFMKAPNEK

SEQ ID NO: 91652 - protein, 246 aa, Coccidioides posadasii
  misc_feature (1)..(246): tr|C5NZM6|C5NZM6_COCP7 Oxidoreductase,short chain dehyd rogenase, putative OS=Coccidioides posadasii (strain C7 35) OX=222929 GN=CPC735_012370 PE=4 SV=1
MANQLPFPSFTRVWHNKIYPTIDPSQNPSIAAIGKKVVISGGGSGIGPHIVKAFAAAGALRIEEVKREFPGTEVDVLVADIADEPSVCKLAADIKRLHGTWDVFVSNAGYSPELLSVTDSITSEWFKAFDVNVKGNFFLVREVAPFAAATGAVFVHVSSGACHALPRPGHSAYCAAKLASTKIMEHFQRECSPIRFTSIHPGIIPTEMANTLFKQVFRRPSQSGLRAAKRILPGAGCCGATGTLES

SEQ ID NO: 91653 - protein, 260 aa, Cohnella sp.
  misc_feature (1)..(260): tr|A0A4V6RXI1|A0A4V6RXI1_9BACL 2,3-dihydro-2,3-dihydrox ybenzoate dehydrogenase OS=Cohnella sp. CC-MHH1044 OX=2 565925 GN=E6C55_18500 PE=4 SV=1
MGTAFEGKVALVTGAAQGIGEAIVHALCGQGAIVAAVDRQREPLMRLSAALAGQGSPARAYPLDLKDDEAILQTVARIEEELGAIDILVHAAGVLRTGSLSTYADEDWEELFAVNVGAVFRLTRAVSERMIPRRRGAIVTVSSNAAAVPRMGMGAYATTKAAATMLTKCFALELAAYGIRCNIVSPGSTDTPMLRGMWQDERGAQETLDGSLPAYRTGIPLRKLATPADIAEGVLYLASERAGHLTMHDLRIDGGATLGV

SEQ ID NO: 91654 - protein, 258 aa, Collimonas arenae
  misc_feature (1)..(258): tr|A0A0A1F8W2|A0A0A1F8W2_9BURK 2,3-dihydro-2,3-dihydrox ybenzoate dehydrogenase of siderophore biosynthesis OS= Collimonas arenae OX=279058 GN=LT85_1813 PE=4 SV=1
MEFQGKVVLITGAAQGIGAAVAQAMAQQGAKLALFDVQQQALAQQVDALASNGAQVLGIGVNVTDSTAVNAAVERVEQELGHIDVLVNAAGILRLGSALDCSDADWEQTFNVNVGGVFRMCRAVANRMAPRGRGVIVTVASNASAVPRQHMAAYAASKAASAHFTRCLGLELAVHGIRCNVVSPGSTDTAMQRQLWTSEEHKQAVINGALEQFRLGIPLRRIADAADIADAVIFLASERARHITMHELCVDGGATLGA

SEQ ID NO: 91655 - protein, 270 aa, Comamonadaceae bacterium
  misc_feature (1)..(270): tr|A0A3M6Q972|A0A3M6Q972_9BURK 2,3-dihydro-2,3-dihydrox ybenzoate dehydrogenase OS=Comamonadaceae bacterium NML 161473 OX=2478744 GN=dhbA PE=4 SV=1
MTSAASTPTPFAGQLTGQFAGQRVLVTGAAQGIGRCIAQSFAAQGAQVIGLDVLADAPDSPATPERPWRLLALDIADAAAVQAVSARLQQEEARLDVLVNAAGILRMGGLDDLTAQDWQRSMAVNAIGPFTLIQQWTPIFKRQRRGSIVNIASNAANLPRLGMLAYAASKAALLSLSRGVALELAPYGVRCNIVSPGSTDTPMLAGMLGDAAGQQRLIQGLPEQFKLGIPLGKIATPQDIAHSVLFLASEQAGHITMQQIVADGGATLGV

SEQ ID NO: 91656 - protein, 270 aa, Comamonadaceae bacterium
  misc_feature (1)..(270): tr|A0A3M6R8A4|A0A3M6R8A4_9BURK 2,3-dihydro-2,3-dihydrox ybenzoate dehydrogenase OS=Comamonadaceae bacterium NML 180581 OX=2478745 GN=dhbA PE=4 SV=1
MTSAASTPTPFAGQLTGQFAGQRVLVTGAAQGIGRCIAQSFAAQGAQVIGLDVLADAPDSPATPERPWRLLALDIADAAAVQAVSARLQQEEARLDVLVNAAGILRMGGLDDLTAQDWQRSMAVNAIGPFTLIQQWTPIFKRQRRGSIVNIASNAANLPRMGMLAYAASKAALLSLSRGVALELAPYGVRCNIVSPGSTDTPMLAGMLGDAAGQQRLIQGLPEQFKLGIPLGKIATPQDIAHIVLFLASEQAGHITMQQIVADGGATLGV

SEQ ID NO: 91657 - protein, 286 aa, Comamonadaceae bacterium
  misc_feature (1)..(286): tr|A0A3M6Q7K0|A0A3M6Q7K0_9BURK 2,3-dihydro-2,3-dihydrox ybenzoate dehydrogenase OS=Comamonadaceae bacterium NML 970147 OX=1076744 GN=dhbA PE=4 SV=1
MTSAASTPTPFAGQLESQSTGRPTGQLTGQLTGQFAGQRVLVTGAAQGIGRCIAQSFAAQGAQVIGLDVLADAPDSPATPERPWRLLALDIADAAAVQAVSARLQQEEARLDVLVNAAGILRMGGLDDLTAQDWQRSMAVNAIGPFTLIQQWTPIFKRQRRGSIVNIASNAANLPRLGMLAYAASKAALLSLSRGVALELAPYGVRCNIVSPGSTDTPMLAGMLGDAAGQQRLIQGLPEQFKLGIPLGKIATPQDIAHSVLFLASEQAGHITMQQIVADGGATLGV

SEQ ID NO: 91658 - protein, 282 aa, Comamonadaceae bacterium
  misc_feature (1)..(282): tr|A0A3P1W7H8|A0A3P1W7H8_9BURK 2,3-dihydro-2,3-dihydrox ybenzoate dehydrogenase OS=Comamonadaceae bacterium OH3 737_COT-264 OX=2491055 GN=dhbA PE=4 SV=1
MTSAASTPTPFAGQLESQSTGRPTGQLTGQFAGQRVLVTGAAQGIGRCIAQSFAAQGAQVIGLDVLADAPDSPATPERPWRLLALDIADAAAVQAVSARLQQEDARLDVLVNAAGILRMGGLDDLTAQDWQRSMAVNAIGPFTLIQQWTPIFKRQRRGSIVNIASNAANLPRLGMLAYAASKAALLSLSRGVALELAPYGVRCNIVSPGSTDTPMLAGMLGDAAGQQRLIQGLPEQFKLGIPLGKIATPQDIAHSVLFLASEQAGHITMQQIVADGGATLGV

SEQ ID NO: 91659 - protein, 257 aa, Comamonadaceae bacterium
  misc_feature (1)..(257): tr|A0A4Q5WQ03|A0A4Q5WQ03_9BURK 2,3-dihydro-2,3-dihydrox ybenzoate dehydrogenase OS=Comamonadaceae bacterium OX= 1871071 GN=EOO24_19445 PE=4 SV=1
MQLTGFDGRIAFVTGAAGGIGQALVRQLLQAGSTVVATDVSAPTQAAADGAGGHLLPHALDVSDGDAVTRLVQQIEAEVGPIALGVNVAGVLGGTLVTDTSDAEWRRVFAVNCDGVFHVGRALAQVMQPRGQGALVTVGSNAAGVPRHAMAAYAASKAAATMFTRCLGLELAPHGIRCNIVAPGSTLTPMQTGMWADERGAERVIAGLPEQYKAGIPLRKLATPEDIANAVMFLLSDQAGHIAMSDLYVDGGATLRA

SEQ ID NO: 91660 - protein, 257 aa, Corallococcus exiguus
  misc_feature (1)..(257): tr|A0A5C5DNI5|A0A5C5DNI5_9DELT 2,3-dihydro-2,3-dihydrox ybenzoate dehydrogenase OS=Corallococcus exiguus OX=834 62 GN=FH620_30155 PE=4 SV=1
MASTTGHAVVTGAAQGIGAAVARKLARTMPVAVFDQNAAGLELLVAELRQQGLKATAFPVDVRDKDGIEDAIASIDSKLGPIQVLANVAGILRMGSVLTQSDADWMTTFAVNTHGVFHVSRAVARHMVPRRSGAIVTVGSNAAGVPRMQMAAYAASKAASTMFTKCLGLELAEHGIRCNVVSPGSTDTAMQRGMWTDESGPARVIQGSLDTYRTGIPLRRIATPDDIADAVVFLASDQARHITMHDLCIDGGATLGV

SEQ ID NO: 91661 - protein, 257 aa, Corallococcus sp.
  misc_feature (1)..(257): tr|A0A3A8JP90|A0A3A8JP90_9DELT 2,3-dihydro-2,3-dihydrox ybenzoate dehydrogenase OS=Corallococcus sp. CA054A OX= 2316733 GN=D7V88_00040 PE=3 SV=1
MGAPTGIAVVTGAAQGIGAAVARKLARTMHVAVFDQNSAGLELLVAELRQQDLKATAFKVDVRDKDGVEDAVAIIEAKLGPIQVLANVAGILRMGAALELSDADWMSTFAVNTHGVFHVSRAVARRMVPRRSGAIVTVGSNAAGVPRMQMAAYAASKAASTMFTKCLGLELAEHGIRCNVVSPGSTDTAMQRALWSDDRGPEAVIAGSLQSFRTGIPLRRIATPDDIADSVVFLASDQARHITMHDLCIDGGATLGV

SEQ ID NO: 91662 - protein, 257 aa, Corallococcus sp.
  misc_feature (1)..(257): tr|A0A3A8HJU9|A0A3A8HJU9_9DELT 2,3-dihydro-2,3-dihydrox ybenzoate dehydrogenase OS=Corallococcus sp. CA054B OX= 2316734 GN=D7V80_00965 PE=4 SV=1
MSSTAGHAVVTGAAQGIGAAVARRLARTMPVAVFDQNAAGLELLVAELRQQGLKATAFPVDVRDKDGIEDAIAYIDGKLGPIQVLANVAGILHMGSVLTQSDADWMSTFAVNTHGVFHVSRAVARHMVPRRSGAIVTVGSNAAGVPRMQMAAYAASKAASTMFTKCLGLELAEHGIRCNIVSPGSTDTAMQRGMWTDESGPVRVIQGSLDTFRTGIPLRRIATPDDIADAVVFLASDQARHITMHDLCIDGGATLGV

SEQ ID NO: 91663 - protein, 257 aa, Corallococcus sp.
  misc_feature (1)..(257): tr|A0A3A5FWD1|A0A3A5FWD1_9DELT 2,3-dihydro-2,3-dihydrox ybenzoate dehydrogenase OS=Corallococcus sp. H22C180312 01 OX=2249217 GN=DRW03_22445 PE=3 SV=1
MEQKTRVALVTGAAQGIGASVTRVLAEEGRVAALDRNAERLEATARELRAHSLDVTAFAVDVSDRQAVESTIELVERELGPIAVLANVAGILRVSPVLSITDEDWAATFAVNTQGVFHVSRAVAQRMVPRRTGVIVTVGSNASGVPRIGMAAYAASKAASAMFTKCLGLELAPHGIRCNIVSPGSTDTAMQRALWTDEQGGQAVIAGSLESFRLGIPLGRIASADDIAEAVRFLASDRARHITLHDLCVDGGATLGA

SEQ ID NO: 91664 - protein, 257 aa, Corallococcus sp.
  misc_feature (1)..(257): tr|A0A554G5C2|A0A554G5C2_9DELT 2,3-dihydro-2,3-dihydrox ybenzoate dehydrogenase OS=Corallococcus sp. Z5C101001 OX=2596829 GN=FOF48_20635 PE=3 SV=1
MGATTGHAVVTGAAQGIGAAVARKLARTMPVAVFDQNAAGLELLVAELRQQGLKATAFPVDVRDKDGIEDAIAVIESRLGPIQVLANVAGILRVGPVLTQSDADWMSTFAVNTHGVFHVSRAVAKHMVPRRSGVIVTVGSNAAGVPRMQMAAYAASKAASTMFTKCLGLELAQHGIRCNVVSPGSTDTAMQRAMWADDSGRDAVIAGSLDTFRTGIPLRRIATPDDIADAVAFLASDQARHITMHDLCIDGGATLGV

SEQ ID NO: 91665 - protein, 253 aa, Corticibacter populi
  misc_feature (1)..(253): tr|A0A3M6QZL6|A0A3M6QZL6_9BURK 2,3-dihydro-2,3-dihydrox ybenzoate dehydrogenase OS=Corticibacter populi OX=1550 736 GN=D8I35_05080 PE=4 SV=1
MQLTGFDQKIAFVTGAAGGIGQAIVDLLLQAGSTVVATDLHAPAPRPHAQLHPHALDVRDAVQVDALVARIEAELGPIEMGINVAGVLSDTAVAQTSDAQWRQVFAVNCDGVFHVSRALARVMQPRRSGRLVTVGSNAAGIPRHAMAAYAASKAAATMFTRCLGLELAPHGIRCNIVAPGSTLTPMQTGMWADADGAQRVIAGIPELYKSGIPLQKLATPEDVANAVMFMLSEQAGHITMSDLYVDGGATLRG

SEQ ID NO: 91666 - protein, 248 aa, Corynebacterium casei
  misc_feature (1)..(248): tr|G7I0P1|G7I0P1_9CORY 2,3-dihydro-2,3-dihydroxybenzoat e dehydrogenase OS=Corynebacterium casei UCMA 3821 OX=1 110505 GN=dhbA PE=4 SV=1
MGQAHVLVTGAAGGIGAAIVQKLLAQGANVTATDLPPFGTSGSNFGSTQCAEHTLDVTDTAQIAELTEMAWKSSFGPVDALVNAAGVFGGAPGVQTSDKELQRLFSINAFGVFAMCRAVGSKMAERGHGSIVTVGSNAGSLPRTNMVAYGASKAAASSITRSFGLELGRNGVRCNVVCPGTTRTPMIEGLDSEEGLITGDQSAFKTGIPLGRIAEPNDIAEVVVFLTSTSARHVTLQEVVVDGGASQR

SEQ ID NO: 91667 - protein, 249 aa, Corynebacterium geronticis
  misc_feature (1)..(249): tr|A0A3G6J2E6|A0A3G6J2E6_9CORY 2,3-dihydro-2,3-dihydrox ybenzoate dehydrogenase OS=Corynebacterium geronticis O X=2079234 GN=entA PE=4 SV=1
MQSKPSDLPRQKPHCLVTGANGGIGSAVCKLLQECGYRVSRWDLPNVDVSDPLSVEFGLEQLPMPVDFLIHTAGILEPDSALLPDRDQINRSIAVNLLGVINTCAPIAGQMKERRSGAIVVVSSNAGSVPRKGMATYGATKAAATNWVKTLALELAPFGVRCNIVSPGSTDTPMLRSLWNDPAGTASELMDRHAEVIAGSPDDFRLGIPLQRVAAPEDIARACAWLISPEAQHVTMHDLRIDGGATLDA

SEQ ID NO: 91668 - protein, 255 aa, Corynebacterium glyciniphilum
  misc_feature (1)..(255): tr|X5E6R7|X5E6R7_9CORY 2,3-dihydro-2,3-dihydroxybenzoat e dehydrogenase OS=Corynebacterium glyciniphilum AJ 317 0 OX=1404245 GN=dhbA PE=4 SV=1
MAADLHGSVRHHVVTGAAGGIGSAVVTELLSAGHTVTAADISYPRGISRVERSGPGVLHHVGLDVGDSHQVDSVVRDVWNTVGAVDSLVNGAGVIAAGPGEDATDEDWERQFSVNAFGVFAMCRALGPRMAANGGGSIVTVGSNAGTVPRSSMTAYAASKAAASSVTRSFGLELGRQHVRCNVVCPGTTRTSMIEGLGSEATLVAGQPELYKSGIPLGRIASPEDIASVVVFLSGDGARHMTLQEVVVDGGASQR

SEQ ID NO: 91669 - protein, 218 aa, Corynebacterium imitans
  misc_feature (1)..(218): tr|A0A076NQA9|A0A076NQA9_9CORY Short-chain dehydrogenas e OS=Corynebacterium imitans OX=156978 GN=entA PE=3 SV= 1
MKTALITGASRGIGHAIAEELGKDHHIIAGASKDASEIVAALPSAEPFEVDLTDSAALCRAAARIEQVDVLIHAAGVLHKAPFDQLSEAQWRETMEVNVHAPVTLTRELLPALRRSRGLLLTINSGAGFFGVPENSAYCASKFALRGFTDALRLEEAGAIRITSLHPGRTNTDMIAAPAHGDAPKMDAASVAKAARLAVDAGPDAVVDFLRITPTGME

SEQ ID NO: 91670 - protein, 253 aa, Corynebacterium jeikeium
  misc_feature (1)..(253): tr|Q4JT61|Q4JT61_CORJK 2,3-dihydro-2,3-dihydroxybenzoat e dehydrogenase OS=Corynebacterium jeikeium (strain K41 1) OX=306537 GN=entA PE=4 SV=1
MIVTGAAGGIGRECVRLLRQNDHTVIGWDLPEVDITSSNPTDPRSVESHLSKALAAHGHIDALIHCAGTLIPDSALTGPTAVDTVDTVSGIGTDPDETGAWENNFAVNVTGLARTCSAIAQHMVDRGTGAIVAVTSNAAAQPRARMASYGASKAAATAWLKTLALECAPHGVRCNSVSPGSTDTAMLRTSWHGEDRAAQTLAGVPEDYRLGIPLQRIAQPEDIAAACLFLISPAACHITMHDLRVDGGATLDA

SEQ ID NO: 91671 - protein, 280 aa, Corynebacterium jeikeium
  misc_feature (1)..(280): tr|A0A2X4TAB5|A0A2X4TAB5_CORJE 2,3-dihydro-2,3-dihydrox ybenzoate dehydrogenase OS=Corynebacterium jeikeium OX= 38289 GN=entA PE=4 SV=1
MDFNIPPHLATRQPTESPPEQAQLQQSVIVTGAAGGIGRECVRLLRQNDHTVIGWDLPEVDITSSNPTDPRSVESHLSKALAAHGHIDALIHCAGTLIPDSALTGPTAVDTVDTVSGIGTDPDETGAWENNFAVNVTGLARTCSAIAQHMVDRGTGAIVAVTSNAAAQPRARMASYGASKAAATAWLKTLALECAPHGVRCNSVSPGSTDTAMLRTSWHGEDRAAQTLAGVPEDYRLGIPLQRIAQPEDIAAACLFLISPAACHITMHDLRVDGGATLDA

SEQ ID NO: 91672 - protein, 275 aa, Corynebacterium kroppenstedtii
  misc_feature (1)..(275): tr|C4LL34|C4LL34_CORK4 2,3-dihydro-2,3-dihydroxybenzoat e dehydrogenase OS=Corynebacterium kroppenstedtii (stra in DSM 44385 / JCM 11950 / CIP 105744 / CCUG 35717) OX= 645127 GN=ckrop_1819 PE=4 SV=1
MSETFPRHCVVTGALGGIGAAVVTAAKNAGYRVTAVDQAPHGETAVDQAPHGETAGADGDVAGVGNKTADLPVDYALDVTDAEAARTTSDRIEADRGPIDVLIHTAGILRADAALDGDTDAMRASFEVNMFGAAHVCAPVAQRMCERKRGAIVIVSSNAGTTPRAGMGSYGASKAAITAWARNLGLECAPHGVRVNIVSPGSTDTPMLRGMWPAGEDRSADVIAGTPDQYRLGIPLQRLAQPEDIAGACLYLVSDNARHIVMHDLRVDGGATLDS

SEQ ID NO: 91673 - protein, 264 aa, Corynebacterium lowii
  misc_feature (1)..(264): tr|A0A0Q1ADQ4|A0A0Q1ADQ4_9CORY 2,3-dihydro-2,3-dihydrox ybenzoate dehydrogenase OS=Corynebacterium lowii OX=154 4413 GN=dhbA PE=4 SV=1
MPSDLIVVTGAAGGIGEAIARLSARRPHTTLILTDREESALERVAEEVAAHSGEGTQVHARPCDLAREEEVEALIEQAATLGTPRYLLHAAGVFTDRPVAQTSTEEFTRMMGVNAYGTFFLLRAMARAMMERPTEGDRGIVVVASNAVGVPRVGMGAYGASKAAASALTRSLGLELAEHGVRCNVVCPGSTDTAMQRDFWGADPEAGKRRSLHGDLVTHRLGIPLGRIATPEDVAHTVDFLASERARHVTLQEFFVDGGASLHA

SEQ ID NO: 91674 - protein, 242 aa, Corynebacterium matruchotii
  misc_feature (1)..(242): tr|E0DCH5|E0DCH5_9CORY 2,3-dihydroxybenzoate-2,3-dehydr ogenase OS=Corynebacterium matruchotii ATCC 14266 OX=55 3207 GN=HMPREF0299_6024 PE=4 SV=1
MTNRHITMKNPPQHIIITGATGGIGAACTKLFRSHDHVVSTWDIPEVDVTDIHQVTEQFRQDVDKHGPVAALVHCAGVMEPDSATNPQNTRNMTINYGGVVNVCSVVAKHMQEQRAGAIVVVSSNAATTPRVGMASYGASKAAVTAWVRTLALESAQFGVRCNVVSPGSTDTPMLRGMWQPDTDQSEQVIAGTPQEYRLGIPLQKLAQPADIAEACAFLISPAAGHITMHDLRVDGGATLDS

SEQ ID NO: 91675 - protein, 242 aa, Corynebacterium matruchotii
  misc_feature (1)..(242): tr|A0A448TGL4|A0A448TGL4_9CORY 2,3-dihydro-2,3-dihydrox ybenzoate dehydrogenase OS=Corynebacterium matruchotii OX=43768 GN=entA PE=4 SV=1
MTNRHITMKNPPQHIIITGATGGIGAACTKLFRSHDHVVSTWDIPEVDVTDIHQVTEQFRQDVDKHGPVAALVHCAGVMEPDSATNPQNTRNMTINYGGVVNVCSVVAKHMQEQRAGAIVVVSSNAATTPRIGMASYGASKAAVTAWVRTLALESAQFGVRCNVVSPGSTDTPMLRGMWQPDTDQSEQVIAGTPQEYRLGIPLQKLAQPADIAEACAFLISPAAGHITMHDLRVDGGATLDS

SEQ ID NO: 91676 - protein, 210 aa, Corynebacterium oculi
  misc_feature (1)..(210): tr|A0A0Q0UDT3|A0A0Q0UDT3_9CORY 2,3-dihydro-2,3-dihydrox ybenzoate dehydrogenase OS=Corynebacterium oculi OX=154 4416 GN=entA_2 PE=4 SV=1
MPHAVITGASRGVGRDVAALLLRAGWTLSAQYHSQPDHTLDAQWWQADFRQPLPGQLPLPERIDALIHCAGICPIGTTEALPRAAWEESLAVNLHAPVELTARALPALRAAQGHVIYVNSGAGIHSKPQWSAYSAAKHAARAWCDALRAEEPEIRVTSIYPGRIATDMQRGIVAALGEQWRPESYLETTEVAQAIVAALGGHTTDIQVRP

SEQ ID NO: 91677 - protein, 249 aa, Corynebacterium pelargi
  misc_feature (1)..(249): tr|A0A410WAX9|A0A410WAX9_9CORY 2,3-dihydro-2,3-dihydrox ybenzoate dehydrogenase OS=Corynebacterium pelargi OX=1 471400 GN=entA PE=4 SV=1
MALKHSEDLEHRGHCLVTGAKGGIGQATCDVLLEHGYSVSRWDLPEVDVSDPESIDHHLQALPAPVDYLIHTAGVLRPDSALQPDWDAIRQSVAINLEGVIATCSPIAQQMAARKRGAIVVVTSNAAAVPRSGMAAYGASKAAAKSWVHTLGLELAPYGVRCNTVSPGSTDTPMLRGMWHEPSDTETQLKQRHQEVIAGNPEAYRLGIPLQRVATPEDIAQACLWLISPQSRHITMHDLRVDGGATLDA

SEQ ID NO: 91678 - protein, 274 aa, Corynebacterium provencense
  misc_feature (1)..(274): tr|A0A2Z3YSY3|A0A2Z3YSY3_9CORY 2,3-dihydro-2,3-dihydrox ybenzoate dehydrogenase OS=Corynebacterium provencense OX=1737425 GN=entA PE=4 SV=1
MGAAVARLLLTRPDRPSVLVLSDRDPAALAAVVESLAGTTSPGPEEHDTVVTGVVCDVSRESSVKDLFCEAGRRGPLTRVIHAAGVLGSGATVTDTPVDDFDRVFAVNARGTFLVVREAAGTMLAQDGATDRTAPGSDPADRADRADRAVTVIASNAAGVPRHGMGVYAASKAAASSLTRSLGLEVAGAGIRCNVVNPGSTDTAMQRDYWGDDPGAGRRRVLAGDLSTARLGIPLGRIASPADVAEVVVFLSSPQARHVILQEIYVDGGATLHA

SEQ ID NO: 91679 - protein, 249 aa, Corynebacterium pseudopelargi
  misc_feature (1)..(249): tr|A0A3G6IWJ7|A0A3G6IWJ7_9CORY 2,3-dihydro-2,3-dihydrox ybenzoate dehydrogenase OS=Corynebacterium pseudopelarg i OX=2080757 GN=entA PE=4 SV=1
MALKHSEDLEHRGHCLITGAKGGIGQATCDLLLEHGYSVSRWDLPEVDVSDPESIAHHLQALPAPVDYLIHTAGVLRPDSALQPDWDAIRQSVAINLEGVIATCSPIAQQMAARKRGAIVVVTSNAAAVPRSGMAAYGASKAAAKSWVHTLGLELAPYGVRCNTVSPGSTDTPMLRGMWHEPSDTETQLKQRHQEVIAGNPEAYRLGIPLQRVATPEDIAQACLWLISPQSRHITMHDLRVDGGATLDA

SEQ ID NO: 91680 - protein, 267 aa, Corynebacterium variabile
  misc_feature (1)..(267): tr|G0HGL3|G0HGL3_CORVD 2,3-dihydro-2,3-dihydroxybenzoat e dehydrogenase OS=Corynebacterium variabile (strain DS M 44702 / JCM 12073 / NCIMB 30131) OX=858619 GN=entA PE =4 SV=1
MSDVAVVTCAAGGMGTAVARLLLSRTDRPSTLILADRDPEALASAVGGLPAFADIRTVTCDVSDEDAVSDLFSAAAGAGRVTRVIHGAGVLGPGVSVAETEPTDFDRVFAVNACGTFLVTRAAARVMTAQGRSQEDAPSDRAITVIASNAAGVPRHGMGVYAASKAAASAVTRSLGLEVAADGIRCNVVNPGSTDTAMQRDYWGDDAAAGKARVLGGDLATARLGIPLGRIATADDVAEVVVFLSSPEARHVVLQEIYVDGGATLHA

SEQ ID NO: 91681 - protein, 254 aa, Corynebacterium variabile
  misc_feature (1)..(254): tr|A0A0X2NMF7|A0A0X2NMF7_9CORY Dehydrogenases with diff erent specificities (Related to short-chain alcohol deh ydrogenases) OS=Corynebacterium variabile OX=1727 GN=CV AR292_01253 PE=4 SV=1
MGTAVARLLLSRTDRPSTLILADRDPEALASAVGGLPAFADIRTVTCDVSDEDAVSDLFSAAAGAGRVTRVIHGAGVLGPGVSVAETEPTDFDRVFAVNARGTFLVTRAAARVMTAQGRSQEDAPSDRAITVIASNAAGVPRHGMGVYAASKAAASAVTRSLGLEVAADGIRCNVVNPGSTDTAMQRDYWGDDAAAGKARVLGGDLATARLGIPLGRIATADDVAEVVVFLSSPEARHVVLQEIYVDGGATLHA

SEQ ID NO: 91682 - protein, 250 aa, Cronobacter condimenti
  misc_feature (1)..(250): tr|K8AA41|K8AA41_9ENTR 2,3-dihydro-2,3-dihydroxybenzoat e dehydrogenase [enterobactin] siderophore OS=Cronobact er condimenti 1330 OX=1073999 GN=BN137_1967 PE=4 SV=1
MRLDFSDQNVWVTGAGKGIGYTTARAFVDAGANVTGFDLAFPGEDYPFACETLDVADAAAVASACQRRLGDHARLDVLVNAAGILRMGATDALSVADWQQTFAVNVGGAFNFFQQTMAQFRAQKGGAIVTVASDAAHTPRIGMSAYGASKAALKSLALTVGLELAAYGVRCNLVSPGSTDTDMQRTLWTSNDAEQQRIRGFAEQFKLGIPLGKIAQPQDVANTILFLASPLAGHITLQDMVIDGGSTLGA

SEQ ID NO: 91683 - protein, 250 aa, Cronobacter dublinensis
  misc_feature (1)..(250): tr|K8AJC5|K8AJC5_9ENTR 2,3-dihydro-2,3-dihydroxybenzoat e dehydrogenase [enterobactin] siderophore OS=Cronobact er dublinensis 1210 OX=1208656 GN=BN134_1403 PE=4 SV=1
MTLDFSGQTVWVTGAGKGIGYATARAFAQAGATVTGFDLAFPHADYPFACETLDVADAAGVAAVCQRLLRDDARLDVLVNAAGILRMGATDALALDDWQQTLAVNVGGAFNFFQQTMATFRAQKRGAIVTVASDAAHTPRIGMSAYGASKAALKSLALTVGLELASCGVRCNLVSPGSTDTDMQRTLWHSDDAEQQRIRGFAEQFKLGIPLGKIAQPQEVANTILFLASDLASHITLQDLVIDGGSTLGA

SEQ ID NO: 91684 - protein, 217 aa, Cronobacter dublinensis
  misc_feature (1)..(217): tr|K8BB30|K8BB30_9ENTR 2,3-dihydro-2,3-dihydroxybenzoat e dehydrogenase [enterobactin] siderophore OS=Cronobact er dublinensis 582 OX=1208661 GN=BN133_1939 PE=4 SV=1
MTGFDLAFPHADYPFACETLDVADAAGVAAVCQRLLRDDARLDVLVNAAGILRMGATDALALDDWQQTFAVNVGGAFNFFQQTMATFRAQKRGAIVTVASDAAHTPRIGMSAYGASKAALRSLALTVGLELASCGVRSNLVSPGSTDTDMQRTLWHSDDAEQQRIRGFAEQFKLGIPLGKIAQPQEVANTILFLASDLASHITLQDLVIDGGSTLGA

SEQ ID NO: 91685 - protein, 250 aa, Cronobacter dublinensis; identical to SEQ ID NO: 91683
  misc_feature (1)..(250): tr|A0A0K2P566|A0A0K2P566_9ENTR 2,3-dihydroxybenzoate-2, 3-dehydrogenase OS=Cronobacter dublinensis subsp. dubli nensis LMG 23823 OX=1159554 GN=AFK67_14875 PE=4 SV=1

SEQ ID NO: 91686 - protein, 108 aa, Cronobacter sakazakii
  misc_feature (1)..(108): tr|K8CT07|K8CT07_CROSK 2,3-dihydro-2,3-dihydroxybenzoat e dehydrogenase [enterobactin] siderophore OS=Cronobact er sakazakii 696 OX=1208664 GN=BN128_1978 PE=4 SV=1
MSAYGASKAALKSLALTVGLELASFGVRANLVSPGSTDTDMQRTLWKSDDAEQQRIRGFAEQFKLGIPLGKIAKPQEVANTILFLASELASHITLQDIVIDGGSTLGA

SEQ ID NO: 91687 - protein, 72 aa, Cronobacter sakazakii
  misc_feature (1)..(72): tr|K8CE17|K8CE17_CROSK 2,3-dihydro-2,3-dihydroxybenzoat e dehydrogenase [enterobactin] siderophore OS=Cronobact er sakazakii 701 OX=1208663 GN=BN129_2189 PE=4 SV=1
MTLDFQGKNVWVTGAGKGIGYTTALAFAAAGANVTGFDLVFPLADYPFACETLDVAAFASGCSAMTRALMCW

SEQ ID NO: 91688 - protein, 250 aa, Cronobacter sakazakii
  misc_feature (1)..(250): tr|A0A5D1BNX9|A0A5D1BNX9_CROSK 2,3-dihydro-2,3-dihydrox ybenzoate dehydrogenase OS=Cronobacter sakazakii OX=281 41 GN=dhbA PE=4 SV=1
MTLDFQGKNVWVTGAGKGIGYTTALAFAGAGANVTGFDLAFPLADYPFACETLDVADAAAVAGVCERLLGNNPRLDVLVNAAGILRMGATDELAPDDWQQTFAVNVGGAFNFFQQTMAQFRTQKGGAIVTVASDAAHTPRIGMSAYGASKAALKSLALTVGLELASFGVRANLVSPGSTDTDMQRTLWKSDDAEQQRIRGFAEQFKLGIPLGKIAQPQEVANTILFLASDLASHITLQDIVIDGGSTLGA

SEQ ID NO: 91689 - protein, 282 aa, Cronobacter turicensis
  misc_feature (1)..(282): tr|C9XXI2|C9XXI2_CROTZ 2,3-dihydro-2,3-dihydroxybenzoat e dehydrogenase OS=Cronobacter turicensis (strain DSM 1 8703 / LMG 23827 / z3032) OX=693216 GN=entA PE=4 SV=1
MAQSTWRYRFRDAREKPDHRCLVGAAEPGAAGMTLDFRGKNVWVTGAGKGIGYTTALAFVAAGAKVTGFDLAFPLADYPFACETLDVADAAAVADVCQRLLTNSARLDVLVNAAGILRMGATDELSPDDWQQTFAVNVGGAFNFFQQTMAQFRAQKGGAIVTVASDAAHTPRLGMSAYGASKAALKSLALTVGLELASSGVRANLVSPGSTDTDMQRTLWKSDDAEQQRIRGFAGQFKLGIPLGKIAQPQDVANTILFLASDLASHITLQDIVIDGGSTLGA

SEQ ID NO: 91690 - protein, 250 aa, Cronobacter universalis
  misc_feature (1)..(250): tr|A0A376ESL1|A0A376ESL1_9ENTR 2,3-dihydro-2,3-dihydrox ybenzoate dehydrogenase OS=Cronobacter universalis NCTC 9529 OX=1074000 GN=entA PE=4 SV=1
MTLDFRGKNVWVTGAGKGIGYTTALAFAAAGAKVTGFDLAFPLADYPFACETLDVADAAAVAAVCQRLPGNDARLDVLVNAAGILRMGATDELTADDWQQTFAVNVGGAFNFFQQTMAQFRAQKGGAIVTVASDAAHTPRIGMSAYGASKAALKSLALTVGLELAPYGVRANLVSPGSTDTDMQRTLWKSDDAEQQRIRGFAEQFKLGIPLGKIAQPQDVANTILFLASDLASHITLQDIVIDGGSTLGA

SEQ ID NO: 91691 - protein, 233 aa, Cryobacterium sp.
  misc_feature (1)..(233): tr|A0A4V2DZ14|A0A4V2DZ14_9MICO 2,3-dihydro-2,3-dihydrox ybenzoate dehydrogenase OS=Cryobacterium sp. SO1 OX=189 7061 GN=entA PE=4 SV=1
MLELRGSTILVVGATGGLGREIARQLSDAGATLVLSARDPAVLAALGLPGAIVAADLTDPAAVRRLVDVAATVTGRLDGIVVAAGVVAFGPAAGLTADTIARLFAVNTTAPMLLLQAAHAPLAASAAAGRSPFLLTLSGVVSESPTANLAAYSASKAALAAFGSAAGRELRRVGIRVIDARPGHTETALSRHPISGTAPRLPVGLDPVAVCARIVRGIVDGERDLPSTAFAPV

SEQ ID NO: 91692 - protein, 251 aa, Deinococcus maricopensis
  misc_feature (1)..(251): tr|E8U3H8|E8U3H8_DEIML 2,3-dihydro-2,3-dihydroxybenzoat e dehydrogenase OS=Deinococcus maricopensis (strain DSM 21211 / LMG 22137 / NRRL B-23946 / LB-34) OX=709986 GN =Deima_0185 PE=4 SV=1
MTGPHAAGPVALVTGAAGGIGAAIVAHLGQQAYRVVATDLHAPAAPHAARAAALDVTDARRVEELVDEIERTLGPIDALVNAAGILRPGALTTYSDEDWARTFAVNTTGPFLTGRAVGRRMAPRGRGAIVTVTSNAAHVARAGMGAYAASKAATAHLTRCLGLELAPHGVRCNTVSPGSTDTRMGRQLWTEAHGADAVIRGSLDAYRPGIPLGRIAQPQDVAGVVAFLLSDAARHVTLQDVVVDGGATLGA

SEQ ID NO: 91693 - protein, 252 aa, Dickeya aquatica
  misc_feature (1)..(252): tr|A0A375A8B2|A0A375A8B2_9GAMM 2,3-dihydro-2,3-dihydrox ybenzoate dehydrogenase OS=Dickeya aquatica OX=1401087 GN=cbsA PE=4 SV=1
MSIRADFSGKQVWITGAGRGIGYDIACRFLEAGADVTGFDLAFPGDTPAFRAIALDIGDAAAVADACATLLAHTPRLDVLVNGAGILRMGATEALSQADWQDCLRVNAGEPFTCFRRLIPQFQQQRAGAIITIGSNAAHVPRVGMAAYCASKAALRSLCLTAGLELAAYGVRCNLVSPGSTDTPMQRSLWHSADAEQHTINGFPNQFKLGIPLGKIAQPREITDTVLFLASESASHITLQDIVIDGGATLGA

SEQ ID NO: 91694 - protein, 252 aa, Dickeya dadantii
  misc_feature (1)..(252): tr|E0SLE6|E0SLE6_DICD3 2,3-dihydro-2,3-dihydroxybenzoat e dehydrogenase, chrysobactin biosynthesis OS=Dickeya d adantii (strain 3937) OX=198628 GN=cbsA PE=4 SV=1
MSVTLDFSGKQVWVTGAGRGIGYDIACRFSEAGATVTGFDRAFSDGEPPFRAVELDIGDHAAVADVCATLLAKTPRLDVLVNGAGILRMGQTETLSQQDWLDCLTVNAGGAFHLFQALIPQFQQQRSGAIVSIGSNAAHVPRVGMAAYCASKAALRSLCLTVGLELAPYGVRCNMVSPGSTDTPMQRSLWHSPASEQHTIAGFPEQFKLGIPLGKIARPREITDAVLFLASDLASHVTLQDMVIDGGATLGA

SEQ ID NO: 91695 - protein, 251 aa, Dickeya dianthicola
  misc_feature (1)..(251): tr|A0A3A4CF25|A0A3A4CF25_9GAMM 2,3-dihydro-2,3-dihydrox ybenzoate dehydrogenase OS=Dickeya dianthicola OX=20403 9 GN=entA PE=4 SV=1
MSVTLDFSGKQVWVTGAGRGIGYDIACRFTEAGATVTGFDRAFSVEPPFRAIELDIGAHAAVADVCATLLAQTPRLDVLVNGAGILRIGQTEALSQQDWQDCLTVNAGGAFHLFQALIPQFQRQRSGAIVSIGSNAAHVPRAGMAAYCASKAALRSLCLTVGLELAPYGVRCNMVSPGSTDTPMQRSLWHSPASEQHTIAGFPEQFKLGIPLGKIARPRDITDAVLFLASDLASHVTLQDMVIDGGATLGA

SEQ ID NO: 91696 - protein, 252 aa, Dickeya solani
  misc_feature (1)..(252): tr|A0A2K8VW20|A0A2K8VW20_9GAMM 2,3-dihydro-2,3-dihydrox ybenzoate dehydrogenase OS=Dickeya solani RNS 08.23.3.1 .A OX=1240086 GN=D083_1107 PE=4 SV=1
MSVTLDFSGKQVWVTGAGRGIGYDIACRFTEAGATVTGFDRAFSDDEPPFRAVELDIGDHAAVADVCATLLAQTPRLDVLVNGAGILRMGQTETLSQQDWLDCLTVNAGGAFHLFQALIPQFQRQRSGAIVSIGSNAAHVPRVGMAAYCASKAALRSLCLTVGLELAPYGVRCNMVSPGSTDTPMQRSLWHSPAAEQHTIAGFPAQFKLGIPLGKIARPREITDAVLFLASDLASHVTLQDMVIDGGATLGA

SEQ ID NO: 91697 - protein, 252 aa, Dickeya sp.
  misc_feature (1)..(252): tr|A0A454USK9|A0A454USK9_9GAMM 2,3-dihydro-2,3-dihydrox ybenzoate dehydrogenase OS=Dickeya sp. FVG10-MFV-A16 OX =2487135 GN=dhbA PE=4 SV=1
MSVTLDFSGKQVWVTGAGRGIGYDIACRFADAGATVTGFDRAFSTDDLPFRAVELDISNAAAVADVCTTLLAQTPHLDVLVNGAGILRMGQTEALSQQDWQDCLNVNAGGAFHLFQALIPQFQQQRSGAIVSIGSNAAHVPRVGMAAYCASKAALRSLCLTVGLELAPYGVRCNLVSPGSTDTPMQRSLWHSPASEQHTIAGFPEQFKLGIPLGKIARPREITDAVLFLASDLASHVTLQDMVIDGGATLGA

SEQ ID NO: 91698 - protein, 252 aa, Dickeya sp.; identical to SEQ ID NO: 91697
  misc_feature (1)..(252): tr|A0A3N0GAC2|A0A3N0GAC2_9GAMM 2,3-dihydro-2,3-dihydrox ybenzoate dehydrogenase OS=Dickeya sp. FVG1-MFV-O17 OX= 2487136 GN=dhbA PE=4 SV=1

SEQ ID NO: 91699 - protein, 252 aa, Dickeya sp.
  misc_feature (1)..(252): tr|A0A5B8HJD5|A0A5B8HJD5_9GAMM 2,3-dihydro-2,3-dihydrox ybenzoate dehydrogenase OS=Dickeya sp. NCPPB 569 OX=568 768 GN=dhbA PE=4 SV=1
MSVTLDFSGKQVWVTGAGRGIGYDIACRFTEAGATVTGFDRVFSADEQPFRAIELDISNAAVVAEVCATQLAHTPHLDVLINGAGILRMGQTEALSQQDWQDCLNVNAGGAFHFFQALIPQFQQQRRGAIVSIGSNAAHVPRVGMAAYCASKAALRSLCMTVGLELAPYGVRCNLVSPGSTDTPMQRSLWHSPASEQQTIAGFPEQFKLGIPLGKIAHPRDITDAVLFLASDLAGHVTLQDMVIDGGATLGA

SEQ ID NO: 91700 - protein, 252 aa, Dickeya zeae
  misc_feature (1)..(252): tr|A0A0A8FFD7|A0A0A8FFD7_9GAMM 2,3-dihydroxybenzoate-2, 3-dehydrogenase OS=Dickeya zeae EC1 OX=1427366 GN=W909_ 13805 PE=4 SV=1
MSVALDFSGKQVWVTGAGRGIGYDIACRFTEAGATVTGFDRAFSSDSLPFHAIELDVSDAAAVAATCARQLAQTPHLDVLINGAGILRMGHTETLSQQDWQDCLNVNAGGAFHLFQAVIPQFQRQRGGAIVSIGSNAAHVPRVGMAAYCASKAALRSLCLTVGLELAPYGVRCNLVSPGSTDTPMQRSLWHAPDAEQHTIAGFPQQFKLGIPLGKIARPRDITDTVLFLASDLAGHVTLQDVVIDGGATLGA

SEQ ID NO: 91701 - protein, 262 aa, Dyella sp.
  misc_feature (1)..(262): tr|A0A410UFJ9|A0A410UFJ9_9GAMM 2,3-dihydro-2,3-dihydrox ybenzoate dehydrogenase OS=Dyella sp. M7H15-1 OX=250129 5 GN=EO087_02575 PE=3 SV=1
MVIPATSRFSSKTIVVTGAAQGIGAAVVRMLVAEGAFVHALDVNQEPLQQLCAAMNEHTECCEAIPIDISRREAVETAVAQIERRRPIDGLVNGAGVLIPAPFEAITPEAWSGMFDVNVHGTFFMSHSVARRMIERRKGAIVTIASNAATTPRMNLAAYCASKAAAAMLTKCMGLELGRHGIRCNVVSPGSTNTAMLTAMAGEGAERDRMLIDGDQHAYRLGIPLRKIAEPEDIARAVIFLLSDEANHITLHDLVVDGGATL

SEQ ID NO: 91702 - protein, 260 aa, Ectocarpus siliculosus
  misc_feature (1)..(260): tr|D8LFB6|D8LFB6_ECTSI 2,3-dihydro-2,3-dihydroxybenzoat e dehydrogenase OS=Ectocarpus siliculosus OX=2880 GN=mx cC PE=4 SV=1
MSTANNVLSLAGKLCLVTGASSGLGMHFARTLANHGAKVAVAARRVDRLDALVEELTLGGAAGVCAVRMDVRDETSIKAGVKQVEQILGPIDVLVNNAGVAVQSPSLKQTRREWEKVLDTNLVGPFLVAQAVARSMVRDKRSGSIINISSVSSMVPSSGLAAYCSSKAGLTHLTKVLALEWARHGIRVNAVCPGYFKTEMNSDFFDTPNGDRIVKAIPMRRLGDPSELDGLLLMLASERASSYMTGSVLTLDGGIMLSHL

SEQ ID NO: 91703 - protein, 276 aa, Empedobacter haloabium
  misc_feature (1)..(276): tr|A0A5C7BWR4|A0A5C7BWR4_9FLAO 2,3-dihydro-2,3-dihydrox ybenzoate dehydrogenase OS=Empedobacter haloabium OX=59 2317 GN=dhbA PE=4 SV=1
MLADQKNLGTASAERPQAPPALQFEGRQVWVTGAGRGIGHQIALAFRQLGARVVGIDRAFDREEAGPAGKRYPFKTVCMDVTDRARIAVVCQQLLTEMPRIDVLVNAAGVLRLGTLDSTTVEDWQASFDINVSGVFYLLRELMPQFRKQGAGSIVNVASNAARVPRMNMLAYCASKSALVGMSHCAALELAQFGVRCNVVSPGSTDTPMLRSMLPDEQGMRRTIEGLPEQFKLGIPLRKIATAREVANTVLFLASDLASHITMQEVVVDGGATLAA

SEQ ID NO: 91704 - protein, 296 aa, Enhygromyxa salina
  misc_feature (1)..(296): tr|A0A2S9XDH8|A0A2S9XDH8_9DELT 2,3-dihydro-2,3-dihydrox ybenzoate dehydrogenase OS=Enhygromyxa salina OX=215803 GN=entA PE=4 SV=1
MSGKTVLITGGNSGIGSFTAVGLARMGARVVFTSRNPRKGDVARAELREAAETKSIDYMALDLASFTSIAAFADQYLAKYDRLDVLILNAGVILDARTETKEGFETTFGVNHLGHFYLTQLLRERLEASAPARVVVVASDAYRGAREGLDFDDLMATRDYKPLRAYAHSKLANILFTNELARQLEGKGVTANSLHPGVVRTGLGRDGDVRSLLGRVALSVMRPFLISPERGARTSIYLASSPEVEGESGGYYVSCRPAKRIAPATDEGAARRLWQVSEELVAEGKATAKAKARRPS

SEQ ID NO: 91705 - protein, 252 aa, Enterobacter agglomerans
  misc_feature (1)..(252): tr|A0A4V3R8H7|A0A4V3R8H7_ENTAG 2,3-dihydro-2,3-dihydrox ybenzoate dehydrogenase OS=Enterobacter agglomerans OX= 549 GN=dhbA PE=4 SV=1
MSHTFDFSGKIVWVTGAGQGIGYHTALAFHQAGAQVEAFDQRFKGHDYPFPCHTMDVADPAQVKTICQRVLAAQPRIDVLVNAAGILRIGATDELSFADWQACLNVNAGGAFNLFQQTLPRFREQRAGAIVTVASNSAHAPRIGMSAYGASKAALRSLCQTVGLEMAPYGVRCNIVSPGSTDTDMQRSLWHTPTGEQEMIAGFPDQFKLGIPLGKIAQPHEIAATVLFLASDLASHVTLQDIVVDGGATLGA

SEQ ID NO: 91706 - protein, 280 aa, Enterobacter asburiae
  misc_feature (1)..(280): tr|A0A376F7I1|A0A376F7I1_ENTAS Protein YxbG OS=Enteroba cter asburiae OX=61645 GN=yxbG PE=4 SV=1
MGLKNKTAVIFGGSGAIGSSAAHVLAREGADVYLAARDHARLEQVASRIRAAGGSASTFIFDVLDDSSQLPDLARIDVVVNATGFMHDQGKRLEALTLGEFRQGFDPFLAAYFNIAKAASPRMGGEHGGTIITVVAPAANMTMAGHLGHIVGCAGTEALTRALAAELGTHNIRVLCVRSHAIADAVQAGSYVGTIFASRAQAMGITVEQFLGGAAQSTLTHRLPTLAQVADTIKFLALRCGGRHHGNYRQYDRGRNLAPLSPAILPTIARISSRLTAPGR

SEQ ID NO: 91707 - protein, 251 aa, Enterobacter bugandensis
  misc_feature (1)..(251): tr|A0A431SPM6|A0A431SPM6_9ENTR 2,3-dihydro-2,3-dihydrox ybenzoate dehydrogenase OS=Enterobacter bugandensis OX= 881260 GN=dhbA PE=4 SV=1
MAGFDFTGKTVWVTGAGKGIGYATALAFVEAGARVTGFDLAFPQDDYPFSTETLDVADAAQVGDVCGRLLGTLERLDVLVNAAGILRMGATDELSQEDWQQTFAVNVGGAFNLFQQTMGQFRRQQGGAIVTVASDAAHTPRIGMSAYGASKAALKSLALTVGLELAGSGVRCNLVSPGSTDTDMQRTLWKSDDAEQQRIRGFGEQFKLGIPLGKIARPREIAATVLFLASDAASHITLQDIVVDGGSTLGA

SEQ ID NO: 91708 - protein, 251 aa, Enterobacter cancerogenus
  misc_feature (1)..(251): tr|D2ZGJ7|D2ZGJ7_9ENTR 2,3-dihydroxybenzoate-2,3-dehydr ogenase OS=Enterobacter cancerogenus ATCC 35316 OX=5006 39 GN=ENTCAN_07614 PE=4 SV=1
MAGFDFTGKTVWVTGAGKGIGYATAQAFAEAGAQVTGFDLAFTRTHYPFATETLDVADAAQVKAVCGRLLQSTARLDVLVNAAGILRMGATDQLSQEDWQQTFAVNVGGAFNLFQQTMDTFRRQQGGAIVTVASDAAHTPRIGMSAYGASKAALKSLALTVGLELAGSGVRCNLVSPGSTDTDMQRTLWTSDDAERQRIRGFGEQFKLGIPLGKIARPQEIASTVLFLASDAASHITLQDIVVDGGSTLGA

SEQ ID NO: 91709 - protein, 251 aa, Enterobacter cancerogenus
  misc_feature (1)..(251): tr|A0A484X0L0|A0A484X0L0_9ENTR 2,3-dihydro-2,3-dihydrox ybenzoate dehydrogenase OS=Enterobacter cancerogenus OX =69218 GN=entA PE=4 SV=1
MAGFDFTGKTVWVTGAGKGIGYATAQAFAEAGAQVTGFDLAFPLTHYPFATETLDVADAAQVKAVCGRLLQSTARLDVLVNAAGILRMGATDQLSQEDWQQTFAVNVGGAFNLFQQTMDTFRRQRGGAIVTVASDAAHTPRIGMSAYGASKAALKSLALTVGLELAGSGVRCNLVSPGSTDTDMQRTLWTSDDAERQRIRGFGEQFKLGIPLGKIARPQEIASTVLFLASDAASHITLQDIVVDGGSTLGA

SEQ ID NO: 91710 - protein, 251 aa, Enterobacter chengduensis
  misc_feature (1)..(251): tr|A0A0F4BPJ3|A0A0F4BPJ3_9ENTR 2,3-dihydroxybenzoate-2, 3-dehydrogenase OS=Enterobacter chengduensis OX=2494701 GN=SG71_10605 PE=4 SV=1
MMGLDFTGKTVWVTGAGKGIGYATALAFAEAGAQVTGFDLAFPLGDYPFTTETLDVADAGQVQEVCGRVLASRERLDVLVNAAGILRMGATDQLSQADWQQTFAVNVGGAFNLFQQTMGQFRRQQGGAIVTVASDATHTPRIGMSAYGASKAALKSLALTVGLELAGSGVRCNLVSPGSTDTDMQRTLWKSDDAEQQRIRGFGEQFKLGIPLGKIARPQEIASTVLFLASDAASHITLQDIVVDGGSTLGA

SEQ ID NO: 91711 - protein, 251 aa, Enterobacter chuandaensis
  misc_feature (1)..(251): tr|A0A3A3ZFD6|A0A3A3ZFD6_9ENTR 2,3-dihydro-2,3-dihydrox ybenzoate dehydrogenase OS=Enterobacter chuandaensis OX =2497875 GN=dhbA PE=4 SV=1
MMGFDFTGKTVWVTGAGKGIGYASALAFVEAGAQVTGFDLAFPQNDYPFTTETLDVADAAQVGEVCGRALASLERLDVLVNAAGILRMGATDELSLEDWQQTFAVNVGGAFNLFQQTMGQFRRQQGGAIVTVASDAAHTPRIGMSAYGASKAALKSLALTVGLELAGSGVRCNLVSPGSTDTDMQRTLWKSDDAEQQRIRGFGEQFKLGIPLGKIARPQEIASTVLFLASDSASHITLQDIVVDGGSTLGA

SEQ ID NO: 91712 - protein, 251 aa, Enterobacter cloacae
  misc_feature (1)..(251): tr|A0A4P6XYX6|A0A4P6XYX6_9ENTR 2,3-dihydro-2,3-dihydrox ybenzoate dehydrogenase OS=Enterobacter cloacae complex sp. OX=2027919 GN=dhbA PE=4 SV=1
MAGFDFTGKTVWVTGAGKGIGYATALAFAEAGAQVTGFDLAFPQDDYPFATETLDVADAAQVHEVCGRALASLERLDVLVNAAGILRMGATDQLSQEDWQHTFAVNVGGAFNLFQQTMGQFRRQQGGAMVTVASDAAHAPRIGMSAYGASKAALKSLALTVGLELAGSGVRCNLVSPGSTDTDMQRTLWKSDDAEQQRIRGFGEQFKLGIPLGKIARPQEIAATVLFLASDAASHITLQDIVVDGGSTLGA

SEQ ID NO: 91713 - protein, 342 aa, Enterobacter cloacae
  misc_feature (1)..(342): tr|A0A5E0X9N9|A0A5E0X9N9_ENTCL 2,3-dihydro-2,3-dihydrox ybenzoate dehydrogenase [enterobactin] siderophore OS=E nterobacter cloacae OX=550 GN=fabG_2 PE=4 SV=1
MQIDLTGKKALVTGASRGLGRAIALSLARAGADVVITYEKSVDKAQQVVDEINALGRHGEAIQADSASAQAIQDAVTQAARSLGGLDILVNNAGIARGGPLESMTLADIDALINVNIRGVVIAIQEALVHMSDGGRIINIGSCLANRVAQPGIAVYSMTKSALNSLTRGLARDLGPRGITVNLVHPGPTNSDMNPEDGEQADSQRQLIALGHYGQPEDVAAAVTFLASPAAGQISGTGLDVDGGLNALSQFSCKPLSPSRGLFEPPRRFAFCLLPALFFRSTVPHKKFGIYLIVLLFPYILCGRTVEVRMKIVWSKTAEKQFSKIDTRYQNRIKFRLEKMDD

SEQ ID NO: 91714 - protein, 251 aa, Enterobacter cloacae
  misc_feature (1)..(251): tr|V5AES2|V5AES2_ENTCL 2,3-dihydro-2,3-dihydroxybenzoat e dehydrogenase OS=Enterobacter cloacae S611 OX=1399146 GN=EDP2_4005 PE=4 SV=1
MASLDFSGRSVWVSGAGKGIGYATALAFVGAGAKVTGFDLAFNGEHYPFACETLDIADAAQVAAVSERLLANNAPLDVLVNAAGILHMGATDALSDKEWQQTFTVNVGGAFNLFRQTMAHFRRQQRGAIVTVCSDAAHTPRIGMSAYGASKAALKSLALTVGLELAASHVRCNIVSPGSTDTDMQRTLWVSDDAEQQRIRGFGEQFKLGIPLGKIARPQEVANTILFLASDLASHITLQDIVVDGGSTLGA

SEQ ID NO: 91715 - protein, 250 aa, Enterobacter cloacae
  misc_feature (1)..(250): tr|A0A0F0TUU8|A0A0F0TUU8_ENTCL 2,3-dihydroxybenzoate-2, 3-dehydrogenase OS=Enterobacter cloacae subsp. cloacae OX=336306 GN=SS44_06950 PE=4 SV=1
MVFDFTGKTVWVTGAGKGIGYATALAFADAGAKVTGFDLAFPQENYPFATQTLDVSDAAQVSDVCGRLLAVEERLDILVNAAGILRMGATDQLSQEDWQQTFAVNVGGAFNLFQQTMGQFRRQQSGAIVTVASDAAHTPRIGMSAYGASKAALKSLALTVGLELAGSGVRCNLVSPGSTDTDMQRTLWTCDDAEQQRIRGFGEQFKLGIPLGKIARPQEIASTILFLASDAASHITLQDIVVDGGSTLGA

SEQ ID NO: 91716 - protein, 251 aa, Enterobacter hormaechei
  misc_feature (1)..(251): tr|F5RUD3|F5RUD3_9ENTR 2,3-dihydro-2,3-dihydroxybenzoat e dehydrogenase OS=Enterobacter hormaechei ATCC 49162 O X=888063 GN=entA PE=4 SV=1
MAGFDFTGKTVWVTGAGKGIGYATALAFVEAGAQVTGFDLAFPQGDYPFATETLDVADAAQVSDVCGRLLSTLERLDVLVNAAGILRMGATDQLSQEDWQQTFAVNVGGAFNLFQQTMGQFRRQQGGAIVTVASDAAHTPRIGMSAYGASKAALKSLALTVGLELAGSGVRCNLVSPGSTDTDMQRTLWTSNDAEQQRIRGFGEQFKLGIPLGKIARPQEIASTVLFLASDAASHITLQDIVIDGGSTLGA

SEQ ID NO: 91717 - protein, 251 aa, Enterobacter hormaechei
  misc_feature (1)..(251): tr|A0A507ZL72|A0A507ZL72_9ENTR 2,3-dihydro-2,3-dihydrox ybenzoate dehydrogenase OS=Enterobacter hormaechei OX=1 58836 GN=dhbA PE=4 SV=1
MMAFDFTGKTVWVTGAGKGIGYATALAFVETGAQVTGFDLAFPHGEYPFATETLDVADAAQASDVCGHLLSSLERLDVLVNAAGILRMGATDQLSPEDWQQTFAVNVGGAFNLFQQTMGQFRRQQGGAIVTVASDAAHTPRIGMSAYGASKAALKSLALTVGLELAGSGVRCNLVSPGSTDTDMQRTLWTSDDAEQRRIRGFGEQFKLGIPLGKIARPQEIAATVLFLASDAASHITLQDIVVDGGSTLGA

SEQ ID NO: 91718 - protein, 250 aa, Enterobacter hormaechei
  misc_feature (1)..(250): tr|A0A4V7S3I9|A0A4V7S3I9_9ENTR 2,3-dihydroxybenzoate-2, 3-dehydrogenase OS=Enterobacter hormaechei subsp. xiang fangensis OX=1296536 GN=SS54_15050 PE=4 SV=1
MAFDFTGKTVWVTGAGKGIGYATALAFVETGAQVTGFDLAFPHGEYPFATETLDVADAAQASDVCGRLLSSLERLDVLVNAAGILRMGATDQLSQEDWQQTFAVNVGGAFNLFQQTMGQFRRQQGGAIVTVASDAAHTPRIGMSAYGASKAALKSLALTVGLELAGSGVRCNLVSPGSTDTDMQRTLWTSDDAEQRRIRGFGEQFKLGIPLGKIARPQEIAATVLFLASDAASHITLQDIVVDGGSTLGA

SEQ ID NO: 91719 - protein, 251 aa, Enterobacter huaxiensis
  misc_feature (1)..(251): tr|A0A3R9PWP2|A0A3R9PWP2_9ENTR 2,3-dihydro-2,3-dihydrox ybenzoate dehydrogenase OS=Enterobacter huaxiensis OX=2 494702 GN=dhbA PE=4 SV=1
MMGFDFTGKTVWVTGAGKGIGYATALAFVEAGAQVTGFDLAFPLGDYPFATETLDVANAAQVQEVCGRALASLERLDVLVNAAGILRMGATDQLSQEDWQQTFAVNVGGAFNLFQQTMGQFRRQQGGAIVTVASDAAHTPRIGMSAYGASKAALKSLALTVGLELAGSGVRCNLVSPGSTDTDMQRTLWTSSDAEQLRIRGFGEQFKLGIPLGKIARPQEIASTVLFLASDAASHITLQDIVVDGGSTLGA

SEQ ID NO: 91720 - protein, 250 aa, Enterobacter kobei
  misc_feature (1)..(250): tr|A0A5E0UXN9|A0A5E0UXN9_9ENTR 2,3-dihydro-2,3-dihydrox ybenzoate dehydrogenase OS=Enterobacter kobei OX=208224 GN=entA_1 PE=4 SV=1
MGFDFTGKTVWVTGAGKGIGYATALAFAEAGAQVTGFDLAFPHGEYPFATETLDVADAAQASDVCGRLLSSLERLDVLVNAAGILRMGATDQLSQEDWQQTFAVNVGGAFNLFQQTMGQFRRQQGGAIVTVASDAAHTPRIGMSAYGASKAALKSLALTVGLELAGSGVRCNLVSPGSTDTDMQRTLWTSDDAEQRRIRGFGEQFKLGIPLGKIARPQEIAATVLFLASDAASHITLQDIVVDGGSTLGA

SEQ ID NO: 91721 - protein, 251 aa, Enterobacter ludwigii
  misc_feature (1)..(251): tr|W0BRN9|W0BRN9_9ENTR 2,3-dihydroxybenzoate-2,3-dehydr ogenase OS=Enterobacter ludwigii OX=299767 GN=M942_1917 5 PE=4 SV=1
MAGFDFTGKTVWVTGAGKGIGYATARAFVEAGAQVTGFDLAFPQEAYPFATETLDIADAAQVREVCGRALARVERLDVLVNAAGILRMGATDQIAQEDWQQTFAVNVGGAFNLFQQTMGQFRRQQSGAIVTVASDAAHTPRIGMSAYGASKAALKSLALNVGLELAGSGVRCNLVSPGSTDTDMQRTLWKSDDAEQQRIRGFGEQFKLGIPLGKIARPQEIASTVLFLASDAASHITLQDIVVDGGSTLGA

SEQ ID NO: 91722 - protein, 250 aa, Enterobacter roggenkampii
  misc_feature (1)..(250): tr|A0A0W2HMJ6|A0A0W2HMJ6_9ENTR 2,3-dihydroxybenzoate-2, 3-dehydrogenase OS=Enterobacter roggenkampii OX=1812935 GN=SS30_11275 PE=4 SV=1
MVFDFTGKTVWVTGAGKGIGYATALAFAEAGAQVTGFDLAFPQDDYPFATETLDVADAGQVHEVCGRVLASLDRLDVLVNAAGILRMGATDQLSQEDWQQTFAVNVGGAFNLFQQTMGQFRRQQGGAIVTVASDAAHAPRIGMSAYGASKAALKSLALTVGLELAGSGVRCNLVSPGSTDTDMQRTLWKSDDAEQQRIRGFGEQFKLGIPLGKIARPQEIAATVLFLASDAASHITLQDIVVDGGSTLGA

SEQ ID NO: 91723 - protein, 250 aa, Enterobacter sichuanensis
  misc_feature (1)..(250): tr|A0A0F1AJQ4|A0A0F1AJQ4_9ENTR 2,3-dihydroxybenzoate-2, 3-dehydrogenase OS=Enterobacter sichuanensis OX=2071710 GN=SS37_19735 PE=4 SV=1
MGFDFTGKTVWVTGAGKGIGYATALAFAEAGAQVTGFDLAFPLSDYPFATEALDVANDAQVSEVCGRLLTTVERLDVLVNAAGILRMGATDQLSQADWQQTFAVNVGGAFNLFQQTMGQFRRQQGGAIVTVASDAAHTPRIGMSAYGSSKAALKSLALTVGLELAASGVRCNLVSPGSTDTDMQRTLWKSNDAEQQRIRGFGEQFKLGIPLGKIARPQEIASTVLFLASDAASHITLQDIVVDGGSTLGA

SEQ ID NO: 91724 - protein, 247 aa, Enterobacter soli
  misc_feature (1)..(247): tr|A0A198GQA4|A0A198GQA4_9ENTR 2,3-dihydro-2,3-dihydrox ybenzoate dehydrogenase OS=Enterobacter soli ATCC BAA-2 102 OX=1354262 GN=M987_02274 PE=4 SV=1
MQIDLTGKKALVTGASRGLGRAIALSLARAGADVVITYEKSADKAQAVASEIKALGRHCEAVQADSASAEAIQEAVTHAARTLGGLDILVNNAGIARGGPLEALTIADIDAMINVNIRGVVLTTQEALVHMSDGGRIINIGSCLANRVAMPGIAVYAMTKSALNSFTRGLARDLGPRGITVNLVHPGPTNSDMNPEDGEQAEAQRQMIAVGHYGQPDDIAAAVTFLASPAAGQISGTGLDVDGGLNA

SEQ ID NO: 91725 - protein, 251 aa, Enterobacter sp.
  misc_feature (1)..(251): tr|A0A0V9DVB1|A0A0V9DVB1_9ENTR 2,3-dihydro-2,3-dihydrox ybenzoate dehydrogenase OS=Enterobacter sp. 50588862 OX =1736698 GN=APT89_01405 PE=4 SV=1
MAELDFTGKTVWVTGAGKGIGYATALAFVEAGARVTGFDLAFPQDDYPFATETLDVADAAQVGDVCGRLLGTLERLDVLVNAAGILRMGATDELSQEDWQQTFTVNVGGAFNLFQQTMGQFRRQQGGAIVTVASDAAHTPRIGMSAYGASKAALKSLALTVGLELAGSGVRCNLVSPGSTDTDMQRTLWKSDDAEQQRIRGFGEQFKLGIPLGKIARPREIAATVLFLASDAASHITLQDIVVDGGSTLGA

SEQ ID NO: 91726 - protein, 251 aa, Enterobacter sp.
  misc_feature (1)..(251): tr|A0A5F0JWS8|A0A5F0JWS8_9ENTR 2,3-dihydro-2,3-dihydrox ybenzoate dehydrogenase OS=Enterobacter sp. A11 OX=1217 049 GN=dhbA PE=4 SV=1
MAGFDFSGKSVWVTGAGKGIGYATALAFVDAGAKVTGFDLAFPQGDYPFATEKLDVADAEQVADVCGRMFATLDRLDVLVNAAGILRMGATDRLSQEEWQQTFAVNVGGAFNLFQQTMGQFRRQQGGAIVTVASDAAHTPRIGMSAYGASKAALKSLALTVGLELAGSGVRCNLVSPGSTDTDMQRTLWKSGDAEQQRIRGFGEQFKLGIPLGKIARPQEIANTILFLASDYASHITLQDIVVDGGSTLGA

SEQ ID NO: 91727 - protein, 251 aa, Enterobacter sp.; identical to SEQ ID NO: 91712
  misc_feature (1)..(251): tr|A0A4S3EN26|A0A4S3EN26_9ENTR 2,3-dihydro-2,3-dihydrox ybenzoate dehydrogenase OS=Enterobacter sp. AD2-3 OX=25 47834 GN=dhbA PE=4 SV=1

SEQ ID NO: 91728 - protein, 250 aa, Enterobacter sp.
  misc_feature (1)..(250): tr|W7PFS3|W7PFS3_9ENTR 2,3-dihydro-2,3-dihydroxybenzoat e dehydrogenase OS=Enterobacter sp. DC4 OX=1395580 GN=e ntA PE=4 SV=1
MGLDFTGKTVWVTGAGKGIGYATALAFVDAGAQVTGFDLAFPQDDYPFATETLDVANAAQVHEVCGRVLTSLERLDVLVNAAGILRMGATDQLSQEDWQQTFAVNVGGAFNLFQLTMGQFRRQQGGAIVTVASDAAHTPRIGMSAYGASKAALKSLALTVGLELAGSGVRCNLVSPGSTDTDMQRTLWKSDDAEQQRIRGFGEQFKLGIPLGKIARPQEIASTVLFLASDAASHITLQDIVVDGGSTLGA

SEQ ID NO: 91729 - protein, 249 aa, Enterobacter sp.
  misc_feature (1)..(249): tr|A0A5J6W8S0|A0A5J6W8S0_9ENTR 2,3-dihydro-2,3-dihydrox ybenzoate dehydrogenase OS=Enterobacter sp. E76 OX=2596 949 GN=dhbA PE=4 SV=1
MAGMFDGKTVWVTGAGKGIGYAAALAFQQQGATVIGLDRAFNGDYPFATEQLDIADAGQVAEVCERLLAAQPRLDVLVNAAGILRMGPTDALSLADWQQTFAVNVGGAFNLYQRLMPVFRTQRGGAIVTVASDAAHTPRIGMSAYGASKAALKSLTLTVGLELAPFGVRVNLVSPGSTDTDMQRTLWTTDDAEQRRIAGFAEQFKLGIPLGKIAKPQEIASTILFLASDQASHITLQDIVIDGGSTLGA

SEQ ID NO: 91730 - protein, 250 aa, Enterobacter sp.
  misc_feature (1)..(250): tr|A0A5C1CWC7|A0A5C1CWC7_9ENTR 2,3-dihydro-2,3-dihydrox ybenzoate dehydrogenase OS=Enterobacter sp. LU1 OX=1848 517 GN=dhbA PE=4 SV=1
MVFDFTGKTVWVTGAGKGIGYATALAFVEAGAQVTGFDLAFPHGEYPFATETLDVADAAQASDVCGRLLSSLERLDVLVNAAGILRMGATDQLSQEDWQQTFAVNVGGAFNLFQQTMGQFRHQQGGAIVTVASDAAHTPRIGMSAYGASKAALKSLALTVGLELAGSGVRCNLVSPGSTDTDMQRTLWTSDDAEQRRIRGFGEQFKLGIPLGKIARPQEIAATVLFLASDAASHITLQDIVVDGGSTLGA

SEQ ID NO: 91731 - protein, 250 aa, Enterobacter sp.
  misc_feature (1)..(250): tr|A0A495ALR8|A0A495ALR8_9ENTR 2,3-dihydro-2,3-dihydrox ybenzoate dehydrogenase OS=Enterobacter sp. R1(2018) OX =2447891 GN=dhbA PE=4 SV=1
MNMDFSGQRVWVTGAGKGIGYHTALAFSAAGATVIGFDLAFPLEVYPFATETLNVADAQQVAAAAQRLLSDAPQLDVLVNAAGILRMGATDALSLQDWQDTFAVNVGGAFNMFRATMPRFREQRSGAMVTVASDAAHTPRTGMSAYGASKAALKSLALTVGLELAPFGVRCNLVSPGSTDTDMQRTLWKTPDAEQQRIKGFPEQFKLGIPLGKIARPQEIVSTIMFLASGHASHITLQDIVIDGGATLGA

SEQ ID NO: 91732 - protein, 251 aa, Enterobacter sp.
  misc_feature (1)..(251): tr|R9VRA6|R9VRA6_9ENTR 2,3-dihydroxybenzoate-2,3-dehydr ogenase OS=Enterobacter sp. R4-368 OX=1166130 GN=H650_2 1625 PE=4 SV=1
MVGLDFTGKIVWVTGAGKGIGYATAKAFVGAGAHVIGFDLAFGGTDYPFSCEVLDVADAAQVQVVCQRVLAQCERLDVLVNAAGVLHMAATDELTPDAWHSTFAVNVGGAFNLFQQTMAQFRRQQSGAIVTVASDAAHTPRIGMSAYGASKAALKSLALTVGLELAASHVRCNVVSPGSTDTDMQRLLWVSDDAEQQRIRGFGEQFKLGIPLGKIARPQEVANTILFLASDLASHITLQDIVVDGGSTLGA

SEQ ID NO: 91733 - protein, 251 aa, Enterobacter sp.
  misc_feature (1)..(251): tr|A0A329H414|A0A329H414_9ENTR 2,3-dihydro-2,3-dihydrox ybenzoate dehydrogenase OS=Enterobacter sp. RIT 418 OX= 2202164 GN=DBY73_020075 PE=4 SV=1
MMAFDFTGKNVWVTGAGKGIGYATARAFSEAGARVTGFDLAFPLDDYPFATETLNVADAVQVRDVCGRLLGRVERLDVLVNAAGILRMGATEQLTQEDWQQTFAVNVGGAFNLFQQTMGQFRRQQGGAIVTVASDAAHTPRIGMSAYGASKAALKSLALTVGLELAGSGVRCNLVSPGSTDTDMQRTLWTRDDAEQQRIRGFGEQFKLGIPLGKIARPQEIASTVLFLASDAASHITLQDIVVDGGSTLGA

SEQ ID NO: 91734 - protein, 250 aa, Enterobacter sp.
  misc_feature (1)..(250): tr|A0A5D9BYP5|A0A5D9BYP5_9ENTR 2,3-dihydro-2,3-dihydrox ybenzoate dehydrogenase OS=Enterobacter sp. RVSM5a OX=2 605743 GN=dhbA PE=4 SV=1
MAFDFTGKTVWVTGAGKGIGYATALAFVEAGAQVTGFDLAFPHGEYPFATETLDVADAAQASDVCGHLLSSLERLDVLVNAAGILRMGATDQLSQEDWQQTFAVNVGGAFNLFQQTMGQFRHQQGGAIVTVASDAAHTPRIGMSAYGASKAALKSLALTVGLELAGSGVRCNLVSPGSTDTDMQRTLWTSDDAEQRRIRGFGEQFKLGIPLGKIARPQEIAATVLFLASDAASHITLQDIVVDGGSTLGA

SEQ ID NO: 91735 - protein, 250 aa, Enterobacter sp.
  misc_feature (1)..(250): tr|A0A3S0H9S2|A0A3S0H9S2_9ENTR 2,3-dihydro-2,3-dihydrox ybenzoate dehydrogenase OS=Enterobacter sp. WCHEn090040 OX=2497436 GN=dhbA PE=4 SV=1
MGWDFTGKTVWVTGAGKGIGYATALAFAEAGAQVTGFDLAFPQDHYPFATETLDVADAAQVHEVCGRVLASLERLDVLVNAAGILRMGATDQLSQKDWQDTFAVNVGGAFNLFQQTMGQFRRQQGGAIVTVASDAAHAPRIGMSAYGASKAALKSLALTVGLELAGSGVRCNLVSPGSTDTDMQRTLWKGDDAEQQRIRGFGEQFKLGIPLGKIARPQEIAATVLFLASDAASHITLQDIVVDGGSTLGA

SEQ ID NO: 91736 - protein, 251 aa, Enterobacter sp.
  misc_feature (1)..(251): tr|A0A4R0GEZ7|A0A4R0GEZ7_9ENTR 2,3-dihydro-2,3-dihydrox ybenzoate dehydrogenase OS=Enterobacter sp. WCHEs120002 OX=2529381 GN=dhbA PE=4 SV=1
MMGFDFTGKTVWVTGAGKGIGYATALAFVEAGAQVTGFDLAFPLGDYPFATETLDVADFAQVSDACGRLLNTLERLDVLVNAAGILRMGATDALSQEDWQQTFAVNVGGAFNLFQQTMGQFRRQQGGAIVTVASDAAHTPRIGMSAYGASKAALKSLALTVGLELAGSGVRCNLVSPGSTDTDMQRTLWKSDDAEQQRIRGFGEQFKLGIPLGKIARPQEIAGTVLFLASDAASHITLQDIVVDGGSTLGA

SEQ ID NO: 91737 - protein, 251 aa, Enterobacter sp.
  misc_feature (1)..(251): tr|A0A4V2LUY4|A0A4V2LUY4_9ENTR 2,3-dihydro-2,3-dihydrox ybenzoate dehydrogenase OS=Enterobacter sp. WCHEs120003 OX=2529382 GN=dhbA PE=4 SV=1
MAGFDFTGKTVWVTGAGKGIGYATALAFVEAGARVTGFDLAFPQDDYPFATETLDVADAAQVGDVCGRLLGTLERLDVLVNAAGILRMGATDELSLEDWQQTFAVNVGGAFNLFQQTMGQFHRQQGGAIVTVASDAAHTPRIGMSAYGASKAALKSLALTVGLELAGSGVRCNLVSPGSTDTDMQRTLWKSDDAEQQRIRGFGEQFKLGIPLGKIARPQEIAATVLFLASDAASHITLQDIVVDGGSTLGA

SEQ ID NO: 91738 - protein, 251 aa, Enterobacteriaceae bacterium
  misc_feature (1)..(251): tr|A0A427C418|A0A427C418_9ENTR 2,3-dihydro-2,3-dihydrox ybenzoate dehydrogenase OS=Enterobacteriaceae bacterium CCUG 66741 OX=1851514 GN=dhbA PE=4 SV=1
MAGFDFHGKTVWVTGAGKGIGYATARAFVEAGAEVTGFDLAFDQADYPFATVKMDVADPQQVMLVCAPLLHDLARLDVLVNAAGILRMGATDTLSQADWQQTFAVNVGGAFNLFQQTMATFRQQQGGAIVTVASDAAHTPRIGMSAYGASKAALKSLALTVGLELSASGVRCNLVSPGSTDTDMQRTLWVSDDAEQQRIRGFGEQFKLGIPLGKIARPQEIASTILFLASDSASHITLQDIVVDGGSTLGA

SEQ ID NO: 91739 - protein, 71 aa, Enterobacteriaceae bacterium
  misc_feature (1)..(71): tr|A0A351NKC6|A0A351NKC6_9ENTR 2,3-dihydro-2,3-dihydrox ybenzoate dehydrogenase (Fragment) OS=Enterobacteriacea e bacterium OX=1849603 GN=DCX28_04710 PE=4 SV=1
MAGLDFSGKTVWVTGAGKGIGYATALAFAEAGALVTGFDRDFSHATYPFACETLDIANADQVAAVSQRLLA

SEQ ID NO: 91740 - protein, 201 aa, Enterococcus casseliflavus
  misc_feature (1)..(201): tr|A0A377KS52|A0A377KS52_ENTCA 2,3-dihydro-2,3-dihydrox ybenzoate dehydrogenase OS=Enterococcus casseliflavus O X=37734 GN=entA PE=4 SV=1
MKLLLIGHTGTLGQLLVEGFQQLPEVELITASRSSGDHQVEIADAASVSQLFAATGKVDAIVSAAGSTVFKPFEELTPADIQQSVASKLQGQVNLALIGQHFLTEGGSITLTSGIIKDEFIPMGTPSALVNGGLEAFVASAAFEIGHGVRINAVSPNALVGSWETFADSFKGFIPVGDAPVFAAYQKAVFGIMTGKTFTVY

SEQ ID NO: 91741 - protein, 248 aa, Enterococcus durans
  misc_feature (1)..(248): tr|A0A557ZLE9|A0A557ZLE9_9ENTE 2,3-dihydro-2,3-dihydrox ybenzoate dehydrogenase OS=Enterococcus durans OX=53345 GN=dhbA PE=4 SV=1
MDFSGKNVWVTGAGKGIGYATALAFVEAGAKVTGFDQAFAQEQYPFATEVMDVADAAQVAQVCQRLLAETERLDVLVNAAGILRMGATDQLSKEDWQQTFAVNVGGAFNLFQQTMNQFRRQRGGAIVTVASDAAHTPRIGMSAYGASKAALKSLALSVGLELAGSGVRCNVVSPGSTDTDMQRTLWVSDDAEEQRIRGFGEQFKLGIPLGKIARPQEIANTILFLASDLASHITLQDIVVDGGSTLGA

SEQ ID NO: 91742 - protein, 250 aa, Erwinia gerundensis
  misc_feature (1)..(250): tr|A0A0U5KXU2|A0A0U5KXU2_9GAMM 2,3-dihydro-2,3-dihydrox ybenzoate dehydrogenase OS=Erwinia gerundensis OX=16193 13 GN=entA PE=4 SV=1
MNIDFTAKQVWVTGAGQGIGYHIALAFQQAGAQVVGFDRQFRQTDYPFRCVTLDVADADQVARVCQPLLAEQKQLDVLVNGAGILRIGATDTLPVADFQALMAVNVGGAFNLFQQTLPRFREQRSGAIVTLASNSAHAPRIGMSAYGASKAALRSLCLSVALEMAPHGVRCNLVSPGSTDTDMQRSLWHTPDAEQRTIAGFPDQYKIGIPLQKIAQPQEIANAVLFLASDLASHIVMQDIVIDGGATLGA

SEQ ID NO: 91743 - protein, 252 aa, Erwinia piriflorinigrans
  misc_feature (1)..(252): tr|V5Z3W4|V5Z3W4_9GAMM 2,3-dihydroxybenzoate-2,3-dehydr ogenase OS=Erwinia piriflorinigrans CFBP 5888 OX=116191 9 GN=cbsA PE=4 SV=1
MTCRFDFSGKQVWVTGAGQGIGYHTALAFVAAGASVVGFDRQFSQREYPFQRVTVDIADAAAVKRTCQRLLAEARRLDVLVNAAGILRIGSTEELALEDWQDCMAVNAGGAFNLFQQALPLFRQQRSGAIVTIASNAAHAPRIGMSAYGASKAALRSLCLTVGLEMAPFGVRCNIVSPGSTDTAMQRSLWHQPEDEQQMIAGYPEQYKLGIPLQKIAKPDDIANAVLFLASDSAGHIVMQDIVIDGGATLGA

SEQ ID NO: 91744 - protein, 250 aa, Erwinia sp.
  misc_feature (1)..(250): tr|A0A3R8ZXS8|A0A3R8ZXS8_9GAMM 2,3-dihydro-2,3-dihydrox ybenzoate dehydrogenase OS=Erwinia sp. 198 OX=2022746 G N=dhbA PE=4 SV=1
MSLDFTNKHIWVTGAGKGIGYATALAFHEAGATVVGLDLAFPQADYPFQTVELNVADAQQVKAVCQRLRPETPRLDVLVNGAGILRMGATDELDVADWEAVMAVNVGGAFNLFQQTMPWFREQRGGAIVTVASDAAHCPRIGMSAYGASKAALRSLSLTVGLELASFGVRCNLVSPGSTDTDMQRTLWKSPDAEQQRIRGFAEQFKVGIPLGKIARPGEVASTILFLASDQASHITMQDIVIDGGSTLGA

SEQ ID NO: 91745 - protein, 252 aa, Erwinia sp.
  misc_feature (1)..(252): tr|A0A0Q4NMJ7|A0A0Q4NMJ7_9GAMM 2,3-dihydro-2,3-dihydrox ybenzoate dehydrogenase OS=Erwinia sp. Leaf53 OX=173622 5 GN=ASF13_00385 PE=4 SV=1
MSCQFDFSDKQVWVTGAGQGIGYHTALAFVAAGASVVGFDRQFSQSDYPFQRVIVDIADAGQVKNVCERLLADIPRLDVLVNAAGILRTGSTETLAVEDWQACMAVNAGGAFNLFQQTLPLFRQQRGGAIVTVASNAAHAPRIGMSAYGASKAALRSLCMTVALEMAPFGVRCNIVSPGSTDTAMQRSLWHRPEDEQQMIAGYPDQYKLGIPLGKIAQPEEIASAILFLASDNASHIVMQDIVVDGGATLGA

SEQ ID NO: 91746 - protein, 248 aa, Escherichia albertii
  misc_feature (1)..(248): tr|B1EKD6|B1EKD6_ESCAT 2,3-dihydro-2,3-dihydroxybenzoat e dehydrogenase OS=Escherichia albertii (strain TW07627 ) OX=502347 GN=entA PE=4 SV=1
MDFSGKNVWVTGAGKGIGYATALAFVEAGAKVTGFDQAFAQEQYPFATEVMDVADAVQVAQVCQRLLAETERLDVLVNAAGILRMGATDQLSKEDWQQTFAVNVGGAFNLFQQTMNQFRRQRGGAIVTVASDAAHTPRIGMSAYGASKAALKSLALSVGLELAGSGVRCNVVSPGSTDTDMQRMLWVSDDAEEQRIRGFGEQFKLGIPLGKIARPQEIANTILFLASDLASHITLQDIVVDGGSTLGA

SEQ ID NO: 91747 - protein, 248 aa, Escherichia albertii
  misc_feature (1)..(248): tr|A0A4Q9IUV5|A0A4Q9IUV5_9ESCH 2,3-dihydro-2,3-dihydrox ybenzoate dehydrogenase OS=Escherichia albertii OX=2089 62 GN=dhbA PE=4 SV=1
MDFSGKNVWVTGAGKGIGYATALAFVEAGAKVTGFDQAFAQEQYPFATEMMDVADAVQVAQVCQRLLAETERLDVLVNAAGILRMGATDQLSKEDWQQTFAVNVGGAFNLFQQTMNQFRRQRGGAIVTVASDAAHTPRIGMSAYGASKAALKSLALSVGLELAGSGVRCNVVSPGSTDTDMQRMLWVSDDAEEQRIRGFGEQFKLGIPLGKIARPQEIANTILFLASDLASHITLQDVVVDGGSTLGA

SEQ ID NO: 91748 - protein, 248 aa, Escherichia coli
  misc_feature (1)..(248): tr|B7L8H9|B7L8H9_ECO55 EntA protein OS=Escherichia coli (strain 55989 / EAEC) OX=585055 GN=entA PE=4 SV=1
MDFSGKNVWVTGAGKGIGYATALAFVEAGAKVTGFDQAFTQEQYPFATEVMDVADAGQVAQVCQRLLAETERLDVLINAAGILRMGATDQLSKEDWQQTFAVNVGGAFNLFQQTMNQFRRQRGGAIVTVASDAAHTPRIGMSAYGASKAALKSLALSVGLELAGSGVRCNVVSPGSTDTDMQRTLWVSDDAEEQRIRGFGEQFKLGIPLGKIARPQEIANTILFLASDLASHITLQDIVVDGGSTLGA

SEQ ID NO: 91749 - protein, 248 aa, Escherichia coli; identical to SEQ ID NO: 91409
  misc_feature (1)..(248): sp|P15047|ENTA_ECOLI 2,3-dihydro-2,3-dihydroxybenzoate dehydrogenase OS=Escherichia coli (strain K12) OX=83333 GN=entA PE=1 SV=1

SEQ ID NO: 91750 - protein, 248 aa, Escherichia coli
  misc_feature (1)..(248): tr|B1LKI9|B1LKI9_ECOSM 2,3-dihydro-2,3-dihydroxybenzoat e dehydrogenase OS=Escherichia coli (strain SMS-3-5 / S ECEC) OX=439855 GN=entA PE=4 SV=1
MDFSGKNVWVTGAGKGIGYATALAFVEAGAKVTGFDQAFAQEQYPFATEVMDVADAAQVAQVCQRLLAQTERLDVLVNAAGILRMGATDQLSKEDWQQTFAVNVGGAFNLFQQTMNQFRRQRGGAIVTVASDAAHTPRIGMSAYGASKAALKSLALSVGLELAGSGVRCNVVSPGSTDTDMQRTLWVSDDAEEQRIRGFGEQFKLGIPLGKIARPQEIANTILFLASDLASHITLQDIVVDGGSTLGA

SEQ ID NO: 91751 - protein, 248 aa, Escherichia coli
  misc_feature (1)..(248): tr|Q1REW6|Q1REW6_ECOUT 2,3-dihydro-2,3-dihydroxybenzoat e OS=Escherichia coli (strain UTI89 / UPEC) OX=364106 G N=entA PE=4 SV=1
MDFSGKNVWITGAGKGIGYATALAFVEAGAKVTGFDQAFTQEQYPFATEVMDVADAAQVAQVCQRLLAETERLDVLVNAAGILRMGATDQLSKEDWQQTFAVNVGGAFNLFQQTMNQFRRQRGGAIVTVASDAAHTPRIGMSAYGASKAALKSLALSVGLELAGSGVRCNVVSPGSTDTDMQRTLWVSDDAEEQRIRGFGEQFKLGIPLGKIARPQEIANTILFLASDLASHITLQDIVVDGGSTLGA

SEQ ID NO: 91752 - protein, 248 aa, Escherichia coli
  misc_feature (1)..(248): tr|B7MRN4|B7MRN4_ECO81 2,3-dihydro-2,3-dihydroxybenzoat e dehydrogenase OS=Escherichia coli O81 (strain ED1a) O X=585397 GN=entA PE=4 SV=1
MDFSGKNVWVTGAGKGIGYATALAFVEAGAKVTGFDQAFTQEQYPFATEVMDVADAAQVAQVCQRLLAETERLDVLVNAAGILRMGATDQLSKEDWQQTFAVNVGGAFNLFQQTMNQFRRQRGGAIVTVASDAAHTPRIGMSAYGASKAALKSLALSVGLELAGSGVRCNVVSPGSTDTDMQRTLWVSDDAEEQRIRGFGEQFKLGIPLGKIARPQEIANTILFLASDLASHITLQDIVVDGGSTLGA

SEQ ID NO: 91753 - protein, 248 aa, Escherichia coli; identical to SEQ ID NO: 91752
  misc_feature (1)..(248): tr|A0A0H3EG28|A0A0H3EG28_ECO8N 2,3-dihydroxybenzoate-2, 3-dehydrogenase OS=Escherichia coli O83:H1 (strain NRG 857C / AIEC) OX=685038 GN=NRG857_02705 PE=4 SV=1

SEQ ID NO: 91754 - protein, 108 aa, Escherichia coli
  misc_feature (1)..(108): tr|A0A376DDE9|A0A376DDE9_ECOLX 2,3-dihydroxybenzoate-2, 3-dehydrogenase OS=Escherichia coli OX=562 GN=entA_2 PE =4 SV=1
MSAYGASKAALKSLALSVGLELAGSGVRCNVVSPGSTDTDMQRTLWVSDDAEEQRIRGFGEQFKLGIPLGKIARPQEIANTILFLASDLASHITLQDIVVDGGSTLGA

SEQ ID NO: 91755 - protein, 248 aa, Escherichia fergusonii
  misc_feature (1)..(248): tr|B7LLK4|B7LLK4_ESCF3 2,3-dihydro-2,3-dihydroxybenzoat e dehydrogenase OS=Escherichia fergusonii (strain ATCC 35469 / DSM 13698 / CDC 0568-73) OX=585054 GN=entA PE=4 SV=1
MDFSGKNVWVTGAGKGIGYATALAFVEAGAKVTGFDQAFTLEQYPFATEVMDVADAAQVAQVCQRLLAQTERLDVLVNAAGILRMGATDQLSKEDWQQTFSVNVGGAFNLFQQTMNQFRRQRGGAIVTVASDAAHTPRIGMSAYGASKAALKSLALSVGLELAGSGVRCNVVSPGSTDTDMQRTLWVSDDAEEQRIRGFGEQFKLGIPLGKIARPQEIANTILFLASDLASHITLQDIVVDGGSTLGA

SEQ ID NO: 91756 - protein, 248 aa, Escherichia marmotae
  misc_feature (1)..(248): tr|A0A370V3R7|A0A370V3R7_9ESCH 2,3-dihydro-2,3-dihydrox ybenzoate dehydrogenase OS=Escherichia marmotae OX=1499 973 GN=entA PE=4 SV=1
MNFSGKNVWVTGAGKGIGYATALAFVDAGAKVTGFDRAFTLEHYPFATEVLDVADAGQVAQVCQRLLGETQRLDVLVNAAGILRMGATDQLSKEDWQQTFAVNVGGAFNLFQQTMNQFRRQRGGAIVTVASDAAHTPRIGMSAYGASKAALKSLALSVGLELAGSGVRCNVVSPGSTDTDMQRTLWVSDDAEEQRIRGFGEQFKLGIPLGKIARPQEIANTILFLASDLASHITLQDIVVDGGSTLGA

SEQ ID NO: 91757 - protein, 248 aa, Escherichia sp.
  misc_feature (1)..(248): tr|A0A4Q9JTD3|A0A4Q9JTD3_9ESCH 2,3-dihydro-2,3-dihydrox ybenzoate dehydrogenase OS=Escherichia sp. E10V4 OX=247 8971 GN=dhbA PE=4 SV=1
MDFSGKNVWVTGAGKGIGYATALAFVEAGAKVTGFDQAFAQEQYPFATEVMDVADAALVAQVCQRLLAETERLDVLVNAAGILRMGATDQLSKEDWQQTFAVNVGGAFNLFQQTMNQFRRQRGGAIVTVASDAAHTPRIGMSAYGASKAALKSLALSVGLELAGSGVRCNVVSPGSTDTDMQRTLWVSDDAEEQRIRGFGEQFKLGIPLGKIARPQEIANTILFLASDLASHITLQDIVVDGGSTLGA

SEQ ID NO: 91758 - protein, 248 aa, Escherichia sp.
  misc_feature (1)..(248): tr|A0A4P9DGB0|A0A4P9DGB0_9ESCH 2,3-dihydro-2,3-dihydrox ybenzoate dehydrogenase OS=Escherichia sp. E4742 OX=204 4467 GN=dhbA PE=4 SV=1
MDFSGKNVWVTGAGKGIGYATALAFVEAGAKVTGFDQAFAQENYPFTTEVMDVADAAQVAQVCQRLLAQTERLDVLVNAAGILRMGATDQLSKEDWQQTFAVNVGGAFNLFQQTMNQFRRQRGGAIVTVASDAAHTPRIGMSAYGASKAALKSLALSVGLELAGSGVRCNVVSPGSTDTDMQRTLWVSDDAEEQRIRGFGEQFKLGIPLGKIARPQEIANTILFLASDLASHITLQDIVVDGGSTLGA

SEQ ID NO: 91759 - protein, 248 aa, Escherichia sp.
  misc_feature (1)..(248): tr|A0A4U6CGA2|A0A4U6CGA2_9ESCH 2,3-dihydro-2,3-dihydrox ybenzoate dehydrogenase OS=Escherichia sp. MR OX=257592 2 GN=dhbA PE=4 SV=1
MDFSGKNVWVTGAGKGIGYATALAFVEAGAKVTGFDRVFTQEQYPFATEVMDVADAGQVAQVCQRLLAETERLDVLVNAAGILRMGATDQLSKEDWQQTFAVNVGGAFNLFQQTMNQFRRQRGGAIVTVASDAAHTPRIGMSAYGASKAALKSLALSVGLELAGSGVRCNVVSPGSTDTDMQRTLWVSDDAEEQRIRGFGEQFKLGIPLGKIARPQEIANTILFLASDLASHITLQDIVVDGGSTLGA

SEQ ID NO: 91760 - protein, 323 aa, Ewingella americana
  misc_feature (1)..(323): tr|A0A377TGS1|A0A377TGS1_9GAMM 2,3-dihydro-2,3-dihydrox ybenzoate dehydrogenase OS=Ewingella americana OX=41202 GN=entA PE=4 SV=1
MTTQQQPLHSGFDKNSTASEVLGSRDLTGVNVIVTGGYSGIGLETVRVLAEAGAQVRVPTRDEEKAKEALKGIPNVETDFLDLMDPASIDAFAERFLATGRPLHILINSAGVMASPLHRDARGNEWQFSTNHLGHYKLTARLLPALKKADGARVVCVSSRGHRFAGIDFADPNFNQRPYDKWLAYGQSKSANALFALQLDKLGEAHNIRAFSLHPGAIFTALTRHMEKSDYQRVGALNEKGEVKTTEEAGFKTVEQGAATSVWCATHPSLAGKGGVYCEDADIAPLAAEDGAEVGVSSWAIDPEAAKRLWQLSETLTGVRYVW

SEQ ID NO: 91761 - protein, 282 aa, Flagellimonas maritima
  misc_feature (1)..(282): tr|A0A2Z4LQ29|A0A2Z4LQ29_9FLAO 2,3-dihydro-2,3-dihydrox ybenzoate dehydrogenase OS=Flagellimonas maritima OX=13 83885 GN=entA PE=3 SV=1
MEDTKYRELKNKVVVITGGGGILCSTLARSLGAQNAKVAVLDLKEEVAQEVAKTINKKGGAAIGVVADVLDINSLKAAHKRVSKELGKCDILINGAGGNHPSGTTSNPFLEEEDLSLSNLKTFFDLEMEGIQFTFNLNFIGTLLPTQVFSKDMIGRSGCSVLNISSMNAFTPLTKIPAYSGAKAAVSNFTQWLAVHFSKVGIRVNALAPGFFLTDQNRNLLTNKDSSLTLRGQTIIDHTPMGRYGNPEDIVGATLWLCGEGASFVTGVIIPIDGGFSAFSGV

SEQ ID NO: 91762 - protein, 250 aa, Franconibacter pulveris
  misc_feature (1)..(250): tr|A0A0J8VJA5|A0A0J8VJA5_9ENTR 2,3-dihydroxybenzoate-2, 3-dehydrogenase OS=Franconibacter pulveris OX=435910 GN =ACH50_18450 PE=4 SV=1
MSLDFSGQTVWVTGAGKGIGYATALAFVEAGASVVGFDLAFEQENYPFACETLDVADAAAVARTCQRLLAAEKRLDVLINAAGILRMGPTDALSATDWQQTFAVNVGGAFNFFQQTMAQFRAQKGGAIVTVASDAAHTPRIGMSAYGASKAALKSLALTVGLELAPFGVRANLVSPGSTDTDMQRTLWKSEDAEQQRIRGFAEQFKLGIPLGKIARPQEIANAILFLASAQASHTTLQDLVIDGGSTLGA

SEQ ID NO: 91763 - protein, 287 aa, Frankia sp.
  misc_feature (1)..(287): tr|A0A4R1D766|A0A4R1D766_9ACTN 2,3-dihydro-2,3-dihydrox ybenzoate dehydrogenase OS=Frankia sp. BMG5.11 OX=22254 0 GN=E0504_04555 PE=4 SV=1
MTTTAQTKTAQTTTAQTTTTPRAGGSTAPGGPSSGGVTLVTGAAGGIGASVARALAVEGTPVALVDRSAEPLWRLADELAGAGRQVLAVAADVTVSADVDAAVAKVEAELGAIGGLVNAAGVLRTGAVTALADEDWEQTLAVNAGGVFHVCRAVARRMVPRGAGSIVTVASNAARTPRTGMAAYGASKAAATMITKVLGLELAGHGIRCNIVAPGSTRTPMLTALAGDAAERASIEGTAATFRLGIPTGRIAEPDQIADAVLFLLSDRAAQITLHELTVDGGATLGA

SEQ ID NO: 91764 - protein, 287 aa, Frankia sp.
  misc_feature (1)..(287): tr|A0A2X3KXR1|A0A2X3KXR1_9ACTN 2,3-dihydro-2,3-dihydrox ybenzoate dehydrogenase OS=Frankia sp. Ea1.12 OX=573499 GN=dhbA PE=4 SV=1
MTTTAQTKTAQTTTAQTTTTPRAGGSTAPGGPSSGGVTLVTGAAGGIGASVARALAVEGTPVALVDRSAEPLWRLADELAGAGRQVLAVAADVTVSADVDAAVAKVEAELGAIGGLVNAAGVLRTGAVTALADEDWEQTLAVNAGGVFRVCRAVARRMVPRGAGSIVTVASNAARTPRTGMAAYGASKAAATMITKVLGLELAGHGIRCNIVAPGSTRTPMLTALAGDAAERASIEGTAATFRLGIPTGRIAEPDQIADAVLFLLSDRAAQITLHELTVDGGATLGA

SEQ ID NO: 91765 - protein, 254 aa, Gemmatimonas aurantiaca
  misc_feature (1)..(254): tr|C1ACN2|C1ACN2_GEMAT 2,3-dihydro-2,3-dihydroxybenzoat e dehydrogenase OS=Gemmatimonas aurantiaca (strain T-27 / DSM 14586 / JCM 11422 / NBRC 100505) OX=379066 GN=GA U_3217 PE=4 SV=1
MTHPGLVGGVAIVSGAAGGIGSEVVSALLHAGARVVAFDQQIPTRTDADDSRYRAFAVDVSQSAAVEALVAQTIAEWGPVRFGVNVAGVLHTASVVDTDDTQWDRLFAVNTTGVFNLSRALARHMMTERQGSIVTVASNAGGVPRQGMAAYGASKAAASLFTRSLGLELAPFGVRCNVVSPGSTRTPMLEAMLAEHGMDSVIAGSPAQFKIGIPLAKLAEPRDVADAVLFLLSDRAGHITMNELFVDGGASLHG

SEQ ID NO: 91766 - protein, 261 aa, Geobacillus sp.
  misc_feature (1)..(261): tr|A0A0Q0UN66|A0A0Q0UN66_9BACI 2,3-dihydro-2,3-dihydrox ybenzoate dehydrogenase OS=Geobacillus sp. PA-3 OX=1699 078 GN=dhbA PE=3 SV=1
MDQWGIAGKVALVTGAAQGIGEAVVRAFVKHGALVAAVDRNGGRLDALVSELQGQGYRVQSFLADVANRTQVDEVVEKVEHSLGPIEILVNVAGILRTGPVSSLADQDWEEVFKVNATGVFYVSRAVSQRMIPRRSGAIVTVSSNAATTPRMSMAAYAASKAAATMFTKCLGLELAPYHIRCNVVSPGSTETDMQRAMWTDDNGANKVIAGSLEEYRLGIPLKKLAQPSDIADAVLFLASEQSRHITLHDLRVDGGATLDS

SEQ ID NO: 91767 - protein, 261 aa, Geobacillus thermodenitrificans; identical to SEQ ID NO: 91766
  misc_feature (1)..(261): tr|A0A1W6VMG5|A0A1W6VMG5_GEOTD Vibriobactin-specific 2, 3-dihydro-2,3-dihydroxybenzoate dehydrogenase OS=Geobac illus thermodenitrificans OX=33940 GN=vibA PE=3 SV=1

SEQ ID NO: 91768 - protein, 252 aa, Glutamicibacter arilaitensis
  misc_feature (1)..(252): tr|E1W0T6|E1W0T6_GLUAR 2,3-dihydro-2,3-dihydroxybenzoat e dehydrogenase OS=Glutamicibacter arilaitensis (strain DSM 16368 / CIP 108037 / IAM 15318 / JCM 13566 / Re117 ) OX=861360 GN=dhbA PE=4 SV=1
MNDVVAKPLIVVTGASGGIGSAVAAKLGDSGYSVLATDRAGDDVLTADISSPEGISELEAAIEHRIERGQVLEGLVNVAGVLHPGKLLDLQPEQWEHMQSVNAQSVFRMTQLVARLMIDQRDQDPGNSRSIVTVSSNAGRTPRYGMAGYCASKAAATMVTRCFSLELAAHGIRANVVSPGSTRTAMLLGMNGEAEMNRASVAGNPAQFRNGIPLGRIADPEDIADSVAFLLSANAKHLTGIELTVDGGATLS

SEQ ID NO: 91769 - protein, 240 aa, Gordonia polyisoprenivorans
  misc_feature (1)..(240): tr|H6N4I3|H6N4I3_GORPV 2,3-dihydro-2,3-dihydroxybenzoat e dehydrogenase DhbA OS=Gordonia polyisoprenivorans (st rain DSM 44266 / VH2) OX=1112204 GN=dhbA PE=4 SV=1
MKGVRQRTVIVGAAQGIGKAVAQLLGVCGHELVLADVQVDRLAVVASDLRTRGAEVSAHHLDLDDTDSIAKTFDEVGAVSGLVSTAAAMHSADPLTVDPAQFEEVLKLNLIGNYALAQAAARSMISHNSAGSIVVVTSAAARRPHPNIGVYAASKAAVTQALRVLGLATQPYGIRINTVAPTATRTEMLTNEASHGTGVVPEYVNDPDDIANVIAFLLSPASRAINLREIPLDGGTLLGL

SEQ ID NO: 91770 - protein, 239 aa, Gordonia sp.
  misc_feature (1)..(239): tr|A0A3G8JJH8|A0A3G8JJH8_9ACTN 2,3-dihydro-2,3-dihydrox ybenzoate dehydrogenase OS=Gordonia sp. MMS17-SY073 OX= 2420509 GN=entA PE=4 SV=1
MTEAPIAGIAGRRAIVTGAAGGIGRAVVDALRVAGAEVHGWDRAGVGVAVVDVADRSAVQNAWRTTEDACGPVDIVVQAAGVMTDDWNLCMAVNAGGVRNVVDVAVAAMTSRGRGCAVVVSSNAGATPRADLAPYAASKAAATSYARSVALAVAPAGVRVNIVSPGSTDTPMLRGMWSSDADEARVLAGTPNRFRLGIPLGRIADPADIAAAVVYLVSDAARHVTMHDLRVDGGATLDM

SEQ ID NO: 91771 - protein, 254 aa, Gordonia terrae; identical to SEQ ID NO: 91648
  misc_feature (1)..(254): tr|A0A4V0AJ89|A0A4V0AJ89_9ACTN 2,3-dihydro-2,3-dihydrox ybenzoate dehydrogenase OS=Gordonia terrae OX=2055 GN=e ntA PE=4 SV=1

SEQ ID NO: 91772 - protein, 254 aa, Gynuella sunshinyii
  misc_feature (1)..(254): tr|A0A0C5VWK7|A0A0C5VWK7_9GAMM Dehydrogenases with diff erent specificities (Related to short-chain alcohol deh ydrogenase) OS=Gynuella sunshinyii YC6258 OX=1445510 GN =YC6258_02766 PE=4 SV=1
MTMTELDFSGQSIWVTGAGRGIGFATAQRFTELGAVVTGLDRNFDKPEKYPFHCQSLDLSNADQVAAGCDNILSQRPQIHGLINAAGILHTGSTENISRQAWQDCFNVNVGAAFNLFQQLIPQFKRQRRGSIVTVSSNAAHVPRMQMSAYCASKAALTSLNHCVALELAGYNVRCNVVSPGSTDTDMQRSLWHTPDARQQTINGFPDQYKLGIPLGKIATADEIANTIVFLASDMASHITMQDIIVDGGATFYR

SEQ ID NO: 91773 - protein, 268 aa, Hahella sp.
  misc_feature (1)..(268): tr|A0A3T0VUX0|A0A3T0VUX0_9GAMM 2,3-dihydro-2,3-dihydrox ybenzoate dehydrogenase OS=Hahella sp. KA22 OX=1628392 GN=ENC22_28780 PE=4 SV=1
MSDSTTQSAGADFAGKVAIVTGAAQGIGAAVVAALAESGAKVAALDVQEKALRDTTSTLTARGLQVRPFVVDISDAAAIEAVVGDIEAGLGEVEVLVNVAGILRLASATELTSDDWLDTFAVNTHGVFFLSRAVGRLMKERRRGAIVTVGSNAAAIPRTKMAAYAASKAASTHFTKCLGLELAEYGVRCNIVSPGSTDTAMQRQFWTDDQALEAVLNGSLDSYRTGIPLKRIATPEDIAEAVTFLASDKARHITMHNLCIDGGATLGV

SEQ ID NO: 91774 - protein, 251 aa, Halomonas elongata
  misc_feature (1)..(251): tr|E1V3P3|E1V3P3_HALED 2,3-dihydro-2,3-dihydroxybenzoat e dehydrogenase OS=Halomonas elongata (strain ATCC 3317 3 / DSM 2581 / NBRC 15536 / NCIMB 2198 / 1H9) OX=768066 GN=entA PE=4 SV=1
MEESRFRHKRVLVTGAASGIGRRIAERFHAEEAEVIGLDLCIEEQETPFRLLQLDISDAHQVATTCAQLQEECAELDVLVNAAGTLRLGDTESLTLDDWHSCLDVNASGVFYLMRQWIPQFKRQRSGAVINIASNAAHVPRMGMTAYCASKAALASLSHCVGLELAPYGVRCNLVSPGSTDTPMLRGMWQTPDDCKLTLQGLPERYKLGIPLGKLATPDDIATAVLFLASDQAGHITLQDLVIDGGATLGA

SEQ ID NO: 91775 - protein, 251 aa, Halomonas elongata; identical to SEQ ID NO: 91774
  misc_feature (1)..(251): tr|A0A1B8P1J5|A0A1B8P1J5_HALEL 2,3-dihydro-2,3-dihydrox ybenzoate dehydrogenase OS=Halomonas elongata OX=2746 G N=entA PE=4 SV=1

SEQ ID NO: 91776 - protein, 256 aa, Halomonas sp.
  misc_feature (1)..(256): tr|A0A4Y8W2V8|A0A4Y8W2V8_9GAMM 2,3-dihydro-2,3-dihydrox ybenzoate dehydrogenase OS=Halomonas sp. TBZ202 OX=2599 398 GN=dhbA PE=4 SV=1
MRDRAVRYDDLTGKRVLVAGAGGGIGRCVAERFMDQGADVVGFDRNVDGRAVPFRLLAVDLGEHARVAEACARLQAESPHLDVLVNAAGILRLGRTEELSLDDWHACLDVNATGAFYLLRQWLPLFKQQRRGAVIHVASNAAHVPRIGMAAYCASKAALASLSHCVGLELAPYGVRCNLVSPGSTDTPMLHDMCPTPADRQRLLLGLAERYKLGIPLGKLATPGDIADAIVFLASERAGHITLQDLVIDGGATLGA

SEQ ID NO: 91777 - protein, 294 aa, Hathewaya histolytica
  misc_feature (1)..(294): tr|A0A4U9RF71|A0A4U9RF71_HATHI 2,3-dihydro-2,3-dihydrox ybenzoate dehydrogenase OS=Hathewaya histolytica OX=149 8 GN=NCTC503_01330 PE=4 SV=1
MDKEEKNSLNKGTNEKNNLSNKAEKTKEDIIKHLHDMKDIDIFGAKSKYIERMENDLEEQKYIKEMQDMEDKLSRKNNYIVVGVVGLGLAIVVGLGIKIMQAPIKNFSFNDKAKVEKKSKEAQEKKEEEAVKGNKSKNNNSENLPEQNNKTYTYAVGNDNRKKSIEESIKINENNKSGITAIFIAELLRKAEVSVPKKVTNTKALVEDLTNKGWKKYTDPKQLKKGDVCFTTDMSNMEGYPSHVYIFMGWVKEGNTDEGYVCDSLVEENKDSLHKRTIGIETETKQKMAFFMRK

SEQ ID NO: 91778 - protein, 250 aa, Hydromonas sp.
  misc_feature (1)..(250): tr|A0A345DB67|A0A345DB67_9BURK 2,3-dihydro-2,3-dihydrox ybenzoate dehydrogenase OS=Hydromonas sp. F02 OX=226802 4 GN=dhbA PE=4 SV=1
MDFSNQIAVVTGAAQGIGAAVVQRLLNDGAQVVLLDKTINPEDYVNVPQTHVFKVDVTNRMQVQEVIDAIEKEIGEVTMLVNVAGVLSLNRILDATEEEWECAFSVNVKGVFNVCQAIAQYMSTRRKGSIVTVASNASDTPRIGMGVYAASKAASTHLTHCLGLELAALGIRCNVVSPGSTDTPMQHQLWLTPEHKNAVLQGSLKQHRLGIPLGRIADADDVANAVCFLLSDQARHITMHDLRVDGGATV

SEQ ID NO: 91779 - protein, 261 aa, Iodobacter fluviatilis
  misc_feature (1)..(261): tr|A0A377STH0|A0A377STH0_9NEIS 2,3-dihydro-2,3-dihydrox ybenzoate dehydrogenase OS=Iodobacter fluviatilis OX=53 7 GN=dhbA PE=3 SV=1
MQDQLYRGKVAIVTGAAQGIGAAVVQALSRQGAIVAALDIQAERLQAVALQYRLEGLAVHAYSVDMRSSSRISEVVGQIEAELGPVAVLVNAAGILHMSAISTMSDEDWENTFAVNTHGPFYLSRAVAQCMIPRRSGAIVTVGSNAAEVPRLQMAAYAASKAAVGHFTKCLGLELAEYGIRCNIVSPGSTDTAMQRQLWQDESDVQKVIAGSLPGYRTGIPLGRIADAEDIAASVLFLLSPGARHITMHNLCVDGGATLGI

SEQ ID NO: 91780 - protein, 250 aa, Izhakiella sp.
  misc_feature (1)..(250): tr|A0A4P8YK61|A0A4P8YK61_9ENTR 2,3-dihydro-2,3-dihydrox ybenzoate dehydrogenase OS=Izhakiella sp. KSNA2 OX=2579 935 GN=dhbA PE=4 SV=1
MKADFHGQTVWVTGAGRGIGYSTALAFHEAGARVVGFDRAFEQADYPFSTEQVDVADAAQVEQVCQRLLKDTDRLDVLVNAAGILRMGATDALPLNDWQDTFAVNVGGAFNFFRATMAQFRAQQGGALVTVASDAAHTPRIGMSAYGASKAALKSLALTVALELAEYGVRGNLVSPGSTDTDMQRGMWTTPDAEQKRIQGYPQQFKLGVPLGKIARPQEIADTILFLASKQASHITLQDIVVDGGSTLGA

SEQ ID NO: 91781 - protein, 258 aa, Janthinobacterium agaricidamnosum
  misc_feature (1)..(258): tr|W0V753|W0V753_9BURK 2,3-dihydro-2,3-dihydroxybenzoat e dehydrogenase OS=Janthinobacterium agaricidamnosum NB RC 102515 = DSM 9628 OX=1349767 GN=dhbA PE=4 SV=1
MEFQGKVVLISGAAQGIGAAVAQAMSLQGARLALFDVQPAALEQQAQALAGSGAPLLALAVDVADSAAVNAAVARVEQELGPVEVLVNAAGILRPGAALDCSDADWERTFSVNVGGVFRLCRAVASRMVPRRRGVIVTVASNASAVPRQQMAAYAASKAASAHFTRCLGLELAPHGIRCNVVSPGSTDTAMQRQLWTSDAHKQAIIDGSLQQFRLGIPLRRIADAADIADAVMFMASERARHITMHELCVDGGATLGA

SEQ ID NO: 91782 - protein, 264 aa, Janthinobacterium sp.
  misc_feature (1)..(264): tr|A0A0S4JZV4|A0A0S4JZV4_9BURK 2,3-dihydro-2,3-dihydrox ybenzoate dehydrogenase of siderophore biosynthesis OS= Janthinobacterium sp. CG23_2 OX=1706231 GN=BN3177_2785 PE=4 SV=1
MNIFSPKQFEGKVALVTGGAQGIGAAVARKLAREGAAVAVLDVKAGVVEDMAATLRASGINAIGIAVDVADSRAVNEAVARVRRELGEIDVLINVAGILRMGSILDYSDADWEQTFAVNAGGVFRLCRAVAPGMVERKRGAIVTVASNASTVPRMQMGAYAASKAASTQFMRCLGLELAQYGIRCNVVSPGSTDTEMQRQLWNGVDGSQAVIGGSLETFRLGIPLKRIATPDDIADTVLYLASDSARHITMHDLRIDGGATLGA

SEQ ID NO: 91783 - protein, 252 aa, Kalamiella piersonii
  misc_feature (1)..(252): tr|A0A3A9IDE8|A0A3A9IDE8_9GAMM 2,3-dihydro-2,3-dihydrox ybenzoate dehydrogenase OS=Kalamiella piersonii OX=2364 647 GN=dhbA PE=4 SV=1
MSQHFDFSGKIVWVTGAGQGIGYHTALAFHAAGAQVQGFDLRFHDHDYPFACHRLDVADPEQVKATCQPLLAQQPRLDVLVNGAGILRIGATDEISFEDFQACLAVNVGGAFNMFQQTLPLFRQQRAGAIVTIASNSAHAPRIGMSAYGASKAALRSLALTVGLEMAPYGVRCNIVSPGSTDTEMQRSLWHTPTAEQEMIDGFPDQYKLGIPLRKIARPQEIAHNVLFLASDLASHVVLQDIVVDGGATLGA

SEQ ID NO: 91784 - protein, 258 aa, Ketobacter sp.
  misc_feature (1)..(258): tr|A0A3L8BKQ4|A0A3L8BKQ4_9GAMM 2,3-dihydro-2,3-dihydrox ybenzoate dehydrogenase OS=Ketobacter sp. OX=2083498 GN =D9N14_12430 PE=4 SV=1
MESKTQVVMISGAARGIGAAVARTFAALGHPLALLDCQPDVTELARELAATYSVKTLGLILDVSDRSAVEQAVTRVEDQLGELHTLVNVAGILRLVPLLEMAAEDWDRTLAVNSTGVFNLSTSVARRLVTRRRGCIITVGSNAATTARTQMGAYAASKAASHQFTRCLGLELAPYGIRCNIVSPGSTDTDMQRQLWTSDEVPAGVLQGSPEQFRLGIPLQRIASPEDIANAVRFLASDEARHITLHDLRVDGGATLDA

SEQ ID NO: 91785 - protein, 262 aa, Kibdelosporangium sp.
  misc_feature (1)..(262): tr|A0A0K3BQU8|A0A0K3BQU8_9PSEU 2,3-dihydro-2,3-dihydrox ybenzoate dehydrogenase of siderophore biosynthesis OS= Kibdelosporangium sp. MJ126-NF4 OX=703222 PE=4 SV=1
MTELSGIESTVALVTGAAQGIGAAVAATLSDARAHVALVDRNAEALDTIVDKLTAGSGSVRGYTVDVCDSDAVNTLVQNIEDEQGPIGILVNSAGVLRTGKVVELPDRYWSEMFSVNVDGVFNVSRAVALRMISRRRGAIVTVASNAAGVPRMEMAAYAASKAASAQFTRCLGLELAEHGIRCNVVSPGSTDTPMLRAMLGEHVDPRVAIDGSPAAYRVGIPLRKLAQPRDVAEAVAFLVSDQAGHITMHDLYVDGGAALHV

SEQ ID NO: 91786 - protein, 248 aa, Kitasatospora xanthocidica
  misc_feature (1)..(248): tr|A0A373A5M9|A0A373A5M9_9ACTN 2,3-dihydro-2,3-dihydrox ybenzoate dehydrogenase OS=Kitasatospora xanthocidica O X=83382 GN=DR950_35520 PE=4 SV=1
MVTGAGQGIGAAVVRALVAEGAVVAAVDRDPGGIDALAAELPSVRPYALDVSDARAVDSTVESIESRLGPIGVLVNVAGILRTAPVVELTDGDWADTFAVNTTGVFHTSRAVGRRMADRGRGAVVTVGSNAAGVPRAGMAAYAASKAAATMFTRCLGLELARSGVRCNVVSPGSTDTAMQRALWGEDAEAAERRVIEGDLGAWRVGIPLGRIAAPADIAEAVVFLASDRARHITMHDLYVDGGATLRA

SEQ ID NO: 91787 - protein, 251 aa, Klebsiella aerogenes
  misc_feature (1)..(251): tr|A0A0H3FXS4|A0A0H3FXS4_KLEAK 2,3-dihydroxybenzoate-2, 3-dehydrogenase OS=Klebsiella aerogenes (strain ATCC 13 048 / DSM 30053 / JCM 1235 / KCTC 2190 / NBRC 13534 / N CIMB 10102 / NCTC 10006) OX=1028307 GN=EAE_13665
MAALDFHGQTVWVTGAGKGIGYATALAFVEAGANVTGFDLAFDGEGYPFATEMLDVADADQVRDVCARLLNDIERLDVLVNAAGILRMGATDQLSAEDWQQTFAVNVGGAFNLFQQTMAQFRRQRGGAIVTVASDAAHTPRIGMSAYGASKAALKSLALTVGLELAGSGVRCNLVSPGSTDTDMQRTLWVNEDAEQQRIRGFGEQFKLGIPLGKIARPQEIANTILFLASSHASHITLQDIVVDGGSTLGA

SEQ ID NO: 91788 - protein, 251 aa, Klebsiella aerogenes; identical to SEQ ID NO: 91787
  misc_feature (1)..(251): tr|A0A0F0U6G4|A0A0F0U6G4_KLEAE 2,3-dihydro-2,3-dihydrox ybenzoate dehydrogenase OS=Klebsiella aerogenes OX=548 GN=entA PE=4 SV=1

SEQ ID NO: 91789 - protein, 251 aa, Klebsiella grimontii
  misc_feature (1)..(251): tr|A0A5A8Y1B0|A0A5A8Y1B0_9ENTR 2,3-dihydro-2,3-dihydrox ybenzoate dehydrogenase OS=Klebsiella grimontii OX=2058 152 GN=dhbA PE=4 SV=1
MNGLDFHGQTVWITGAGKGIGYATALAFVEAGAQVTGFDLAFDGESYPFATETLDVADARQVAQVCGRLLAGIERLDVLVNAAGILRMGATDALSQEDWQQTFAVNVGGAFNLFQQTMAQFRRQKGGAIVTVASDAAHTPRIGMSAYGASKAALKSLALTVGLELAGSGVRCNLVSPGSTDTDMQRTLWVSDDAEQQRIRGFGEQFKLGIPLGKIARPQEIANTILFLASAHASHITLQDIVVDGGSTLGA

SEQ ID NO: 91790 - protein, 251 aa, Klebsiella michiganensis
  misc_feature (1)..(251): tr|A0A2J4Z6L6|A0A2J4Z6L6_9ENTR 2,3-dihydro-2,3-dihydrox ybenzoate dehydrogenase OS=Klebsiella michiganensis OX= 1134687 GN=dhbA PE=4 SV=1
MNGLDFHGRTVWITGAGKGIGYATALAFVEAGAQVTGFDLAFDGESYPFATETLDVADAQQVAQTCGRLLAGIARLDVLVNAAGILRMGATDALSQEDWQQTFAVNVGGAFNLFQQTMGQFRRQKGGAIVTVASDAAHTPRIGMSAYGASKAALKSLALTVGLELAGSGVRCNLVSPGSTDTDMQRTLWVSDDAEQQRIRGFGEQFKLGIPLGKIARPQEIANTILFLASDHASHITLQDIVVDGGSTLGA

SEQ ID NO: 91791 - protein, 251 aa, Klebsiella oxytoca; identical to SEQ ID NO: 91790
  misc_feature (1)..(251): tr|A0A0H3HAF2|A0A0H3HAF2_KLEOK 2,3-dihydroxybenzoate-2, 3-dehydrogenase OS=Klebsiella oxytoca (strain ATCC 8724 / DSM 4798 / JCM 20051 / NBRC 3318 / NRRL B-199 / KCTC 1686) OX=1006551 GN=KOX_13965 PE=4 SV=1

SEQ ID NO: 91792 - protein, 261 aa, Klebsiella oxytoca
  misc_feature (1)..(261): tr|A0A077MKN5|A0A077MKN5_KLEOX 2,3-dihydro-2,3-dihydrox ybenzoate dehydrogenase OS=Klebsiella oxytoca OX=571 GN =dhbX PE=3 SV=1
MTFDKDYIAVITGACGGIGESVAHALAKEGLSLALLDNNATQLATLVATLQDNHPQPIAGFTVDVADDRCVAEAFTAVGHQLGPVGYLVNGAGVLCHASVAETQPQDWAKTFAVNATGVFNTSRHAANLMMAQRKGSIVTIASNAARVPRATMAAYCASKAAAQAFTYALGLEVAPYGIRCNVVAPGSTDTPMLRGMWHSESDKQNTLNGNPQQFRIGIPLNKVATAEEIAAAVCFYLCEESGQTTLSTLLVDGGAALGSC

SEQ ID NO: 91793 - protein, 144 aa, Klebsiella pneumoniae
  misc_feature (1)..(144): tr|W1EP87|W1EP87_KLEPN 2,3-dihydro-2,3-dihydroxybenzoat e dehydrogenase [enterobactin] siderophore OS=Klebsiell a pneumoniae IS53 OX=1432554 PE=4 SV=1
MTLADIDALINVNIRGVVIATQEALVHMADGGRIINIGSCLANRVAMPGIAVYAMTKSALNALTRGLARDLGPRGITVNLVHPGPTNSDMNPEDGEQAEAQRQMIAVGHYGQPEDIAAAVTFLASPAAGQISGTGLDVDGGLNA

SEQ ID NO: 91794 - protein, 108 aa, Klebsiella pneumoniae
  misc_feature (1)..(108): tr|A0A2X3EP62|A0A2X3EP62_KLEPN 2,3-dihydroxybenzoate-2, 3-dehydrogenase OS=Klebsiella pneumoniae OX=573 GN=entA _2 PE=4 SV=1
MSAYGASKAALKSLALTVGLELAGSGVRCNLVSPGSTDTDMQRTLWVSDDAEQQRIRGFGEQFKLGIPLGKIARPQEIANTILFLASSHASHITLQDIVVDGGSTLGA

SEQ ID NO: 91795 - protein, 263 aa, Klebsiella pneumoniae
  misc_feature (1)..(263): tr|A0A377Z8W7|A0A377Z8W7_KLEPO 2,3-dihydroxybenzoate-2, 3-dehydrogenase OS=Klebsiella pneumoniae subsp. ozaenae OX=574 GN=entA PE=4 SV=1
MAALDFRGQTVWVTGAGKGIGYATALAFVEAGANVTGFDLAFDGESYPFATETLDVADADQVREACSRLLANTERLDVLVNAAGILRMGATDQLSAEDWQQTFAVNVGGAFNLFQQTMAQFRRQRGGAIVTVASDAAHTPRIGMSAYGASKAALKSLALTVGLELAGSGVRCNLVSPGSTDTDMQRTLWVSDDAEQQRIRGFGEQFKLGIPLGKIARPQEIANTILFLASSHASHITLQDIVVDGGSTLGRKWPGSESLRWRR

SEQ ID NO: 91796 - protein, 251 aa, Klebsiella pneumoniae
  misc_feature (1)..(251): tr|A0A378A640|A0A378A640_KLEPN 2,3-dihydro-2,3-dihydrox ybenzoate dehydrogenase OS=Klebsiella pneumoniae subsp. pneumoniae OX=72407 GN=entA PE=4 SV=1
MAALDFRGQTVWVTGAGKGIGYATALAFVEAGANVTGFDLAFDGESYPFATETLDVADADQVREACSRLLANTERLDVLVNAAGILRMGATDQLSAEDWQQTFAVNVGGAFNLFQQTMAQFRRQRGGAIVTVASDAAHTPRIGMSAYGASKAALKSLALTVGLELAGSGVRCNLVSPGSTDTDMQRTLWVSDDAEQQRIRGFGEQFKLGIPLGKIARPQEIANTILFLASSHASHITLQDIVVDGGSTLGA

SEQ ID NO: 91797 - protein, 251 aa, Klebsiella quasipneumoniae
  misc_feature (1)..(251): tr|A0A483KIP3|A0A483KIP3_9ENTR 2,3-dihydro-2,3-dihydrox ybenzoate dehydrogenase OS=Klebsiella quasipneumoniae O X=1463165 GN=dhbA PE=4 SV=1
MAALDFRGQTVWVTGAGKGIGYATALAFVEAGANVTGFDLAFDGERYPFATETLDVADADRVREVCSRLLANTERLDVLVNAAGILRMGATDQLSAEDWQQTFAVNVGGAFNLFQQTMAQFRRQRGGAIVTVASDAAHTPRIGMSAYGASKAALKSLALTVGLELAGSGVRCNLVSPGSTDTDMQRTLWVSDDAEQQRIRGFGEQFKLGIPLGKIARPQEIANTILFLASAHASHITLQDIVVDGGSTLGA

SEQ ID NO: 91798 - protein, 251 aa, Klebsiella quasipneumoniae; identical to SEQ ID NO: 91797
  misc_feature (1)..(251): tr|A0A422X791|A0A422X791_9ENTR 2,3-dihydro-2,3-dihydrox ybenzoate dehydrogenase OS=Klebsiella quasipneumoniae s ubsp. quasipneumoniae OX=1667327 GN=dhbA PE=4 SV=1

SEQ ID NO: 91799 - protein, 251 aa, Klebsiella quasipneumoniae
  misc_feature (1)..(251): tr|A0A5C6INC4|A0A5C6INC4_9ENTR 2,3-dihydro-2,3-dihydrox ybenzoate dehydrogenase OS=Klebsiella quasipneumoniae s ubsp. similipneumoniae OX=1463164 GN=dhbA PE=4 SV=1
MAALDFRGQTVWVTGAGKGIGYATALAFVEAGANVTGFDLAFDGERYPFATETLDVADADRVREVCRRLLANTERLDVLVNAAGILRMGATDQLSAEEWRQTFAVNVGGAFNLFQQTMAQFRRQRGGAIVTVASDAAHTPRIGMSAYGASKAALKSLALTVGLELAGSGVRCNLVSPGSTDTDMQRTLWVSDDAEQQRIRGFGEQFKLGIPLGKIARPQEIANTILFLASSHASHITLQDIVVDGGSTLGA

SEQ ID NO: 91800 - protein, 251 aa, Klebsiella quasivariicola
  misc_feature (1)..(251): tr|A0A556VH78|A0A556VH78_9ENTR 2,3-dihydro-2,3-dihydrox ybenzoate dehydrogenase OS=Klebsiella quasivariicola OX =2026240 GN=dhbA PE=4 SV=1
MAALDFRGQTVWVTGAGKGIGYATALAFVEAGANVTGFDLAFSGESYPFATETLDVADADQVRDVCARLLNNIERLDVLVNAAGILRMGATDQLSAEDWRQTFAVNVGGAFNLFQQTMAQFRRQRGGAIVTVASDAAHTPRIGMSAYGASKAALKSLALTVGLELAGSGVRCNLVSPGSTDTDMQRTLWVNDDAEQQRIRGFGEQFKLGIPLGKIARPQEIANTILFLASSHASHITLQDIVVDGGSTLGA

SEQ ID NO: 91801 - protein, 251 aa, Klebsiella sp.
  misc_feature (1)..(251): tr|J5XDN7|J5XDN7_9ENTR 2,3-dihydro-2,3-dihydroxybenzoat e dehydrogenase OS=Klebsiella sp. OBRC7 OX=936565 GN=HM PREF1144_3921 PE=4 SV=1
MNGLNFHGRTVWITGAGKGIGYATALAFVEAGAQVTGFDLAFDGESYPFATETLDVADAQQVAQTCGRLLAGIARLDVLVNAAGILRMGATDALSQEDWQQTFAVNVGGAFNLFQQTMAQFRRQKGGAIVTVASDAAHTPRIGMSAYGASKAALKSLALTVGLELAGSGVRCNLVSPGSTDTDMQRTLWVSDDAEQQRIRGFGEQFKLGIPLGKIARPQEIANTILFLASDHASHITLQDIVVDGGSTLGA

SEQ ID NO: 91802 - protein, 251 aa, Klebsiella sp.
  misc_feature (1)..(251): tr|A0A3G5D7A3|A0A3G5D7A3_9ENTR 2,3-dihydro-2,3-dihydrox ybenzoate dehydrogenase OS=Klebsiella sp. P1CD1 OX=2267 618 GN=dhbA PE=4 SV=1
MAALDFHGQTVWVTGAGKGIGYATALAFVEAGANVTGFDLAFDGEGYPFATETLDVADAGQVRDVCARLLNNIERLDVLVNAAGILRMGATDQLSAEDWQQTFAVNVGGAFNLFQQTMAQFRRQRGGAIVTVASDAAHTPRIGMSAYGASKAALKSLALTVGLELAGSGVRCNLVSPGSTDTDMQRTLWVSDDAEQQRIRGFGEQFKLGIPLGKIARPQEIANTILFLASSHASHITLQDIVVDGGSTLGA

SEQ ID NO: 91803 - protein, 251 aa, Klebsiella sp.
  misc_feature (1)..(251): tr|A0A0L0AR76|A0A0L0AR76_9ENTR 2,3-dihydroxybenzoate-2, 3-dehydrogenase OS=Klebsiella sp. RIT-PI-d OX=1681196 G N=AC791_08135 PE=4 SV=1
MSGFDFHGKTVWVTGAGKGIGFATAQAFSGAGAKVIGFDLAFDRRDYAFTTEILDVANAVQVADVCQRVLASDARLDVLVNAAGILRMGATDALSAEEWQQTFAVNVGGAFNLFQQTMPQFRRQQSGAIVTVASDAAHTPRIGMSAYGASKAALKSLALTVGLELAASGVRCNLVSPGSTDTDMQRTLWVSDDAEQQRIRGFAEQFKLGIPLGKIARPQDIANTILFLASDLACHVTLQDIVVDGGSTLGA

SEQ ID NO: 91804 - protein, 251 aa, Klebsiella sp.
  misc_feature (1)..(251): tr|A0A4S5DKK9|A0A4S5DKK9_9ENTR 2,3-dihydro-2,3-dihydrox ybenzoate dehydrogenase OS=Klebsiella sp. Z2 OX=2561928 GN=dhbA PE=4 SV=1
MMAFDFTGKTVWVTGAGKGIGYATALAFVEAGAQVTGFDLAFPHGEYPFATETLDVADAAQASDVCGHLLSSLERLDVLVNAAGILRMGATDQLSPEDWQQTFAVNVGGAFNLFQQTMGQFRRQQGGAIVTVASDAAHTPRIGMSAYGASKAALKSLALTVGLELAGSGVRCNLVSPGSTDTDMQRTLWTSDDAEQRRIRGFGEQFKLGIPLGKIARPQEIAATVLFLASDAASHITLQDIVVDGGSTLGA

SEQ ID NO: 91805 - protein, 251 aa, Klebsiella variicola
  misc_feature (1)..(251): tr|A0A4S4HUE3|A0A4S4HUE3_KLEVA 2,3-dihydro-2,3-dihydrox ybenzoate dehydrogenase OS=Klebsiella variicola OX=2443 66 GN=dhbA PE=4 SV=1
MAALDFNGQTVWVTGAGKGIGYATALAFVEAGANVTGFDLAFAGAGYPFATETLDVADAGQVRDVCARLLNNIERLDVLVNAAGILRMGATDQLSAEDWQQTFAVNVGGAFNLFQQTMAQFRRQRGGAIVTVASDAAHTPRIGMSAYGASKAALKSLALTVGLELAGSGVRCNLVSPGSTDTDMQRTLWVSDDAEQQRIRGFGEQFKLGIPLGKIARPQEIANTILFLASSHASHITLQDIVVDGGSTLGA

SEQ ID NO: 91806 - protein, 251 aa, Kluyvera ascorbata
  misc_feature (1)..(251): tr|A0A378GM70|A0A378GM70_9ENTR 2,3-dihydro-2,3-dihydrox ybenzoate dehydrogenase OS=Kluyvera ascorbata OX=51288 GN=entA PE=4 SV=1
MAGFDFNGQTVWVTGAGKGIGHATALAFVDAGAKVTGFDLAFNGEHYPFATEVLNVADAQQVAQVCERLLATTERLDVLVNAAGILRMGATDALSLDDWQQTFAVNVGGAFNLFQQTMAQFRRQQGGAIVTVASDAAHTPRIGMSAYGASKAALKSLALTVGLELSSAGVRCNIVSPGSTDTDMQRVLWVSDDAEQQRIRGFGEQFKLGIPLGKIARPQEIANTILFLASNCASHITLQDIVVDGGSTLGA

SEQ ID NO: 91807 - protein, 251 aa, Kluyvera cryocrescens
  misc_feature (1)..(251): tr|A0A2X3EC21|A0A2X3EC21_KLUCR 2,3-dihydro-2,3-dihydrox ybenzoate dehydrogenase OS=Kluyvera cryocrescens OX=580 GN=entA PE=4 SV=1
MAGLDFNGQTVWVTGAGKGIGHATALAFVEAGATVTGFDLAFDGEDYPFATEVLDVADAQQVAQVCERVLAKTERLDVLVNAAGILRMGATDTLSLADWQQTFAVNVGGAFNLFQQTMAQFRRQQGGAIVTVASDAAHTPRMGMSAYGASKAALKSLALTVGLELAGAGVRCNIVSPGSTDTDMQRVLWVSDDAEQQRIRGFAEQFKLGIPLGKIARPHEIANTILFLASSSASHITLQDIVVDGGSTLGA

SEQ ID NO: 91808 - protein, 251 aa, Kluyvera georgiana
  misc_feature (1)..(251): tr|A0A1B7JGE2|A0A1B7JGE2_9ENTR 2,3-dihydro-2,3-dihydrox ybenzoate dehydrogenase OS=Kluyvera georgiana ATCC 5160 3 OX=1354264 GN=M989_03976 PE=4 SV=1
MTGFDFRGQTVWVTGAGKGIGYSTALAFVAAGAQVTGFDLAFDGEDYPFATEVLDVADAQQVAQVCERLLAGAERLDVLVNAAGILRMGATDALSQADWQQTFAVNVGGAFNLFQNTMAQFRRQKGGAIVTVASDAAHTPRIGMSAYGASKAALKSLALTVGLELASAGVRCNIVSPGSTDTDMQRVLWVSDDAEQQRIRGFAEQFKLGIPLGKIAHPQEIASTILFLASHSASHITLQDIVVDGGSTLGA

SEQ ID NO: 91809 - protein, 251 aa, Kluyvera intermedia
  misc_feature (1)..(251): tr|A0A3S4EE40|A0A3S4EE40_KLUIN 2,3-dihydro-2,3-dihydrox ybenzoate dehydrogenase OS=Kluyvera intermedia OX=61648 GN=entA PE=4 SV=1
MAGFDFSGQTVWVTGAGKGIGYSTALAFVEAGAKVTGFDLAFGGEDYPFATEVVDVADAQQVAQVCERLLAKTERLDVLVNAAGILRMGATDALSQADWQQTFAVNVGGAFNLFQQTMAQFRRQQGGAIVTVASDAAHTPRIGMSAYGASKAALKSLALTVGLELASYGVRCNIVSPGSTDTDMQRVLWVSDDAEQQRIRGFAEQFKLGIPLGKIARPQEIANTILFLASDCASHITLQDIVVDGGSTLGA

SEQ ID NO: 91810 - protein, 235 aa, Kocuria rosea
  misc_feature (1)..(235): tr|A0A3P8JZA8|A0A3P8JZA8_KOCRO 2,3-dihydro-2,3-dihydrox ybenzoate dehydrogenase OS=Kocuria rosea OX=1275 GN=dhb A_2 PE=4 SV=1
MSTSSGARTAVVAGATSASGVALTHALLACGYTVVAVGSSAGRLETALAGLDGVDRRVCDLTDEAAVSSLAARLQADHGGVDALFHLVGGWRGGTGITTQTTEDYDALHRSVFTTLFNTSRAFYDQLAARGGRLAAVSATAVASPTAPNASYAAVKASVDAWLQAVAHGFSKDGTAAAATAVVVKALLDDRMRAEHPERTFPGYTHVADLARILVSLPGRPPAEINGARIDAVRG

SEQ ID NO: 91811 - protein, 313 aa, Komagataeibacter europaeus
  misc_feature (1)..(313): tr|A0A0M0EK27|A0A0M0EK27_KOMEU 2,3-dihydro-2,3-dihydrox ybenzoate dehydrogenase OS=Komagataeibacter europaeus O X=33995 GN=entA1 PE=4 SV=1
MTRHWTIKQAPRMDGHLALVTGATGGLGYQTALGLASRGARVMLAGRNPDKGLAALTRLQHDAPGADATFRLLDVASLDSIATFARELAAETDRLDILVNNAGVMGTPRRLETRDGFELQFGTNFLGPFALTARLRPLLCAAPQGGRVVTVASLAALTGQIVFDDLQGRRRYAPFRAYRQSKLADLILALELDRQARTHGWPLHSIAAHPGWAMTDIAASRLNTKQGLQERLTRFGAIWAFRLMGQSAAHGALPIEFAAMAPEARDGGYYGPGGRGERRGHVAEAFIPPAARDLTIARRLWQVAERLTGTSLS

SEQ ID NO: 91812 - protein, 304 aa, Komagataeibacter saccharivorans
  misc_feature (1)..(304): tr|A0A347W8C3|A0A347W8C3_9PROT 2,3-dihydro-2,3-dihydrox ybenzoate dehydrogenase OS=Komagataeibacter saccharivor ans OX=265959 GN=entA PE=4 SV=1
MRKWTTSDIPDIRGRSFVVTGTGGLGFEDALALAGAGATVILAGRNPAKGSGAVARIKREAPKADISFEALDLADLASIAAFGERLRSQRDHLDVLINNAGVMMPPTRKVTSDGFELQFGTNYLGHFALTAHLLPLLRKGDHPRVVTLSSIAARDGRIAFDDLQATRNYKPMPVYSQSKLACLMFALELQRRSEAGNWGITSIAAHPGISRTDLLPNGAGASSILGLARRILWFLFQPAAQGALPTLFAATSSEAKGGCYYGPDKLSETRGYPTAAKIPPVALDRQDAARLWDISEQLTHVQFG

SEQ ID NO: 91813 - protein, 200 aa, Kordia sp.
  misc_feature (1)..(200): tr|A0A345H140|A0A345H140_9FLAO 2,3-dihydro-2,3-dihydrox ybenzoate dehydrogenase OS=Kordia sp. SMS9 OX=2282170 G N=entA PE=4 SV=1
MKILIIGGNGTIGKKLTEYFRQQHEVFIAGRTTGDVTVDISNSQSIQKMFDQVGTLDAIICAAGEATWKPFDELSEEDYYVGFKSKLMGQVNLVRIGQNYLNKGGSITLTTGILADEPVPMTASAAMVNGAIHSFVKAVILELEGNIRVNVVSSGLVEDAVEKYDAYFPGHNPIAMQKVVNAYRKSVDGRQTGEIIRIYN

SEQ ID NO: 91814 - protein, 251 aa, Kosakonia cowanii
  misc_feature (1)..(251): tr|A0A410KFX3|A0A410KFX3_9ENTR 2,3-dihydro-2,3-dihydrox ybenzoate dehydrogenase OS=Kosakonia cowanii OX=208223 GN=dhbA PE=4 SV=1
MASLDFSGRSVWVSGAGKGIGYATALAFVEAGAQVTGFDLAFNGVHYPFACETLDIADAAQVAAVSERLLANNAPLDVLVNAAGILHMGATDALSDKEWQQTFTVNVGGAFNLFRQTMAHFRRQQRGAIVTVCSDAAHTPRIGMSAYGASKAALKSLALTVGLELAASHVRCNIVSPGSTDTDMQRTLWVSDDAEQQRIRGFGEQFKLGIPLGKIARPQEVANTILFLASDLASHITLQDIVVDGGSTLGA

SEQ ID NO: 91815 - protein, 251 aa, Kosakonia radicincitans
  misc_feature (1)..(251): tr|A0A5C1PDB1|A0A5C1PDB1_9ENTR 2,3-dihydro-2,3-dihydrox ybenzoate dehydrogenase OS=Kosakonia radicincitans OX=2 83686 GN=dhbA PE=4 SV=1
MASLDFTGKIVWVTGAGKGIGYATALAFVAAGAQVTGFDLAFPGRDYPFSCETVDIADAAQAQAACKRLLAQNDRLDVLVNAAGILHMGATDALSAEAWQRTFAVNVGGAFNLFQQTMAQFRRQQGGAIVTVASDAAHTPRIGMSAYGASKAALKSLTLTVGLELAASRVRCNVVSPGSTDTDMQRTLWVSDDAEQQRIRGFGEQFKLGIPLGKIARPQEVANTVLFLASDLASHITLQDIVVDGGSTLGA

SEQ ID NO: 91816 - protein, 251 aa, Kosakonia sp.
  misc_feature (1)..(251): tr|A0A3G9BN52|A0A3G9BN52_9ENTR 2,3-dihydro-2,3-dihydrox ybenzoate dehydrogenase OS=Kosakonia sp. CCTCC M2018092 OX=2492396 GN=dhbA PE=4 SV=1
MASLDFSGRSVWVSGAGKGIGYATALAFVEAGAQVTGFDLAFNGEHYPFACETLDIADAAQVAAVCERLLSNNAPLDVLVNAAGVLHMGATDALSDKEWQQTFAVNVGGAFNLFRQTMAHFRRQQRGAIVTVCSDAAHTPRIGMSAYGASKAALKSLALTVGLELAASHVRCNIVSPGSTDTDMQRTLWVSDDAEQQRIRGFGEQFKLGIPLGKIARPQEVANTILFLASDLASHITLQDIVVDGGSTLGA

SEQ ID NO: 91817 - protein, 251 aa, Kosakonia sp.
  misc_feature (1)..(251): tr|A0A4R0HV40|A0A4R0HV40_9ENTR 2,3-dihydro-2,3-dihydrox ybenzoate dehydrogenase OS=Kosakonia sp. WCHEs120001 OX =2529380 GN=dhbA PE=4 SV=1
MASLDFTGNIVWVTGAGKGIGYATAKAFVEAGAHVTGFDLAFGGTDYPFSCEVLDVADAGQVQAVCQRLLMQSERLDVLVNAAGVLHMAATDELTAQAWQNTFAVNVGGAFNLFQQTMAQFRRQQSGAIVTVASDAAHTPRIGMSAYGASKAALKSLALSVGLELAASRVRCNIVSPGSTDTDMQRLLWLSDDAEQQRIRGFGEQFKLGIPLGKIARPQEVANTILFLASDLASHITLQDIVVDGGSTLGA

SEQ ID NO: 91818 - protein, 262 aa, Kushneria phyllosphaerae
  misc_feature (1)..(262): tr|A0A2R8CJR0|A0A2R8CJR0_9GAMM 2,3-dihydro-2,3-dihydrox ybenzoate dehydrogenase OS=Kushneria phyllosphaerae OX= 2100822 GN=dhbA PE=4 SV=1
MSGEFQDDHIVITGAARGIGATLAQDLLEQGASVALLDSLEDTLNDTATRLGEAFGSERVSTYVVDVSDSTAVDKAIAEIEAHAPITHLAHVAGVLQMGRVTELTDAQWLHALNINTTGVFNVTRAVARRMSERQKGAIVVVGSNAADTPRQAMGAYCASKAATHQLVRCLGLEMAEHNVRCNIVSPGSTDTDMQRGMWIDDSGRDNVIRGSLEGWKLGIPLRRIAEPGDVSEAIRFLLSDRARHITLHDMRIDGGATLGIR

SEQ ID NO: 91819 - protein, 251 aa, Labrenzia aggregata
  misc_feature (1)..(251): tr|A0A0M6YAX8|A0A0M6YAX8_9RHOB 2,3-dihydro-2,3-dihydrox ybenzoate dehydrogenase OS=Labrenzia aggregata OX=18730 4 GN=entA PE=4 SV=1
MSTRQFADKRVFVTGAASGIGRRIAERFCDEGATVLGLDRQAGDNTLPFRILTADLADARQVEKISSGLVADRWYPDILVNAAGVLRTGAAEDLSLEDWQACMNVNVSGPFYLLRQWIPVFKERQSGAIVNIASNAAHVPRTGMTAYCASKAAMASLSHCIGLELAPFGIRCNLVSPGSTDTPMLREMTGGASGYRQLVAGQPDRFKLGIPLQKVATTDDIAETVLFLASDKAGHITLQDIVVDGGATLGA

SEQ ID NO: 91820 - protein, 255 aa, Labrys neptuniae
  misc_feature (1)..(255): tr|A0A5C1W9T4|A0A5C1W9T4_9RHIZ 2,3-dihydro-2,3-dihydrox ybenzoate dehydrogenase OS=Labrys neptuniae OX=376174 G N=dhbA PE=4 SV=1
MTSWNFAGKRVLVTGAAGGIGRCVAERFRAEGARVVGLDLAAPNAGGNGNAEAELIALDITDPRQVDEVCGRILGESECLDILVNAAGVLRLGAAEDLTLDDWQACFGVNVSGAFYLMRRCIPLFKRQRSGVIVNVASNAAHVPRVGMTAYCASKAAMVSLSHCVGLELAPFGVRCNVVSPGSTDTPMLRGMFKNPSDGQRLLAGLPEHFKLGIPLGKLASPEEIADVVLFLASDRSSHVTLQDVVVDGGATLGA

SEQ ID NO: 91821 - protein, 255 aa, Lampropedia puyangensis
  misc_feature (1)..(255): tr|A0A4S8F3R3|A0A4S8F3R3_9BURK 2,3-dihydro-2,3-dihydrox ybenzoate dehydrogenase OS=Lampropedia puyangensis OX=1 330072 GN=E9531_08405 PE=4 SV=1
MQLTGFNNRIALVTGAGGGIGQAVTDALLAAGSTVVACDLTAPSQPNHHHDHFHARALDVRNSVAVNNLVADVEAHIGPIDLGVNVAGVLSNTLVTETSDDAWRQVFAVNCDGVFHVSRALAQRMQARQRGVMVTVSSNAAGVPRHAMAAYAASKAAATMFTRCLGLELAPHGIRCNIVAPGSTLTPMQTGMWADDRGAERVIAGLPEQYKAGIPLRKLATPEDIAHAVLFMLSEQAGHIAMSDLYVDGGATLRA

SEQ ID NO: 91822 - protein, 258 aa, Lampropedia sp.
  misc_feature (1)..(258): tr|A0A4S5BVI4|A0A4S5BVI4_9BURK 2,3-dihydro-2,3-dihydrox ybenzoate dehydrogenase OS=Lampropedia sp. YIM MLB12 OX =2562762 GN=E8K88_01130 PE=4 SV=1
MQLTGFQDRVAFVTGAERGIGLAVASTLLEAGCIVVASDVRLPQLPAALRDKHSRFHAHVLDVRDANAVNALVDLVEERIGPIDLGANVAGVLCNTVVTETSDEAWRQVFAVNCDGVFHVCRALAQRMQPRQRGAMVTVSSNAAGVARHAMAAYAASKAAATMFTRCLGLELAPHGIRCNIVAPGSTLTPMQTGMWSDAHGAERVIAGLPEQYKAGIPLRKLATPEDIAHAVMFMLSEQAGHIAMSDLYVDGGATLRA

SEQ ID NO: 91823 - protein, 274 aa, Lautropia sp.
  misc_feature (1)..(274): tr|A0A3R8NSA8|A0A3R8NSA8_9BURK 2,3-dihydro-2,3-dihydrox ybenzoate dehydrogenase OS=Lautropia sp. KCOM 2505 OX=2 490857 GN=dhbA PE=4 SV=1
MNSTSTRRFSGKRVLATGTAQGIGRRIAERFVGEGAEVIGLDRQAPTGSQPGTGGAHESSASPSASASAAALTQLQVDLTDTAAIARVCAQIRQRWDSLDVLVNAAGVLRMGGLDTLSADDWQACLDVNVTGPFHLIQQWAQVLKAQRRGAIVNIASNAAVVPRIGMLAYCTSKAAMAAMSQTVALEMAPFGVRCNIVSPGSTNTPMLAGMLGDPAGQKRLIEGLPEDYKLGIPLGKIATPDDIADAVLFLASDQAGHITMQQIVIDGGATLGA

SEQ ID NO: 91824 - protein, 248 aa, Leclercia adecarboxylata
  misc_feature (1)..(248): tr|A0A514VJ40|A0A514VJ40_9ENTR 2,3-dihydro-2,3-dihydrox ybenzoate dehydrogenase OS=Leclercia adecarboxylata OX= 83655 GN=dhbA PE=4 SV=1
MDFTGKTVWVTGAGKGIGYATARAFAEAGAKVTGFDVAFPQASYPFATEVLNVADAVQVNEVCGRLLATIDRLDVLVNAAGILRMGATDQLSQDHWQETFAVNVGGAFNLFQQTMGQFRRQQGGAIVTVASDAAHTPRIGMSAYGASKAALKSLALTVGLELAGSGVRCNLVSPGSTDTDMQRTLWVSDDAEQQRIRGFGEQFKLGIPLGKIARPEEIASTVLFLASDHASHITLQDIVVDGGSTLGA

SEQ ID NO: 91825 - protein, 250 aa, Leclercia sp.
  misc_feature (1)..(250): tr|A0A0J6MQA2|A0A0J6MQA2_9ENTR 2,3-dihydroxybenzoate-2, 3-dehydrogenase OS=Leclercia sp. LK8 OX=1628210 GN=VK95 _03540 PE=4 SV=1
MGWDFTGKTVWVTGAGKGIGYATALAFAEAGAQVTGFDLAFPQDHYPFTTETLDVADAAQVHEVCGRVLASLERLDVLVNAAGILRMGATDQLSQKDWQDTFAVNVGGAFNLFQQTMGQFRRQQGGAIVTVASDAAHAPRIGMSAYGASKAALKSLALTVGLELAGSGVRCNLVSPGSTDTDMQRTLWKSDDAEQQRIRGFGEQFKLGIPLGKIARPQEIAVTVLFLASDAASHITLQDIVVDGGSTLGA

SEQ ID NO: 91826 - protein, 248 aa, Leclercia sp.
  misc_feature (1)..(248): tr|A0A345CGZ5|A0A345CGZ5_9ENTR 2,3-dihydro-2,3-dihydrox ybenzoate dehydrogenase OS=Leclercia sp. W17 OX=2282309 GN=DVA44_17750 PE=4 SV=1
MDFTGKTVWVTGAGKGIGYTTALAFAEAGAQVTGFDVAFPQASYPFATEVLNVADAVQVNAVCGRLLAGMDRLDVLVNAAGILRMGATDQLSQDDWQQTFAVNVGGAFNLFQQTMGQFRRQQGGAIVTVASDAAHTPRIGMSAYGASKAALKSLALTVGLELAGSGVRSNLVSPGSTDTDMQRTLWKSDDAEQQRIRGFGEQFKLGIPLGKIARPEEIASTVLFLASDHASHITLQDIVVDGGSTLGA

SEQ ID NO: 91827 - protein, 250 aa, Lelliottia nimipressuralis
  misc_feature (1)..(250): tr|A0A4Y8IWX1|A0A4Y8IWX1_9ENTR 2,3-dihydro-2,3-dihydrox ybenzoate dehydrogenase OS=Lelliottia nimipressuralis O X=69220 GN=dhbA PE=4 SV=1
MGFDFTGKTVWVTGAGKGIGYATALAFAEAGAQVTGFDLAFPLGDYPFTTETLDVADDVQVSEVCGRALGTIERLDVLVNAAGILRMGATDQLSQEDWQQTFAVNVGGAFNLFQQTMGQFRRQQGGAIVTVASDAAHTPRIGMSAYGASKAALKSLALTVGLELAGSGVRCNLVSPGSTDTDMQRTLWKSDDAEQQRIRGFGEQFKLGIPLGKIARPQEIASTVLFLASDAASHITLQDIVVDGGSTLGA

SEQ ID NO: 91828 - protein, 251 aa, Litoreibacter sp.
  misc_feature (1)..(251): tr|A0A5B8IXS9|A0A5B8IXS9_9RHOB 2,3-dihydro-2,3-dihydrox ybenzoate dehydrogenase OS=Litoreibacter sp. LN3S51 OX= 2599296 GN=dhbA PE=4 SV=1
MTFGLHGKRVLLTGAGGGIGHAVASAFHTEGAHVIATDRDRPTELPDAIRREAMDVTDSAAVDRLVTRIVAEDGPIDIGLSVAGVLSTTRVQDTSDAEWRRVFAVNTDGVFHLCRALARVMQPRGKGAIVVVSSNAAGIPRHAMAAYAASKAATTMFTRCLGLELAPHGIRCNIVAPGSTMTPMQTGMWPDEHGGAAVIRGSLETFKSGIPLGKIATPEEIADAVLFLASDRASHITMSDLYVDGGATLRG

SEQ ID NO: 91829 - protein, 252 aa, Lonsdalea populi
  misc_feature (1)..(252): tr|A0A3N0USD3|A0A3N0USD3_9GAMM 2,3-dihydro-2,3-dihydrox ybenzoate dehydrogenase OS=Lonsdalea populi OX=1172565 GN=dhbA PE=4 SV=1
MSLEAEFRGKQVWVTGAGRGIGYVTACRFALAGADVTGFDVAFDEADAPFLRRTLDISDAVAVADSCGELLAHTPRLDVLVNGAGILRMGATETLSQQDWLDCIGVNAGGAFNLFQATLPQFQRQRAGAIVSIGSNAAHVPRVGMAAYCASKAALRSLCLTVGLELAPYGVRCNLISPGSTDTPMQRSLWHAPDAEQRTIEGFPDHYKLGIPLRKIARPEDIADAVLFMASSRAGHITLQDIVIDGGATLGA

SEQ ID NO: 91830 - protein, 251 aa, Luteimonas sp.
  misc_feature (1)..(251): tr|A0A4Z1R1V5|A0A4Z1R1V5_9GAMM 2,3-dihydro-2,3-dihydrox ybenzoate dehydrogenase OS=Luteimonas sp. 1626 OX=25083 25 GN=E4582_01055 PE=4 SV=1
MHLTGFEGRIALVTGAAGGIGAAVVTLLRASGAIVVATDLEAPASEANVHAFALDVTDSAAVDALVARVEAGIGPIDLAAHVAGVLSTTSVAETSDAEWRRTFAVNTDGVFHVGRALARVMAPRRRGALVVVGSNAAGIPRQAMAAYAASKAAATMFVRCLGLELAPHGVRCNVVAPGSTRTSMQTGMWADADGEARVIAGTLENFKSGIPLGKIAEPADIAHAVMFLLSAQAGHIAMGDLYVDGGATLRA

SEQ ID NO: 91831 - protein, 253 aa, Luteimonas terrae
  misc_feature (1)..(253): tr|A0A4R5UFI0|A0A4R5UFI0_9GAMM 2,3-dihydro-2,3-dihydrox ybenzoate dehydrogenase OS=Luteimonas terrae OX=1530191 GN=E2F49_06295 PE=4 SV=1
MQLTGFDGKIALVTGAAGGIGAALVRLLRQSGAIVVATDRDAPAIDDVEGIRAHALDVTDANAVDALVARIESGVGPIDLLVNVAGVLSTSAVLDLSADEWRRTFAVNTDGVFHVSQAVARVMTPRRRGAMVTVSSNAAGIPRQNMAAYAASKAATTMFVRCLGLELAPLGIRCNIVAPGSTRTPMQTGMWTDAGGEARTIAGTLETFKSGIPLGKLAEPEDIASAVMFLLSDQAGHIAMSDLYVDGGATLRA

SEQ ID NO: 91832 - protein, 240 aa, Luteococcus japonicus
  misc_feature (1)..(240): tr|A0A1R4KGE6|A0A1R4KGE6_9ACTN 2,3-dihydro-2,3-dihydrox ybenzoate dehydrogenase of siderophore biosynthesis OS= Luteococcus japonicus LSP_Lj1 OX=1255658 GN=FM114_14165 PE=4 SV=1
MPGPVLITGAGGGIGSALVELLRRRGIPVVTTDLGGAVDHRCDLTDRSAVEAMVDRVEEEAGPLAGLAHVAGGLAAGSLLDGGLDELPRLLAVNPLATGHVLVAVGRRMRERGDGAIVVVASNAARVPRTRLGAYGASKAAVTSLTRSVGLELAEYGVRCNVVHPGSTDTPMLRESWAGGEERAARSATLAGDLTQHRLGIPLRRIAEPSDIAESLAFLLSPAARHITLAELVVDGGATL

SEQ ID NO: 91833 - protein, 264 aa, Lysobacter capsici
  misc_feature (1)..(264): tr|A0A108U5E1|A0A108U5E1_9GAMM 2,3-dihydro-2,3-dihydrox ybenzoate dehydrogenase of siderophore biosynthesis OS= Lysobacter capsici AZ78 OX=1444315 GN=AZ78_0413 PE=4 SV =1
MSGADTGDFAGRVAVVTGAAQGIGAATARRLAGEGAVLALIDRDADSLAGLVAQLRAGGTTVWARALDLCDAAAVETAMAEIEHELGAIEHLAHVAGILRVGDCLQLDPDDWDACMAVNARAVFTTTRAVARSMQARGRGSIVAVGSNAAATPRVGMAAYAASKAAASQYLRCLALELAPFGVRCNLVSPGSTDTAMQRAFADDEQARRDILMGVAERYRLGIPLQRIADPDDIAEAICFLLSDRARHITLHDLRVDGGATLDA

SEQ ID NO: 91834 - protein, 266 aa, Lysobacter enzymogenes
  misc_feature (1)..(266): tr|A0A3N2RF78|A0A3N2RF78_LYSEN 2,3-dihydro-2,3-dihydrox ybenzoate dehydrogenase OS=Lysobacter enzymogenes OX=69 GN=D9T17_15205 PE=4 SV=1
MNARQDGAGEFAGRVAVVVGAAQGIGAATAARLAGEGARLALIDRDGARLQATALALRGQGAQVSAQACDVADIGAVEAAVARIEDELGPIAHLAHVAGILRVGAAVELDPDDWDACMAVNARGVFATTRAVAARMRERRAGSIVAVGSNAAAAPRTGMSAYAASKAAATQYLRCLALELAPCGVRCNIVSPGSTDTAMQRAFAADEAARERILRGDGERFRIGIPLGRIAEPDDVAEAICFLLSDRARHITLHDLRVDGGATLDA

SEQ ID NO: 91835 - protein, 260 aa, Lysobacter maris
  misc_feature (1)..(260): tr|A0A2U9T9V2|A0A2U9T9V2_9GAMM 2, 3-dihydroxybenzoate-2 , 3-dehydrogenase OS=Lysobacter maris OX=1605891 GN=C9I 47_0576 PE=4 SV=1
MNAQSGEFAGHLALVTGAASGIGAAVARMLATRGAGLALIDRDADGLRALAATLPVDATCLTVDVVDAAAVERAVDAIEADRGPLDHLAHVAGILRIGDALEMAPDDWDACMAVNARAVFGTTRAVARRMRERRRGSIVVVGSNAATTPRAGMAAYAASKAAASAYLRCLALELAPHGVRCNLVSPGSTDTPMQQALAGSAQARQAILDGVPERYRLGIPLGRIAEAADVAEAVCFLLGERARHIVMHDLRVDGGATLDA

SEQ ID NO: 91836 - protein, 267 aa, Lysobacter sp.
  misc_feature (1)..(267): tr|A0A371JZX3|A0A371JZX3_9GAMM 2,3-dihydro-2,3-dihydrox ybenzoate dehydrogenase OS=Lysobacter sp. zong2l5 OX=22 93254 GN=DX914_12960 PE=4 SV=1
MSASPPLSEFDGRLILVTGAAQGIGAATALRLGASGARLALFDRDGDALSHTLAQLQAAGVRAQAWTVDLADAAATRAAIAEVEQDGGAIEHLAHVAGVLRTGALLDGADALADWDACMAVNARALVGIAQALAPAMARRRRGSIVVVGSNAASAPRIGMAAYAASKAAASQYLRCLALELAPHGVRCNLVSPGSTDTPMQRAFAADEAARNAILGGDAARFRLGIPLGRIAAAEDVAEAVCFLLSERARHITLHDLRVDGGATLDA

SEQ ID NO: 91837 - protein, 258 aa, Lysobacter sp.
  misc_feature (1)..(258): tr|A0A3M8SY69|A0A3M8SY69_9GAMM 2,3-dihydro-2,3-dihydrox ybenzoate dehydrogenase OS=Lysobacter sp. ZS60 OX=13273 43 GN=EER27_08430 PE=4 SV=1
MEFRHRTVLVTGAAQGIGAATAQMLARQGAALALLDRDEERLHDTAASLRALGVPVFAQALDLTDIAALDDAVATIEREFGAIRHLAHVAGILRTGEVLDSRLEDWDACMAINARAVYGSTRAVARVMAARGHGSIVVVGSNAATVPRVGMAAYAASKAAASQYLRCLALELAPLGIRCNLVSPGSTDTAMQRAFAGDAQARRDILDGVPQRWRLGIPLRRIADPQDIAEAVCFLLSDRARHITLHDLRVDGGATLDA

SEQ ID NO: 91838 - protein, 250 aa, Magnetospira sp.
  misc_feature (1)..(250): tr|W6K7Q9|W6K7Q9_MAGSQ Putative Short-chain dehydrogena se/reductase SDR OS=Magnetospira sp. (strain QH-2) OX=1 288970 GN=MGMAQ_2182 PE=4 SV=1
MTDTSSPSTGRLAGRIALITGASRGIGLAVAKRFAAEGAHLVLIARTQGALEELDDDLRAAGHEAPTLVPLDLLDFDSIDQVGAALYQRFGKLDILVGNAGLLESLTPMHQIDPKEWDKVMGVNLTANFRLIRAMDPLLRQSDAGRAIFLSSGTTKAPRVYWATYGVSKMALEYMVRSYALEVEKITNIKANLIDPGSTRTRMRASAYPGEDPDSLKTPEMIAGTFVEMASPEWESTGEVVRLDASGKPE

SEQ ID NO: 91839 - protein, 250 aa, Mangrovibacter sp.
  misc_feature (1)..(250): tr|A0A071M1D1|A0A071M1D1_9ENTR 2,3-dihydroxybenzoate-2, 3-dehydrogenase OS=Mangrovibacter sp. MFB070 OX=1224318 GN=DT73_01130 PE=4 SV=1
MNPEFKDKTVWVTGAGKGIGYATAQAFAAAGANVTGFDLAFPLNNYAFSTVMMDVADDQQVSEVCRGQLASIQRLDVLVNAAGILTMGATDELTPEAWHRTFAVNVGGAFNLFRHTMAQFRHQKGGAVVTVASDAAHTPRIGMSAYGASKAALKSLAQTVGLELAPFGVRCNLVSPGSTDTDMQRTLWLSDDAEQQRIRGFAEQFKLGIPLGKIARPEEIANTVLFLASELASHITLQDIVVDGGSTLGA

SEQ ID NO: 91840 - protein, 285 aa, Marinomonas mediterranea
  misc_feature (1)..(285): tr|F2JZ72|F2JZ72_MARM1 2,3-dihydro-2,3-dihydroxybenzoat e dehydrogenase OS=Marinomonas mediterranea (strain ATC C 700492 / JCM 21426 / NBRC 103028 / MMB-1) OX=717774 G N=Marme_2827 PE=4 SV=1
MPVAQTVTHRPAAPDPLDFTGKTVWVTGAGRGIGREVALQFVERGANVVGFDLQFEKADVTTSPLEALAQSKEQSSEKERGTLINVELDISDESAVDKQVSRLLKESSALDILVNAAGILRMGAVEDTSLDDFKKCFDVNAGGVFLMLRSTIPHFKKQKSGCIVTISSNAAKVPRANMAAYCASKAALSALNNTAALELAPYGVRCNLVCPGSTDTPMQRMLWTSDDAESKTIQGFPEQYKLGIPLGKIAQPSEIAQTVLFFASPMASHITMQDVVVDGGATLNA

SEQ ID NO: 91841 - protein, 251 aa, Marinomonas posidonica
  misc_feature (1)..(251): tr|F6CU81|F6CU81_MARPP 2,3-dihydro-2,3-dihydroxybenzoat e dehydrogenase OS=Marinomonas posidonica (strain CECT 7376 / NCIMB 14433 / IVIA-Po-181) OX=491952 GN=Mar181_2 162 PE=4 SV=1
MSLLDFAGKTVWVTGAGRGIGLEVANQFLSLGANVIGFDLAFDETSYEFECITLDISDEQRVKSLVDHALLKHPVLDVLVNAAGILRMASVEETSWQDFSDCINVNAGGAFLMIKHTMARFKQQRHGAIVTVSSNAAKVPRTNMMAYCASKAALSSISHTAGLELAPYGVRCNLVCPGSTDTPMQRQLWQDEKAEANTIKGFPEQYKLGIPLGKIAAPSDIAQVVLFFASSMANHITMQDVVVDGGATLNV

SEQ ID NO: 91842 - protein, 252 aa, Marinomonas profundimaris
  misc_feature (1)..(252): tr|W1RQ32|W1RQ32_9GAMM 2,3-dihydroxybenzoate-2,3-dehydr ogenase OS=Marinomonas profundimaris OX=1208321 GN=D104 _13825 PE=4 SV=1
MMNPLDFSNKTVWVTGAGRGIGLEVANQFAEQGAKVIGFDLAFDGGHYGFDCIVLDISDDRAVKQVVERVITKDPVLDVLVNGAGILRLGSLETTTLEDFQHCFNVNAGGPFLMIKHTMATFKRQRQGAIVTISSNAAKVPRQNMAAYCASKAALSALSHTAGLELAPYGVRCNVVCPGSTDTPMQRMLWSTDDAEANTIKGFPEQYKLGIPLGKIAQPSDIAQTVLFFASSMSNHITMQDVVADGGATLNA

SEQ ID NO: 91843 - protein, 276 aa, Massilia plicata
  misc_feature (1)..(276): tr|A0A4V1AUH7|A0A4V1AUH7_9BURK 2,3-dihydro-2,3-dihydrox ybenzoate dehydrogenase OS=Massilia plicata OX=321984 G N=dhbA PE=4 SV=1
MLADQKNLGAAASPRAPEPPALQFEGRQVWVTGAGRGIGHQIALAFRQLGARVTGIDRSFDREEAGPAGKRYPFRTVSMDITDRPRIATVCQQLLTEMPRVDVLVNAAGVLRLGTLDSTTVEDWQASFDINVSGVFYLMRELMPQFRAQGAGSIVNVASNAARVPRMNMLAYCASKSALVGMSHCAALELAQYGVRCNVVSPGSTDTPMLRSMLPDEAGMRRTIEGLPEQFKLGIPLRKIATAREVANTVLFLASDLASHITMQELVVDGGATLAA

SEQ ID NO: 91844 - protein, 260 aa, Massilia sp.
  misc_feature (1)..(260): tr|A0A430HGB8|A0A430HGB8_9BURK 2,3-dihydro-2,3-dihydrox ybenzoate dehydrogenase OS=Massilia sp. SOD OX=2495579 GN=EJB06_23180 PE=4 SV=1
MTNQFEGKVALVTGAAQGIGAAVARKLAAGGAAVAVFDVKAGAVEDMAATLRASGTRAIGIAVDVTDSAAVNAAVAQVERELGEIDVLVNVAGILRMGSILDCSDDDWERTFAVNAGGVFRLCRAVAAGMVERKRGAIVTVASNASSVPRMQMGAYAASKAASTQFMRCLGLELAPHGIRCNVVSPGSTDTEMQRQLWNGADGSQGVIGGSLETFRLGIPLKRIATPEDIAEAVLYLASDSARHITMHDLRIDGGATLGG

SEQ ID NO: 91845 - protein, 276 aa, Massilia sp.
  misc_feature (1)..(276): tr|A0A344JNH3|A0A344JNH3_9BURK 2,3-dihydro-2,3-dihydrox ybenzoate dehydrogenase OS=Massilia sp. YMA4 OX=1593482 GN=DPH57_08265 PE=4 SV=1
MLADQKNLGTASAERPQAPPALQFEGRQVWVTGAGRGIGHQIALAFRQLGARVVGIDRAFDREEAGPAGKRYPFKTVCMDVTDRARIAVVCQQLLTEMPRIDVLVNAAGVLRLGTLDSTTVEDWQASFDINVSGVFYLLRELMPQFRKQGAGSIVNVASNAARVPRMNMLAYCASKSALVGMSHCAALELAQYGVRCNVVSPGSTDTPMLRSMLPDEQGMRRTIEGLPEQFKLGIPLRKIATAREVANTVLFLASDLASHITMQEVVVDGGATLAA

SEQ ID NO: 91846 - protein, 244 aa, Meiothermus granaticius
  misc_feature (1)..(244): tr|A0A399F7K5|A0A399F7K5_9DEIN 2,3-dihydro-2,3-dihydrox ybenzoate dehydrogenase OS=Meiothermus granaticius NBRC 107808 OX=1227551 GN=entA PE=4 SV=1
MELRGQTLILTGASRGIGRALALELARAGANLVLNARSEEALEQVTREVQGLGVQARAVVGDAAQDATAQFAVKAAKVIGGFAGFIHNAGVLHPGPRLWELSEAEFDQVFATHVKAGFLLAKYAFPNLRRQGSGIAVFVGSGAAHHPRVGWGAYGAAKAAEHYLAFNLAQEAPEITTLVYSPGTVDTEMQRQGRAAKGEIAQMFQGFQREGRLIQPEETAAALVRILAGEPRRFHGKIATYNDA

SEQ ID NO: 91847 - protein, 244 aa, Meiothermus roseus
  misc_feature (1)..(244): tr|A0A399EUA0|A0A399EUA0_9DEIN 2,3-dihydro-2,3-dihydrox ybenzoate dehydrogenase OS=Meiothermus roseus OX=164411 8 GN=entA PE=4 SV=1
MSLKQQTWILTGASRGIGRAVALELAHAGANLVLGARNPQALEAVAQECRALGVQAKSVAGDAALDQTAQFLVKAAKVIGNFAGFIHNAGVLHPGPTLWELSEAQFDEVFGANVKAAFQLARYAYPNLIRRGGGVAVFVGSGAAKRNVAGWGAYGAAKAAEHYLAAQLALEEPRITCFVYSPGPVDTDMQRQGREAPGPIATMFQGFKEQGHLLSPEQSARALVRLLQTDPHRFHGKIATYNDA

SEQ ID NO: 91848 - protein, 252 aa, Mesorhizobium sp.; identical to SEQ ID NO: 91559
  misc_feature (1)..(252): tr|A0A4S0VQT3|A0A4S0VQT3_9RHIZ 2,3-dihydro-2,3-dihydrox ybenzoate dehydrogenase OS=Mesorhizobium sp. M00.F.Ca.E T.170.01.1.1 OX=2500524 GN=EN813_003215 PE=4 SV=1

SEQ ID NO: 91849 - protein, 260 aa, Methanothrix soehngenii
  misc_feature (1)..(260): tr|F4BT48|F4BT48_METSG 2,3-dihydro-2,3-dihydroxybenzoat e dehydrogenase (Coldshock protein CSI14) OS=Methanothr ix soehngenii (strain ATCC 5969 / DSM 3671 / JCM 10134 / NBRC 103675 / OCM 69 / GP-6) OX=990316 GN=MCON
MGRVDGRVAIITGSTYGIGEAIARVLAKEGALSIITGRSREEGRKVVEAINSAGGRSEYYPLDVTDEKRIEEVSKAVYEKYGRIDILVNNAGVAGPNKPTHEYARAEWEWVFDVNVTGAFLCTKYVVPYMQRQKSGNIVYISSIYGIIGAPDLPAYHATKAANRVMAKIDALLYAKDNIRVNSVHPGFIWTPLVDNFLQEQCNKSGLSCEELKKQLDAKHPIGHIGEPDDIAYGVLYLVSDEAKFVTGSELIIDGGYTAT

SEQ ID NO: 91850 - protein, 248 aa, Methylocystis hirsuta
  misc_feature (1)..(248): tr|A0A3M9XL45|A0A3M9XL45_9RHIZ 2,3-dihydro-2,3-dihydrox ybenzoate dehydrogenase OS=Methylocystis hirsuta OX=369 798 GN=D1O30_04540 PE=4 SV=1
MDFSGKQIWVTGAGQGIGYATAAQFAALGGDVVGLDKSFAASNYPFATVRLDVSERDQVQKTCRALLEECPRLDVLVSAAGVLRLGSTEELSFDDWAACMNVNASGPFHLFQQTIPQFKRQRSGAIVSIGSNAAHTPRMLMSAYCASKAALTSLTHCVGLELAPYGVRCNLVSPGSTDTAMQRSMWRSADAEKQVIAGDLGSFKLGIPLGKIAAPEEIASAVVFLASDLASHITLQDLVVDGGATLAA

SEQ ID NO: 91851 - protein, 248 aa, Methylocystis rosea
  misc_feature (1)..(248): tr|A0A3G8M8V1|A0A3G8M8V1_9RHIZ 2,3-dihydro-2,3-dihydrox ybenzoate dehydrogenase OS=Methylocystis rosea OX=17336 6 GN=dhbA PE=4 SV=1
MNFSGKRIWVTGAGQGIGYATAAQFAALGGDVVGLDMTFAGSNYPFAPVRLDVSDRDQVQETCRALLKERPRLDVLVSAAGVLRLGLTEELSLDDWAACMNVNASGPFHLFQHTIPQFKRQRSGAIVSVGSNAAHTPRMLMSAYCASKAALTSLTHCVGLELAPYGVRCNLVSPGSTDTAMQRSMWRSADAEKQVIAGDPGSFKLGIPLGKIAAPEEIASAVVFLASDLASHITLQDLVVDGGATLAA

SEQ ID NO: 91852 - protein, 248 aa, Methylosinus sporium
  misc_feature (1)..(248): tr|A0A549SMU8|A0A549SMU8_METSR 2,3-dihydro-2,3-dihydrox ybenzoate dehydrogenase OS=Methylosinus sporium OX=428 GN=dhbA PE=4 SV=1
MDFTGKRVWVTGAGQGIGFCAATTFVALGANVVGLDRAFAEARYPFRTLVVDIADHAQAERVCAQLLDECGRLDVLVNAAGILRLGATEEVSLEDWRASFDVNVSGAFHLLRHTIAQFKRQRSGAVVIVGSNAAHVPRLSMAAYCASKAALASLTHCVALELAPYGVRCNLVSPGSTDTPMQRSMWRAPDAEQRVIAGNPETFKLGVPLGKIATPQEIANVIAFLASDLASHIVMQDIVVDGGAALTA

SEQ ID NO: 91853 - protein, 254 aa, Microbacterium hydrocarbonoxydans
  misc_feature (1)..(254): tr|A0A0M2HP30|A0A0M2HP30_9MICO 2,3-dihydro-2,3-dihydrox ybenzoate dehydrogenase OS=Microbacterium hydrocarbonox ydans OX=273678 GN=entA_2 PE=4 SV=1
MNITGNTIFIPGATSGIGLALARSLSARGNTVIVGGRRTDLLERIAQETPELRTVAIDTSDADSIRSAAASVLAAHPDLNVLITMAGIMRVEDWTSPEGFLETAEATVTTNLLGPIRLIAAFIEHLRSVPEATIMTVSSGLAFAPLRVTPTYNATKAAIHMLSESVRLQLSGSAVRVVELEPPSVRTALMPGQEESEFAMPLDDFIAEVMTLIETQPDADEIQVENVKFLRYGEARGDYAQVVATLNRLDPHGR

SEQ ID NO: 91854 - protein, 254 aa, Microbacterium oxydans
  misc_feature (1)..(254): tr|A0A3S9WJW1|A0A3S9WJW1_9MICO 2,3-dihydro-2,3-dihydrox ybenzoate dehydrogenase OS=Microbacterium oxydans OX=82 380 GN=entA PE=4 SV=1
MNISGNTIFIPGATSGIGLALALRLRERGNTVIVGGRREDRLATIAGEHPDIHTVRVDTTDASSIEAAAAEVLAAHPGLNVLITMAGVMRAEDWSTPSGFLSAAEETVVTNILGPIRLIAAFVEHLRAQADATIMTVSSGLAFAPLRVTPTYNASKAAIHMLSESLRLQFEGSSVSVLELEPPAVRTALMPGHEDNASAMPLDEFIDEVMALIEAQPDAAEIQVERVKFLRYGEARGDYDQVVATLNRTDPHGR

SEQ ID NO: 91855 - protein, 254 aa, Microbacterium sp.
  misc_feature (1)..(254): tr|A0A0F2C7F4|A0A0F2C7F4_9MICO 2,3-dihydro-2,3-dihydrox ybenzoate dehydrogenase OS=Microbacterium sp. SA39 OX=1 263625 GN=entA PE=4 SV=1
MNITGNTIFIPGATSGIGLALARALRVKGNTVIVGGRRTALLREIVASDPGIHTVQIDTTDADSIRSAASEVLSAHPDLNVIIAMAGVMRVEDWSQPAGFLATAEETITTNVLGPIRLIGAFIEHLRSTPDATIMTVSSGLAFAPLAATPSYNASKAAIHMLSESLRLQLAGTSVKVVELEPPSVQTDLLPGQRDSDFAMPLDSFISEVVGLIEAQPDAAEIQVENVKFLRYGEARGDYDQVVATLNGRDPHGR

SEQ ID NO: 91856 - protein, 63 aa, Microbacterium sp.
  misc_feature (1)..(63): tr|A0A074UFT9|A0A074UFT9_9MICO 2,3-dihydroxybenzoate-2, 3-dehydrogenase (Fragment) OS=Microbacterium sp. SUBG00 5 OX=1504156 GN=HR12_08145 PE=4 SV=1
MMAFDFTGKTVWVTGAGKGIGYATALAFVEAGAQVTGFDLAFPHGEYPFATETLDVADAAQAS

SEQ ID NO: 91857 - protein, 224 aa, Microbacterium trichothecenolyticum
  misc_feature (1)..(224): tr|A0A0M2HBQ4|A0A0M2HBQ4_9MICO 2,3-dihydro-2,3-dihydrox ybenzoate dehydrogenase OS=Microbacterium trichotheceno lyticum OX=69370 GN=dhbA PE=4 SV=1
MPVIAIIGAGPGLGAAVARRFGREGFSIALISRNQSKLDAMAAELNAGGVIARGYAADVRVPTALGEALARAAAELGPITALQYSPLPAREYLKPVLEMTPELALEALQFSALGLIHAVRAVLPAMRGAGDGSVILINGGTSVKARADFAGTSVAFPAESAYGEMLHDALEGEGVRVAQLVIPGSIPKLQLVNGIDDVADRIWDLHAVAGPFRTMLIPLEDGRE

SEQ ID NO: 91858 - protein, 247 aa, Microlunatus phosphovorus
  misc_feature (1)..(247): tr|F5XI88|F5XI88_MICPN 2,3-dihydro-2,3-dihydroxybenzoat e dehydrogenase OS=Microlunatus phosphovorus (strain AT CC 700054 / DSM 10555 / JCM 9379 / NBRC 101784 / NCIMB 13414 / VKM Ac-1990 / NM-1) OX=1032480 GN=dhbA P
MTGAAGGIGRALTTALVRDGYAVGALDADAAGLDELLTAYPLADRARVLPLVADVRRRSEVEAAIEKLAVSFGEPNAVALCSGVLRPARLEATDEADWAWHLAVNATGTFHLLQSVAPRLTTGSSIVLIGSNAASVPRVGMAAYAASKAAAETLVRCAGLELATRGIRCNVIEPGSTDTKMQRDLWPDPAIGQAIAVDGDPAGFRVGIPLGRIADPADVAEVAAFLLSDRARHVTLQTVRVDGGASL

SEQ ID NO: 91859 - protein, 261 aa, Micromonospora sp.
  misc_feature (1)..(261): tr|A0A385AT18|A0A385AT18_9ACTN 23-dihydro-23-dihydroxyb enzoate dehydrogenase OS=Micromonospora sp. B006 OX=220 1999 GN=MicB006_2899 PE=3 SV=1
MELTGIESKVALVTGAGQGIGAAVAGVLARAGAQVAAVDRNAEALTTVVTKLAAEGDSARAYCVDVCDSEAVDALVRRVEDEMGPVAILVNAAGVLHTGRVVELSDRQWRRTFSVNADGVFHVSRAVARRMVGRRRGAIVTVASNAAGVPRTEMAAYAASKAASAQFTRCLGLELSGYGIRCNVVSPGSTDTPMLRAMLGEGADPSAVIEGTPGAYRVGIPLRKLAQPRDVAEAVAYLVSDQAGHVTMHDLYVDGGAALHV

SEQ ID NO: 91860 - protein, 257 aa, Micromonospora sp.
  misc_feature (1)..(257): tr|A0A518W9T2|A0A518W9T2_9ACTN 2,3-dihydro-2,3-dihydrox ybenzoate dehydrogenase OS=Micromonospora sp. HM134 OX= 2583243 GN=FJK98_01255 PE=4 SV=1
MSTTGTALVTGAAGGIGAEVARALARRGTPVAAVDSDADRLRATVDEARSAGLPLTAYPADVRVGAAVRDLVDTVERALGPIDALVNAAGVLRSGEARTLTEEDWQLTFAVNATGVFHTCRAVADRMVPRRRGTIVTVASNAAGTARAGMSAYGASKAAATAFTKALGLEVARYGIRCNVVAPGSTDTPMLAALLPDDAARRSTIGGVPEAYRVGIPLGRIADPADIAAAVLFLISDDARHITMQHLTVDGGATLGV

SEQ ID NO: 91861 - protein, 256 aa, Micromonospora sp.
  misc_feature (1)..(256): tr|A0A4R4UC47|A0A4R4UC47_9ACTN 2,3-dihydro-2,3-dihydrox ybenzoate dehydrogenase OS=Micromonospora sp. KC606 OX= 2530379 GN=E1193_06495 PE=4 SV=1
MEKRVAFVTGSAGGIGAAIARRLAEDDMAVALVDLPSLRLSQVAEVLTDKGMVVCTVPADVSDRAQVRAAVADAERRLGPIDALVNAAGVLRLGKVGELTDDDWAATFAVNAYGVFCTSQAVVERMAPRGRGAVVTVASNAAGTPRMSMAAYCASKSAATMFTKVLGLEMAEHGIRCNVVAPGSTDTPMLRSMWSGGSGPETALAGSPEAYKVGIPLRKLASAEDIADAVAFLLSDAAGHITMHSLTVDGGAALGA

SEQ ID NO: 91862 - protein, 261 aa, Micromonospora sp.
  misc_feature (1)..(261): tr|A0A4R4L8T9|A0A4R4L8T9_9ACTN 2,3-dihydro-2,3-dihydrox ybenzoate dehydrogenase OS=Micromonospora sp. KC723 OX= 2530381 GN=E1165_01915 PE=4 SV=1
MQFREFHDRIALVTGAGSGIGAAVARALAANGATVAALDRDAERLRATVEKIRSDDHRATAYEVDVSDRARVERVVDRVETELGPISYLVNSHGVLHVGEVTALADEQWTECLEVNATGVFLVTRAVVGRMTSRAAGAVVNIASNVVGTARSGMSAYSASKAAVSAFTRCLALEVAPHGIRCNLVAPGSTDTPMLRALWPDGDAVSASIAGRPEAYRVGIPLGKVAQPGEVADAVLYLLSDRASHITMQQLTVDGGATLGV

SEQ ID NO: 91863 - protein, 254 aa, Micromonospora sp.
  misc_feature (1)..(254): tr|A0A2P8AZV0|A0A2P8AZV0_9ACTN 2,3-dihydro-2,3-dihydrox ybenzoate dehydrogenase OS=Micromonospora sp. MH33 OX=1 945509 GN=entA PE=4 SV=1
MNISGNSIFIPGATSGIGLALALELRARGNTVIVGGRRTDLLDTIAAEHPGIDTVEIDTTDPASIDSAAKAVLAKHPDLNVLITMAGIMRIEDWRRPESFLASAEATVTTNLLGPIRLIAAFIEHLRAQPDATIMTVSSGLAFAPLRVTPSYNASKAAIHMLSESLRLQLADTTVKVVELEPPSVRTSLLPGQENSEFGMPLDEFVAEVVALIESQPDATEIQVERVKFLRYGETRGDYDQVVATLNAADPHSD

SEQ ID NO: 91864 - protein, 261 aa, Micromonospora sp.
  misc_feature (1)..(261): tr|A0A505HPG2|A0A505HPG2_9ACTN 2,3-dihydro-2,3-dihydrox ybenzoate dehydrogenase OS=Micromonospora sp. XM-20-01 OX=2583240 GN=FJ969_02545 PE=4 SV=1
MELTGIESRVALVTGAAQGIGAAVAGVLARAGAQVAAVDRNAEALTTVVTKLAAEGDSARAYCVDVCDSDAVDALVRRVEDEIGPVGILVNAAGVLHTGPVVELSDRQWRRTFSVNADGVFHVSRAVARRMVGRRRGAIVTVASNAAGVPRTEMAAYAASKAASAQFTRCLGLELSGYGIRCNVVSPGSTDTPMLRAMLGEGADPSAVIEGTPGAYRVGIPLRKLAQPRDVAEAVAYLVSDQAGHVTMHDLYVDGGAALHV

SEQ ID NO: 91865 - protein, 125 aa, Unknown
  misc_feature (1)..(125): tr|A0A1J5P5U5|A0A1J5P5U5_9ZZZZ 2,3-dihydro-2,3-dihydrox ybenzoate dehydrogenase OS=mine drainage metagenome OX= 410659 GN=entA_4 PE=4 SV=1
MIRQENGGRILFMSSVTGHQAHQNLAAYGMTKAALEMLAKSLVIELSQFQITVNTVAPGATLTERTMEDAGYKNTWSRITPMGRPATVEDVANAVLFLVSAQAGHITGQNIIVDGGWTAVSTSPY

SEQ ID NO: 91866 - protein, 249 aa, Mixta sp.
  misc_feature (1)..(249): tr|A0A506VAZ9|A0A506VAZ9_9GAMM 2,3-dihydro-2,3-dihydrox ybenzoate dehydrogenase OS=Mixta sp. BIT-26 OX=2562439 GN=dhbA PE=4 SV=1
MMPFSGQTVWVTGAGSGIGEQVAMRFVEAGAKVIGFDLAFPRRNPPFTAVTLDLSDPAAVREVCAPLLAAGDLDVLVNGAGILRLGALETISWDRWQQSLNVNAGAAFNLFQLTIPHFQRRRRGNIVSIVSNAAHAPRVNMAVYCASKAAMRSLCLSAGLELAPWGIRCNLVSPGSTLTPMLEKMLGDDPAARQRLIEGLPAQFKLGIPLGKIALPDEIASCVLFLASDAASHITLQDIVIDGGATLGA

SEQ ID NO: 91867 - protein, 258 aa, Moritella sp.
  misc_feature (1)..(258): tr|A0A137SGL7|A0A137SGL7_9GAMM 2,3-dihydro-2,3-dihydrox ybenzoate dehydrogenase OS=Moritella sp. JT01 OX=756698 GN=AKG98_472 PE=4 SV=1
MSLKNKKILLVGAASGIGLSVLDSLLSAGANVTVADKQIDLLKQNSESLFPQYSEQFQCHYLDLADHSSITRSVDIWQEQGAFDHLVCCAGVLHIGALHELPLETVKRTFDINTFGVLALMQAVAKTMKNQRSGSMVIVGSNAANTPRQSIGAYGASKAALHLMVKCIGIELASFGIRCNIVSPGSTDTPMQRQLWTDDYGEPEVIAGDASQFRLGIPLNKLAQPKDIAHAVLFLLSDAAGHITMHDLRVDGGATLDN

SEQ ID NO: 91868 - protein, 263 aa, Mycetocola reblochoni
  misc_feature (1)..(263): tr|A0A1R4IC54|A0A1R4IC54_9MICO 2,3-dihydro-2,3-dihydrox ybenzoate dehydrogenase of siderophore biosynthesis OS= Mycetocola reblochoni REB411 OX=1255698 GN=FM119_00935 PE=4 SV=1
MSADRRQAIVVTGAAGGIGSAIVSAILAGPADHGAARVYALDAHWPDDAPADTADLVRRRIDVTDEEAVASFFDELGERETLRALVNAAGVLATGPAVELDRRTLDRVLAVNVVAVIGASLAAARLMLRQGASAARHRDRSILTVASNAGTIPRAGFAAYGASKAAASQFTRSLGLELGPAGIRCTVLNPGTTRTAMVERMWGGRDRSAEAIAGDPALFRAGIPLGRVAEPEDIASVAAFLIGDGARHITAEEITVDGGATAR

SEQ ID NO: 91869 - protein, 274 aa, Mycobacterium basiliense
  misc_feature (1)..(274): tr|A0A447GJX0|A0A447GJX0_9MYCO 2,3-dihydro-2,3-dihydrox ybenzoate dehydrogenase OS=Mycobacterium basiliense OX= 2094119 GN=dhbA PE=4 SV=1
MPRFQPHPDRRPAIVAGASSGIGAATAVDLAAHGFPVALGARRVEKCQEIAEKIQADGGEAVALPLDVTDANSVKGFVHRATEQLGDIEILVAGAGDTYFGRLHEIDTETFESQVQIHLIGANRLATAVLGGMLERQRGDLIFVGSDVALRQRPHMGAYGAAKAGLLAMVTNLQMELEGTGVRASIVHPGPTKTAMGWSMPVEAVGPALEDWAKWGQARHNYFLRATDIARAITFVTETPRGGFVANIELQPEAPLAATKERQQLKVDEKDLKS

SEQ ID NO: 91870 - protein, 112 aa, Mycobacterium kansasii
  misc_feature (1)..(112): tr|A0A1V3WVP5|A0A1V3WVP5_MYCKA 2,3-dihydro-2,3-dihydrox ybenzoate dehydrogenase domain protein OS=Mycobacterium kansasii OX=1768 GN=dhbA2 PE=4 SV=1
MVTNLQMELEGTGVRASIVHPGPTKTGMGWSLPVESIGPALQDWAKWGQARHNYFLRASDIARAITFVAETPRGGFVVNMELQPEAPLADATDRHQLRVDEKAFVDEGKLDS

SEQ ID NO: 91871 - protein, 275 aa, Mycobacterium tuberculosis
  misc_feature (1)..(275): tr|A0A0T7LAA9|A0A0T7LAA9_MYCTX Oxidoreductase OS=Mycoba cterium tuberculosis OX=1773 GN=dhbA PE=4 SV=1
MPRFEPHPARRTTVVAGASSGIGAATATELAGRGFPVALGARRMDKLAELVDKIRADGGEAVAFPLDVTDPESVKSFVAQTVEALGEVELLVSSAGDMLPGQLHEVSTEAFAEQVQIHLVGANRLATAVLPAMAARRRGDLIFVGSDVGLRQRPHMGAYGAAKAGLAAMVTNLQMELEGTGVRASIVHPGPTLTGMGWQLSAEQVGPMLADWAKWGQARHNYFLRPSDLARAIAFVAETPRGCVVVNMEIQPEAPLRDAPAHRQKLVLGEEGMPG

SEQ ID NO: 91872 - protein, 280 aa, Mycobacterium xenopi
  misc_feature (1)..(280): tr|A0A2X1T5L5|A0A2X1T5L5_MYCXE Short-chain type dehydro genase/reductase OS=Mycobacterium xenopi OX=1789 GN=ent A PE=4 SV=1
MTAIEQFRYDGKRVLVVGGATGMGAAAAQTAAELGAEVVVMDYAPVPYEVAQSVQVDLADRSSIDSALGQVKEPIHAIFSAAGVAEGPKLMRVNFIGHRHLIETMLADGRLPRGSAICFISSVGGIGWESNLPLLQEFLATPDYESADAWVKAHEPEGIIHYGFSKQAINAYVATKAYPFMAKGIRINAICPGPTDTPLARANADLWLTFAQDYRDATGCEIHTPQQMANTMAFLNSGAASGISGVTLLVDNGHVMSSMTGSFAPGKPIIDLIIGRVSLA

SEQ ID NO: 91873 - protein, 255 aa, Mycobacteroides abscessus
  misc_feature (1)..(255): tr|A0A0U0ZLG0|A0A0U0ZLG0_9MYCO Putative short chain deh ydrogenase/reductase OS=Mycobacteroides abscessus OX=36 809 GN=entA PE=4 SV=1
MQISGNTVFIPGATSGIGLELALALQAKGNTVIVGGRRTELLDQIRRDHPGVSTVRIDISDPASIDIAAQQVLTDHPTLNILVTMAGIMRVEDWHHPESFLQSAEEIVTTNVLGPIRLIAAFIEHLQVRPEATIITVSSGLAFAPLKVTPSYNASKAAIHMLSESLRLQLADTRVEVKELLPPAVRTNLMPGQQESEFAMPLKDFIDEVIALLESEPDAHEIQVERVKFLRYGEVRGDYDDVVATLNASDPHARR

SEQ ID NO: 91874 - protein, 252 aa, Mycobacteroides abscessus
  misc_feature (1)..(252): tr|A0A1N5L1K1|A0A1N5L1K1_9MYCO Putative 2,3-dihydro-2,3 -dihydroxybenzoate dehydrogenase OS=Mycobacteroides abs cessus subsp. abscessus OX=1185650 GN=dhbA_2 PE=4 SV=1
MVAVVTGAGGGVGSRVVTTLARRHERVVAVDIDEVAIKQLVEYAADEGLDVIGQILDITDDTAVAVGVSDIESRVGPITALVNGAGVLRTGAAVEFSDADWARTFDVNVRAPFVLSREVARRMIPRRAGSVVTVASNAALVARKGMTAYAASKAAANAFTKSLGLELAEYGIRCNVVAPGSTDTPMLRAMLGDSSDAGLVAGSLGDYKPGIPLGRVAQPQHIADAVAFLLSDQAAHITMHTLVVDGGATLGV

SEQ ID NO: 91875 - protein, 236 aa, Mycobacteroides abscessus
  misc_feature (1)..(236): tr|X8E1A6|X8E1A6_9MYCO 2,3-dihydro-2,3-dihydroxybenzoat e dehydrogenase OS=Mycobacteroides abscessus subsp. bol letii 1513 OX=1299321 GN=dhbA PE=4 SV=1
MTTLARRDERVVAVDIDEVAIKQLVEYAADEGLDVIGQILDITDDTAVAVGVSDIESRVGPITALVNGAGVLRTGAAVEFSDADWARTFDVNVRAPFVLSREVARHMIPRRAGSVVTVASNAALVARKGMTAYAASKAAANAFTKSLGLELAEYGIRCNVVAPGSTDTPMLRAMLGDSSDAGLVAGSLGDYKPGIPLGRVAQPQHIADAVAFLLSDQAAHITMHTLVVDGGATLGV

SEQ ID NO: 91876 - protein, 252 aa, Mycobacteroides abscessus
  misc_feature (1)..(252): tr|A0A1N6B7Q3|A0A1N6B7Q3_9MYCO Putative 2,3-dihydro-2,3 -dihydroxybenzoate dehydrogenase OS=Mycobacteroides abs cessus subsp. bolletii OX=319705 GN=dhbA_2 PE=4 SV=1
MVAVVTGAGGGVGSRVVTTLARRHERVVAVDIDEVAIKQLVEYAADEGLDVIGQILDITDDTAVAVGVSDIESRVGPITALVNGAGVLRTGAAVEFSDADWARTFDVNVRAPFVLSREVARHMIPRRAGSVVTVASNAALVARKGMTAYAASKAAANAFTKSLGLELAEYGIRCNVVAPGSTDTPMLRAMLGDSSDAGLVAGNLGDYKPGIPLGRVAQPQYIADAVVFLLSDQAAHITMHTLVVDGGATLGV

SEQ ID NO: 91877 - protein, 275 aa, Mycobacteroides abscessus
  misc_feature (1)..(275): tr|A0A1U0WK87|A0A1U0WK87_9MYCO 2,3-dihydro-2,3-dihydrox ybenzoate dehydrogenase OS=Mycobacteroides abscessus su bsp. massiliense OX=1962118 GN=dhbA_1 PE=3 SV=1
MPRFEPHPARRPSIIAGASSSIGAATAIELAGRGFPVALGARRVDKLTELVEKIRSDGGEAVAFPLDVTDADSVKSFVAESIDALGEIDLLVSGAGDMYPGRVHEMSAATFAAQIQVHLLGANQLATEVVPDMVSRRRGDVVFIGSDVALHQRPHMGAYGAAKAALLAMVNTMRMELEGTGVRASIVHPGPTLTSMGWQLSAEQVGPMLEDWKSWGQARHSYFLRPSDIARAVTFVAETPRGAHIPEMEVQPEAPLKDAPADKQKLELGEEGMPS

SEQ ID NO: 91878 - protein, 275 aa, Mycobacteroides chelonae
  misc_feature (1)..(275): tr|A0A448GFU4|A0A448GFU4_MYCCH Short chain dehydrogenas e OS=Mycobacteroides chelonae OX=1774 GN=dhbA PE=4 SV=1
MPRFDPLPDRRPVIVAGASSGIGEATAIEMAARGFPVALGARRVDKLEELVGKINADGGEAVGFRLDVTDPDSVKTFVAQATEALGDIEVLVAGAGDTDFGKIAETSTEDFERQLQIHLVGANRLATAVLPGMIERRRGDLIFVGSDVALRQRPHMGAYGAAKAGLVAMVTNLQMELEGTGVRASVVHPGPTKTNMGWSLPAEKLGPALEDWAKWGQARHDYFLRAKDLARAITFVAETPRGGFIASMELQPEAPLAEVKERQKLALGEEGVPNS

SEQ ID NO: 91879 - protein, 275 aa, Mycobacteroides franklinii
  misc_feature (1)..(275): tr|A0A4R8R6T9|A0A4R8R6T9_9MYCO 2,3-dihydro-2,3-dihydrox ybenzoate dehydrogenase OS=Mycobacteroides franklinii O X=948102 GN=dhbA_1 PE=4 SV=1
MPRFDPHPKRRPSIIAGASSGIGAATAIELAGRGFPVALGARRVDKLTELVDKIRTDGGEAVAFPLDVTDADSVKSFVAESIDALGEIDLLISGAGDMYPGRVHEMSADTFAAQIQVHLLGANRLATSIVPDMVARRRGDVIFIGSDVALHQRPHMGAYGAAKAALLAMVNTMRMELEGTGVRASIVHPGPTLTSMGWQLSAEQVAPMLEDWKSWGQARHSYFLRPSDIARAVSFVAETPRGVHIPEMEVQPEAPLKDAPPDKQKLELGEEGMPS

SEQ ID NO: 91880 - protein, 275 aa, Mycobacteroides salmoniphilum
  misc_feature (1)..(275): tr|A0A4R8SSR0|A0A4R8SSR0_9MYCO 2,3-dihydro-2,3-dihydrox ybenzoate dehydrogenase OS=Mycobacteroides salmoniphilu m OX=404941 GN=dhbA_1 PE=3 SV=1
MPRFEPHPDRRPSIIAGASSGIGAATAIELAGRGFPVALGARRVDKLTELVEKIRADGGEAVAFPLDVTDADSVKSFVAESIDALGEIDLLVSGAGDMSPGRVHEMSADTFAAQIQVHLLGANRLATAIVPDMVARRRGDVVFIGSDVALHQRPHMGAYGAAKAALLAMVNTMRMELEGTGVRASIVHPGPTLTSMGWQLSAEQVGPMLEDWKTWGQARHSYFLRPSDIARAVTFVAETPRGAHIAEMEVQPEAPLTDAPADKQKLELGEEGMPS

SEQ ID NO: 91881 - protein, 275 aa, Mycolicibacter terrae
  misc_feature (1)..(275): tr|A0A1X2DRK5|A0A1X2DRK5_9MYCO Short-chain dehydrogenas e OS=Mycolicibacter terrae OX=1788 GN=dhbA PE=4 SV=1
MPRFDPPPARRPAIVAGASSGIGAATAEELARRGFPVALGARRADKLAKLVDKIRADGGEAVAFPLDVTDVESVKSFVAQSIDALGEIELLVSGAGDMSPGRIHEMSTEAFNDQIQVHLIGANRLATAVVPDMVARRRGDVIFVGSDVALQQRPHMGAYGAAKAALVAMVSNMRMELEGTGVRASIVHPGPTLTEMGWKLSAEQVGPMLEDWAKWGQARHSYFLRPADLARAIAFVAETPRGAHVVNLEVQPEAPLHETDSDRQHLQLGEEGMPS

SEQ ID NO: 91882 - protein, 248 aa, Mycolicibacterium aichiense
  misc_feature (1)..(248): tr|A0A378ULW9|A0A378ULW9_9MYCO Dehydrogenase of unchara cterized specificity, short-chain alcohol dehydrogenase like protein OS=Mycolicibacterium aichiense OX=1799 GN =entA PE=4 SV=1
MTELPARKVLVVGAGRGLGRGIACAFAESGADVVALARDGAALAALADTHPAIRTHVADASDAATARHVLDEYQPYTVIVVAGATPEMRELTQHSWETFSVNWDADVKIAFTWAQAALLQPMPRGSRVVIVSSGAALNGSPLSGGYAGSKATQRFIAQYAQRESERSGLGIIFTTVMPRMTPAGDVGRAGIRAYACEAGLTEDAFIEQLGPVITPEIAGQAMIDLVSLGRGDYAAGYVLTGAGLAPPT

SEQ ID NO: 91883 - protein, 275 aa, Mycolicibacterium chitae
  misc_feature (1)..(275): tr|A0A448HYR9|A0A448HYR9_MYCCI Short-chain dehydrogenas e OS=Mycolicibacterium chitae OX=1792 GN=dhbA PE=4 SV=1
MARFEPHPDRRPALVAGASSGIGAATATQLAAHGFPVALGARRVEKCQELVDEIRAGGGEAIALPLDVTDADSVKSFVHGATEALGEIELLVAGAGDTDFGRIHETSTTEFEQQIQIHLIGANRLATAVLPGMVERRRGDVIFVGSDVALRQRPHMGAYGAAKSALVAMVTNLQMELEGTGVRASIVHPGPTKTSMGWSLSAEKIGPALEDWAKWGQARHDYFLRAADLARAITFVAETPRGGFIANLEIQPEAPLADVKDRQKLALGEEGMPGQ

SEQ ID NO: 91884 - protein, 275 aa, Mycolicibacterium flavescens
  misc_feature (1)..(275): tr|A0A448HM43|A0A448HM43_MYCFV Short-chain alcohol dehy drogenase OS=Mycolicibacterium flavescens OX=1776 GN=dh bA PE=4 SV=1
MPRFDPLPERRPVIVAGASSGIGEATAIEMAARGFPVALGARRVEKLEDIVGKINADGGEAVGFHLDVTDPNSVKTFVAQSVEALGEIEVLVAGAGDTYFGKLAEISTDEFESQLQIHLVGANRLASAVLPGMLARQRGDLIFVGSDVALRQRPHMGAYGAAKAALLAMVNNFQMELEGTGVRASIVHPGPTKTSMGWSLPAEKIGPALEDWAKWGQARHDYFLRAADLARAITFVAETPRGGFIANMELQPEAPLATAPAERQQLKLNEENLKS

SEQ ID NO: 91885 - protein, 275 aa, Mycolicibacterium phlei
  misc_feature (1)..(275): tr|A0A448H2F9|A0A448H2F9_MYCPH 2,3-dihydro-2,3-dihydrox ybenzoate dehydrogenase OS=Mycolicibacterium phlei OX=1 771 GN=dhbA_2 PE=3 SV=1
MPRFEPHPRRRPSIIAGASSGIGAATAIELAGRGFPVALGARRVDKLTELVEKIQADGGEAVAFPLDVTDADSVKSFVAQSIDALGEIDLLVSGAGDMYPGRVHEMSADTFAAQIQVHLLGANRLATAIVPDMVARRRGDVVFIGSDVALHQRPHMGAYGAAKAALLAMVNTMRMELEGTGVRASIVHPGPTLTSMGWQLSAEQVGPMLEDWKTWGQARHSYFLRPSDIARAVTFVAETPRGAHIAEMEVQPEAPLTDAPADKQKLELGEEGMPS

SEQ ID NO: 91886 - protein, 259 aa, Mycolicibacterium smegmatis
  misc_feature (1)..(259): tr|A0A0D6IEI9|A0A0D6IEI9_MYCSM Short-chain dehydrogenas e/reductase OS=Mycolicibacterium smegmatis OX=1772 GN=e ntA PE=4 SV=1
MKISGNTIFIPGSTSGIGLALALALRDKGNTVIIGGRRTPELDRITAEHPDLGGVVIDTTDPASIAAAAHQVLSDHPDLNVLVTMAGIMRVEDWHQPETFLATAEATVETNVLGPIRLIAAFVEHLQAQPDSTIVTVSSGLAFTPLGVTPTYNASKAAIHMLSESIRMQLADTSVKVVELVPPSVRTQLMPGHEEDENGVPLDVFIADVMTLLEAEPDAHEILVEQAKFLRYGEARGDYDHVVSILNAADPHAQHGASA

SEQ ID NO: 91887 - protein, 337 aa, Mycolicibacterium tokaiense
  misc_feature (1)..(337): tr|A0A378TA93|A0A378TA93_9MYCO Short-chain dehydrogenas e/reductase SDR OS=Mycolicibacterium tokaiense OX=39695 GN=dhbA PE=4 SV=1
MTSHHQHPLGSGFTAASTTADILAGVELTGVNAVVTGGHSGLGAETTRALAGAGAAVTVAARNPDRAAQALSGLNVDIRRLDLMDPLSIDRFTAGWRETGRPLHILINNAGLPAPAAVQRDARGFEAQFATNHLGHFQLTLGLLPVLRAARGARVVTVSSGAQRFGHIRWEDLHFENGYNPDVAYAQSKVANVLFTVELDRRYRTDGIRGYAVHPGVVVGTALNAAGGPEQLRTMGLIDAAGHAIIRPETGRKTAAQGAATIVFAATSPLLAGIGGVYLMDNDISPVVAGDVPMTFSPDQAIPAEVAPHAIDPESARRLWQLSEELVSPTHHDRNGR

SEQ ID NO: 91888 - protein, 257 aa, Myxococcus fulvus
  misc_feature (1)..(257): tr|F8CAV5|F8CAV5_MYXFH 2,3-dihydroxybenzoate-2,3-dehydr ogenase OS=Myxococcus fulvus (strain ATCC BAA-855 / HW- 1) OX=483219 GN=LILAB_26325 PE=3 SV=1
MGTPTRVALVTGAAQGIGAAVARALAGEALIAAVDTNAEGLGTLVTELREQHHHAVGYPVSVSDVAAVDAVVERVERELGPIEVLANVAGVLRTGPVLSYSDEDWAFTFSVNTLGVFQVSRAVARRMVPRRRGVIVTVGSNAAAVPRTQMAAYAASKAASSMFTKCLGLELAPHGIRCNVVSPGSTDTAMQRALWADDSGAQAVIAGSPESYRLGIPLQRIASPEDIANAVRFLVSDAARHITLHDLRVDGGATLDA

SEQ ID NO: 91889 - protein, 257 aa, Myxococcus sp.
  misc_feature (1)..(257): tr|A0A540WQI3|A0A540WQI3_9DELT 2,3-dihydro-2,3-dihydrox ybenzoate dehydrogenase OS=Myxococcus sp. AM401 OX=2590 453 GN=FJV41_35090 PE=3 SV=1
MGDTPRVALVTGAAQGIGAEVARVLAGEATIAALDTNAEGLLSLVAELRGKGQRATAWPVSVSDASAVETVVERIEKELGPIHTLVNVAGVLRMNPVVSLSDEDWATTFGVNTNGVFHVSRAVARRMVPRRAGVIVTVGSNAAGTPRMQMAAYAASKAASTMFTKCLGLELAQYGIRCNVVSPGSTDTAMQRGMWKDEHGADAVIAGASETFRVGIPLRRIATPRDIAEAVQFLASDRARHITMHDLCVDGGATLGV

SEQ ID NO: 91890 - protein, 257 aa, Myxococcus xanthus
  misc_feature (1)..(257): tr|Q1D689|Q1D689_MYXXD 2,3-dihydro-2,3-dihydroxybenzoat e dehydrogenase OS=Myxococcus xanthus (strain DK 1622) OX=246197 GN=MXAN_3647 PE=3 SV=1
MGTPTRVALVTGAAQGIGAAVARALAGEALIAAVDTNADGLSALVAELRQKHQHAVAYPASVSDVAAVDAVVERIERELGPIEVLANVAGVLRTGPILSYSDEDWAFTFSVNTLGVFQVSRAVARRMVPRRSGVIVTVGSNAAAVPRTQMAAYAASKAASSMFTKCLGLELAPHGIRCNVVSPGSTDTAMQRALWADDSGAQAVIAGSPEAYRLGIPLQRIATPEDIANAVRFLVSDAARHITLHDLRVDGGATLDA

SEQ ID NO: 91891 - protein, 262 aa, Nocardia brasiliensis
  misc_feature (1)..(262): tr|K0FAW8|K0FAW8_9NOCA 2,3-dihydroxybenzoate-2,3-dehydr ogenase OS=Nocardia brasiliensis ATCC 700358 OX=1133849 GN=O3I_033285 PE=3 SV=1
MIGPQQASDSGAQRIALVTGAAGGIGHRIVYRLAAQGMVVVAVDRAADASKELRAMPGQVTIVQGDVTDPVDVERIVGDVERDIGPLDYLVNAAGIMRFGEIVELSEDDWEETFSVNTTGVFRVTKAVLTRMISRRRGAVVTVSSNAARTPRASMSAYSASKAAATMLAKCAALEVAKYGIRCNVVSPGSTRTEMLQATWEGEDRTEATIAGVPEKFRLGIPLGRIADPDDIVDAVEFLLSDRARHITMQELTVDGGATLGS

SEQ ID NO: 91892 - protein, 267 aa, Nocardia brasiliensis
  misc_feature (1)..(267): tr|A0A379BHY9|A0A379BHY9_9NOCA 2,3-dihydro-2,3-dihydrox ybenzoate dehydrogenase OS=Nocardia brasiliensis OX=373 26 GN=dhbA_1 PE=4 SV=1
MNTIERQRDSGCALVVGAAGGIGGAVADRLAAAGRDLALLDRDGAALAVVGKQIRTNYGSDRRVTTHVADIGSRAEVERAVDEIERQHGPVGALACTAGVLHRGPLTDIDVDAVQRMIDVNVVGVLHLLASVGGRMKQRRRGSIVVIGSNAGAVPRLHIGVYGATKAAAALLTRVAALELAPYGVRANVVAPGSTDTPMLRALYPNEDEMVRHAVGGSPADFRLGIPLGRLAQASDIAAAVHFLLSDAARHITMQTLYVDGGATLHD

SEQ ID NO: 91893 - protein, 267 aa, Nocardia cyriacigeorgica
  misc_feature (1)..(267): tr|A0A2L2JS88|A0A2L2JS88_9NOCA 2,3-dihydro-2,3-dihydrox ybenzoate dehydrogenase OS=Nocardia cyriacigeorgica OX= 135487 GN=dhbA PE=4 SV=1
MFMNVSGQRVVVVTGAAAGIGAATARRFASESHTLALWDRDPRVHRIAGEIVATAACSVIATEVDLTDATAVDAAFDALVTEYGAPDVVAHAAGIMRAGSALEITAQEWDTSLAVNATATMLVTQRAAREMVAAGRGSIVVVSSNAAAAPRVGMAAYCASKAAATAFTRALALQVAPHGVRVNLVSPGSTDTAMLRGLYADDDRPLDATARTALLDGDAHAYRLGIPLRRIATADDIAAAVRFLASAEARHITMHDLRVDGGATLDM

SEQ ID NO: 91894 - protein, 262 aa, Nocardia otitidiscaviarum
  misc_feature (1)..(262): tr|A0A378YFR4|A0A378YFR4_9NOCA 2,3-dihydro-2,3-dihydrox ybenzoate dehydrogenase OS=Nocardia otitidiscaviarum OX =1823 GN=dhbA_1 PE=4 SV=1
MPRFAPHPERRPVLIAGASSGIGAATALTLAEQGYPVALGARRVDQCEELADKIRADGGEAIAHRLDVTDGASVDAFATAAENALGPIEIVVSGAGDLEFGRIHATDPDVFDQQLRVHLGGAQRLAHRLLPGMIERRRGDFVVIGSDCADRPRPGMAAYNAAKIGAETLARQLRMELEGTGVRASVVRPGQTLTGMGMNAAPEVVGPLLEDWVKWGFARHSHFLRAADIAAAVAAVVSTPRGAHLVLVEVQPEAPLSDDGSR

SEQ ID NO: 91895 - protein, 254 aa, Nocardia seriolae
  misc_feature (1)..(254): tr|A0A1I9ZGX6|A0A1I9ZGX6_9NOCA 2,3-dihydro-2,3-dihydrox ybenzoate dehydrogenase OS=Nocardia seriolae OX=37332 G N=NS506_07070 PE=4 SV=1
MLGNYSDLAGKIAVLTGGSRGIGAETARMLAAQQSQVCVVGRDEQALDAVVAEISAAGGTAVGAVADVTSAAALAEVAALVEREFGRVDVLGVFAGGMGYPTPSSELSEELWRRVLDSDLTSAFLTVRAFLPMLLAQGSGSVVTMASSAGRQPSQANLAYGVANAGIIMMTRHLAAELGPRGIRVNAIAPSSILTEKVAANMPEAVQRQMAASHPLRRMGFPADVALAALFLASDASSYPSGITIDVAGGRITN

SEQ ID NO: 91896 - protein, 298 aa, Nocardioides dokdonensis
  misc_feature (1)..(298): tr|A0A1A9GPZ9|A0A1A9GPZ9_9ACTN 2,3-dihydro-2,3-dihydrox ybenzoate dehydrogenase OS=Nocardioides dokdonensis FR1 436 OX=1300347 GN=dhbA PE=3 SV=1
MVRARPWTAVPDQGGRRVVVTGATSGIGLLTSKVLAHRGAHVVLAVRDPAKGERVARELSSMRGRVEVSRLDVSDLDSVHAFAERTGEVDVLVNNAGVLGLPRSASAQGHELQLATNHLGHFALANLLLPRLRDRVVVVSSASHRHGDLDLEDLDWERRGYRPYAAYAASKLANMLFLAELQRRLGAAGSTLRATGAHPGNTRTAITSSTGNGLTTRVGAVGQGLVAMPAWRGALPVLYAATMDVPGNSYLGPDGPGELWGWPTQVGRSRAASDPDLARRTWTATERLTGVVWPFSRR

SEQ ID NO: 91897 - protein, 255 aa, Nocardiopsis alba
  misc_feature (1)..(255): tr|J7L4R6|J7L4R6_NOCAA 2,3-dihydro-2,3-dihydroxybenzoat e dehydrogenase OS=Nocardiopsis alba (strain ATCC BAA-2 165 / BE74) OX=1205910 GN=dhbA PE=4 SV=1
MNGIDGAVAMVTGAAGGVGRAVALDLAGHGARVAAVDVDADGLDRTLRLLRERGHRAGAFIADVTDTTRVEGLFDEIEADLGPVTLAVNAAGTLVTGPVADCDERDWHRVMAVNATGVFAVGRAVARRMGPRGHGALVTVASNAAGIPRSGMAAYAASKAAAVALTKSLGLELAPLGVRCNVVSPGSTDTPMLRAMTPDPAALVHGDPGRFKVGIPLGRIGSPEDVAEAVRFLLSDAARHITMHELYVDGGATLR

SEQ ID NO: 91898 - protein, 255 aa, Nocardiopsis sp.
  misc_feature (1)..(255): tr|A0A1R3UFY9|A0A1R3UFY9_9ACTN 2,3-dihydro-2,3-dihydrox ybenzoate dehydrogenase of siderophore biosynthesis OS= Nocardiopsis sp. JB363 OX=1434837 GN=BQ8420_03480 PE=4 SV=1
MNGIDGAVTVVTGAAGGVGRAVALDLAAHGARVAVVDVDTLGLDQTLHRLTATGHKAFAFTADVTDPIRVESIFDEVEALLGPVSTVVNAAGALATGSVVDCSDQDWRRLIAVNATGVFNVGRAAARRMGPRGHGALVTVASNAAGVPRSGMAAYAASKAAAVAFTKSLGLELAPLGVRCNVVSPGSTDTPMLRTMTPDPEALIDGDPSHFKVGIPLRRLGQPQDVAEAVRFLLGDAARHITMHELYVDGGATLR

SEQ ID NO: 91899 - protein, 257 aa, Nonomuraea sp.
  misc_feature (1)..(257): tr|A0A4R4WLC2|A0A4R4WLC2_9ACTN 2,3-dihydro-2,3-dihydrox ybenzoate dehydrogenase OS=Nonomuraea sp. KC712 OX=1848 329 GN=E1294_28490 PE=4 SV=1
MRNTTGLVTGAAGGIGEAVVRALVAEGVAVAALDANAQALAMVVKELVNEGHVVRGYPVDVSSSVAVDAVVEAAEHELGPISSLVNAAGVLRTGAAVALTDDDWNQTFAVNATGVFHVSRAVARRMVPRRTGAIVTVASNAASTPRWNMAAYAASKAAAAGFTRCLGLEVAKFGIRCNVVAPGSTDTPMLTSLWGEGGDALRACLDGAPEQFRVGIPLGRLAEPADVADAVVFLLSQRAAHITLHDLTVDGGAALGR

SEQ ID NO: 91900 - protein, 258 aa, Notoacmeibacter sp.
  misc_feature (1)..(258): tr|A0A3L7JE22|A0A3L7JE22_9RHIZ 2,3-dihydro-2,3-dihydrox ybenzoate dehydrogenase OS=Notoacmeibacter sp. M2BS9Y-3 -1 OX=2448481 GN=D8780_10400 PE=4 SV=1
MTIHPAGLWGLENKLVLVTGAAGGIGLALVKALAREGARVLATDLDIAAIPPNDAIIPRSLDVSNTADVEALVDEVEETLGPIDSGVSLAGALATGLVTETTDDDWRRVFAVNTDGVFHLSRALARRMVKRRTGNIVTVSSNAAGVPRHAMAAYAASKAAATMFTRSLGLELAPHGIRCNIVAPGSTLTPMQTGMWSDADGAKAVIAGSAQTFKAGIPLGKLATPEDVADAVLFLLSDRASHITMADIYVDGGATLRG

SEQ ID NO: 91901 - protein, 258 aa, Oceanobacillus iheyensis
  misc_feature (1)..(258): tr|Q8CV03|Q8CV03_OCEIH 2,3-dihydro-2,3-dihydroxybenzoat e dehydrogenase OS=Oceanobacillus iheyensis (strain DSM 14371 / CIP 107618 / JCM 11309 / KCTC 3954 / HTE831) O X=221109 GN=dhbA PE=4 SV=1
MMEKKVAIVTGAAQGMGYEVFHALAVRGYVTIGIDIQEEKLQKIKDIAETDHLAAETFYADVSDSTRVNEIIDQVYKTYGRIDVLVNAAGVLSLGEVTTLSDEDWERTFAVNTNGVFHVSRAVCNRMKENKQGAVVTISSNAASVPRTSMAAYSASKAASLMFTKCLGLEMASHGIRCNIVSPGATDTEMQRAFWKEEADIEKGIKGIPEQYRVGIPLQKIASTTEITEAVLFLLSDSASHITMNNIVVDGGATLGAQ

SEQ ID NO: 91902 - protein, 261 aa, Oceanobacillus profundus
  misc_feature (1)..(261): tr|A0A417YIV9|A0A417YIV9_9BACI 2,3-dihydro-2,3-dihydrox ybenzoate dehydrogenase OS=Oceanobacillus profundus OX= 372463 GN=D1B32_07460 PE=3 SV=1
MNVSEINGKIAVVTGAAGGMGQIISEKLAENGAVIAAIDTNSQVLKKCVKELQDKGYQATGFSIDISNLDAVEEVVAFIESDVGPIEVLVNAAGMLRLGEIDVLDKEDWNASFAVNATGVFHVSSSVSRRMIPRKSGAIITVSSNAAHMPRMAMAAYGASKAAATMFTKCMGLELAQYNIRCNVISPGSTETSMLKKLWKDEHGAQKTIEGQSEAYRVGIPLGKLGKPKDIAETVLFLVSDHASHITMHDMVIDGGATLGI

SEQ ID NO: 91903 - protein, 277 aa, Oerskovia enterophila
  misc_feature (1)..(277): tr|A0A163T4J2|A0A163T4J2_9CELL 2,3-dihydro-2,3-dihydrox ybenzoate dehydrogenase OS=Oerskovia enterophila OX=436 78 GN=dhbA PE=4 SV=1
MSTRVVLVTGAAGGIGAAVVHAFAAEGYVVVAADLDRPTVPAHTTVPPHGGTAPVTAAAPSTPGTVVPVRLDVTDEQDVARLVRWVEDEVGPLEVLVNAAGVLRPGVVTESSLADWQRMLAVNATGVYLVSRAVARCLSSRRRGAIVTVASNAAGVPRAGMAAYAASKAAASSLTRSLGLELAPFGVRCNVVSPGSTRTPMLAALAGSPGSDDVPVLDEPAEARVVAGAPQDFRLGIPLGRLAEVQDVAAAVVFLASDAARHITVHELVVDGGATLR

SEQ ID NO: 91904 - protein, 85 aa, Omnitrophica bacterium
  misc_feature (1)..(85): tr|A0A136N375|A0A136N375_9BACT 2,3-dihydro-2,3-dihydrox ybenzoate dehydrogenase OS=Omnitrophica bacterium OLB16 OX=1617433 GN=dhbA PE=4 SV=1
MELKNRGVLITGAGRGLGKVLALSLAYCGCRLGLVSRTEKELNEVARSIQGKKGSAVVLPADITNSAAVQKMVARAEGELGTSMS

SEQ ID NO: 91905 - protein, 251 aa, Pacificibacter marinus
  misc_feature (1)..(251): tr|A0A1Y5TD07|A0A1Y5TD07_9RHOB 2,3-dihydro-2,3-dihydrox ybenzoate dehydrogenase OS=Pacificibacter marinus OX=65 8057 GN=dhbA PE=3 SV=1
MINLTGKTALITGASRGIGAQTARIFADAGAKVALLARSAQELEALAQDIGPNALALPCDISDSAALEVAVNTARKTLGPIDILVNNAGVIHPIGKMIDMDVEEWSKAIEINLKAVFGAMRLIVPDMVARGGGTVLSVSSGAAHGPVEGWSAYCTSKAGAAMLTRMLDLEERANGIRVLGLSPGTVATEMQREIKASGINAVSQLDWSTHIPADWPAKALLWMCGPDADAFRGQEISLRDETIRRLIGLTT

SEQ ID NO: 91906 - protein, 261 aa, Paenibacillus alvei
  misc_feature (1)..(261): tr|K5AAA0|K5AAA0_PAEA2 2,3-dihydro-2,3-dihydroxybenzoat e dehydrogenase OS=Paenibacillus alvei (strain ATCC 634 4 / DSM 29 / NBRC 3343 / NCIMB 9371 / NCTC 6352) OX=120 6781 GN=dhbA PE=3 SV=1
MKYSGIEGKVAVVTGAAQGIGKAVSRALAVQGAIVAAVDRNEAGCVSLAAELGTDGYRAAAYPVDVGDSSAVDVTVERIEKELGPIGVLVNVAGILRPGPIETLSDEDWQATFRVNVNGVFYMSRAVVTRMAKRRSGAIVTVGSNASGVPRTYMSAYAASKAATTMFTKCLGLEYARHHIRCNIVSPGSTDTEMQRSLWNGQNGAEAMIAGSPESFRLGIPLGRIAQPSDIADAVVFLASEQARHITMHDMCIDGGATLGC

SEQ ID NO: 91907 - protein, 261 aa, Paenibacillus alvei
  misc_feature (1)..(261): tr|A0A383RFB8|A0A383RFB8_PAEAL 2,3-dihydro-2,3-dihydrox ybenzoate dehydrogenase OS=Paenibacillus alvei OX=44250 GN=dhbA PE=3 SV=1
MKYSGIEGKVAVVTGAAQGIGEAVARALAVQGAAVAVVDRNEAGCTSLAAELDAGGYHAAAYPVDVSDSTAVNRTVGRIEEELGPIGVLVNVAGILRLGPIETLSDEDWQSTFSVNVNGVFYMSRAVVTLMAKRRSGAIVTVGSNASGVPRTQMSAYAASKAATTMFTKCLGLEYARHHIRCNIVSPGSTDTEMQRSLWNGQNGAEAMIAGSPESFRLGIPLGRIAQPSDIADAVLFLASEQARHITMHDMCIDGGATLGC

SEQ ID NO: 91908 - protein, 262 aa, Paenibacillus dendritiformis
  misc_feature (1)..(262): tr|A0A4R5YTU4|A0A4R5YTU4_9BACL 2,3-dihydro-2,3-dihydrox ybenzoate dehydrogenase OS=Paenibacillus dendritiformis OX=130049 GN=E2R60_22360 PE=3 SV=1
MEYAGIKGKVALVTGAAQGIGEAVAQALSGLGAIVAAVDRNAAGVEKLAAELSGAGNLRAAAYPADVGDRSAVDKAVERIEQELGPIEIAVNVAGLLRAGPIESLSDEDWQETFRVNVNGVFYVSRTVVRRMALRGSGSIVTVGSNAAGVPRMHMSAYAASKAAAAMFTKCLGLEYARNNIRCNIVAPGSTDTAMQRALWSGEDSAAAVIDGSPEAFRLGIPLHKLAMPSDIADAVIFLVSDRARHITMHELCVDGGATLGC

SEQ ID NO: 91909 - protein, 261 aa, Paenibacillus hemerocallicola
  misc_feature (1)..(261): tr|A0A5C4SYY2|A0A5C4SYY2_9BACL 2,3-dihydro-2,3-dihydrox ybenzoate dehydrogenase OS=Paenibacillus hemerocallicol a OX=1172614 GN=FE784_34055 PE=3 SV=1
MNHLGIKGKVALVTGAAQGIGEAIARAMAQYGAHVAAVDSNAERLDAVVNDILAEGGRAAAFRLDVRDGSSVEEIVERIEKEIGPIEILVHAAGILRTGPIASLSDEDWSSTFEVNCTGVFRLSRSVMNHMMPRMKGSIVTVGSNAAGVPRMQMSAYAASKAAVTMFTKCMGLELARYRIRCNIVSPGSTDTEMQRSLWKDEQGAEAIIAGHTDSYRLGIPLGKLAAASDIAEAVIFLASDLASHITMHDLCVDGGATLGI

SEQ ID NO: 91910 - protein, 261 aa, Paenibacillus illinoisensis
  misc_feature (1)..(261): tr|A0A2W0C9J1|A0A2W0C9J1_9BACL Short-chain dehydrogenas e-reductase SDR OS=Paenibacillus illinoisensis OX=59845 GN=PIL02S_02120 PE=3 SV=1
MSYTGIHGKVALVTGAAQGIGEAVARALAEQGAVVAAVDIREEQLEQLAVDLNHQGHQAAVYPADIANRQSVDDTVQRIEATLGPIGILINAAGVLHTGAVASLSDEEWTRTFDVNTHGVFYMSRAVVRNMAKRQSGTVVTVGSNASGVPRMHMSAYAASKAASTMFTKCLALEYAEQHIRCNIVSPGSTDTPMQRALWQDDHGAQAVIAGSQQAYRLGIPLNRLALPSDIAEAVLFLASDQARHITMHDLCVDGGATLGV

SEQ ID NO: 91911 - protein, 261 aa, Paenibacillus larvae
  misc_feature (1)..(261): tr|V9W311|V9W311_9BACL 2,3-dihydro-2,3-dihydroxybenzoat e dehydrogenase OS=Paenibacillus larvae subsp. larvae D SM 25430 OX=697284 GN=dhbA PE=3 SV=1
MGLKGFQGKIALVTGAAQGIGETVARELVESGVQVAAVDKKVGLLNELVNDLTTQGGRVKAFPIDVSDSRAVDSTVNQIENEMGPIEILVNIAGVLHVGPIDSLSDADWDEVFSVNSNGVFYVSRSVSRRMMSRRTGSIITVGSNAASVPRMHMAAYASSKAAATMFTKCLGLELAEYGIRCNLVSPGSTETEMQRLLWGDGNGAEKMIAGSQSTYRVGIPLKKLALPSDIAAAVLFLASDQARHITMHNLCVDGGATLGV

SEQ ID NO: 91912 - protein, 261 aa, Paenibacillus larvae; identical to SEQ ID NO: 91911
  misc_feature (1)..(261): tr|W2E861|W2E861_9BACL 2,3-dihydro-2,3-dihydroxybenzoat e dehydrogenase OS=Paenibacillus larvae subsp. larvae D SM 25719 OX=697286 GN=dhbA PE=3 SV=1

SEQ ID NO: 91913 - protein, 261 aa, Paenibacillus larvae
  misc_feature (1)..(261): tr|A0A2L1TZM1|A0A2L1TZM1_9BACL 2,3-dihydro-2,3-dihydrox ybenzoate dehydrogenase OS=Paenibacillus larvae subsp. larvae OX=147375 GN=dhbA PE=3 SV=1
MGLKGFQGKIALVTGAAQGIGETVARELVESGVQVAAVDKKVGLLNELVNDLTTQGGRVKAFPIDVSDSRAVDSTVNQIENEMGPIEILVNIAGVLHVGPIDSLSDADWDEVFSVNSNGVFYVSRSVSRHMMSRRTGSIITVGSNAASVPRMHMAAYASSKAAATMFTKCLGLELAEYGIRCNLVSPGSTETEMQRLLWGDGNGAEKMIAGSQSTYRVGIPLKKLALPSDIAAAVLFLASDQARHITMHNLCVDGGATLGV

SEQ ID NO: 91914 - protein, 261 aa, Paenibacillus lautus
  misc_feature (1)..(261): tr|A0A328W905|A0A328W905_PAELA 2,3-dihydro-2,3-dihydrox ybenzoate dehydrogenase OS=Paenibacillus lautus OX=1401 GN=DP091_22245 PE=4 SV=1
MEITGISGKVALVTGAAQGIGEAVARALARQGAVVAACDQKEAELIRLTADLCSSGTQAAAYGANVSCSAEVEEMIGRIEEELGPIEILVNVAGVLRIGGVESLRDEDWQEHFNVNTNGVFYTSRSVVRRMASRNSGAIVTVSSNASKVPRAQMSAYAASKAASTMFTKCLGLEYARHHIRCNVVSPGSTDTGMQRLLWKDDQGAESIIAGSLDDYRVGIPLGRIALPSDIADAVVFLVSDRARHMTMQDVCVDGGATLGC

SEQ ID NO: 91915 - protein, 261 aa, Paenibacillus lentus
  misc_feature (1)..(261): tr|A0A3Q8S626|A0A3Q8S626_9BACL 2,3-dihydro-2,3-dihydrox ybenzoate dehydrogenase OS=Paenibacillus lentus OX=1338 368 GN=EIM92_18460 PE=4 SV=1
MEYTGIQGKVALVTGAAQGIGEAVARALASAGAIVAALDLNGEALEGLAAELRAQGCQVSVFVTDVADSHAVEAAVDQVERELGPIEILVNVAGLLRIGSVEALSDEDWAAAFAVNANGVFYVSRSVVKRMAVRKSGSIVTVGSNAARIPRMQMAAYNASKAAAVMFTKCLGLEQATNHIRCNIVSPGSTDTVMQRMLWNDSNGGQSVVAGSPEAFRLGIPLGRIAAPSDIADAVMFLASDRARQITMLDLCIDGGATLGV

SEQ ID NO: 91916 - protein, 263 aa, Paenibacillus nuruki
  misc_feature (1)..(263): tr|A0A1E3KX47|A0A1E3KX47_9BACL 2,3-dihydro-2,3-dihydrox ybenzoate dehydrogenase OS=Paenibacillus nuruki OX=1886 670 GN=entA PE=3 SV=1
MLGKKTIFITGAGSGLGKGAALGLAKKGHKVIASVEIIPQVTELREEAKAQGLDIEVLKLDVNKPLDRIQLEKYDFDVYVANAGIGEGGPLAEIPVDNIRQIFDTNVFNSLEMVQIVARQFVAKKKGKIIFVSSIAGLSVTPYLGAYCASKHAVEAMAQALKEELKEFGIQVATINPGPYKTGFNDNMFEQKEKWYDEKTNFTKRADLLKGEKMLAQQFDPQDMIDKMVEVIDAKHHPFRNVYPKPSEEQVKEYQAKIWEETV

SEQ ID NO: 91917 - protein, 70 aa, Paenibacillus polymyxa
  misc_feature (1)..(70): tr|A0A378XZ56|A0A378XZ56_PAEPO Oxidoreductase OS=Paenib acillus polymyxa OX=1406 GN=dhbA PE=4 SV=1
MSFEGQVVIVTGAAHGIGKEVAFAYAAQGAKVVFADYNEEEGAAAAAAARNEGHQAIFIPCDVCVRKQIL

SEQ ID NO: 91918 - protein, 261 aa, Paenibacillus silvae
  misc_feature (1)..(261): tr|A0A2W6NF91|A0A2W6NF91_9BACL 2,3-dihydro-2,3-dihydrox ybenzoate dehydrogenase OS=Paenibacillus silvae OX=1325 358 GN=DN757_16425 PE=3 SV=1
MSYTGIDGNVAVVTGAAQGIGEAVARLLAQYGAIVALVDQQEAALSQLVSELRSQGHQAVACIADVSDRQAVEDTVQQIEENVGPIGILVNAAGVLHAGTVSELKDEEWMRTFDVNTHGVFYMSRAVVRNMSKRQTGAVVTVGSNAASVPRMHMSAYAASKAASTMFTKCLALEYANQHIRCNIVSPGSTDTPMQRALWQEEDGAEAVIAGSLQTFRLGIPLNRMALPSDIADAVIFLISDQARHITMHNLCVDGGATLGV

SEQ ID NO: 91919 - protein, 261 aa, Paenibacillus sp.
  misc_feature (1)..(261): tr|H6CGS3|H6CGS3_9BACL Short-chain dehydrogenase/reduct ase SDR OS=Paenibacillus sp. Aloe-11 OX=1050222 GN=WG8_ 1483 PE=3 SV=1
MSDDGIQGKVALVTGAAQGIGAAVARSLAELGATIAAVDQNTEGVSRLVDELVRDGYRATAFPVDVSHRAAIDETVEQIEHQLGPVGILVNVAGVLRMGQVDTLRDSDWTETFAVNTNGVFYISRAVVKHMIPRKSGSIVTVGSNAGAVPRMYMAAYAASKAASAMFTKCLGLEVACHHIRCNVVSPGSTETEMQRSLWSDENGAQAAIDGSPNAYKVGIPLQRLADPADIAAAVVFLASDKSRHITMHDLRIDGGATLGV

SEQ ID NO: 91920 - protein, 261 aa, Paenibacillus sp.
  misc_feature (1)..(261): tr|A0A2M9N4F6|A0A2M9N4F6_9BACL 2,3-dihydro-2,3-dihydrox ybenzoate dehydrogenase OS=Paenibacillus sp. GM2FR OX=2 059268 GN=dhbA PE=3 SV=1
MESTGIRGKVALVTGAAQGIGEAVARALARQGAVVAACDRKEAELIRLTADLCSSGVQAAAYRTDVSCSAEVEAMVERIEEELGPIEILVNVAGVLRIGGVESLRDEDWQAHFNVNTHGVFYTSRSVVRRMASRNSGAIVTVSSNASKVPRAQMSAYAASKAASTMFTKCLGLEYARYHIRCNVVSPGSTDTEMQRLLWKDDQGAVPIIEGAPDSFRVGIPLGKIALPSDIADAVVFLVSDRAGHLTMQDVCVDGGATLGC

SEQ ID NO: 91921 - protein, 269 aa, Paenibacillus sp.
  misc_feature (1)..(269): tr|F5LRL7|F5LRL7_9BACL 2,3-dihydroxybenzoate-2,3-dehydr ogenase OS=Paenibacillus sp. HGF7 OX=944559 GN=HMPREF94 13_1211 PE=4 SV=1
MKESPFAGAPYTGISGKVAVVTGAAQGIGEAAAAVLAGLGAVIAAVDLQGEKVERSAEALASSGASAAAYAADVSDSRSVEEVIARIEREQGPVDILVHAAGVLQHGTGVTLGDEEWERTFAVNTTGAFYVCRSVISRMSKRRRGSIVLIGSNAGTVPRYGMSAYAASKAAAAMMLKCLGLEHAAEGIRCNIVSPGSTDTPMQRGMWEDESGEFKTISGSPELYKLGIPLGKLATPEDIAWAAAFLSSDQAGHITLHDIRIDGGATLGR

SEQ ID NO: 91922 - protein, 262 aa, Paenibacillus sp.
  misc_feature (1)..(262): tr|A0A3P3U5G4|A0A3P3U5G4_9BACL 2,3-dihydro-2,3-dihydrox ybenzoate dehydrogenase OS=Paenibacillus sp. KCOM 3021 OX=2490856 GN=EHV15_20110 PE=3 SV=1
MEYEGIKGKVALVTGAAQGIGEAVARALAGLGAIVAAIDRNAAGVEKLAAELNGTGNLRAAPYPADVGDRAAVEEAVERIEQELGPIEIVVNVAGVLRAGRIESLSDEDWQETFRVNVNGVFYVSRAAVGRMALRGSGSIVTVGSNAAGVPRMHMSAYAASKAAAAMFTKCLGLEYARNNIRCNIVAPGSTDTAMQRVLWSGEDGAEAVIAGSPESFRLGIPLHKLAMPSDIADAVSFLVSDRARHITMHELYVDGGATLGC

SEQ ID NO: 91923 - protein, 256 aa, Paenibacillus sp.
  misc_feature (1)..(256): tr|A0A559J486|A0A559J486_9BACL 2,3-dihydro-2,3-dihydrox ybenzoate dehydrogenase OS=Paenibacillus sp. N4 OX=2590 547 GN=FPZ44_11720 PE=3 SV=1
MEGKVALVTGAAQGIGEAVVRALAEQGVRIAAVDRNEAGLNSLVVDLTSIGAKVFPYTVDVGSSAEVEAAVEQIERALGPIDILVNVAGVLRIGAIGSLSDEDWQSHFTVNTNGVFYVSRAVVCRMATRKAGAIVTVSSNASKVPRTQMSAYAASKAASTMFTKCLALEYAKDNIRCNVVSPGSTDTEMQRLLWKDENGAQPIIDGSLESYRVGIPLGKIAAPVDIADSVLFLLSSRAGHITMHDVCVDGGATLGC

SEQ ID NO: 91924 - protein, 261 aa, Paenibacillus sp.
  misc_feature (1)..(261): tr|A0A544VGI6|A0A544VGI6_9BACL 2,3-dihydro-2,3-dihydrox ybenzoate dehydrogenase OS=Paenibacillus sp. SDF0028 OX =2133754 GN=C7Y44_05785 PE=3 SV=1
MKYSGIEGKVAVVTGAAQGIGEAVARALAVQGATVAVVDRNEAGCTSLAAELNAGGYHAAAFPVDVSDSAAVNRTVERIEEELGSIGVLANVAGILRLGPIETLSDEDWQSTFSVNVNGVFYMSRAVVTRMAKRRSGAIVTVGSNASGVPRTHMSAYAASKAATTMFTKCLGLEYANHHIRCNIVSPGSTDTEMQRSLWNGQNGAEAMISGSPESFRLGIPLGRIAQPSDIADAVLFLASEQARHITMHDMCIDGGATLGC

SEQ ID NO: 91925 - protein, 261 aa, Paenibacillus taichungensis
  misc_feature (1)..(261): tr|A0A329QZJ3|A0A329QZJ3_9BACL 2,3-dihydro-2,3-dihydrox ybenzoate dehydrogenase OS=Paenibacillus taichungensis OX=484184 GN=DC345_11370 PE=3 SV=1
MSYTGVNGKVAIVTGAAQGIGEAVARLLAEQGAIVAAFDVREDQLNQLVTDLHSQGHQATACPMDISNRQSVEDAIQRIEKTLGPIGILVNAAGVLYTGAVSELRDEEWTRTFDVNTHGVFYMSRAVVRYMAERQSGAIVTVGSNASGVPRMHMSAYVASKAASTMFTKCLALEYASDHIRCNIVSPGSTDTDMQRALWADEQGAEAVIAGSPQAYRLGIPLNRLALPSDIADSVLFLVSDQARHITMHKLCVDGGATLGA

SEQ ID NO: 91926 - protein, 262 aa, Paenibacillus thiaminolyticus
  misc_feature (1)..(262): tr|A0A378XB54|A0A378XB54_PANTH Short-chain dehydrogenas e/reductase SDR OS=Paenibacillus thiaminolyticus OX=492 83 GN=dhbA PE=3 SV=1
MEYPGIKGKVALVTGAAQGIGEAVARSLAGLGAIVAAVDQNAAGVEKLAAELRGAGNYRAAAYPADVGDRAAVEEAVERIEQELGPIEIVVNVAGLLRAGPIESLTDEDWQETFRVNVNGVFYVSRAAVRHMALRGSGAIVTVGSNAAGVPRMHMSAYAASKAAAAMFTKCLGLEYARNHIRCNIVAPGSTDTDMQRALWSGNDGAAAVISGSPEAFRLGIPLRKLAMPSDIADAVIFLVSDRARHITMHELCVDGGATLGC

SEQ ID NO: 91927 - protein, 260 aa, Paenibacillus whitsoniae
  misc_feature (1)..(260): tr|A0A3S0BIM0|A0A3S0BIM0_9BACL 2,3-dihydro-2,3-dihydrox ybenzoate dehydrogenase OS=Paenibacillus whitsoniae OX= 2496558 GN=EJQ19_22865 PE=4 SV=1
MTNELEGRVALVTGAAQGIGEAVVRALSAQGATVAAVDKQAEPLQRLCGEMVGQGALVKAYPLNLKDHAAVPQVVERVEAELGPIDILVHAAGVLRMGALSSYADEDWNELLAVNVSGVFHLSRAVGTRMIPRRRGAIVTVSSNAAAVPRMGMGAYATTKAAVTMLTKCLALELAEYGIRCNIVSPGSTDTPMLRGMWQDEQGKQATLDGSLPSYRIGIPLRKLATPEDIADAVRFLVSDRAGHVTMHDLRVDGGATLGV

SEQ ID NO: 91928 - protein, 261 aa, Paenibacillus xylanexedens
  misc_feature (1)..(261): tr|A0A3N6BX28|A0A3N6BX28_9BACL 2,3-dihydro-2,3-dihydrox ybenzoate dehydrogenase OS=Paenibacillus xylanexedens O X=528191 GN=EDO6_04819 PE=4 SV=1
MSYTGIDGKVAVVTGAAQGIGEAVARLLAQNGAFVALVDRQESLLNQLVTDLHSQGHQATAHVADISNRQAVEDTVQRIEETVGPIGILVNAAGVLHTGAVSELTDEEWTKTFDVNTHGVFYMSRAVVRNMAERQTGAVVTVGSNASGVPRMHMSAYAASKAASTIFTKCLALEYADRHIRCNIVSPGSTDTPMQRAMWQDEHGAEAVIAGSPQTFRLGIPLNRMALPEDIAEAVVYLVSDQARHITMHDLCVDGGATLGT

SEQ ID NO: 91929 - protein, 242 aa, Paeniglutamicibacter gangotriensis
  misc_feature (1)..(242): tr|M7MSQ8|M7MSQ8_9MICC 2,3-dihydroxybenzoate-2,3-dehydr ogenase OS=Paeniglutamicibacter gangotriensis Lz1y OX=1 276920 GN=ADIAG_02485 PE=4 SV=1
MADLTDLTVLIAGATSAAGVAAAHALCQAGATVLAAGSNAGRLNEALPFVHGRYEVDLADHAAVTELRALIDVERGPIDGLLHLVGGWRGGKALAGQSDDDYAFLHTQVITTLRNTTRVFRDDLVASKCGRVGIVSATAVDAPSGSNANYTTAKAGAEAWMRSVAAELRTAQSGHKTDPVPQRAAALIWVIKAFTNAEARAAKPEAKTAGFTDVTALGQAAVQLFTSDAADLNGARIHLPTL

SEQ ID NO: 91930 - protein, 251 aa, Palleronia marisminoris
  misc_feature (1)..(251): tr|A0A1Y5TI37|A0A1Y5TI37_9RHOB 2,3-dihydro-2,3-dihydrox ybenzoate dehydrogenase OS=Palleronia marisminoris OX=3 15423 GN=dhbA PE=4 SV=1
MKLTGFEGRRALVTGAAGGIGSALATALAEAGASVTATDLESALTGVDRKDGIAWQPLDVTDPAAVDRLVGEGEAFDLGAHAAGILVTAPLLDTTVEDWQRVFDINVNGTFHVTRALGRRMAARGRGAIVAIGSNAAGIPRTGMGAYPATKAAVAMHMRCLGLELAAHGVRCNLVAPGSTLTPMQTGMWADETGAERVIAGDPATYRTGIPLRKLATPEDIAMAAMFLLSEQAGHVTMADLYVDGGATLRT

SEQ ID NO: 91931 - protein, 237 aa, Pandoraea apista
  misc_feature (1)..(237): tr|A0A0G4JLW2|A0A0G4JLW2_9BURK 2,3-dihydro-2,3-dihydrox ybenzoate dehydrogenase OS=Pandoraea apista OX=93218 GN =entA PE=4 SV=1
MFNFDGQRVLVIGGSSGIGRAAAQAFAKAGAAVTIASRSQSRLDEALATIGTTARAVVLDMGDASAVERFFADHAPWQHVVVSAAQTPTGQVRKLSLDDAHAAFDSKFWGSYHVARYARIEDGGSLTLTSGYLSVRPSTSSVVQGAINAAVEALGRGLALELSPVRVNTVSPGLTVTPLWNKLAEADREAMYRNAAERLPARRVVAAEDVANTILYLAGTPSATGSTVLIDAGGAIA

SEQ ID NO: 91932 - protein, 237 aa, Pandoraea pnomenusa
  misc_feature (1)..(237): tr|A0A378YFK3|A0A378YFK3_9BURK 2,3-dihydro-2,3-dihydrox ybenzoate dehydrogenase OS=Pandoraea pnomenusa OX=93220 GN=entA PE=4 SV=1
MFDFEGQRVLVIGGSSGIGRAAAQAFAKAGAAVTIASRSQAKLDAALATIGSTARAVVLDTGNAAAVERFFEEHAPWQHVVISAAQTPTGQVRKLSLEDAHTAFDSKFWGTYHVARHARIEAGGSLTLTSGYLSVRPSTASVVQGAINAAVEALGRGLALELSPVRVNTVSPGLTVTPLWNKMAETDREAMYRNAAERLPARRVVAADDVANAILYLAGTPSATGSTVLIDAGGAIA

SEQ ID NO: 91933 - protein, 237 aa, Pandoraea pulmonicola
  misc_feature (1)..(237): tr|A0A378ZBQ5|A0A378ZBQ5_9BURK 2,3-dihydro-2,3-dihydrox ybenzoate dehydrogenase OS=Pandoraea pulmonicola OX=932 21 GN=entA PE=4 SV=1
MFNFEGQRVLVIGGSSGIGRAAAQAFARAGAAVTIASRNQAKLDEALATIGNTARAAVLDISDAAAVERFFADHASWQHVVMSAAQTPTGQVRKLPLDDAHAAFDSKFWGTYHVARFARIEDGGSLTLTSGYLSVRPSTSSVVQGAINAAIEALGRGLALELSPVRVNTVSPGLTVTPLWNKLSEADREAMYRNAAERLPARRVVAAEDVANTILYLAGTPSATGSTVLIDAGGAIA

SEQ ID NO: 91934 - protein, 237 aa, Pandoraea sputorum
  misc_feature (1)..(237): tr|A0A239SH79|A0A239SH79_9BURK 2,3-dihydro-2,3-dihydrox ybenzoate dehydrogenase OS=Pandoraea sputorum OX=93222 GN=entA PE=4 SV=1
MFNFEGQRVLVIGGSSGIGRAAAQAFAKAGAVVTIASRSQAKLDEALATIGSTARAVVLDTGDVAAVERFFADHAPWQHVVISAAQTPTGQVRKLSLDDAHAAFDSKFWGTYHVAKFARIEDGGSLTLTSGYLSVRPNTSSVVQGAINAAVEALGRGLALELSPVRVNTVSPGLTVTPLWNKLAEADREAMYHNAAQRLPARRVVAAEDVANTILYLAGTPSATGSTVLIDAGGAIA

SEQ ID NO: 91935 - protein, 252 aa, Pantoea anthophila
  misc_feature (1)..(252): tr|A0A506PBC2|A0A506PBC2_9GAMM 2,3-dihydro-2,3-dihydrox ybenzoate dehydrogenase OS=Pantoea anthophila OX=470931 GN=dhbA PE=4 SV=1
MSHTFDFSGRVVWVTGAGQGIGYQSALAFHRAGAQVEAFDLQFARQDYPFRCHRLDVADPDQVETICQRVLATQPRIDVLVNAAGILRVGATDTLSFADWQACLNVNAGGAFNLFQQTLPRFRQQRAGAIVTVASNAAHAPRIGMSAYGASKAALRSLCLTVGLEMAPFGVRCNIVSPGSTDTAMQRSLWQTPGGEQEMIAGFPDQFKLGIPLGKIAQPQEIAATVLFLASDLASHVTLQDIVVDGGATLGA

SEQ ID NO: 91936 - protein, 252 aa, Pantoea dispersa
  misc_feature (1)..(252): tr|A0A518X974|A0A518X974_9GAMM 2,3-dihydro-2,3-dihydrox ybenzoate dehydrogenase OS=Pantoea dispersa OX=59814 GN =dhbA PE=4 SV=1
MSAVFDFQGKTVWVTGAGKGIGYHTACAFQQAGAQVIGFDRCFDQAAYPFVTETLDVADPDAVQRVCQRLLAAQPRLDVLVNAAGILRTGSTETLSFADWQACLAVNAGGAFNLFQQTLPRFRQQRAGAIVTVASNAAHAPRLGMSAYGASKAALRSLCQTVGLEMAPCGVRCNLVSPGSTDTDMQRSLWHTADAEQATINGFPDQYKLGIPLRKIAQPQEIVNTILFLASDLASHVVLQDIVVDGGATLGA

SEQ ID NO: 91937 - protein, 252 aa, Pantoea rodasii
  misc_feature (1)..(252): tr|A0A0B1RDZ1|A0A0B1RDZ1_9GAMM 2,3-dihydroxybenzoate-2, 3-dehydrogenase OS=Pantoea rodasii OX=1076549 GN=QU24_0 1155 PE=4 SV=1
MSASFDFSGKIVWVTGAGKGIGYHTALAFHQAGAKVIGFDLRFDQAEYPFTTQVMDVANAAEVKAVCQRLLADQPHLDVLVNGAGILRIGSTEELAFEDWQACLAVNAGGAFNMFQQTLPVFRQQRAGAIVTIASNAAHAPRLGMSAYGASKAALRSLCLTVGLEMAPLGVRCNIVSPGSTDTDMQRSLWHTPEAEQEMINGFQDQYKLGIPLRKIAKPQEIVNNILFLASDLASHVVLQDIVVDGGATLGS

SEQ ID NO: 91938 - protein, 252 aa, Pantoea sp.
  misc_feature (1)..(252): tr|A0A0F5XZM5|A0A0F5XZM5_9GAMM 2,3-dihydroxybenzoate-2, 3-dehydrogenase OS=Pantoea sp. 3.5.1 OX=1522060 GN=EP46 _11430 PE=4 SV=1
MSHSFDFSGKIVWITGAGQGIGYHTALAFHQAGAQVEAFDQRFHGHDYPFPCHTLDVSDPDQVKTLCQRLLATQPRIDVLVNAAGILRIGATDELSFTDWQACLNVNAGGAFNLFQQTLPVFRQQRAGAIVTIASNSAHAPRIGMSAYGASKAALRSLCLTVGLEMAPYGVRCNIVSPGSTDTDMQRSLWHTPTGEQEMIAGFPDQFKLGIPLGKIAQPQEIAANVLFLASDLASHVTLQDIVVDGGATLGA

SEQ ID NO: 91939 - protein, 252 aa, Pantoea sp.
  misc_feature (1)..(252): tr|A0A0F3M0W8|A0A0F3M0W8_9GAMM 2,3-dihydroxybenzoate-2, 3-dehydrogenase OS=Pantoea sp. BL1 OX=1628190 GN=VH86_1 2150 PE=4 SV=1
MSASFDFNGKFVWVTGAGKGIGYHTALAFHHAGAQVIGFDLRFDQPDYPFATQVLDVANAAEVKEVCQRLLAEQPRLDVLVNGAGILRVGSTEALAFEDWQACLAVNAGGAFNMFQQTLPVFRQQRAGAIVTIASNAAHAPRLGMSAYGASKAALRSLCLTVGLEMAPFGVRCNIVSPGSTDTDMQRSLWHTPEAEQEMINGFPDQYKLGIPLRKIAKPQEIVNNVLFLASDLASHVVLQDIVVDGGATLGS

SEQ ID NO: 91940 - protein, 252 aa, Pantoea sp.
  misc_feature (1)..(252): tr|A0A519R754|A0A519R754_9GAMM 2,3-dihydro-2,3-dihydrox ybenzoate dehydrogenase OS=Pantoea sp. OX=69393 GN=dhbA PE=4 SV=1
MSHTFDFSGKIVWVTGAGQGIGYHTALAFHQAGAQVEAFDQRFKGHDYPFPCHTMDVADPAQVKTICQRVLAAQPRIDVLVNAAGILRIGATDELSFADWQACLNVNAGGAFNLFQQTLPRFREQRAGAIVTVASNSAHAPRIGMSAYGASKAALRSLCQTVGLEMAPYGVRSNIVSPGSTDTDMQRSLWHTPTGEQEMIAGFPDQFKLGIPLGKIAQPQEIAATVLFLASDLASHVTLQDIVVDGGATLGA

SEQ ID NO: 91941 - protein, 252 aa, Pantoea sp.
  misc_feature (1)..(252): tr|A0A555ZJT0|A0A555ZJT0_9GAMM 2,3-dihydro-2,3-dihydrox ybenzoate dehydrogenase OS=Pantoea sp. paga OX=2597519 GN=dhbA PE=4 SV=1
MSHTFDFSGKIVWVTGAGQGIGYHTALAFHQAGAQVEAFDQRFKGHDYPFPCHMMDVADPAQVKTICQRVLAAQPRIDVLVNAAGILRIGATDELSFADWQACLNVNAGGAFNLFQQTLPRFREQRAGAIVTVASNSAHAPRIGMSAYGASKAALRSLCQTVGLEMAPYGVRCNIVSPGSTDTDMQRSLWHTPTGEQEMIAGFPDQFKLGIPLGKIAQPQEIAATVLFLASDLASHVTLQDIVVDGGATLGA

SEQ ID NO: 91942 - protein, 252 aa, Pantoea sp.
  misc_feature (1)..(252): tr|A0A4S3L9I4|A0A4S3L9I4_9GAMM 2,3-dihydro-2,3-dihydrox ybenzoate dehydrogenase OS=Pantoea sp. R102 OX=2507583 GN=dhbA PE=4 SV=1
MSACFDFSGKIVWVTGAGKGIGYHTALAFHQAGAQVTGFDLHFGQDDYPFATCQLDVADSAAVRDCCQSLLASQPRLDILVNGAGILRIGSTDALSFADWQACLAVNAGGAFNLFQQTLPVFRQQRAGAIVTIASNAAHAPRLGMSAYGASKAALRSLCQTVGLEMAPYGVRCNIVSPGSTDTDMQRSLWHTPEAEQEMINGFPDQYKLGIPLRKIAQPQEIVNNILFLASDLASHVVLQDIVVDGGATLGA

SEQ ID NO: 91943 - protein, 252 aa, Pantoea sp.
  misc_feature (1)..(252): tr|A0A3N4PYG3|A0A3N4PYG3_9GAMM 2,3-dihydro-2,3-dihydrox ybenzoate dehydrogenase OS=Pantoea sp. RIT388 OX=186931 3 GN=dhbA PE=4 SV=1
MSHSFDFSGKIVWVTGAGQGIGYHTALAFHAAGAQVQGFDRRFHDSDYPFACHTLDVADPDQVKTVCQRLLAEQTRLDVLVNGAGILRIGATDEISFADFQACLAVNVGGAFNMFQQTLPLFRQQRAGAIVTIASNSAHAPRIGMSAYGASKAALRSLCLTVGLEMAPFGVRCNIVSPGSTDTEMQRSLWHTPTAEQEMIDGFPDQYKLGIPLRKIAQPQEIAHNVLFLASDLASHVVLQDIVVDGGATLGA

SEQ ID NO: 91944 - protein, 252 aa, Pantoea sp.
  misc_feature (1)..(252): tr|A0A432B899|A0A432B899_9GAMM 2,3-dihydro-2,3-dihydrox ybenzoate dehydrogenase OS=Pantoea sp. YU22 OX=2497684 GN=dhbA PE=4 SV=1
MSQHFDFSGKIVWVTGAGQGIGYHTALAFHAAGAQVQGFDLRFHDHEYPFACHRLDVADPEQVKATCQPLLAQQPRLDVLVNGAGILRIGATDEISFEDFQACLAVNVGGAFNMFQQTLPRFRQQRAGAIVTIASNSAHAPRIGMSAYGASKAALRSLALTVGLEMAPYGVRCNIVSPGSTDTEMQRSLWHTPTAEQEMIDGFPDQYKLGIPLRKIARPQEIAHNVLFLASDLASHVVLQDIVVDGGATLGA

SEQ ID NO: 91945 - protein, 252 aa, Pantoea vagans
  misc_feature (1)..(252): tr|E1SC62|E1SC62_PANVC 2,3-dihydro-2,3-dihydroxybenzoat e dehydrogenase OS=Pantoea vagans (strain C9-1) OX=7128 98 GN=entA PE=4 SV=1
MSHVSDFSGKIVWVTGAGQGIGYHTALAFHQAGAQVEAFDLRFQGHDYPFSCHIMDVADPAQVKSVCQRVLAAQPRIDVLVNAAGILRTGATDALSFADWQACLNVNAGGAFNLFQQTLPRFREQRAGAIVTVASNSAHAPRIGMSAYGASKAALRSLCLTVGLEMAPYGVRCNIVSPGSTDTDMQRSLWHTPTGEQEMIAGFPDQFKLGIPLGKIAQPQEIAATVLFLASDLASHVTLQDIVVDGGATLGA

SEQ ID NO: 91946 - protein, 252 aa, Pantoea vagans; identical to SEQ ID NO: 91937
  misc_feature (1)..(252): tr|A0A0U3UTI1|A0A0U3UTI1_9GAMM 2,3-dihydroxybenzoate-2, 3-dehydrogenase OS=Pantoea vagans OX=470934 GN=LK04_165 05 PE=4 SV=1

SEQ ID NO: 91947 - protein, 258 aa, Paracoccus sp.
  misc_feature (1)..(258): tr|A0A418T7J2|A0A418T7J2_9RHOB 2,3-dihydro-2,3-dihydrox ybenzoate dehydrogenase OS=Paracoccus sp. 1011MAR3C25 O X=1675788 GN=D3P04_00480 PE=4 SV=1
MKLEGFSNRAAFVTGAAGGIGLALVAALHAAGARVFATDIPEALDGLLEWDSNETVHWHRLDVSDPVAVADCVALAEETVGPLSLAVHAAGILSTTPVLDLTPAEWERVMSVNAGGCFNVLQALGRVMLPRGKGSIVVVGSNAAGVPRQNMAAYAASKAAIAMLTRCVGLELAGHGIRCNILAPGSTLTPMQTGMWADESGAAKVIAGDPASYRTGIPLGKLAAPEDIAAAAMFLLSDQAGQITMTDLYVDGGATLRA

SEQ ID NO: 91948 - protein, 256 aa, Paracoccus yeei
  misc_feature (1)..(256): tr|A0A386UHN6|A0A386UHN6_9RHOB 2,3-dihydro-2,3-dihydrox ybenzoate dehydrogenase of siderophore biosynthesis OS= Paracoccus yeei OX=147645 GN=PY32053_00491 PE=4 SV=1
MRLTGFQDRTAIVTGAAGGIGRSVVAALVEAGARVIATDTEAALQAAPVPGAENRALDVRDAEATEALVAGVEAAHGPLALGVHAAGVLGIAPILDMAPQEWDRVMGVNATGTFNVTRAFGRAMARQGRGAIVVVSSNAAGIPRLNMGAYAASKAAATMLVRCLGLELAAQGVRCNIVAPGSTLTPMQTGMWAEDGGAGERAVIEGSLEAYRTGIPLKKLATPEDIAGAVMFLLSDQAGHVTMADLYVDGGATMRA

SEQ ID NO: 91949 - protein, 261 aa, Parageobacillus thermoglucosidasius
  misc_feature (1)..(261): tr|A0A369XEB5|A0A369XEB5_PARTM 2,3-dihydro-2,3-dihydrox ybenzoate dehydrogenase OS=Parageobacillus thermoglucos idasius OX=1426 GN=DV713_02370 PE=3 SV=1
MEHWGLQGKIALVTGAAQGIGEAVTRSFVKHGVSVAAVDRNGERLAALVSDLQSNGYDVQAFCADVANSAEIDEIVAQIEDNMGPIEILVNVAGILRTGLIESFMDEDWEEVFKVNTAGVFYVSRSVSRRMIPRRSGAIVTVSSNAATIPRMFMAAYAASKAAATMFTKCLGLELARYHIRCNVVSPGSTETEMQRVLWTDENGANKVITGSMEEFRLGIPLQKLAQPSDIADAVLFLVSEQSRHITMHDLRVDGGATLDA

SEQ ID NO: 91950 - protein, 256 aa, Pectobacterium aquaticum
  misc_feature (1)..(256): tr|A0A3R8NM38|A0A3R8NM38_9GAMM 2,3-dihydro-2,3-dihydrox ybenzoate dehydrogenase OS=Pectobacterium aquaticum OX= 2204145 GN=dhbA PE=4 SV=1
MMNKAQPLQFDFRGKTVWVTGAASGIGESIARQFVALGANVIGFDRAFRHDDHPFSCVTLDISEPDSVAAVCRQQLAETGLDVLVNAAGILRLGDIDALSVDDWHQCINVNASGAFYLLNALVPHFKQQRRGAIVCVGSNAAHVPRMQMAAYCASKAALTSLSHCAGLELAPYGVRCNLVSPGSTDTPMQRGMWHSADAEQRTIAGFPDQYKLGIPLGKIAQPEEIANTVVFLASDLASHITMQDVVVDGGATLTA

SEQ ID NO: 91951 - protein, 261 aa, Pectobacterium atrosepticum
  misc_feature (1)..(261): tr|Q6D9Y2|Q6D9Y2_PECAS Enterobactin synthetase componen t A (2,3-dihydro-2,3-dihydroxybenzoate dehydrogenase) O S=Pectobacterium atrosepticum (strain SCRI 1043 / ATCC BAA-672) OX=218491 GN=entA PE=4 SV=1
MMNKAQPLQFDFSGQTVWVTGAASGIGESIARQFVALGANVIGFDRAFQHNASPYNDRPFRCVTLDISEPNSVATVCRQQLAETGLDVLVNAAGILRLGDIDALSVDDWYQCINVNASGAFYLLNALVPHFKQQRRGAIVCVGSNAAHVPRVQMAAYCASKAALTSLSHCAGLELAPYGVRCNLVSPGSTDTPMQRGMWHSADAEQRTIAGFPDQYKLGIPLGKIAQPEEIANTVVFLASDLASHITMQDVVVDGGATLTA

SEQ ID NO: 91952 - protein, 256 aa, Pectobacterium carotovorum
  misc_feature (1)..(256): tr|A0A419AQP0|A0A419AQP0_PECCA 2,3-dihydro-2,3-dihydrox ybenzoate dehydrogenase OS=Pectobacterium carotovorum O X=554 GN=dhbA PE=4 SV=1
MMNKAQPLQFDFSGQTVWVTGAASGIGESIARQFVALGANVIGFDRAFRHYDHPFTCVTLDISEPDSVAAVCRQQLAETGLDVFVNAAGILRLGDIDALSVDDWHQCINVNASGAFYLLNALVPHFKQQRRGAIVCVGSNAAHVPRLQMAAYCASKAALTSLSHCAGLELAPYGVRCNLVSPGSTNTPMQRGMWHSADAEQRTIAGFPDQYKLGIPLGKIAQPEEIANTVVFLASDLASHITMQDVVVDGGATLTA

SEQ ID NO: 91953 - protein, 256 aa, Pectobacterium carotovorum
  misc_feature (1)..(256): tr|A0A518VP29|A0A518VP29_PECCC 2,3-dihydro-2,3-dihydrox ybenzoate dehydrogenase OS=Pectobacterium carotovorum s ubsp. carotovorum OX=555 GN=dhbA PE=4 SV=1
MMNKAQPLQFDFSGKTVWVTGAASGIGESIACQFVALGANVIGFDRAFRHNDYPFRGVTLDISEPDSVAAVCRQQLAETGLDVLVNAAGILRLGDIDALSVDDWHQCINVNASGAFYLLNALVPHFKQQRRGAIVCVGSNAAHVPRLQMAAYCASKAALASLSHCAGLELAPYGVRCNLVSPGSTDTPMQRGMWHSAGAEQRTIAGFPDQYKLGIPLGKIAQPEEIANTVVFLASDLASHITMQDVVVDGGATLTA

SEQ ID NO: 91954 - protein, 256 aa, Pectobacterium polaris
  misc_feature (1)..(256): tr|A0A3A4A0L7|A0A3A4A0L7_9GAMM 2,3-dihydro-2,3-dihydrox ybenzoate dehydrogenase OS=Pectobacterium polaris OX=20 42057 GN=dhbA PE=4 SV=1
MMNKAQPLQFDFSGQTVWVTGAASGIGESIARQFVALGATVIGFDRQFLHQDHPFTCVTLDISEPDSVAAVCRRQLAETGLDVLVNAAGILRLGDIDALSVDDWHQCINVNASGAFYLLNALVPHFKQQRRGAIVCVGSNAAHVPRLQMAAYCASKAALTSLSHCAGLELAPYGVRCNLVSPGSTDTPMQRGMWHSADAEQRTIAGFPDQYKLGIPLGKIAQPEEIANTVVFLASDLASHITMQDVVVDGGATLTA

SEQ ID NO: 91955 - protein, 256 aa, Pectobacterium polonicum
  misc_feature (1)..(256): tr|A0A4U7KD36|A0A4U7KD36_9GAMM 2,3-dihydro-2,3-dihydrox ybenzoate dehydrogenase OS=Pectobacterium polonicum OX= 2485124 GN=dhbA PE=4 SV=1
MMNKAKPLQFDFSGKTVWVTGAASGIGESIARQFVALGANVIGFDRAFRHDDHPFSCVTLDISEPDSVAAVCRQQLAETGLDVLVNAAGILRLGDIDALSVDDWHQCINVNASGAFYLLNALVPHFKQQRRGAIVCVGSNAAHVPRMQMAAYCASKAALTSLSHCAGLELAPYGVRCNLVSPGSTDTPMQRGMWHSADAEQRTIAGFPDQYKLGIPLGKIAQPEEIANTVVFLASDLASHITMQDVVVDGGATLTA

SEQ ID NO: 91956 - protein, 265 aa, Pelagibacterium sp.
  misc_feature (1)..(265): tr|A0A369W3A5|A0A369W3A5_9RHIZ 2,3-dihydro-2,3-dihydrox ybenzoate dehydrogenase OS=Pelagibacterium sp. XYN52 OX =2282655 GN=DVH29_14630 PE=4 SV=1
MNTAPNSLRPSGIAGKIAFVTGAGSGIGAAVARGLHAEGARVVATDIAPGGIERLASELGPALRCLTLDISDSAAVDAAIAEIEQSWGPIDLGVSVAGILATDLVTETSDETWKRVFDVNTHGVFHVARALAGRMQARRRGALVTVSSNAASVPRHGMAAYAASKAATSMFMRCLGLELAPFGIRCNTVAPGSTLTPMQTGMWADESGSQKVIAGSLETYKNGIPLGKLATPEEVADAVLFLLSDRASHITMANLMIDGGATLSA

SEQ ID NO: 91957 - protein, 261 aa, Pelagicola litorisediminis
  misc_feature (1)..(261): tr|A0A1Y5SIM1|A0A1Y5SIM1_9RHOB 2,3-dihydro-2,3-dihydrox ybenzoate dehydrogenase OS=Pelagicola litorisediminis O X=1312363 GN=dhbA PE=4 SV=1
MWELGLSGRAIVTGAGQGIGRAIALQLLAAGCHVQAIGRSGEKLLTLADEAKVPADQVLATALDIQDTAAVAQTLAKSQADLGPPRYLVNSAGVLKSSRLLDTPEDALANTIAINLTATVVMSQIVARQMIEAGQGAIVTIGSNSGTTPRLLLGGYPASKAGLEMAMKCLGLELSEYGIRCNIVSPGSTDTPMQAAYQGDTKSRERVLKGDTGSWRLGIPLGRMAQPEDVADLVLFLLSDRARHITMENIVIDGGGTLGAR

SEQ ID NO: 91958 - protein, 261 aa, Pelosinus fermentans
  misc_feature (1)..(261): tr|I9DMY0|I9DMY0_9FIRM 2,3-dihydro-2,3-dihydroxybenzoat e dehydrogenase OS=Pelosinus fermentans JBW45 OX=119219 7 GN=JBW_01670 PE=3 SV=1
MNYLKMKGKIALVTGGAQGIGESIVRALTEAGAVVAMLDHNAAKLNSLVNELKSQGCNVEAFLVDVSDSKAVNTVVDLIECNIGPIDILINVAGVLRMGLISSLSDQDWEKTFAVNSRGVFNVSRSVSKYMIPRQKGSIVVVGSNAAKVPRISMAAYAASKAAATMFTKCLGLELAQYNIRCNIVSPGSTDTEMQWSLWKDENGARAVIAGTPEAFKIGIPLKKIAAPSDIADAVLFLASDRANHITMLDLCVDGGATLGV

SEQ ID NO: 91959 - protein, 232 aa, Phaeobacter italicus
  misc_feature (1)..(232): tr|A0A0H5CYW1|A0A0H5CYW1_9RHOB 2,3-dihydro-2,3-dihydrox ybenzoate dehydrogenase OS=Phaeobacter italicus OX=4814 46 GN=entA PE=4 SV=1
MHKRILIIGGTSGVGAELAKHYVNAGHDVWITGRRRPEKTEATFLPLNISADPKQLAQDLDLLLADIGKLHTLIFAAGYLQRGHIDDLTDDDLATMVNTGLLAPMLLVQRLKREAIGPLKVILISSSSQYTPREREPAYSATKAAMGMLGASLARDPDLGKVLVVAPSGIATDFWDGSGEDTRTMLDPHWVSNQIVDLSSGPFKYKYAKILRHPARVEVVECLNNQMEPATP

SEQ ID NO: 91960 - protein, 226 aa, Photobacterium damselae
  misc_feature (1)..(226): tr|A0A2T3QQ02|A0A2T3QQ02_9GAMM 2,3-dihydro-2,3-dihydrox ybenzoate dehydrogenase OS=Photobacterium damselae OX=3 8293 GN=dhbA PE=4 SV=1
MQIAQSVVVITAAGSAIGRAMAMHFSQLGAHIALIDTDASHLQTTLECCQTLKNPCHGYLIKDLTEANIHQIGLKVLQDFGSIDILVNCWQGIVLPNLLSSHSEEHMTQALTQDSTLFFSFGRFIANYMKSNKRAGVILNVITSETLDTANYTIGNKAMIAGLTQNWAKELKHFDVRVGSIVPISYQETNTSAPLSLSMQYEMVRSAEYIVENDYFNGRIIEAEHQ

SEQ ID NO: 91961 - protein, 252 aa, Photorhabdus asymbiotica
  misc_feature (1)..(252): tr|C7BNH5|C7BNH5_PHOAA 2,3-dihydro-2,3-dihydroxybenzoat e OS=Photorhabdus asymbiotica subsp. asymbiotica (strai n ATCC 43949 / 3105-77) OX=553480 GN=phbA PE=4 SV=1
MSITLDFSDKIVWITGAGSGIGYQTAYRFQQAGAKVIGFDITFPEGDLPFTPYLLDISDTIAVSRCCEQLLVQQPRLDVLVNGAGILRLGATEEITFEDWQQCLSVNAGGAFNLFQATIPQFQRQKAGAIVTIASNAAHVPRVGMSAYCASKAALRSLCLSVGLELAPYGVRCNLVSPGSTDTPMQRDMWQTEASKQQVIQGFSELFKLGIPLGKIATPTEIADAILFMASDLASHITLQDIVIDGGATLGA

SEQ ID NO: 91962 - protein, 252 aa, Photorhabdus australis
  misc_feature (1)..(252): tr|A0A1C0U9U4|A0A1C0U9U4_9GAMM 2,3-dihydro-2,3-dihydrox ybenzoate dehydrogenase OS=Photorhabdus australis OX=28 6156 GN=entA PE=4 SV=1
MSITLDFSDKIVWVTGAGSGIGYQTAYRFQQAGAKVIGFDITFPEGNLPFTPCLLDISDNIAVSRCCEQLLAQQPRLDVLVNGAGILRLGATEEIMFEDWQQCLSVNAGGAFNLFQATIPQFQRQKAGAIVTIASNAAHVPRVGMSAYCASKAALRSLCLSVGLELAPYGVRCNLVSPGSTDTPMQRDMWQTEASKQQVIQGFSELFKLGIPLGKIATPTEIADAVLFMASDLASHITLQDIVIDGGATLGA

SEQ ID NO: 91963 - protein, 252 aa, Photorhabdus heterorhabditis
  misc_feature (1)..(252): tr|A0A0M9D0I7|A0A0M9D0I7_9GAMM 2,3-dihydroxybenzoate-2, 3-dehydrogenase OS=Photorhabdus heterorhabditis OX=8801 56 GN=AM629_07730 PE=4 SV=1
MSITLDFSDKIVWVTGAGSGIGYQTAYRFQQAGAKVIGFDITFPDGDLPFTPYLLDISDTIAVSHCCEQLLAQQPQLDVLVNGAGILRLGATEEITFEDWQQCLSVNAGGAFNLFQATIPQFQRQKAGAIVTIASNAAHVPRVGMSAYCASKAALRSLCLSVGLELAPYGVRCNLISPGSTDTPMQRDMWQTAASKQQVIQGFSELFKLGIPLGKIATPTEIADAVLFMASDLASHITLQDIVIDGGATLGA

SEQ ID NO: 91964 - protein, 256 aa, Photorhabdus luminescens
  misc_feature (1)..(256): tr|A0A022PJW8|A0A022PJW8_PHOLU 2,3-dihydro-2,3-dihydrox ybenzoate dehydrogenase OS=Photorhabdus luminescens BA1 OX=1393736 GN=BA1DRAFT_02654 PE=4 SV=1
MKNKQNLQMDFSHKTVWVTGAARGIGEQIARDFTALGANVIGFDRVFEQDDLPYQCIQLDISDPEKVEMICSQQLSISAKLDILVNAAGILQLGNIDELNISDWHRCINVNASGAFYLLRAVVPHFKRQRSGAIISISSNAAHVPRMRMAAYCASKSALTSLTHCVGLELAPFGIRCNVVSPGSTDTPMQRSMWKTDDDEKNMINGYPEQYKLGIPLGKIASVNEISHTVLFLSSDLASHITLQDIVVDGGATLAC

SEQ ID NO: 91965 - protein, 256 aa, Photorhabdus luminescens
  misc_feature (1)..(256): tr|A0A5C4RGN4|A0A5C4RGN4_PHOLU 2,3-dihydro-2,3-dihydrox ybenzoate dehydrogenase OS=Photorhabdus luminescens sub sp. sonorensis OX=1173677 GN=dhbA PE=4 SV=1
MKNKQNLQMDFSHKTVWVTGAARGIGEQIARDFTALGANVIGFDHVFEQDNLPYKCIQLDISDPEKVEMICSQQLSISDKLDILVNAAGILQLGNVDELNISDWHRCINVNASGAFYLFRTVIPHFKRQRSGNIISVSSNAAHVPRMRMAAYCASKSALTSLTHCVGLELAPFGVRCNVVSPGSTDTLMQRSMWKTDDDEKNTINGYPEQYKLGIPLGKIANVNEISHTVLFLSSDLASHITLQDIVVDGGATLAC

SEQ ID NO: 91966 - protein, 256 aa, Photorhabdus namnaonensis
  misc_feature (1)..(256): tr|A0A1B8YE17|A0A1B8YE17_9GAMM 2,3-dihydro-2,3-dihydrox ybenzoate dehydrogenase OS=Photorhabdus namnaonensis OX =1851568 GN=entA PE=4 SV=1
MQNKQNLQMDFSRKTVWVTGAARGIGEQIARDFTALGANVIGFDRVFEQDNLPYQCIQLDISDPEKVEMICSQQLSISAKLDILVNAAGILQLGNIDELNISDWHRCINVNASGAFYLFHTVVPHFKRQRSGAIISISSNAAHVPRMRMAAYCASKSALTSLTHCVGLELAPFGVRCNVVSPGSTDTPMQRSMWKTDDDEKNTINGYPEQYKLGIPLGKIANVNEISHTVLFLSSDLASHITLQDIVVDGGATLAC

SEQ ID NO: 91967 - protein, 252 aa, Photorhabdus temperata
  misc_feature (1)..(252): tr|U7R8F6|U7R8F6_PHOTE 2,3-dihydroxybenzoate-2,3-dehydr ogenase OS=Photorhabdus temperata J3 OX=1389415 GN=O185 _00655 PE=4 SV=1
MSIALDFSDKIVWVTGAGSGIGYQTAYRFQQAGAKVIGFDITFPEGDLPFIPYLLDISDPIAVSRCCEQLLAQQPQLDVLVNGAGILRLGAAEEITFEDWQQCLSVNAGGAFNLFQATIPQFQRQKAGAIVTIASNAAHVPRVGMSAYCASKAALRSLCLSVGLELAPYGVRCNLISPGSTDTPMQRGMWQTEASKQQVIQGSSELFKLGIPLGKIATPTEIADAVLFMASDLASHITLQDIVIDGGATLGA

SEQ ID NO: 91968 - protein, 252 aa, Photorhabdus temperata
  misc_feature (1)..(252): tr|T0P2R3|T0P2R3_PHOTE 2,3-dihydroxybenzoate-2,3-dehydr ogenase OS=Photorhabdus temperata subsp. temperata M102 1 OX=1221520 GN=B738_05844 PE=4 SV=1
MSIALDFSDKIVWVTGAGSGIGYQTAYRFQQAGAKVIGFDITFPEGDLPFIPYLLDISDPIAVSRCCEQLLAQQPQLDVLVNGAGILRLGAAEEITFEDWQQCLSVNAGGAFNLFQATIPQFQRQKAGAIVTIASNAAHVPRVGMSAYCASKAALRSLCLSVGLELAPYGVRCNLISPGSTDTPMQRGMWQTEASKQQVIQGSSKLFKLGIPLGKIATPTEIADAVLFMASDLASHITLQDIVIDGGATLGA

SEQ ID NO: 91969 - protein, 252 aa, Photorhabdus temperata; identical to SEQ ID NO: 91967
  misc_feature (1)..(252): tr|A0A081S275|A0A081S275_PHOTE 2,3-dihydro-2,3-dihydrox ybenzoate dehydrogenase OS=Photorhabdus temperata subsp . temperata Meg1 OX=1393735 GN=MEG1DRAFT_00418 PE=4 SV= 1

SEQ ID NO: 91970 - protein, 252 aa, Photorhabdus thracensis
  misc_feature (1)..(252): tr|A0A0F7LGW8|A0A0F7LGW8_9GAMM 2,3-dihydroxybenzoate-2, 3-dehydrogenase OS=Photorhabdus thracensis OX=230089 GN =VY86_02555 PE=4 SV=1
MSIALDFSDKIVWVTGAGSGIGYQTAYRFQQAGAKVIGFDITFPEGDLPFIPYLLDISDPIAVSRCCEQLLAQQPQLDVLVNGAGILRLGAAEEITFEDWQQCLSVNAGGAFNLFQATIPQFQRQKAGAIVTIASNAAHVPRVGMSAYCASKAALRSLCLSVGLELAPYGVRCNLISPGSTDTPMQRGMWQTEAFKQQVIQGSSELFKLGIPLGKIATPTEIADAVLFMASNLASHITLQDIVIDGGATLGA

SEQ ID NO: 91971 - protein, 248 aa, Phytobacter ursingii
  misc_feature (1)..(248): tr|A0A0G3QBD4|A0A0G3QBD4_9GAMM 2,3-dihydroxybenzoate-2, 3-dehydrogenase OS=Phytobacter ursingii OX=1972431 GN=A B182_18165 PE=4 SV=1
MDFSGKTVWVTGAGKGIGYATALAFADAGAQVTGFDQAFDGEHYPFTTEILDIADAEQVSRVCSRVLAQNTRLDVLVNAAGILRMGATDALSQEDWQQTFAVNVGGAFNLFQATMAQFRQQQGGAMVTVASDAAHTPRIGMSAYGASKAALKSLALTVGLELAASGVRANLVSPGSTDTDMQRTLWTSSDAEQKRIAGFGEQFKLGIPLGKIARPEEVASTILFLASDYASHITLQDIVVDGGSTLGA

SEQ ID NO: 91972 - protein, 287 aa, Pigmentiphaga aceris
  misc_feature (1)..(287): tr|A0A5C0B4I2|A0A5C0B4I2_9BURK 2,3-dihydro-2,3-dihydrox ybenzoate dehydrogenase OS=Pigmentiphaga aceris OX=1940 612 GN=FXN63_25615 PE=4 SV=1
MPDDNGEDSIAKPGEPAANDRIVPHTRPIVGDFAESRVLVTGAASGIGAAVVRALLAQGARVAALDLDELGLETLRTEAAPGQLHLATVDVSDSAAVDRAVVEAEAAIGHLDKLACVAGVLQMGKIVDLSDEQWARPFAVNATGTFNVCRAVARGMIERRSGSIVNISSNAAGTPRTGMGAYAASKAAVSQLTRCLALELAEYGIRCNIVSPGSTDTEMQRAMWREGSSRETVIEGSLAGYRLGIPLRQIATPEEVAESVLFLLSDRASHITLHDLRVDGGATLDQG

SEQ ID NO: 91973 - protein, 558 aa, Planctomyces sp.
  misc_feature (1)..(558): tr|A0A142WTS0|A0A142WTS0_9PLAN 2,3-dihydro-2,3-dihydrox ybenzoate dehydrogenase OS=Planctomyces sp. SH-PL14 OX= 1632864 GN=entA PE=4 SV=1
MIVFVTGGTGFVGRAFLPQLLEALSADDEIRVLSRGPAAGPTDRRIRPIAGDLETPDRWIDALDGVAYVFHIAADARFGQGTHYHGVNVAPVEAMLSRLRTSDTLRGFILVSTVGAVDRAPADDVRQPLTLQSAPHPTSDYGRSKRGAEELVERSGLPYTILRPGWVYGSGMRAGSHLNVMARMIRRKPWTARLGFPGRVPLIHVEDLAPALVRCLNSPAARGKTYFAVTENRSLAEVWSLLHETLRGRRPRQFRFPSLRSVLGRLHSRLPLTVNNLFLDYLAADDPDFRRDLLAERPIRLEEGARDVAARHRPEGSWWIVTGANSGIGFALTAALREAGHPVVAVDRAVDRLSEDPGLKVIAADLTQEADLQRLRKAVEPLCLGGLINNAGIGIRGGLFDLPWEASERTVRINVLGTMHLTHLLKEQLTREGSVIVNIASSVAYHPLPGMSVYAASKAFLLNWSLAFSEELRETNLVVTYSPSGTRTNFQASGGVRGANSAELLTPEAVARDILDTVRRERRHRLLGWKSRILVTLSDWLPVSLRLRLWGWLFAARR

SEQ ID NO: 91974 - protein, 268 aa, Planctomycetes bacterium
  misc_feature (1)..(268): tr|A0A5C5VAZ1|A0A5C5VAZ1_9BACT 2,3-dihydro-2,3-dihydrox ybenzoate dehydrogenase OS=Planctomycetes bacterium Enr 8 OX=2527970 GN=entA PE=4 SV=1
MRPTGSVQFDNSGRVVLVTGGAGGIGLAICQAFAASGATVYAVDVAEPEGELPAKLISGDVSKREECRRVIAQVVEEAGAIDVLVNNAAIQPPASYKAIDELSTETWDKMVAINLSGYAYMAMETAAVMRKQQSGVIVNMASAQAHRTAREVPAYGPIKAANVMQAKQWGVELAREGVRVVSVSPGAVGTPLLRASLAQQGGEESLANRHPLGRIGEPPEIAAAVLWLASEGASFITATDIEVDGGLGAFAAFADPFSVATLPGKNDC

SEQ ID NO: 91975 - protein, 251 aa, Pluralibacter gergoviae
  misc_feature (1)..(251): tr|A0A0J5P0Q4|A0A0J5P0Q4_PLUGE 2,3-dihydroxybenzoate-2, 3-dehydrogenase OS=Pluralibacter gergoviae OX=61647 GN= ABW06_09860 PE=4 SV=1
MAGFDFHGRRVWVTGAGKGIGYATALAFAEAGAEVVGFDLQFDKADYPFTTEVLDVADAGQVAETCRRLLAVTPRLDVLVNAAGILRMGATDAISVDDWQQTFAVNVGGAFNLFQQTMAQFRQQQGGAIVTVASDAAHTPRIGMSAYGASKAALKSLALTVGLELAASGVRCNLVSPGSTDTDMQRTLWVSEDAEQQRIRGFGEQFKLGIPLGKIARPQEIASTVLFLASDLASHITLQDIVVDGGSTLGA

SEQ ID NO: 91976 - protein, 258 aa, Polyangium fumosum
  misc_feature (1)..(258): tr|A0A4V5PNC0|A0A4V5PNC0_9DELT 2,3-dihydro-2,3-dihydrox ybenzoate dehydrogenase OS=Polyangium fumosum OX=889272 GN=E8A74_06640 PE=3 SV=1
MAFTGKTALVTGAAQGIGEAVVRALAARGARVAAVDSNAKRLGEVVAEMQASGQRVEPFSADVTNSEAVDATVDRIEREHGPIDFLVNVAGVLHVGPIEALRDEDWERTFAVNARGVFYLCRAVARHMVPRRSGAIVTVGSNAARTPRMHMSAYAASKAAVAMFTQCLGLELAKHGIRCNVVSPGSTDTPMQRSLWKDGSGAQAVIDGAPAAFKVGIPLQRIAEPADVADAVLFLLSDQARHITMHDLCIDGGATLGV

SEQ ID NO: 91977 - protein, 258 aa, Polyangium sp.
  misc_feature (1)..(258): tr|A0A4U1HMG9|A0A4U1HMG9_9DELT 2,3-dihydro-2,3-dihydrox ybenzoate dehydrogenase OS=Polyangium sp. SDU3-1 OX=256 7896 GN=E8A73_12625 PE=3 SV=1
MELAGKIALVTGAAQGIGEAVARALAARGATVATLDSNPERLYAVVAQMQASGHRAEPFPADVTDREAVDAAVDRIERELGPIDFLVNVAGVLHVGALETLRDEDWERSFAVNARGVFYLCQAVARRMVPRRSGAIVTVGSNAARTPRMNMSVYAASKAASTMFTKCLGLELAQHGIRCNVVSPGSTDTPMQRSLWKDGKGAQAVIDGAPDAFRLGIPLQRMADPRDVAGAVLFLLSEQARHITMHDLCVDGGATLGA

SEQ ID NO: 91978 - protein, 325 aa, Pontivivens insulae
  misc_feature (1)..(325): tr|A0A2R8A705|A0A2R8A705_9RHOB 2,3-dihydro-2,3-dihydrox ybenzoate dehydrogenase OS=Pontivivens insulae OX=16396 89 GN=entA PE=4 SV=1
MSLSDQTPLETGFHAKSTASEVLADIDLTDKTAIVTGGYSGIGLETVRALAEKGAKIIVPVRSREKAADALAGVAGDVSSKAMDLGDIASVRAFAAEVASEHPVIDILICNAGIMACPEARIGDGWESQFGICHMGHFALVTSLMEQLEASEGARIVALSSTGHKLSGIRWDDMHFQAEPYDKWVAYGQAKTANALFANALSRRLKPSGGHAFSVHPGGIFTPLQRHLPKEEMIALGWLGEDGEPSELAKAGFKSPEQGASTTLWAATSPALNGHAGVYCEDCNIAAPSDPESETSRYFGVEAHAADDAEAERLWEWSANALKAV

SEQ ID NO: 91979 - protein, 256 aa, Porphyrobacter sp.
  misc_feature (1)..(256): tr|A0A0P7Z3V9|A0A0P7Z3V9_9SPHN 2,3-dihydro-2,3-dihydrox ybenzoate dehydrogenase OS=Porphyrobacter sp. HL-46 OX= 1479239 GN=entA PE=4 SV=1
MYGISDFTGRSALVTGAASGIGAACARALAARGAARLFLVDVDGAGLDALELAAHAGCEVHRINGSVADEALWGALGPRLAGLDHAVVNAGIGSGGPIAEISLAEWRRVMAVNLDGAFLTLVSSLRAMGATGGSAVVVASVTGLKPVAGIGPYGVSKAAVAHMARIAAAENAKKGIRINAIAPGGVDTAIWESGEDFQRSVAAIGREATLKAMAKTTPLGRFATPAEMAENILYLLSDAASNITGHVMVSDGGFTL

SEQ ID NO: 91980 - protein, 245 aa, Primorskyibacter insulae
  misc_feature (1)..(245): tr|A0A2R8AQ81|A0A2R8AQ81_9RHOB 2,3-dihydro-2,3-dihydrox ybenzoate dehydrogenase OS=Primorskyibacter insulae OX= 1695997 GN=entA PE=3 SV=1
MSKTIIITGAGRGVGKATALAFLDAGWRVGLVGRTAAPLEELAAAHEGALALPCDVTDEASVEAAFEKAYAEWGHLDALFNNAGVSMKGAPIDELSVDDWRNLIDINVTGSFIAARAAFGIMRRQDPQGGRIINNGSVSAYVPRWGSAPYTASKHAITGLTRTISLDGRPFNIACGQIDIGNTLTDMAAKMTQGVPQADGSIAIEPVMDVSNVANSVLHMANLPLEANVQFMTVMATAMPFIGRG

SEQ ID NO: 91981 - protein, 276 aa, Propionispora sp.
  misc_feature (1)..(276): tr|A0A0K8JCJ2|A0A0K8JCJ2_9FIRM 2,3-dihydro-2,3-dihydrox ybenzoate dehydrogenase OS=Propionispora sp. 2/2-37 OX= 1677858 GN=dhbA PE=3 SV=1
MNHRWIAWRKERKGKMSFLNLEGKTALVTGGAQGIGEAVVRSLCEAGAVVAVIDRNPQKLNDFVARLKSAGCKAEAFPADVSDREAVDTVIEGIERNLGPIEILVNVAGVLHMGWIAELSDEAWEKTFTVNTTGVFYISRAVSRYMVSRGHGSIVTVGSNAAKVPRIAMAAYASSKAAAAMFTKCLGLELARHNIRCNIVSPGSTNTPMQWSLWNDADGAAAVIDGSQEAFKTGIPLKKLADPSDIAAAVLFLVSDKAGHITMHDICVDGGATLGV

SEQ ID NO: 91982 - protein, 251 aa, Providencia sneebia
  misc_feature (1)..(251): tr|K8W5T8|K8W5T8_9GAMM 2,3-dihydroxybenzoate-2,3-dehydr ogenase OS=Providencia sneebia DSM 19967 OX=1141660 GN= OO7_13329 PE=4 SV=1
MTRFDFQGKTVWITGAGKGIGYTSALAFVEAGAQVIGFDREFLLENYPFNTQKMDVSNAAQVKEVCQRLLQQIDQLDVLVNAAGILHIGATDTLNAEEWQQTFAVNVGGAFNLFQQTMGQFRKQQRGVIVTVASDAAHIPRIGMSAYGASKAALKSLTLTVGLELAGSGVRCNIVSPGSTDTDMQRSLWSNSDAEQQRIHGFCEQFKLGIPLGKIARPQEVASTILFLASDLASHITLQDIVVDGGSILGA

SEQ ID NO: 91983 - protein, 258 aa, Pseudaminobacter sp.
  misc_feature (1)..(258): tr|A0A432V7V2|A0A432V7V2_9RHIZ 2,3-dihydro-2,3-dihydrox ybenzoate dehydrogenase OS=Pseudaminobacter sp. CB3 OX= 1851146 GN=EET67_08960 PE=4 SV=1
MRPTGLEGKTALVTGAGGGIGEAVVRLLVDEGAHVLATDVDAAALAPLADLPAGRVTTAMLDVRDAAAVEALVDRREKEHGPIDLGVSVAGILSTDLVTETSDETWRNVFAVNCDGVFHVSRALARRMKVGRRGALVTVSSNAAGIPRHAMAAYAASKAAATMFTRCLGLELAPLGIRCNIVAPGSTLTPMQTGMWADEAGAQKVIAGSLETFKSGIPLGKLATPDDVAEAVVFLLSDRAGHITMGDLYVDGGATLRA

SEQ ID NO: 91984 - protein, 254 aa, Pseudoalteromonas citrea
  misc_feature (1)..(254): tr|U1KJP5|U1KJP5_9GAMM 2,3-dihydroxybenzoate-2,3-dehydr ogenase OS=Pseudoalteromonas citrea DSM 8771 OX=1117314 GN=PCIT_18039 PE=4 SV=1
MSFDTQLKTEYQDKVVWVTGVGQGIGLSAAQHFAKLGAKVIGFDKHFSDTACLYKPVQCDLAKLAELEATLSELIAQGLAPYNLINVAGVLEFETMEHLSLAQWMQCQTINSSAVFLFIKACYAHFKTNQQGSIVTVGSNAANTPRQKMAAYCASKAAVTQLTLTAGLELANYGVRCNVIAPGSTLTPMQTGMWQDESGAHNVIAGFAQEYKLGIPLQKIATADEIARSIVFIASQLSSHTTMQVLTIDGGATF

SEQ ID NO: 91985 - protein, 254 aa, Pseudoalteromonas luteoviolacea
  misc_feature (1)..(254): tr|A0A167H226|A0A167H226_9GAMM 2,3-dihydroxybenzoate-2, 3-dehydrogenase OS=Pseudoalteromonas luteoviolacea CPMO R-1 OX=1365248 GN=N473_06590 PE=4 SV=1
MDFHNALTSEYNQQVVWVTGVGQGIGLAVAKQFAALGAKVIGFDRQFSDTSMLFKHVLCDLSAPEQLTQTLNELIQHGLAPYNLVYVAGVLEMGGLDELNLAQWQHCQNVNSASLFVFIQQCAKHFKQTRQGSIVTIGSNAANTPRQQMGAYCASKAAATQLTLTAGIELANFGIRCNVIAPGSTLTPMQTGMWQDEHGAQRVIEGFAEQYKLGIPLQKIATPEEIANTAVFIASNLSSHTTMQVLTIDGGATF

SEQ ID NO: 91986 - protein, 254 aa, Pseudoalteromonas luteoviolacea
  misc_feature (1)..(254): tr|A0A541BJB1|A0A541BJB1_9GAMM 2,3-dihydro-2,3-dihydrox ybenzoate dehydrogenase OS=Pseudoalteromonas luteoviola cea OX=43657 GN=dhbA PE=4 SV=1
MQFEQALNAEYRDKIIWVTGVGQGIGLAVAKHFHALGAKVIGFDRHFNEPDALYKQIVCDLAQPEQVEQILAELIEQQLAPYNLIYVAGVLEMGELEALSLSQWQHCHNVNAASLFAFIKHCGAHFKQQRVGSLVTIGSNAADTPRQQMGAYCASKAAATQLTLTAGIEWANFGVRCNVIAPGSTLTPMQTGMWQDEQGAQRVIDGFAEQYKLGIPLQKIATPEEIAHSAVFLASNLSSHTTMQVLTIDGGATF

SEQ ID NO: 91987 - protein, 257 aa, Pseudoalteromonas piscicida
  misc_feature (1)..(257): tr|A0A0F4NT69|A0A0F4NT69_PSEO7 2,3-dihydro-2,3-dihydrox ybenzoate dehydrogenase OS=Pseudoalteromonas piscicida OX=43662 GN=D0N37_00670 PE=4 SV=1
MSNECEFTGRIALVTGAYQGIGKALVEQLLARGAIVVAADIAIAASQLQEVTANHFQIHLDVTNKNLVQTVVEEIEIQLGALEYVASVAGILHMGTLLEQSDAQWLDTFAVNCHGPFYLCQAVANKMRIRKRGAIVAVSSNAASTPRVNMGSYCASKAALSAMIKTLALEVAPFNIRCNLVAPGSTDTQMQQQLWRDENGAEQTIQGDLTQFKLGIPLGRIASATDIANSILFLLSDQARHITMANLLVDGGATLGH

SEQ ID NO: 91988 - protein, 254 aa, Pseudoalteromonas rubra
  misc_feature (1)..(254): tr|U1KVL6|U1KVL6_9GAMM 2,3-dihydroxybenzoate-2,3-dehydr ogenase OS=Pseudoalteromonas rubra DSM 6842 OX=1117318 GN=PRUB_05886 PE=4 SV=1
MSFDARLQQEYHEQIVWISGVGQGIGLAAAQRFHALGAKVIGFDRQFSDLSVLHRAVECDLSAPELLAQQLDKLVAEGLVPYNLINVAGVLELGDLEQLTLAQWQHCQTVNSTAVFTFLRACTPHFKQQGKGAVVTVGSNAADTPRQQMAAYCASKAAVTQLTLTAGLELANFGVRCNVIAPGSTLTPMQTGMWQDEKGAQRVIDGFAAQYKLGIPLQKLATAEEIADSIVFVASSLSSHTTLQVITLDGGATF

SEQ ID NO: 91989 - protein, 257 aa, Pseudoalteromonas sp.
  misc_feature (1)..(257): tr|A0A4Q6Z310|A0A4Q6Z310_9GAMM 2,3-dihydro-2,3-dihydrox ybenzoate dehydrogenase OS=Pseudoalteromonas sp. CO342X OX=1777270 GN=dhbA PE=4 SV=1
MSNECEFTGRIALVTGAYQGIGKALVEQLLARGAIVVAADIATAASQLQEVTANHFQIHLDVTNKNLVQTVVEEIEIQLGAIEYVASVAGILHMGTLLEQSDAQWLDTFAVNCHGPFYLCQAVANKMRIRKRGAIVAVSSNAASTPRVNMGSYCASKAALSAMIKTLALEVAPFNIRCNLVAPGSTDTQMQQQLWRDENGAEQTIQGDLTQFKLGIPLGRIASATDIANSILFLLSDQARHITMANLLVDGGATLGH

SEQ ID NO: 91990 - protein, 254 aa, Pseudoalteromonas sp.
  misc_feature (1)..(254): tr|A0A3R8TA09|A0A3R8TA09_9GAMM 2,3-dihydro-2,3-dihydrox ybenzoate dehydrogenase OS=Pseudoalteromonas sp. J010 O X=998465 GN=dhbA PE=4 SV=1
MGFDSLLQQEYRNKVVWITGAGQGIGQSIAEKFIQLGARVVGFDKQFPRTHNLFKAVQCDLEDLTTLQATLTELIQQGLAPYNLLNVAGVLELGELESHSLEQWQHCQHVNAGAVFVFLKACASHFKQQGLGSIVTVSSNASHTPRQSMAAYCASKSAATQLTLTAGLELAPYGIRANVIAPGSTLTPMQTGMWLDDSGADQVIRGFASQYKLGIPLQKLATPEEIANSVLFFASSLSSHTTLQVLTIDGGATL

SEQ ID NO: 91991 - protein, 254 aa, Pseudoalteromonas sp.
  misc_feature (1)..(254): tr|A0A3S5I6E9|A0A3S5I6E9_9GAMM 2,3-dihydro-2,3-dihydrox ybenzoate dehydrogenase OS=Pseudoalteromonas sp. R3 OX= 1709477 GN=dhbA PE=4 SV=1
MSYDARLQQEYQDQIVWISGVGQGIGLATAQRFAALGAKVIGFDRQFSDTDILERAVQCDLADLAQLEATLDELLAQGLAPYNLINIAGVLELGEVEQLSLAQWQHCLNVNAGAVFTFIRACTPHLKQQQAGAIVTVGSNAAHTPRQQMAAYCASKAAVTQLTLSAGLELANFGVRCNVVAPGSTLTPMQTGMWQDEQGAQRVIEGFAPQYKLGIPLKKLATAQEIADSVVFLASKLSSHTTLQTITIDGGATF

SEQ ID NO: 91992 - protein, 251 aa, Pseudocitrobacter sp.
  misc_feature (1)..(251): tr|A0A5B0K3I9|A0A5B0K3I9_9ENTR 2,3-dihydro-2,3-dihydrox ybenzoate dehydrogenase OS=Pseudocitrobacter sp. 73 OX= 2605731 GN=dhbA PE=4 SV=1
MSGFDFNGKTVWVTGAGRGIGFATAQVFVEAGATVVGFDLAFADEEYPFTTQALDVSDARQVAEVCERLLATTPRLEVLVNAAGILRMGATDALSIDDWQQTFAVNVGGAFNLFQQTMATFRQQQGGAIVTVASDAAHTPRIGMSAYGASKAALKSLALTVGLELAGSGVRCNLVSPGSTDTDMQRGMWQSDDAEQQRIRGFGEQFKLGIPLGKIAQPQEIANTVLFLASDYASHITLQDIVVDGGSTLGA

SEQ ID NO: 91993 - protein, 254 aa, Pseudogulbenkiania ferrooxidans
  misc_feature (1)..(254): tr|U1AIF4|U1AIF4_9NEIS 2,3-dihydroxybenzoate-2,3-dehydr ogenase OS=Pseudogulbenkiania ferrooxidans EGD-HP2 OX=1 388764 GN=O166_23030 PE=4 SV=1
MIGMDFTGQCVWVTGAAQGIGQEVARRFVEAGARVVALDLQFAQPAAHCGVMRELPLDIRDADAVAALCRRLAEEDALPDVLVNAAGVLRLGAFDALSVDDWQQCLAVNVSGPFYLLRALMPHFKARRAGAIINVASNAAHVPRIDMAAYGASKAAMASLSHNAALELAPYGVRCNVVSPGSTDTPMLRGMWQDEHGAARTIAGKPEAFRLGIPLGKLATPADVAGAVLYLASDLAGHVTMQDIVVDGGATLAA

SEQ ID NO: 91994 - protein, 247 aa, Pseudomonas citronellolis
  misc_feature (1)..(247): tr|A0A127MS40|A0A127MS40_9PSED 2,3-dihydro-2,3-dihydrox ybenzoate dehydrogenase OS=Pseudomonas citronellolis OX =53408 GN=entA PE=4 SV=1
MPSNDSRSPLAVITGAGSGIGLAVARRLLREGTRVVAMARREVPPAELDEAGGHLCWLSGDVTRAEDLQCLADLARELGPVDYLLPNAGIAQLADGLDQAAFQRQWAVNGAGALNTLAALRGQMARPSSVVFIGTFLSQVSFPGLAAYIASKSALKAQARTLAVELAGEGIRVNVVSPGPTATPIWGTLGLDDEALGKVAASVNGRLLDGRFLEAEAVADAILFMLSDQARGIHGQDLVVDNGYTLR

SEQ ID NO: 91995 - protein, 490 aa, Pseudomonas fluorescens
  misc_feature (1)..(490): tr|G8Q676|G8Q676_PSEF3 N-acyl-D-amino-acid deacylase OS =Pseudomonas fluorescens (strain F113) OX=1114970 GN=PS F113_0729 PE=4 SV=1
MLYDTLIRNALVIDGSDTPGYRADVAIRGGRIERIGDLRDTRAVEDIDAAGRVLAPGFIDVHTHDDTVVIRQPQMLPKLSQGVTTVIVGNCGISASPVSLRGDPPDPMNLLGTAQAFAYPRFTDYRAAVEAATPAVNVAALVGHTALRSNHMDDLLRTASVGEIAAMRRQLRESLEAGALGLSTGLAYANAFSASTDEVMQLSEELAAFGAVYTTHLRSEFEPVLEAMDEAFQIGRHAQSPVIISHLKCAGAGNWGRSPQVLAALENAAKTHPVGCDCYPYAASSSTLDLKQVTDAHRITITWSTAHPHMGGRDLADIANEWDVSLLEAARRLQPAGAVYYGMDEGDVRRILAHPLSMVGSDGLPEDPFPHPRLWGAFPRVLGHFSRDIGLFPLHTAVHKMTGLSAARFGLKHRGEIREGHWADLVLFNPQTIRDVADFNEPQRAADGIDGVWVNGVLSYREGQANGRREGRFLAREGDLRRGFSPSDSV

SEQ ID NO: 91996 - protein, 303 aa, Pseudomonas fluorescens
  misc_feature (1)..(303): tr|A0A3S4PG89|A0A3S4PG89_PSEFL Oxidoreductase OS=Pseudo monas fluorescens OX=294 GN=entA PE=4 SV=1
MTRITTPFGFHSTAQEVIEGVDLSGKRAIVTGGASGIGIETARALVNAGADVTLAVRRPEAAESVAAQLRAGGRGRVDIRTVDLADLTSVKSFAECWSEPLHILVNNAGIMAVPERQLSAQGWELQFASNFLGHFALVLGLQNALSSAAGARIVSLSSNANLLGPVVFDDINFDFRAYDAFAAYAQAKSACALIAVEITRRWAERGIFANALNPGAIATNLQKHTGGLKTPIERQKTVQQGAATSILLAASPLLAGIGGRYFEDCNEALVVDKRPADYTGVAPYAVDPDNARRLWDVATAMIS

SEQ ID NO: 91997 - protein, 329 aa, Pseudomonas knackmussii
  misc_feature (1)..(329): tr|A0A024HI36|A0A024HI36_PSEKB Short-chain dehydrogenas e/reductase SDR OS=Pseudomonas knackmussii (strain DSM 6978 / LMG 23759 / B13) OX=1301098 GN=PKB_3346 PE=4 SV= 1
MMAGEAGMASLGDGYRALVIGASGAIGAAFCALLRDDPRCARVVELGRRSSPRLDLEDPPSIAAAAHEVAVHAPFQLILHAAGLLHRDGLRPEKRLADLDALALQQVFQVNAIGPVLVLRHFLPLLDRRGAMALLSAKVGSVGDNRLGGWYAYRASKAALNMLVKTASIELARTHPQARLLCLHPGTVASALSQPFHGAANARPAAQAALLRLRRGAPALVTTKQESLMNLLELTELAAAGNIRLLEVVSLEGGFYVVQVHTADTIKALHDEHGGVLRLLSVTHVREYLRDLPAVPCELVQHSIHDEMCGSRSGAIEPLRVPFSLVQQW

SEQ ID NO: 91998 - protein, 247 aa, Pseudomonas mendocina
  misc_feature (1)..(247): tr|A0A379IXE1|A0A379IXE1_PSEME Short-chain dehydrogenas e/reductase OS=Pseudomonas mendocina OX=300 GN=entA PE= 4 SV=1
MSMNFQGRLAVVTGASSGIGLAVCDLLLQRGAQVLAFSRRLGALEALQARNPEQLHWCAGDVTDIDALHALAERAGRLGAVDYLVPNAGIARLAPGCDMQAFEQQWRVNGAGAVNTFEVLKPHLARPASVVFISTFLRQLGFAGLGGYIASKAALSALVRSLALEHAGEGLRLNLVSPGPTATPIWNSLGLAEEMLAGVASEVNKRLVDGEFLDPLAIAEVVLFQLSNGARGVYGQDWVVDKGYTLQ

SEQ ID NO: 91999 - protein, 105 aa, Pseudomonas oleovorans
  misc_feature (1)..(105): tr|A0A379K3N0|A0A379K3N0_PSEOL 3-ketoacyl-(Acyl-carrier -protein) reductase OS=Pseudomonas oleovorans OX=301 GN =fabG_1 PE=4 SV=1
MQLKDKVIIITGGCQGLGRAMGEYLAAKGAKLALVDLNQEKLDETVAACKAAGGDARAYLCNVADEEQVTHMVAQVADDFGAINGLVNNAGILRDGLTVRVKMAR

SEQ ID NO: 92000 - protein, 256 aa, Pseudomonas orientalis
  misc_feature (1)..(256): tr|A0A3G7X518|A0A3G7X518_9PSED 2,3-dihydro-2,3-dihydrox ybenzoate dehydrogenase OS=Pseudomonas orientalis OX=76 758 GN=C4J97_4302 PE=4 SV=1
MSRFEHQSIVVTGAAQGIGAAITRLLLQEGADVFALDNNAQALAALADEQRSRRLHPKVVDITRPHEVELAIAAIDSQYPLTGLVNNAGVLVPKSIATTSAEEWQTTFEVNVHGTFFVSRAVAIRMAERGQGAIVTVASNAGSTPRINMGAYCSSKAAAAMLTRCIGLEFAAQGIRCNVVSPGSTRTSMLANIAGEGPQTEQRIIAGDPGQYRLGIPLQKIAEPQDIAAVVAFLLSGDANHITLQNLVVDGGATFE

SEQ ID NO: 92001 - protein, 232 aa, Pseudomonas pseudoalcaligenes
  misc_feature (1)..(232): tr|W6RDJ3|W6RDJ3_PSEP5 Short-chain dehydrogenase/reduct ase SDR OS=Pseudomonas pseudoalcaligenes (strain CECT 5 344) OX=1182590 GN=BN5_1333 PE=4 SV=1
MTLHSLGNGYKALVIGASGTIGQAFCQLLRADPSCAGVRELSRSSSPALDLETPTSIAEAAAALADEGPYQLILHTAGLLHRPGIAPEKSLAAIDADALQAVFQVNALGPALVLRHFLPLLDKQGAMAMLSAKVGSIGDNRLGGWYAYRASKAALNMLIKTAAIELARSKPKARLLSLHPGTVISPLSQPFRGASAARPAELAAAEMLRVIDALGPEHSGSFHAYDGQPLPW

SEQ ID NO: 92002 - protein, 254 aa, Pseudomonas sp.
  misc_feature (1)..(254): tr|A0A4T1ZTV0|A0A4T1ZTV0_9PSED 2,3-dihydro-2,3-dihydrox ybenzoate dehydrogenase OS=Pseudomonas sp. CCM 8849 OX= 2448482 GN=dhbA PE=4 SV=1
MQMNRQMDFSGQTIWVTGAGQGIGRSVAEGFAQLGGQVIGFDLNFPEQDYSFTRYVLDIGDAQAVQQACHELLGAHGVIDVLASVAGVLRLAPIEELALEDWDVCLRVNVSGPFYLLRQLMPRFKAWRRGTVVAVSSNAAHVPRMQMAAYSASKSALSSLIRTAGLELASHGVRCNLVSPGSTDTPMQRGMWHSSDAPARTIAGFPEQFKLGIPLQKIATPDEVANVVLFLASNLASHITLQDIVVDGGASLTD

SEQ ID NO: 92003 - protein, 249 aa, Pseudomonas sp.
  misc_feature (1)..(249): tr|A0A0F7XY00|A0A0F7XY00_9PSED 2,3-dihydro-2,3-dihydrox ybenzoate dehydrogenase OS=Pseudomonas sp. CCOS 191 OX= 1649877 GN=entA PE=4 SV=1
MAMARFTGRRVLVTGAASGIGRCVAQRFVEEGAEVIGLDCEEADVPFPLMHVDLTDPADVQRVCDRLKEQAQYLDVLVNVAGVLRLGLSDEVSCEDWQRCLDVNASAPFYLMRQWTPVFRRQRRGAIVNVASNAAHVPRLNMAAYCASKAALVSLSHCVGLELAPYGVRCNVVSPGSTRTPMLAGMLGDPAAERQLIDGLPQQFKLGVPLGKIATPDDIAHVVLFLASEQAGHVTLQDIVVDGGATLAA

SEQ ID NO: 92004 - protein, 254 aa, Pseudomonas sp.
  misc_feature (1)..(254): tr|K5XIA6|K5XIA6_9PSED 2,3-dihydroxybenzoate-2,3-dehydr ogenase OS=Pseudomonas sp. Chol1 OX=440512 GN=C211_0695 2 PE=4 SV=1
MQMTQQMDFRGRRIWVTGAGQGIGRAVAEGFARLGGEVVGLDRAFPECDYGYRTHVLDVGDAVAVRQACAELLAPGQGIDVFASVAGILRLGAIEALSLADWDDSLRVNVSGPFYLLRELLPRFRAQGRGAVVAVSSNATRVPRMQMAAYAASKAALTSLIRTAGLELASCGVRCNLVSPGSTDTAMQRGIWTDDNGRARTIAGLPEQFKLGIPLQKIATPEEVANTVLFLASDLASHITLQDIVVDGGATLAA

SEQ ID NO: 92005 - protein, 252 aa, Pseudomonas sp.
  misc_feature (1)..(252): tr|A0A4R0PXI1|A0A4R0PXI1_9PSED 2,3-dihydro-2,3-dihydrox ybenzoate dehydrogenase OS=Pseudomonas sp. IC_126 OX=25 47400 GN=dhbA PE=4 SV=1
MNDQMDFSGRSVWVTGAGQGIGRAVAEGFVRLGAQVTGFDRAFPERDYGFTPYVLDVGDAHAVQQACSELLGAQQTVDVFASVAGILRLAPIEELSSADWDASMRVNVSGPFYLLRELIPRFKAQGHGAVVAVSSNATHVPRMQMAAYSASKAALSSLIRTAGLELAEHGVRCNLVSPGSTDTAMQRGMWHSEDARERTIAGFPEQYKLGIPLRKIATPEEVARTVLFLASDLASHITLQDIVVDGGATLAA

SEQ ID NO: 92006 - protein, 251 aa, Pseudomonas sp.
  misc_feature (1)..(251): tr|A0A329I3J6|A0A329I3J6_9PSED 2,3-dihydro-2,3-dihydrox ybenzoate dehydrogenase OS=Pseudomonas sp. RIT 411 OX=2 202160 GN=DBY63_001695 PE=4 SV=1
MTQLDFTGKRVWVTGAGQGIGLQVARRFQAAGAEVIGLDRQFAEGSYPFRTQLLDVADAAQVEDVCQALLAEERRLDVLVNGAGVLRLGTSDSLSLDDWQALLDVNVSGPFYLFRQLVPLFKAQGRGAIVNIASNAAHVPRLQMAGYCTSKAALVSLSHCVALELAGSGVRCNVVSPGSTATPMLAGMLGSPEGYQRLVDGLPEDFKLGIPLRKIAQPDEIANTVLFLASDLASHITMQDIVVDGGATLAA

SEQ ID NO: 92007 - protein, 252 aa, Pseudomonas sp.
  misc_feature (1)..(252): tr|A0A3R8WEI9|A0A3R8WEI9_9PSED 2,3-dihydro-2,3-dihydrox ybenzoate dehydrogenase OS=Pseudomonas sp. s199 OX=2479 850 GN=dhbA PE=4 SV=1
MNHQMDFSGRNIWVTGAGQGIGRAVAEGFARLGGEVTGFDRAFPERDYGFTPYVLDVGDAQAVQQACRELLAEEGALDVFASVAGILRLALIEELTLADWDDSLQVNVSGPFYLLRELLPHFKRHGRGAVVAVSSNATHVPRMQMAAYSASKAALSSLIRTAGLELANHGVRCNLVSPGSTDTAMQRGMWHSEDARERTIAGFPEQYKLGIPLRKIATPEEIASTVLFLASDLASHITLQDIVVDGGATLTA

SEQ ID NO: 92008 - protein, 252 aa, Pseudomonas stutzeri
  misc_feature (1)..(252): tr|M2V5W9|M2V5W9_PSEST 2,3-dihydroxybenzoate-2,3-dehydr ogenase OS=Pseudomonas stutzeri NF13 OX=1212548 GN=B381 _05466 PE=4 SV=1
MTQQMDFHGRHIWVTGAGQGIGRAVAEGFARLGGEVVGLDQAFPECDYGYRTYVLDVSDAAAVHRACAELLAPGQGIDVLASVAGILRLGAIEELSLADWDDSLRVNLSGPFYLLRELLPRFKAQRRGAVVAVSSNATRVPRMQMAAYAASKAALTSLIRTAGLELATCGVRCNLVSPGSTDTAMQRGMWADDSGRTRTIAGFPEQFKLGIPLQKIATPEEVANTVLFLASDLASHITLQDIVVDGGATLAA

SEQ ID NO: 92009 - protein, 252 aa, Pseudomonas stutzeri
  misc_feature (1)..(252): tr|A0A379LDB4|A0A379LDB4_PSEST 2,3-dihydroxybenzoate-2, 3-dehydrogenase OS=Pseudomonas stutzeri OX=316 GN=entA PE=4 SV=1
MNHQMDFSGRNIWVTGAGQGIGRAVAEGFARLGGEVTGFDRAFSERDYGFTPYVLDVCDAQAVQQACRELLAEEGALDVFASVAGILRLAPIEELTLADWDDSLQVNVSGPFYLLRELLPRFKRHGRGAVVAVSSNATHVPRMQMAAYSASKAALSSLIRTAGLELANHGVRCNLVSPGSTDTAMQRGMWHSEDARERTIAGFPEQYKLGIPLRKIATPEEIASTVLFLASDLASHITLQDIVVDGGATLTA

SEQ ID NO: 92010 - protein, 254 aa, Pseudomonas stutzeri
  misc_feature (1)..(254): tr|I4JLR5|I4JLR5_PSEST 2,3-dihydroxybenzoate-2,3-dehydr ogenase OS=Pseudomonas stutzeri TS44 OX=477228 GN=YO5_1 1315 PE=4 SV=1
MQMTQQMDFRGRRIWVTGAGQGIGRAVAEGFARLGGEVLGLDRAFPERDYGYRTHVLDVGDAAAVRQACAELLVPGQGIDVFASVAGILRLGAIEELSLADWDDSLRVNVSGPFYLLRELLPRFRAQGRGAVVAVSSNATRVPRMQMAAYAASKAALSSLIRTAGLELASCGVRCNLVSPGSTDTAMQRGMWTDDSGRARTIAGLPEQFKLGIPLQKIATPEEVANTVLFLASDLASHITLQDIVVDGGATLAA

SEQ ID NO: 92011 - protein, 252 aa, Pseudomonas zhaodongensis
  misc_feature (1)..(252): tr|A0A3M2HPL9|A0A3M2HPL9_9PSED 2,3-dihydro-2,3-dihydrox ybenzoate dehydrogenase OS=Pseudomonas zhaodongensis OX =1176257 GN=dhbA PE=4 SV=1
MSDQMNFNGQGVWVTGAGQGIGRAVAEGFARLGAQVIGFDRAFGEKEYGFTPYVLDVGDAAAVKRTCNALLGAGKPVDAFVSVAGILRLGAVDELSLADWDDSMRVNVSGPFYLLRELIPHFKTRGSGNVVAVSSNATHVPRMQMAAYSASKAALTSLIRTAGLELAEHGVRCNLVSPGSTDTAMQRGMWHSEDALERTIAGFAEQYKLGIPLRKIATPDEVARTVLFLASDLASHITLQDIVVDGGATLAA

SEQ ID NO: 92012 - protein, 287 aa, Pseudonocardia autotrophica
  misc_feature (1)..(287): tr|A0A1Y2MPJ4|A0A1Y2MPJ4_PSEAH 2,3-dihydro-2,3-dihydrox ybenzoate dehydrogenase OS=Pseudonocardia autotrophica OX=2074 GN=entA PE=4 SV=1
MVTGAGAGIGRETARSLARAGAEVTLAVRRIDDAQEIAREIRAETGNEAVDVRPLDLADLASVAAFSKEWAGPLDLLINNAGIMALPEPTRTEQGWEMQFAVNHLGHFALALGLHDALAEASGARIVSVSSSGHHVSPVVFDDIHYRQRAYDPWSAYGQSKTANVLFAVAATTRWATEGIVANAVMPGGIMTGLQRHVPAEVRAQWEQVPSNKTPQQGAATTLVAAVAPEFAGVGGRYLEDGGEAPIVEDDAETDGVHGVRHWALDPTAAERLWETSEESLRSTRDR

SEQ ID NO: 92013 - protein, 254 aa, Pseudonocardia dioxanivorans
  misc_feature (1)..(254): tr|F4CNM6|F4CNM6_PSEUX 2,3-dihydro-2,3-dihydroxybenzoat e dehydrogenase OS=Pseudonocardia dioxanivorans (strain ATCC 55486 / DSM 44775 / JCM 13855 / CB1190) OX=675635 GN=Psed_6223 PE=4 SV=1
MTDPEKPARIALVTGAGGGIGRAVVATLAARGHAVVASDVDAPDAPGAAANVALDVTDTAGVERVVDDVETTHGPIDVLVCTAGIIRPARLLDTTDDDWAAVLDVNTTGVLRMLRAVGRRMAGRRHGSIVVVASNAGSVPRTGIVGYATSKAAAIHLTRCAGLELAEFGVRANVVSPGSTDTTMLRALPVAGAVDDAAEKAIAGSLPDHRVGIPLRRVADPADIAEAVAYLASDAARHVTMQELYVDGGASLQT

SEQ ID NO: 92014 - protein, 247 aa, Pseudonocardia sp.
  misc_feature (1)..(247): tr|A0A1Q8JQV2|A0A1Q8JQV2_9PSEU 2,3-dihydro-2,3-dihydrox ybenzoate dehydrogenase of siderophore biosynthesis OS= Pseudonocardia sp. Ae356_Ps1 OX=1885032 GN=Ae356Ps1_445 9c PE=4 SV=1
MTGGARGIGAAVAAALAADGRPVALLDRDPAVRDTAAGLTGPAALGLVADADAGAVDRAVGEAERELGPLGVLVNAAGVLRTGTVLDADADDLATCLAVNTTGVWNTGRAAGRRMYGRGSGSIVTVASDASRTPRTGMAAYAASKAASVSLTRTLGLELAPHVRCNVVCPGATDTAMQRALWPDPSDDGGATAVVAGAPERYRLGIPLGRIADPGDVAAAVLFLAGDGARHVTMQSLTVDGGASLGL

SEQ ID NO: 92015 - protein, 255 aa, Pseudonocardia sp.
  misc_feature (1)..(255): tr|A0A1Q8KWZ3|A0A1Q8KWZ3_9PSEU 2,3-dihydro-2,3-dihydrox ybenzoate dehydrogenase of siderophore biosynthesis OS= Pseudonocardia sp. Ae707_Ps1 OX=1885572 GN=Ae707Ps1_527 0c PE=4 SV=1
MAASAALVTGGARGIGAAVAAALAADGRPVALLDRDPAVRDTAAGLTGPAALGLVADVADAGAVDRAVGEAERELGPLGVLVNAAGVLRTGTVLDADADDLATCLAVNTTGVWNTGRAAGRRMYGRGSGSIVTVASDASRTPRTGMAAYAASKAASVSLTRTLGLELAPHVRCNVVCPGATDTAMQRALWPDPSDDGGATAVVAGAPERYRLGIPLGRIADPGDVAAAVLFLAGDGARHVTMQSLTVDGGASLGL

SEQ ID NO: 92016 - protein, 241 aa, Pseudonocardiaceae bacterium
  misc_feature (1)..(241): tr|A0A419HJ58|A0A419HJ58_9PSEU 2,3-dihydro-2,3-dihydrox ybenzoate dehydrogenase OS=Pseudonocardiaceae bacterium YIM PH 21723 OX=2340915 GN=dhbA PE=4 SV=1
MNRFDGKVALVTGAGQGIGAAVARALADHGAIVAATDLKNTERTLDVTDADAVERTVAEIEDELGPIDIVVNVAGILRPNKAIDMSTQDWKDTFAVNTDGVFHVSQAAARRMVPRNRGVIITVGSNATGVPRAQMAAYGASKAAATMFTRILGLEVAEHGIRCNIVSPGSTDTEMQRALWTEAGAQPVIDGDLAAHRVGIPLRRIADPADIADAVVFLASDQARHITMQNLYVDGGATLYA

SEQ ID NO: 92017 - protein, 230 aa, Pseudovibrio sp.
  misc_feature (1)..(230): tr|A0A165VXF0|A0A165VXF0_9RHOB 2,3-dihydro-2,3-dihydrox ybenzoate dehydrogenase OS=Pseudovibrio sp. Ad26 OX=989 410 GN=entA PE=4 SV=1
MKKNILIVGGTSGVGLELARHYVEEGHSVGLTGRQNPELEGATFHSLSITDDPVQLAQNIDQVLDGFNNVHTLIYAAGFLQRGHIDELADDQLGTMVNVGLLAPMMLIQRLKRRSDHPLKIMLITSSSQYTPRELEPAYCATKSALGMLGASLVRDKGLGKVLVAAPSGIQTPFWDDTEEDTETMLDSSWVSEQIVELSSGSFKYKFAKLLRDPARVEVVETLDNNLATI

SEQ ID NO: 92018 - protein, 230 aa, Pseudovibrio sp.
  misc_feature (1)..(230): tr|A0A161UAG8|A0A161UAG8_9RHOB 2,3-dihydro-2,3-dihydrox ybenzoate dehydrogenase OS=Pseudovibrio sp. W74 OX=1735 584 GN=entA PE=4 SV=1
MKKNILIVGGTSGVGLELAKHYVKEGHNVGLTGRQNPELEGATFQKFSMTDDPVQLARDIDQVLDGFNNVHTLIYAAGFLQRGHIDELADDQLGTMVNVGLLAPMMLIQRLKRRSDHPLKIMLITSSSQYTPRELEPAYCATKSALGMLGASLVRDKGLGKVLVAAPSGIQTPFWDDTEEDTETMLDPFWVSEQIVELSGGSFKYKFAKLLRDPARVEVVETLDNNLVTI

SEQ ID NO: 92019 - protein, 230 aa, Pseudovibrio sp.
  misc_feature (1)..(230): tr|A0A166CHE6|A0A166CHE6_9RHOB 2,3-dihydro-2,3-dihydrox ybenzoate dehydrogenase OS=Pseudovibrio sp. WM33 OX=173 5585 GN=entA PE=4 SV=1
MKKNILIVGGTSGVGLELARHYLEEGHNVGLTGRQNPELEGTTFHSLSITDDPVQLAQNIDRVLDGFKNVHTLIYAAGFLQRGHIDELADAELGTMVNVGLLAPMMLIQRLKRRSDHPLKIMLITSSSQYTPRELEPAYCATKSALGMLGASLVRDKDLGKVLVVAPSGIQTAFWDNTDEDTDTMLCPSWVSQQIVELSSGSFKYKFAKILRDPARVEIVETLDNNLATI

SEQ ID NO: 92020 - protein, 256 aa, Psychromonas sp.
  misc_feature (1)..(256): tr|A0A366VY74|A0A366VY74_9GAMM 2,3-dihydro-2,3-dihydrox ybenzoate dehydrogenase OS=Psychromonas sp. B3M02 OX=22 67226 GN=DS885_15980 PE=4 SV=1
MAAQSANSQQWLNKTVWVTGANQGIGAATAEMFLQLGANVIGFDQQFAHPHSQIKQVTLDISNEQAVKEICQSLLETESNVDALVNVAGILQMGKITELSSKQWQRTFDVNVSGAFNVMQQAIPVMKAANTGAIVSVSSNATHMPRMSMAAYSASKAALTNLTMVAGIELAEYGIRCNVVSPGSTQTPMQWSLWQNETGEKSTINGFPEQFKPGIPLGKLATPEDIAETIVFLCSSQANHITLQDIVIDGGATLGK

SEQ ID NO: 92021 - protein, 255 aa, Puniceibacterium sp.
  misc_feature (1)..(255): tr|A0A0J5QDJ6|A0A0J5QDJ6_9RHOB 2,3-dihydro-2,3-dihydrox ybenzoate dehydrogenase OS=Puniceibacterium sp. IMCC212 24 OX=1618204 GN=IMCC21224_111858 PE=4 SV=1
MQLTGFDGRIALVTGAGGGIGRATVSALYDAGCTVVATDLPDMLNAAPQQHGVHLRPLDVTDAVAVDALVAEVEAELGPVELFAGTAGILSTQPIAELSAEEWHRVFDVNMHGSFHVTRAVARGMAARQRGAMVVVSSNAGGIPRLNMSAYAASKAALTMYVRCLGLELAPRGIRCNVIAPGSTLTPMQTGMWADASGAEAVIAGSLEGFKTGIPLGKLATSEDIANSVMFLLSEQAGHIAMADLYVDGGATLRG

SEQ ID NO: 92022 - protein, 247 aa, Puniceispirillum marinum
  misc_feature (1)..(247): tr|D5BN97|D5BN97_PUNMI Probable short chain dehydrogena se OS=Puniceispirillum marinum (strain IMCC1322) OX=488 538 GN=SAR116_2046 PE=4 SV=1
MKIFIQGAGRGIGLAFARHAFALQQGDDWHMFLTARNPEDSDGFKELPPSANITWMAMDYLDPDSITKAGMTVAAHSDQLDRVISVAGVLRDPTVSPEKRIADLDSAAMLYAYQINAMGPVLLAKALWPLIKGEHPAIFASLSARVGSISDNRLGGWYAYRASKAAQNQLLRTMSIELARYNPHACVVTLHPGTVDTALSKPFQAHVPADKLFTAAYSADCLWRVMDGLDASDTGGFFAYDGSPIDY

SEQ ID NO: 92023 - protein, 261 aa, Pusillimonas ginsengisoli
  misc_feature (1)..(261): tr|A0A4U5LLN6|A0A4U5LLN6_9BURK 2,3-dihydro-2,3-dihydrox ybenzoate dehydrogenase OS=Pusillimonas ginsengisoli OX =453575 GN=dhbA PE=4 SV=1
MNTANTQEFSQQCVIVSGAGRGIGAAVARQLLDQGARVVALDLDVTPLQSWQTSYPDALHLETVDVADFDAVQQAVDNGTRQLGPVDKLVCAAGVLQMGAITDLRPDQWARTFACNTNGVFNLCHIVAKQMLTRSKGAIVNISSNAATAPRMAMGAYAASKAAVTQLSRCLGLELAHAGIRVNVVSPGSTDTPMQQAMWAAGSSAQAVIDGSGEQYRLGIPLKKIATPDEIADAVLFLLSDRASHITLHDLRVDGGATLDQ

SEQ ID NO: 92024 - protein, 284 aa, Pusillimonas sp.
  misc_feature (1)..(284): tr|A0A5A9XCN0|A0A5A9XCN0_9BURK 2,3-dihydro-2,3-dihydrox ybenzoate dehydrogenase OS=Pusillimonas sp. ANT_WB101 O X=2597356 GN=dhbA PE=4 SV=1
MCYHRQPARPAIRAARIASPGTRVNAVNTQEFSQQCVVVSGAGRGIGAAVARQLLDQGARVVALDLDITPLQSWQSSYPDALYLETVDVADFNAVAQAVDNGTRQLGPIDKLVCAAGVLQMGAITDLSPDQWARTFACNTNGVFNLCHIVAKQMLTRRKGAIVNISSNAATAPRMAMGAYAASKAAVTQLSRCLGLELAHAGIRVNVVSPGSTDTPMQQAMWAAGSSAQTVIDGSGEHYRLGIPLKKIAMPDEIADAVLFLLSDRASHITLHDLRVDGGATLDQ

SEQ ID NO: 92025 - protein, 252 aa, Rahnella inusitata
  misc_feature (1)..(252): tr|A0A419M8F1|A0A419M8F1_9GAMM 2,3-dihydro-2,3-dihydrox ybenzoate dehydrogenase OS=Rahnella inusitata OX=58169 GN=dhbA PE=4 SV=1
MSTAWDFAGKQVWVTGAGQGIGLHTARAFQQAGATVTGFDKTFSGEDYPFRTEVMDITDSQAVAAVCQRLLAEQPVLDVLVNGAGILRLGATDEISDDDWQSCLAVNAGGAFNLFRHTLPVFRRQQHGAIISIASNAAHVPRVGMSAYCASKAALRSLCLTVGLEMAPFGVRCNLVSPGSTNTPMQQAMWQTHDAEQRTIDGFPDQFKLGIPLGKIALPQEVAEAVLFLASGSASHITMQDIVIDGGATLGA

SEQ ID NO: 92026 - protein, 251 aa, Raoultella electrica
  misc_feature (1)..(251): tr|A0A514EUN8|A0A514EUN8_9ENTR 2,3-dihydro-2,3-dihydrox ybenzoate dehydrogenase OS=Raoultella electrica OX=1259 973 GN=entA PE=4 SV=1
MAALDFQGQTVWVTGAGKGIGYATALAFVEAGARVSGFDLAFEGDDYPFATHTLDVANAQQVAGVCGHLLQGIDRLDVLVNAAGILRMGATDELSLDAWQQTFAVNVGGAFNLFQQTMGQFRRQQGGAIVTVASDAAHTPRIGMSAYGASKAALKSLALTVGLELAGSGVRCNLVSPGSTDTDMQRTLWLSEDAEQRRIRGFGEQFKLGIPLGKIARPQEIASTILFLASDHASHITLQDIVVDGGSTLGA

SEQ ID NO: 92027 - protein, 251 aa, Raoultella ornithinolytica
  misc_feature (1)..(251): tr|A0A1Y6GP98|A0A1Y6GP98_RAOOR 2,3-dihydro-2,3-dihydrox ybenzoate dehydrogenase OS=Raoultella ornithinolytica O X=54291 GN=entA PE=4 SV=1
MAALDFQGQTVWVTGAGKGIGYATALAFVEAGARVSGFDLAFEGDDYPFATHTLDVANAQQVAEVCGHLLKGIDRLDVLVNAAGILRMGATDELSLDAWQQTFAVNVGGAFNLFQQTMGQFRRQQGGAIVTVASDAAHTPRIGMSAYGASKAALKSLALTVGLELAGSGVRCNLVSPGSTDTDMQRTLWVSEDAEQRRIRGFGEQFKLGIPLGKIARPQEIASTILFLASDHASHITLQDIVVDGGSTLGA

SEQ ID NO: 92028 - protein, 266 aa, Raoultella planticola
  misc_feature (1)..(266): tr|A0A2X2E4I5|A0A2X2E4I5_RAOPL 2,3-dihydro-2,3-dihydrox ybenzoate dehydrogenase OS=Raoultella planticola OX=575 GN=dhbA PE=4 SV=1
MLVKDKVAAIFGGSGAIGSAVAHAMAREGARVYLGARDRQKLDRVAGEIRAAGGRAETFIVDLLDERSTAERIAQLTQQSGGLDIVVNATGFVHNQGKEITTLSLAEFMQGITPFLAAQFNLAKAVTPYMGGARPGAIITVVAPAATMAMPGHLGHIVGCAGSEAFIKALASELGPKNIRVLGVRSHAITGAVEAGSYTAEVFAAKAQAMGLTVEQWVGGAAHSTMLKRLPTLAQVADVITFLASDRADAMTATVVNMTAGATTGG

SEQ ID NO: 92029 - protein, 251 aa, Raoultella sp.
  misc_feature (1)..(251): tr|A0A509CMD3|A0A509CMD3_9ENTR 2,3-dihydroxybenzoate-2, 3-dehydrogenase OS=Raoultella sp. NCTC 9189 OX=2583577 GN=entA PE=4 SV=1
MAALDFQGQTVWVTGAGKGIGYATALAFVEAGAQVTGFDLAFAGESYPFATETLDVADAPQVAEVCQRLLGGIERLDVLVNAAGILRMGATDALSVEEWQQTFAVNVGGAFNLFQQTMAQFRRQRGGAIVTVASDAAHTPRIGMSAYGASKAALKSLALTVGLELAGSGVRCNLVSPGSTDTDMQRTLWVSDDAEQQRIRGFGEQFKLGIPLGKIARPQEIASTILFLASHHASHITLQDIVVDGGSTLGA

SEQ ID NO: 92030 - protein, 108 aa, Raoultella terrigena
  misc_feature (1)..(108): tr|A0A3P8L0X5|A0A3P8L0X5_RAOTE 2,3-dihydro-2,3-dihydrox ybenzoate dehydrogenase OS=Raoultella terrigena OX=577 GN=entA_1 PE=4 SV=1
MSAYGASKAALKSLALTVGLELAGSGVRCNLVSPGSTDTDMQRTLWVSDDAEQQRIRGFGEQFKLGIPLGKIARPQEIASTILFLASHHASHITLQDIVVDGGSTLGA

SEQ ID NO: 92031 - protein, 251 aa, Rhizobium radiobacter; identical to SEQ ID NO: 91459
  misc_feature (1)..(251): tr|A0A5B1AC60|A0A5B1AC60_RHIRD 2,3-dihydro-2,3-dihydrox ybenzoate dehydrogenase OS=Rhizobium radiobacter OX=358 GN=dhbA PE=4 SV=1

SEQ ID NO: 92032 - protein, 251 aa, Rhizobium sp.
  misc_feature (1)..(251): tr|A0A4U6RBU3|A0A4U6RBU3_9RHIZ 2,3-dihydro-2,3-dihydrox ybenzoate dehydrogenase OS=Rhizobium sp. AU243 OX=23034 25 GN=D0C28_22555 PE=4 SV=1
MTQQRFTGRRVLVTGTAQGIGRRIAERFIEEGAEVIGLDLLADTVEAPFRQIALDITDAAAVETTCRAIESEWGGLDILVNAAGILRLGDSESLTPADWKACMDVNAAGPFYMLRQWSGAFKRQRRGAIVNVGSNAAVVPRIGMMAYCASKAALVSLSHCAALELAPYGVRCNVVSPGSTDTPMLAGMLSDPSGKDQLVAGLPEQFKLGIPLGKIARPDDIADTVLFLASDQAGHVTMQQIVVDGGATLAA

SEQ ID NO: 92033 - protein, 251 aa, Rhizobium sp.; identical to SEQ ID NO: 91561
  misc_feature (1)..(251): tr|U4PYF9|U4PYF9_9RHIZ 2,3-dihydro-2,3-dihydroxybenzoat e dehydrogenase OS=Rhizobium sp. IRBG74 OX=424182 GN=en tA PE=4 SV=1

SEQ ID NO: 92034 - protein, 248 aa, Rhodobacteraceae bacterium
  misc_feature (1)..(248): tr|A0A418SHB0|A0A418SHB0_9RHOB 2,3-dihydro-2,3-dihydrox ybenzoate dehydrogenase OS=Rhodobacteraceae bacterium L w-13e OX=1537215 GN=entA PE=3 SV=1
MKTVLITGCSSGFGLETARHFLERDWRVIATMRSPRADLLPASDRLTVPPLDVTDPDSIARLVDGVGQVDALVNNAGIGLMGAVEATPPETMRQIFETNTFGTMALTRALLPQFREAGAGTIVNVTSSVTITPLPLLAIYTASKAAVAAYSDCLALEMAQFGVSVRLVLPGRSSTRFAENARPLMQGLVPDSYADFAQRTFGAMAGAVSPTRPEDVVSAIWRAVTDPDCPAHQPAGEDAVAALEGTAT

SEQ ID NO: 92035 - protein, 256 aa, Rhodococcus coprophilus
  misc_feature (1)..(256): tr|A0A2X4X5B7|A0A2X4X5B7_9NOCA 2,3-dihydro-2,3-dihydrox ybenzoate dehydrogenase OS=Rhodococcus coprophilus OX=3 8310 GN=dhbA PE=4 SV=1
MSAPVTLVVGAAQGIGRATALTLSRAGHRPVLLDRDSDGLRKTAALIGDDIPVYPVDVRDADAIEFAVGSIESDHGPIERLAHVAGVFTTGSVLDSDPDDWQRMFDVNVTGLLSVLRAVGRVMRQRRSGAIVVVGSNSAGVPRMGMGAYGSSKAAAAMIVRVAGLELAQYGIRANIVAPGSTDTAMQRSLWEDPDDDAGAHSAIDGDPAQFKVGIPLGRIADPSDIADSIEFLLSDRARHITMQALYVDGGATLRA

SEQ ID NO: 92036 - protein, 263 aa, Rhodococcus erythropolis
  misc_feature (1)..(263): tr|C0ZYH0|C0ZYH0_RHOE4 2,3-dihydro-2,3-dihydroxybenzoat e dehydrogenase OS=Rhodococcus erythropolis (strain PR4 / NBRC 100887) OX=234621 GN=RER_26970 PE=4 SV=1
MSERRIAVVTGAAAGIGAAVARTLARDGYSLALLDRDDVELKRVTAELAETIVEGADIESHVVDVTDRQAVDAAVASTMDTFGRIDALAHVAGILDTGSVLDSDPDQWRKIFGVNVFGLLNVLQSVGLEMRRRRAGAIVVVSSNAAGVPRIGMGAYGSSKAAATMLVRTAGLELAADGIRVNVVAPGSTDTAMQRSLWSDPSDDSGADAVIEGNLASYRLGIPLGKLATADDIAESVHFLLSDRAAHITMQALYVDGGATLKA

SEQ ID NO: 92037 - protein, 226 aa, Rhodococcus erythropolis
  misc_feature (1)..(226): tr|A0A1F2PXE5|A0A1F2PXE5_RHOER 2,3-dihydro-2,3-dihydrox ybenzoate dehydrogenase OS=Rhodococcus erythropolis OX= 1833 GN=dhbA_3 PE=4 SV=1
MGIGAAIAEELARQGAHVALVARGRAALNDKVAQIGQRAHAYPCDMRDPEAITAMVASVERDLGPVSILVNNVGAGTFKPLQQIDARQISTTVFRSVPIGSRHRVLRAQRRRYGLVSPDVFLVSRPETGSGRSANGPCDTQKPAGGHLPLAAGTDHMAVQAVSGHRIGSAQSSGIVSATPHPADGRSSHSRRSVLTGDSSCPAPLCSPASLYPRTCLALGGSSRCT

SEQ ID NO: 92038 - protein, 266 aa, Rhodococcus erythropolis
  misc_feature (1)..(266): tr|C3JKH8|C3JKH8_RHOER Putative 2,3-dihydroxybenzoate-2 ,3-dehydrogenase OS=Rhodococcus erythropolis SK121 OX=5 96309 GN=RHOER0001_5832 PE=4 SV=1
MPAVSERRIAVVTGAAAGIGAAVARTLARDGYSLALLDRDDVELKRVTAELAETIVEGADIESHVVDVTDRQAVDAAVASTMDTFGRIDALAHVAGILDTGSVLDSDPDQWRKIFGVNVFGLLNVLQSVGLEMRRRRAGAIVVVSSNAAGVPRIGMGAYGSSKAAATMLVRTAGLELATDGIRVNVVAPGSTDTAMQRSLWSDPSDDSGADAVIEGNLASYRLGIPLGKLATADDIADSVHFLLSDRAAHITMQALYVDGGATLKA

SEQ ID NO: 92039 - protein, 221 aa, Rhodococcus fascians
  misc_feature (1)..(221): tr|A0A165LJA8|A0A165LJA8_RHOFA 2,3-dihydro-2,3-dihydrox ybenzoate dehydrogenase OS=Rhodococcus fascians D188 OX =1051973 GN=dhbA PE=4 SV=1
MTSIAIVGAGAGLGAAVARKFGAQGFSVGLISRNRSRVDALADQLAADGVSAKGFVADVRDPASIAAALEQVTETLGPIEVLQYSPLPQKDFMRPVLETTPADMVGPVEFSIYGPIAAVHQVLPGMRFLGENKGTILFVNGGSAVKPGRTVTGTSIAFAGQAAYAQLLNEELADEGIQVSQLIIGGAIDGKDPKKSPEALAEQLWSLHTKRDRFRVQVATD

SEQ ID NO: 92040 - protein, 267 aa, Rhodococcus gordoniae
  misc_feature (1)..(267): tr|A0A379M2V6|A0A379M2V6_9NOCA 2,3-dihydro-2,3-dihydrox ybenzoate dehydrogenase OS=Rhodococcus gordoniae OX=223 392 GN=dhbA PE=4 SV=1
MTETPAPQSPAPRDPVTLVVGAAQGIGRATAETLARAGHRLVLVDRNAEGLGRTAALLGDSVPTYAVDIRDHDAVAYAVDSIESEHGPIEHLAHVAGVFTTGSVLDSDPEDWQHMFDVNVTGLLSVLRSVGRAMRERQSGSIVVVGSNSAGVPRMGMGAYGSSKAAATMIVRILGLELGPYGIRANIVAPGSTDTAMQRSLWADPNDDTGARGAIEGDLSQFKVGIPLGRIAEPTDIAEAIEFLLSDRARHITMQALYVDGGATLRA

SEQ ID NO: 92041 - protein, 256 aa, Rhodococcus jostii
  misc_feature (1)..(256): tr|Q0S7A7|Q0S7A7_RHOJR 2,3-dihydro-2,3-dihydroxybenzoat e dehydrogenase OS=Rhodococcus jostii (strain RHA1) OX= 101510 GN=dhbA PE=4 SV=1
MSGTTLVVGAAQGIGRATAVTLSRSGHRLVLLDRDADGLAATAALLDTPPLGTAVTDIRDTDAVTDTVRRIEDEHGPITALAHVAGVLETGSVLDADPESWQRVFDVNVTGLVNVLRAVGTGMRERAAGSIVVVGSNAAGVPRTGMGAYGASKAAVSMIVRVLGLELAEYGIRANIVAPGSTDTAMQRSLWADPADDTGARGAIDGDLGTFKVGIPLGRIADAADIADSVEFLLSERARHITMQALYVDGGATLRA

SEQ ID NO: 92042 - protein, 256 aa, Rhodococcus opacus
  misc_feature (1)..(256): tr|C1AT68|C1AT68_RHOOB 2,3-dihydro-2,3-dihydroxybenzoat e dehydrogenase OS=Rhodococcus opacus (strain B4) OX=63 2772 GN=ROP_48850 PE=4 SV=1
MSGTTLIVGAAQGIGRATAVTLSRSGHRLVLLDRDAEGLAATAALLDTPPLGTAVTDIRDTAAVTDTVRRIEDEHGPVTALAHVAGVLETGSVLDADPASWQRVFDVNVTGLVNVLRAVGTGMRDRSAGSIVVVGSNAAGVPRTGMGAYGASKAAVAMIVRVLGLELAEYGIRANIVAPGSTDTAMQRSLWSDPSDDTGARGAIDGDLGSFKVGIPLGRIADAADIADSVEFLLSDRARHITMQALYVDGGATLQA

SEQ ID NO: 92043 - protein, 266 aa, Rhodococcus qingshengii
  misc_feature (1)..(266): tr|A0A4S5DYM1|A0A4S5DYM1_9NOCA 2,3-dihydro-2,3-dihydrox ybenzoate dehydrogenase OS=Rhodococcus qingshengii OX=3 34542 GN=EU244_32080 PE=4 SV=1
MPAVSERRIAVVTGAAAGIGAAVARTLARDGYSLALLDRDDVELKRVTAELAETIVEGADIESHVVDVTDRQAVDAAVASTMDTFGRIDALAHVAGILDTGSVLDSDPDQWRKIFGVNVFGLLNVLQSVGLEMCRRRAGAMVVVSSNAAGVPRIGMGAYGSSKAAATMLVRTAGLELAADGIRVNVVAPGSTDTAMQRSLWSDPSDDSGADAVIEGNLASYRLGIPLGKLATADDIADSVHFLLSDRAAHITMQALYVDGGATLKA

SEQ ID NO: 92044 - protein, 256 aa, Rhodococcus rhodochrous
  misc_feature (1)..(256): tr|W3ZZV2|W3ZZV2_RHORH 2,3-dihydro-2,3-dihydroxybenzoat e dehydrogenase OS=Rhodococcus rhodochrous ATCC 21198 O X=1429046 GN=RR21198_4492 PE=4 SV=1
MSRSVTLVVGAAQGIGRATALTLAKAGHRVVLADRDVDGLAETAALLDVAAPVHGLDVCDAAGVAEAVARVEAEHGPVDALAHVAGVFTTGSVLDSDPAEWQRMFDVNVTGLINVLRVVGRGMRERRRGAIVTVGSNSAGVPRAGMGAYGASKSAAHMIVRVLGLELARFGVRANVVAPGSTDTAMQRSLWPDPADDAGARTAIDGDAASFKVGIPLGRIADPADIADAVEFLLSDRARHITMQTLYVDGGATLRA

SEQ ID NO: 92045 - protein, 260 aa, Rhodococcus rhodochrous
  misc_feature (1)..(260): tr|A0A385LB65|A0A385LB65_RHORH 2,3-dihydro-2,3-dihydrox ybenzoate dehydrogenase OS=Rhodococcus rhodochrous OX=1 829 GN=C6369_011865 PE=4 SV=1
MTETAPSPVTLVVGAAQGIGRATAEALARAGHRLVLADRNAEGLRKTAALLGGSVPTYPVDIRDHDAVAYVVESIESEHGPIEHLAHVAGVFTTGSVLDSDPEDWQHMYDVNVTGLLSVLRSVGRAMRERRSGSIVVVGSNSAGVPRMGMGAYGSSKAAATMIVRILGLELAQYGIRANIVAPGSTDTAMQRSLWEDPNDDAGARSAIEGDLSQFKVGIPLGRIAEPADIAEAIEFLLSDRARHITMQALYIDGGATLRA

SEQ ID NO: 92046 - protein, 256 aa, Rhodococcus ruber
  misc_feature (1)..(256): tr|A0A098BRE9|A0A098BRE9_9NOCA 2,3-dihydro-2,3-dihydrox ybenzoate dehydrogenase OS=Rhodococcus ruber OX=1830 GN =entA PE=4 SV=1
MSRSVTLVVGAAHGIGRATARTLAGAGHRVVLADRDLDGLAETAALLDVPAPVHGLDVCDAAAVAEAVARVEAEHGPVDALAHVAGVFTTGSVLDCDPAEWRKMFDVNVTGLVNVLRVVGRGMRERRRGAIVTVGSNSAGVPRVGMGAYGASKSAAHMIVRVLGLELARFGVRANVVAPGSTDTAMQRSLWPDPGDDAGARTAIDGDATSFKVGIPLGRIAEPADIADAVAFLLSDRARHITMQTLYVDGGATLRA

SEQ ID NO: 92047 - protein, 251 aa, Rhodococcus sp.
  misc_feature (1)..(251): tr|A0A0D8I367|A0A0D8I367_9NOCA 2,3-dihydro-2,3-dihydrox ybenzoate dehydrogenase OS=Rhodococcus sp. AD45 OX=1038 08 GN=entA PE=4 SV=1
MDVKGVTGRSVVITGAGGGIGAATAALFEEAGATVARWDLAAPTVPVGGFVLAVDVTDRQSVEQAFAATTDAIGTVSALVHTAGVLRAGSALTEDNNDWDACMAVNATGTMNVAREAARRFVAAGAGVITAVGSNAASTPRTNMAAYGASKAAATAYMRSLGLEIAPHGIRCNIISPGSTDTPMLRGMWDGTDQSAGVIAGDADAYRLGIPLGRLAQPGDIAATALFLSSDAARHITMHDLRVDGGATLDM

SEQ ID NO: 92048 - protein, 260 aa, Rhodococcus sp.
  misc_feature (1)..(260): tr|A0A5A7S7H7|A0A5A7S7H7_9NOCA 2,3-dihydro-2,3-dihydrox ybenzoate dehydrogenase OS=Rhodococcus sp. C1-24 OX=249 5913 GN=FOY51_21240 PE=3 SV=1
MNGPRQNSTSGRIALVTGAAGGIGRRIVHRLAAEGMTVVAVDRAADALEGLHSIPGHILTKQGDVTDAGQVEAIVSDVERDIGPLDYLVNAVGILRVGELVELSDKDWDDMFAVNTNSVFLVTRTVAARMIPRRRGAIVTVSSNAAHTPRASMSAYSASKAAATMLARCAALEFAKYGIRCNVVSPGSTDTEMLQVSWEYEDRSAATIAGVPEQFRLGIPLGRIADADDIVDAVEFLLSDKAKHITMQQLTVDGGATLGV

SEQ ID NO: 92049 - protein, 256 aa, Rhodococcus sp.
  misc_feature (1)..(256): tr|N1LZP2|N1LZP2_9NOCA 2,3-dihydro-2,3-dihydroxybenzoat e dehydrogenase OS=Rhodococcus sp. EsD8 OX=1301088 GN=E BESD8_5920 PE=4 SV=1
MSRSVTLVVGAAQGIGRATALTLAKAGHRVVLADRDVDGLAETAALLDVAAPVHGLDVCNAAGVAEAVARVEAEHGPVDALAHVAGVFTTGSVLDSDPAEWQRMFDVNVTGLINVLRVVGRGMRERRRGAIVTVGSNSAGVPRAGMGAYGASKSAAHMIVRVLGLELARFGVRANVVAPGSTDTAMQRSLWPDPADDAGARTAIDGDAASFKVGIPLGRIADPADIADAVEFLLSDRARHITMQTLYVDGGATLRA

SEQ ID NO: 92050 - protein, 266 aa, Rhodococcus sp.; identical to SEQ ID NO: 92038
  misc_feature (1)..(266): tr|A0A3G8ZXV1|A0A3G8ZXV1_9NOCA 2,3-dihydro-2,3-dihydrox ybenzoate dehydrogenase OS=Rhodococcus sp. NJ-530 OX=24 90853 GN=EHW12_13225 PE=4 SV=1

SEQ ID NO: 92051 - protein, 221 aa, Rhodococcus sp.
  misc_feature (1)..(221): tr|A0A143QJP4|A0A143QJP4_9NOCA 2,3-dihydro-2,3-dihydrox ybenzoate dehydrogenase OS=Rhodococcus sp. PBTS 2 OX=16 53479 GN=dhbA PE=4 SV=1
MTSIAIVGAGAGLGAAVARKFGAQGFSVGLISRNRSRVDALADQLAAEGVSAKGFVADVRDPASIAAALEQVTETLGPIEVLQYSPLPQKDFMRPVLETTPADMVGPVEFSIYGPIAAVHQVLPGMRFLGKNKGTILFVNGGSAVKPGRTVTGTSIAFAGQAAYAQLLNEELAAEGIQVSQLIIGGAIDGKDPKKSPEALAEQLWSLHTERDRFRVQVATD

SEQ ID NO: 92052 - protein, 257 aa, Rhodococcus sp.
  misc_feature (1)..(257): tr|A0A0K2YDM6|A0A0K2YDM6_9NOCA 2,3-dihydro-2,3-dihydrox ybenzoate dehydrogenase OS=Rhodococcus sp. RD6.2 OX=260 936 GN=dhbA PE=4 SV=1
MAVEGVTGRSVLVTGAAGGIGAAVARLLESVGATVARWDLAGEADADLHAGEALAVDVTDIDAVVAAYDATEAAVGPIAILVHAAGVLRTGSGMDLGDDWDACMAVNATGTRNVAGEAARRLIAAVRAGAQPGVIVGVSSNAAATPRTSMAAYGASKAAATAYLRSLGLELAPHGIRCNVVSPGSTDTPMLRGMWSGDDESPAVIAGDAASFRLGIPLGRIARPEDIAQTVLFLCSDAARHVTLHDLRVDGGATLDM

SEQ ID NO: 92053 - protein, 307 aa, Rhodococcus sp.
  misc_feature (1)..(307): tr|A0A4P8PW07|A0A4P8PW07_9NOCA 2,3-dihydro-2,3-dihydrox ybenzoate dehydrogenase OS=Rhodococcus sp. SGAir0479 OX =2567884 GN=E7742_00165 PE=4 SV=1
MDGGHPLRRDQQRSTPGHHVCGRWHRRRVRSGGRTTRDGDQVRYRHERTGSATVTISLVVGAGHGIGRAVALTLARAGRKVALADADAAGLADTARQLGGGVLTHTVDIRDPEAVAATVAETEQSAGPITELAHVAGILETGSVLDSDPADWRNVFDVNLFGLLNVVRPVGRAMRERRSGAIVVVGSNSAGVPRMSMGAYGSSKAASTMLTRVLGLELARYGVRANIVAPGSTDTDMQRSLWADPEDEAGARGAIDGDLSSYKVGIPLGRIATPSDIAETVEFLLSDRARHITMQSVYVDGGATLRA

SEQ ID NO: 92054 - protein, 266 aa, Rhodococcus sp.
  misc_feature (1)..(266): tr|A0A4Y7AY65|A0A4Y7AY65_9NOCA 2,3-dihydro-2,3-dihydrox ybenzoate dehydrogenase OS=Rhodococcus sp. WS1 OX=18827 43 GN=EEB12_02775 PE=4 SV=1
MPAVSDRRIAVVTGAAAGIGAAVARTLARDGYSLALLDRDDVELKRATAELAETIVEGADIESHVVDVTDRQAVDAAVASTMDTFGRIDALAHVAGILDTGSVLDSDPDQWRKIFGVNVFGLLNVLQSVGLEMRRRRAGSIVVVSSNAAGVPRIGMGAYGSSKAAATMLVRTAGLELAVDGIRVNVVAPGSTDTAMQRSLWSDPSDDSGADAVIEGDLAGYRLGIPLGKLATADDIADSVHFLLSDRAAHITMQALYVDGGATLKA

SEQ ID NO: 92055 - protein, 138 aa, Ricinus communis
  misc_feature (1)..(138): tr|B9TA10|B9TA10_RICCO 3-oxoacyl-[acyl-carrier-protein] reductase, putative OS=Ricinus communis OX=3988 GN=RCO M_0389200 PE=4 SV=1
MKQQRLGGSIVFVGSKNGLVASAGASAYCTAKAAEIHLARCIALEGAEHGIRVNVVNPDAVIRGSRIWDGKWKEERAASNKIDLDDVEEFYRKRSMLKKSVFPEDIAEAVYFFASEKSGKSTGNVLNVDAGNAAAFTR

SEQ ID NO: 92056 - protein, 253 aa, Roseomonas gilardii
  misc_feature (1)..(253): tr|A0A379N5M2|A0A379N5M2_9PROT 2,3-dihydro-2,3-dihydrox ybenzoate dehydrogenase OS=Roseomonas gilardii subsp. r osea OX=243956 GN=dhbA PE=4 SV=1
MRGSGIAGRIALVTGAGGGIGAAVVRALREEGARVVATDLDPAAIAPGEDIRAEALDVTDSAAVEALVERVERDWGPVDLGASVAGVLSTTLVTETTDAEWRRVFAVNAEGVFHVSRALARRMQPRGRGSLVTVSSNAAGIPRHAMAAYAASKAAATMFTRCLGLELAPHGIRCNIVAPGSTLTPMQTGMWSDADGAARVIAGVPEAFKTGIPLGKLATPEDIAEAVVFLLSDRAGHITMTDLYVDGGATMRA

SEQ ID NO: 92057 - protein, 253 aa, Roseomonas mucosa
  misc_feature (1)..(253): tr|A0A1S8D846|A0A1S8D846_9PROT 2,3-dihydro-2,3-dihydrox ybenzoate dehydrogenase OS=Roseomonas mucosa OX=207340 GN=dhbA PE=4 SV=1
MRGSGIAGRIALVTGAGGGIGAAVVRALREEGARVVATDLDPAAIAPGENIRAEALDVTDSAAVEALVERVERDWGPVDLGASVAGVLSTTLVTETTDAEWRRVFAVNAEGVFHISRALARRMQPRGRGSLVTVSSNAAGIPRHAMAAYAASKAAATMFTRCLGLELAPHGIRCNIVAPGSTLTPMQTGMWSDADGAARVIAGVPEAFKTGIPLGKLATPEDVAEAVVFLLSDRAGHITMTDLYVDGGATMRA

SEQ ID NO: 92058 - protein, 253 aa, Roseomonas sp.; identical to SEQ ID NO: 92057
  misc_feature (1)..(253): tr|A0A1Q2YXR5|A0A1Q2YXR5_9PROT 2,3-dihydro-2,3-dihydrox ybenzoate dehydrogenase OS=Roseomonas sp. TAS13 OX=1926 319 GN=dhbA PE=4 SV=1

SEQ ID NO: 92059 - protein, 253 aa, Roseomonas sp.
  misc_feature (1)..(253): tr|A0A3A9J8A1|A0A3A9J8A1_9PROT 2,3-dihydro-2,3-dihydrox ybenzoate dehydrogenase OS=Roseomonas sp. Z24 OX=238222 2 GN=D6Z83_14380 PE=4 SV=1
MRPSGLSGKRVLVTGAAGGIGQAVLRALLEEGMRVVATDLDPAAIPPAPNLRAERLDVTSSAAVDALVARIEAEEGPIDCGVSLAGILATDTVAQTTDESWRRVFAVNTDGVFHLGRALARVMGPRAAGSIVVVSSNAAGVPRHAMAAYAASKAATTMFTRCLGLELAPQGIRCNIVAPGSTLTPMQTGMWADADGAARVIAGSPETYKAGIPLRKLATPEDIADAVAFLLSDRAGHITMADLYIDGGATLRG

SEQ ID NO: 92060 - protein, 261 aa, Roseovarius albus
  misc_feature (1)..(261): tr|A0A1X6YI69|A0A1X6YI69_9RHOB 2,3-dihydro-2,3-dihydrox ybenzoate dehydrogenase OS=Roseovarius albus OX=1247867 GN=dhbA PE=4 SV=1
MNEISLQGLAIVTGAGQGIGRVIAVRLLQAGCRVLAVGRTQSKLEGLAEEAGVTEDQVTIASVDIQDSSVVEQVVQVAKEQHGEIAYLVNAAGILAPSKLLETGVDALTETIAVNFTSTLVVTQIVARVMAEQKAGAIVTIGSNSGTTPRTGLGAYPASKAGLAHAMKCLGLELAEYGVRCNIVSPGSTDTPMQQSFQTSASGLDRVLKGDANLWRLGIPLGRMADPQDVANIVLFLLSDMARHITMENIVIDGGATLGAR

SEQ ID NO: 92061 - protein, 249 aa, Roseovarius mucosus
  misc_feature (1)..(249): tr|A0A1V0RRS5|A0A1V0RRS5_9RHOB 2,3-dihydro-2,3-dihydrox ybenzoate dehydrogenase OS=Roseovarius mucosus OX=21574 3 GN=dhbA PE=3 SV=1
MDMQGKCVLITGASKGIGAAAARVFAAAGAQVALVARNAEAIAELAGEIGPSAIAIPCDVSRYWEMEAAVAACHTAFGQLDVLINNAGVIEPITSLSEADPEAWARAIDINLKGVFNGMRAALPGMITRGSGSILTVSSGAAHSPLEGWSAYCTSKAGAAMLTRCADLEAASAGVRIMGLSPGTVATDMQREIKASGVNPVSQLDWSIHIPADWPARALLWMCSPDAAEFAGQEISLRDEAIRRRVGLI

SEQ ID NO: 92062 - protein, 249 aa, Roseovarius sp.
  misc_feature (1)..(249): tr|A0A5E7ZJN3|A0A5E7ZJN3_9RHOB 2,3-dihydro-2,3-dihydrox ybenzoate dehydrogenase OS=Roseovarius sp. EC-HK134 OX= 2038394 GN=dhbA PE=3 SV=1
MDMQGKCVLITGASKGIGAAAARVFAAAGAQVALVARNAEAIAELAGEIGPSAIAIPCDVSRYWEMEAAVAACHTAFGQLDVLINNAGVIEPITSLSEADPEAWARAIDINLKGVFNGMRAALPGMITRGSGSILTVSSGAAHSPLEGWSAYCTSKAGAAMLTRCADLEAASAGVRIMGLSPGTVATDMQREIKASGVNPVSQLDWSIHIPADWPARALLWMCSPDAAEFAGQEISLRDEAIRRRVGLV

SEQ ID NO: 92063 - protein, 249 aa, Roseovarius sp.; identical to SEQ ID NO: 92062
  misc_feature (1)..(249): tr|A0A5E7ZP09|A0A5E7ZP09_9RHOB 2,3-dihydro-2,3-dihydrox ybenzoate dehydrogenase OS=Roseovarius sp. EC-SD190 OX= 2038395 GN=dhbA PE=3 SV=1

SEQ ID NO: 92064 - protein, 78 aa, Rothia dentocariosa
  misc_feature (1)..(78): tr|A0A3S4Z1J6|A0A3S4Z1J6_9MICC 2,3-dihydro-2,3-dihydrox ybenzoate dehydrogenase OS=Rothia dentocariosa OX=2047 GN=entA PE=4 SV=1
MNTVCPGTTRTPMVTDAWNGEDLSALPVAGSPETFRLGIPLGRIADPADIAAVNAFLISDASRHITMQNIVADGGATF

SEQ ID NO: 92065 - protein, 253 aa, Rothia kristinae
  misc_feature (1)..(253): tr|A0A147E8G2|A0A147E8G2_9MICC 2,3-dihydro-2,3-dihydrox ybenzoate dehydrogenase OS=Rothia kristinae OX=37923 GN =entA PE=4 SV=1
MSAVLVTGAAGGIGSQVVRLLAEDGHHVWAADRVMPDPQGWSDPERITPAVLDVSAERDVVDLLRGIEESGQQLTGAVHAAGIVHAAPLLETSVREWDEILAVNARAVFLVLRESAGLMIRQRAQDPGNRRGIVTISSNAGRVPRTEFGAYGASKAAATSVTRSFGLQLARHGIRCNAVSPGTTRTPMVTSGWDGEDRSAVPVAGSPEDFRLGIPLGRIAEPADIAEVARFLVSERARHVSLQDVVVDGGATF

SEQ ID NO: 92066 - protein, 255 aa, Rothia mucilaginosa
  misc_feature (1)..(255): tr|C6R4B1|C6R4B1_9MICC 2,3-dihydroxybenzoate-2,3-dehydr ogenase domain protein OS=Rothia mucilaginosa ATCC 2529 6 OX=553201 GN=ROTMU0001_0482 PE=4 SV=1
MSWVIVTGANGGIGEATVQQLIKNGYSVFAADLAEQPIASFGTYGDAIFRYRAVDVTSEESVTALANAVAALDEPITGAVLAAGIAHSQPLLETSFDTWKRLHAVNSDGVFLCLREFARIMIDQQETDPANSRSLVTVASNAARVPRAEFGAYGASKASAARVSSSFGLQLAAHGIRVNSVCPGTTRTPMVTDAWEGEDRSALPVAGNPQTFRLGIPLRRIADPADIAAVNAFLISEAARHITMQEIVADGGATL

SEQ ID NO: 92067 - protein, 259 aa, Rubrivivax sp.
  misc_feature (1)..(259): tr|A0A519GEZ1|A0A519GEZ1_9BURK 2,3-dihydro-2,3-dihydrox ybenzoate dehydrogenase OS=Rubrivivax sp. OX=50259 GN=E OP38_01155 PE=4 SV=1
MSRFAGRVAVVTGAAQGIGLAVAKALAKEGAKVAMLDQNIDLLTPAAGQLSSQGLQVQPWQVDVRRVDSIAHAVSDVHGQWGGIDILVNVAGVLHAQAVVDTTQEAWMHTFEVNTQGVFSMCAAVVPHMVARRQGCIVTVGSNAASTPRVNMAAYAASKAASAQFTRCLGLELAAHGIRCNIVSPGSTDTPMQRALWHGPDAPGKVIEGNLAQHRLGIPLGRIATPHDVAQAVCFLASDEAKHITLHDLRVDGGATLDA

SEQ ID NO: 92068 - protein, 260 aa, Saccharopolyspora erythraea
  misc_feature (1)..(260): tr|A4FGF1|A4FGF1_SACEN 2,3-dihydro-2,3-dihydroxybenzoat e dehydrogenase OS=Saccharopolyspora erythraea (strain ATCC 11635 / DSM 40517 / JCM 4748 / NBRC 13426 / NCIMB 8594 / NRRL 2338) OX=405948 GN=dhbA PE=4 SV=1
MDRTGIAGKVALVTGAGRGIGAAVATALSDLGATVAAVDIDADEGTAVAARLAEQGGKAGPYVADVADAASVAGVVDRVERDLGPVDILANVAGVLHPGKVHDLADEDWHRTFAVNTDGVFHLCREVTRRMVPRGRGCVVTVGSNAAGVPRHGMAAYAASKAAATLFTKSLGLELAEHGIRCNVVSPGSTDTDMLRALAGEGDASQVIEGSPETFKVGIPLRKLAAPEDVADAVAFLASDRAGHITMHDLYVDGGATLRA

SEQ ID NO: 92069 - protein, 261 aa, Saccharopolyspora sp.
  misc_feature (1)..(261): tr|A0A4R4VQI1|A0A4R4VQI1_9PSEU 2,3-dihydro-2,3-dihydrox ybenzoate dehydrogenase OS=Saccharopolyspora sp. 16K309 OX=2530384 GN=E1181_09705 PE=4 SV=1
MNRTGISGKVAIVTGAGQGIGAAVARAFAQLGADVAAVDRNGDKADETVEKLAAEGHRARAYRADVADPAAVTEVVTRVEAEQGPADVLANVAGVLQVATVQELTDAEWQRTFAVNTTGVFNVCREVSKHMISRRRGSIVTVGSNAAGVPRHSMAAYAASKAAATMFTKSLGLELAEYGIRCNIVAPGSTDTDMQRGMWTDGNGPDRVIAGSLETYKAGIPLRKLATPDDIANAVVFLASDEAGHITMHDLYVDGGATLRA

SEQ ID NO: 92070 - protein, 261 aa, Saccharopolyspora sp.
  misc_feature (1)..(261): tr|A0A4R4U9Z1|A0A4R4U9Z1_9PSEU 2,3-dihydro-2,3-dihydrox ybenzoate dehydrogenase OS=Saccharopolyspora sp. 16K404 OX=2530385 GN=E1161_24075 PE=3 SV=1
MNRTGISDEVAIVTGAGQGIGAAVARAFAELGAEVAAVDRNGGTAAETAEELAAEGHRVRAYRADVADPAAVTEVVTRVEAEQGPIDVLANVAGVLQVATVQELTDAEWQRTFAVNATGVFNMCREVSKHMISRRRGSIVTVGSNAAGVPRHSMAAYAASKAAATMFTKSLGLELAEYGIRCNIVAPGSTDTDMQRGMWTDGNGPDRVIAGSLETYKAGIPLRKLATPDDIANAVVFLASDEAGHITMHDLYVDGGATMRA

SEQ ID NO: 92071 - protein, 261 aa, Saccharopolyspora sp.
  misc_feature (1)..(261): tr|A0A4R5BD20|A0A4R5BD20_9PSEU 2,3-dihydro-2,3-dihydrox ybenzoate dehydrogenase OS=Saccharopolyspora sp. 5K548 OX=2530386 GN=E1202_26855 PE=3 SV=1
MNRTGISGKVAIVTGAGQGIGAAVARAFAQLGADVAVVDRNGDKADETAEALAAEGHRVRAYRADVADPAAVTEVVTRVEAEQGPVDVLANVAGVLQVATVQELTDAEWQRTFAVNTTGVFNVCREVSKHMISRRRGSIVTVGSNAAGVPRHSMAAYAASKAAATMFTKSLGLELAEHGIRCNVVAPGSTDTDMQRGMWTDGNGPDRVIAGSLETYKAGIPLRKLATPDDIANAVVFLASEEAGHITMHDLYVDGGATLRA

SEQ ID NO: 92072 - protein, 261 aa, Saccharopolyspora sp.
  misc_feature (1)..(261): tr|A0A4R4Z3K5|A0A4R4Z3K5_9PSEU 2,3-dihydro-2,3-dihydrox ybenzoate dehydrogenase OS=Saccharopolyspora sp. 7K502 OX=2530387 GN=E1288_12130 PE=3 SV=1
MNRTGIGGKVAIVTGAGQGIGAAVTTALAELGATVAAVDRNGEQAEAVAAELTGRGHAVHAYRADVADAAAVNDVVDRVERTHGPIDVLANVAGVLQVGTVQELTDEDWHRTFAVNTTGVFNLSRAVSKHMIGRRRGAIVTVSSNAAGVPRHGMSAYAASKAAATLFTKSLGLELAEFGIRCNVVAPGSTDTEMQRGMWADERGAERVIAGSPETFKAGIPLRKLATPQDIADAVVFLASDQAGHITMHDLYVDGGATLRA

SEQ ID NO: 92073 - protein, 261 aa, Saccharopolyspora sp.
  misc_feature (1)..(261): tr|A0A426K0K6|A0A426K0K6_9PSEU 2,3-dihydro-2,3-dihydrox ybenzoate dehydrogenase OS=Saccharopolyspora sp. H219 O X=2492662 GN=EIL87_05410 PE=3 SV=1
MNRTGISGQVAFVTGAGQGIGAAVARAFAELGADVAAVDRDGEKATETAEKLAAEGHRARAYRADVADPAAVAEVVTRVEAEQGPIDVLANVAGVLQVGTVQEITDAEWQRTFAVNTTGVFTVCREVSGHMISRRRGCIVTVGSNAAGVPRHSMAAYAASKAAATMFTKSLGLELAEHGIRCNIVAPGSTDTEMQRGMWTDGSGPERVIAGSPETYKAGIPLRKLATPEDIAHAVVFLAPDEAGHITMHDLYVDGGATLRA

SEQ ID NO: 92074 - protein, 244 aa, Saccharothrix espanaensis
  misc_feature (1)..(244): tr|K0JVL7|K0JVL7_SACES 2,3-dihydro-2,3-dihydroxybenzoat edehydrogenase OS=Saccharothrix espanaensis (strain ATC C 51144 / DSM 44229 / JCM 9112 / NBRC 15066 / NRRL 1576 4) OX=1179773 GN=entA PE=4 SV=1
MVDRGIAGRVALVTGAGQGIGAAVAAALAAEGALVADVDLKGATHQVDVSDVDGVDEVVDQVERTLGPISVLVNVAGVLRPGRVLETTDEDWRRTFAVNTDGVFHVSRAVARRMVPRREGAIVTVGSNASGVPRTDMAAYAASKAATTMFTRCLGLELAEHGIRCNVVSPGSTDTAMQRSLWTDDDSPSRVIAGDPATYRVGIPLGRIADPADIADAVLFLVSGQARHITMQNLYVDGGATLRA

SEQ ID NO: 92075 - protein, 251 aa, Salmonella abony
  misc_feature (1)..(251): tr|A0A5H6TEL3|A0A5H6TEL3_SALAB 2,3-dihydro-2,3-dihydrox ybenzoate dehydrogenase OS=Salmonella abony OX=29482 GN =dhbA PE=4 SV=1
MTGFDFSDKTVWVTGAGKGIGYATALAFVDAGARVIGFDREFTQENYPFATEVMDVADAAQVAQVCQRVLQKTPRLDVLVNAAGILRMGATDALSVDDWQQTFAVNVGGAFNLFSQTMAQFRRQQGGAIVTVASDAAHTPRIGMSAYGASKAALKSLALTVGLELAGCGVRCNVVSPGSTDTDMQRTLWVSEDAEQQRIRGFGEQFKLGIPLGKIARPQEIANTILFLASDLASHITLQDIVVDGGSTLGA

SEQ ID NO: 92076 - protein, 251 aa, Salmonella agona
  misc_feature (1)..(251): tr|B5EYI9|B5EYI9_SALA4 2,3-dihydro-2,3-dihydroxybenzoat e dehydrogenase OS=Salmonella agona (strain SL483) OX=4 54166 GN=entA PE=4 SV=1
MPCIDFSDKTVWVTGAGKGIGYATALAFVDAGARVIGFDREFTQENYPFATKVMDVADAAQVAQVCQRVLQKTPRLDVLVNAAGILRMGATDALSVDDWQQTFAVNVGGAFNLFSQTMAQFRRQQGGAIVTVASDAAHTPRIGMSAYGASKAALKSLALTVGLELAGCGVRCNVVSPGSTDTDMQRTLWVSEDAEQQRIRGFGEQFKLGIPLGKIARPQEIANTILFLASDLASHITLQDIVVDGGSTLGA

SEQ ID NO: 92077 - protein, 251 aa, Salmonella anatum
  misc_feature (1)..(251): tr|A0A3Y5S9P7|A0A3Y5S9P7_SALAN 2,3-dihydro-2,3-dihydrox ybenzoate dehydrogenase OS=Salmonella anatum OX=58712 G N=ZD17_00390 PE=4 SV=1
MASFDFSDKTVWVTGAGKGIGYATALAFVDAGARVFGFDREFTQENYPFATEVMDVADAAQVAQVCQRVLQKTPRLDVLVNAAGILRMGATDALSVDDWQQTFAVNVGGAFNLFSQTMAQFRRQQGGAIVTVASDAAHTPRIGMSAYGASKAALKSLALTVGLELAGCGVRCNVVSPGSTDTDMQRTLWVSEDAEQQRIRGFGEQFKLGIPLGKIARPQEIANTILFLASDLASHITLQDIVVDGGSTLGA

SEQ ID NO: 92078 - protein, 251 aa, Salmonella berta
  misc_feature (1)..(251): tr|A0A3V6R393|A0A3V6R393_SALBE 2,3-dihydro-2,3-dihydrox ybenzoate dehydrogenase OS=Salmonella berta OX=28142 GN =XR79_10790 PE=4 SV=1
MACIDFSDKTVWVTGAGKGIGYATALAFVDAGARVIGFDREFTQENYPFATEVMDVADAAQVAQVCQRVLQKTPRLDVLVNAAGILRMGATDALSVDDWQQTFAVNVGGAFNLFSQTMAQFRRQQGGAIVTVASDAAHTPRIGMSAYGASKAALKSLALTVGLELAGCGVRCNVVSPGSTDTDMQRTLWVSEDAEQQRIRGFGEQFKLGIPLGKIARPQEIANTILFLASDLASHITLQDIVVDGGSTLGA

SEQ ID NO: 92079 - protein, 251 aa, Salmonella blockley
  misc_feature (1)..(251): tr|A0A5H8HFE6|A0A5H8HFE6_SALBL 2,3-dihydro-2,3-dihydrox ybenzoate dehydrogenase OS=Salmonella blockley OX=57741 GN=dhbA PE=4 SV=1
MPCIDFSDKTVWVTGAGKGIGYATALAFVDAGARVIGFDREFTQENYPFATEVMDVADAAQVAQVCQRVLQKTTRLDVLVNAAGILRMGATDALSVDDWQQTFAVNVGGAFNLFSQTMAQFRRQQGGAIVTVASDAAHTPRIGMSAYGASKAALKSLALTVGLELAGCGVRCNVVSPGSTDTDMQRTLWVSEDAEQQRIRGFGEQFKLGIPLGKIARPQEIANTILFLASDLASHITLQDIVVDGGSTLGA

SEQ ID NO: 92080 - protein, 251 aa, Salmonella bongori
  misc_feature (1)..(251): tr|A0A5I6N1J5|A0A5I6N1J5_SALBN 2,3-dihydro-2,3-dihydrox ybenzoate dehydrogenase OS=Salmonella bongori CFSAN0005 10 OX=1299282 GN=dhbA PE=4 SV=1
MTSVDFSDKTVWVTGAGKGIGYATALAFVDAGARVIGFDREFTQENYPFATEVMDVAEAGQVAQVCQRVLQKTPRLDVLVNAAGILRMGATDALSLDDWQQTFAVNVGGAFNLFSQTMAQFRRQQGGAIVTVASDAAHTPRIGMSAYGASKAALKSLALTVGLELAGSGVRCNVVSPGSTDTDMQRTLWVSEDAEQQRIRGFGEQFKLGIPLGKIARPQEIANTILFLASDLASHITLQDIVVDGGSTLGA

SEQ ID NO: 92081 - protein, 108 aa, Salmonella bongori
  misc_feature (1)..(108): tr|A0A447M8J8|A0A447M8J8_SALBN 2,3-dihydro-2,3-dihydrox ybenzoate dehydrogenase OS=Salmonella bongori OX=54736 GN=entA_1 PE=4 SV=1
MSAYGASKAALKSLALTVGLELAGSGVRCNVVSPGSTDTDMQRTLWVSEDAEQQRIRGFGEQFKLGIPLGKIARPQEIANTILFLASDLASHITLQDIVVDGGSTLGA

SEQ ID NO: 92082 - protein, 251 aa, Salmonella bongori
  misc_feature (1)..(251): tr|A0A5I6MPX0|A0A5I6MPX0_SALBN 2,3-dihydro-2,3-dihydrox ybenzoate dehydrogenase OS=Salmonella bongori serovar 4 8:i:- OX=1173776 GN=dhbA PE=4 SV=1
MTGVDFSDKTVWVTGAGKGIGYATALAFVDAGARVIGFDREFTQENYPFATEVMDVAEAGQVAQVCQRLLQKTPRLDVLVNAAGILRMGATDALSLDDWQQTFAVNVGGAFNLFSQTMAQFRRQQGGAIVTVASDAAHTPRIGMSAYGASKAALKSLALTVGLELAGSGVRCNVVSPGSTDTDMQRTLWVSEDAEQQRIRGFGEQFKLGIPLGKIARPQEIANTILFLASDLASHITLQDIVVDGGSTLGA

SEQ ID NO: 92083 - protein, 251 aa, Salmonella derby
  misc_feature (1)..(251): tr|A0A4Z8SVH2|A0A4Z8SVH2_SALDE 2,3-dihydro-2,3-dihydrox ybenzoate dehydrogenase OS=Salmonella derby OX=28144 GN =dhbA PE=4 SV=1
MPCIDFSDKTVWVTGAGKGIGYATALAFVDAGARVIGFDREFTQENYPFATEVMDVADAAQVAQVCQRVLQKTPRLDVLVNAAGILRMGATDALSVDDWQQTFAVNVGGAFNLFSQTMAQFRRQQGGAIVTVASDAAHTPRIGMSAYGASKAALKSLALTVGLELAGCGVRCNVVSPGSTDTDMQRTLWVSEDAEQQRIRGFGEQFKLGIPLGKIARPQEIANTILFLASDLASHITLQDIVVDGGSTLGA

SEQ ID NO: 92084 - protein, 251 aa, Salmonella diarizonae
  misc_feature (1)..(251): tr|A0A3V0PH56|A0A3V0PH56_SALDZ 2,3-dihydro-2,3-dihydrox ybenzoate dehydrogenase OS=Salmonella diarizonae OX=592 04 GN=DRK11_11740 PE=4 SV=1
MPGIDFSDQTVWVTGAGKGIGYATALAFVDAGARVIGFDREFTPADYPFTTEVMDVSDAAQVAQVCQRILQKTPRLDVLVNAAGILRMGATDALSVDDWQQTFAVNVGGAFNLFSQTMAQFRRQRGGAIVTVASDAAHTPRIGMSAYGASKAALKSLALTVGLELAGCGVRCNVVSPGSTDTDMQRALWVSEDAEQQRIRGFGEQFKLGIPLGKIARPQEIANTILFLASDLASHITLQDIVVDGGSTLGA

SEQ ID NO: 92085 - protein, 251 aa, Salmonella dublin
  misc_feature (1)..(251): tr|A0A5I6TXB6|A0A5I6TXB6_SALDU 2,3-dihydro-2,3-dihydrox ybenzoate dehydrogenase OS=Salmonella dublin OX=98360 G N=dhbA PE=4 SV=1
MPCIDFSDKTVWVTGAGKGIGYATALAFVDAGARVSGFDREFTQESYPFATEVMDVADAGQVAQVCQRVLQKTPRLDVLVNAAGILRMGATDGLSVDDWQQTFAVNVGGAFNLFSQTMAQFRRQQGGAIVTVASDAAHTPRIGMSAYGASKAALKSLALTVGLELAGCGVRCNVVSPGSTDTDMQRTLWVSEDAEQQRIRGFGEQFKLGIPLGKIARPQEIANTILFLASDLASHITLQDIVVDGGSTLGA

SEQ ID NO: 92086 - protein, 251 aa, Salmonella enterica
  misc_feature (1)..(251): tr|A0A3U4ISU7|A0A3U4ISU7_SALET 2,3-dihydro-2,3-dihydrox ybenzoate dehydrogenase OS=Salmonella enterica I OX=592 01 GN=entA PE=4 SV=1
MTGFDFSDKTVWVTGAGKGIGYATALAFVDAGARVIGFDREFTQENYPFATEVMDVADAGQVAQVCQRVLQKTPRLDVLVNAAGILRMGATDALSVDDWQQTFAVNVGGAFNLFSQTMAQFRRQQGGAIVTVASDAAHTPRIGMSAYGASKAALKSLALTVGLELAGCGVRCNVVSPGSTDTDMQRTLWVSEDAEQQRIRGFGEQFKLGIPLGKIARPQEIANTILFLASDLASHITLQDIVVDGGSTLGA

SEQ ID NO: 92087 - protein, 251 aa, Salmonella enterica
  misc_feature (1)..(251): tr|A0A3R0BTI8|A0A3R0BTI8_SALER 2,3-dihydro-2,3-dihydrox ybenzoate dehydrogenase OS=Salmonella enterica OX=28901 GN=AIF45_13190 PE=4 SV=1
MAGIDFSGQTVWVTGAGKGIGYATALAFVDAGARVIGFDREFMPADYPFTTEVMDVADAAQVAQVCQRILHNTPRLDVLVNAAGILRMGATDALSVDDWQQTFAVNVGGAFNLFSQTMAQFRRQRGGAIVTVASDAAHTPRIGMSAYGASKAALKSLALTVGLELAGCGVRCNVVSPGSTDTDMQRALWVSEDAEQQRIRGFGEQFKLGIPLGKIARPQEIANTILFLASDLASHITLQDIVVDGGSTLGA

SEQ ID NO: 92088 - protein, 251 aa, Salmonella enterica
  misc_feature (1)..(251): tr|A0A5I3MFR3|A0A5I3MFR3_SALHO 2,3-dihydro-2,3-dihydrox ybenzoate dehydrogenase OS=Salmonella enterica subsp. h outenae str. CFSAN000557 OX=1299292 GN=dhbA PE=4 SV=1
MPGIDFSDQTVWVTGAGKGIGYATALAFVDAGARVIGFDREFMPADYPFTTEVMDVADAAQVAQVCQRILHKTPRLDVLVNAAGILRMGATDALSVDDWQQTFAVNVGGAFNLFSQTMAQFRRQQGGVIVTVASDAAHTPRIGMSAYGASKAALKSLALTVGLELAGCGVRCNVVSPGSTDTDMQRALWVSEDAEQQRIRGFGEQFKLGIPLGKIARPQEIANTILFLASDLASHITLQDIVVDGGSTLGA

SEQ ID NO: 92089 - protein, 251 aa, Salmonella enterica
  misc_feature (1)..(251): tr|A0A379XU94|A0A379XU94_SALER 2,3-dihydro-2,3-dihydrox ybenzoate dehydrogenase OS=Salmonella enterica subsp. i ndica OX=59207 GN=entA PE=4 SV=1
MPGIDFSDQTVWVTGAGKGIGYATALAFVDAGARVIGFDREFTPADYPFTTEVMDVADAAQVAQVCQRILHKTPRLDVLVNAAGILRMGATDALSADDWQQTFAVNVGGAFNLFSQTMAQFRRQRGGAIVTVASDAAHTPRIGMSAYGASKAALKSLALTVGLELAGCGVRCNVVSPGSTDTDMQRALWVSEDAEQQRIRGFGEQFKLGIPLGKIARPQEIANTILFLASDLASHITLQDIVVDGGSTLGA

SEQ ID NO: 92090 - protein, 251 aa, Salmonella enterica; identical to SEQ ID NO: 92089
  misc_feature (1)..(251): tr|V1H543|V1H543_SALER 2,3-dihydroxybenzoate-2,3-dehydr ogenase OS=Salmonella enterica subsp. indica serovar 6, 14,25:z10:1,(2),7 str. 1121 OX=1173950 GN=SEI61121_0310 5 PE=4 SV=1

SEQ ID NO: 92091 - protein, 251 aa, Salmonella enterica
  misc_feature (1)..(251): tr|A0A344R4K0|A0A344R4K0_SALER 2,3-dihydro-2,3-dihydrox ybenzoate dehydrogenase OS=Salmonella enterica subsp. s alamae OX=59202 GN=AC322_03380 PE=4 SV=1
MAGIDFSDQTVWVTGAGKGIGYATALAFVDAGARVIGFDREFMPADYPFTTEVMDVADAAQVAQVCQRILHNTPRLDVLVNAAGILRMGATDALSVDDWQQTFAVNVGGAFNLFSQTMAQFRRQRGGAIVTVASDAAHTPRIGMSAYGASKAALKSLALTVGLELAGCGVRCNVVSPGSTDTDMQRALWVSEDAEQQRIRGFGEQFKLGIPLGKIARPQEIANTILFLASDLASHITLQDIVVDGGSTLGA

SEQ ID NO: 92092 - protein, 251 aa, Salmonella enterica; identical to SEQ ID NO: 92091
  misc_feature (1)..(251): tr|A0A5I3P2C0|A0A5I3P2C0_SALER 2,3-dihydro-2,3-dihydrox ybenzoate dehydrogenase OS=Salmonella enterica subsp. s alamae str. CFSAN000559 OX=1299293 GN=dhbA PE=4 SV=1

SEQ ID NO: 92093 - protein, 251 aa, Salmonella enteritidis
  misc_feature (1)..(251): tr|A0A4U8AYZ3|A0A4U8AYZ3_SALEN 2,3-dihydro-2,3-dihydrox ybenzoate dehydrogenase OS=Salmonella enteritidis OX=14 9539 GN=dhbA PE=4 SV=1
MACIDFSDKTVWVTGAGKGIGYATALAFVDAGARVIGFDSEFTQENYPFATEVMDVADAAQVAQVCQRVLQKTPRLDVLVNAAGILRMGATDALSVDDWQQTFAVNVGGAFNLFSQTMAQFRRQQGGAIVTVASDAAHTPRIGMSAYGASKAALKSLALTVGLELAGCGVRCNVVSPGSTDTDMQRTLWVSEDAEQQRIRGFGEQFKLGIPLGKIARPQEIANTILFLASDLASHITLQDIVVDGGSTLGA

SEQ ID NO: 92094 - protein, 251 aa, Salmonella gallinarum; identical to SEQ ID NO: 92078
  misc_feature (1)..(251): tr|A0A3V9NIE1|A0A3V9NIE1_SALGL 2,3-dihydro-2,3-dihydrox ybenzoate dehydrogenase OS=Salmonella gallinarum OX=594 GN=dhbA PE=4 SV=1

SEQ ID NO: 92095 - protein, 251 aa, Salmonella hadar
  misc_feature (1)..(251): tr|A0A4V2HYV2|A0A4V2HYV2_SALHA 2,3-dihydro-2,3-dihydrox ybenzoate dehydrogenase OS=Salmonella hadar OX=149385 G N=dhbA PE=4 SV=1
MPCIDFSDKTVWVTGAGKGIGYATALAFVDAGARVIGFDREFTQENYPFATEVMDVADAAQVAQVCQRVLQKTPRLDVLVNAAGILRIGATDALSVDDWQQTFAVNVGGAFNLFSQTMAQFRRQQGGAIVTVASDAAHTPRIGMSAYGASKAALKSLALTVGLELAGCGVRCNVVSPGSTDTDMQRTLWVSEDAEQQRIRGFGEQFKLGIPLGKIARPQEIANTILFLASDLASHITLQDIVVDGGSTLGA

SEQ ID NO: 92096 - protein, 251 aa, Salmonella houtenae; identical to SEQ ID NO: 92088
  misc_feature (1)..(251): tr|A0A1J6YDS2|A0A1J6YDS2_SALHO 2,3-dihydro-2,3-dihydrox ybenzoate dehydrogenase OS=Salmonella houtenae OX=59205 GN=dhbA PE=4 SV=1

SEQ ID NO: 92097 - protein, 251 aa, Salmonella infantis; identical to SEQ ID NO: 92075
  misc_feature (1)..(251): tr|A0A3R0DE08|A0A3R0DE08_SALIN 2,3-dihydro-2,3-dihydrox ybenzoate dehydrogenase OS=Salmonella infantis OX=595 G N=dhbA PE=4 SV=1

SEQ ID NO: 92098 - protein, 251 aa, Salmonella montevideo
  misc_feature (1)..(251): tr|A0A3A3KR88|A0A3A3KR88_SALMO 2,3-dihydro-2,3-dihydrox ybenzoate dehydrogenase OS=Salmonella montevideo OX=115 981 GN=dhbA PE=4 SV=1
MASFDFSDKTVWVTGAGKGIGYATALAFVDAGARVFGFDREFTQENYPFATEVMDVADAAQVAQVCQRVLQKTPRLDVLVNAAGILRMGATDALSVDDWQQTFAVNVGGAFNLFSQTMTQFRRQQGGAIVTVASDAAHTPRIGMSAYGASKAALKSLALTVGLELAGCGVRCNVVSPGSTDTDMQRTLWVSEDAEQQRIRGFGEQFKLGIPLGKIARPQEIANTILFLASDLASHITLQDIVVDGGSTLGV

SEQ ID NO: 92099 - protein, 251 aa, Salmonella moscow; identical to SEQ ID NO: 92078
  misc_feature (1)..(251): tr|A0A5H7LHQ5|A0A5H7LHQ5_SALMC 2,3-dihydro-2,3-dihydrox ybenzoate dehydrogenase OS=Salmonella moscow OX=28146 G N=dhbA PE=4 SV=1

SEQ ID NO: 92100 - protein, 251 aa, Salmonella muenchen
  misc_feature (1)..(251): tr|A0A3T3ES78|A0A3T3ES78_SALMU 2,3-dihydro-2,3-dihydrox ybenzoate dehydrogenase OS=Salmonella muenchen OX=596 G N=dhbA PE=4 SV=1
MTGFDFSDKTVWVTGAGKGIGYATALAFVDAGARVIGFDREFTQENYPFATEVMDVADAAQVAQVCQRVLQKTTRLDVLVNAAGILRMGATDALSVDDWQQTFAVNVGGAFNLFSQTMAQFRRQQGGAIVTVASDAAHTPRIGMSAYGASKAALKSLALTVGLELAGCGVRCNVVSPGSTDTDMQRTLWVSEDAEQQRIRGFGEQFKLGIPLGKIARPQEIANTILFLASDLASHITLQDIVVDGGSTLGA

SEQ ID NO: 92101 - protein, 251 aa, Salmonella muenster; identical to SEQ ID NO: 92083
  misc_feature (1)..(251): tr|A0A5J1AXI3|A0A5J1AXI3_SALMS 2,3-dihydro-2,3-dihydrox ybenzoate dehydrogenase OS=Salmonella muenster OX=82689 GN=dhbA PE=4 SV=1

SEQ ID NO: 92102 - protein, 251 aa, Salmonella newport
  misc_feature (1)..(251): tr|A0A0H3BRP9|A0A0H3BRP9_SALNS 2,3-dihydro-2,3-dihydrox ybenzoate dehydrogenase OS=Salmonella newport (strain S L254) OX=423368 GN=entA PE=4 SV=1
MPCIDFSDKTVWVTGAGKGIGYATALAFVDAGARVIGFDREFTQENYPFATEVMDVADAGQVAQVCQRVLQKTPRLDVLVNAAGILRMGATDALSVDDWQQTFAVNVGGAFNLFSQTMAQFRRQQGGAIVTVASDAAHTPRIGMSAYGASKAALKSLALTVGLELAGCGVRCNVVSPGSTDTDMQRTLWVSEDAEQQRIRGFGEQFKLGIPLGKIARPQEIANTILFLASDLASHITLQDIVVDGGSTLGA

SEQ ID NO: 92103 - protein, 251 aa, Salmonella newport
  misc_feature (1)..(251): tr|A0A4P3G1I2|A0A4P3G1I2_SALNE 2,3-dihydro-2,3-dihydrox ybenzoate dehydrogenase OS=Salmonella newport OX=108619 GN=SX18_15320 PE=4 SV=1
MPCIDFSDKTVWVTGAGKGIGYATALAFVDAGARVIGFDREFTQENYPFATEVMDVADAGQVAQVCQRVLQKTPRLDVLVNAAGILRMGATDALSVDDWQQTFAVNVGGAFNLFSQTMAQFRRQQGGAIVTVASDAAHTPRIGMSAYGASKAALKSLALTVGLELAGCGVRCNVVSPGSTDTDMQRTLWVSEDAVQQRIRGFGEQFKLGIPLGKIARPQEIANTILFLASDLASHITLQDIVVDGGSTLGA

SEQ ID NO: 92104 - protein, 251 aa, Salmonella oranienberg
  misc_feature (1)..(251): tr|A0A3Z0YPG0|A0A3Z0YPG0_SALON 2,3-dihydro-2,3-dihydrox ybenzoate dehydrogenase OS=Salmonella oranienberg OX=28 147 GN=ZU40_15845 PE=4 SV=1
MTGFDFSDKTVWVTGAGKGIGYATALAFVDAGARVIGFDREFTQENYPFATEVMDVADAAQVAQVCQRVLQKTPRLDVLVNAAGILRMGATDALSVDDWQQTFAVNVGGAFNLFSQTMAQFRRQQGGAIVTVASDAAHTPRIGMSAYGASKVALKSLALTVGLELAGCGVRCNVVSPGSTDTDMQRTLWVSEDAEQQRIRGFGEQFKLGIPLGKIARPQEIANTILFLASDLASHITLQDIVVDGGSTLGA

SEQ ID NO: 92105 - protein, 251 aa, Salmonella paratyphi; identical to SEQ ID NO: 92102
  misc_feature (1)..(251): tr|A0A5I8SCI3|A0A5I8SCI3_SALPT 2,3-dihydro-2,3-dihydrox ybenzoate dehydrogenase OS=Salmonella paratyphi A OX=54 388 GN=dhbA PE=4 SV=1

SEQ ID NO: 92106 - protein, 251 aa, Salmonella paratyphi
  misc_feature (1)..(251): tr|A0A3Z1EI61|A0A3Z1EI61_SALPB 2,3-dihydro-2,3-dihydrox ybenzoate dehydrogenase OS=Salmonella paratyphi B (stra in ATCC BAA-1250 / SPB7) OX=1016998 GN=AU980_19930 PE=4 SV=1
MPCIDFSDKTVWVTGAGKGIGYATALAFVDAGARVIGFDREFTQESYPFATEVMDVADAAQVAQVCQRVLQKTPRLDVLVNAAGILRMGATDALSVDDWQQTFAVNVGGAFNLFSQTMAQFRRQQGGAIVTVASDAAHTPRIGMSAYGASKAALKSLALTVGLELAGCGVRCNVVSPGSTDTDMQRTLWVSEDAEQQRIRGFGEQFKLGIPLGKIARPQEIANTILFLASDLASHITLQDIVVDGGSTLGA

SEQ ID NO: 92107 - protein, 251 aa, Salmonella potsdam
  misc_feature (1)..(251): tr|A0A5H7F775|A0A5H7F775_SALPO 2,3-dihydro-2,3-dihydrox ybenzoate dehydrogenase OS=Salmonella potsdam OX=597 GN =dhbA PE=4 SV=1
MPCIDFSDKTVWVTGAGKGIGYATALAFVDAGARVIGFDREFTQESYPFATEVMDVADAAQVAQVCQRVLQKTSRLDVLVNAAGILRMGATDALSVDDWQQTFAVNVGGAFNLFSQTMAQFRRQQGGAIVTVASDAAHTPRIGMSAYGASKAALKSLALTVGLELAGCGVRCNVVSPGSTDTDMQRTLWVSEDAEQQRIRGFGEQFKLGIPLGKIARPQEIANTILFLASDLASHITLQDIVVDGGSTLGA

SEQ ID NO: 92108 - protein, 251 aa, Salmonella rubislaw
  misc_feature (1)..(251): tr|A0A5I1KZB8|A0A5I1KZB8_SALRU 2,3-dihydro-2,3-dihydrox ybenzoate dehydrogenase OS=Salmonella rubislaw OX=598 G N=dhbA PE=4 SV=1
MPCIDFSDKTVWVTGAGKGIGYATALAFVDAGARVIGFDREFTQENYPFATEFMDVADAAQVAQVCQRVLQKTPRLDVLVNAAGILRMGATDALSVDDWQQTFAVNVGGAFNLFSQTMAQFRRQQGGAIVTVASDAAHTPRIGMSAYGASKAALKSLALTVGLELAGCGVRCNVVSPGSTDTDMQRTLWVSEDAEQQRIRGFGEQFKLGIPLGKIARPQEIANTILFLASDLASHITLQDIVVDGGSTLGA

SEQ ID NO: 92109 - protein, 251 aa, Salmonella schwarzengrund
  misc_feature (1)..(251): tr|A0A0N1QZA2|A0A0N1QZA2_SALSV 2,3-dihydro-2,3-dihydrox ybenzoate dehydrogenase OS=Salmonella schwarzengrund (s train CVM19633) OX=439843 GN=entA PE=4 SV=1
MASFDFSDKTVWVTGAGKGIGYATALAFVDAGARVFGFDREFTQENYPFATEVMDVADAAQVAQVCQRVLQKTPRLDVLVNAAGILRMGATDALSVDDWQQTFAVNVGGAFNLFSQTMTQFRRQQGGAIVTVASDAAHTPRIGMSAYGASKAALKSLALTVGLELAGCGVRCNVVSPGSTDTDMQRTLWVSEDAEQQRIRGFGEQFKLGIPLGKIARPQEIANTILFLASDLASHITLQDIVVDGGSTLGA

SEQ ID NO: 92110 - protein, 251 aa, Salmonella senftenberg
  misc_feature (1)..(251): tr|A0A3V2I4U7|A0A3V2I4U7_SALSE 2,3-dihydro-2,3-dihydrox ybenzoate dehydrogenase OS=Salmonella senftenberg OX=28 150 GN=dhbA PE=4 SV=1
MPCIDFSDKTVWVTGAGKGIGYATALAFVDAGARVIGFDREFTQENYPFATEVMDVADAVQVAQVCQRVLQKTPRLDVLVNAAGILRMGATDALSVDDWQQTFAVNVGGAFNLFSQTMAQFRRQQGGAIVTVASDAAHTPRIGMSAYGASKAALKNLALTVGLELAGCGVRCNVVSPGSTDTDMQRTLWVSEDAEQQRIRGFGEQFKLGIPLGKIARPQEIANTILFLASDLASHITLQDIVVDGGSTLGA

SEQ ID NO: 92111 - protein, 150 aa, Salmonella sp.
  misc_feature (1)..(150): tr|A0A509CT92|A0A509CT92_9ENTR 2,3-dihydro-2,3-dihydrox ybenzoate dehydrogenase OS=Salmonella sp. NCTC 11881 OX =2583579 GN=entA_2 PE=4 SV=1
MTGFDFSDKTVWVTGAGKGIGYATALAFVDAGARVIGFDREFTQENYPFATEVMDVADAAQVAQVCQRVLQKTTRLDVLVNAAGILRMGATDALSVDDWQQTFAVNVGGAFNLFFSDDGAVSPSAGRGDCHRSLRCGAYAAHRYERLRRL

SEQ ID NO: 92112 - protein, 251 aa, Salmonella sp.; identical to SEQ ID NO: 92078
  misc_feature (1)..(251): tr|A0A509BYH2|A0A509BYH2_9ENTR 2,3-dihydro-2,3-dihydrox ybenzoate dehydrogenase OS=Salmonella sp. NCTC 3046 OX= 2583580 GN=entA PE=4 SV=1

SEQ ID NO: 92113 - protein, 251 aa, Salmonella sp.; identical to SEQ ID NO: 92100
  misc_feature (1)..(251): tr|A0A509CH49|A0A509CH49_9ENTR 2,3-dihydro-2,3-dihydrox ybenzoate dehydrogenase OS=Salmonella sp. NCTC 6947 OX= 2583581 GN=entA PE=4 SV=1

SEQ ID NO: 92114 - protein, 134 aa, Salmonella sp.
  misc_feature (1)..(134): tr|A0A509BHL5|A0A509BHL5_9ENTR 2,3-dihydro-2,3-dihydrox ybenzoate dehydrogenase OS=Salmonella sp. NCTC 7297 OX= 2583578 GN=entA_1 PE=4 SV=1
MAQFRRQQGGVIVTVASDAAHTPRIGMSAYGASKAALKSLALTVGLELAGCGVRCNVVSPGSTDTDMQRALWVSEDAEQQRIRGFGEQFKLGIPLGKIARPQEIANTILFLASDLASHITLQDIVVDGGSTLGA

SEQ ID NO: 92115 - protein, 251 aa, Salmonella thompson
  misc_feature (1)..(251): tr|A0A3Y9ZSD5|A0A3Y9ZSD5_SALTH 2,3-dihydro-2,3-dihydrox ybenzoate dehydrogenase OS=Salmonella thompson OX=600 G N=DFV51_13475 PE=4 SV=1
MPCIDFSDKTVWVTGAGKGIGYATALAFVDAGARVIGFDREFTQENYPFATEVMDVADAAQVAQVCQRVLQKTPRLDVLVNAAGILRMGATDALSVDDWQQTFAVNVGGAFNLFSQTMVQFRRQQGGAIVTVASDAAHTPRIGMSAYGASKAALKSLALTVGLELAGCGVRCNVVSPGSTDTDMQRTLWVSEDAEQQRIRGFGEQFKLGIPLGKIARPQEIANTILFLASDLASHITLQDIVVDGGSTLGA

SEQ ID NO: 92116 - protein, 251 aa, Salmonella typhi
  misc_feature (1)..(251): tr|Q8Z8K9|Q8Z8K9_SALTI 2,3-dihydro-2,3-dihydroxybenzoat e dehydrogenase OS=Salmonella typhi OX=90370 GN=dhbA PE =4 SV=1
MASFDFSDKTVWVTGAGKGIGYATALAFVDAGARVIGFDREFTQENYPFATEVMDVADAAQVAQVCQRVLQKTPRLDVLVNAAGILRMGATDALNVDDWQQTFAVNVGGAFNLFSQTMAQFRRQQGGAIVTVASDAAHTPRIGMGAYGASKAALKSLALTVGLELAGCGVRCNVVSPGSTDTDMQRTLWVSEDAEQQRIRGFGEQFKLGIPLGKIARPQEIANTILFLASDLASHITLQDIVVDGGSTLGA

SEQ ID NO: 92117 - protein, 251 aa, Salmonella typhimurium; identical to SEQ ID NO: 92100
  misc_feature (1)..(251): tr|A0A3Z6P6W5|A0A3Z6P6W5_SALTU 2,3-dihydro-2,3-dihydrox ybenzoate dehydrogenase OS=Salmonella typhimurium (stra in ATCC 68169 / UK-1) OX=990282 GN=AU596_25025 PE=4 SV= 1

SEQ ID NO: 92118 - protein, 251 aa, Salmonella typhimurium; identical to SEQ ID NO: 92100
  misc_feature (1)..(251): tr|Q8ZR30|Q8ZR30_SALTY 2,3-dihydro-2,3-dihydroxybenzoat e dehydrogenase OS=Salmonella typhimurium (strain LT2 / SGSC1412 / ATCC 700720) OX=99287 GN=entA PE=4 SV=1

SEQ ID NO: 92119 - protein, 86 aa, Salmonella typhimurium
  misc_feature (1)..(86): tr|A0A484YLT4|A0A484YLT4_SALTM Putative oxidoreductase OS=Salmonella typhimurium OX=90371 GN=ucpA_1 PE=4 SV=1
MGKLTGKTALITGASQGIGEGIARVFARHGANLILLDISDEIEKLADELGGRGIAALPLRLTSEILLRCRRRLRAPKRLKVELIFW

SEQ ID NO: 92120 - protein, 251 aa, Salmonella virchow; identical to SEQ ID NO: 92102
  misc_feature (1)..(251): tr|A0A5H8R6H4|A0A5H8R6H4_SALVI 2,3-dihydro-2,3-dihydrox ybenzoate dehydrogenase OS=Salmonella virchow OX=48409 GN=dhbA PE=4 SV=1

SEQ ID NO: 92121 - protein, 248 aa, Serratia ficaria
  misc_feature (1)..(248): tr|A0A240C5U9|A0A240C5U9_SERFI 2,3-dihydro-2,3-dihydrox ybenzoate dehydrogenase OS=Serratia ficaria OX=61651 GN =entA PE=4 SV=1
MDFSGKRVWVTGAARGIGEQIARHFMAQGAEVLGFDREFAQPDLPYPCVTLDISQPQQVAEVCREQLAQNPRLDVLVNAAGILRMGNTEDLSLDDWHQCINVNASGAFYLFRALLPHFKAQRRGAIVSVGSNAAHVPRVQMAAYCASKAALTSLNHCVGLELAPFGVRCNLVSPGSTDTPMQRGMWQTPDAEQRTIAGFPEMFKLGIPLGKIARPDEIANAVLFLASDLASHITLQDIVIDGGATLAS

SEQ ID NO: 92122 - protein, 239 aa, Serratia fonticola
  misc_feature (1)..(239): tr|A0A448SYB4|A0A448SYB4_SERFO 2,3-dihydro-2,3-dihydrox ybenzoate dehydrogenase OS=Serratia fonticola OX=47917 GN=dhbA_2 PE=4 SV=1
MKNTILICGYGPGISHAVARRFGKAGHPVALIARNVQRLTEAVAELTAEGIQVQAFPADLSDVKAIRRAVTDVREAMGPIGILHWNVFLDIEGDLLSTPPEDLGKSFDLRVVGYITAVQESMDDLAASKGTVLVTSGVMALDDPQINAFAVDYAAIAISGAAQRKATHILAHTLAPHDIHVGEVIVNGFVEGTPGGSGKSNTVSPTDIAEQFWALHTARQVCSVIIGKAVPIAEAGIHG

SEQ ID NO: 92123 - protein, 252 aa, Serratia liquefaciens
  misc_feature (1)..(252): tr|A0A515CSB6|A0A515CSB6_SERLI 2,3-dihydro-2,3-dihydrox ybenzoate dehydrogenase OS=Serratia liquefaciens OX=614 GN=dhbA PE=4 SV=1
MSQQGDFAGKRVWVTGAGAGIGLETALAFVRAGAEVIGFDKHFGEPEYAFRTEVLDIADSDAVDALCGRLLAEQGELDVLVNGAGILRMGLADETSTADWLACLAVNAGGAFNMFRHALPVFRRQRRGAIVSVASNAAHVPRVGMAAYCASKAALRSLCQTVGLEMAPYGVRCNLVSPGSTNTPMQRGMWQDETGEQNTINGFPEQFKLGIPLGKIAQPQEIADAILFLASDRASHITMQDIVIDGGATLAA

SEQ ID NO: 92124 - protein, 252 aa, Serratia marcescens
  misc_feature (1)..(252): tr|A0A0A5TBX9|A0A0A5TBX9_SERMA 2,3-dihydro-2,3-dihydrox ybenzoate dehydrogenase OS=Serratia marcescens OX=615 G N=dhbA PE=4 SV=1
MSIQMDFTGKRVWVTGAARGIGEQIARHFLTQGAEVVGFDREFANPDLPYPCVTLDISRPEQVEAVCRQQLAENPRLDVLVNAAGILRMGNTEDLSVDDWHQCINVNASGAFYLFRAVLPHFKAQRSGAIVSIGSNAAHVPRAQMAAYCASKAALTSLNHCVGLEMAPFGVRCNLVSPGSTDTPMQRGMWQTDDAQQRTIAGFPEMFKLGIPLGKIARPDEIANAVLFLASDLASHITMQDIVIDGGATLAA

SEQ ID NO: 92125 - protein, 252 aa, Serratia marcescens
  misc_feature (1)..(252): tr|A0A1C0F8M3|A0A1C0F8M3_SERMA 2,3-dihydro-2,3-dihydrox ybenzoate dehydrogenase OS=Serratia marcescens subsp. m arcescens OX=211759 GN=dhbA PE=4 SV=1
MSIQMDFTGKRVWVTGAARGIGEQIARHFLTQGAEVVGFDREFANPDLPYPCVMLDISRPEQVEAVCRQQLAENPRLDVLVNAAGILRMGNTEDLSVDDWHQCINVNASGAFYLFRAVLPHFKAQRSGAIVSIGSNAAHVPRAQMAAYCASKAALTSLNHCVGLEMAPFGVRCNLVSPGSTDTPMQRGMWQTDDAQQRTIAGFPEMFKLGIPLGKIARPDEIANAVLFLASDLASHITMQDIVIDGGATLAA

SEQ ID NO: 92126 - protein, 252 aa, Serratia marcescens
  misc_feature (1)..(252): tr|A0A5C7BBM1|A0A5C7BBM1_SERMA 2,3-dihydro-2,3-dihydrox ybenzoate dehydrogenase OS=Serratia marcescens subsp. s akuensis OX=211760 GN=dhbA PE=4 SV=1
MSIQMDFTGKRVWVTGAARGIGEQIARHFLTQGAEVVGFDREFANPDLPYPCVTLDISRPEQVEAVCRQQLAENPQLDVLVNAAGILRMGNTEDLSVDDWHQCINVNASGAFYLFRAVLPHFKAQRSGAIVSIGSNAAHVPRAQMAAYCASKAALTSLNHCVGLEMAPFGVRCNLVSPGSTDTPMQRGMWQTDDAQQRTIAGFPEMFKLGIPLGKIARPDEIANAVLFLASDLASHITMQDIVIDGGATLAA

SEQ ID NO: 92127 - protein, 252 aa, Serratia nematodiphila
  misc_feature (1)..(252): tr|A0A5C7CZN7|A0A5C7CZN7_9GAMM 2,3-dihydro-2,3-dihydrox ybenzoate dehydrogenase OS=Serratia nematodiphila OX=45 8197 GN=dhbA PE=4 SV=1
MSIQMDFTGKRVWVTGAARGIGEQIARHFLTQGAEVVGFDREFANPDLPYPCVTLDISRPEQVEAVCRQQLAENPRLDVLVNAAGILRMGNTEDLSVDDWHQCINVNASGAFYLFRAVLPHFKAQRSGAIVSIGSNAAHVPRAQMAAYCASKAALTSLNHCVGLEMAPFGVRCNLVSPGSTDTPMQRGMWQTDDAQQRTIAGFPELFKLGIPLGKIARPDEIANAVLFLASDLASHITMQDIVIDGGATLAA

SEQ ID NO: 92128 - protein, 251 aa, Serratia odorifera
  misc_feature (1)..(251): tr|D4E3D5|D4E3D5_SEROD 2,3-dihydroxybenzoate-2,3-dehydr ogenase OS=Serratia odorifera DSM 4582 OX=667129 GN=ent A PE=4 SV=1
MSGWDFNGKRVWVTGAGAGIGLQTALDFVAAGAEVVGFDLRFDLREYPFRCEVLDIADGEAVDGVCTRLLAEQGELDVLVNGAGILRMGLTDATSSADWMACLNVNAGGAFNMFRHALPVFRRQRRGAIVSIASNAAHVPRVGMAAYCASKAALRSLCQTVGLEMAEFGVRSNMVSPGSTNTPMQRGMWQDETGEQKTIQGFPQQFKLGIPLGKIAQPQEVSNAILFLASDLASHITMQDIVIDGGATLAA

SEQ ID NO: 92129 - protein, 191 aa, Serratia odorifera
  misc_feature (1)..(191): tr|A0A447KU61|A0A447KU61_SEROD 2,3-dihydro-2,3-dihydrox ybenzoate dehydrogenase OS=Serratia odorifera OX=618 GN =entA PE=3 SV=1
MSGWDFNGKRVWVTGAGAGIGLQTALDFVAAGAEVVGFDLRFDLREYPFRCEVLDIADGEAVDGVCTRLLAEQGELDVLVNGAGILRMGLTDATSSADWMACLNVNAGGAFNMFRHALPVFRRQRRGAIVSIASNAAHVPRVGMAAYCASKAALRSLCQTVGLEMAEFGVRSNMVSPGSTNTPMQRGMWQG

SEQ ID NO: 92130 - protein, 252 aa, Serratia plymuthica
  misc_feature (1)..(252): tr|A0A2X4UWH3|A0A2X4UWH3_SERPL 2,3-dihydro-2,3-dihydrox ybenzoate dehydrogenase OS=Serratia plymuthica OX=82996 GN=entA PE=4 SV=1
MGEEGDFAGKRVWVTGAGAGIGLETALAFVRAGAEVIGFDLRFDEPEYPFRTEVLDVADSDAVDSLCGRLLAAQPALDVLVNGAGILRMGLADETSTADWLACMAVNAGGAFNMFRHVLPVFRRQRRGAIVSVASNAAHVPRVGMAAYCASKAALRSLCQTVGLEMAPYGVRCNLVSPGSTNTPMQRGMWQDESGEQNTINGFPEQFKLGIPLGKIAQPQEIADAILFLASDRASHITMQDIVIDGGATLAA

SEQ ID NO: 92131 - protein, 252 aa, Serratia plymuthica
  misc_feature (1)..(252): tr|S4YJ85|S4YJ85_SERPL 2,3-dihydroxybenzoate-2,3-dehydr ogenase OS=Serratia plymuthica S13 OX=1348660 GN=M621_1 8160 PE=4 SV=1
MGKEGDFAGKRVWVTGAGAGIGLETALAFVRAGAEVIGFDLRFDEPEYPFRTEVLDVADSDAVDSLCGRLLAAQPALDVLVNGAGILRMGLADETSTADWLACMAVNAGGAFNMFRHALPVFRRQRCGAIVSVASNAAHVPRVGMAAYCASKAALRSLCQTVGLEMAPYGVRCNLVSPGSTNTPMQRGMWQDESGEQNTIKGFPEQFKLGIPLGKIAQPQEIADAILFLASDRASHITLQDIVIDGGATLAA

SEQ ID NO: 92132 - protein, 252 aa, Serratia proteamaculans
  misc_feature (1)..(252): tr|A0A4Z0DUU6|A0A4Z0DUU6_9GAMM 2,3-dihydro-2,3-dihydrox ybenzoate dehydrogenase OS=Serratia proteamaculans OX=2 8151 GN=dhbA PE=4 SV=1
MEQRGDFAGKRVWVTGAGAGIGLATALAFVQAGAEVIGFDKHFGEPEYAFRTEVLDIADSDAVDRVCGRLLAEQGELDVLVNGAGILRMGLADETSTADWLACLAVNAGGAFNLFRHALPVFRRQRRGAIVSVASNAAHVPRVGMAAYCASKAALRSLCNTVGLEMAPYGVRCNLVSPGSTNTPMQRGMWQDETGEQNTINGFPEQFKLGIPLGKIAQPQEIADAILFLASDRASHITMQDIVIDGGATLAA

SEQ ID NO: 92133 - protein, 252 aa, Serratia quinivorans
  misc_feature (1)..(252): tr|A0A2X2GJA3|A0A2X2GJA3_9GAMM 2,3-dihydro-2,3-dihydrox ybenzoate dehydrogenase OS=Serratia quinivorans OX=1375 45 GN=entA PE=4 SV=1
MGQQGDFAGKRVWVTGAGAGIGLTTALAFVQAGAEVVGFDKHFGEQEYPFRTEVLDIADSDAVDRVCGRLLAEQGDLDVLVNGAGILRMGLTDETSTADWLSCLAVNAGGAFNMFRHALPVFRRQRRGAIVSVASNAAHVPRVGMAAYCASKAALRSLCQTVGLEMAPYGVRSNLVSPGSTNTPMQRGMWLDETGEQNTINGFPEQFKLGIPLGKIAQPQEIADAILFLASDRASHITMQDIVIDGGATLAA

SEQ ID NO: 92134 - protein, 251 aa, Serratia rubidaea
  misc_feature (1)..(251): tr|A0A3S4XI15|A0A3S4XI15_SERRU 2,3-dihydro-2,3-dihydrox ybenzoate dehydrogenase OS=Serratia rubidaea OX=61652 G N=entA PE=4 SV=1
MSSWDFSGKRVWVTGAGAGIGLQTARQFAAAGAEVIGFDLRFSEAEYPFHTEVLDIADAEAVERVCTRLLAQHGELDVLVNGAGILRMGLTDATSSADWMACLNVNAGGAFNMFRHTLPVFRRQRRGAIVSIASNAAHVPRVGMAAYCASKAALRSLCQTVGLEMAEFGVRSNMVSPGSTNTPMQRGMWQDETGEQKTINGFPEQFKLGIPLGKIAQPQEISDAILFLASDMASHITMQDIVIDGGATLAA

SEQ ID NO: 92135 - protein, 252 aa, Serratia sp.
  misc_feature (1)..(252): tr|A0A3G2FGJ2|A0A3G2FGJ2_9GAMM 2,3-dihydro-2,3-dihydrox ybenzoate dehydrogenase OS=Serratia sp. 3ACOL1 OX=24484 83 GN=dhbA PE=4 SV=1
MGREQEFSGKRVWVTGAGAGIGYQTALAFAQSGAEVIGFDLHFGDLDYPFRTEVLDITDADAVDSVCQRLLAEHERLDVLVNGAGVLRMGLTDETSNADWLACMAVNAGGAFNLFRHTLPVFRRQKQGAIVSIASNAAHVPRVGMAAYCASKAAMRSLCQTVGLEMAPYGVRSNLVSPGSTNTPMLRGMWQDEHGESNMIKGFPDQFKLGIPLGKIAQPQEIADAILFLASDRASHITMQDIVIDGGATLAA

SEQ ID NO: 92136 - protein, 252 aa, Serratia sp.
  misc_feature (1)..(252): tr|A0A087KNT2|A0A087KNT2_9GAMM 2,3-dihydroxybenzoate-2, 3-dehydrogenase OS=Serratia sp. Ag1 OX=1524467 GN=IV04_ 23045 PE=4 SV=1
MSNGHDFTGKRVWVTGAGAGVGYQTALAFVQDGAEVIGFDLRFDEQDYPFRTVVLDIADDEAVERVCLRLLAEQPELDVLVNGAGILRMGLADETSSADWLACMTVNAGGAFNMFRQTLPVFRRQRRGAIVSVASNAAHVPRVGMAVYGASKAALRSLCQTVGLEMAPYGVRCNLVSPGSTNTPMLRGMWQDESGERKTIAGYPEQFKLGIPLGKIAQPQEIADAILFLASDRASHITLQDIVIDGGATLAA

SEQ ID NO: 92137 - protein, 239 aa, Serratia sp.
  misc_feature (1)..(239): tr|A0A084A428|A0A084A428_9GAMM 2,3-dihydro-2,3-dihydrox ybenzoate dehydrogenase OS=Serratia sp. DD3 OX=1410619 GN=dhbA PE=4 SV=1
MKNTIVICGYGPGISQAVARRFGKAGHPVALIARNVQRLTEAVTELNAEGIQVQAFPADLSDVKAIRHVFTNVHGMMGPIGILHWNVFLDIEGDLLSTPPDDLSKSFDLRVVGYITAVQESKNDLMASKGTVLVTSGVMALDDPQINAFAVDYAAIAIGVAAQRKTTHILAHTFAPHGIHVGEVIVNGFVEGTPGAIGKSDTVAPTDVADQFWELHTTRQVHSVIVGKAVPIEEAGIHG

SEQ ID NO: 92138 - protein, 252 aa, Serratia sp.
  misc_feature (1)..(252): tr|A0A0Q4LUT9|A0A0Q4LUT9_9GAMM 2,3-dihydro-2,3-dihydrox ybenzoate dehydrogenase OS=Serratia sp. Leaf50 OX=17362 23 GN=ASE93_17535 PE=4 SV=1
MDSTQEFSQKRVWVTGAAQGIGYTTALAFVKAGAEVVGFDKHFSDGDYPFRTELLDITDPKAVREVCQRLLSECDELDVLVNGAGILRMGATDELSDDDWHDCLAVNAGGAFNMFRYTLPVFRRQKRGAIVSIASNAAHVPRIGMSAYCASKAALRSLCLSVGLEMAPYGVRCNLVSPGSTDTPMQRGMWTNATGEQQTIAGFPEQFKLGIPLGKIGKPQDVADAVLFMASDRAGHITMQDIVIDGGATLSA

SEQ ID NO: 92139 - protein, 248 aa, Serratia sp.
  misc_feature (1)..(248): tr|I0QTG8|I0QTG8_9GAMM 2,3-dihydroxybenzoate-2,3-dehydr ogenase OS=Serratia sp. M24T3 OX=932213 GN=SPM24T3_1052 6 PE=4 SV=1
MEFANKRVWVTGAGQGIGYTTALAFVKAGAEVIGFDRHFGSSHYPFRTEVLDITDVKAVREVCQRVLAENDRLDVLVNGAGILRMGVTDELSDDDWNDCLAVNAGGAFNMFRHTLPVFRRQQHGAIVSIASNAAHVPRIGMSAYCASKAALRSLCLSVGLEMAPFGVRCNLISPGSTDTPMQRGLWTSPESEQNTINGFPAQFKLGIPLGKMGKPQDVADAVLFMASDRAGHITMQDIVIDGGATLAA

SEQ ID NO: 92140 - protein, 252 aa, Serratia sp.
  misc_feature (1)..(252): tr|A0A5C7DHB7|A0A5C7DHB7_9GAMM 2,3-dihydro-2,3-dihydrox ybenzoate dehydrogenase OS=Serratia sp. S9 OX=2596922 G N=dhbA PE=4 SV=1
MSIQMDFTGKRVWVTGAARGIGEQIARHFLTQGAEVVGFDREFANPDLPYPCVTLDISRPEQVEAVCRQQLAENPRLDVLINAAGILRMGNTEDLSVDDWHQCINVNASGAFYLFRAVLPHFKAQRSGAIVSIGSNAAHVPRAQMAAYCASKAALTSLNHCVGLEMAPFGVRCNLVSPGSTDTPMQRGMWQTDDAQQRTIAGFPEMFKLGIPLGKIARPDEIANAVLFLASDLASHITMQDIVIDGGATLAA

SEQ ID NO: 92141 - protein, 249 aa, Serratia symbiotica
  misc_feature (1)..(249): tr|A0A068Z8M3|A0A068Z8M3_9GAMM 2,3-dihydro-2,3-dihydrox ybenzoate dehydrogenase OS=Serratia symbiotica OX=13807 4 GN=entA PE=4 SV=1
MMSFKNKVVWVTGAGRGIGQQIALRFAESGASVIGLDLAFERDDVPFRCIRLDVSSPEAVNKIGTELLEKDGLDILVNGAGILRLGTIEKLSWEDWQQSLNVNAGAVFNLFRIAVPHFQRQRGGSIVSVASNTAHVPRVNMAVYCASKAAMRSLCLSVGLELAPYGVRCNLVSPGSTLTPMLKGMLGEDPAAQQRLIDGLPSQFKLGIPLGKVAQPDEIADSVLFLASDAASHITLQDIVIDGGATLGA

SEQ ID NO: 92142 - protein, 252 aa, Serratia ureilytica
  misc_feature (1)..(252): tr|A0A5C7BVG6|A0A5C7BVG6_9GAMM 2,3-dihydro-2,3-dihydrox ybenzoate dehydrogenase OS=Serratia ureilytica OX=30018 1 GN=dhbA PE=4 SV=1
MSIQMDFTGKRVWVTGAARGIGEQIARHFLTQGAEVVGFDREFANPDLPYPCVTLDISRSEQVEAVCRQQLAENPRLDVLVNAAGILRMGNTEDLSVDDWHQCINVNASGAFYLFRAVLPHFKAQRSGAIVSIGSNAAHVPRAQMAAYCASKAALTSLNHCVGLEMAPFGVRCNLVSPGSTDTPMQRGMWQTDDAQQRTIAGFPEMFKLGIPLGKIARPDEIANAVLFLASDLASHITMQDIVIDGGATLAA

SEQ ID NO: 92143 - protein, 82 aa, Shigella boydii
  misc_feature (1)..(82): tr|E7T3P5|E7T3P5_9ENTR 2,3-dihydroxybenzoate-2,3-dehydr ogenase OS=Shigella boydii ATCC 9905 OX=932676 GN=SGB_0 4404 PE=4 SV=1
MRCNVVSPGSTDTDMQRTLWVSDDAEEQRIRGFGEQFKLGIPLGKIARPQEIANTILFLASDLASHITLQDIVVDGGSTLGA

SEQ ID NO: 92144 - protein, 248 aa, Shigella boydii; identical to SEQ ID NO: 91748
  misc_feature (1)..(248): tr|A0A2S8DU55|A0A2S8DU55_SHIBO 2,3-dihydro-2,3-dihydrox ybenzoate dehydrogenase OS=Shigella boydii OX=621 GN=en tA PE=4 SV=1

SEQ ID NO: 92145 - protein, 248 aa, Shigella boydii; identical to SEQ ID NO: 91748
  misc_feature (1)..(248): tr|B2TTF5|B2TTF5_SHIB3 2,3-dihydro-2,3-dihydroxybenzoat e dehydrogenase OS=Shigella boydii serotype 18 (strain CDC 3083-94 / BS512) OX=344609 GN=entA PE=4 SV=1

SEQ ID NO: 92146 - protein, 248 aa, Shigella dysenteriae
  misc_feature (1)..(248): tr|A0A3P6LH50|A0A3P6LH50_SHIDY 2,3-dihydroxybenzoate-2, 3-dehydrogenase OS=Shigella dysenteriae OX=622 GN=entA PE=4 SV=1
MDFSGKNVWVTGAGKGIGYATALAFVEAGAKVTGFDQAFTQEQYPFATEVMDVADAAQVAQVCQQLLAETERLDALVNAAGILRMGATDQLSKEDWQQTFAVNVGGAFNLFQQTMNQFRRQRGGAIVTVASDAAHTPRIGMSAYGASKAALKSLALSVGLELAGSGVRCNVVSPGSTDTDMQRTLWVSDDAEEQRIRGFGEQFKLGIPLGKIARPQEIANTILFLASDLASHITLQDIVVDGGSTLGA

SEQ ID NO: 92147 - protein, 259 aa, Shigella dysenteriae
  misc_feature (1)..(259): tr|A0A090NY29|A0A090NY29_SHIDY 2,3-dihydro-2,3-dihydrox ybenzoate dehydrogenase OS=Shigella dysenteriae WRSd3 O X=1401327 GN=WRSd3_01387 PE=4 SV=1
MVEATLPRGEIMDFSGKNVWVTGAGKGIGYATALAFVKAGAKVTGFDQAFTQEQYPFATEVMDVADAAQVAQVCQRLLAETERLDALVNAAGILRMGATDQLSKEDWQQTFAVNVGGAFNLFQQTMNQFRRQRGGAIVTVASDAAHTPRIGMSAYGASKAALKSLALSVGLELAGSGVRCNVVSPGSTDTDMQRTLWVSDDAEEQRIRGFGEQFKLGIPLGKIARPQEIANTILFLASDLASHITLQDIVVDGGSTLGA

SEQ ID NO: 92148 - protein, 248 aa, Shigella flexneri
  misc_feature (1)..(248): tr|A0A2Y2ZJ15|A0A2Y2ZJ15_SHIFL 2,3-dihydroxybenzoate-2, 3-dehydrogenase OS=Shigella flexneri 2a OX=42897 GN=ent A PE=4 SV=1
MDFSGKNVWVTGAGKGIGYATALTFVEAGAKVTGFDQAFTQEQYPFATEVMDVADAGQVAQVCQRLLAETERLDVLINAAGILRMGATDQLSKEDWQQTFAVNVGGAFNLFQQTMNQFRRQRGGAIVTVASDAAHTARIGMSAYGASKAALKSLALSVGLELAGSGVRCNVVSPGSTDTDMQRTLWVSDDAEEQRIRGFGEQFKLGIPLGKIARPQEIANTILFLASDLASHITLQDIVVDGGSTLGA

SEQ ID NO: 92149 - protein, 248 aa, Shigella flexneri; identical to SEQ ID NO: 91748
  misc_feature (1)..(248): tr|I6D465|I6D465_SHIFL 2,3-dihydro-2,3-dihydroxybenzoat e dehydrogenase OS=Shigella flexneri K-315 OX=766150 GN =entA PE=4 SV=1

SEQ ID NO: 92150 - protein, 248 aa, Shigella flexneri
  misc_feature (1)..(248): tr|A0A3U2IK89|A0A3U2IK89_SHIFL 2,3-dihydro-2,3-dihydrox ybenzoate dehydrogenase OS=Shigella flexneri OX=623 GN= DOU92_16315 PE=4 SV=1
MDFSGKNVWVTGAGKGIGYATALAFVEAGAKVTGFDQAFTQEQYPFATEVMDVADAGQVAQVCQRLLAETERLDVLINAAGILRMGATDQLSKEDWQQTFAVNVGGAFNLFQQTMNQFRRQRGGAIVTVASDAAHTARIGMSAYGASKAALKSLALSVGLELAGSGVRCNVVSLGSTDTDMQRTLWVSDDAEEQRIRGFGEQFKLGIPLGKIARPQEIANTILFLASDLASHITLQDIVVDGGSTLGA

SEQ ID NO: 92151 - protein, 248 aa, Shigella flexneri
  misc_feature (1)..(248): tr|A0A4P7TNZ4|A0A4P7TNZ4_SHIFM 2,3-dihydro-2,3-dihydrox ybenzoate dehydrogenase OS=Shigella flexneri serotype 5 a (strain M90T) OX=1086030 GN=dhbA PE=4 SV=1
MDFSGKNVWVTGAGKGIGYATALAFVEAGAKVTGFDQAFTQEQYPFATEVMDVADAGQVAQVCQRLLAETERLDVLINAAGILRMGATDQLSKEDWQQTFAVNVGGAFNLFQQTMNQFRRQRGGAIVTVASDAAHTARIGMSAYGASKAALKSLALSVGLELAGSGVRCNVVSPGSTDTDMQRTLWVSDDAEEQRIRGFGEQFKLGIPLGKIARPQEIANTILFLASDLASHITLQDIVVDGGSTLGA

SEQ ID NO: 92152 - protein, 248 aa, Shigella flexneri; identical to SEQ ID NO: 92151
  misc_feature (1)..(248): tr|A0A5C2EBK9|A0A5C2EBK9_SHIFL 2,3-dihydro-2,3-dihydrox ybenzoate dehydrogenase OS=Shigella flexneri Y OX=42472 0 GN=dhbA PE=4 SV=1

SEQ ID NO: 92153 - protein, 248 aa, Shigella sonnei; identical to SEQ ID NO: 91741
  misc_feature (1)..(248): tr|A0A5F0C651|A0A5F0C651_SHISO 2,3-dihydro-2,3-dihydrox ybenzoate dehydrogenase OS=Shigella sonnei OX=624 GN=dh bA PE=4 SV=1

SEQ ID NO: 92154 - protein, 244 aa, Shimia marina
  misc_feature (1)..(244): tr|A0A0P1FI36|A0A0P1FI36_9RHOB 2,3-dihydro-2,3-dihydrox ybenzoate dehydrogenase OS=Shimia marina OX=321267 GN=e ntA PE=3 SV=1
MSMKSILVTGASQGIGKATAEAFLQAGWRVGVLARSADKLAALAETYEHAIALEADVTDAAQMERAFDHFVAQSGRLDALFNNAGIFGPAGSIDDVDLSGFDQVLNVNVRGMFIAAQLAFAQMRRQDPQGGRIINNGSLAAHVPREGAVCYTLSKHAITGLTRSLSLDGRAFDIACGQIDIGNAATDMVSDLNARLVAEGKEPNPTMDVQDAAQSVLHMAALPLSANVQFMTVMATKMPFIGRG

SEQ ID NO: 92155 - protein, 255 aa, Snodgrassella alvi
  misc_feature (1)..(255): tr|X2HAH5|X2HAH5_9NEIS 2,3-dihydro-2,3-dihydroxybenzoat e dehydrogenase [enterobactin] siderophore OS=Snodgrass ella alvi wkB2 OX=1196094 GN=SALWKB2_2023 PE=4 SV=1
MQQAIIVTGAAQGIGAAIVTKLLEQHYHVIGIDKQPYSPSWPVQQMIEAQYQTYWTSISQDITAFEETRILLNTLINQYNITGLVNVAGVLILTPLLSATEAQWQTSLNVNLLAPIFISQHLAAHFRQQRQGCIVTVSSNSARMARTEMGLYATTKAALSHFCRNLALEVAPYVRVNIVSPGSTLTAMQQQLWTDNEPPAGILDGDLTQYRLGIPLRKLAQPADIANTVSFLLSEEAAQITMQEIVVDGGATLGV

SEQ ID NO: 92156 - protein, 262 aa, Solibacillus isronensis
  misc_feature (1)..(262): tr|K1L3J6|K1L3J6_9BACL 2,3-dihydro-2,3-dihydroxybenzoat e dehydrogenase OS=Solibacillus isronensis B3W22 OX=122 4748 GN=dhbA PE=3 SV=1
MNFQELRGKVALVTGGAQGIGASLVKSLATLGVKVAVIDYNEEKLRSHVNGLIEQDHEVFAFPADVGDSNAIDAVVEKVENEIGPIEMLVNVAGALATGPVESCTDRDWARIFSINTTGVFYVSRAVSRYMVQRKAGSIVTVGSNAASVPRIFMAAYAASKAATVMFTKCLGLELAEHNIRCNIVSPGSTDTDMQRSMWSDDHGAEVMIKGMTETYKVGIPLKKIAQPDNIVDAILFFLSNQSSHITMSNLVVDGGATLGAN

SEQ ID NO: 92157 - protein, 258 aa, Sorangium cellulosum
  misc_feature (1)..(258): tr|A9EPQ8|A9EPQ8_SORC5 2,3-dihydro-2,3-dihydroxybenzoat e dehydrogenase OS=Sorangium cellulosum (strain So ce56 ) OX=448385 GN=mxcC PE=3 SV=1
MEFEHKAALVTGAAQGIGEAVARRLAARGAAVAAVDANRERLAAVVADLQASGHRAAAFAVDVADGEAVDGAVERIERELGPLEMLVNVAGVLRVGGALSLTSDDWERTFAVNTRGVFNVSRAVARRMVPRRSGSIVTVGSNAARTPRMNMGAYAASKAAAAQWTKCLGLELAQHDIRCNVVSPGSTDTPMQRALWADDRGAQAVIAGAPEAFRLGIPLRRIATTDDVASAVLFLLSDEARHITMHDLCVDGGATLGA

SEQ ID NO: 92158 - protein, 258 aa, Sorangium cellulosum
  misc_feature (1)..(258): tr|A0A2L0EVA4|A0A2L0EVA4_SORCE 2,3-dihydroxybenzoate-2, 3-dehydrogenase OS=Sorangium cellulosum OX=56 GN=entA P E=4 SV=1
MEFKHKVALVTGAAQGIGEAVARALAARGAAVAGVDANRERLGAVVADLAASGLRAAAFPVDVSDTEAVNGVVDRVERELGPLDILVNVAGVLRVGPVLELSDEDWERTFAVNTRGVFNMSRAVARRMTARASGAIVTVGSNAARTPRVHMAAYAASKAATTMFTKCLGLELAQHNIRCNVVSPGSTDTPMQRSLWTGGRGARAVIAGSPEAFRVGIPLNRIADAEDVAAAVLFLASDQARHITMHDLCVDGGATLGV

SEQ ID NO: 92159 - protein, 250 aa, Sphaerisporangium sp.
  misc_feature (1)..(250): tr|A0A366LRC3|A0A366LRC3_9ACTN 2,3-dihydro-2,3-dihydrox ybenzoate dehydrogenase OS=Sphaerisporangium sp. LHW630 15 OX=2248750 GN=DP939_32745 PE=4 SV=1
MKGVEGRIALVSGAAGGIGAAVCAALAGAGAKVAAADTQASAQPGVASYLLDVRDARAVEAAVAAIERDLGPIEILVNVAGVLRAASVRETDDETWRQSFAVNADGVFNLSRAVTRHMAVRRSGVVVTVGSNAASVPRIGMAAYAASKAAAVMFTRCLGLELAGYGVRCNVVSPGSTDTPMLRGLPGGDAPGAFEAVLAGEPAAFRVGVPLGRVALPEDVAEAVLFLASDHARHITMHELMVDGGASLRA

SEQ ID NO: 92160 - protein, 268 aa, Sphingobium sp.
  misc_feature (1)..(268): tr|A0A173KZJ0|A0A173KZJ0_9SPHN 2,3-dihydro-2,3-dihydrox ybenzoate dehydrogenase OS=Sphingobium sp. EP60837 OX=1 855519 GN=entA PE=4 SV=1
MTVSLLGLEGKKALIVGGGRGMGEASALLLAEAGCDIAVLDSVLERAEQVAKEVRALGRAGIAIEADILDEASVKQAVADAEAAMGGLDILVTIVGQALFKPLLDVTLEEWDYDQSRNLRYFFVTGRAVAQSMIARGVPGSLICIGSVDGAVGSPMHAPYGAAKAGLMHLVKSMAAEWGRQGIRANAVAPGSITTPRLPETPDSRALMESSVLPIGRPGTTRDVAGAVLFLASGLSEYVTGHTLFVDGGWMAANHFDPRVMATKKSNE

SEQ ID NO: 92161 - protein, 329 aa, Sphingomonas dokdonensis
  misc_feature (1)..(329): tr|A0A245ZI51|A0A245ZI51_9SPHN 2,3-dihydro-2,3-dihydrox ybenzoate dehydrogenase OS=Sphingomonas dokdonensis OX= 344880 GN=dhbA PE=3 SV=1
MGKVVVVTGAGAGVGRATAEKFASEGYDVALLSRDPERLERAAAELRRHGVRALPIPTDVADAAAVEAAADRTERELGPIDVWVNVAMATVFAPVAKLTPEEVERGTRVTYLGQVHGMMSALKRMRSRSGTIVNVGSALAYRSVPLQSVYCGAKAAIRGFTDSLRSEIIHDKIDVHLTMVDLPAVNTPQFDWALNKMGKKARPVAPIFEPEVPALAIYFAATHKRRDVWLGFSSVKAILGNRVAPGLIDRYLAKAGYSGQLTDEPTPANAPSNLFEAVPGDYDAHGRFDDSSRRRSIEFFTDRHRTGFLAAAAVAVGYLTHRAAKRLNV

SEQ ID NO: 92162 - protein, 257 aa, Staphylococcus carnosus
  misc_feature (1)..(257): tr|A0A380F7T3|A0A380F7T3_STACA Putative short chain deh ydrogenase OS=Staphylococcus carnosus subsp. utilis OX= 147449 GN=entA PE=4 SV=1
MHLMKNLIGKHFVITGGTSGLGYAITNAVLKKGAYVTLLVRNIDKFNKTYYPYNAHLLNAQVCNLNSRAAIKKLCFKKEAIDGLIHSAGLGYFKSIDAHEENEMIETYEINLINFNILLKQLAPYFTKHPYIVGISSLAAFSTQVHSGHYAASKAALNQVLNTYRLEHPNYQVMLVNTGPIRTPFHAKADPTLKYAAQVDNIMLDPDKLAEEIINNMLKNKSEVNRPKWLHALLKLYQLAPRTIEKTFPALFNNKKE

SEQ ID NO: 92163 - protein, 254 aa, Staphylococcus condimenti
  misc_feature (1)..(254): tr|A0A143P8C6|A0A143P8C6_9STAP Putative short chain deh ydrogenase OS=Staphylococcus condimenti OX=70255 GN=ent A PE=4 SV=1
MKNLIGKHFVITGGTSGLGYAITNAVLKRGAKVTLLVRNIDKFNKIYYPYNAHLLNVQLCNLNSRSDIKKITFQKDSIDGLIHSAGLGYFKSIDTHEEKEMIETYEINLINFNVLLKHLASYFRKHPYIVGISSLAAFSTQVYSGHYAASKAGLNQVLNTYRLEHPHYHVMLVNAGPIRTPFHAKADPTLKYAVQVDNIMLDPDKLAEDIIDSMLKNKFEINRPKWLYTLLKFYQLAPRKIEKTFPSLFNNKKE

SEQ ID NO: 92164 - protein, 254 aa, Staphylococcus piscifermentans
  misc_feature (1)..(254): tr|A0A239U2K7|A0A239U2K7_9STAP Putative short chain deh ydrogenase OS=Staphylococcus piscifermentans OX=70258 G N=entA PE=4 SV=1
MENLIGKHFVITGGTSGLGYALTKVLLERGAKVTLLVRSMTKFKQTFFPHNTHLLQAVQCDLNSAEQIKRLDFAHATINGLIHSAGLGYFKSISAHSEEEMLETYRINVVHFNILLNHLAHSFSEHPYIIGISSLAAHSTQAHSGHYAASKAAFNQVLNTYRLEHPNYHILTVNAGPIRTPFHAKADPTLKYATQVDKLMLDPDKLANQIIIYMLRNKAELNAPKWLNSLLKLYQLAPRKLERAFPKLFNNKKE

SEQ ID NO: 92165 - protein, 258 aa, Starkeya sp.
  misc_feature (1)..(258): tr|A0A556PHB3|A0A556PHB3_9RHIZ 2,3-dihydro-2,3-dihydrox ybenzoate dehydrogenase OS=Starkeya sp. 3C OX=2597768 G N=FO470_00250 PE=4 SV=1
MRDSGLSGKVALVTGAAGGIGAAVVRQLHAEGVRVVAGDVAEAGVSALAAELGDAVVPALLDVRSTEAVDALVGHVEREVGPIDLLANVAGVLSYEPVVGLSDAEWERVFDINAAGVFRVSRAVARAMQARKRGAMVTVSSNAAGIPRHAMSAYAASKAAATMFTRCLGLELAPLGIRCNIVAPGSTLTPMQTGMWADGNGAARVIAGSPETFKAGIPLAKLATPDDIADAVVFLLSDRAGHVTMADLYIDGGATLRG

SEQ ID NO: 92166 - protein, 252 aa, Stenotrophomonas maltophilia
  misc_feature (1)..(252): tr|B2FHQ1|B2FHQ1_STRMK Putative enterobactin synthetase component A (2,3-dihydro-2,3-dihydroxybenzoate dehydro genase) OS=Stenotrophomonas maltophilia (strain K279a) OX=522373 GN=entA PE=4 SV=1
MQLTGFEGRVALVTGAAGGIGEALVRLLAEAGCTVVATDREAPHVADTRVRSFALDVTDSAAVGALVDRVESSIGPIMLAASVAGVLHMGGVTETGDDDWRRVFAVNTDGVFHVGRALARVMSPRQRGVIVTVSSNAAGVPRHGMAAYAASKAAATMFTRCLGLELAPLGIRCNIVAPGSTLTPMQTGMWQDERGAERVIAGSLETYKAGIPLRKLATPEDIAHSVMFLLSEQAGHVAMSDLYVDGGATLRG

SEQ ID NO: 92167 - protein, 252 aa, Stenotrophomonas maltophilia
  misc_feature (1)..(252): tr|A0A431UN78|A0A431UN78_STEMA 2,3-dihydro-2,3-dihydrox ybenzoate dehydrogenase OS=Stenotrophomonas maltophilia OX=40324 GN=EKL94_03195 PE=4 SV=1
MQLTGFERRVALVTGASGGIGEALVRLLAEAGCTVVATDREVPRVSDTRVTSFALDVTDSAAVDALVDQVESSIGPIALAASVAGVLHVGGVTETGDDDWRRVFAVNADGVFHVGRALARVMSPRRQGAIVTVSSNAAGVPRHGMAAYAASKAAATMFTRCLGLELAPLGIRCNIVAPGSTLTPMQTGMWQDERGAERVIAGNLETYKAGIPLRKLATPEDIAHSVMFLLSEQAGHVAMSDLYVDGGATLRA

SEQ ID NO: 92168 - protein, 252 aa, Stenotrophomonas maltophilia
  misc_feature (1)..(252): tr|M5CZ24|M5CZ24_STEMA 2,3-dihydroxybenzoate-2,3-dehydr ogenase OS=Stenotrophomonas maltophilia RA8 OX=1118157 GN=entA PE=4 SV=1
MQLTGFEGRVALVTGAAGGIGEALVRLLAEAGCTVVATDREAPVVADARVQAFALDVTDSAAVDALVDRVEASIGPIGLAASVAGVLQVGAVTETTDADWRRVFAVNADGVFHIGRALARVMSPRRQGAMVTVSSNAAGVPRHGMAAYAASKAAATMFTRCLGLELAPLGIRCNIVAPGSTLTPMQTGMWQDEHGAERVIAGNLETYKAGIPMRKLATPEDIAHSVMFLLSEQAGHVAMSDLYVDGGATLRG

SEQ ID NO: 92169 - protein, 252 aa, Stenotrophomonas maltophilia
  misc_feature (1)..(252): tr|M5CNK7|M5CNK7_STEMA 2,3-dihydro-2,3-dihydroxybenzoat e dehydrogenase OS=Stenotrophomonas maltophilia SKK35 O X=1118156 GN=entA PE=4 SV=1
MQLTGFEGRVALVTGAAGGIGEALVRLLAEAGCTVVATDREAPRVEDARVHAFSLDVTDSVAVDALLDRVEASLGPICLAASVAGVLHVGDVAGTSDADWRRVFSVNADGVFHVGRALARVMSPRRQGAIVTVSSNAAGVPRHGMAAYAASKAAATMFTRCLGLELAPLGIRCNIVAPGSTLTPMQTGMWQDEFGAQRVIAGSLETYKAGIPLRKLATPEDIAHAVMFLLSEQAGHVAMSDLYVDGGATLRG

SEQ ID NO: 92170 - protein, 253 aa, Stenotrophomonas sp.
  misc_feature (1)..(253): tr|A0A427BVR7|A0A427BVR7_9GAMM 2,3-dihydro-2,3-dihydrox ybenzoate dehydrogenase OS=Stenotrophomonas sp. 278 OX= 2479851 GN=EGJ34_21780 PE=4 SV=1
MKLTGFDGTVALVTGAAGGIGAALVQLLLDSGAVVVATDREAPVRAAHPRLHAYALDVSDAAAVDARVSAVESDLGPIGFGVNVAGVLQVGEVTGISDAQWRSVFAVNTDGVFHLGRALARVMTPRRRGAIVTVSSNAAGVPRHGMAAYAASKAAATMFTRCLGLELAPHGIRCNIVAPGSTLTPMQTGMWADDQGAQRVIAGTPETFKAGIPLGKLANPEDVAQAVMFLLSDQAGHIAMSDLYVDGGATLRG

SEQ ID NO: 92171 - protein, 252 aa, Stenotrophomonas sp.
  misc_feature (1)..(252): tr|A0A4P6VZK4|A0A4P6VZK4_9GAMM 2,3-dihydro-2,3-dihydrox ybenzoate dehydrogenase OS=Stenotrophomonas sp. ASS1 OX =2282124 GN=MG068_11915 PE=4 SV=1
MQLTGFEGRVALVTGAAGGIGEALVRLLAEAGCTVVATDREAPVVVDARVQAFALDVTDSAAVDALVDRVEASIGPIGLAASVAGVLHVGAVAETTDADWRRVFAVNADGVFHVGRALARVMSPRGQGAIVTVSSNAAGVPRHGMAAYAASKAAATMFTRCLGLELAPLGIRCNIVAPGSTLTPMQTGMWQDAHGAERVIAGSLETYKAGIPLRKLATPEDIAHSVMFLLSEQAGHVAMSDLYVDGGATLRG

SEQ ID NO: 92172 - protein, 252 aa, Stenotrophomonas sp.
  misc_feature (1)..(252): tr|A0A4Q1CWM5|A0A4Q1CWM5_9GAMM 2,3-dihydro-2,3-dihydrox ybenzoate dehydrogenase OS=Stenotrophomonas sp. MA5 OX= 2508572 GN=ERT44_04010 PE=4 SV=1
MQLTGFEGRVALVTGAAGGIGTALVKLLVAAGCQVVATDRESPAIVGERVHACALDVSDSAAVDALIDQVEAKIGPIALAASVAGVLQVGAVTDTCDADWRRVFSVNADGVFHLGRALARVMSPRRQGAIVTVSSNAAGVPRHGMAAYAASKAAATMFTRCLGLELAPLGIRCNIVAPGSTLTAMQTGMWEDAYGAERVIAGNLDTYKAGIPLRKLATPEDVAQSVMFLLSEQAGHVAMSDLYVDGGATLRG

SEQ ID NO: 92173 - protein, 252 aa, Stenotrophomonas sp.
  misc_feature (1)..(252): tr|B8L5N8|B8L5N8_9GAMM Vibriobactin-specific 2,3-dihydr o-2,3-dihydroxybenzoate dehydrogenase OS=Stenotrophomon as sp. SKA14 OX=391601 GN=SSKA14_2204 PE=4 SV=1
MQLTGFEGRVALVTGAAGGIGEALVRLLAEAGCTVVATDREAPRVEEARVHAFSLDVTDSVAVDALVDRVEASLGPIGLAASVAGVLHVGEVVGTTDADWRRVFAVNADGVFHVGRALARVMSPRRQGAIVTVSSNAAGVPRHGMAAYAASKAAATMFTRCLGLELAPLGIRCNIVAPGSTLTPMQTGMWQDEHGAERVIAGSPETYKAGIPLRKLATPDDIAHAVMFLLSEQAGHVAMSDLYVDGGATLRG

SEQ ID NO: 92174 - protein, 257 aa, Stigmatella aurantiaca
  misc_feature (1)..(257): tr|E3FDX3|E3FDX3_STIAD 2,3-dihydro-2,3-dihydroxybenzoat e dehydrogenase OS=Stigmatella aurantiaca (strain DW4/3 -1) OX=378806 GN=STAUR_3598 PE=3 SV=1
MGTTSKVALVTGAAQGIGAAVVRALAGSGPVAALDTQAEKLSALATDLGQGRGRVVPYRADVRDSAAVEAVVEQVERELGPIGILVNVAGVLRTGAAVEFSDADWETTFAVNTQGVFHVSRAVARRMVPRKAGVIVTVASNASGTPRMQMAAYAASKAASAMFTKCLGLELAPHNIRCNVVSPGSTDTPMQRALWTDERGGDAAITGSLETFRVGIPLRRLATPADIADAVVFLTSDQARHITMHDLCVDGGATLGV

SEQ ID NO: 92175 - protein, 260 aa, Streptacidiphilus pinicola
  misc_feature (1)..(260): tr|A0A2X0J6H0|A0A2X0J6H0_9ACTN 2,3-dihydro-2,3-dihydrox ybenzoate dehydrogenase OS=Streptacidiphilus pinicola O X=2219663 GN=DN069_24415 PE=3 SV=1
MENKVALVTGAAGGIGEAVVRALAGLGVAVALVDRNRERLEVLAKDLRRDGRRAEPLPADVTDSAEVEAAVSEAERRLGGLDYLVNAAGVLRTGEARELSDSDWSATFAVNTTGVFFVSRAVVNRMVARGSGGVIVTVASNAAGTARMEMSAYAASKAAATMFTKCLGLEVARFGIRCNVVAPGSTDTPMLTALWEDGGDDDALRASIDGVASAYRVGIPLGRIARPEHIADAVLFLLSEQAAHITMHDLTVDGGAALGH

SEQ ID NO: 92176 - protein, 256 aa, Streptacidiphilus sp.
  misc_feature (1)..(256): tr|A0A345SXP6|A0A345SXP6_9ACTN 2,3-dihydro-2,3-dihydrox ybenzoate dehydrogenase OS=Streptacidiphilus sp. DSM 10 6435 OX=2126346 GN=C7M71_014745 PE=3 SV=1
MENKVALVTGAAGGIGAAVVRALGERGVLVAAVDRDADRLAEVVGKLVADGIRAEAVPADVTDSDSVEAAVEAAEQRLGPLDYLVNAAGVLRLGEVRDFTDEDWRATFAVNVDGVFHVSRAVVNRMVTRGGGAIVTVASNAAVTPRTDMAAYAASKAAATLFTKSLGLEVARYGIRCNLVAPGSTDTRMLSSMWQDDSGRRGTIEGRPSAYRVGIPLGKLAEPSDIANAVVFLLSEEAGHITLHDLTVDGGAGLGA

SEQ ID NO: 92177 - protein, 248 aa, Streptococcus pneumoniae
  misc_feature (1)..(248): tr|A0A4V6JYD3|A0A4V6JYD3_STREE 3-ketoacyl-(Acyl-carrier -protein) reductase OS=Streptococcus pneumoniae OX=1313 GN=fabG_1 PE=4 SV=1
MDFSGKNVWVTGAGKGIGYATALAFVEAGAKVTGFDQAFTQEQYPFATEVMDVADAGQVAQVCQRLLAETERLDVLINAAGIFRMGATDQLSKEDWQQTFAVNVGGAFNLFQQTMNQFRRQRGGAIVTVASDAAHTPRIGMSAYGASKAALKSLALSVGLELAGSGVRCNVVSPGSTDTDMQRTLWVSDDAEEQRIRGFGEQFKLGIPLGKIARPQEIANTILFLASDLASHITLQDIVVDGGSTLGA

SEQ ID NO: 92178 - protein, 254 aa, Streptococcus sanguinis
  misc_feature (1)..(254): tr|A0A427ZP61|A0A427ZP61_STRSA 2,3-dihydro-2,3-dihydrox ybenzoate dehydrogenase OS=Streptococcus sanguinis OX=1 305 GN=entA PE=4 SV=1
MEKIISKAVILGASGGIGRQLAIELAQRTDQLVLVGRDEAKLTQLQEDLSGVQAKLSCRVLDLLDAAAVDDFAQQLDADLLINCCGLANFGPALSLSEADEKALWRVNYQAPIRLIKQVAERNRKIRLVQLSSLAALCPHPYLAAYSASKAALQTYCLALQEELRLKGSEVTVCCYILGPVQTAIFPPELQDALGGSQLQMSPEIAARRIIRLLQQGCSYAIVGKRYRLLAWLMKLLPQRWIIRLIGAYLRKGL

SEQ ID NO: 92179 - protein, 261 aa, Streptomonospora sp.
  misc_feature (1)..(261): tr|A0A4P6Q1Z4|A0A4P6Q1Z4_9ACTN 2,3-dihydro-2,3-dihydrox ybenzoate dehydrogenase OS=Streptomonospora sp. M2 OX=2 498135 GN=dhbA PE=4 SV=1
MSQNGIAGTVALVTGAARGIGRAVALRLAAEGALVAAADLDAGGLAEVADELHGDGHKAAWYTLDVRDSADVARVVAAAERDLGPLTHAVNVAGVLATADVAETTDADWEHVFAVNATGVFHVSRAAARRMAQRGRGTITTVGSNAAGVPRAGMAAYGASKAAATMFTKSLGLELAGSGIRCNVVSPGSTDTPMQRGMWTGDQGAADVVAGSPERFRAGIPLGRIADPGDIADAVCFLASSSARHITMHDLYVDGGATLRA

SEQ ID NO: 92180 - protein, 259 aa, Streptomyces acidiscabies
  misc_feature (1)..(259): tr|A0A1Q2ZM60|A0A1Q2ZM60_9ACTN 2,3-dihydro-2,3-dihydrox ybenzoate dehydrogenase OS=Streptomyces acidiscabies OX =42234 GN=dhbA PE=4 SV=1
MDGMANRTALVTGAAGGIGTAIVHALASAGARVAAVDRDVRELLEVTTKLSTGGLDIAPLPADITDEDAVRRVVDETEQRLGGIDFLVNAAGILRLGTVRGFRTQDWADTFAVNATGVFHMTRAVVDRMIPRRSGAIVTVASNAARTPRSEMAAYAASKAAAAQFTKSLGVEVARYGIRCNVVAPGSTDTPMLSSMWADESGRQKTIDGSPDAFKLGIPLGKIARPEDVAAAVCFLLSDEASHITLHDLTVDGGATLGA

SEQ ID NO: 92181 - protein, 276 aa, Streptomyces alboniger
  misc_feature (1)..(276): tr|A0A5J6HED4|A0A5J6HED4_STRAD 2,3-dihydro-2,3-dihydrox ybenzoate dehydrogenase OS=Streptomyces alboniger OX=13 2473 GN=CP975_14845 PE=4 SV=1
MPDHIPPDHLADESRAEGEFAGRTALVTGAGQGIGAAVATALAARGAHVVATDRSAHGIDELAAAARDLAGTVTPRVMDVTDPVAVTAVVDDVVRDHGALDLLVNVAGILRAAPVAELTDADWADTFAVNTTGVFHTSRAAASHMTARGRGCIVTVASNAAGIPRTGMAAYAASKAAATMFTKCLGLEVARSGVRCNVVAPGSTDTAMQRALWPDGQTEVPLSVIDGDPATYRTGIPLGRIAAPRDIADAVLFLASDRARHVTLQELYVDGGATLR

SEQ ID NO: 92182 - protein, 256 aa, Streptomyces albus
  misc_feature (1)..(256): tr|A0A4Z0VK61|A0A4Z0VK61_9ACTN 2,3-dihydro-2,3-dihydrox ybenzoate dehydrogenase OS=Streptomyces albus OX=1888 G N=D8771_34980 PE=4 SV=1
MEDKVALVTGAAGGIGAAVARALARRGARVAAVDLHTGRLTEEVGKLTADGLAVEAFPADVTRAAAVEELVEGVETRLGPVDLLVNAAGVLRLGPVHRLGDEDWAATFAVNTTGVFLVSRAVAGRMMPRSRGAIVTVASNAAGTPRTEMAAYAASKAAATMFTKCLALEVAGHGIRCNVVAPGSTDTAMLRSMWQDESGARATIEGRPEAYKLGIPLGKLARPADIADAVVFLLSDRAGHITMHELTVDGGATLGA

SEQ ID NO: 92183 - protein, 219 aa, Streptomyces alfalfae
  misc_feature (1)..(219): tr|A0A4Q7EUX3|A0A4Q7EUX3_9ACTN 2,3-dihydro-2,3-dihydrox ybenzoate dehydrogenase OS=Streptomyces alfalfae OX=164 2299 GN=D4104_19205 PE=4 SV=1
MAAHEPGRAAPAPGTITPRTMDVTDPAAVSRVIDETVRDLGALDILVNVAGILRTAPVAELTDADWADTFAVNTTGVFHASRAAASHMTARGSGCIVTVASNAAGIPRTGMAAYAASKAAATMFTKCLGLETARSGVRCNVVAPGSTDTAMQRALWPDGQAEAPSSVIAGDPATYRTGIPLGRIAAPEDIAEAVVFLASDRARHITLQELYVDGGATLR

SEQ ID NO: 92184 - protein, 265 aa, Streptomyces chartreusis
  misc_feature (1)..(265): tr|A0A2N9BJK3|A0A2N9BJK3_STRCX 2,3-dihydro-2,3-dihydrox ybenzoate dehydrogenase OS=Streptomyces chartreusis NRR L 3882 OX=1079985 GN=dhbA PE=3 SV=1
MTRTTDSRAMEGKVALVTGAAGGIGAAVVRAIAERGGVLAAVDANSVALKETTEALAGEGLRVEGFVADVTRPDEVEATVAAVEARLGPVDHLVNAAGILRLGDARTLSDTDWADTIAVNATGVFHMSRAVVNRMVPRRSGALVTVASNAAGTPRTQMAAYAASKAAATMFTKCLGLEVAEYGIRCNLVAPGSTDTPMLSSMWHDDSGREATVRGSLETFKVGIPLRKLAAPRDVADAVVFLLSEEASHITLHALTVDGGATLGV

SEQ ID NO: 92185 - protein, 271 aa, Streptomyces cinereoruber
  misc_feature (1)..(271): tr|A0A5J6IKL4|A0A5J6IKL4_9ACTN 2,3-dihydro-2,3-dihydrox ybenzoate dehydrogenase OS=Streptomyces cinereoruber OX =67260 GN=CP977_04045 PE=4 SV=1
MPNGTGPNGEFAGRVALVTGAAQGIGEAVVRALSARGAAVAATDLSERELGQSVARLAEEAGADPAAGPVVPYRLDVTAPDDVAETVERVSRELGPVDILVNVAGMLRTGPAVETTDRDWADVFAVNTTGVFHLSRAVVAGMAARGSGSVVTVASNAAGIPRADMSVYAASKAAAVAFTKCLGLEVAARGVRCNAVCPGSTDTPMQRSLWDGDSVPDSVLDGDLATHRTGIPLRRIARPEDVAEAVVFLASDRARHITMQDLYVDGGATLR

SEQ ID NO: 92186 - protein, 263 aa, Streptomyces formicae
  misc_feature (1)..(263): tr|A0A291QA94|A0A291QA94_9ACTN 2,3-dihydro-2,3-dihydrox ybenzoate dehydrogenase of siderophore biosynthesis OS= Streptomyces formicae OX=1616117 GN=KY5_3428 PE=4 SV=1
MPEHIPQEPGEFTGRTALVTGAGQGIGAAVATALAARGAHVVATDRDAHGIDELAAAHRGAITPRVMDVTNPLAVTAVVDDVVREHGSLDLLVNVAGILRAAPVAELTDADWADTFAVNTTGVFHTSRAAAAHMTARGSGCIVTVASNAAGIPRTGMAAYAASKAAATMFTKCLGLEIARTGVRCNVVAPGSTDTAMQRSLWTDDEAPQRVIAGDPETYRTGIPLGRIADPQDIAEAVVFLASDRARHITLQELYVDGGATLR

SEQ ID NO: 92187 - protein, 219 aa, Streptomyces fradiae; identical to SEQ ID NO: 92183
  misc_feature (1)..(219): tr|A0A3B7R078|A0A3B7R078_STRFR 2,3-dihydro-2,3-dihydrox ybenzoate dehydrogenase OS=Streptomyces fradiae OX=1906 GN=D3X13_02285 PE=4 SV=1

SEQ ID NO: 92188 - protein, 256 aa, Streptomyces fulvissimus
  misc_feature (1)..(256): tr|N0CVL2|N0CVL2_9ACTN 2,3-dihydro-2,3-dihydroxybenzoat e dehydrogenase OS=Streptomyces fulvissimus DSM 40593 O X=1303692 GN=SFUL_5263 PE=3 SV=1
MEGKTALVTGAAGGIGAEVVRQLAGQGVTVAAVDRDRELLHETTQKLAADGLGVLPFPADVSSAAEVEAVVEAVEGRLGPVDLLVNGAGVLRLGGVGELSEDDWNATFAVNTTGVFLMSRAVVRRMTARGGGAVVTVASNAAGTPRMEMAAYAASKAAATMFTKCLGLEAAAHGIRCNVVAPGSTDTPMLRSMWHDESGPRATLQGSLDSHRLGIPLAKVATVTDVADAVVFLLSDRASHITMHTLTVDGGATLGV

SEQ ID NO: 92189 - protein, 256 aa, Streptomyces glaucescens
  misc_feature (1)..(256): tr|A0A089XC03|A0A089XC03_STRGA 2,3-dihydro-2,3-dihydrox ybenzoate dehydrogenase OS=Streptomyces glaucescens OX= 1907 GN=dhbA PE=3 SV=1
MEGRIALVTGAAGGIGEAVVRALAAHGARVVAVDRNAERLREIAKSVGEDGGRAEAFVADVTSSADVEALVEDVETTVGPIDYLVNGAGVLRMGEARKLTDEEWAVTFAVNTSGVFFTSRAVVNRMVPRRRGAIVTIASNAAGTARTEMSAYAASKAAATMFTKCLGLEVAKHGIRANLVAPGSTDTPMLSSMWQDESSARASIEGVPDAYRVGIPLGRLARPEDVAEAVVFLLSDKAAHITMHDLTVDGGAALGV

SEQ ID NO: 92190 - protein, 262 aa, Streptomyces globisporus
  misc_feature (1)..(262): tr|A0A423V2D1|A0A423V2D1_STRGL 2,3-dihydro-2,3-dihydrox ybenzoate dehydrogenase OS=Streptomyces globisporus OX= 1908 GN=D3105_09640 PE=4 SV=1
MEMPGITGRVVVVTGAGRGIGAAVARLLGRHGAQVALWDTDPVTVTEVASELDAAGVKATAVCVDVRDSAAVEAATVQVEHTLGPVDLLVNVAGMLRTGALMEFTDEEWDEIFAVNVRGVFTVSRSVAGRMARRGHGAVVTVASNAGGVPRTGMGAYAASKAASSMLTKSLGLELATQGVRCNVVSPGSTDTPMLRDMWDAAGEGATEATVRGSLDAFRVGIPLGRVGTPEQVAQAVLFLLSDQASHITLQDLYVDGGAALG

SEQ ID NO: 92191 - protein, 260 aa, Streptomyces globosus
  misc_feature (1)..(260): tr|A0A344TZ17|A0A344TZ17_9ACTN 2,3-dihydro-2,3-dihydrox ybenzoate dehydrogenase OS=Streptomyces globosus OX=682 09 GN=C0216_10835 PE=4 SV=1
MPVRAGGNPPPVALVTGAARGIGAAVVDGLVREGVAVAAVDVDEGGLAELAERSAGLVVPFAADVSDRAAVADVVAAVEKGIGPIETGVSVAGILRPGLLCDTTDEDWDETFAVNTTGVFLVLRELARRMVPRGRGALVTVASNAAGVPRAGMGAYAASKAASAMLTRCLGLEVARHGIRCNVVSPGSTDTRMQRQLWTGEDDLERVIAGTPEEFRTGIPLGRIADPADIAEAVLFLVSDRARHITMQNLFVDGGATLRA

SEQ ID NO: 92192 - protein, 319 aa, Streptomyces griseorubiginosus
  misc_feature (1)..(319): tr|A0A385ZD68|A0A385ZD68_9ACTN 2,3-dihydro-2,3-dihydrox ybenzoate dehydrogenase OS=Streptomyces griseorubiginos us OX=67304 GN=entA PE=4 SV=1
MSTAQHKIGSGFGAHSTADDVLAGVDLSGKLAIVTGGYSGLGLETTKALVKAGARVVVPARRPDTAKEALAGLDGVEQDVLDLGDLDSVHAFAERFLASGRTIDLVIDNAGIMACPETRVGPGWEAQFATNHLGHFALVNRLWSAIEPGGARVVSVSSRAHHFSGMRWDDVHWRTGYDKWQAYGQAKTANVLFAVHLDKLGAERGVRAFSLHPGGILTPLQRHLPKAEMVERGWIDEQGNALNPSGFKSPEQGAATQVWAATSPQLDGMGGVYLEDCDIAEPAVDGDQSGGVRAWATDPEQAARLWTLSAELTGVNAFA

SEQ ID NO: 92193 - protein, 276 aa, Streptomyces griseus
  misc_feature (1)..(276): tr|A0A2X2M9U4|A0A2X2M9U4_STRGR 2,3-dihydro-2,3-dihydrox ybenzoate dehydrogenase OS=Streptomyces griseus OX=1911 GN=dhbA PE=4 SV=1
MPEHIPGRSGEFTGRTALVTGAAQGIGAAVADLLATLGARVAATDRARPGVEALAAEWSLAQEKTPDGERSEGSLTPYVMDVTDRGSVESTVAAIERRLGPVDVLVNVAGILRTGPAAVLSAQDWADTFAVNTTGVYHVSQAVAPLMAARGSGAVVTVGSNAAGIPRTGMAAYAASKAAAAMFTKCLGLELAGSGVRCNVVAPGSTDTPMQRALWTGPGAEQRVIDGDPSTYRTGIPLGRIADPGDIAETVAFLASDRARHITMQELYVDGGATLR

SEQ ID NO: 92194 - protein, 268 aa, Streptomyces hoynatensis
  misc_feature (1)..(268): tr|A0A3A9YSN8|A0A3A9YSN8_9ACTN 2,3-dihydro-2,3-dihydrox ybenzoate dehydrogenase OS=Streptomyces hoynatensis OX= 1141874 GN=D7294_22745 PE=4 SV=1
MAAHQAAQAREFEGRVALVTGAGSGIGLATARLLAERGAQVVAADRAPAAAAPGPGAGSATGSGALHAVRLDVTEGPRVRAVVAETERRFGRIDVLVNAAGILRPGTVAELADEDWADTLDVNATGVMRVSRAVAPGMAARRSGAIVTVGSDAAGLARTGMAAYAAAKAAAVAFTRCLGLELARHGVRCNIVSPGATDTPLQRRLWTSPEAAAQAVAGDPARYRGPIPLGRLADPADVAEAIAFLASDRARHVALHELRVDGGATLHR

SEQ ID NO: 92195 - protein, 255 aa, Streptomyces ipomoeae
  misc_feature (1)..(255): tr|L1KUS6|L1KUS6_9ACTN 2,3-dihydroxybenzoate-2,3-dehydr ogenase OS=Streptomyces ipomoeae 91-03 OX=698759 GN=STR IP9103_03574 PE=3 SV=1
MDDKVALVTGAAGGIGEAVVRTLAERGAMVAMLDRNADRLEELAEKVRVSGGRAEAFPADVTDSAAVEAVVEQAEQRLGPLDYLVNAAGVLRLGQARGLTDEDWATTFAVNTAGVFFVSRAVVNRMVERRQGAIVTIASNAAGTARVDMAAYSASKAAATMFTKCLGLEVSRFGIRCNVVAPGSTDTQMLTALWDDGAEQASIDGVSSAFRVGIPLGRIARPQHIADAVVFLLSDQAAHITMHDLTVDGGAALGH

SEQ ID NO: 92196 - protein, 255 aa, Streptomyces ipomoeae; identical to SEQ ID NO: 92195
  misc_feature (1)..(255): tr|A0A540P8I0|A0A540P8I0_9ACTN 2,3-dihydro-2,3-dihydrox ybenzoate dehydrogenase OS=Streptomyces ipomoeae OX=103 232 GN=Sipo7851_34435 PE=3 SV=1

SEQ ID NO: 92197 - protein, 120 aa, Streptomyces jeddahensis
  misc_feature (1)..(120): tr|A0A177HPB0|A0A177HPB0_9ACTN 2,3-dihydro-2,3-dihydrox ybenzoate dehydrogenase OS=Streptomyces jeddahensis OX= 1716141 GN=dhbA PE=4 SV=1
MGASEFAGLMAVVTGGASGVGLATARLLAARGACVACLDLRPDAMPAPLVDTPADAADDVTVRAAVEEAARWFGGLGILASSAGIGAQGIISPSSAAWADYGFGPAPDLPRETVRRKNQP

SEQ ID NO: 92198 - protein, 275 aa, Streptomyces kanamyceticus
  misc_feature (1)..(275): tr|A0A5J6GII8|A0A5J6GII8_STRKN 2,3-dihydro-2,3-dihydrox ybenzoate dehydrogenase OS=Streptomyces kanamyceticus O X=1967 GN=CP970_25110 PE=4 SV=1
MPEHIPQEPGEFTGRTALVTGAGQGIGAAVATALAARGAHVVATDRDAHGIDELAAATRGSTAAPGTLATRGAITPRVMDVTDHRAVSTVIGDVIRDHGSLDLLVNVAGILRTAPVAELTDADWADTFAVNTTGVFHTSRAAAAHMTARGSGCIVTVASNAAGIPRTGMAAYAASKAAATMFTKCLGLEIARSGVRCNVVAPGSTDTAMQRSLWTDDEAPRRVIAGDTETYRTGIPLGRIADPQDIADAVLFLASDRARHITLQELYVDGGATLR

SEQ ID NO: 92199 - protein, 259 aa, Streptomyces kasugaensis
  misc_feature (1)..(259): tr|A0A4Q9HRI2|A0A4Q9HRI2_STRKA 2,3-dihydro-2,3-dihydrox ybenzoate dehydrogenase OS=Streptomyces kasugaensis OX= 1946 GN=EYS09_23070 PE=4 SV=1
MRETELSGRTALVTGAGRGIGAAVARLLADQGARVVAVDRDADGVTALEDEYGAGRITGRAVDITDRAAVDALVTDAERTAGPLDILVNVAGVLRTAPVVELTDQDWDDTFAVNTTGVFQLSRAVARTMTTRRSGCIVTVGSNAAGVPRAGMAAYAASKAAATLFTKCLGLELARSGVRCNVVSPGSTDTPMQRQLWTGPEARDRIIDGDPESYRVGIPLGRIAEPRDIAEAVGFLVSDRARHITMHDLYVDGGATLRA

SEQ ID NO: 92200 - protein, 259 aa, Streptomyces klenkii
  misc_feature (1)..(259): tr|A0A3B0BHZ5|A0A3B0BHZ5_9ACTN 2,3-dihydro-2,3-dihydrox ybenzoate dehydrogenase OS=Streptomyces klenkii OX=1420 899 GN=D7231_13375 PE=4 SV=1
MQQSELSGRVALVTGAGQGIGEAVTRALVARGARVAALDWTPDGIKDLEAEFGRDKVTAHTADVADSTAVEAVVDEVENTVGPLGILVNVAGVLRTSPVVDITDDVWHRTFAVNSTGVFNASRAVARRMTERRSGCIVTVGSNAAGVPRTSMAAYAASKAAATMFTKCLGLELGRSGIRCNVVSPGSTDTAMQRGLWADDQAPQRVIDGDPGSYRVGIPLGRIAEPADIADAVAFLVSDRARHITMHDLYVDGGATLRA

SEQ ID NO: 92201 - protein, 264 aa, Streptomyces lavendulae
  misc_feature (1)..(264): tr|A0A5C8GZ00|A0A5C8GZ00_STRLA 2,3-dihydro-2,3-dihydrox ybenzoate dehydrogenase OS=Streptomyces lavendulae OX=1 914 GN=E2C11_17875 PE=4 SV=1
MSGEPELTGRAALVTGAARGIGAAVVEALAAGGARVLATDVDGAAVAELAARYEGRVTGRELDVTDATAVEDLIAEAERTLGPLDIVVNVAGVLRGAAVADLDDADWAAVFAVNTDGVFHVCRAAARRMTERRRGSIVTVASNAAGVPRAGMAAYAASKAAAVMFTKCLGLEVAPYGVRCNTVSPGSTDTDMQRAMWDRAPGGPDSGRRAVIEGDLASYRTGIPLGRLAEPSDIADAVAFLVSDRARHITLHDLYVDGGATLRA

SEQ ID NO: 92202 - protein, 259 aa, Streptomyces luteoverticillatus
  misc_feature (1)..(259): tr|A0A3Q9G2P5|A0A3Q9G2P5_STRLT 2,3-dihydro-2,3-dihydrox ybenzoate dehydrogenase OS=Streptomyces luteoverticilla tus OX=66425 GN=EKH77_26075 PE=4 SV=1
MEQSALAGRIALVTGAGQGIGEAVTRALVAQGARVAAVDATEDGVKALETEYGTEKVTHYTADVSDSRAVEAVFEEVERTAGPLDILVNVAGVLRTSPVVEITDEDWKRTFDVNSTGVFNTSRAAARRMSERRSGCIVTVGSNAAGVPRTSMAAYAASKAAATMFTKCLGLELARSGVRCNVVSPGSTDTAMQRSLWSGDEPPAGVIDGDPGSYRVGIPLGRIAEPSDIADAVLFLVSDRARHITMHDLYVDGGATLRA

SEQ ID NO: 92203 - protein, 259 aa, Streptomyces malaysiensis
  misc_feature (1)..(259): tr|A0A291T402|A0A291T402_9ACTN 2,3-dihydro-2,3-dihydrox ybenzoate dehydrogenase OS=Streptomyces malaysiensis OX =92644 GN=DNK48_04565 PE=4 SV=1
MRLTGIAEVTALVTGAAGAIGAATARQLAAEGAIVAVADIDENGAHTVAGHLGPAAHPVRLDVTDSGDVERAVRDVEDRLGPIGILVNAAGVLGRTAPLTEQEDAEWERVFGVNVRGTFNCVRAVGRRMARRGRGCVITVASNSAGIVKYDQGLYGASKAAAQYLTNCAGLELAEHGVRSVVVAPGTTESPMSRSNAHLPGRRQALLHGDPARHRVGIPRGTLAEPEDIASVIGFLASDQAAHMTITTVTVDGGSTLRP

SEQ ID NO: 92204 - protein, 264 aa, Streptomyces netropsis
  misc_feature (1)..(264): tr|A0A445NJJ2|A0A445NJJ2_STRNE 2,3-dihydro-2,3-dihydrox ybenzoate dehydrogenase OS=Streptomyces netropsis OX=55 404 GN=dhbA PE=4 SV=1
MGGTVVQQSELAGRVALVTGAGQGIGEAVTRALVARGARVAALDRSTEGVKELEAEFGAERVVAHSADVADSLAVDAVVDEVERTLGPIAILVNVAGVLRTSPVVDITDEVWDRTFAVNSTGVFNTSRAVARRMSERRDGCIVTVGSNAAGVPRTSMAAYAASKAAATMFTKCLGLELARSGVRCNVVSPGSTDTAMQRGLWADEQAPQRVIDGDPGTYRVGIPLGRIAEPADIADAVTFLVSDRARHITMHDLYVDGGATLRV

SEQ ID NO: 92205 - protein, 265 aa, Streptomyces nitrosporeus
  misc_feature (1)..(265): tr|A0A5J6F3N6|A0A5J6F3N6_9ACTN 2,3-dihydro-2,3-dihydrox ybenzoate dehydrogenase OS=Streptomyces nitrosporeus OX =28894 GN=CP967_01490 PE=4 SV=1
MSADQELAGRLALVTGAGRGIGEAVVHALAERGARVLATDLDTAGVEAAVAGRYDGRVTARRLDVTDAAAVEELVADVEDTLGPLDIAVNVAGILRGSPVAELTDEDWAATFAVNTGGVFHVSRAASRRMAGRGSGAIVTVASNAAGIPRTNMAAYASSKAAAVMFTKCLGLEVASSGVRCNTVSPGSTLTDMQRGMWADAGADPEAAARSVLEGDLAGYRTGIPLGRMADPSDVADAVAFLVSDRARHITMHDLYVDGGATLRA

SEQ ID NO: 92206 - protein, 276 aa, Streptomyces parvus
  misc_feature (1)..(276): tr|A0A5D4IWY9|A0A5D4IWY9_9ACTN 2,3-dihydro-2,3-dihydrox ybenzoate dehydrogenase OS=Streptomyces parvus OX=66428 GN=FY004_23470 PE=4 SV=1
MPEHIPGRSGEFIGRTALVTGAAQGIGAAVADLLATLGARVAATDRVLPGIEATAAEWARKQEKLPADERSAGSLDPYVMDVTDRSSVESTVARVERQLGPVDVLVNVAGILRTGPAAVLSAQDWADTFAVNATGVFHVSQAVAPLMAARGSGAVVTVGSNAAGIPRSGMAAYAASKAAAAMFTKCLGLELARSGVRCNVVAPGSTDTPMQRALWTDPGAEQRVIDGDLSAYRTGIPLGRIADPGDIAETVAFLASDRARHITMQELYVDGGATLR

SEQ ID NO: 92207 - protein, 266 aa, Streptomyces scabiei
  misc_feature (1)..(266): tr|A0A100JMC5|A0A100JMC5_STRSC 2,3-dihydro-2,3-dihydrox ybenzoate dehydrogenase OS=Streptomyces scabiei OX=1930 GN=dhbA_1 PE=3 SV=1
MDVGGTDNVDGIANSVALVTGAAGGMGEAVVRTLAERGAVVAMLDQRADRLEELAARIRESGGRAEAFPADVTDGAAVESAVERVERRLGPLAHLVNGAGVLRPGRAWALTDEDWASTFAVNTAGVFHVSRAVVRRMIERRRGAIVTVASNAAGTPRMDMAAYVASKAASTMFTKCLGLEVSRFGIRCNVVAPGSTDTPMLTALWDADAERASVEGVSSAFRVGIPLGRIARPQHIADAVVFLLSDRAAHITMQDLTVDGGAALGH

SEQ ID NO: 92208 - protein, 308 aa, Streptomyces sp.
  misc_feature (1)..(308): tr|A0A2P8AKW1|A0A2P8AKW1_9ACTN 2,3-dihydro-2,3-dihydrox ybenzoate dehydrogenase OS=Streptomyces sp. 111WW2 OX=1 945515 GN=entA_1 PE=4 SV=1
MNHWTPGDIPDQAGRTALITGGNSGIGLETARALARHGARVILAGRSRTRLDQAAEAVRAATPEARTDTLVLDLSDLSSVRDAATRIAETETVDLLFNNGGVMNLPERRTTHDGLEMTVGTNHLGHFAFNAQVWPAVRRSPAPRVVTVSAIAARWPMGRLEDLMSEKSYRAMGAYAKSKRANIVYTLELARRTASSPVEALVVHPGAAMTNLQQHGTGPLSRMVTPIAARLLMGSAEGAAWPSLYAATSPHVQSGWFIGPAGRDQTSGTPRPAKLPTGADDPAEGRRLWAASEQLTGVPFDIEAEAAV

SEQ ID NO: 92209 - protein, 256 aa, Streptomyces sp.
  misc_feature (1)..(256): tr|A0A552R738|A0A552R738_9ACTN 2,3-dihydro-2,3-dihydrox ybenzoate dehydrogenase OS=Streptomyces sp. 130 OX=2591 006 GN=FKN01_16225 PE=3 SV=1
MENRTAVVTGAAGGIGRAVIRSLAERGATVAAVDRDAEALDAAVAELRAEGHDVHPYVVEITDAGAVRELVDTVEQRLGPIEYLVNGAGVLRLGNVRTFSAEDWALTFAVNTTAVFHVSRAVIDRMMERRRGSVVTVASNAASTPRAGMAAYAASKAAATLFTKSLGLEAAPYGIRCNLVAPGSTDTPMLRSMWHDETGPKHTVEGRPEEFRLGIPLGKVAQPEDIAAAVTFLLSDEASHITLHDLTVDGGATLGA

SEQ ID NO: 92210 - protein, 256 aa, Streptomyces sp.
  misc_feature (1)..(256): tr|A0A4S2IM90|A0A4S2IM90_9ACTN 2,3-dihydro-2,3-dihydrox ybenzoate dehydrogenase OS=Streptomyces sp. 1AS2c OX=25 64098 GN=E5Z02_11190 PE=4 SV=1
MEEQTALVTGAAGGIGAAVVRLLAEQGTTVVAVDRDADRLAEEVAKLRAESLQVADFPVDVSDSAAVEAVVAAAEEQIGPIDQLVNAAGVLRLGPVRDITDEDLRAMLDVNVTGVLNVTRAVVNRMIPRARGSIVTVTSNAAVTPRAGMAAYAASKAAATQLVKSLGLEVAQYGIRCNTVAPGSTDTPMLRSMWHDREAEQHTLDGSPSAYRVGIPLRRIGRPDDVAEAVAFLLSDRAAQITLHDLTVDGGASLGA

SEQ ID NO: 92211 - protein, 277 aa, Streptomyces sp.
  misc_feature (1)..(277): tr|A0A4V3T7Z8|A0A4V3T7Z8_9ACTN 2,3-dihydro-2,3-dihydrox ybenzoate dehydrogenase OS=Streptomyces sp. A0592 OX=25 63099 GN=E6U81_36930 PE=4 SV=1
MPEAAAPGHARFAGRVAFVTGAGRGIGEAVVRTLYAHGASVFATDIDGEAVTALAGRLAEEARAAHPDGTPPPGRLLPRRLDVADPDAVRTAVADAVAAFGPVDILVNVAGVLHTGPATAVDDAAWERLFAVNAGGVFHTARELAPAMAERGRGSIVTVASDAAGVPRVGMAAYAASKAAATMFTKCLGLEYARSGVRCNVVAPGSTDTAMQRSLWEDDRVPHRVLEGDPGRYRNAIPLGRIADPADVADAVAFLASDEARHITMQQLYVDGGASLR

SEQ ID NO: 92212 - protein, 262 aa, Streptomyces sp.
  misc_feature (1)..(262): tr|A0A4S2UVX3|A0A4S2UVX3_9ACTN 2,3-dihydro-2,3-dihydrox ybenzoate dehydrogenase OS=Streptomyces sp. A0642 OX=25 63100 GN=E6R60_10070 PE=4 SV=1
MSPVPELTGRLALVTGAGRGIGEAVVHALVERGARVLATDVAPEGVTALAGKHPGHVTARTLDVTDAAAVEDLVAEAEDALGPLDIAVNVAGILRSSPVAELTDEDWAATFAVNTDGVFHVSRAVSTRMAARGTGSIVTVASNAAGIPRTNMAAYAASKAAAVMFTKCLGLELAPLGIRCNTVSPGSTLTDMQRGLWPAGDEDAAARRVIEGDGASYRTGIPLGRIADPSDIADAVAFLVSDRARHITLHDLYVDGGATLRA

SEQ ID NO: 92213 - protein, 265 aa, Streptomyces sp.
  misc_feature (1)..(265): tr|A0A4S2TPY9|A0A4S2TPY9_9ACTN 2,3-dihydro-2,3-dihydrox ybenzoate dehydrogenase OS=Streptomyces sp. A0958 OX=25 63101 GN=E6P78_29250 PE=4 SV=1
MSTAQELTGRLALVTGAGRGIGEAVVRALVERGCRVLATDVDREGVDALAREHGGSVVARALDVTDAAAVESLVAEAEETVGALDIAVNVAGILRCSPVSELTDEDWAATFAVNTNGVFHVSRSVSRRMAERGSGSIVTVASNAAGIPRTTMAAYAASKAASVMFTKCLGLELAPRGVRCNTVSPGSTLTDMQRGMWPAGEERDDGPAARRVIAGDLASYRTGIPLGRIAEPSDIAEAVAFLVSDRARHITLHDLYVDGGATLRA

SEQ ID NO: 92214 - protein, 265 aa, Streptomyces sp.
  misc_feature (1)..(265): tr|A0A4S2RMS7|A0A4S2RMS7_9ACTN 2,3-dihydro-2,3-dihydrox ybenzoate dehydrogenase OS=Streptomyces sp. A1277 OX=25 63103 GN=E6R18_20925 PE=4 SV=1
MTTEQELTGRLALVTGAGRGIGEAVVRALAERGCRVLATDVDREGVDALARELGENVVARALDVTDAAAVDALVAEAEESVGALGIAVNVAGILRCSPVSELTDEDWAATFAVNTNGVFHVSRAVSRRMAERGAGSIVTVASNAAGIPRTTMAAYAASKAASVMFTKCLGLELAPRGVRCNTVSPGSTLTDMQRGMWPAGEERDDGPAARRVIAGDLASYRTGIPLGRIAEPSDIAEAVAFLVSDRARHITLHDLYVDGGATLRA

SEQ ID NO: 92215 - protein, 316 aa, Streptomyces sp.
  misc_feature (1)..(316): tr|A0A4S3G296|A0A4S3G296_9ACTN 2,3-dihydro-2,3-dihydrox ybenzoate dehydrogenase OS=Streptomyces sp. A1499 OX=25 63104 GN=dhbA PE=3 SV=1
MPEHIPNGPYAEGEFAGRTALVTGAGQGIGAAVAAALAARGAHVIATDREPGRAADGAMGRGSGRAADRGPGREPGRDADGEPGRDGSGAAGSEPGRAAAHEPGKAAYAPGTITPRAMDVTDPAAVSRVIDETVRDLGALDILVNVAGILRTAPVAELTDADWADTFAVNTTGVFHASRAAASHMTARGSGCIVTVASNAAGIPRTGMAAYAASKAAATMFTKCLGLEIARSGVRCNVVAPGSTDTAMQRALWPDGQAEAPSSVIAGDPATYRTGIPLGRIAAPEDIAEAVVFLASDRARHITLQELYVDGGATLR

SEQ ID NO: 92216 - protein, 256 aa, Streptomyces sp.
  misc_feature (1)..(256): tr|A0A4S2RTA4|A0A4S2RTA4_9ACTN 2,3-dihydro-2,3-dihydrox ybenzoate dehydrogenase OS=Streptomyces sp. A1547 OX=25 63105 GN=E6W17_27940 PE=4 SV=1
MEGKIALVTGAAGGIGEAIVRALASRGVRVAAVDRDAHRLRDVAKSVAEEGGRVDPFPADVTSSADVESLVDDVEALVGPLDFLVNAAGVLRLAEARTLTDQEWSTTFAVNTTGVFFVSRAVVNRMVPRRRGAIVTIASNAAGTARTEMSAYAASKAAATMFTKCLGLEVAKFGIRANLVAPGSTDTPMLNSMWQDESSARASIDGVPDAYRVGIPLGKLARPEDVAEAVVFLLSDKAAHITMHDLTVDGGAALGA

SEQ ID NO: 92217 - protein, 278 aa, Streptomyces sp.
  misc_feature (1)..(278): tr|A0A384I7N6|A0A384I7N6_9ACTN 2,3-dihydro-2,3-dihydrox ybenzoate dehydrogenase OS=Streptomyces sp. AC1-42W OX= 2218666 GN=DNK56_16000 PE=4 SV=1
MAPHSTPAAPRPVPAGEGELAGRLALVTGAGRGIGEAVVRALVARGCRVLATDADPEGIDALAGEHDGLVVARTLDVTDAAAVETAVAETEESLGTLDIAVNVAGILRCSPVTELTDEDWAATFAVNTDGVFHVSRSVARRMAGRGAGSIVTVASNAAGIPRTTMAAYAASKAAAVMFTKCLGLELAPLGIRCNTVSPGSTLTDMQRAMWPAGEDRDDGPAARRVIAGDLPSFRTGIPLGRIAEPADVAEAVAFLVSDRARHITLHDLYVDGGATLRA

SEQ ID NO: 92218 - protein, 277 aa, Streptomyces sp.
  misc_feature (1)..(277): tr|A0A370B5U3|A0A370B5U3_9ACTN 2,3-dihydro-2,3-dihydrox ybenzoate dehydrogenase OS=Streptomyces sp. AC230 OX=22 82652 GN=DVH02_26460 PE=4 SV=1
MSPHPHAPSQPSPHTGQDLAGRLALVTGAGRGIGEAVVVALLAQGARVLATDRDADDVAALARRHGAEVTDRQLDVTDAAAVEALVAEAEETLGPLDIAVNVAGIMRSSQAVELTDEDWATTFAVNTNGVFHVARSTVRRMAERGRGSFVTVASNAAGIPRAGMAAYAASKAAAVMFTKCLGLEVAARGVRCNTVCPGSTLTDMQRALWAGSGPEAEEAAARRVVEGDLAAHRTGIPLGRIADPADIADAVAFLVSDRARHITLHDLYVDGGATLRA

SEQ ID NO: 92219 - protein, 276 aa, Streptomyces sp.
  misc_feature (1)..(276): tr|G0Q136|G0Q136_9ACTN 2,3-dihydro-2,3-dihydroxybenzoat e dehydrogenase OS=Streptomyces sp. ACT-1 OX=1609288 GN =SACT1_7088 PE=4 SV=1
MPEHIPGRSGEFTGRTALVTGAAQGIGAAVADLLATLGARVAATDRARPGVEALAAEWSLAQEKTPDGERSKGSLTPYVMDVTDRGSVESTVAAIERQLGPVDVLVNVAGILRTGPAAVLSAQDWADTFAVNTTGVYHVSQAVAPLMAARASGAVVTVGSNAAGIPRTGMAAYAASKAAAAMFTKCLGLELAGSGVRCNVVAPGSTDTPMQRALWTGPGAEQRVIDGDPSTYRTGIPLGRIADPGDIAETVAFLASDRARHITMQELYVDGGATLR

SEQ ID NO: 92220 - protein, 256 aa, Streptomyces sp.
  misc_feature (1)..(256): tr|A0A3N6DMB4|A0A3N6DMB4_9ACTN 2,3-dihydro-2,3-dihydrox ybenzoate dehydrogenase OS=Streptomyces sp. ADI91-18 OX =1522755 GN=dhbA PE=4 SV=1
MQGKTALVTGAAGGIGEAVVRALASRGVRVAAVDLNAERLREAAKAAVEDGLDVTAFPADVTLSTEVDEVVAEVESALGPIDYLVNAAGVLRMGAARSLSDEEWAVTFAVNTTGVFFMSRAVVNRMVARESGALVTVASNAAGTARAEMSAYAASKAAATMFTKCLGLEIAKYGIRANLVAPGSTDTPMLTSMWEDDSHARVSIEGNPETFRVGIPLGKLAQPQDVADAVVFLLSDEASHITMHDLTVDGGAALGV

SEQ ID NO: 92221 - protein, 255 aa, Streptomyces sp.
  misc_feature (1)..(255): tr|A0A3N6EW64|A0A3N6EW64_9ACTN 2,3-dihydro-2,3-dihydrox ybenzoate dehydrogenase OS=Streptomyces sp. ADI93-02 OX =1522757 GN=entA PE=3 SV=1
MYVNSADQAFSDHVALITGAGSGIGRAAAIAFAEAGAHVLGIGRREEPLKETAAAHANIEVLAMDITDDGAPAKAVSDAVRRWGRLDYLVNNAGATAVMPLAESEQQVIVDLLALNVVAPSLLAHEALPHLRETKGTIVNVSSTYGHRPMAGGAHYAASKAAVEQLTRSWALELAGEGVRVNCVAPGPTQTDVMLHAGLTQEASNEMYAYERDRIPTHHVAGAEEMAHWVLRMAEPTGRHATGQIITVDGGLELI

SEQ ID NO: 92222 - protein, 256 aa, Streptomyces sp.
  misc_feature (1)..(256): tr|A0A3G4VZ51|A0A3G4VZ51_9ACTN 2,3-dihydro-2,3-dihydrox ybenzoate dehydrogenase OS=Streptomyces sp. ADI95-16 OX =1522758 GN=dhbA PE=4 SV=1
MQGKTALVTGAAGGIGEAVVRALASRGVRVAAVDLNAERLREAAKAAVEDGLDVTAFPADVTLSSEVDEVVAEVESALGPIDYLVNAAGVLRMGAARSLSDEEWAVTFAVNTTGVFFMSRAVVNRMVTRESGALVTVASNAAGTARAEMSAYAASKAAATMFTKCLGLEIAKYGIRANLVAPGSTDTPMLTSMWEDESHARVSIEGNPETFRVGIPLGKLAQPQDVADAVVFLLSDEASHITMHDLTVDGGAALGV

SEQ ID NO: 92223 - protein, 221 aa, Streptomyces sp.
  misc_feature (1)..(221): tr|A0A3N6HCU8|A0A3N6HCU8_9ACTN 2,3-dihydro-2,3-dihydrox ybenzoate dehydrogenase OS=Streptomyces sp. ADI95-17 OX =1522759 GN=dhbA2 PE=4 SV=1
MTTFALVGAGPGLGLAAARRFGAAGHHVALLSRNADHLDALAAELGGDGIRARGFTADVLDSASLTAALAAAAEELGPIEVLQFSPVPRADFMKPVLETTAAGLDDPLAFSVKGPVTCVDAVLPGMRHLGRGTLLFVNGGSAVRPNPKVAGTSVAFAAESAYAAMLHDALAPENIHVAQLIVPGAIRLDAEHSSPDALAERLYAIHTDRGAFRHYAEPMPA

SEQ ID NO: 92224 - protein, 276 aa, Streptomyces sp.
  misc_feature (1)..(276): tr|A0A3N6G591|A0A3N6G591_9ACTN 2,3-dihydro-2,3-dihydrox ybenzoate dehydrogenase OS=Streptomyces sp. ADI98-10 OX =1522763 GN=dhbA2 PE=4 SV=1
MPEHIPGRSGEFIGRTALVTGAAQGIGAAVADLLATLGARVAATDLALPGIEALAVGWTRTQEKLPAGERSTGSLDPYVMDVTDRSSVERTVALVERRLGAVDVLVNVAGILRTGPAAVLSAQDWADTFAVNATGVFHVSQAVAPLMAARGSGAVVTVGSNAAGIPRTGMAAYAASKAAAAMFTKCLGLELARSGVRCNVVAPGSTDTPMQRALWTDPGAGQRVIDGDPATYRTGIPLGRIADPGDIAETVAFLASERARHITMQELYVDGGATLR

SEQ ID NO: 92225 - protein, 256 aa, Streptomyces sp.
  misc_feature (1)..(256): tr|A0A4Q6IJR2|A0A4Q6IJR2_9ACTN 2,3-dihydro-2,3-dihydrox ybenzoate dehydrogenase OS=Streptomyces sp. F001 OX=151 0026 GN=StrepF001_25940 PE=3 SV=1
MEGKVALITGAAGGIGAAVARALGERGVTVAAVDRDADGLLHTVQKLTADGVSARAFPADITGRAEVDALVDTVEQQLGPLDFLVNAAGVLHLGEARHLTDQDWDATFAVNATGVFVVSRAVVNRMVPRRRGAIVTVASNAAGTARTQMAAYAASKAAATMFTKCLGLEVAGHGIRCNLVAPGSTDTPMLSSMWRDNSGRRTTIAGRPEEYRVGIPLGKLAMPSDVADAVAFLLSDRAAHITLHSLTVDGGATLGG

SEQ ID NO: 92226 - protein, 322 aa, Streptomyces sp.
  misc_feature (1)..(322): tr|A0A1K2FI94|A0A1K2FI94_9ACTN 2,3-dihydro-2,3-dihydrox ybenzoate dehydrogenase OS=Streptomyces sp. F-1 OX=4636 42 GN=entA_1 PE=4 SV=1
MTTAQHKIGSGFGARSTADDVLRGIDLTGRLALVTGGYSGIGLETTRSLVRAGARVVVPARRPDTAEQALGGLPGVEVDEMDLGDLESVRAFAERFLGSGRTLDMVIGSAGIMACPETRVGPGWEAQFATNHLGHFALVNRLWPAIAAGGARVVSVSSRGHHAGGIRWDDVNWRQGYDKWEAYGQAKTANVLFAVHLDKLGRDAGVRAFALHPGGILTPLQRYLGKEEQIERGWIDENGTVLHPEAFKTPQQGAATQVWAATSPQLDGLGGLYLEDCDVAEPAPADGEREGVKDWAIDPEQAARLWALSAELTGVDAFADRA

SEQ ID NO: 92227 - protein, 269 aa, Streptomyces sp.
  misc_feature (1)..(269): tr|A0A345HY51|A0A345HY51_9ACTN 2,3-dihydro-2,3-dihydrox ybenzoate dehydrogenase OS=Streptomyces sp. GSSD-12 OX= 2282738 GN=DVK44_32320 PE=4 SV=1
MSIEASPTATALGADRSAVAVVTGAAGGIGAVVARALAATGVPVALLDRDIMPLWELAAELDGSAGGVLAVAADVTDSADVDSAIAKVEAELGPVTYLVNGAGVLRSGPASELTDEEWDITFAVNTSGVFHVSRAVSRVMVPRGRGSIVTIASNAAMTPRASMAAYAASKAASSMFTKCLGLELARHGIRCNVVAPGSTRTPMLTALQGDAAERASVDGTPDTYRVGIPLGRIAEPAHIAEAVLFLLSDRSAHITMHDLTVDGGASLGA

SEQ ID NO: 92228 - protein, 264 aa, Streptomyces sp.
  misc_feature (1)..(264): tr|A0A1V2MUC5|A0A1V2MUC5_9ACTN D-beta-hydroxybutyrate d ehydrogenase OS=Streptomyces sp. IB2014 011-1 OX=184447 8 GN=bdhA_1 PE=4 SV=1
MRIDLTGKNAVVTGSSQGIGLAIATGLAAAGAEVVLTGRGQERLDGAARSLRAEVAEAAVTTVACDLTTEEGAAELYAAVPETDVLVNNLGIFGSRPPLEITDEEWRTYFDTNVLSAVRLIRHYLPPMTGQGWGRVLNIASDSAIVIPAEMIHYGMSKTALLAVSRGFAKEAAGTGVTVNSVIAGPTHTGGVEDFVHELVDKALPWEEAQREFMRLHRPQSLLQRLIEPEEIANLVVYLSSAQASATTGAAVRVDGGYVDSIVP

SEQ ID NO: 92229 - protein, 256 aa, Streptomyces sp.
  misc_feature (1)..(256): tr|A0A2Z4UZK3|A0A2Z4UZK3_9ACTN 2,3-dihydro-2,3-dihydrox ybenzoate dehydrogenase OS=Streptomyces sp. ICC1 OX=209 9583 GN=DRB96_19735 PE=4 SV=1
MIAVVTGAAGGIGAAVARLLAERGITVAAVDLDPGRLSAVVDELTADGLPVWAHPADVTSSAEAEAVVAEVERVAGPIGYLVNAAGVLLLAESRALTDRDWHSTFAVNTNGVFFMSRSVVNRMIPRRQGAIVTVGSNAASIARGAMAAYAASKAAASAFTKCLGLEVAQYGIRCNLVAPGSTDTPMLHGMHSGGDAAAASVAGDHAAYRVGIPLGKVASPQDVAHAVRFLLSEEAGHITMHDLTVDGGATLGAQVY

SEQ ID NO: 92230 - protein, 295 aa, Streptomyces sp.
  misc_feature (1)..(295): tr|A0A552YGH9|A0A552YGH9_9ACTN 2,3-dihydro-2,3-dihydrox ybenzoate dehydrogenase OS=Streptomyces sp. IF17 OX=183 0119 GN=FNX48_14885 PE=3 SV=1
MIVRARAAPSGDVVPQPARHIVEPAGRHGAELAGLTALVTGAGGGIGEAVVRVLVGMGARVAATDRETDAIRALEKEFGPKFVTSHPLDVTDPGAVEAVVDGIERDIAPLGALVNVAGVLRVAPATELTDRDWAETFAVNTTGVFHTSRAVARRMTARRSGCIVTVGSNAAGVPRTGMAAYAASKAAAAQFTKCLGLEVARSGVRCNVVSPGSTDTAMQRQLWPGPPDDPDGAATADARRRVIDGDPETYRTGIPLGRIAEPVDVAEAVAFLLTDRARHITLHDLYVDGGATLRV

SEQ ID NO: 92231 - protein, 256 aa, Streptomyces sp.
  misc_feature (1)..(256): tr|A0A5C6WR14|A0A5C6WR14_9ACTN 2,3-dihydro-2,3-dihydrox ybenzoate dehydrogenase OS=Streptomyces sp. ISID311 OX= 2601673 GN=FS847_00105 PE=3 SV=1
MEDAVALVTGAAGGIGAAVVRALGRHRTRVAAVDRDARRLNDVVGKMVADGLSVEAFPADVTRAAEVEELVDAVESALGPVDYLVNAAGVLRLGPVRQQTDEDWAATFAVNTTGVMQVSRAVVNRMVLRSRGSIVTVASNAAGTPRMEMAAYAASKAAATMFTKCLALEVAGHGIRCNVVAPGSTDTAMLRSMWQDETGPQATIDGRPEAYKVGIPLGKLARPADIADAVVFLLSQQAGHITMHDLTVDGGATLGV

SEQ ID NO: 92232 - protein, 284 aa, Streptomyces sp.
  misc_feature (1)..(284): tr|A0A4U0P828|A0A4U0P828_9ACTN 2,3-dihydro-2,3-dihydrox ybenzoate dehydrogenase OS=Streptomyces sp. jys28 OX=25 71125 GN=FCH28_01685 PE=4 SV=1
MSDSIRLGLPKLIRGEVSEKGYDVRESELSGRTALVTGAGRGIGEAVARLLAERGAHVVAVDRDAAGITALEANSSSGPARITARTVDITDRPAVDALVDEVERTVGPLDILVNVAGVLRTGSVVELTDQDWADTFAVNTTGVFQVCRAVARRMTARRSGSIITVGSNAAGVPRAGLAAYAASKAAATLFTKSLGLELARTGVRCNVVSPGSTNTPIQRQLWTEPDSRGRVIEGDLAAYRVGIPLGRLAEPVDIAEAVGFLVSDRARHITMHDLYVDGGAALRA

SEQ ID NO: 92233 - protein, 271 aa, Streptomyces sp.
  misc_feature (1)..(271): tr|A0A3Q8VTJ4|A0A3Q8VTJ4_9ACTN 2,3-dihydro-2,3-dihydrox ybenzoate dehydrogenase OS=Streptomyces sp. KPB2 OX=230 5221 GN=D1J63_10945 PE=3 SV=1
MHSAHASDGDTGDDTASGLALVTGAAGGIGAAVVRTLAERGLRVAAVDRHAGRLGEEVAKLAADGLPVTAHAADVTDSAAVEAVVDEIEGTLGPVDRLVNAAGVLRLGEVTAFTDDDWTSTFAVNTTGVFHLSRAVVSRMVRRGGGAVVTVASNAAATPRSGMAAYAASKAAAEMFTKSLGLEVARHGVRCNIVAPGSTDTPMLSSMWHDESGPRATLAGNLEAFRVGIPLGKLARPADVAEAVAFLLSDRASHITLHTLTVDGGAALGAA

SEQ ID NO: 92234 - protein, 276 aa, Streptomyces sp.
  misc_feature (1)..(276): tr|A0A367E6Y7|A0A367E6Y7_9ACTN 2,3-dihydro-2,3-dihydrox ybenzoate dehydrogenase OS=Streptomyces sp. LHW50302 OX =2250578 GN=DQ392_32320 PE=4 SV=1
MSTTHRTAPGASRPLAPELDGRVALVTGAARGIGAAVVRALVAQGAHVLATDLEPAGVEKLAAEHPGQVTARPLDVADAAAVEALLAESDRLLGPLDIAANVAGILRISEVTELSDADWAATFAVNTNGVFHVSRAAARRMSERGSGSIVTVASNAAGIPRTGMAAYAASKAAAVMFTKCLGLEVAGRGVRCNTVSPGSTLTDMQRACWGPGADDEAAAARRVVEGDLATYRTGIPLGRIADPADVAEAVVFLASDRARHITLHDLYVDGGAALRA

SEQ ID NO: 92235 - protein, 221 aa, Streptomyces sp.
  misc_feature (1)..(221): tr|A0A2K8RG95|A0A2K8RG95_9ACTN 2,3-dihydro-2,3-dihydrox ybenzoate dehydrogenase OS=Streptomyces sp. M56 OX=1495 638 GN=dhbA_3 PE=4 SV=1
MTTLAIIGAGPGLGAAVARRFGREGYDTALIARDQGRLDALAAGLADEGVTARGFAADVRDPKTLTGALDAAATALGPIEVLQYSPVPQREFMLPVLDTTADDLAGPVEFSVYGPVTAVQQVLPGMRGLGRGTVLFVNGGTAVVPHPERAGTSIAFAAESAYGQLLHDTLAAEGIHVAQLVIPGAIVPGHDRKDPAVLADTLWTLHQDRNGFRHFADDLDS

SEQ ID NO: 92236 - protein, 261 aa, Streptomyces sp.
  misc_feature (1)..(261): tr|A0A1V2RFP5|A0A1V2RFP5_9ACTN 2,3-dihydro-2,3-dihydrox ybenzoate dehydrogenase OS=Streptomyces sp. MP131-18 OX =1857892 GN=STBA_20110 PE=3 SV=1
MEVRPMKGKTALVTGAAGGVGAAVVRAIAERGGVPAAVDADGVALKEKIEALSTEGLRAEGFTADVTRRDEADATVAAVEAQLGPVDYLVNAAGILRLAEARHLSDTDWADTLAVNATGVFHMSQAVVNRMVPRRSGAVVTVASNAAGTPRKLMAAYAASKAAATMFTKCLGLEVAEYGIRCNLVAPGSTDTPMLNSMWHDDSGREATIRGDLAAYKLGIPLGKLATPQDVADAVVFLLSEEAAHITMHALTVDGGATLGV

SEQ ID NO: 92237 - protein, 264 aa, Streptomyces sp.
  misc_feature (1)..(264): tr|A0A553ZRS5|A0A553ZRS5_9ACTN 2,3-dihydro-2,3-dihydrox ybenzoate dehydrogenase OS=Streptomyces sp. MZ03-48 OX= 2593677 GN=FNZ23_00010 PE=4 SV=1
MSTAPELDGRLALVTGAGRGIGAAVTAALAARGARVLATDLTPGELPEAARPYAERITTRALDVTDAAAVDALVAETEETVGPLDIAVNVAGVLRGAPVTELSDEDWAATFAVNTDGVLHVSRAAARRMAARGRGSIVTVASNAAGIPRAGMAAYAASKAAAVMFTKCLGLEVAAHGVRCNTVSPGSTLTDMQRAMWTASGQDEESAARHIIEGDLAAHRTGIPLGRIADPSDIAEAVVFLVSDRARHITLHDLYVDGGATLRA

SEQ ID NO: 92238 - protein, 265 aa, Streptomyces sp.
  misc_feature (1)..(265): tr|A0A3M8VPD4|A0A3M8VPD4_9ACTN 2,3-dihydro-2,3-dihydrox ybenzoate dehydrogenase OS=Streptomyces sp. NEAU-LD23 O X=2486417 GN=EEJ42_26955 PE=4 SV=1
MTEHKDTADIACRVALVTGAAGGIGTAIARALAGRGTLVAAVDKDADRLTDLVEKMAADGLTAAAFPADVTDSGRIDEVVDRIETELGAVDLLVNAAGVMRAGSALDMSDLDWRAIFSINLDGVFHCSRAVASRMKERGEGAIVTVASNAGRIPRVHMAAYGASKAAASLYTKSLGLELAEYGIRCNVVSPGSTDTDMLRALWSAEADRQTTIDGSMTTYKTGIPLRRIAEPGDIADAVVFLASDRARHITMQDLCVDGGAILGV

SEQ ID NO: 92239 - protein, 256 aa, Streptomyces sp.
  misc_feature (1)..(256): tr|A0A505D1R2|A0A505D1R2_9ACTN 2,3-dihydro-2,3-dihydrox ybenzoate dehydrogenase OS=Streptomyces sp. NEAU-SSA 1 OX=2315329 GN=FGD71_046285 PE=3 SV=1
MDGKVALVTGAASGIGEAVARALGERGAVVAAVDRDADRLRRVVDKLRADGLEAQALPADVTSGADVEAVVEEAEKRLGPLEYLVNGAGVLRLGHVRNLTDEDWTTTFAVNATGVFLMSRAVVNRMLPRRRGAIVTVASNAAAAPRVQMAAYAASKAAATMFTKSLGLEVARDGIRCNVVAPGSTSTPMLTSMWHDESGPKHTVEGRLDAFRVGIPLGKLARPSDVAGAVVFLLSDEASHITLHELTVDGGAALGA

SEQ ID NO: 92240 - protein, 264 aa, Streptomyces sp.
  misc_feature (1)..(264): tr|A0A372LVK7|A0A372LVK7_9ACTN 2,3-dihydro-2,3-dihydrox ybenzoate dehydrogenase OS=Streptomyces sp. NEAU-YY421 OX=2293568 GN=DY218_34165 PE=4 SV=1
MTVDQELAGRFALVTGAGRGIGEAVVHALVERGARVLATDLDPAGVAALAVKHPDRVTARALDVSDADAVERLVDEAERELGPLDIAVSVAGILRGGKVTELSDEDWAATFAVNTDGVFHLGRATARRMTERGHGSIVTVASNAAGIPRTGMAAYAASKAAAVMFTKCLGLEVSARGVRCNSVSPGSTLTEMQRAMWADSGVDETEAARRIVAGDPESYRTGIPLGRIADPEDIAEAVVFLVSDRARHITLHDLYVDGGATLRA

SEQ ID NO: 92241 - protein, 276 aa, Streptomyces sp.
  misc_feature (1)..(276): tr|A0A433DR55|A0A433DR55_9ACTN 2,3-dihydro-2,3-dihydrox ybenzoate dehydrogenase OS=Streptomyces sp. NP10 OX=114 1731 GN=dhbA PE=4 SV=1
MPEHIPGRSGDFIGRTALVTGAAQGIGAAVADLLATLGARVAATDRALHGIEATAAEWTRTQEKLPHGERSAGSLDPYVMDVTDRGSVESTVARVERQLGPVDVLVNVAGILRTGPAAVLSAQDWADTFAVNATGVFHVSQAVAPLMAARGSGAVVTVGSNAAGIPRTGMAAYAASKAAAAMFTKCLGLELAGSGVRCNVVAPGSTDTPMQRALWTDPGAEQRVIDGDPATYRTGIPLGRIADPEDIAETVAFLASDRARHITMQELYVDGGATLR

SEQ ID NO: 92242 - protein, 256 aa, Streptomyces sp.
  misc_feature (1)..(256): tr|A0A552WY73|A0A552WY73_9ACTN 2,3-dihydro-2,3-dihydrox ybenzoate dehydrogenase OS=Streptomyces sp. OF1 OX=2213 162 GN=FNX44_22690 PE=4 SV=1
MTDGIALVTGAAGGIGAAVARLLATRGTEVVAVDLDGGRLADVVDKFTADGLPVTARPVDVSDGSAVAELVAEVERTVGPIGQLVNTAGVLHVAPAHELTEEQWSRTFAVNADGVFHTSRAVVRRMIARRSGAIVTVASNAAGTARERMAAYAASKAAATAYTKCLGLEVARYGIRCNVVAPGSTDTTMLHGMYGDRTAAAAAVAGDLATYKVGIPLGKVALPDDVARAVAFLLSDEAGHITLHELTVDGGATLGA

SEQ ID NO: 92243 - protein, 258 aa, Streptomyces sp.
  misc_feature (1)..(258): tr|A0A1B9ESF3|A0A1B9ESF3_9ACTN 2,3-dihydro-2,3-dihydrox ybenzoate dehydrogenase OS=Streptomyces sp. PTY087I2 OX =1819298 GN=dhbA_2 PE=3 SV=1
MSAPLSGVALVTGAAGGIGAEVVRALSAAGLPVGLVDRDVPALWELTAELSAAGARVLAVPADVTVSKDVDMAVAKAEAELGPIENLVNAAGVLRSGPAAELSDADWDTTFAVNAGGVFHTSRAVAGVMVPRRRGSIVTIASNAAATPRMSMAAYAASKAASAMFTKCLGLELAPHGIRCNVVAPGSTRTPMLTALQGDAAERASVDGVPAAYRLGIPLGRIAEPGHIADAVLFLLSERAAHITMHDLTVDGGATLGV

SEQ ID NO: 92244 - protein, 260 aa, Streptomyces sp.
  misc_feature (1)..(260): tr|A0A4V3SVJ7|A0A4V3SVJ7_9ACTN 2,3-dihydro-2,3-dihydrox ybenzoate dehydrogenase OS=Streptomyces sp. RKND-216 OX =2562581 GN=E4198_22620 PE=4 SV=1
MSARDTGVAGSVAFVTGAARGIGAAVVEELVREGATVAAVDVDAEGLSSLADRSQGRVVPFTADVADAAAIAEVVDRAERDLGPVGIGVSVAGVLRPGPLCETTDEDWADTFSVNTTGVFHVLRELGRRMTPRGRGSLVTVTSNAGGVPRAGMGAYAASKAASTMLTRCLGLELAAHGIRCNVISPGSTDTLMQRQLWTCEDDLDRVIAGSPEQYRVGIPLGRIASPADIADAVLFLVSDHARHITMQNLFVDGGATLRA

SEQ ID NO: 92245 - protein, 276 aa, Streptomyces sp.
  misc_feature (1)..(276): tr|A0A4P9U7X9|A0A4P9U7X9_9ACTN 2,3-dihydro-2,3-dihydrox ybenzoate dehydrogenase OS=Streptomyces sp. S6 OX=25064 27 GN=EQG64_01075 PE=3 SV=1
MPEHIPGRSGEFAGRTALVTGAGQGIGAAVAELLADLGAQVAATDRAGHSIEALAADWPRRQEKLAAGERSAGRLEPYVMDVTDRVAVENTVARVEDQLGPVDILVNVAGILRTGPATTLSAQDWADTFAVNTTGVFQVSQAVAPLMVTRKTGCIVTVGSNAAGIPRTGMAAYAASKAAAAMFTKCLGLELARSGVRCNVVAPGSTDTAMQRALWTDPGAEARVIDGDPSTYRTGIPLGRIAEPADIAQAVAFLASDRARHITLQELYVDGGATLR

SEQ ID NO: 92246 - protein, 256 aa, Streptomyces sp.
  misc_feature (1)..(256): tr|A0A429UYX8|A0A429UYX8_9ACTN 2,3-dihydro-2,3-dihydrox ybenzoate dehydrogenase OS=Streptomyces sp. WAC04770 OX =2487423 GN=EF908_02655 PE=4 SV=1
MEEQTALVTGAAGGIGAAVVRLLAEQGTTVVAVDRDAARLAEEVAKLRAESLQVADFPVDVSDSAAVEAVVAAAEEQIGPIDQLVNAAGVLRLGPVKDITDEDLRAMLDVNVTGVLNVTRAVVNRMIPRARGAIVTVTSNAAVTPRAGMAAYAASKAAATQLVKSLGLEVAQYGIRCNTVAPGSTDTPMLRSMWHDREAEQHTLDGSPSAYRVGIPLRRIGRPDDVAEAVAFLLSDRAAQITLHDLTVDGGASLGA

SEQ ID NO: 92247 - protein, 259 aa, Streptomyces sp.
  misc_feature (1)..(259): tr|A0A3R9V6Y2|A0A3R9V6Y2_9ACTN 2,3-dihydro-2,3-dihydrox ybenzoate dehydrogenase OS=Streptomyces sp. WAC05292 OX =2487418 GN=EF903_17110 PE=4 SV=1
MTVETDKVALVSGAAGGIGAAVARALAAEGRAVALLDRDRSALDLVAKELAEDGHRVVAVAADVASPAEVTAAVDRAEEALGPVCELVNCAGVLRMGPVLDLSDDDWEATFAVNAGGVFRLSRTVGRRMAERGSGAVVTVASNAAGTARMNMSAYAASKAAATMLTKCLGLELARYGIRCNTVAPGSTYTPMLYGMYDPEDVARSSIEGLPESFRTGIPLRRIAVPPDIADAVLFLLSDRARHITMHDLVVDGGATLGA

SEQ ID NO: 92248 - protein, 274 aa, Streptomyces sp.
  misc_feature (1)..(274): tr|A0A3S0B6N3|A0A3S0B6N3_9ACTN 2,3-dihydro-2,3-dihydrox ybenzoate dehydrogenase OS=Streptomyces sp. WAC08241 OX =2487421 GN=EF906_34565 PE=4 SV=1
MGTAPNGTGPRGEFAGRVALVTGAAQGIGEAVVRALSARGATVAATDRSEQELKRSVARLSEDAGADPAAGPVVPYRLDVTAPDDVAETVERVSRELGPVDILVNVAGVLRTGPAVETTDRDWADVFAVNTTGVFHLSRAVVAGMAARGSGSVVTVASNAAGIPRADMSVYAASKAAAVAFTKCLGLEVAARGVRCNAVCPGSTDTPMQRSLWDGDSVPDGVLDGDLATHRTGIPLRRIAQPEDVAEAVVFLASDRARHITMQDLYVDGGATLR

SEQ ID NO: 92249 - protein, 328 aa, Streptomyces sp.
  misc_feature (1)..(328): tr|A0A5B7UNQ2|A0A5B7UNQ2_9ACTN 2,3-dihydro-2,3-dihydrox ybenzoate dehydrogenase OS=Streptomyces sp. YIM 121038 OX=2136401 GN=entA PE=4 SV=1
MTTTTAEQRRIGSGHGAWSTADDVLKGISLEGRTAIVTGGYSGLGLAATRALARAGARVLVPARRPRAATAALDGVPGTEVAALDLADLESVRAFADRVLDAGRAVDLLIAGAGVMACPETRVGPGWEAHFAVNHLGHYALVNRLAPALTPGRARVVAVASSGHFLSGVRWHDPHFHEGYDRWLAYAQSKTANALFALHLDRLAGPRGPRAFAVHPGSVLTPLQRHVPREEQLAQGWFGPDGTPAEGFKSPAQGAATAVWAATSPLLADHGGAYCQDCDVAEPATTDDMLIGGVKPWVRDPEAAARLWQLSAELTGVDHFARRAPSGR

SEQ ID NO: 92250 - protein, 264 aa, Streptomyces sp.
  misc_feature (1)..(264): tr|A0A399H3Y7|A0A399H3Y7_9ACTN 2,3-dihydro-2,3-dihydrox ybenzoate dehydrogenase OS=Streptomyces sp. YIM 130001 OX=2259644 GN=dhbA PE=4 SV=1
MTVDQELAGRFALVTGAGRGIGEAVVNALVERGARVLATDLDPAGVAALAVKHPTRVTARALDVTDADAVERLVDEAERELGALDIAVSVAGVLRGGPVTELSDDDWSATFAVNADGVFHLSRAAARRMSERGHGSIVTVASNAAGVPRSGMAAYAASKAAAVMFTKCLGLEVAARGVRCNTVSPGSTLTEMQRGMWAESGVDETEAARRIVAGDPESYRTGIPLGRIAGPEDIADAVAFLVSDRARHITLHDLYVDGGATLRA

SEQ ID NO: 92251 - protein, 261 aa, Streptomyces sp.
  misc_feature (1)..(261): tr|A0A2Z4JDH6|A0A2Z4JDH6_9ACTN 2,3-dihydro-2,3-dihydrox ybenzoate dehydrogenase OS=Streptomyces sp. ZFG47 OX=21 84053 GN=DN051_33900 PE=4 SV=1
MEDKEFGCRVALVTGAAGGIGSAVVRALAERGTTVAAVDKDPRRLTGLVEELAEDGLKAVAFPADVTDSVLVEEIVDRTENELGAVDLLVNAAGVIRSGSMLGMSDVDWRAVFSVNLDGVFHCSRAVAARMRERRAGTIVTISSNAARIPRMQMGAYGASKAAATLYTKSLGLELAEHGIRCNVVSPGSTETDMLRSLWSAENDRQVTIDGSPAAYRTGIPLRRIAEPQDIADAVLFLASDRARHITMQDLCVDGGAILGV

SEQ ID NO: 92252 - protein, 274 aa, Streptomyces spectabilis
  misc_feature (1)..(274): tr|A0A516R253|A0A516R253_STRST 2,3-dihydro-2,3-dihydrox ybenzoate dehydrogenase OS=Streptomyces spectabilis OX= 68270 GN=FH965_03400 PE=4 SV=1
MPDHIPGARAALADRTALVTGAGQGIGAAVAEALAAEGAHVLATDRTADGVKALAADWAADPARWGAGVEGTITAEAMDVTDAVSVEAVVAEAERTHGPLDILVNVAGILRPGPAAELTDADWADTFAVNTSGVLHTARAVTPRMAARGRGSVVTVGSNAAGVPRTGMAAYAASKAAAAMYTKCLGLELARSGVRCNVVAPGSTDTAMQRALWTDESAPQRVIDGDLATYRTGIPLGRIAEPGDIADAVVFLASDRARHITMQELYVDGGATLR

SEQ ID NO: 92253 - protein, 257 aa, Streptomyces turgidiscabies
  misc_feature (1)..(257): tr|L7FAX1|L7FAX1_9ACTN 2,3-dihydroxybenzoate-2,3-dehydr ogenase OS=Streptomyces turgidiscabies Car8 OX=698760 G N=STRTUCAR8_03377 PE=3 SV=1
MTHGKIALVTGAAGGIGEAVLRTLAERGARVAAVDKDGDRLDEVVAKLSYDGLDVTAFPGDVTVSAEAERLVAEVEDTLGPLDHLVNGAGVLRLAKARELTDADWASTFAVNTTGVFFMSRAVVNRMVPRRSGAVVTIASNAAGTARMDMAAYSASKAAATMFTKCLGLEAAQYGIRCNVVAPGSTETPMLTSMWQDDHGRTATLEGAPDAYRVGIPLGKLARPADVAEAVAFLLSDRASHITMHDLTVDGGAALGV

SEQ ID NO: 92254 - protein, 256 aa, Streptomyces vinaceus
  misc_feature (1)..(256): tr|A0A5J6J7V1|A0A5J6J7V1_STRVI 2,3-dihydro-2,3-dihydrox ybenzoate dehydrogenase OS=Streptomyces vinaceus OX=196 0 GN=CP980_14875 PE=4 SV=1
MENKVALVTGAAGGIGLAVARRLAEEGATVAAVDRDADRLRESVEKLVADGLDVHAHPADVTVTAQVEAVVDAVETELGPLDFLVNTAGILRLGEVRDFSDEDWLQTFEVNVSGVFRLSRAAVNRMIPRNRGAIVTVASNASGTPRTAMGAYGASKAAATMLTKTLGLEVAKHNIRCNIVAPGSTDTAMLASMWEDEQGPARTIAGSPESFKVGIPLGKLARTNDIAESVIFLLSDRAAHITLHVLTVDGGATLGA

SEQ ID NO: 92255 - protein, 256 aa, Streptosporangiaceae bacterium
  misc_feature (1)..(256): tr|A0A3A4B047|A0A3A4B047_9ACTN 2,3-dihydro-2,3-dihydrox ybenzoate dehydrogenase OS=Streptosporangiaceae bacteri um YIM 75507 OX=2339229 GN=D5H75_21205 PE=4 SV=1
MEPGISGAHAFVTGAARGIGEAVARTLAGYGARLSLLDRDPGPLARLARELDTPSAHAADVSDARAVEKAVAEAEDRLGPIGILVNVAGVLHTGPVAEFGDEEWARTFAVNTGGVFHVSRAVVRRMIPRAAGVIVTVASNAAGVPRAEMAAYAASKAAATMFTKCLGLEVARYGIRCNVVAPGSTDTAMQRALWTDDRAAERVIAGVPEAYRTGIPLGRIAEPGDIADAVAFLASDRARHITMHDLYVDGGATLRA

SEQ ID NO: 92256 - protein, 334 aa, Syntrophorhabdus sp.
  misc_feature (1)..(334): tr|A0A1V5D4Q7|A0A1V5D4Q7_9DELT 2,3-dihydro-2,3-dihydrox ybenzoate dehydrogenase OS=Syntrophorhabdus sp. PtaU1.B in153 OX=1811705 GN=entA PE=4 SV=1
MSTNQKPINSGFTSSSTTADVIQGIDLHGKTAIVTGGSSGLGRETVRTFLAAGARVIVPARDLERARRQLSEIKGVEVLKMDLLSPASVDAFANEFLARNEPLHILVNSAGIMACPFSKSSRGFESQFATNHLGHFQLVVQLWPALLKAKGARVVSVASKGHWFSPIVFEDPTFDHRPYDPWAAYGQSKTANILLVVELDKRGKDKNIRAFALHPGGIPGTGLEKYVPAEQIQAAGIIDKDGKPILDPEKDVKTVEQGAATQVWCATSPKLKDLGGVYCENVEVAPIVDESPRDDFGIDRSAKTRGVRPYAIDPINASRLWELSEKLLGIKADI

SEQ ID NO: 92257 - protein, 252 aa, Tatumella morbirosei
  misc_feature (1)..(252): tr|A0A095VUR7|A0A095VUR7_9GAMM 2,3-dihydroxybenzoate-2, 3-dehydrogenase OS=Tatumella morbirosei OX=642227 GN=HA 49_03620 PE=4 SV=1
MSQWPEFQGKQVWVTGAGQGIGYQTALAFHQAGAEVTGFDLKFDRQDYPFYCQVMNVADPKQVTEVCQDLLARQHRLDVLINAAGILRIGATDELSFDDWQQCLNVNAGGAFNLFQQTLPVFRRQQQGAIVTVASNAAHAPRLGMSAYGASKAALRSLCLTVGLEMAPHGVRCNIVSPGSTDTEMQRSLWKTPQSEQQTIDGFPEQFKLGIPLKKIAQPQEITNTILFLASAQASHVVLQDIVVDGGATLGA

SEQ ID NO: 92258 - protein, 252 aa, Tatumella ptyseos
  misc_feature (1)..(252): tr|A0A085JQA4|A0A085JQA4_9GAMM 2,3-dihydro-2,3-dihydrox ybenzoate dehydrogenase OS=Tatumella ptyseos ATCC 33301 OX=1005995 GN=entA PE=4 SV=1
MTVQQDFHAKHVWVTGAGQGIGYHTALAFHQAGAIVTAFDIKFGEQEYPFHCQLLNVADPVQVKDVCQQLLSRQPQLDVLVNAAGILRIGATDELSFEDWQQCLNVNAGGAFNLFSQTLPHFRRQKHGAIVTVASNAAHAPRLGMSAYGASKAALRSLCLTVGLEMAPYGVRCNIVSPGSTDTEMQRSLWKTPQAEQQTIEGFPEQFKLGIPLKKIAKPQEIADTILFLASDRASHVVLQDIVVDGGATLGS

SEQ ID NO: 92259 - protein, 252 aa, Tatumella ptyseos; identical to SEQ ID NO: 92258
  misc_feature (1)..(252): tr|A0A2X5NG33|A0A2X5NG33_9GAMM 2,3-dihydro-2,3-dihydrox ybenzoate dehydrogenase OS=Tatumella ptyseos OX=82987 G N=entA PE=4 SV=1

SEQ ID NO: 92260 - protein, 255 aa, Teredinibacter turnerae
  misc_feature (1)..(255): tr|C5BUB9|C5BUB9_TERTT 2,3-dihydro-2,3-dihydroxybenzoat e dehydrogenase OS=Teredinibacter turnerae (strain ATCC 39867 / T7901) OX=377629 GN=dhbA PE=4 SV=1
MNSLVEALNFSGKQVWITGAGRGIGYAIAESFYRAGAQVTGLDCAFPQHEYPFATVKCDLCKPEEIRACCQRLFVENGQIDVLVNAAGILRFAEITELTEDDWQASLDVNVSAVFHLIQQCIPRFKQQKSGVIVNIASNAARVPRMGMAAYCASKAALESFSHCIALELAAYGVRCNLVSPGSTNTPMLQNMLSNDAGFERTIQGSLATFKNGIPLRKIAHPNDIANSVLFLASDLASHITLHNLVVDGGATLSA

SEQ ID NO: 92261 - protein, 257 aa, Tetrasphaera japonica
  misc_feature (1)..(257): tr|A0A077LXB9|A0A077LXB9_9MICO 2,3-dihydro-2,3-dihydrox ybenzoate dehydrogenase OS=Tetrasphaera japonica T1-X7 OX=1194083 GN=dhbA PE=4 SV=1
MNDAASRVVVVTGAASGIGRAVALRLATDADTLVLLDRDGAGLAETAERAERAGASGTLPYAVDVSDGASVDEALGAAVDTVGPFDGLVSAAGTLEPGTLEEVTEDAWQRHLAVNATGVFHLLRTGAPRIRDGGAVVVVSSNAARVARAGMLAYAASKAAASALTRCAGLELAARGIRCNVVEPGSTDTPMLRALWPDPAIGAETAIEGDPQSHRLGIPLRRLAAPEDVADVVRFLLTDASRHVTLQQLFVDGGASL

SEQ ID NO: 92262 - protein, 250 aa, Thalassolituus sp.
  misc_feature (1)..(250): tr|A0A558NKC2|A0A558NKC2_9GAMM 2,3-dihydro-2,3-dihydrox ybenzoate dehydrogenase OS=Thalassolituus sp. C2-1 OX=2 597518 GN=dhbA PE=4 SV=1
MAAFDFSGRHAWVTGAGQGIGWQVAQQLTALGADVTGFDLAFSQPPAAYAFRRQTLDLSRDGDVQACVADHLHHAVPDILINAAGILRLGGLDNLTMADWDACFAVNVRAVFSMIRALSPAMKEQRRGSIVTVSSNAAHVPRLNMAAYCASKAAVRSFAQCAALELAPFAVRCNLVSPGSTDTPMLRAMLPDGYQRTIGGLPEQYKLGIPLGKVATPADITNAVIFLASDLAGHITMHDLVVDGGATLAA

SEQ ID NO: 92263 - protein, 255 aa, Tomitella sp.
  misc_feature (1)..(255): tr|A0A516X5S8|A0A516X5S8_9ACTN 2,3-dihydro-2,3-dihydrox ybenzoate dehydrogenase OS=Tomitella sp. HY188 OX=25976 60 GN=FO059_15115 PE=4 SV=1
MDAAEFAGRVAVVTGAASGIGAAVAAALTAHGAVVAALDLDGAAADAAVSAGGRGYACDVTDSAAVDAVVARIEAELGPVEMLANVAGVLATGDVVDTSDVQWSRPFAVNTTGVFTVSRAVARMMIPRGGGAIVTVGSNAAGVPRASMAAYGASKAAATMFTKCLGLELAEHGIRCNVVSPGSTDTPMQRGMWGDGRGAESVIGGTPEKFKVGIPLGRIADPADVADSVLFLLSDKARHITMHDLYVDGGATLKA

SEQ ID NO: 92264 - protein, 251 aa, Trabulsiella guamensis
  misc_feature (1)..(251): tr|A0A084ZZ18|A0A084ZZ18_9ENTR 2,3-dihydro-2,3-dihydrox ybenzoate dehydrogenase OS=Trabulsiella guamensis ATCC 49490 OX=1005994 GN=entA PE=4 SV=1
MSGFDFRDKTVWVTGAGKGIGYVAALAFADAGAMVTGFDLAFDGDHYPFTTEVLDVADAQQVAQVCRRLLERQSRLDVLVNAAGILRMGATDALSVADWQQTFAVNVGGAFNLFQQTMAQFRQQQGGAIVTVASDAAHTPRLGMSAYGASKAALKSLALTVGLELAASGVRCNLVSPGSTDTDMQRTLWLSDDAKQQRIRGFGEQFKLGIPLGKIARPQEIASTILFLASDHASHITLQDIVVDGGSTLGA

SEQ ID NO: 92265 - protein, 251 aa, Trabulsiella odontotermitis
  misc_feature (1)..(251): tr|A0A0L0GXA4|A0A0L0GXA4_9ENTR 2,3-dihydroxybenzoate-2, 3-dehydrogenase OS=Trabulsiella odontotermitis OX=37989 3 GN=GM31_21270 PE=4 SV=1
MAGFDFHGKTVWVTGAGKGIGYATALAFVEAGADVTGFDLAFDGDHYPFAVEVLDVADAQQVALVCRRVLEQQPRLDVLVNAAGILRMGATDALSVADWQQTFAVNTGGAFNLFQQTMAQFRRQQGGAIVTVTSDAAHTPRLGMSAYGASKAALKSLALTVGLELAASGVRCNLVSPGSTDTDMQRTLWRSDDAEQQRIRGFGEQFKLGIPLGKIARPQEIASTILFLASDHASHITLQDIVVDGGSTLGA

SEQ ID NO: 92266 - protein, 256 aa, Trichormus variabilis
  misc_feature (1)..(256): tr|Q3M611|Q3M611_TRIV2 Short-chain dehydrogenase/reduct ase SDR OS=Trichormus variabilis (strain ATCC 29413 / P CC 7937) OX=240292 GN=Ava_3970 PE=4 SV=1
MSFIDEINRANVLIVGASQGIGLGFVKKLLQDDRIAKIYATYRQKDSASELITLEKEYSPRLTCLSLDITDELQIAEILQQINTETNRLHLVINCVGILHEGNLQPEKSLRQLNSENLLRYFHINSIGAVLLAKHLLPCFQHNEPSVFASISAKLGSIGDNQLGGWYGYRASKAALNMFMRTVAVEYGRSCPKTTVVTLHPGTTDTRLSRPFQKNVAAEKLFSIERTVDQLLAVIAQLQKGDSGKFFSWDGTQLPW

SEQ ID NO: 92267 - protein, 245 aa, Tropicibacter naphthalenivorans
  misc_feature (1)..(245): tr|A0A0P1G2G6|A0A0P1G2G6_9RHOB 2,3-dihydro-2,3-dihydrox ybenzoate dehydrogenase OS=Tropicibacter naphthalenivor ans OX=441103 GN=entA PE=3 SV=1
MTQTIIITGAGRGIGKACAKVFLEAGWKVGLVGRQPGPLEEVAAGHKNALVLPGDVAQEMQVEQIFNRAAAEWGRIDALFNNAGVSVMGATIDEINVADWKRCMEVNVTGAFICARAAFKRMRAQDPQGGRIINNGSVSADVPRWGSAPYTASKHAVTGLTRSISLDGRPYNIACGQINIGNALTDMAEKMTQGVPQADGSIAIEPVMDVAHVANSVLHMANLPLDANVQFMTVMATNMPYIGRG

SEQ ID NO: 92268 - protein, 429 aa, Trypanosoma conorhini
  misc_feature (1)..(429): tr|A0A3R7RW10|A0A3R7RW10_9TRYP Putative short-chain deh ydrogenase OS=Trypanosoma conorhini OX=83891 GN=Tco025E _05931 PE=4 SV=1
MIHYVSSEAFAALACLLFLALAAAAHFFQWSFWSSMTKVETLVAVVSCAFACRGVASGRPCKWPRGVDFTSRVALVTGASSGVGYGVAQELSLHGWTVIMAGRDLMRLLKAKRSLAAQNPPGRLVVLGEVDLADLDSVRSFAASVLEQREKFPVSLLVNAAGVLRRHLHRCEDTGMEEMIATNVVGPMLLTNLLLPLLEEAADRSGASSRIVNVASSCHTFLGASRRCGPAEMLAALHPQPPGEGAAAAAKAVPPALEDFTLGNFVRYYGLSKLCVIWWTSVLARRVSLRFFRHGDGNHLKVFVACCHPGIITTRLYRDLFSQRVLDRIIYYPSLLIGKTWREGAQAALRAGIETENMVHGGYYMCTGEYGPNSGINCLSKDAMNMEEANKFCAWAEAQIEAQKNRPRQPGQGKKVARPKRVMRVTFVT

SEQ ID NO: 92269 - protein, 428 aa, Trypanosoma rangeli
  misc_feature (1)..(428): tr|A0A3R7N7S2|A0A3R7N7S2_TRYRA Putative short-chain deh ydrogenase OS=Trypanosoma rangeli OX=5698 GN=TraAM80_06 897 PE=4 SV=1
MIHLFSSEALAALACLLFLAIAAVAQFFRWPFWSSMTTADTLLAIVSCAFACRGVASGRSCRWPSDMDFTSCVALVTGASSGVGYGVAQELSQHGWTVIMTGRNLMQLLKAKRSLMVQKPSGRLVVLGEVDLSDLDSVRSFAASVLEQKEKFPVSLLVNAAGVLRRHLHRCEDTGMEEMIATNVVGPMLLTNLLLPLLEEAAERSGVSSRIVNVASSCHTFLGVRQRGGPAEMLAALHPQPSEGATVAAKAGATAMKDFTLGNFVGYYGLSKLCVIWWTSVLARRVSRSFFRHGDGNQLKVFVACCHPGIITTHLYRDLFPQRVLDYIIYYPSLLIGKTWREGAQAVLRASIETDNMVHGGYYMCTGEYGPNSGINCLSKDAMNMDEAIKFCAWAEMQIEAQKNRPRQPGAGKKGATPKRIMGVKFVT

SEQ ID NO: 92270 - protein, 259 aa, Tsukamurella paurometabola
  misc_feature (1)..(259): tr|A0A3P8KSD7|A0A3P8KSD7_TSUPA 2,3-dihydro-2,3-dihydrox ybenzoate dehydrogenase OS=Tsukamurella paurometabola O X=2061 GN=entA_2 PE=4 SV=1
MELDLRDRAFVVSGAGSGIGLATALRLLREGARVCGFARDHDRLTAAFADVHAAPDRLLLMRGDARLPEDVEAVVDAAVRAFGGVHGVVANAGTGVAAGVDAAPGVWAEQFTTKVGAAMALVHAARPHLIAARGAIVLVNGVSAHHPASELAPVGAARAALANYAATLGTDLAPDGVRVVVVNVGVIETARQRERYERSGTTSTYADWCHEEARRRSIPLQRMGRPDEVGDTIAFLLSDRSSYTTGTSIDVSGGLDGRT

SEQ ID NO: 92271 - protein, 251 aa, Unknown; identical to SEQ ID NO: 91641
  misc_feature (1)..(251): tr|A0A212I5P2|A0A212I5P2_9ENTR 2,3-dihydro-2,3-dihydrox ybenzoate dehydrogenase OS=uncultured Citrobacter sp. O X=200446 GN=entA PE=4 SV=1

SEQ ID NO: 92272 - protein, 393 aa, Unknown
  misc_feature (1)..(393): tr|A0A1C6AZF7|A0A1C6AZF7_9CLOT 2,3-dihydro-2,3-dihydrox ybenzoate dehydrogenase OS=uncultured Clostridium sp. O X=59620 GN=entA PE=4 SV=1
MIDERLQDCRYALKGRKVLITGAGGGIGYEAAKAFLCMDAAVIIADISREKGSQAVQSLGALYPNSRMEFYEIDLADELQIRRMHSYLIQKYGFIDVVMHNAAVIYIGNVEEISSADWDKSYRVNFRAPLLLTQLFLPQMRSRNAGTIVFVPSSGAAPYMGAYEVFKTAQVELCNTLSGELEGTDVFTYSIGPGLVKTDTAMHGIEMVAQKMGLTTKEFYAMNGSHMLSAREAGCGFAVSVLHAEKYNGQEIGSIQALMDCGLLSVTDSGNSDKAGKAQTDPAMIHKIIQIYKEQYNGWMERNIFERQWVLRDFKKTVGISAGQFQSDMLQQEKELTAESENGFTVYRDHFEKLKRYYQRQYKLLQGYEKNPDKRKEHSDIILSWIRMLDEIL

SEQ ID NO: 92273 - protein, 261 aa, Variovorax sp.
  misc_feature (1)..(261): tr|A0A520E7X9|A0A520E7X9_9BURK 2,3-dihydro-2,3-dihydrox ybenzoate dehydrogenase OS=Variovorax sp. OX=1871043 GN =EOP81_03090 PE=4 SV=1
MSTPDTEFQGQHVLVTGAAGGIGAALARRLLQQGARVTALDADDAGLAALQTETDASRLLTRVVDVSDAAAVDAAVAEAEATLGPIDRLACVAGVLQMGRVIDLDDAQWSRTLAINAGGVFHTCRAVARRMVERRRGAIVNVSSNAATTPRAGMAAYAASKAAVTQLSRCLALELAEYGIRCNVVSPGSTDTEMQRAMWRQGSSREAVISGHAPSHRLGIPLGKIATPDDIVDSILFLLSDRAGHITLHDLRVDGGATLDQ

SEQ ID NO: 92274 - protein, 273 aa, Verrucomicrobia bacterium
  misc_feature (1)..(273): tr|A0A1V6E6V5|A0A1V6E6V5_9BACT 2,3-dihydro-2,3-dihydrox ybenzoate dehydrogenase OS=Verrucomicrobia bacterium AD urb.Bin122 OX=1852929 GN=entA PE=3 SV=1
MMSYQMLQSFRAVILTGGSSGIGKSFIEHVGKLHPALVFFNLSRRPPEIKVPGLILRHFDCDLSNRAQIEAVCGELVGEIDREIPAGRILLINNSGFGTYGPFPEPNLARQLEMLEVNLCAPVQLTARLLPTLRAHGGAIVNIASTSAFQPTGHMATYGASKAFLLHWSLALSEELRGSGVHVLAVCPGPTSTQFFRSAGLDRSVVPDSVGQTPEEVVETTLHALARRRTMVVSGWKNKLLAALSSRLPKPLAARIAIRVIAHYRGTGGKTNA

SEQ ID NO: 92275 - protein, 256 aa, Verrucosispora sp.
  misc_feature (1)..(256): tr|A0A372G6S3|A0A372G6S3_9ACTN 2,3-dihydro-2,3-dihydrox ybenzoate dehydrogenase OS=Verrucosispora sp. LHW63014 OX=2294034 GN=D0Q02_03080 PE=4 SV=1
MTPDGIAGRTALVTGAARGIGAAVAAALSARGAHVALTDRDGPGARRRAEMLAGARGYPMDVTDADAVERTFAVVEEELGPIHICVSVAGILRPARVLDATDDDWRTTFDVNTTGVFHVLRCAGRRMAARNGGSIVVVSSNAAGVPRMGMAAYAASKAATSMLTKCLGLELAGHGVRCNVVAPGSTDTDMQRALSTGGGDTAVVAGSLPTFRTGIPLGRIADPTDVADAVLFLVSDQARHITMHDLYVDGGATLRA

SEQ ID NO: 92276 - protein, 253 aa, Verticiella sediminum
  misc_feature (1)..(253): tr|A0A556AZG5|A0A556AZG5_9BURK 2,3-dihydro-2,3-dihydrox ybenzoate dehydrogenase OS=Verticiella sediminum OX=124 7510 GN=dhbA PE=4 SV=1
MQLTGFRNRIALVSGAGGGIGAAVVHALIEAGARVVATDLDWPQAAAVDGLTRLPLDVRDASAVDALVASVEEEIGPIRFGVSLAGVLTTGLATETSAADWRQTFAVNTDGVFHLTRALARRMGPRREGALVAVSSNAAGVPRYGMAAYAASKAATTMYMRSLGLELAPLGIRCNIVAPGSTRTPMQTGMWADASGEQRVIAGIPEQFKAGIPLGKIGEPEDVAAAVMFLLSDQASHVTMADLYVDGGATQRA

SEQ ID NO: 92277 - protein, 261 aa, Vibrio aerogenes
  misc_feature (1)..(261): tr|A0A1M6AKQ8|A0A1M6AKQ8_9VIBR 2,3-dihydro-2,3-dihydrox ybenzoate dehydrogenase OS=Vibrio aerogenes CECT 7868 O X=1216006 GN=entA PE=4 SV=1
MSYDFSHSTILLTGAGGGIGFAVLKQLLRSKARVIATDISLSALQEKTKKLHHDYPGQLICREMDLAVHRATDEYISCWEAEYGPIHHLVSCAGLLHVHPLRTMPVSDIQDMFDVNVFGTLALMQAAGKKMAERQQGNMVIIGSNAANTPRAGIGAYAASKSALHMMVKCMGMELAPFGIRCNIVSPGSTRTHMQQQLWTENYGESQVIAGDAENFRLGIPLGKIAEPDDIAGTVLFLLSEAANHITLHDLRVDGGATLDQ

SEQ ID NO: 92278 - protein, 259 aa, Vibrio alginolyticus
  misc_feature (1)..(259): tr|A0A5D6X2X6|A0A5D6X2X6_VIBAL 2,3-dihydro-2,3-dihydrox ybenzoate dehydrogenase OS=Vibrio alginolyticus OX=663 GN=EWT61_22850 PE=4 SV=1
MNSTFETVLLTGSGKGIGYAVLEHLLENGYRVVATDKDISLLNQSIEALRARFDESRLCCFELDLLKHDEVNDKVCQLDREFQFDHLVSCAGILHLGAVNDMSLDEIKQMFDVNTFGALALIQAISNSMKDRQQGNIVVIGSNSANTPRLNIGAYAATKSALHMLVKCVGLELAEKGIRCNLVSPGSTRTDMQTQLWNVNYGENEVIKGNLEQYRLGIPLGQMAEPEDIAKAVLFLMSDGAKQITMHDLRVDGGATLDN

SEQ ID NO: 92279 - protein, 258 aa, Vibrio anguillarum
  misc_feature (1)..(258): tr|A0A1Q1KXZ8|A0A1Q1KXZ8_VIBAN 2,3-dihydro-2,3-dihydrox ybenzoate dehydrogenase OS=Vibrio anguillarum OX=55601 GN=CEJ46_05095 PE=4 SV=1
MMKLDETVLLTGAGQGIGYAVLESLLASGYRVVATDRNHHQLTQQLASLNARYTEQLHCYELDLQHHDDVKKRVQELNERYQFDHFISCAGILHLGSITELSMSEIKAMFDVNTFGTLAALQGVTIGMKVRQRGNVIVIGSNSANTPRLNIGAYAASKSALHMLVKCAALELANDGIRCNIVSPGSTRTEMQTQLWNSEYGEREVIKGNLEQYRLGIPLGKMAEPEDIAGVVMFLMSNAASQITMHDLRVDGGATLDN

SEQ ID NO: 92280 - protein, 261 aa, Vibrio atlanticus
  misc_feature (1)..(261): tr|A0A558GY10|A0A558GY10_9VIBR 2,3-dihydro-2,3-dihydrox ybenzoate dehydrogenase OS=Vibrio atlanticus OX=693153 GN=FQP88_12795 PE=4 SV=1
MERFLEGQLVLLTGAAKGIGFSTLESLLDSGAKVLATDINSQLLATKSESLARKYPDQLWVEPLDLSKPELVKQSICHWVEEYGEFDHLVSCAGILHLGALCDMSFEQIENTFMVNSFGALATMQAVSKCMKARGKGNMVVVGSNAANTPRANMGAYAASKSALHMFVKSIGIELAPLGIRCNIVSPGSTRTEMQLQLWNESYGEEQVIAGDATQFRLGIPLNKIAEPKDIAQSILFLMSNAANHITMHDLRIDGGATLDN

SEQ ID NO: 92281 - protein, 263 aa, Vibrio campbellii
  misc_feature (1)..(263): tr|A0A1Q1PBM7|A0A1Q1PBM7_9VIBR 2,3-dihydro-2,3-dihydrox ybenzoate dehydrogenase OS=Vibrio campbellii OX=680 GN= dhbA PE=4 SV=1
MSENRSEFNGKLCLVTGAGQGIGLACAKSLLAQGARVIACDVTQLALDAFQQSLPECQQSNTLLVPFDLADANAIQTACHNLEQDQLIPDYIVTCAGTLHLESVLDLPLEALNKTLDVNLKGTMLLTQQLAKILVKHSKQGAIVAVGSNAADTPRVKMSAYCTSKAGLHMWMQCLGLELAEHGIRCNIVSPGSTRTPMQEQMWNEAYGERETIQGNLASHRMGIPLNKIAETKDITNAIEFLLSDKSGHITMHDLRVDGGATF

SEQ ID NO: 92282 - protein, 255 aa, Vibrio celticus
  misc_feature (1)..(255): tr|A0A1C3JIC1|A0A1C3JIC1_9VIBR 2,3-dihydro-2,3-dihydrox ybenzoate dehydrogenase OS=Vibrio celticus OX=446372 GN =dhbA PE=4 SV=1
MNFTKNGIAVVIGGTSGMGFETAKQLVAQNIHVLVVGNNPTKLDKAVSELQSLGHASGWQANLYDDASVSRLIAHLESLKEGIGYLVNAAGYFNPKAFIDHQETDYEQYMQLNKATFFITQAISKLMIQNGGGSVVNVGSMWAKQAIKATPSSAYSMAKAGLHALTQHMAMELAEHNIRVNAVSPAVVKTPIYESFIKPEEVDQALEGFNAFHPIGRVGLPKDIANSISFLLSDSADWVTGAIWDVDGGVIAGRN

SEQ ID NO: 92283 - protein, 262 aa, Vibrio cholerae
  misc_feature (1)..(262): tr|A0A0H3Q4H1|A0A0H3Q4H1_VIBCL 2,3-dihydro-2,3-dihydrox ybenzoate dehydrogenase OS=Vibrio cholerae B33 OX=41740 0 GN=VCE_002123 PE=4 SV=1
MKDMSLVNSKVLLVGSARGIGFSVLEHLLQAGAQVMAADCEWQLLLEQSESLLGRYPDQLTLKKLDLAEPEAVREQVNQWAEQVAGFDHLVCCAGILHVAPLHEMPMEQVSSIFTVNAFGVLACMQGVASSMKARQQGSMVIIGSNAANTPRMSIGAYGASKAALHMLVKCIGMELAPYGIRCNLVSPGSTRTAMQQQLWTEQYGEAQVIAGDAAQFRLGIPLNKIAEPADIAQAVLFLLSDNAGHITLHDLRVDGGATLDH

SEQ ID NO: 92284 - protein, 262 aa, Vibrio cholerae; identical to SEQ ID NO: 92283
  misc_feature (1)..(262): tr|A0A4S3QP88|A0A4S3QP88_VIBCL 2,3-dihydro-2,3-dihydrox ybenzoate dehydrogenase OS=Vibrio cholerae O1 biovar El Tor OX=686 GN=E5300_10860 PE=4 SV=1

SEQ ID NO: 92285 - protein, 239 aa, Vibrio cholerae
  misc_feature (1)..(239): tr|A0A0E4GMK0|A0A0E4GMK0_VIBCL 2,3-dihydro-2,3-dihydrox ybenzoate dehydrogenase OS=Vibrio cholerae OX=666 PE=4 SV=1
MLEHLLQAGAQVMAADCEWQLLLEQSEPLLGSYPDQLTLKKLDLAEPEAVREQVNQWAEQVAGFDHLVCCAGILHVAPLHEMPLEQVSSIFTVNAFGVLACMQGVASSMKARQQGSMVIIGSNAANTPRMSIGAYGASKAALHMLVKCIGMELAPYGIRCNLVSPGSTRTAMQQQLWTEQYGEAQVIAGDAAQFRLGIPLNKIAEPADIAQAVLFLLSDKAGHITLHDLRVDGGATLDH

SEQ ID NO: 92286 - protein, 262 aa, Vibrio cholerae; identical to SEQ ID NO: 92283
  misc_feature (1)..(262): sp|Q56632|VIBA_VIBCH Vibriobactin-specific 2,3-dihydro- 2,3-dihydroxybenzoate dehydrogenase OS=Vibrio cholerae serotype O1 (strain ATCC 39315 / El Tor Inaba N16961) O X=243277 GN=vibA PE=3 SV=1

SEQ ID NO: 92287 - protein, 262 aa, Vibrio fluvialis
  misc_feature (1)..(262): tr|A0A1L9L0I2|A0A1L9L0I2_VIBFL 2,3-dihydro-2,3-dihydrox ybenzoate dehydrogenase OS=Vibrio fluvialis OX=676 GN=d hbA PE=4 SV=1
MFNQFLEKQTVFLTGAAKGIGFSVMLHLLEAGARVVATDIDEVRLKTDSDALKNRYREQLFCYHLDLSQPESVARRVAQMIEQHGQFDHLVCCAGVLHLGSIASMPLAQIEHTFNVNTFGTLAVMQALAEGMKARRSGSMVIVGSNAANTPRPNMGAYGASKAALHMLVKSMGMELAEYGVRCNIVSPGSTRTDMQMQLWSEEYGEPQVIAGNLEQFRLGIPLRKMAEPQDIARSVLFLLSEHAGHITLHDLRVDGGATLDN

SEQ ID NO: 92288 - protein, 263 aa, Vibrio harveyi
  misc_feature (1)..(263): tr|A0A2S0S3P1|A0A2S0S3P1_VIBHA 2,3-dihydro-2,3-dihydrox ybenzoate dehydrogenase OS=Vibrio harveyi OX=669 GN=DS9 57_004295 PE=4 SV=1
MSENNTEFKSKLCLVTGAGQGIGLACAKSLLEQGATVIACDITQALLEEFKQSLPKKQQARTLLLPFDLANTTAVQYACHYLAQDKLIPDYVITCAGALHLGSVLELPPEALIKTLDVNLKGTMLLTQQLAKLLVQNNKKGAIVAVGSNAADTPRVNMSAYCSSKAGLHMWMQCLGLELAAYGIRCNIVSPGSTRTPMQEQMWNESYGERETIQGNLASHRIGIPLNKIAETKDITNAIEFLLSEKAGHITMHDLRVDGGATF

SEQ ID NO: 92289 - protein, 262 aa, Vibrio kanaloae
  misc_feature (1)..(262): tr|A0A0H3ZVR3|A0A0H3ZVR3_9VIBR 2,3-dihydro-2,3-dihydrox ybenzoate dehydrogenase OS=Vibrio kanaloae OX=170673 PE =4 SV=1
MEITMSLDNQKVLLVGAATGIGLSTLESLLRAGARVIVADHKLKLLEKNTQALAKEYPKQFECHWLDLADQVKVLESVDAWQQQGLFNHLVCCAGMLHVGPLHELPMSTIKQTFDVNTFGVLALMQAIAKTMKTRGSGSMVIVGSNAANTPRQSIGAYGASKSALHMMVKCMGIELAPFGIRCNIVSPGSTDTPMQRQLWTESYGEKEVIEGDINQFRLGIPLAKLAQPEDIANAILFLLSKAASHITMHDLRVDGGATLDN

SEQ ID NO: 92290 - protein, 252 aa, Vibrio mangrovi
  misc_feature (1)..(252): tr|A0A1Y6IUD1|A0A1Y6IUD1_9VIBR 2,3-dihydro-2,3-dihydrox ybenzoate dehydrogenase OS=Vibrio mangrovi OX=474394 GN =entA PE=4 SV=1
MSQEQEFTGQNVWVTGAGQGIGAAVAKAFSCAGATVFGLDKTFAADDYPYRCITVDLAQSHEVTDCCHTLLENCSGLDVLVNCAGILRMGATDELSHKDWQDTFAVNVGAAFHLFQQAIPVFKQQHSGAIVTIASNAAQTPRIGMSAYGASKAALRSLTMTVGLELAEYGVRANLVSPGSTDTQMQRSLWNTADAEQQTIQGFPQQYKLGIPLRKIATPAEIAQSVLFLASKRASHITMQDLVIDGGATLGR

SEQ ID NO: 92291 - protein, 257 aa, Vibrio metschnikovii
  misc_feature (1)..(257): tr|A0A380Q1H8|A0A380Q1H8_VIBME 2,3-dihydroxybenzoate-2, 3-dehydrogenase OS=Vibrio metschnikovii OX=28172 GN=dhb A PE=4 SV=1
MNQNNQTVLLTGSSQGIGYAVLERLLIEGYRVVATDRCIDKLDEHLASLQRQYADQLDCYAIDLLDSQLDQKVAQLCRQYRFDHLVSCAGILSIGSVSSMPIEEIRKMFEVNTFAAMSIIQNVAKGMKQRKSGNIVVIGSNSANTPRMNIGGYAASKSALHLLVKCCALELAEFGIRCNIVSPGSTRTEMQTQLWNESYGEQQVIEGNLAQYRLGIPLGRMAEPADIANTVLFLMSDSARQITMHDLRVDGGATLDN

SEQ ID NO: 92292 - protein, 261 aa, Vibrio nigripulchritudo
  misc_feature (1)..(261): tr|U4E159|U4E159_9VIBR 2,3-dihydro-2,3-dihydroxybenzoat e dehydrogenase OS=Vibrio nigripulchritudo FTn2 OX=1238 441 GN=dhbA PE=4 SV=1
MPNFLDAQHVLLTGAAKGIGFSTLESLLDAGAKVLATDIDEKLLAKKSDFLSTQFPGQLRIAKLDLSQPEYVKERIHGWIEEYGEFDHLVSCAGILHLGALSDMPFEQVEHTFMVNSFGVLAAMQAVSISMKQHGKGNIVVVGSNAANTPRANMGAYAASKSALHMFVKSIGIELAPLGIRCNIVSPGSTRTEMQLQLWNENYGEEQVIAGNAEQFRLGIPLKKIAEPEDIAKTILFLMSEGANHITMHDLRVDGGATLDN

SEQ ID NO: 92293 - protein, 261 aa, Vibrio nigripulchritudo; identical to SEQ ID NO: 92292
  misc_feature (1)..(261): tr|U4KGJ2|U4KGJ2_9VIBR 2,3-dihydro-2,3-dihydroxybenzoat e dehydrogenase OS=Vibrio nigripulchritudo OX=28173 GN= dhbA PE=4 SV=1

SEQ ID NO: 92294 - protein, 263 aa, Vibrio owensii
  misc_feature (1)..(263): tr|A0A3G2PVZ4|A0A3G2PVZ4_9VIBR 2,3-dihydro-2,3-dihydrox ybenzoate dehydrogenase OS=Vibrio owensii OX=696485 GN= D0812_08590 PE=4 SV=1
MSENRSEFDSKLCLVTGAGQGIGLACAKSLLAQNARVIACDVTQKALDALQQSLPSDQQQRAILLPFDLADSTAIQSACRKLEQDQLIPDYIVTCAGTLHLESVLDLPLEALNKTMDVNLKGTMLLTQQLAKMLVKHSKQGAIVAVGSNAADTPRVKMSAYCTSKAGLHMWMQCLGLELAEHGIRCNIVSPGSTRTPMQEQMWNESYGERETIQGNLASHRIGIPLNKIAETKDITNAIEFLLSDKSGHITMHDLRVDGGATF

SEQ ID NO: 92295 - protein, 261 aa, Vibrio palustris
  misc_feature (1)..(261): tr|A0A1R4B879|A0A1R4B879_9VIBR 2,3-dihydro-2,3-dihydrox ybenzoate dehydrogenase OS=Vibrio palustris OX=1918946 GN=entA PE=4 SV=1
MTIDLSNQQVLLTGASQGIGLATLKQLLRCGARVLATDRDLSELHGATQQLQETHPKTLHIRELDLINCEDIMAEVPRWIDSFGTIDQLIHCAGILNLNPILTAPTSTITETFSVNVFGATTLLQQIGQHMKSHGNGNIVVIGSNAANTPRANMGAYAASKAALHMLVKCFGMELAESGIRCNIVSPGSTRTAMQMQLWNENYGEQQVIDGDAKHYRLGIPLKKIAEPDDIVQTILFLMSDAANHITLHDLRVDGGATLDN

SEQ ID NO: 92296 - protein, 251 aa, Vibrio parahaemolyticus
  misc_feature (1)..(251): tr|A0A0M3E4Y7|A0A0M3E4Y7_VIBPH 2,3-dihydroxybenzoate-2, 3-dehydrogenase OS=Vibrio parahaemolyticus OX=670 GN=AA Y51_20080 PE=4 SV=1
MAGFDFHGKTVWVTGAGKGIGYATALAFVEAGAQVTGFDREFTLQDYPFVTEVMDVADAGQVAEVCQRLLVQTDRLDVLVNAAGILRMGATDALSPRDWQQTFAVNVGGAFNLFQQTMAQFRHQRGGAIVTVASDAAHTPRIGMSAYGASKAALKSLALTVGLELAGSGVRCNLVSPGSTDTDMQRTLWVSDDAEQQRIRGFGEQFKLGIPLGKIARPQEIANTILFLASDLASHITLQDIVVDGGSTLGA

SEQ ID NO: 92297 - protein, 258 aa, Vibrio pectenicida
  misc_feature (1)..(258): tr|A0A427U1F9|A0A427U1F9_9VIBR 2,3-dihydro-2,3-dihydrox ybenzoate dehydrogenase OS=Vibrio pectenicida OX=62763 GN=EJA03_13720 PE=4 SV=1
MSLDNKKVLLVGAATGIGLSVLESLLREGAIVTVADKQIDLLIKNTQFLLKMYSNKFECHWLDLAEHTQVAEIVEAWQQQGTFDHLVCCVGLLHVGSLHELPIAAVKHTFDVNTFGVLALMQTVAKSMKFKGLGSMVIVGSNAANTPRQSIGAYGASKAALHMMVKCMGIELSPFGIRCNIVSPGSTDTPMQRQLWTESYGESEVIAGDLSQFRLGIPLAKLAQPQDIANAILFLLSDAAGHITMHDLRVDGGATLDN

SEQ ID NO: 92298 - protein, 261 aa, Vibrio penaeicida
  misc_feature (1)..(261): tr|A0A432DFB5|A0A432DFB5_9VIBR 2,3-dihydro-2,3-dihydrox ybenzoate dehydrogenase OS=Vibrio penaeicida OX=104609 GN=EKN09_07055 PE=4 SV=1
MSKFLERNHVLLTGAAKGIGFSTLENLLEAGAKVIATDIDVELLASKSDSLSTQYPDQLQVFKLDLSKPERVKESIHQWINDYGEFDHLVSCAGILHLGALCDMALEQIENTFMVNTFGVLSTMQAVSASMKTRRKGNIVVVGSNAANTPRANMGAYAASKSALHTFVKSVGIELAPLGIRCNIVSPGSTRTEMQLQLWNDDYGEEQVIAGDAKQFRLGIPLNKIAEPNDIAQTILFLMSDAANHITMHDLRVDGGATLDN

SEQ ID NO: 92299 - protein, 261 aa, Vibrio quintilis
  misc_feature (1)..(261): tr|A0A1M7YX48|A0A1M7YX48_9VIBR 2,3-dihydro-2,3-dihydrox ybenzoate dehydrogenase OS=Vibrio quintilis OX=1117707 GN=entA PE=4 SV=1
MSDNLNHKTILLTGAGGGIGFAVLKQLLHNNARVISTDISLSALKEKNQSLLKDYPNQLICHELNLAHHAEINGQIAHWDSEYGPIDHLISCAGLLHVHPLTTMPVSNIQEIFEVNVYGTVALMQAIGKKMAERRHGNMVIIGSNAANTPRAGIGAYAASKSALHMMVKCMGMELAPHGIRCNIVSPGSTRTEMQAQLWTENYGESEVIAGNAEHFRLGIPLGKIAEPDDIAGTVLFLLSDAANHITLHDLRVDGGATLDH

SEQ ID NO: 92300 - protein, 305 aa, Vibrio ruber
  misc_feature (1)..(305): tr|A0A1R4LTS2|A0A1R4LTS2_9VIBR 2,3-dihydro-2,3-dihydrox ybenzoate dehydrogenase OS=Vibrio ruber DSM 16370 OX=11 23498 GN=entA PE=4 SV=1
MTNICHLFHTQYIGKIISENNYQFQMIIHLICGIIIVIVANIKTGEVGLNQNHQTVLLTGASQGIGYTVLERLLVEGYKVVATDRCIDALDTKLDAVKKQYAAQLDYYAIDLLDSQLAQQVAQLCSKYHFDHLVSCAGALSSGSVHEMSVETIKQMFDINTFGALTMIQQVAEGMKRRKAGNIVVIGSNAANTPRLNIGAYAASKSALHMLVKCSGLELAEYGIRCNIISPGSTRTEMQTQLWHENYGEPQVIAGNLEQYRLGIPLRKMAEPADIANSVLFLMSDAARQITMHDLRVDGGATLDN

SEQ ID NO: 92301 - protein, 275 aa, Vibrio sp.
  misc_feature (1)..(275): tr|A0A0H3ZW35|A0A0H3ZW35_9VIBR 2,3-dihydro-2,3-dihydrox ybenzoate dehydrogenase OS=Vibrio sp. 1S_269 OX=1652828 PE=4 SV=1
MKSSQISAMGGVKMEITMSLDNQKVLLVGAATGIGLSTLESLLRAGARVIVADHKLKLLEKNTQALAKEYPKQFECHWLDLADQVKVLESVDAWQQQGLFNHLVCCAGMLHVGPLHELPMSTIKQTFDVNTFGVLALMQAIAKTMKTRGSGSMVIVGSNAANTPRQSIGAYGASKSALHMMVKCMGIELAPFGIRCNIVSPGSTDTPMQRQLWTESYGEKEVIEGDINQFRLGIPLAKLAQPEDIANAILFLLSKAASHITMHDLRVDGGATLDN

SEQ ID NO: 92302 - protein, 263 aa, Vibrio sp.
  misc_feature (1)..(263): tr|K5UQH7|K5UQH7_9VIBR 2,3-dihydro-2,3-dihydroxybenzoat e dehydrogenase OS=Vibrio sp. HENC-03 OX=992012 GN=dhbA PE=4 SV=1
MSENRSEFDSKLCLVTGAGQGIGLACAKSLLAQNARVIACDVTQKALDALQQSLPSDQQQRATLLPFDLADSTAIQNACRKLEQDQLIPDYIVTCAGTLHLESVLDLPLESLNKTLDVNLKGTMLLTQQLAKMLVKHGKQGAIVAVGSNAADTPRVKMSAYCTSKAGLHMWMQCLGLELAEHGIRCNIVSPGSTRTPMQEQMWNESYGERETIQGNLASHRIGIPLNKIAETKDITNAIEFLLSDKSGHITMHDLRVDGGATF

SEQ ID NO: 92303 - protein, 261 aa, Vibrio sp.
  misc_feature (1)..(261): tr|A0A3N9TCS5|A0A3N9TCS5_9VIBR 2,3-dihydro-2,3-dihydrox ybenzoate dehydrogenase OS=Vibrio sp. LJC006 OX=2487322 GN=EES38_19275 PE=4 SV=1
MTIDLSNQQILLTGASQGIGLATLKQLLGCGASVIATDRDISLLKDATHELQLTSPEKLRLKELDLMRCDHIVSEVPDWIEEVGKIDQLVHCAGILHLNPILTAPTSTITDTFSVNVFGATTLLQQLGQHMKAQRKGNIVVIGSNAANTPRANMGAYAASKAALHMLVKCFGMELSEFGIRCNIVSPGSTRTSMQMQLWNEHYGEQQVIEGNAEQYRLGIPLKKIAEPEDIVQTILFLMSDAANHITLHDLRVDGGATLDN

SEQ ID NO: 92304 - protein, 257 aa, Vibrio spartinae
  misc_feature (1)..(257): tr|A0A1N6M7L6|A0A1N6M7L6_9VIBR 2,3-dihydro-2,3-dihydrox ybenzoate dehydrogenase OS=Vibrio spartinae OX=1918945 GN=dhbA PE=4 SV=1
MKQNNETVLLTGASQGIGYAVLERLLAEGYKVVATDRCMDALESKLGDFKRAYGEQLDWYAIDLLDRQLAQQVAQLCREYHFDHFVSCAGVLSIGNVHAMAAEDIRQMFDINTFGALTMIQHVAEGMKHRQSGSIVVIGSNSANTPRLNIGAYAASKSALQMLVKCTALELAEYGIRCNIVSPGSTRTEMQTQLWHDNYGEQQVIEGNLEQYRLGIPLKTMAEPVDIANAVLFLMSDSARQITMHDLRVDGGATLDN

SEQ ID NO: 92305 - protein, 261 aa, Vibrio tapetis
  misc_feature (1)..(261): tr|A0A2N8ZM52|A0A2N8ZM52_9VIBR 2,3-dihydro-2,3-dihydrox ybenzoate dehydrogenase OS=Vibrio tapetis subsp. tapeti s OX=1671868 GN=entA PE=4 SV=1
MMDAEKPRTLTLITGAASGIGKACAKAVLTQDEEVILLDKDNEQLLAFYESLTAKQQDKAHLYSVDLNDLTSVSNFCQSISEKGLTPNNIISAAGILHLSPILELSAEQLTDTLNTNFIGTFVLLQHLAKTWVTNHYPGSLVVVGSNAADTPRVNMSAYCASKASLHIAIKCMGLELAQYGIRCNIVSPGSTRTSMQEQLWQNADGEQLTIQGNLEQHKLGIPLGKIAEPDDIVNAVLFLLSEKAGHITMQDLRVDGGATL

SEQ ID NO: 92306 - protein, 261 aa, Vibrio tasmaniensis
  misc_feature (1)..(261): tr|A0A2N7NPE0|A0A2N7NPE0_9VIBR 2,3-dihydro-2,3-dihydrox ybenzoate dehydrogenase OS=Vibrio tasmaniensis OX=21266 3 GN=BCS92_01430 PE=4 SV=1
MERFLEGQLVLLTGGAKGIGFSTLESLLDSGAKVLATDIDSQLLATKSESLARKYPDQLWVEPLDLSKPELVKQSIYHWVAEYGEFDHLVSCAGILHLGALCDMSFEQIENTFMVNSFGALATMQAVSKCMKDRGKGNMVVVGSNAANTPRANMGAYAASKSALHMFVKSIGIELAPLGIRCNIVSPGSTRTEMQLQLWNESYGEEQVIAGDATQFRLGIPLNKIAEPKDIAQSILFLMSNAANHITMHDLRIDGGATLDN

SEQ ID NO: 92307 - protein, 262 aa, Vibrio vulnificus
  misc_feature (1)..(262): tr|A0A3Q0KYY2|A0A3Q0KYY2_VIBVU 2,3-dihydro-2,3-dihydrox ybenzoate dehydrogenase OS=Vibrio vulnificus (strain CM CP6) OX=216895 GN=VV2_0834 PE=4 SV=1
MFNQFLEKQTVFLTGAAKGIGFSVMQHLLEAGARVVATDIDEVRLKTDSDALKNRYREQLFCYHLDLSQPESVARRVAQMIEQHGQFDHLVCCAGVLHLGSITSMPLAQIEHTFNVNTFGTLAVMQALAEGMKARRSGSMVIVGSNAANTPRPNMGAYGASKAALHMLVKSMGMELAEYGVRCNIVSPGSTRTDMQMQLWSEEYGEPQVIAGNLEQFRLGIPLRKMAEPQDIARSVLFLLSEHAGHITLHDLRVDGGATLDN

SEQ ID NO: 92308 - protein, 262 aa, Vibrio vulnificus
  misc_feature (1)..(262): tr|A0A4Q7IB86|A0A4Q7IB86_VIBVL 2,3-dihydro-2,3-dihydrox ybenzoate dehydrogenase OS=Vibrio vulnificus OX=672 GN= D8T65_12985 PE=4 SV=1
MFDQFLEKQTVFLTGAAKGIGFSVMQHLLDAGARVVATDIDEVRLKADSDALMNRYREQLFCYHLDLSQPESVARRVAQMVEQHGPFDHLVCCAGVLHLGAIASMPLAQIEHTFNVNTFGTLAVMQVLAEGMKARRAGSMVIVGSNAANTPRPNMGAYGASKAALHMLVKSMGIELAEYGVRCNIVSPGSTRTDMQMQLWSEEYGEPQVIAGNLEQFRLGIPLRKMAEPQDIARSVLFLLSDHAGHITLHDLRVDGGATLDN

SEQ ID NO: 92309 - protein, 247 aa, Xenorhabdus bovienii
  misc_feature (1)..(247): tr|D3V7C5|D3V7C5_XENBS 2,3-dihydro-2,3-dihydroxybenzoat e dehydrogenase OS=Xenorhabdus bovienii (strain SS-2004 ) OX=406818 GN=entA PE=4 SV=1
MNSFKGKTVWVTGAGSGIGYRTALRFHEAGAKVFGFDLKFPDSMPFETLILDVSDDCAVQKICPPLLKENGLDILVNGAGILRLGSAETLSREDWESSINVNAGAAFNLFKILIPHFQRQRSGNIVSIASNAAHVPRVNMAVYCASKAAMRSLCLSVGLELAPFGIRCNIVSPGSTLTPMLEGMFDDDIAHQRLIHGVTEQFKLGIPLGKIAHPDEIASVILFLASEQASHMTLQDIVIDGGATLGA

SEQ ID NO: 92310 - protein, 252 aa, Xenorhabdus bovienii
  misc_feature (1)..(252): tr|A0A0B6X9A2|A0A0B6X9A2_XENBV 2,3-dihydro-2,3-dihydrox ybenzoate dehydrogenase implied in enterobactin synthes is OS=Xenorhabdus bovienii OX=40576 GN=entA PE=4 SV=1
MSTVFDFSGKNVWITGAGRGIGYQIASRFSQAGANVTGFDVAFPDAEIPFTSYVLDISDHLAVSHCCRKLLTPETHLDVLVNGAGILRTGHTETLSWEDWQQCLNVNAGGAFNFFQAVIPQFQRQCSGNIVSICSNAAHVPRVEMSAYGASKAALRSLCLSVGLELAPYGVRCNLVSPGSTDTPMLQSMWQTLASRQHTIDGSPEKFKLGIPLKKIALPNEIADTVLFLASDLASHITLQDIVIDGGATLGA

SEQ ID NO: 92311 - protein, 252 aa, Xenorhabdus bovienii
  misc_feature (1)..(252): tr|A0A077N168|A0A077N168_XENBV 2,3-dihydro-2,3-dihydrox ybenzoate dehydrogenase OS=Xenorhabdus bovienii str. fe ltiae Florida OX=1397852 GN=entA PE=4 SV=1
MSIVFDFSGKNVWITGAGRGIGYQIASRFSQAGANVTGFDVAFPDSEIPFTSYVLDISDHLAVSRCCRELLTPETHLDVLVNGAGILRTGSTELLSWEDWQQCLNVNAGGAFNFFQAVIPQFQRQRSGNIISICSNAAHVPRVEMSAYGASKAALRSLCLSVGLELAPYGVRCNLVSPGSTDTPMLQSMWQTLASRQHTIDGSPEKFKLGIPLKKIALPNEIADTVLFLASDLASHITLQDIVIDGGATLGA

SEQ ID NO: 92312 - protein, 252 aa, Xenorhabdus bovienii
  misc_feature (1)..(252): tr|A0A077NXV5|A0A077NXV5_XENBV 2,3-dihydro-2,3-dihydrox ybenzoate dehydrogenase OS=Xenorhabdus bovienii str. fe ltiae Moldova OX=1398200 GN=entA PE=4 SV=1
MSIVFDFSGKNVWITGAGRGIGYQIASRFSQAGANVTGFDVAFPDAEIPFTSYVLDISDHLAVSHCCRKLLTPETHLDVLVNGAGILRTGHTETLSWEDWQQCLNVNAGGAFNFFQAVIPQFQRQCSGNIVSICSNAAHVPRVEMSAYGASKAALRSLCLSVGLELAPYGVRCNLVSPGSTDTPMLQSMWQTLASRQHTIDGSPEKFKLGIPLKKIALPNEIADTVLFLASDLASHITLQDIVIDGGATLGA

SEQ ID NO: 92313 - protein, 252 aa, Xenorhabdus bovienii
  misc_feature (1)..(252): tr|A0A077QGB2|A0A077QGB2_XENBV 2,3-dihydro-2,3-dihydrox ybenzoate dehydrogenase OS=Xenorhabdus bovienii str. In termedium OX=1379677 GN=entA PE=4 SV=1
MSTAFDFSGKNVWITGAGRGIGYQIASRFSQAGANVMGFDVAFPDAEIPFTSYVLDISDHLAVSRCCRELLTPETHLDVLVNGAGILRTGHTETLSWEDWQQCLNVNAGGAFNFFQAVIPQFQRQRSGNIVSICSNAAHVPRVEMSAYGASKAALRSLCLSVGLELAPYGVRCNLVSPGSTDTPMLQSMWQTPASRQHTIEGSPEKFKLGIPLKKIALPDEIADTVLFLASDLASHITLQDIVIDGGATLGA

SEQ ID NO: 92314 - protein, 261 aa, Xenorhabdus bovienii
  misc_feature (1)..(261): tr|A0A077Q2S4|A0A077Q2S4_XENBV 2,3-dihydro-2,3-dihydrox ybenzoate dehydrogenase OS=Xenorhabdus bovienii str. kr aussei Becker Underwood OX=1398204 GN=entA PE=3 SV=1
MTFDENYIAIITGACGGIGEATANQLAAQGLTLALIDNQAEALQVLVDKLNKKYSQPIAAFPANVADPQQIEEVFLAITNQLGAIGYLVNGAGILHHGTVEDTDIDVWNHTFSVNTTGVFNVSKAAAKHMVEQKKGSIVTIASNASRVPRATMSAYCASKAAAQAFTYALGLEVAPYGIRCNVVSPGSTDTPMLRGMWQNENDKNHTLKGNPEQFRTGIPLHKIATPEEIAAAVCFYLSEESGQTTLSTLLVDGGAALGNC

SEQ ID NO: 92315 - protein, 252 aa, Xenorhabdus bovienii
  misc_feature (1)..(252): tr|A0A077P224|A0A077P224_XENBV 2,3-dihydro-2,3-dihydrox ybenzoate dehydrogenase OS=Xenorhabdus bovienii str. kr aussei Quebec OX=1398203 GN=entA PE=4 SV=1
MSTAFDFSGKNVWITGAGRGIGYQIASRFSQAGANVTGFDVAFPDAEIPFTSYVLDISDHLAVSRCCRELLTPETHLDVLVNGAGILRTGHTETLSWEDWQQCLNVNAGGAFNFFQAVIPQFQRQRSGNIVSICSNAAHVPRVEMSAYGASKAALRSLCLSVGLELAPYGVRCNLVSPGSTDTPMLQSMWQTPASRPHTIDGFPEKFKLGIPLKKIALPDEIADTVLFLASDLASHITLQDIVIDGGATLGA

SEQ ID NO: 92316 - protein, 212 aa, Xenorhabdus bovienii
  misc_feature (1)..(212): tr|A0A077P1J2|A0A077P1J2_XENBV 2,3-dihydro-2,3-dihydrox ybenzoate dehydrogenase OS=Xenorhabdus bovienii str. or egonense OX=1398202 GN=entA PE=4 SV=1
MAFPDTEIPFTSYVLDISDHLAVSRCCRELLTPETHLDVLVNGAGILRTGHTETLSWEDWQQCLNVNAGGAFNFFQAVIPQFQRQWSGNIVSICSNAAHVPRVEMSAYGASKAALRSLCLSVGLELAPYGVRCNLVSPGSTDTPMLQSMWQTPASRQYTIEGFPEKFKLGIPLKKIALPDEIAGTVLFLASDLASHITLQDIVIDGGSTLGA

SEQ ID NO: 92317 - protein, 252 aa, Xenorhabdus bovienii; identical to SEQ ID NO: 92311
  misc_feature (1)..(252): tr|A0A077NNT7|A0A077NNT7_XENBV 2,3-dihydro-2,3-dihydrox ybenzoate dehydrogenase OS=Xenorhabdus bovienii str. pu ntauvense OX=1398201 GN=entA PE=4 SV=1

SEQ ID NO: 92318 - protein, 252 aa, Xenorhabdus cabanillasii
  misc_feature (1)..(252): tr|W1J5G0|W1J5G0_9GAMM 2,3-dihydro-2,3-dihydroxybenzoat e dehydrogenase OS=Xenorhabdus cabanillasii JM26 OX=142 7517 GN=entA PE=4 SV=1
MNIAFDFSNKHVWVTGAGSGIGYHIASRFSQAGAKVIGFDLAFPDSELPFTTYKLDISNHIAVSQLCRELLAAEPNLDILINSAGILRTGRTESLSWEDWQQCFNVNAGGAFNLFQAVIPQFLRQRSGNIVSICSNAAHVPRVEMSAYCASKAAMRSLCQSVGLELAPYGVRCNLVSPGSTDTSMLQNIWQGTTTRQNIIDGFPDKFKLGIPLKKIALPEEITDTVFFLASDLASHITLQDIVVDGGATLGC

SEQ ID NO: 92319 - protein, 261 aa, Xenorhabdus doucetiae
  misc_feature (1)..(261): tr|A0A068QSZ4|A0A068QSZ4_9GAMM 2,3-dihydro-2,3-dihydrox ybenzoate dehydrogenase OS=Xenorhabdus doucetiae OX=351 671 GN=dhbA PE=3 SV=1
MTFDKHYIAVITGACGGIGEAVARLLAKEGISLALLDNKSQALESLVVELKDEYTQPIMGFTVDVADAQCVEKAFATLSCQLGPVGYLVNGAAVLCHSFVTETSLQDWEKTFAVNATGVFNVSRHAANVMMKQRKGSIVTIASNAARVPRATMAAYCASKAAAQAFTYALGLEVAPYGIRCNVVAPGSTDTPMLRSMWQNERDRQNTLKGNLQQFRIGIPLNKIATVKEIATAVCFYLCEESGQTTLSTLLVDGGAALGSC

SEQ ID NO: 92320 - protein, 257 aa, Xenorhabdus khoisanae
  misc_feature (1)..(257): tr|A0A0J5FR95|A0A0J5FR95_9GAMM 2,3-dihydroxybenzoate-2, 3-dehydrogenase OS=Xenorhabdus khoisanae OX=880157 GN=A B204_13175 PE=4 SV=1
MNMTFDFSGKQVWVTGAGRGIGYHIASRFSQVGAKVIGLDLAFPDSDLPFTAYQLDVSDPVAVSQLCRKLLKAEPHLDILVNGAGILRTGSTETLSWEDWQQCFNVNAGGAFNLFQAVIPQFQRQRSGNIVSVCSNAAHVPRIGMSAYGASKAAMRSLCQSVGLELAPYGVRCNLVSPGSTDTPMLQSMWQNDLQQGAVFRRNIVKGFPDTFKLGIPLKKIALPEEIADTVLFLASDLASHITMQDIVVDGGATLGS

SEQ ID NO: 92321 - protein, 261 aa, Xenorhabdus nematophila
  misc_feature (1)..(261): tr|N1NKJ4|N1NKJ4_XENNE 2,3-dihydro-2,3-dihydroxybenzoat e dehydrogenase OS=Xenorhabdus nematophila F1 OX=130616 2 GN=dhbA PE=3 SV=1
MTFDKKYVAVIIGACGGIGEAIARQLAMEGITLALIDKQADALQFLVTRLSHEYSQSITSFPVDVAEPQQVVSAFLAIRNQLGPIGYLVNSAGVLHHDSVENTDIDAWNRIFAINATGVFNVSKAAASYMTEQKKGSIVTVASNAARVPRAMMAAYCASKAAAQAFTYALGLEVAPFGIRCNVVAPGSTDTPMLRSMWKNENDKSLTLDGNPEQFRIGIPLRKIATSDEIATAVCFYLSEESSQTTLSTLLVDGGAALGSC

SEQ ID NO: 92322 - protein, 261 aa, Xenorhabdus nematophila; identical to SEQ ID NO: 92321
  misc_feature (1)..(261): tr|A0A0A8P2M6|A0A0A8P2M6_XENNE 2,3-dihydro-2,3-dihydrox ybenzoate dehydrogenase OS=Xenorhabdus nematophila str. Websteri OX=1437826 GN=dhbA PE=3 SV=1

SEQ ID NO: 92323 - protein, 247 aa, Xenorhabdus poinarii
  misc_feature (1)..(247): tr|A0A068R149|A0A068R149_9GAMM 2,3-dihydro-2,3-dihydrox ybenzoate dehydrogenase OS=Xenorhabdus poinarii G6 OX=1 354304 GN=entA PE=4 SV=1
MSNFKGKTVWVTGAGSGIGYRTALRFHEAGAKVFGFDLKFPDSMPFETRILDVSDDCAVQKICPPLLQENGLDILVNGAGILRLGSAETLSREDWESSINVNAGAAFNLFKILIPHFQRQRSGNIVSIASNAAHVPRVNMAVYCASKAAMRSLCLSVGLELAPFGIRCNIVSPGSTLTPMLEGMFDDNIAHQRLIHGVTEQFKLGIPLGKIAHPDEIASVILFLASEQASHVTLQDIVIDGGATLGA

SEQ ID NO: 92324 - protein, 254 aa, Xinfangfangia sp.
  misc_feature (1)..(254): tr|A0A3P5XZ11|A0A3P5XZ11_9RHOB 2,3-dihydro-2,3-dihydrox ybenzoate dehydrogenase OS=Xinfangfangia sp. CIP 111625 OX=2483812 GN=dhbA PE=4 SV=1
MRLTGFQDALALVTGAGGGIGRALVGLLLDAGARVVATDLTAPDLPPRQGLTCLPLDVSDAGAVEALVAQVEADLGPVRFGIAVAGALATGLVTETSDEDWRRVFAVNADGVFHLTRALARRMIGREPRGALVAVSSNAAGVPRYGMAGYAASKAAATMYMRALGLELAPHGIRCNIVAPGSTRTPMQTGMWADESGEARVIAGLPEQFKPGIPLGKIAEPGDIAAAVMFLLSDQAGHVTMADLYVDGGATQRG

SEQ ID NO: 92325 - protein, 274 aa, Yersinia frederiksenii
  misc_feature (1)..(274): tr|A0A0T9UC78|A0A0T9UC78_YERFR 3-ketoacyl-ACP reductase OS=Yersinia frederiksenii OX=29484 GN=fabG_5 PE=4 SV=1
MAANQISSAKSMPAATLVAQLDFTGKRVWVTGAGQGIGYQIACQFFALGADVVGLDKSFHADPTSAAQGYPFTTALLDISHPQQVELVCQHLLSEVPRLDILVNGAGILRMADTEELSLEDWQQCFNVNVSGAFYLLRQLIPQFKQQRYGAVVTLGSNAAHVPRIKMSAYCASKAALTSLSHCVGLELAAYGVRCNLVSPGSTDTLMQRGMWHSEDAQQQTIAGFPLQYKLGIPLGKIATPQEITNTVVFLASDLASHITMQDIVVDGGATLSA

SEQ ID NO: 92326 - protein, 249 aa, Yersinia frederiksenii
  misc_feature (1)..(249): tr|A0A0B6FT46|A0A0B6FT46_YERFR 2,3-dihydro-2,3-dihydrox ybenzoate dehydrogenase OS=Yersinia frederiksenii Y225 OX=1454377 GN=AW19_2614 PE=4 SV=1
MDFTDKRVWVTGAGQGIGYQIASQFVALGADVVGLDKSFSATQNFPFTTALLDISNPQQVALVCQHLLSQVPRIDVLVNGAGILRMAETEALSLEDWQQCFNVNVSGAFYLLRQLIPQFKWQRFGAVVTIGSNAAHVPRIQMSAYCASKAALTSFSHCVGLELAAYGVRCNVVSPGSTDTPMQRGMWHSEDAQQRTIAGFPPQYKLGIPLGKIATPQEIANTVVFLASDLASHITLQDIVVDGGATLSA

SEQ ID NO: 92327 - protein, 249 aa, Yersinia hibernica
  misc_feature (1)..(249): tr|A0A481QL17|A0A481QL17_9GAMM 2,3-dihydro-2,3-dihydrox ybenzoate dehydrogenase OS=Yersinia hibernica OX=233925 9 GN=dhbA PE=4 SV=1
MDFSGKRVWVTGAGQGIGYQIACQFVAQGAEVVGLDKAFAPTQSYPFTTVLLDISHPQQVALVCQHLLSETPRLDVLVNGAGILHMAETEALSLKDWQQCFNVNVFGAFYLLRQLIPQFKQQRFGAVVTIGSNAAHAPRMRMSAYCASKAALTSFSHCVGLELAPYGVRCNLVSPGSTDTPMQRGMWHSADAEQQTIAGFPQQYKLGIPLGKIATPQEIANTVVFLASDLASHITMQDIVVDGGATLSA

SEQ ID NO: 92328 - protein, 261 aa, Yersinia intermedia
  misc_feature (1)..(261): tr|A0A0U1ELR9|A0A0U1ELR9_YERIN 3-ketoacyl-ACP reductase OS=Yersinia intermedia OX=631 GN=fabG_1 PE=3 SV=1
MTFDKHYIAVITGACGGIGESVAHALAKEGVSLALLDNNATQLATLVATLQNNHPQPIAGFTVDVADDRCVAEAFTAIGRQLGPVGYLVNGAGVLCHASVAETQPQDWAKTFAVNATGVFNTSRHAANLMMAQRKGSIVTIASNAARVPRATMAAYCASKAAAQAFTYALGLEVAPYGIRCNVVAPGSTDTPMLRGMWHSESDRQNTLNGNPQQFRIGIPLNKVATAEEIAAAVCFYLCEESGQTTLSTLLVDGGAALGSC

SEQ ID NO: 92329 - protein, 269 aa, Yersinia kristensenii
  misc_feature (1)..(269): tr|A0A0T9L4V7|A0A0T9L4V7_YERKR Putative oxidoreductase OS=Yersinia kristensenii OX=28152 GN=entA PE=4 SV=1
MAANQVSSAKNTRTISQATPMDFTGKRVWVTGAGQGIGYQIASQFVALGADVVGLDKTFSAAQNPPFTTALLDISNPQQVELVCQHLLSQVPRIDILVNGAGILRLAETEALSLEDWQQCFNVNVSGTFYLLRQLIPQFKQQRFGAVVTISSNAAHVPRIQMSAYCASKAALTSFSHCVGLELAAYGVRCNVVSPGSTDTPMQRGMWRSEDAQQQTIAGFPQQYKLGIPLGKIATPQEIAHTVVFLASDLASHITMQDIVVDGGATLSA

SEQ ID NO: 92330 - protein, 259 aa, Yersinia massiliensis
  misc_feature (1)..(259): tr|A0A0T9PXF7|A0A0T9PXF7_9GAMM 3-ketoacyl-ACP reductase OS=Yersinia massiliensis OX=419257 GN=fabG_4 PE=4 SV=1
MAAMQMDFTGKRVWVTGAGQGIGYQVACQLAALGADVVGLDKAFSTDNTSATRDYPFATEFLDISHPQQVEGVCQRLLRQVPRIDVLVNGAGILRMADTEELSLEDWKQCFDVNVSGAFYLLRQLIPQFKQQRFGTVVTISSNAAHVPRMQMSAYCASKAALTSFSHCVGLELAAYGVRCNVVSPGSTDTPMQRSMWHSEDAQQQTIAGFPQQYKLGIPLGKIATPSEIANTVAFLASDLASHITLQDIVVDGGATLSA

SEQ ID NO: 92331 - protein, 255 aa, Yersinia nurmii
  misc_feature (1)..(255): tr|A0A0T9KZZ9|A0A0T9KZZ9_9GAMM Putative oxidoreductase OS=Yersinia nurmii OX=685706 GN=entA PE=4 SV=1
MAGTMAQMDFTGKRVWVTGAGQGIGFETAKLFTALGAEVFGLDKNFPNEEYPFTTAVLDISQPVQVADVCEQRLEVVSGIDVLVNAAGILRMGEAEALSLDDWQQCFDVNVSGAFYLLKQLIPVFKRQRSGAIVSIGSNAAHVPRMQMAAYCASKAALTSFSHCVGLELAPYGVRCNLVSPGSTDTPMQRGMWQTPDAEQRTIAGFPQQYKLGIPLGKIATPAEIAQTVAFLASDLASHITLQDMVVDGGATLAA

SEQ ID NO: 92332 - protein, 251 aa, Yersinia ruckeri
  misc_feature (1)..(251): tr|A0A0A8VLD7|A0A0A8VLD7_YERRU 2,3-dihydro-2,3-dihydrox ybenzoate dehydrogenase of siderophore biosynthesis OS= Yersinia ruckeri OX=29486 GN=entA PE=4 SV=1
MVQMDFTAKRVWVTGAGQGIGFETAKLFGELGADVLGLDKAFPNGNYPFTTVVVDISQPAQVADVCEHLLEDVPRVDVLVNAAGILRLGDIEALGLDDWQQCFDVNVSGAFYILRHLIPYFKQQGAGTVVSIGSNAAHVPRMQMAAYCASKAALTSFSHCVGLELAPYGVRCNLVSPGSTDTPMQRGMWQAADAEQRTIAGFPQQYKLGIPLGKIATPQEIAHTVAFLASDLASHITLQDIVVDGGATLAA

SEQ ID NO: 92333 - protein, 251 aa, Yokenella regensburgei
  misc_feature (1)..(251): tr|A0A2X2Q4J6|A0A2X2Q4J6_9ENTR 2,3-dihydro-2,3-dihydrox ybenzoate dehydrogenase OS=Yokenella regensburgei OX=15 8877 GN=entA PE=4 SV=1
MAGFDFHGKHVWVTGAGKGIGYATALAFTEAGASVTGLDLTFDGEHYPFATEVLDVADAEEVALVSRRLLAHQPRLDVLVNAAGILRMGVTDALSQQDWQQTFAVNVGGAFNLFQNTMAQFRQQQGGAMVTVASDAAHTPRIGMSAYGASKAALKSLALTVGLELAASGVRCNLVSPGSTDTDMQRTLWRSDDAEQQRIRGFGEQFKLGIPLGKIARPQEIASTVLFLASDQASHITLQDIVVDGGSTLGA

SEQ ID NO: 92334 - protein, 258 aa, Zooshikella ganghwensis
  misc_feature (1)..(258): tr|A0A4P9VPQ7|A0A4P9VPQ7_9GAMM 2,3-dihydro-2,3-dihydrox ybenzoate dehydrogenase OS=Zooshikella ganghwensis OX=2 02772 GN=B9G39_11560 PE=4 SV=1
MNFNKDIIVVSGAANGIGLATVNHLLDTGAHVVALDNDKAALNVLSEKKRLNKLNLYTYQVDVSNSHEVEQVIQHVEENIGAINKLVCSSGILRMGALNTLSDEDWHSTFAVNTTGVFNLCRAVTVRMQQRQSGAIVAVSSNAASVPRANMGAYAASKAAVTSFIKCLGLELAAANIRCNIVSPGSTDTQMQRQLWTDDSGPQRVIDGDLANHRLGIPLQKIATVDDIAQAILFLLSDQAHHITMHDLRVDGGATLGC

SEQ ID NO: 92335 - protein, 188 aa, Acetobacter ghanensis
  misc_feature (1)..(188): tr|A0A0U5BN43|A0A0U5BN43_9PROT Isochorismatase hydrolas e OS=Acetobacter ghanensis OX=431306 GN=AGA_1P44 PE=4 S V=1
MISLQATKTALVLIDLQKGITGLPLAPTPGALIVERSKELTARFRTAGAPVILVNVAFALDFADAVHTVVDRSFSPPGGFAPDWMELVDGLAEPTDLRITKRQWGAFYGTDLDLQLRRRGITTIVVGGIATNLGVESTARAAHEHGYNVVLVEDVMSTFTEEMQRFACEEIFPRLGRVTTSDAIGLDA

SEQ ID NO: 92336 - protein, 211 aa, Acetobacter senegalensis
  misc_feature (1)..(211): tr|A0A0U5EYG6|A0A0U5EYG6_9PROT Isochorismatase hydrolas e OS=Acetobacter senegalensis OX=446692 GN=ASN_1282 PE= 4 SV=1
MSGAKQIVAKPMIVGQPALIVVDIQKGSFAPRPPSSRLEFMPDAVERYTRARTVVDAAREAGIPIIFVQEAHRRTMVDFGRELDGSESVHCLEGQSGTDFAVEELGMLEDDYRITKRRYSVFFGTDMEILLKGLGVQTVIMVGGFTDVCVHYSFVDGHQMDYYCRVVEDCVSGSSYRAHDAALEAMEYLQAGARRSAQDMVDAFAAIRQQA

SEQ ID NO: 92337 - protein, 176 aa, Acetobacterium woodii
  misc_feature (1)..(176): tr|H6LJE7|H6LJE7_ACEWD Isochorismatase OS=Acetobacteriu m woodii (strain ATCC 29683 / DSM 1030 / JCM 2381 / KCT C 1655 / WB1) OX=931626 GN=Awo_c31470 PE=4 SV=1
MKSVLLVIDYQKDFVDGSLGFPQSVKLEELIAQKIEAYRSNGWEIVFTYDTHTADYLNTQEGKNLPVVHCIKGTPGWELYGKVAKLRQDSDTCIEKIAFGSMELANYLAANQYDRVELVGVVSNICLISDAVLAKAALPEAEIIVDASCVASNEDHLNEAALDVMASMQIRIINRI

SEQ ID NO: 92338 - protein, 205 aa, Achromobacter insolitus
  misc_feature (1)..(205): tr|A0A3S4UGG0|A0A3S4UGG0_9BURK Probable isochorismatase OS=Achromobacter insolitus OX=217204 GN=phzD PE=4 SV=1
MNHPTIRAIAGATAPQSIDPASTALLVIDFQNEYFSGRLPIPDGPAALRNAARLVAFADQNGIPVFHIQHATPAGSPVFAEGSAGLDFHPDLRPAPGHTVLRKSTVSVFPSTDIDQRLKAAGIRTLLVTGLMTHACVAGAARDAVPLGYQVIVAADACATRDLDTGASDSSALPHAILHRAALASIDDTFGDIMTTKQVLELPLA

SEQ ID NO: 92339 - protein, 285 aa, Achromobacter sp.
  misc_feature (1)..(285): tr|A0A0M7P067|A0A0M7P067_9BURK Isochorismatase OS=Achro mobacter sp. ATCC35328 OX=1806490 GN=entB PE=4 SV=1
MAIPKLQAYALPESHDIPQNKVDWAFEPQRAALLIHDMQDYFVSFWGENCPMMEQVIANIAALRDYCKQHNIPVYYTAQPKEQSDEDRALLNDMWGPGLTRSPEQQKVVDRLTPDADDTVLVKWRYSAFHRSPLEQMLKESGRNQLIITGVYAHIGCMTTATDAFMRDIKPFMVADALADFSRDEHLMSLKYVAGRSGRVVMTEELLPAPIPASKAALREVILPLLDESDEPFDDDNLIDYGLDSVRMMALAARWRKVHGDIDFVMLAKNPTIDAWWKLLSREVK

SEQ ID NO: 92340 - protein, 190 aa, Achromobacter spanius
  misc_feature (1)..(190): tr|A0A3S4PSS4|A0A3S4PSS4_9BURK Probable isochorismatase OS=Achromobacter spanius OX=217203 GN=phzD PE=4 SV=1
MSTMNTLVPARSALLVMHYQTDIINLFPSVAPTLLANTRTLCDAARRQGIRVYFAQIRFSLGYPEVSPLNKNGQGIKQLGLFTDDQISPELDRQPDEPIIIAHRASVFFGTDLELRLSAQGIDTLLMVGIASTGVMLSSIAHASDADYRLFTVKDCCYDPDVIVHEHLFSTAFASRTTVLSLADALALLA

SEQ ID NO: 92341 - protein, 187 aa, Acidilobus saccharovorans
  misc_feature (1)..(187): tr|D9Q1R5|D9Q1R5_ACIS3 N-carbamoylsarcosine amidase rel ated protein OS=Acidilobus saccharovorans (strain DSM 1 6705 / JCM 18335 / VKM B-2471 / 345-15) OX=666510 GN=AS AC_0847 PE=4 SV=1
MSALRPALVIVDMLNDFIDGALATPEAKATVAPARKVLEAFRRNGWPVIYVNDAHYPTDIEMPLWGPHAMKGTRGAEVYSELAPREGEYVLEKHAYSGFFGTALDHILRSLGVDTVVLVGLDADICVRHTAADAFFRGYKVVVVRDAVAARIDKNWETYYKKVYGATVLNSDEVESYLRSAQPITAR

SEQ ID NO: 92342 - protein, 187 aa, Acidithiobacillus caldus
  misc_feature (1)..(187): tr|A0A059ZXA2|A0A059ZXA2_ACICK Isochorismatase OS=Acidi thiobacillus caldus (strain ATCC 51756 / DSM 8584 / KU) OX=637389 GN=Acaty_c0733 PE=4 SV=1
MSGLGRAQIRPEQAVLLLVDLQDRLLNTLAPQTRHLLLRRVDAMVALCQRLAIPILATAQYPEGLGPLPPERTEPCSAVFAKTSFSCLGQPDLRQWLEAHDDRRQVWIAGVETHVCIVQTALDLETQGWRAVVLEDACASRDPAHRDSALARLRQAGVLVAPAESVFYESLRDARHPAFRELAAQWR

SEQ ID NO: 92343 - protein, 181 aa, Acidithiobacillus thiooxidans
  misc_feature (1)..(181): tr|A0A543PZ87|A0A543PZ87_ACITH Putative isochorismatase OS=Acidithiobacillus thiooxidans ATCC 19377 OX=637390 GN=phzA PE=4 SV=1
MRIEAQQSLILTIDMQDRLLGAIPETERNQAIQNVTRLLAAAAALEIPRLATVQYAKGLGPIRADLQSFCAPPLDKTVFSCWRHAPLQNLLETEQSRRQIILTGVETHICVLQTALDLHGAGWQPVVVADACASRDDANAQSALLRLRQAGITVAVAESVFYEWLGDAAHPQFRSLAPAWR

SEQ ID NO: 92344 - protein, 213 aa, Acinetobacter baumannii
  misc_feature (1)..(213): tr|D0C789|D0C789_ACIB2 Isochorismatase OS=Acinetobacter baumannii (strain ATCC 19606 / DSM 30007 / CIP 70.34 / JCM 6841 / NBRC 109757 / NCIMB 12457 / NCTC 12156 / 81 ) OX=575584 GN=entB PE=4 SV=1
MSIPKIASYSMPQAHEFTPNKTNWPLHTSRAVLLVHDMQQYFLDFYDLTQEPIPELIQNTKALIDAARQSNIPVVYTAQPGNQSPEYRQLLTDFWGPGLKDEPNITQIFPKISPQKNDTVLTKWRYSVFKFSPLEQLMRDSGRDQLIICGVYAHIGCLMSAAEAFMLNIQPFLCGDALADFSREEHDMALKYASTRCAQVMTTQQVIQAWIQE

SEQ ID NO: 92345 - protein, 179 aa, Acinetobacter baylyi
  misc_feature (1)..(179): tr|Q6F743|Q6F743_ACIAD Putative isochorismatase OS=Acin etobacter baylyi (strain ATCC 33305 / BD413 / ADP1) OX= 62977 GN=ACIAD3473 PE=4 SV=1
MKQALMVIDVQNDYFEGGAMALVHPEQALHHIQQLERWFLAQNLPIIYIQHINSAQASFFRPDTNGAELHSDLQLQRNSIILQKHKPNSFLATDLDQILQQLSVNQLVITGMMTHMCIDSTTRAATELGYQPILIADATATRDLHFNDQLTSARDVQTAFLAALSNFATIQKTHQFIQA

SEQ ID NO: 92346 - protein, 182 aa, Acinetobacter bereziniae
  misc_feature (1)..(182): tr|A0A0A8TTY4|A0A0A8TTY4_ACIBZ Isochorismatase OS=Acine tobacter bereziniae OX=106648 PE=4 SV=1
MKMSRTALLIIDVQNDYFPQGKMELFGAEQALKHINRLEADFIKNAQPIIYIQHIAKQAQATFFQEGTEGAELHAGLQINQDPIIIEKHYPNSFFQTNLKQVLDQLKIEHLVISGMMTHMCVDATSRAAAELGYQPIIIAEATATRQLSYAGKTVQAQDVQTACLSAFQMFSQVISIDDYLK

SEQ ID NO: 92347 - protein, 180 aa, Acinetobacter calcoaceticus
  misc_feature (1)..(180): tr|A0A380VHX1|A0A380VHX1_ACICA Isochorismatase OS=Acine tobacter calcoaceticus OX=471 GN=dhbB_1 PE=4 SV=1
MKQALLVIDVQNDYFKNGKMELVGPDQALDKIKQLEQYFNEKDLPIIYVQHINPPQASFFQENTEGVLLHSELSAGGDSLIVTKHYPNSFLETNLEELLKAHQIEQLVITGMMTHICIDSGTRAAKELGYQPILIGDATATRDLSHNGKTVKAEDVQTAFLAALGMFASVQNTADFLAKS

SEQ ID NO: 92348 - protein, 289 aa, Acinetobacter haemolyticus
  misc_feature (1)..(289): tr|D4XRX2|D4XRX2_ACIHA Phosphopantetheine attachment do main protein OS=Acinetobacter haemolyticus ATCC 19194 O X=707232 GN=entB PE=4 SV=1
MAISKISTYLMPQPESYPNNKTDWQLDPARAVLLIHDMQRYFLNFYDAESELIKTVIDNLVQLKNWAHQHNIPVVYTAQPYEQPAEDRALLNAMWGPGLPASTIDQQKIIDQLSPDQQDIVLTKWRYSAFKRSDLLERMQHWNRDQLIIGGVYAHIGCMITAVEAFMSDIQPFLVGDAVADFSEEEHRLALKYVSSRCGQVMDTESVVGHVATGITRPWLEQKVQQLIEEDELDPEENLILYGLDSLRIMQFSSELKAQGINISFEELGRTPTLSNWWSLVDARQRIAG

SEQ ID NO: 92349 - protein, 180 aa, Acinetobacter junii
  misc_feature (1)..(180): tr|A0A380UE25|A0A380UE25_ACIJU Putative isochorismatase OS=Acinetobacter junii OX=40215 GN=dhbB PE=4 SV=1
MKQALLIIDVQNDYFKDGKMELVNPEHALEKINQLEYYFNQNNLPIIYIQHINPASAGFFLENTLGVELHPELLLSDSSLVVQKHFPNSFLKTNLQSMLQKLQIEQLVITGMMTHMCIDSGTRAACELGYQPILIADATATRDLEYKNSIVKASDVQSAFLSALNVFAKVQNTSDFLNNQ

SEQ ID NO: 92350 - protein, 289 aa, Acinetobacter lactucae
  misc_feature (1)..(289): tr|A0A3R9RZA0|A0A3R9RZA0_9GAMM Acinetobactin biosynthes is bifunctional isochorismatase/aryl carrier protein Ba sF OS=Acinetobacter lactucae OX=1785128 GN=basF PE=4 SV =1
MAIAKISTYLMPKRESYPNNKTDWQLDSSRAVLLIHDMQRYFLNFYDAESELIKTVVNHLVQLRSWAHQNNVPVVYTAQPYEQPAADRALLNAMWGPGLPASTIDQQKIIDQLSPAEHDIVLTKWRYSAFKRSDLLERMQNWNRDQLIIGGVYAHIGCMVTAIEAFMSDIQPFLVGDAVADFSEEEHRLALKYVSSRCGQVVDTESVVGQVATAITRPWLEQKVQQLIEEDELDPEENLILYGLDSLRIMQFSSELKAQGINISFEELGRTPTLSNWWSLVDARQRIAG

SEQ ID NO: 92351 - protein, 289 aa, Acinetobacter pittii
  misc_feature (1)..(289): tr|A0A4Q7C2T7|A0A4Q7C2T7_ACIPI Acinetobactin biosynthes is bifunctional isochorismatase/aryl carrier protein Ba sF OS=Acinetobacter pittii OX=48296 GN=basF PE=4 SV=1
MAISKISTYLMPERESYPNNKTDWQLDPSRAVLLIHDMQRYFLNFYDAESELIKTVVNHLVQLRTWAHQNNVPVVYTAQPYEQPEADRALLNAMWGPGLPASTIDQQKIIDQLSPAEHDIVLKKWRYSAFKRSDLLERMQNWNRDQLIIGGVYAHIGCMVTAIEAFMSDIQPFLVGDAVADFSEEEHRLALKYVSSRCGQVIDTESVVGQVATGITRPWLEQKVQQLIEEDELDPEENLILYGLDSLRIMQFSSELKAQGINISFEELGRTPTLSNWWSLVDARQRIAG

SEQ ID NO: 92352 - protein, 289 aa, Acinetobacter sp.
  misc_feature (1)..(289): tr|A0A022ISL9|A0A022ISL9_9GAMM Isochorismatase OS=Acine tobacter sp. 1000160 OX=1310800 GN=entB PE=4 SV=1
MAIAKISTYLMPEPQSYPINKTDWQLEPKRAVLLIHDMQRYFLNFYDAESELIKTVVNHLVRLRSWAHQNNVPVVYTAQPYEQPASDRALLNAMWGPGLPASTIDQQSIIDQLSPAEHDIVLTKWRYSAFKRSDLLERMQNWNRDQLIIGGVYAHIGCMVTAVEAFMNDIQAFLVGDAVADFSEEEHRLALQYVSSRCGQVVDTESVVGQATSAITRPWLEQKVQQLIEEEELDPEENLIMYGLDSLRIMQFSSELKAQGINISFEELGRTPTLSNWWSLVDARQRIAG

SEQ ID NO: 92353 - protein, 327 aa, Actinobacillus pleuropneumoniae
  misc_feature (1)..(327): tr|A0A4U9TPS7|A0A4U9TPS7_ACTPL Isochorismatase OS=Actin obacillus pleuropneumoniae OX=715 GN=dhbB PE=4 SV=1
MALPKISPYPMPGETDLPKNKVAWTADPNRAVLLIHDMQQYFIDAFTPDQSPVVELIAHIQKLRSCCAELGIPVIYSAQPGGQAPEQRGLLQDFWGSGINDGPYQKKFVDAVAPSERDMLLTKWRYSAFQKTNLHEIMRELDRDQLMICGIYAHIGCLLTAGEAFMKDIQPFFIADALADFSLEKHRLALVYAAERCAVTLTTERLIDSLTQARHPVPGRSEAPSGEGRPGDAAEEPSPLTLQTLRENVAELLQERPSSLGEDDHLIEYWGLDSIRIMSLAERFRREGLDISFVELAEQPTLAGWWGLLSDKQNVRVSPPNYDYYTV

SEQ ID NO: 92354 - protein, 699 aa, Actinobacteria bacterium
  misc_feature (1)..(699): tr|A0A0N1G4T9|A0A0N1G4T9_9ACTN (2,3-dihydroxybenzoyl)ad enylate synthase, Isochorismatase OS=Actinobacteria bac terium OK074 OX=1592327 GN=OK074_3045 PE=4 SV=1
MSSDPSARSDAARPQDHHPTPTPLPAPPPDPADATTLPELLHARAGLHPERTALVAPGSARRTWTYRELADRADRRAAGLLARGIRRGDRVVVQLPAVMELFELLLALLRIRAVPVVVPPAAHEAVLCAVCGFAEAVACVVPAVWGGADQRPTATRLLARVPTLHEVYVTGDAPGHTRLADVTHEPRTDLEPPAPDDLALLQLAGAGVGVPRLVPRGQGELLRTLRERAAPLDLDEDTVHLVATPERPQPVPGLLDWLAVLCAGGRLVLGSRPDPDSAFPLLATEGVTHTALTPPLAVTWTHAAAVTAYDLSALRTLVVGGGPFEERAARRVRPALGCRLRQVYGTVEGLVSCTGVADGPEPAVTTQGRPVSAADEVRIVDEDDREVSPGERGQLLARGPATVRGYWRSPAHDARHFTPDGFHRTGATARLTAAGHLVLERAPQEPDAGAVARPLPSSLPRRAVRPLPTPYGRRAQLPDAAPGPYFMPAPVLLPADRTGWTLETSRAALLVLNVQNTFVRVLEREAAPVAELLANVGRLARSAHAAGVPVIYSVQAHEGRATDRWPAPYAQLAGARPGEADGTIASPVRPLRGDTVLTARKYSAFARTRLDGRLRDLRRDQLVVVGLYARVGVLTTAADAWMQGLEPFVVADAVADVTAGHHETALRWVADTSGAVTTTQRVATAFGELHATASAAEAV

SEQ ID NO: 92355 - protein, 180 aa, Actinokineospora spheciospongiae
  misc_feature (1)..(180): tr|W7INU0|W7INU0_9PSEU Isochorismatase of siderophore b iosynthesis OS=Actinokineospora spheciospongiae OX=9096 13 GN=UO65_6513 PE=4 SV=1
MTQPVADPYDMSAAAVLPERASSWSCRSDRALLLVHDLPAEIDTECAPLRDLAFNLDQLRETCHELGVPVARSSVRFEGGPGPGEHWLANLSADHFGGLRALLDSFGRDQLLLTGVRAHAACLMSAAGPALAGVQVFCVADAIVDRSLDEHRHSVRAAADHGATPITTGQVIGQLLGVLT

SEQ ID NO: 92356 - protein, 200 aa, Actinomadura parvosata
  misc_feature (1)..(200): tr|A0A2P9I5T5|A0A2P9I5T5_9ACTN Isochorismatase OS=Actin omadura parvosata subsp. kistnae OX=1955414 GN=KIS93_02 843 PE=4 SV=1
MSVSTTLRDVIGLDRELPRLSTATLVLIDFQNTYCEGVMALPGADRALDAAARLLERARAAGTPVVHVINDGGEGTPYDIRAEIGQIEPRVAAREGEAVVVKGFPNSFHETDLLETLRKLDAGPDLVLAGFMTHMCVQFTAQGAFNLGYRPTVVAEACATRPLAAPGGEPISAEQLHAAALTTIGDLFGLVAARVDDLPA

SEQ ID NO: 92357 - protein, 214 aa, Actinomadura sp.
  misc_feature (1)..(214): tr|A0A2P4UF74|A0A2P4UF74_9ACTN Isochorismatase OS=Actin omadura sp. 5-2 OX=1926885 GN=dhbB_2 PE=4 SV=1
MALPEIAPYPMPGADEIPPPRVGWRPDPRRAVLLVHDMQNYFLDAFAGDPIPTLIANIDALRRAARAAGVPVVYTAQPGGQTPDQRGLQLDFWGAGVGAAAREPAIVDALAPQDGDILLTKWRYSAFLRTDLADLLLPRGRDQLIVTGVYAHIGCQATAVEAFMRDVQPFFVADALADFSAADHRAAVSFAARRCAVVTATAPLVRALAAVPAR

SEQ ID NO: 92358 - protein, 214 aa, Actinomyces sp.
  misc_feature (1)..(214): tr|F9ECJ8|F9ECJ8_9ACTO Isochorismatase hydrolase OS=Act inomyces sp. oral taxon 448 str. F0400 OX=888056 GN=HMP REF9062_0170 PE=4 SV=1
MTDLDELVRTAPHRALVLVDVQNEYAHLPLRIRHPSLSDCLERIERALDVAENAGLPVACVQHAGPPGGTIFNPGGKGFELCPCIERRRTAQWKRVVKRRGSIYAGTDLAAWLHEQDVDTVTLVGFMANNCILASAAWGETIGLTTEVLSDAVGAINLRNCAGRANARTVHATMMALLHSNWAAVATTDDWCRALGRDEPLPHSNLVASAMMPL

SEQ ID NO: 92359 - protein, 214 aa, Actinomycetales bacterium
  misc_feature (1)..(214): tr|A0A1R4EQP9|A0A1R4EQP9_9ACTO Isochorismatase OS=Actin omycetales bacterium JB111 OX=1434822 GN=CZ771_00720 PE =4 SV=1
MTDLGGSLAVVVVDVQNDFCSPDGTMAGRGLDLEQIPAASANLVRLAEAARAAGVPVVHVRTHHDEDVDSAAWDARYNVPDGAPVPPRNCRPGTWGAEPWAVTDLPGEQVHIKHRYSGFTSPTLEAGLRELGATTLLVCGVATEVCVETTLRDALERDFHVAVVGDASATYARDIHDQAVARMGRHWGLALTTDQAVEAVGRASSSARAGDAAG

SEQ ID NO: 92360 - protein, 188 aa, Actinoplanes sp.
  misc_feature (1)..(188): tr|G8SAM7|G8SAM7_ACTS5 Isochorismatase hydrolase OS=Act inoplanes sp. (strain ATCC 31044 / CBS 674.73 / SE50/11 0) OX=134676 GN=ACPL_6811 PE=4 SV=1
MTEALIVIDVQESFRARPLWAAVDNPDLIPNVQRLVDRARAAGHLVVWVLHAEPGTGGVFDPASGFVRLMAELTPADGEPILVKTVHNAFTTTDLQFRLTSAGVRAVTVCGLRTEQCVETTARVASDLGYQVTFVTDATATFPIPHRDAPDDLDDPRTLSAADVVARTEYALAGRFATITTVDEVEKG

SEQ ID NO: 92361 - protein, 303 aa, Aeromonas caviae
  misc_feature (1)..(303): tr|A0A2X4NKP6|A0A2X4NKP6_AERCA Isochorismatase OS=Aerom onas caviae OX=648 GN=entB PE=4 SV=1
MAIPTLNNYAMPSQWKANKVDWSLDPKRAALLIHDMQEYFTAFYGENSPLIAALTEQLAAVRKQCKALGIPVFYTAQPKDQSPEDRALLSDMWGPGLNKRPEQQQVVAALRPERDDTVLVKWRYSAFQRSELEQMLKALGRDQLIIGGIYGHIGCMMTACDAFMRDIQPFFLADGVADFSLADHQMALDYVATRCGKVIRCEEVLALAPASASAAQPTNPLLTYEGLKARLLSHIDEDEDEFDPDENLIDYGLDSVRIMALLTEWRAAGVELGFVDLAKLPTLNGWWRLIEARLAAQALEVTP

SEQ ID NO: 92362 - protein, 302 aa, Aeromonas encheleia
  misc_feature (1)..(302): tr|A0A3S4SRC6|A0A3S4SRC6_9GAMM Isochorismatase OS=Aerom onas encheleia OX=73010 GN=entB PE=4 SV=1
MAIPTLSAYAMPSQWKANKVSWTLEPRRAALLIHDMQEYFTAFYGEHSPLIRDLTARLAAVRRHCKALGIPVYYTAQPKDQAPEDRALLNDMWGPGLNKSPELQQVVAPLRPERDDVVLVKWRYSAFQRSELEQMLKAQGRDQLIIGGIYGHIGCMMTACDAFMRDIQPFFLADGVADFSLADHQMALDYVATRCGKVILCAEVLAIAAAPKSEQQNPLLTYDGLKARLLSHIDEDEAEFDPDENLIDYGLDSVRIMSLLTEWRAAGVELGFVDLAKLPSLNGWWRLIEAKLAEQKTREVTP

SEQ ID NO: 92363 - protein, 312 aa, Aeromonas hydrophila
  misc_feature (1)..(312): tr|V9ZU69|V9ZU69_AERHY Isochorismatase OS=Aeromonas hyd rophila 4AK4 OX=1354302 GN=AH4AK4_1749 PE=4 SV=1
MAIPTLNNYAMPSQWKANKVDWILDPKRAALLIHDMQEYFTAFYGEHSPLIAALTERLAAVRKQCKALGIPVFYTAQPKDQSPEDRALLNDMWGPGLNKRPEQQQVVAALRPEPDDTVLVKWRYSAFQRSELEQMLKELGRDQLIIGGIYGHIGCMMTACDAFMRDIQPFFLADGVADFSLADHQMALDYVATRCGKVIPCEEVLALAPASASVAQSNSLSANPLLTNPLLTYEGLKARLLSHIDEDEGEFDPDENLIDYGLDSVRIMALLTEWRAAGVELGFVDLAKLPTLNGWWRLIEARLAVQALEVTP

SEQ ID NO: 92364 - protein, 302 aa, Aeromonas salmonicida
  misc_feature (1)..(302): tr|A0A449HTV9|A0A449HTV9_AERSA Isochorismatase OS=Aerom onas salmonicida OX=645 GN=entB_1 PE=4 SV=1
MAIPTLNNYAMPSQWKANKVNWTLNPKRAALLIHDMQEYFTAFYGENSPLIQALTERLAAVRKQCKALGIPVYYTAQPKDQSPEDRALLNDMWGPGLNKSPELQQVVAGLRPERDDTVLVKWRYSAFQRSELEQMLKDLGRDQLIIGGIYGHIGCMMTACDAFMRDIQPFFLADGIADFSLADHQMALDYVATRCGKVIPCEEVLALAPASTFAVQTNPLLTYEGLKARLLSHIDEDEGEFDPDENLIDYGLDSVRIMSLLTEWRAAGVELGFVDLAKLPTLNGWWRLIEAKLAAQALEVTP

SEQ ID NO: 92365 - protein, 177 aa, Agarivorans albus
  misc_feature (1)..(177): tr|R9PHB1|R9PHB1_AGAAL Isochorismatase OS=Agarivorans a lbus MKT 106 OX=1331007 GN=AALB_0854 PE=4 SV=1
MKSAVLVIDVQSILFDPEPQPFESQVVLNKINQVTSLARAKSVPVIFIQHEHANSVIEYGTEGWALQSSLVTQTGDHFVRKTTPDSFLNTNLEELLKELAVDSLIMCGYASEFCVDTTVRRAAGLGYPVVLVSDAHTTHDKEHASGAQIRAHHNATLANISSFGVKIEAIETAKLWP

SEQ ID NO: 92366 - protein, 289 aa, Agrobacterium deltaense
  misc_feature (1)..(289): tr|A0A1S7U4V9|A0A1S7U4V9_9RHIZ Isochorismatase OS=Agrob acterium deltaense NCPPB 1641 OX=1183425 GN=entB PE=4 S V=1
MTIPTISDYPMPVAASFPANKTKWQPDAKRAVLLIHDMQRYFLRFYEADGKLMTTLIDNLAKVKAWAVQNGVPVIYTAQPHNQPPGDRALLNDMWGPGLTVVDPELQKVVDKLAPTPDDVVLTKWRYSAFQRSDLAERMKGWGRDQIIVGGVYAHIGCMMTAVEAFMKDIQPFMIGDGVADFSEAEHRMALQYVATRCGVVIDTASLVGAGEATGTREWLKARVLQMVEDESDIDPDENLIFYGLDSLQVMKLAGELKERGVTVGFDELARVPTLSAWWALIDEKRLAA

SEQ ID NO: 92367 - protein, 229 aa, Agrobacterium fabrum
  misc_feature (1)..(229): tr|A0A1S7QWY1|A0A1S7QWY1_9RHIZ Putative Isochorismatase family protein OS=Agrobacterium fabrum str. J-07 OX=11 83433 GN=AGR8A_Lc20074 PE=4 SV=1
MSKLEVLTPANSQLIFIDQQPQMAFGVQSIDRQTLKNNVVGLAKAAKIFNIPTTITTVETESFSGNTFPELLAVFPENDILERTSMNSWDDQNVRDALAKNAATGRRKIVVSGLWTEVCNTTFALSALHDVADYEIYMVADASGGTSLDAHKYAMDRMVQAGVIPVTWQQVLLEWQRDWARKETYDAVTSLVKEHSGAYGMGIDYAVTHVHGGAERVKHGKRIGPNPAK

SEQ ID NO: 92368 - protein, 229 aa, Agrobacterium genomosp.
  misc_feature (1)..(229): tr|A0A1S7N8S9|A0A1S7N8S9_9RHIZ Putative Isochorismatase family protein OS=Agrobacterium genomosp. 1 str. S56 O X=1183429 GN=AGR1B_Lc50122 PE=4 SV=1
MSKLEVLTPANSQLIFIDQQPQMAFGVQSIDRQTLKNNVVGLAKAAKIFNVPTTITTVETESFSGNTFPELLAVYPQNDILERTSMNSWDDQNVRDALAKNAANGRKKIVVSGLWTEVCNTTFALSALHDVPEYEIYMVADASGGTSSDAHKYAMDRMVQAGVIPVTWQQVLLEWQRDWARKETYDAVTTLVKEHSGAYGMGIDYAVTHVHGGAERVSHGKRIGPNPAK

SEQ ID NO: 92369 - protein, 230 aa, Agrobacterium salinitolerans
  misc_feature (1)..(230): tr|A0A1S7U9Q1|A0A1S7U9Q1_9RHIZ Putative Isochorismatase family protein OS=Agrobacterium salinitolerans str. Ha yward 0363 OX=1183434 GN=AGR9A_Lc40533 PE=4 SV=1
MSKLEVLTPANSQLIFIDQQPQMAFGVQSIDRQTLKNNVVGLAKAAKIFNIPTTITTVETESFSGNTFPELLAVFPENDILERTSMNSWDDQNVRDALAKNAAAGRKKIVVSGLWTEVCNTTFALSALHDVADYEIYMVADASGGTSVDAHKYAMDRMVQAGVIPVTWQQVLLEWQRDWARKETYDAVTSLVKEHSGAYGMGIDYAVTHVHGGEERVKHGKRIGPNPAKK

SEQ ID NO: 92370 - protein, 229 aa, Agrobacterium sp.
  misc_feature (1)..(229): tr|A0A1S7SH86|A0A1S7SH86_9RHIZ Putative Isochorismatase family protein OS=Agrobacterium sp. NCPPB 925 OX=16316 29 GN=AGR6A_Lc90581 PE=4 SV=1
MSKLEVLTPANSQLIFIDQQPQMAFGVQSIDRQTLKNNVVGLAKAAKIFNIPTTITTVETESFSGNTFPELLAVFPENDILERTSMNSWDDQNVRNSLAKNAAGGCKKIVVSGLWTEVCNTTFALSALHDVADYEIYMVADASGGTSLDAHRYAMDRMVQAGVIPVTWQQVLLEWQRDWARKETYDAVTSLVKEHSGAYGMGIDYAVTHVHGGAERIKHGKRIGPNPAK

SEQ ID NO: 92371 - protein, 230 aa, Agrobacterium tumefaciens
  misc_feature (1)..(230): tr|A0A1S7QSD3|A0A1S7QSD3_RHIRD Putative Isochorismatase family protein OS=Agrobacterium tumefaciens str. CFBP 5621 OX=1183422 GN=AGR4B_Lc30208 PE=4 SV=1
MSKLEVLTPANSQLIFIDQQPQMAFGVQSIDRQTLKNNVVGLAKAAKIFNIPTTITTVETESFSGNTFPELLAVFPENDILERTSMNSWDDQNVRDALAKNAAGGRKKIVVSGLWTEVCNTTFALSALHDVADYEIYMVADASGGTSLDAHKYAMDRMVQAGIIPVTWQQVLLEWQRDWARKETYDAVTALVKEHSGAYGMGIDYAVTHVHGGEERVKHGKRIGPNPAKK

SEQ ID NO: 92372 - protein, 175 aa, Agrococcus casei
  misc_feature (1)..(175): tr|A0A1R4EZF2|A0A1R4EZF2_9MICO Isochorismatase OS=Agroc occus casei LMG 22410 OX=1255656 GN=CZ674_01785 PE=4 SV =1
MTTRHSGGERDNPVCEVNIEQLLARWRERSSSVVFVQHDSRNPESPLFPGSAGHAFKDALTGAPDLLVSKSVNSSFYGTPDLHAWLQHRGITQIAICGITTNHCCETTARMAGNLGYDVTFVIDATHTFGRAAPDGTVFTAQQLSAVTAANLHGEFATVQTTAEVLAKTPDSASL

SEQ ID NO: 92373 - protein, 204 aa, Alloactinosynnema sp.
  misc_feature (1)..(204): tr|A0A0H5CFM1|A0A0H5CFM1_9PSEU Isochorismatase OS=Alloa ctinosynnema sp. L-07 OX=1653480 PE=4 SV=1
MTVTLDPKTTAVVLIEYQNDFTSEGGVLHGAVAGVMAETGMLGNTVAVVDAARKAGVTIMHAPITFADGYTEISAHPYGILKGVVDGNAFVKGGWGAAIVDDLAPHDGDIVVEGKRGLDTFASTNLDFMLRSKGITTIVLGGFLTNCCVESTMRSGYENGYRVITLTDCVAATSQAEHDNALTYDYPMFSLPVTSDEVIAALQN

SEQ ID NO: 92374 - protein, 184 aa, Alphaproteobacteria bacterium
  misc_feature (1)..(184): tr|A0A2S6R457|A0A2S6R457_9PROT Isochorismatase OS=Alpha proteobacteria bacterium MarineAlpha10_Bin2 OX=2013104 GN=dhbB PE=4 SV=1
MLLDAQRSVLIVIDLQEKLVPAIDKGDDVVANAGKLLEGAGRLGVPVIVSEQYPKGLGLTVDDIASKLPNESKTIAKLTFSAARSEDFRRDLSALRGRGRDQMVICGTETHVCVLQTVADLLAEDLPVYLVTDASGSRAEPNRRAGVERMAGLGAQCVTSEMVLFEWLEAAGSDDFKELSKLIK

SEQ ID NO: 92375 - protein, 80 aa, Amycolatopsis sp.
  misc_feature (1)..(80): tr|A0A178XGX8|A0A178XGX8_9PSEU Isochorismatase OS=Amyco latopsis sp. M39 OX=1825094 GN=dhbB PE=4 SV=1
MSTPELTAEQVNADVAELLGCGLDELTPDTDLADLGLDSMRIMSLVEKWRGAGAAQLEFADLAEDPRLGHWTKLLTGGAQ

SEQ ID NO: 92376 - protein, 180 aa, Anaerostipes rhamnosivorans
  misc_feature (1)..(180): tr|A0A4V1EG80|A0A4V1EG80_9FIRM Isochorismatase OS=Anaer ostipes rhamnosivorans OX=1229621 GN=AR1Y2_1696 PE=4 SV =1
MLIIDVQNDYFENVKCRLHQPEAALKAIQRLLKYFRDMNYQVYYIQHIAAKDAPFFVPNTEGVKSSENIKPLDTEKIIKKHYPNSFFETELQAELKKSSVTELTVCGMMTHMCVDTTVRAAKDLGYQVTLISDACATKDLEWQGEKIPAEIEQNVFLASLNQKFATIMTVEDLASEDLLI

SEQ ID NO: 92377 - protein, 180 aa, Anaerotignum neopropionicum
  misc_feature (1)..(180): tr|A0A136WEY3|A0A136WEY3_9FIRM Vibriobactin-specific is ochorismatase OS=Anaerotignum neopropionicum OX=36847 G N=vibB PE=4 SV=1
MRICADDTAAVVIDFQEKLVPVISGKEEILRKSAILVQGLAEVGVPFVVSQQYTKGLGETVEELTGVIDSFHYMEKNTFSCFECEEIADWVKAQGKRTILVCGVEAHICVLQTVIDLLGADYRVFVVADCVGSRNPYDKEIGLERMRVEGAILTTCEAALFELTGGAKSPYFKAISKLVK

SEQ ID NO: 92378 - protein, 180 aa, Anaerotignum propionicum
  misc_feature (1)..(180): tr|A0A0X8V9P3|A0A0X8V9P3_ANAPI Vibriobactin-specific is ochorismatase OS=Anaerotignum propionicum DSM 1682 OX=9 91789 GN=vibB PE=4 SV=1
MRIYAEDTAALFIDFQEKLVPVINQNAEIVKKAVMLAQGLTEIGVPFAVSQQYTKGLGETVPEFSGAIESLQYMEKHTFSCFECEEIANWVKAQQKKTILICGVEAHICVLQTVLDLLDDGYRVFVVADCVGSRNPYDKEIGLERMKAEGAILTTCEAALFELTGGAKSPHFKVISKLVK

SEQ ID NO: 92379 - protein, 169 aa, Anoxybacillus flavithermus
  misc_feature (1)..(169): tr|A0A150LKG6|A0A150LKG6_9BACI Isochorismatase OS=Anoxy bacillus flavithermus OX=33934 GN=B4168_3633 PE=4 SV=1
MEGHGRDQLIICGVYAHIGCLLTASDAFMQDIQVFFVADAVADFSLEHHKMALHYAASRCAFITPTQHLIEALKKEPVPDCQNILPMSLHDVRNQVAELIQESPADLSDHENLVNRGLDSIRMMSLVEKWRRAGAEVTFAALAARPTLFAWWNLLSSQSEKVLSAQDSQ

SEQ ID NO: 92380 - protein, 300 aa, Anoxybacillus sp.
  misc_feature (1)..(300): tr|A0A160F9R7|A0A160F9R7_9BACI Isochorismatase OS=Anoxy bacillus sp. B7M1 OX=1490057 GN=dhbB PE=4 SV=1
MGIPAIPAYPMPLLSELPKNKVLWTLDPKRAVLLIHDMQNYFLDAFTPNASPLVELVSHIQQIKQECKKLGVPVVYSAQPGGQVPEERGLLQDFWGKGMADDPYQKGIIDDLAPDADDIVLTKWRYSAFKKTNLSEILKEQGRDQLIICGVYAHIGCLLTASDAFMQDIQVFFVADAVADFSREQHQMAIQYAASRCAFTMSTQQLLGVLKRAQNPLPLSLEDVRRQVAELLQEEAADLSDQENLIDRGLDSIRIMSLVEKWRRAGAEVTFADLAARPTLSDWWNLLYFPREKVLSHQDS

SEQ ID NO: 92381 - protein, 219 aa, Aquimixticola soesokkakensis
  misc_feature (1)..(219): tr|A0A1Y5T6R9|A0A1Y5T6R9_9RHOB Isochorismatase OS=Aquim ixticola soesokkakensis OX=1519096 GN=dhbB_1 PE=4 SV=1
MALPSIPDYALPTDLPAPRASFTLETDRAALLIHDMQRYFCAAFGPDALSRAGSTLARVTQNIAALAQAARAAGVPVFYTAQKGNQLLADRGLQADLWGKGMNAIPEHEDIIAALAPQPGDIQLVKHRYSAFQRSNLAELMRARGRDQLIVTGIYAHIGCLATVCEAFQRDIEPFFVADALADFSREKHDMALAWVAACAGVPMASDAVRTTLGDAACN

SEQ ID NO: 92382 - protein, 212 aa, Aquisphaera giovannonii
  misc_feature (1)..(212): tr|A0A5B9VUE3|A0A5B9VUE3_9BACT Isochorismatase OS=Aquis phaera giovannonii OX=406548 GN=dhbB PE=4 SV=1
MSTKPSPRGDAASFRGRNEDLHGNAPDKSRTALLLIDVINDLEFPEGDQLLEHALPMADRIVELKRRAKAAGVPAVYVNDNFGRWQSNFQAQVEHCLRDGVRGRPIVERLVPEEDDYFVLKPKHSGFFSTTLDILLEYLGATSLILTGVAGNICVLFTANEAYMRDFTLFVPGDCVASNTADVNRYALDQMREVLKADTRPAAELDLAALAG

SEQ ID NO: 92383 - protein, 174 aa, Aquitalea magnusonii
  misc_feature (1)..(174): tr|A0A3G9GH79|A0A3G9GH79_9NEIS Isochorismatase OS=Aquit alea magnusonii OX=332411 GN=DLM_3634 PE=4 SV=1
MPGTALLIVDMQCGVVAAQPAAVRLEQVLDSLQLAIAKARQRGFPVIFVQHEEAGLERSSAAWQLHPALPATAADHFIGKRHGDSFCDTELAGLLQSLEVSRLWLGGCATDFCVDSTLRNAVSRGFQVTVIRDGHTTLPAFALSGEQVIDHFNAVWQATKATPQPLRVQAATAL

SEQ ID NO: 92384 - protein, 217 aa, Archaeon sp.
  misc_feature (1)..(217): tr|A0A0B3AG19|A0A0B3AG19_ARCGX Isochorismatase hydrolas e OS=Archaeon GW2011_AR5 OX=1579367 GN=QT00_C0002G0133 PE=4 SV=1
MKLNPKYLDPKKTAVIVVDLQNDFCHEISVLHRKRSRNKACALRVYKFIEEAGKAGVEVLFAQQIHDPRKLTWRQKKYYERVASGEREFGAYKGKLKIPCAMGTFGAEYFDYKPPKNKLFVKSGFDIWQNEQFKEFLDKHKIETLIITGVELTCCILYAVLGAEERGFNIVVPKDLVSGVDEGKRSQDNLLKIIGEMYAPVVNSEQILKIWTQKSGV

SEQ ID NO: 92385 - protein, 170 aa, Unknown
  misc_feature (1)..(170): tr|A0A4Y3FQF6|A0A4Y3FQF6_9ARCH Isochorismatase OS=archa eon OX=1906665 GN=IPdc08_01914 PE=4 SV=1
MRTLLVIDMLRDFIYKDCVLPANGAKKLIPQINYKIIEFRERNEPIIFICDSHDEMDEEFDMWGRHAVEGTEGAEIIDELNRREYDIVVTKKRFSAFYNTDLEKILKGLNVDTLVITGVVTDICILHTAADATMRGFKVIVPENCVATVDEEKQKWGLRHIKEVLGGRID

SEQ ID NO: 92386 - protein, 185 aa, Arcobacter butzleri
  misc_feature (1)..(185): tr|E6L1N2|E6L1N2_9PROT Isochorismatase transposase OS=A rcobacter butzleri JV22 OX=888827 GN=entB2 PE=4 SV=1
MKQTALLLVDFQNDYFSTFEGAKFELEGTEKASSNASKILEFFRKSEGKIIHIKHESAKGALFFEIETQGANIHKSVEPKEDEIVVTKNFPNSFKDTNLKEILDEINIKSLIIVGAMSHMCIDATTRAAKDFGYECTVISDATATRDLQFGDIVVPSKYVHASFMAALEFAYAKIKTTTEILKGF

SEQ ID NO: 92387 - protein, 196 aa, Asaia platycodi
  misc_feature (1)..(196): tr|A0A060QBZ5|A0A060QBZ5_9PROT Isochorismatase OS=Asaia platycodi SF2.1 OX=1382230 GN=ASAP_0128 PE=4 SV=1
MSQTALVLIEFQNDFVSEGGALHDGVKAEIARTGMIDRTIALVNAARAKGVKIVWVPIEFAKGYPELASAPYGILAGVKATQAFQKGEWGARIIDALSPEGDDIVISGKRGLCSFASTNLDFVLRHNGITRVALGGFLTDCCVESTMRTAYELGYDVVTLTDCTATLSQAQHEAAIQYTYPMFSRPMTSEAFLATL

SEQ ID NO: 92388 - protein, 206 aa, Aspergillus niger
  misc_feature (1)..(206): tr|A2QYZ0|A2QYZ0_ASPNC Aspergillus niger contig An12c00 80, genomic contig OS=Aspergillus niger (strain CBS 513 .88 / FGSC A1513) OX=425011 GN=An12g03010 PE=4 SV=1
MATNGSINFGKNYAVLNLDWITVLIDAVEDTPEGQALIANYTKWNDAVHASSSRPLTVFSTLSFYPGQPEVQSGSPFANLIAPFGEFRHGSPETQIHKAFNVDSQDNVLPKTRWSATTGSVLEQILQAHGVKTVVISGVTLSGVVMATIYRLFDLDYNVYVIRENVLELPIEQHSAFASVMLDMLLPKMGIKVISVDEAINAVNSS

SEQ ID NO: 92389 - protein, 283 aa, Atlantibacter hermannii
  misc_feature (1)..(283): tr|A0A447LRS7|A0A447LRS7_ATLHE Isochorismatase OS=Atlan tibacter hermannii OX=565 GN=entB PE=4 SV=1
MAIPGLNAYTLPVAADIPDNKVQWDFEPTRAALLIHDMQDYFINFWGEACPMMAQVIANIAALRRYCKQQGIPVYYTAQPQNQSPEDRALLNDMWGPGLNNYPEQQKVVAQLTPDHDDTVLVKWRYSAFHRSPLEQALKASGRDQLLICGVYAHIGCMITATDAFMRDIQPFMVADALADFSREEHLMALKYVAGRAGRVVMTADLLPTPQSKAQLRALILPLLDETDEPEDDENLIDYGLDSVRMMALASRWRQVHPDIDFVMLAKKPTIDAWWALLSRDAR

SEQ ID NO: 92390 - protein, 223 aa, Azospirillum brasilense
  misc_feature (1)..(223): tr|G8AS63|G8AS63_AZOBR Putative Isochorismatase family protein OS=Azospirillum brasilense Sp245 OX=1064539 GN= AZOBR_p170030 PE=4 SV=1
MTITATATPGKLLVSPKDHALIMIDHQSQMAFATHSIDATTLRTNTALVAHAAAGFGVSTILTTVAEKSFSGPIFSEITEAFPGAEVTDRTSMNTWEDANVIKRVNGLGKTRLVFCGLWTSVCIVGPTLSALDQGFEVYVIADACGDVSVEAHQRAMDRMVQAGVRPMTSLQYMLELQRDWARTETYEMTTGIAKKYGGAYGLGIIYAKTMFGASEGGHSAAA

SEQ ID NO: 92391 - protein, 228 aa, Azospirillum lipoferum
  misc_feature (1)..(228): tr|G7ZDS6|G7ZDS6_AZOL4 Putative hydrolase, isochorismat ase family protein OS=Azospirillum lipoferum (strain 4B ) OX=862719 GN=ycaC PE=4 SV=1
MTFPAKSLINADDTVFLFIDHQPQMSFGVVNIDRQQLKNNTIALAKTAKLFGAPTILTAVETESFSGYIWPELMDVLKQDPIERTSMNSWDSEELVAAIKATGKKKLVIAALWTEACLLFPTLCAIEEGFEVYIVTDASGGTSQESHDAAIRRMEQAGAHSITSVNVLLELQRDWAKRGTYDGVMAIVREHFGAYGMGVDYAYTMVHKAPQRGEYPHKVIGAATHEHA

SEQ ID NO: 92392 - protein, 302 aa, Bacillus altitudinis
  misc_feature (1)..(302): tr|A0A5K1N8D0|A0A5K1N8D0_9BACI Isochorismatase OS=Bacil lus altitudinis OX=293387 GN=B4133_3883 PE=4 SV=1
MAIPTIPAYPMPSIHDLPENKVNWIPDPKRAVLLIHDMQQYFLNAFQQDTSPITELVQHIEQLRDTCKELGIPVVYTAQPGDQDPKDRALLTDFWGPGLGDDEALTKIIDQLAPSESDTMLTKWRYSAFKKSNFLDLLHEGGRDQLIITGVYAHIGCMLTAAEAFMLDIETFFVADAVADFSLKHHKMAMTYAAERCAVTTTTNQIIRRLTGQDADGDDLSFDAIVHQVAEYLQIEPNEIPLDENLVYLGLDSIRMMSLAEKWRQQGATVNFVELAAHPTLTHWRALLFPEKQPSIPNIDYL

SEQ ID NO: 92393 - protein, 103 aa, Bacillus amyloliquefaciens
  misc_feature (1)..(103): tr|I2CB40|I2CB40_BACAM Isochorismatase OS=Bacillus amyl oliquefaciens Y2 OX=1126211 GN=ywoC PE=4 SV=1
MPDIGVKENDYTVTKRQWGAFFGTDLDLQLRRRGIDTIVLCGIATNIGVESTAREAFQLGYQQVFVTDAMATFSDEQHEATLKFIFPKIGRSRTTEEFIAQTK

SEQ ID NO: 92394 - protein, 295 aa, Bacillus anthracis
  misc_feature (1)..(295): tr|A0A0F7RI26|A0A0F7RI26_BACAN Isochorismatase OS=Bacil lus anthracis OX=1392 GN=dhbB PE=4 SV=1
MAIPSISVYKMPIESELPKNKVNWTPDPKRAVLLIHDMQEYFLDAYSDKESPKVELISNIKVIREKCKELGIPVVYTAQPGGQTLEQRGLLQDFWGDGIPAGPDKKKIVDELTPDEDDIFLTKWRYSAFKKTNLLEILNEQGRDQLIICGIYAHIGCLLTACEAFMDGIQPFFVADAVADFSLEHHKQALEYASNRCAVTTSTNSLLTELQGLKDDDEITLQKVHELVAQLLREPVESVGTDEDLLNRGLDSVRIMSLVEKWRREGKEITFADLAENPTVVDWYRLLSPQTEHVL

SEQ ID NO: 92395 - protein, 311 aa, Bacillus atrophaeus
  misc_feature (1)..(311): tr|A0A080UG79|A0A080UG79_BACAT Isochorismatase OS=Bacil lus atrophaeus OX=1452 GN=dhbB PE=4 SV=1
MAIPAISSYPMPSASDLPNNKVTWEPDPKRSVLLIHDMQNYFVDAFTAGTSPVVELVDNIRKLKSQCAELGIPVIYTAQPGAQAPEDRALLTDFWGPGLNDGPYEQEIVDELAPDDHDTVLTKWRYSAFKKTNLLDILRGKNRDQLIICGIYANIGCLLTACDAFMQDVEPFFVGDAVADFSLEQHRMSLEYAAGRCAVTISTLDLLEKLKTAPKSVSEPSSGSSSQLLTQQAVRQQIAELLQESPADIADTDDLIDRGLDSVRIMSLVEQWRRAGAEVTFVELAENPTLENWWRLLSSRSQKVLPNADYL

SEQ ID NO: 92396 - protein, 221 aa, Bacillus beveridgei
  misc_feature (1)..(221): tr|A0A1D7QWX2|A0A1D7QWX2_9BACI Isochorismatase OS=Bacil lus beveridgei OX=632773 GN=rutB PE=4 SV=1
MTTKVLVLIDLQKESNFGLFNLDRVISNSQKLIAACREQGIPIIYTRQINRMDGIGLSKGEPLKADGTPLYYADHTDQIEIIDDLKPHEGDIVIDKYRWSAFYETSLDVMLKSYGAEEVIMGGVVTDGCLMTSVFDAYFRDYEVHLVSDMVTASNRGAHQSAMLTMANWVYNLNIYRTDEMIKRLNGQPFERWRHEKTDDYQFTEGTLNQEFKRLTGDDLI

SEQ ID NO: 92397 - protein, 297 aa, Bacillus cereus
  misc_feature (1)..(297): tr|A0A158RTW8|A0A158RTW8_BACC3 Isochorismatase OS=Bacil lus cereus (strain 03BB102) OX=572264 GN=bacB PE=4 SV=1
MAIPSISVYKMPIESELPKNKVNWTPDPKRAVLLIHDMQEYFLDAYSDKESPKVELISNIKVIREKCKELGIPVVYTAQPGGQTLEQRGLLQDFWGDGIPAGPDKKKIVDELSPNDDDIFLTKWRYSAFKKTNLLEILNEQGRDQLIICGIYAHIGCLLTACEAFMDGIEPFFVADAVADFSLGHHKQALEYASSRCAVTTSTHLLLKDLQSVKGDKSEGITLQEVHELVAQLLREPVESIETDEDLLNRGLDSVRIMSLVEKWRREGKEITFADLAENPTVVDWYRLLSPQTEHVL

SEQ ID NO: 92398 - protein, 185 aa, Bacillus clausii
  misc_feature (1)..(185): tr|Q5WJE7|Q5WJE7_BACSK Isochorismatase OS=Bacillus clau sii (strain KSM-K16) OX=66692 GN=ABC0969 PE=4 SV=1
MKERCALLIIDMINPFDFDDADKLLPDAKNCAKAIANLKAILRAKEWPIIYVNDNYGDWQSEFTQVYNHIVNNRLPGAPIAKLLAPDTEDYSVLKPQFSGFFASPLDMLLRELNIQTLILTGVVGNMCVEFTANDAYMRDYQLLIPKDGFACFTEEEYDASLNHFTTVLKADVSSSKELQKRLNR

SEQ ID NO: 92399 - protein, 189 aa, Bacillus coagulans
  misc_feature (1)..(189): tr|A0A150K875|A0A150K875_BACCO Isochorismatase OS=Bacil lus coagulans OX=1398 GN=B4100_1166 PE=4 SV=1
MQNQSSKAALLVLDMQNGMVSRFAGNEAMLRPNQKAIESARAHHIPVIFVRLGFSKGYPEINQGHPTYARVAGYGDMTIFDEATQIHPSVQPLENEPVVTKYRVSAFSGSNLEMILKAQEIDTLILSGITTSGVVLSTLREAADKDYSLIVLRDACHDGNPDIHHMLMEKLFPVQAKVMTVSTWAGTLD

SEQ ID NO: 92400 - protein, 297 aa, Bacillus cytotoxicus
  misc_feature (1)..(297): tr|A7GPJ9|A7GPJ9_BACCN Isochorismatase OS=Bacillus cyto toxicus (strain DSM 22905 / CIP 110041 / 391-98 / NVH 3 91-98) OX=315749 GN=Bcer98_1757 PE=4 SV=1
MAIPAISIYKMPTESDLPMNKVTWKLDPKRAALLIHDMQEYFLDAYCDEESPKVELISNIQRIRQTCKGLHVPVIYTAQPGGQTLEQRGLLQDFWGAGIPEGPYKQKIVDELAPDDHDIFLTKWRYSAFKKTNLLEILHEQGRDQLIICGVYAHIGCLLTACEAFMDGIQPFFIADAVADFSFDHHRQAMQYASDRCAVTTTTNAVLTDFQRLKEESESAITLQMIREQVAQLLRESPADIANDENLLNRGLDSVRLMSLVEKWRQIGVEVTFADLAEHPTISDWFRMIASQKERVL

SEQ ID NO: 92401 - protein, 178 aa, Bacillus endophyticus
  misc_feature (1)..(178): tr|A0A3N6C9S4|A0A3N6C9S4_9BACI Isochorismatase OS=Bacil lus endophyticus OX=135735 GN=FH5_02401 PE=4 SV=1
MSKKTALLLLDVQNIMFSYEGGALWNEQQVLRNISFLLTKARQSNTTIIHIQHTDPSSNSMLSKGEFTWEIHRDVRPLPTEIIVQKSSWDAFYQTTLHNKLQEFGIRNLVIAGMQTEFCLDTTCRRAYSLGYKENILVKDAHSTFDTDVLSADKIVEHHNNILGGRFVTLKESREIMF

SEQ ID NO: 92402 - protein, 308 aa, Bacillus glycinifermentans
  misc_feature (1)..(308): tr|A0A1C3SKS6|A0A1C3SKS6_9BACI Isochorismatase OS=Bacil lus glycinifermentans OX=1664069 GN=dhbB PE=4 SV=1
MAIPAISPYKMPKASDLPKNKVSWTPHPKRAALLIHDMQQYFIDAYTRGESPMTELLPNINMLKERCKELGIPVIYTAQPGGQTPEERGLLQDFWGPGIPPGPDQQKIVEELKPDEGDTVLTKWRYNAFRKTDLLRLLQEQGRDQLIITGVYAHIGCLMTACDAFMQEIETFFVADAVADFSLQHHEMAISYAADRCAVTVTAEHLLNELKNGRNDDGVQEGRELLSKQTIREQIAALLLESPDDITDGENLIHRGLDSVRMMSLTERWRRAGAEVTFVELAEEPTIENWWRLLSSPKEPSLPNSDYQ

SEQ ID NO: 92403 - protein, 180 aa, Bacillus licheniformis
  misc_feature (1)..(180): tr|A0A447SA46|A0A447SA46_BACLI Isochorismatase hydrolas e OS=Bacillus licheniformis OX=1402 GN=yaaI PE=4 SV=1
MSNSALIIVDIINDFQFDMGDVLSKKTRNMTEHLLALKEHAAKKKWPIIYINDHFGIWQADIAAIIKKCKNDRSEYIIDRLAPNNNDYFLIKPKHSAFYGTALETLLNELHVDHLIITGIAGNICVLFTANDAYMREYDITIPHDCIASNNEKDNKYALTMMENVLFANITTAKEITAET

SEQ ID NO: 92404 - protein, 297 aa, Bacillus mycoides
  misc_feature (1)..(297): tr|A9VF23|A9VF23_BACMK Isochorismatase OS=Bacillus myco ides (strain KBAB4) OX=315730 GN=BcerKBAB4_2178 PE=4 SV =1
MAIPSISVYKMPIESELPKNKVNWTPNPKRAVLLIHDMQEYFLDAYSDTESPKVELISNIKVIRERCKELGIPVVYTAQPGGQTLEQRGLLQDFWGDGIPAGPDKKKIVDELTPDEDDIFLTKWRYSAFKKTNLLEILNEQGRDQLIICGIYAHIGCLLTACEAFMDGIQPFFVADAVADFSLEHHKQALQYASNRCAVTTSTNLLLKDLQSLKGDESEGITLQEVHELVAQLLRESVESIEVDEDLLNRGLDSVRIMSLVEKWRREGKGITFADLAERPTVDDWYRLLSSQAAQVL

SEQ ID NO: 92405 - protein, 295 aa, Bacillus paranthracis
  misc_feature (1)..(295): tr|A0A1J9Y0E2|A0A1J9Y0E2_9BACI Isochorismatase OS=Bacil lus paranthracis OX=2026186 GN=dhbB PE=4 SV=1
MAIPSISVYKMPIESELPKNKVDWKPDPKRAVLLIHDMQEYFLDAYSDKESPKVELISNIKVIREKCKELGIPVVYTAQPGGQTLEQRGLLQDFWGDGIPAGPDKKKIVDELTPDEDDIFLTKWRYSAFKKTNLLEILNEQGRDQLIICGIYAHIGCLLTACEAFMDGIQPFFVADAVADFSLEHHKQALEYASNRCAVTTSTNSLLTELQGLKDDDEITLQKVHELVAQLLREPVESVGTDEDLLNRGLDSVRIMSLVEKWRREGKEITFADLAENPTVVDWHRLLSLQTERVL

SEQ ID NO: 92406 - protein, 302 aa, Bacillus pumilus
  misc_feature (1)..(302): tr|A0A498U5T4|A0A498U5T4_BACPU Isochorismatase OS=Bacil lus pumilus OX=1408 GN=dhbB PE=4 SV=1
MAIPTIPAYPMPSTQDLPENKVNWIPDPKRAVLLIHDMQQYFLNAFQQDTSPITELVQHIEQLRDTCNELGIPVVYTAQPGDQDPKDRALLTDFWGPGLGDDEALTKIIDQLAPSEADTMLTKWRYSAFKKSNFLDILQEGGRDQLIITGVYAHIGCMLTAAEAFMLDIETFFVADAVADFSLKHHKMAMTYAAERCAVTTTTNQIISRLTGQEANSDDLSFEAIVHQVAEYLQIEPNEIPLDENLVYLGLDSIRMMSLAEKWRQQGATVNFVELAANPTLAHWRTLLFPEKQPSIPNIDYL

SEQ ID NO: 92407 - protein, 302 aa, Bacillus safensis
  misc_feature (1)..(302): tr|A0A5C0WGQ4|A0A5C0WGQ4_9BACI Isochorismatase OS=Bacil lus safensis OX=561879 GN=dhbB PE=4 SV=1
MAIPTIPAYTMPSTQDLPKNKVNWIPDPKRAVLLIHDMQQYFLNAFQQDTSPITELVQHIEQLRNTCNELGIPVVYTAQPGDQDPKDRALLTDFWGPGLGDDEALTKIIDQLAPSEADTMLTKWRYSAFKKSNFLDILQEGGRDQLIITGVYAHIGCMLTAAEAFMLDIETFFVADAVADFSLKHHKMAMTYAAERCAVTTTTNQIISHLTGQEANSDDLSFEAIVHQVAEYLQMEPNEIPLDENLVYLGLDSIRMMSLAEKWRQQGATVNFVELAANPTLTHWRTLLFPEKQPSIPNIDYL

SEQ ID NO: 92408 - protein, 190 aa, Bacillus selenatarsenatis
  misc_feature (1)..(190): tr|A0A0A8X616|A0A0A8X616_9BACI Isochorismatase OS=Bacil lus selenatarsenatis SF-1 OX=1321606 GN=SAMD00020551_28 77 PE=4 SV=1
MNNLLELPGLLILDVQKGFDDSYWGTRNNPEAEGNMARLLTEWRNRKGHVIYTKHLSLDPASPLHHRNKLGTEFKEIIQPMDGEIVFTKNVNSGFIGTELEAYLKQKQIKSVVITGLSTQHCVSTTTRMSGNLGFNTFLVSDAIAAFEITDHKGVRHTAASIQENELAMLQKEFATIITTNEIISQFKQQ

SEQ ID NO: 92409 - protein, 174 aa, Bacillus smithii
  misc_feature (1)..(174): tr|A0A0H4NZM1|A0A0H4NZM1_9BACI Isochorismatase OS=Bacil lus smithii OX=1479 GN=BSM4216_2023 PE=4 SV=1
MKQALIVIDVQEIFFKLPQNLLYNSVQLVNNISRLIDQAHEKNTPVIFIQHTSQDERDDLFEGKDTWKLHENLNIRHTDKIIQKTTWDSFYQTELLDYLKDNEIEQLIFAGAQTEFCMDTTIRAAFSLGFQNNLLFKNTHSTVNNAILDAHTIIKHHENIWNNRFLTIVEWDKE

SEQ ID NO: 92410 - protein, 295 aa, Bacillus sp.
  misc_feature (1)..(295): tr|A0A4Y7QTA1|A0A4Y7QTA1_9BACI Isochorismatase OS=Bacil lus sp. BH2 OX=2528958 GN=dhbB PE=4 SV=1
MAIPSISVYKMPIESELPKNKVNWTPDPKRAVLLIHDMQEYFLDAYSDKESPKVELISNIKMIREKCNNLGIPVVYTAQPGGQTLEQRGLLQDFWGDGIPAGPDKKKIVDELTPNEDDIFLTKWRYSAFKKTNLLEILNEQGRDQLIICGIYAHIGCLLTACEAFMDGIQPFFVADAVADFSLEHHKQALEYASNRCAVTTSTNSLLTELQGLKDDDEITLQKVHELVAQLLREPVESVGTDEDLLNRGLDSVRIMSLVEKWRREGKEITFADLAENPTVVDWYRLLSLQTEHVL

SEQ ID NO: 92411 - protein, 185 aa, Bacillus sporothermodurans
  misc_feature (1)..(185): tr|A0A150LGY0|A0A150LGY0_9BACI Isochorismatase OS=Bacil lus sporothermodurans OX=46224 GN=B4102_0176 PE=4 SV=1
MNQTLLIIDAQQQLIDGNENESAVFNKEQLISNINLVIEKARESNVPVVFIRDIDVAEGKGEGFQVHNAINVPSDSKIFDKAATNCFHGTGLLSHLRSQAIEHIVIMGCATQHCIDSAVRTATITGFDVTLVGDGHSTTDNDSLSAEQILKHHNRTLHGHYNVEHFSMVRNAEEDLFHPTHDSYR

SEQ ID NO: 92412 - protein, 312 aa, Bacillus subtilis
  misc_feature (1)..(312): sp|P45743|DHBB_BACSU Isochorismatase OS=Bacillus subtil is (strain 168) OX=224308 GN=dhbB PE=1 SV=1
MAIPAIQPYQMPTASDMPQNKVSWVPDPNRAVLLIHDMQNYFVDAFTAGASPVTELSANIRKLKNQCVQLGIPVVYTAQPGSQNPDDRALLTDFWGPGLNSGPYEEKIITELAPEDDDLVLTKWRYSAFKRTNLLEMMRKEGRDQLIITGIYAHIGCLVTACEAFMEDIKAFFVGDAVADFSLEKHQMALEYAAGRCAFTVMTDSLLDQLQNAPADVQKTSANTGKKNVFTCENIRKQIAELLQETPEDITDQEDLLDRGLDSVRIMTLVEQWRREGAEVTFVELAERPTIEEWQKLLTTRSQQVLPNADYL

SEQ ID NO: 92413 - protein, 311 aa, Bacillus tequilensis
  misc_feature (1)..(311): tr|A0A2X0X1M7|A0A2X0X1M7_9BACI Isochorismatase OS=Bacil lus tequilensis OX=227866 GN=dhbB PE=4 SV=1
MAIPAIQPYQMPTASDMPQNKVSWVPDPNRAVLLIHDMQNYFVDAFTAGASPVTELSANIRTLKDQCAQLGIPVVYTAQPGSQNPADRALLTDFWGPGLNSGPYEEKIITELAPDDDDLVLTKWRYSAFKRTNLLEMMRKEGRDQLIISGIYAHIGCLVTACEAFMEDIEAFFVGDAVADFSLEKHQMALDYAAGRCAFTVMTDSLLDQLKNAPADTPKTSANTGKEVFTYEKIRKQIVELLQETPEDITDQEDLLERGLDSVRIMTLVEQWRREGAEVTFVELAERPTIEDWQKLLTTRSRQVLPNADYL

SEQ ID NO: 92414 - protein, 197 aa, Bacillus thuringiensis
  misc_feature (1)..(197): tr|A0R910|A0R910_BACAH Isochorismatase OS=Bacillus thur ingiensis (strain Al Hakam) OX=412694 GN=BALH_0302 PE=4 SV=1
MNMKLEEDKYMKTALLLVDIQNDYFPHGKMELRNPAEASAYASQLLQLFRKKNEPIFHIQHISIKEDATFFLPNTEGVHIHESVRPLREESVILKHYPNSFRETDLLKQLQRLAIEHVVICGMMTHMCIDATVRAAFDFGLQCTVIHDACATKDLSFKNATIPAVYIHNTILASLNGVYANVMSTEEFLATKKHSLQ

SEQ ID NO: 92415 - protein, 308 aa, Bacillus velezensis
  misc_feature (1)..(308): tr|S6FP83|S6FP83_9BACI Isochorismatase OS=Bacillus vele zensis UCMB5033 OX=1338518 GN=dhbB PE=4 SV=1
MAIPSIPAYALPTASDMPENKVSWTLNPKRAVLLIHDMQNYFVDAFAKGEAPITEASQNIKKIKEQCKALGIPVVYTAQPGSQDPADRALLTDFWGPGLKSGPYEEKVIPELAPDDQDIVLTKWRYSAFKRTNLLEIMHESGRDQLMITGIYAHIGCLVTACEAFMDDIQSFFIGDAVADFSSEKHKMAIEYASQRCAYTALTNEVLELLGGAPVSGGEEKVSAVLTKDRVREQIAAILQESPSDIPDHEDLLDRGLDSVRIMSLVEQWRRDGAEVTFVELAENPTLEEWWRLLSSRSQKVLPNADYL

SEQ ID NO: 92416 - protein, 297 aa, Bacillus wiedmannii
  misc_feature (1)..(297): tr|A0A0G8BYV4|A0A0G8BYV4_9BACI Isochorismatase OS=Bacil lus wiedmannii OX=1890302 GN=B4147_1999 PE=4 SV=1
MAIPSISVYKMPVESELPKNKVNWIPDPKRAVLLIHDMQEYFLDAYSDKESPKVELISNIKVIREKCKELGIPVVYTAQPGGQTLEQRGLLQDFWGDGIPAGPDKKKIVGELTPDEDDIFLTKWRYSAFKKTNLLEILNEQGRDQLIICGIYAHIGCLLTACEAFMDGIEPFFVADAVADFSLDHHKQALEYASNRCAVTTSTNLLLKDLQSVKSDESEGITLQEVHELVAQLLREPVESIDIDEDLLNRGLDSVRIMSLVEKWRREGKEITFADLAERPTVSDWYSLLSSQTAQVL

SEQ ID NO: 92417 - protein, 189 aa, Unknown
  misc_feature (1)..(189): tr|A0A1V6ACL8|A0A1V6ACL8_9BACT Putative isochorismatase OS=bacterium ADurb.Bin157 OX=1866935 GN=phzD PE=4 SV=1
MRHSDILTRDGSVLLICDVQKKCIKPIYKKEAMINNIKSLVSFAGLTGLPVLLTELSPQRFGTTIDEIKGLVPRLEPIKRTKYSCFGNEELTLRLESMNTNRLIVLGMETHISICPTVLDAITRGYSVHVVLNATSAARKVNWKVAIEKMRRAGAVITTADIVMHELMGGTDHPKYEQCLELTKKISDL

SEQ ID NO: 92418 - protein, 186 aa, Unknown
  misc_feature (1)..(186): tr|A0A1V5V2T9|A0A1V5V2T9_9BACT Isochorismatase OS=bacte rium ADurb.Bin236 OX=1866925 GN=entB PE=4 SV=1
MEKDAYGRITKEDSVLLIIDVQEKFVPHIRNIDEVIANCARMASGCRALGVPVIVTEQYPEGLGRTVPEVQEAIGDTAIMEKTAFSVFADPAISSEIEKLGRPNLMLAGVEAHVCLIKTALDALAAGYSVHWIDDAISSRTKGNVRAARDRACRCGAFPSSAEMALFQLISSSKDEHFRAISKLVK

SEQ ID NO: 92419 - protein, 216 aa, Unknown
  misc_feature (1)..(216): tr|A0A1V5P5G3|A0A1V5P5G3_9BACT Isochorismatase OS=bacte rium ADurb.Bin363 OX=1866927 GN=entB PE=4 SV=1
MYRDKLTEWMKEVKIFHRNPGKVEPSRTALLIIDMENYFASPDGNSYLSDTKFILPSIKKLLHYFREKKLPVIYTAHQHIDPKIDGGLLSTWWGSFIEEGTYHAKIYEELTPLPEERIIKKRRYNAFYQTELELVLRGMDIKNLVITGVMTNLCCETTAREAFQRDFMVFFIADGNCTANDEMHISSLKNLAFGFAHVLTAEDMLKLIKNYDKKNN

SEQ ID NO: 92420 - protein, 188 aa, Unknown
  misc_feature (1)..(188): tr|A0A1V5NH85|A0A1V5NH85_9BACT Vibriobactin-specific is ochorismatase OS=bacterium ADurb.Bin374 OX=1866937 GN=v ibB PE=4 SV=1
MRHPDILTREGAVLLITDVQKKCIKPIYRKEPMINNIKTLVSYAGMIGLPILLTELAPQTFGGTIEEIKKLMPRLEPIKRSRYSAFGSEDLTLRLEAMNTNTLVVVGMETHVSVCQTVLDALTRGFRVHVVLDASSSRRKVDWKVSLEKMRRAGAIVTTMELVMHEMIERVDVPQFDKFQELLSNIGR

SEQ ID NO: 92421 - protein, 189 aa, Unknown
  misc_feature (1)..(189): tr|A0A2H6EJ49|A0A2H6EJ49_9BACT Putative isochorismatase OS=bacterium BMS3Abin04 OX=2005712 GN=phzD PE=4 SV=1
MSDNIRRNPKILNSKKSALLVIDIQERILTVERKKERVIENTIKLIQGCKVLNVPIYFTEQYPKGLGPTHPDIKNELEAVEAIQKMSFSCYGAGDLFEEFMSKNISQIIVCGIETHVCVQQTVLDLIVNNFQVNLAADAVSSRKKIDYKIALERMRNNGAEITTAESILFEMLNVCGTPEFKEVSKIVK

SEQ ID NO: 92422 - protein, 174 aa, Unknown
  misc_feature (1)..(174): tr|A0A2H6F185|A0A2H6F185_9BACT Isochorismatase OS=bacte rium BMS3Abin06 OX=2005714 GN=entB PE=4 SV=1
MSGEELLIIDMLNDFVLEGAPLEVPDTRKVIPVIKKEIEDTKTRGNPVIYICDAHDKDDKEFSKFGWPVHAVDGTRGAEVADEIKPDKDDIVIKKTTYSGFYNTKLEETLKGLGAAGVRLTGCVTHICILFTASDAVLRDYRVTVVENGVAGLEREDHEAAIRIMKNVLGANII

SEQ ID NO: 92423 - protein, 174 aa, Unknown; identical to SEQ ID NO: 92422
  misc_feature (1)..(174): tr|A0A2H6F8N2|A0A2H6F8N2_9BACT Isochorismatase OS=bacte rium BMS3Abin07 OX=2005715 GN=entB PE=4 SV=1

SEQ ID NO: 92424 - protein, 197 aa, Unknown
  misc_feature (1)..(197): tr|A0A2H5WN78|A0A2H5WN78_9BACT Vibriobactin-specific is ochorismatase OS=bacterium HR14 OX=2035409 GN=vibB PE=4 SV=1
MASELILSKERSALVVVDMQETFLEPIKVRGLIERNIQLLMQIAQQLGVPALATTQNAEKLGGMVPALQEVPGVPVFNKLCFSCWQEEVFAKALQESGCQQVLLTGVEAHICVMQTALDLIEAGYQVHIPYDAVASRNKRDWKYALYRLQSGGAIITSVESAIYEWLRAAGTEEFRQVLPLLKAHMSPQRESSEETE

SEQ ID NO: 92425 - protein, 201 aa, Unknown
  misc_feature (1)..(201): tr|A0A2H5WWY1|A0A2H5WWY1_9BACT Vibriobactin-specific is ochorismatase OS=bacterium HR15 OX=2035410 GN=vibB PE=4 SV=1
MERSDLLLRRERSVLVVVDMQEPFLRMIKVRDLIVQNIAFLLQATRLLGIPVLATLQNRERIGEIVPPLQALLPEQVMPIDKLCFSCLGAEPFAKALQETGRQQVVLTGIEAHICIMQTALDLLKAGHQVYVPYDAVASRGKPDWKYALLRLQHAGVIITSVESVTYEWLDQAGTEMFRQLLPLIKERDQFLKKRKESVDE

SEQ ID NO: 92426 - protein, 185 aa, Unknown
  misc_feature (1)..(185): tr|A0A2H5Z5V4|A0A2H5Z5V4_9BACT Isochorismatase OS=bacte rium HR28 OX=2035423 GN=dhbB PE=4 SV=1
MKSAVLVIDMLNDFVTGKLGNERVRTVIEPIRRLLERARAAGVPVIYVGDAHLPSDPEMAVWGPHAMKGTKEAETIPELAPQPGDVVLEKRTYSAFYETGLDLLLRSLGVDTVVITGLHTNICCRHTAADAFTHGYRIVVPEDCVNAFTEEEHKEGIAYLKRVYGAQITTSEELAREWATERQST

SEQ ID NO: 92427 - protein, 191 aa, Unknown
  misc_feature (1)..(191): tr|A0A2H6AH75|A0A2H6AH75_9BACT Vibriobactin-specific is ochorismatase OS=bacterium HR36 OX=2035431 GN=vibB PE=4 SV=1
MRHPTLLDRNQTAILVVDVQEKLLPLIAARPSLLRNIRFLLQVARLLQLPIQATEQYPKGLGSTTPELAELLPPRPEKLDFSCCGLPEVVEQFRNWQRRQVIVAGIETHVCVLQTVLDLLAHGFQVHVPVDAVAARFELDHQVALQRMLEAGAVLTTVESAGFELLQRAGSPEFKEFSRLVQQRAKDLQNI

SEQ ID NO: 92428 - protein, 184 aa, Unknown
  misc_feature (1)..(184): tr|A0A2H6ANZ5|A0A2H6ANZ5_9BACT Putative isochorismatase OS=bacterium HR37 OX=2035432 GN=phzD PE=4 SV=1
MNFPNKSQALLVVIDMQEKLMNAIPSAEREPLIKNAETLIESAKTFGIPIIVTEQYPKGLGSTIEEIKEKLGEYFNPIEKVVFSCARALEFKSILTAQKKQDIVLCGIETHVCVLQTAVDLLKEGYNVFVPVDAVASRKRLDWEVGIKLIEKAGAIAGTVETFLFQMLEQAGTDEFKRISKLIK

SEQ ID NO: 92429 - protein, 196 aa, Unknown
  misc_feature (1)..(196): tr|A0A2H6B713|A0A2H6B713_9BACT Putative isochorismatase OS=bacterium HR41 OX=2035436 GN=phzD PE=4 SV=1
MSEGSNQLGAASGGGDRHARALLDPQRAALIVVDVQEAFAKAVGDFDAVAAAARKLVRGAHIVGLPVIVSEQYPRGLGPTVAELAELLDSDVRIEKRCFAASAAEGFDLSGRTQAIVCGIEAHVCVAQTVLELLARGVAVHLVVDAIASRKENDRDVAVRRLERAGAVPQTVESALFELIRGADHPQFKAIQELIK

SEQ ID NO: 92430 - protein, 185 aa, Bacteroidales bacterium
  misc_feature (1)..(185): tr|U5Q7Y8|U5Q7Y8_9BACT Isochorismatase OS=Bacteroidales bacterium CF OX=1400053 GN=BRDCF_p1931 PE=4 SV=1
MNNMRAGLLLIDIQNDYFDKGAMTLVNPEEACANAKRILERFRSEKLPVIFIQHIAANPAATFFLPGTAGAEIYPSIQPVEGEKVIVKHFPNSFRDTDLMDYLRKSNITDLVICGMMTHMCVDATTRAAKDLGYNITLIGDACATRNLEIHGEIVSASDVQNSFLAALNYFYSSVKSTSQYLNKE

SEQ ID NO: 92431 - protein, 180 aa, Bacteroidetes bacterium
  misc_feature (1)..(180): tr|A0A1V6CQD5|A0A1V6CQD5_9BACT Putative isochorismatase OS=Bacteroidetes bacterium ADurb.Bin123 OX=1852804 GN= phzD PE=4 SV=1
MRIDKEHTACLVIDIQEKIFRVMAGKEEFLKNCTTLIRGMIILEIPVLVTQQYTKGLGDTIPEIRICIPDFHYTEKRKFSCCDEPSVMQHLYASGIENVILCGIESHVCVLQTAVDLKGAGMHPIVVMDAVTSRTENSAGLARERFRHEGIMMTSAESILFELTRSSAAPEFREISKLVK

SEQ ID NO: 92432 - protein, 179 aa, Betaproteobacteria bacterium
  misc_feature (1)..(179): tr|A0A1V5QWT9|A0A1V5QWT9_9PROT Vibriobactin-specific is ochorismatase OS=Betaproteobacteria bacterium ADurb.Bin 341 OX=1852821 GN=vibB PE=4 SV=1
MFTQQESALVLIDIQGKLAESMQEREALFDNLVRLTRSAALLQLPILWVEQSPEKMGRTIAPLAELLSGHEAIAKTSFSCCGEPAFMQALKQSGRRQLILTGIECHVCVFQTAANLLAAGYEVQTVADAVSSRTLANRQIGLERMRALGAQITSTEMLLFELMKTANHPQFRDIAKLVR

SEQ ID NO: 92433 - protein, 207 aa, Blastochloris viridis
  misc_feature (1)..(207): tr|A0A0P0J372|A0A0P0J372_BLAVI Putative isochorismatase OS=Blastochloris viridis OX=1079 GN=phzD_1 PE=4 SV=1
MSAIPSLISYPLPSGSSLPANITHWKVDMERAVLLIHDMQRYFVGFFDDRMRYLLINNIKILRQVLVSHKVPIAYSAQPGGMNDTERGLLKDFWGPGMKVAPEDRNVVDELRPEPGDWILTKWRYSAFFRSDLLARMKAARRDQIILCGVYAHVGVIATAVDAFSNDIKPFLVADATADFSEDFHRSTLTYAAQRCAHVTTVEEVLP

SEQ ID NO: 92434 - protein, 180 aa, Bordetella ansorpii
  misc_feature (1)..(180): tr|A0A157S5N9|A0A157S5N9_9BORD Isochorismatase OS=Borde tella ansorpii OX=288768 GN=ycaC_1 PE=4 SV=1
MPAISLKASDCTLLVIDMQARLLPAIHDGEAVLAATLKLARAARLLDIPVVGTEQQPGKLGATVPELAGALQAVLAKTHFSAAREPGFEAWLPPGRRTVLVAGVEAHVCVLQTLLDLRQRGWQVALVSDAVGSRRPSDHHAASRRARAGGADIVSAEMAIFEWMETCEHPRFREVLRLVK

SEQ ID NO: 92435 - protein, 179 aa, Bordetella pertussis
  misc_feature (1)..(179): tr|A0A0T7CTT4|A0A0T7CTT4_BORP1 Isochorismatase OS=Borde tella pertussis (strain ATCC 9797 / DSM 5571 / NCTC 107 39 / 18323) OX=568706 GN=BN118_3654 PE=4 SV=1
MSALLQANQATLLIVDMQGRLMPAIHDGQAVLAAAHKPAQAARLLDVPVVATEHHARMLGVTVAPLDTQIQARFPKMHFSATREPGFTAWLPPARKTILVAGCEAHICVLQTVLGLLEEGYRALLVSDAAGSRKPADHHAALRRARGAGAEIVTTEMAIFEWMETCEHPKFRDVLRLVK

SEQ ID NO: 92436 - protein, 177 aa, Bordetella trematum
  misc_feature (1)..(177): tr|A0A157S8B9|A0A157S8B9_9BORD Isochorismatase OS=Borde tella trematum OX=123899 GN=ycaC_1 PE=4 SV=1
MLLQAEQCSLLIIDMQERLMPVIDQGEAVLAANCKLAQAARLLEVPVLATEHHVRALGTTLAPLRDSIDATFQKMAFGAMREPGFEAWLPASRRTLVVTGCEAHVCVLQTVLGLREHGWQVALVADAAGSRKPADHHAALRRMRAAGAQIVTSEMVMFEWMQTCEHPRFREVLRLVK

SEQ ID NO: 92437 - protein, 183 aa, Bosea sp.
  misc_feature (1)..(183): tr|A0A1E1UY35|A0A1E1UY35_9BRAD Isochorismatase OS=Bosea sp. BIWAKO-01 OX=506668 GN=BIWAKO_01116 PE=4 SV=1
MSALVIIDVQRDILAVPGAARAVVGERFAKVRERLAELIGRAHAADRPVIFIQHDGPAGHRLETGTRGWELHPDLPRQPGDIVVHKTACDSFHDTALQVVLAERRIGHLVIAGLMTQYCVDTTCRRAVSLGFDVTLVADAHTTADSGTLQVEQIVAHHNALLDGFDAGSATIRVKPLAQVAFT

SEQ ID NO: 92438 - protein, 207 aa, Bradyrhizobiaceae bacterium
  misc_feature (1)..(207): tr|F7QFT8|F7QFT8_9BRAD Isochorismatase OS=Bradyrhizobia ceae bacterium SG-6C OX=709797 GN=CSIRO_0311 PE=4 SV=1
MAAAPKSLLQIAGAPLNPSPLDKSALVIVDAQLEYTKGGLPLDGVDNAILEAAKLLKLARERGVPVFHIVQHAPAGRPLFAEDGPYAAIVPLLAPAAGEVVVRKALPNSFAGTDLDALVKSTGRTELILAGFMTHMCVSATARAALDLRYRTTIVANATATRDLPDPLGGTIPASIVHRVALTELADRFAIVVKDTAELTAATKAVA

SEQ ID NO: 92439 - protein, 216 aa, Bradyrhizobium sp.
  misc_feature (1)..(216): tr|A5EN11|A5EN11_BRASB Putative Isochorismatase family protein OS=Bradyrhizobium sp. (strain BTAi1 / ATCC BAA- 1182) OX=288000 GN=BBta_5596 PE=4 SV=1
MSKLEMLTPQNCAVALIDYQPAMYQGVQSHDRLGVFNNIQIVAKAAKLFKIPTVLTTVAKDSFSGPFMPEVTELFPDHDIVDRTAMNSWLDAGFRKQVAATGRKKFIIAGLWTEACVLFPTLDMLREGYEIYIPADACGDLSLEAHNRAMDRAVQAGAVPITSCQFAFELQQDWARAETYDGMMEILKAHSPYGIQIRFSKWALGEHASEGGAKVA

SEQ ID NO: 92440 - protein, 207 aa, Brenneria goodwinii
  misc_feature (1)..(207): tr|A0A0G4JZN5|A0A0G4JZN5_9GAMM Isochorismatase of sider ophore biosynthesis OS=Brenneria goodwinii OX=1109412 G N=BN1221_03837 PE=4 SV=1
MAIPSLNVYDMPESHDFPANKVSWDFAPDRAVLLIHDMQDYFVQFYDRQSPLIQQLIENIAVLRHYCKSQRIPVVYSAQPNNQSPQDRALLNDMWGPGLNQYPDLQPVVGRLCPDDDDIVLVKWRYSAFHRTSLEEKMKAWGRDQLVICGVYGHIGCMITATDAFMRDIKAFLVGDAIADFSRRDHMMALNYVATRSGQVVSVADLV

SEQ ID NO: 92441 - protein, 292 aa, Brenneria sp.
  misc_feature (1)..(292): tr|G7LSL5|G7LSL5_9GAMM Isochorismatase OS=Brenneria sp. EniD312 OX=598467 GN=BrE312_3953 PE=4 SV=1
MSIPKLNSYPLPSADALPDNKVNWPLETARAALLIHDMQRYFLNFWGENSPLTARLIDNIARLKKFCRQHGIPVFYTAQPNNQSAADRALLNDMWGPGLNNYPEQQNITDALTPEGADTVLVKWRYSAFLRTDLEQRLRDAGRDQLIICGVYAHIGCLTTANDAFMRDIKPFMVADALADFSLEEHMMALRYGAGRCARVVATDQLVADEPAAQGYGKFRLRAELLPLLDEDCGEVDDDENLLDYGLDSVRIMSLAARWRQQGHDVDFVALVKRPTITHWLTLLAQPQREEA

SEQ ID NO: 92442 - protein, 181 aa, Brevibacillus laterosporus
  misc_feature (1)..(181): tr|H0U651|H0U651_BRELA Isochorismatase family protein O S=Brevibacillus laterosporus GI-9 OX=1118154 GN=BLGI_83 9 PE=4 SV=1
MIDKTALVIVDTQSIITYHSYHGEEIVDKISSLQAKARQLNVPVLFIQHIGPAGSPFEEGAHMTEIHPNVAPLEGEIVIKKTACDAFYETALHQELLNRGIEHLIIVGFQTQFCIDTACRSAVSHGYEVTLVGDCHSTANTPTLNAISIIDHHNETLNGLGTQHHNITVKDSSEIFASEPR

SEQ ID NO: 92443 - protein, 194 aa, Brevibacterium aurantiacum
  misc_feature (1)..(194): tr|A0A1D7W8U0|A0A1D7W8U0_9MICO Isochorismatase OS=Brevi bacterium aurantiacum OX=273384 GN=BLSMQ_3726 PE=4 SV=1
MSTSTSTHQPPLASQREKTALIVIDVQNGVFVENWHADEVIGTISDLVQRARDTGAEVIWVRHSSGELPLESPQWQIVDALSPADDETIVEKTHGNTFEDTDFEDVLASKDVGHLVVTGAQSDACVRSTIHGGFARGYDVTLVSDAHTTEDLSDWGAPPPEQVVSHTNLYWGFESGPGRTARVQESAEVDFTAP

SEQ ID NO: 92444 - protein, 207 aa, Brevibacterium casei
  misc_feature (1)..(207): tr|A0A449DB56|A0A449DB56_9MICO Probable isochorismatase OS=Brevibacterium casei OX=33889 GN=phzD PE=4 SV=1
MEHTFTTSPYAQVTAADVKMRGPGWALDWTRAALLVHDMQEYFVRALPSQPSQQLQGNVGQLVRLARGHGAPVIYSGQRGGMTPEERGLMTDFWGPGMEADEEDRRLVDSAEPTKDDPRITKWRYSAFTRTHLAELLSEFGKDQLIVCGIYLHVGILATAIDCVAKDIRCFVIGDATADFNRTLHIDTLEYIGDRCGQIKFIGSDLI

SEQ ID NO: 92445 - protein, 215 aa, Brevundimonas diminuta
  misc_feature (1)..(215): tr|A0A1R4G8B9|A0A1R4G8B9_BREDI Isochorismatase of sider ophore biosynthesis OS=Brevundimonas diminuta 3F5N OX=1 255603 GN=FM111_10445 PE=4 SV=1
MSVSKGLPTVPAYALPTEAEIPASRAQWTLQRDRAALLVHDMQRYFMRPYAPGAEPLPGLIANIARLIVAARAAGAPVFYTAQHGDQDRRDRGLQADLWGPGMSRAPEHEEILPELAPAPGDFPLVKHRYSAFQRSNLETLMRVRGRDQLIVCGVYAHIGCQLTAADAFQRDIEPFFVADALGDFSRDKHMGAVAWAADTCAVALSTARVLERLT

SEQ ID NO: 92446 - protein, 87 aa, Brevundimonas vancanneytii
  misc_feature (1)..(87): tr|A0A4P1KBY5|A0A4P1KBY5_9CAUL Isochorismatase OS=Brevu ndimonas vancanneytii OX=1325724 GN=dhbB_1 PE=4 SV=1
MTKLTPQDLTLERMRADVAAVLHETPDSILDDDNLMDLGVDSLRALNLSLAWSEAVPLEFSELAEHTTLAGWWSVVQARLRAAGHDA

SEQ ID NO: 92447 - protein, 166 aa, Brochothrix thermosphacta
  misc_feature (1)..(166): tr|A0A2X0QJW8|A0A2X0QJW8_BROTH Isochorismatase OS=Broch othrix thermosphacta OX=2756 GN=BTBSAS_30162 PE=4 SV=1
MKPLADALIIIDLQNGVCYNDTEIFNLSSLVTLINKRMLDYTSQGKNIIIVQHTDEDLIQGQSPWEVIPSLDKGKATHYIQKTHANSFYTTNLKELLEQEHINSIEICGAQTEYCVDATVKNAHALGYLIQMLRGGTTTYSNAFMSAENTVRFYENIWDNRFATFI

SEQ ID NO: 92448 - protein, 290 aa, Brucella abortus
  misc_feature (1)..(290): tr|Q2YL96|Q2YL96_BRUA2 Isochorismatase hydrolase family :Isochorismatase:Phosphopantetheine attachment site:Pho sphopantetheine-binding domain OS=Brucella abortus (str ain 2308) OX=359391 GN=BAB2_0013 PE=4 SV=1
MAIPKIADYPMPQKAGFPANKTNWQPDPARAVLLIHDMQRYFLRFYDANGPLMGDLIGNLVRLRNWAHENGVPVVYTAQPHEQPAGDRALLNDMWGPGLPAAAPEQQLIVDKLTPGATDTVLAKWRYSAFQRSDLLQRMKDWNRDQLIIGGIYAHIGCMVTAIDAFMNDIQPFMVGDAVADFSEEEHRLALKYVATRCGAVIDTASLIRKPATETTRDWLQKRVLELIEDETELDPQENLILYGLDSLQVMKLSAELKERGVAVGFDDLARVPTLAAWWDLIETKQKAAA

SEQ ID NO: 92449 - protein, 290 aa, Brucella melitensis; identical to SEQ ID NO: 92448
  misc_feature (1)..(290): tr|Q7CNT0|Q7CNT0_BRUME Isochorismatase OS=Brucella meli tensis biotype 1 (strain 16M / ATCC 23456 / NCTC 10094) OX=224914 GN=BMEII0079 PE=4 SV=1

SEQ ID NO: 92450 - protein, 290 aa, Brucella neotomae; identical to SEQ ID NO: 92448
  misc_feature (1)..(290): tr|A0A381BZP4|A0A381BZP4_BRUNE Enterobactin isochorisma tase OS=Brucella neotomae OX=29460 GN=entB PE=4 SV=1

SEQ ID NO: 92451 - protein, 290 aa, Brucella ovis; identical to SEQ ID NO: 92448
  misc_feature (1)..(290): tr|A0A0H3AVX8|A0A0H3AVX8_BRUO2 Isochorismatase OS=Bruce lla ovis (strain ATCC 25840 / 63/290 / NCTC 10512) OX=4 44178 GN=entB PE=4 SV=1

SEQ ID NO: 92452 - protein, 290 aa, Brucella sp.
  misc_feature (1)..(290): tr|E2PLR4|E2PLR4_9RHIZ Isochorismatase OS=Brucella sp. BO2 OX=693750 GN=BIBO2_0997 PE=4 SV=1
MAIPKIADYPMPQKAGFPANKTNWQPDPARAVLLIHDMQRYFLRFYDANGPLMGDLIGNLVRLRNWAQENGVPVVYTAQPHEQPAGDRALLNDMWGPGLPAAAPEQQLIVDKLTPSTTDTVLAKWRYSAFQRSDLLQRMKDWNRDQLIIGGIYAHIGCMVTAIDAFMNDIQPFMVGDAVADFSEEEHRLALKYVATRCGAVIDTASLIGKPATETTRDWLQKRVLELIEDETELDPQENLILYGLDSLQVMKLSAELKERGVAVGFDDLARVPTLAAWWDLIETKQKAAA

SEQ ID NO: 92453 - protein, 291 aa, Burkholderia ambifaria
  misc_feature (1)..(291): tr|Q0BF28|Q0BF28_BURCM Isochorismatase OS=Burkholderia ambifaria (strain ATCC BAA-244 / AMMD) OX=339670 GN=Bam b_1688 PE=4 SV=1
MAIPKIASYPMPAELPANRVNWRFDPHRAALLVHDMQDYFLDFYDRAAAPVPTLVAHVRRLIDFARAAGMPVYYTAQPATQAAADRALLTDMWGPGLTAQPSRAAICDALAPASGDTVLDKWRYSAFRRSPLETCLREQARDQLAICGIYAHIGCLMTACDAFMRDVQPFFVADALADFSEREHRMALDYVAGRCGMAVTTDALVGVAPADDSAPMLVAIAAQVARSLRIPAADLREHDNLIDCGLDSIRMMTLVEQWRAQGYDVTFVQLAEQPTLGAWTQVLQRAAQVSA

SEQ ID NO: 92454 - protein, 187 aa, Burkholderia cenocepacia
  misc_feature (1)..(187): tr|A0A107L5U2|A0A107L5U2_9BURK Hydrolase OS=Burkholderi a cenocepacia OX=95486 GN=yecD_4 PE=4 SV=1
MSATRLDTNTALVVIDLQKGIVALPTAHPVAPVIARTRELLDAFRSRGLPVVLVNVAGGAPGRTEQAPRTAQLPADWTELVPELNRQPTDHVVTKQTWGAFTGTGLDAHLKAAGVTQIVLTGVATSIGVESTARQAHELGYNVTLAVDAMTDLNADAHVNSVERLFPRLGETGTTQDIVALLDRRGA

SEQ ID NO: 92455 - protein, 187 aa, Burkholderia cepacia
  misc_feature (1)..(187): tr|A0A2X2PCN9|A0A2X2PCN9_BURCE Isochorismatase family p rotein OS=Burkholderia cepacia OX=292 GN=yecD_3 PE=4 SV =1
MSATRLDTNTALVVIDLQKGIVALPTAHPVAPVIAHARELLDAFRSRGLPVVLVNVAGGAPGRTEQSPPVAQLPADWTELVPELNRQPSDHVVTKRTWGAFTGTGLDAHLKAAGVTQIVLAGVATSIGVESTARQAHELGYNVTLAIDAMTDLKADAHVNSVERLFPRLGETGTTQDIVALLDRRGA

SEQ ID NO: 92456 - protein, 187 aa, Burkholderia lata
  misc_feature (1)..(187): tr|Q397H5|Q397H5_BURL3 Isochorismatase hydrolase OS=Bur kholderia lata (strain ATCC 17760 / DSM 23089 / LMG 224 85 / NCIMB 9086 / R18194 / 383) OX=482957 GN=Bcep18194_ B1272 PE=4 SV=1
MSATRLDTNTALVVIDLQKGIVALPTAHPVEPVIAHTRTLLDAFRSRGLPVVLVNVAGGAPGRTQQQVRLDALPADWAELVPELNRQPGDHVVTKKTWGAFTGTDLDAHLKAAGVTQIVLTGIATSIGVESTARQAHELGYNVTLAIDAMTDLNADAHVNSVERLFPRLGETGTTQDIVALLDRRGE

SEQ ID NO: 92457 - protein, 187 aa, Burkholderia multivorans
  misc_feature (1)..(187): tr|A0A0H3KMJ9|A0A0H3KMJ9_BURM1 Isochorismatase OS=Burkh olderia multivorans (strain ATCC 17616 / 249) OX=395019 GN=BMULJ_04433 PE=4 SV=1
MSATRLDTNTALVVIDLQKGIVALPTAHPVGGVIERTRELLDAFRSRGLPVVLVNVAGGAPGRTQQQVRLDALPADWTELIDELDRRPGDHLVTKKTWGAFTGTDLDAYLKAAGVTQIVLAGVATSIGVESTARQAHELGYNVTLAVDAMTDLNADAHANSVERLFPRLGETGSTQDIVALLDRRGA

SEQ ID NO: 92458 - protein, 187 aa, Burkholderia plantarii
  misc_feature (1)..(187): tr|A0A0B6S510|A0A0B6S510_9BURK Putative isochorismatase OS=Burkholderia plantarii OX=41899 GN=BGL_2c02690 PE=4 SV=1
MTVTTLDPKTALIVVDLQKGIVALPVAHQPTAVVERSVRLLDAFRERGLPVVLVNVAGMAPGRNEQPHRGGELPPDWADLLPELKQQADDILVTKRTWCGFTNTGLDAKLKAAGVTQVVLCGIATSIGVESTARLAYQLGYHVTLAVDAMTDLHADAHANSIARIFPRLGETGTTDDIIALLDTRNA

SEQ ID NO: 92459 - protein, 200 aa, Burkholderia pseudomallei
  misc_feature (1)..(200): tr|Q3JJ31|Q3JJ31_BURP1 Isochorismatase OS=Burkholderia pseudomallei (strain 1710b) OX=320372 GN=entB PE=4 SV=1
MRPIDMSIPTLNPTVALVAIDLQNGIVSLPVVPQSGSEVVAKTAELANAFRARKLPVIFVHTSYQPDGAVALKVKTDVPPSPPNLDPEWSAFAPALGVQPLDVVVTKHQWGAFTGTDLDVQLRRRGITDIVLTGIATNVGVESTAREAYENNYNVVIVSDAVSTWSTDAQTFALTQIFPKLGQVATAADVEAALETQQQR

SEQ ID NO: 92460 - protein, 185 aa, Burkholderia singularis
  misc_feature (1)..(185): tr|A0A238H9T1|A0A238H9T1_9BURK Isochorismatase OS=Burkh olderia singularis OX=1503053 GN=BSIN_4728 PE=4 SV=1
MKGAAVLVIDMQRGLLQGARPAHALGEIVAGINRLTAAARAAHAPVCFVQHDGEPDDGDDIAPGTPGWELHADLVRAPADWSIRKRVSDAFQDTPLAAGLDRHGISHVILCGYATQFCVDATARRAALIGYRTTVVADLHTTCDWPHLSAAQIITHHNLTWKNCTYSGNGVVPRPLDDVLAMEFA

SEQ ID NO: 92461 - protein, 84 aa, Burkholderiales bacterium
  misc_feature (1)..(84): tr|A0A433SGK5|A0A433SGK5_9BURK Isochorismatase OS=Burkh olderiales bacterium CNM695-12 OX=1965230 GN=dhbB PE=4 SV=1
MTTTPSPILTLERMREDIAKVLHEDASEIRDDDNLIDLGLDSIRAMTLLTRWREAGAHIDFADMAQRPELGYWWRLVRDGLPQN

SEQ ID NO: 92462 - protein, 284 aa, Buttiauxella agrestis
  misc_feature (1)..(284): tr|A0A085GIG0|A0A085GIG0_9ENTR Isochorismatase OS=Butti auxella agrestis ATCC 33320 OX=1006004 GN=entB PE=4 SV= 1
MAIPKLNAYTLPTAADIPENKVNWAFEPERAALLIHDMQEYFIDFWGDNCPMIQQVIANIAVLRDYCKRHNIPVYYTAQPNAQSDEDRALLNDMWGPGLNKHPERQKVVAELAPDEHDTVLTKWRYSAFVRSPLEQVLKETGRNQLIICGVYAHIGCMTTATDAFMRDIKPFMVADALADFSREEHMMALKYTAGRSGRVVMTRDLLPEAAPQNKEQLRELVLPLLDESDIPQDDENLIDYGLDSVRMMALAARWRKIHTDIDFVMLAKNPTIDAWWALLSRGS

SEQ ID NO: 92463 - protein, 286 aa, Buttiauxella brennerae
  misc_feature (1)..(286): tr|A0A1B7IVR6|A0A1B7IVR6_9ENTR Isochorismatase OS=Butti auxella brennerae ATCC 51605 OX=1354251 GN=M975_0512 PE =4 SV=1
MAIPKLNAYTLPTAADIPENKVNWAFEPERAALLIHDMQEYFIDFWGDNCPMIQQVIANIAALRDYCKRHNIPVYYTAQPNGQSDEDRALLNDMWGPGLNKHPERQKVVAELAPDEHDTVLTKWRYSAFIRSPLEQALKETGRNQLIICGVYAHIGCMTTATDAFMRDIKPFMVADALADFSREEHMMALKYTAGRSGRVVMTRDLLPESAPQNKQQLREIVLPLLDESDIPEDDENLIDYGLDSVRMMALAARWRKIHADIDFVMLAKNPTIDAWWALLSREAQA

SEQ ID NO: 92464 - protein, 286 aa, Buttiauxella gaviniae
  misc_feature (1)..(286): tr|A0A1B7HRK9|A0A1B7HRK9_9ENTR Isochorismatase OS=Butti auxella gaviniae ATCC 51604 OX=1354253 GN=M977_03213 PE =4 SV=1
MAIPKLNAYTLPTAADIPENKVSWALEPERAALLIHDMQEYFIDFWGDNCPMIQQVIANIAALRDYCKRHNIPVYYTAQPNAQSDEDRALLNDMWGPGLNKYPERQKVVAELAPDEHDTVLTKWRYSAFIRSPLEQALKETGRNQLIICGVYAHIGCMTTATDAFMRDIKPFMVADALADFSREEHMMALKYTAGRSGRVVMTRDLLPESAPQNKQQLREIVLPLLDESDIPEDDENLIDYGLDSVRMMALAARWRKIHADIDFVMLAKNPTIDAWWVLLSREVAA

SEQ ID NO: 92465 - protein, 286 aa, Buttiauxella noackiae
  misc_feature (1)..(286): tr|A0A1B7I114|A0A1B7I114_9ENTR Isochorismatase OS=Butti auxella noackiae ATCC 51607 OX=1354255 GN=M979_0229 PE= 4 SV=1
MAIPKLNAYTLPTAADIPENKVNWAFEPERAALLIHDMQEYFIDFWGDNCPMIQQVIANIAALRDYCKRHNIPVYYTAQPNAQSDEDRALLNDMWGPGLNKHPERQKVVAELAPDENDTVLTKWRYSAFIRSPLEQSLKDTGRNQLIICGVYAHIGCMTTATDAFMRDIKPFMVADALADFSREEHMMALKYTAGRSGRVVMTRDLLPEAAPQNKQQLREIVLPLLDESDIPEDDENLIDYGLDSVRMMALAARWRKIHADIDFVMLAKKPTIDAWWVLLSREVQA

SEQ ID NO: 92466 - protein, 196 aa, Caldiarchaeum subterraneum
  misc_feature (1)..(196): tr|E6N938|E6N938_CALS0 Isochorismatase OS=Caldiarchaeum subterraneum OX=311458 GN=CSUB_C1612 PE=4 SV=1
MAGESIPEPVKVRLHRGNTAVIVVDMQNDFCKPSGKLFVPASVETIPKIGQVLEKARQSDVMIVYTQDWHMKDDPEFAIWGEHALEGSWGAEIVDELRPRAGDVVVKKLRYDAFYGTSLDHILRLRQIENIVVTGTVANICVLHTAGSAALRWYKVYLPIDCVSALNDFDYRATLRQVSFLYRGILTRSELLEFEK

SEQ ID NO: 92467 - protein, 231 aa, Unknown
  misc_feature (1)..(231): tr|A0A1V5FMG3|A0A1V5FMG3_9BACT Isochorismatase OS=candi date division BRC1 bacterium ADurb.BinA292 OX=1852824 G N=dhbB PE=4 SV=1
MTDHPAPACSPAIPGGAELNPDTTALVIVDMMNRFCDPAWLGRHDDAAQVAWYRRELEGIIPRIRSVLESFRRRGALVVHVVLARWTPDAREVVPYQRGREYDAFDTQAMSVIPELAPATGEIVIRKVASSAFQATGLDFMLRNAGIRQVVITGQFGDACCFYTLIMSREAGFANIWVHDALLFSNEQMKQTINPLVAGRWAESLSAEELVRRLEPSRAAAAPIPSLARKA

SEQ ID NO: 92468 - protein, 174 aa, Burkholderia sp.
  misc_feature (1)..(174): tr|A0A0L0MEH8|A0A0L0MEH8_9BURK Isochorismatase OS=Candi datus Burkholderia verschuerenii OX=242163 GN=BVER_0070 1 PE=4 SV=1
MARADTLVVIDMQAKLVPHIDDGERVTQRVAAIVRAAGLLDVPVVATEQNPRGLGATVDGLLDGRHRLIEKDSFDATRANAFLAALPPAPGTLWIAGAEAHVCVLLTAIGLLARGYRVEWLADAVGSRRAADRATANLRAQQEGARLTTVETAIFSWLGDFRHPRFREALALIK

SEQ ID NO: 92469 - protein, 215 aa, Heimdallarchaeota sp.
  misc_feature (1)..(215): tr|A0A1Q9PG04|A0A1Q9PG04_9ARCH Isochorismatase OS=Candi datus Heimdallarchaeota archaeon AB_125 OX=1841596 GN=d hbB PE=4 SV=1
MQKELYLTKENQEEKVSQWITECKKMKKHIAFAFDLSKAALLVLDMQNFFLDESKHAYVPSAKTITEDISKLVDFFQKNERPVIFTKHLDTQKPDEMMTRWWKDSIEDGTPEAEISNLLNTEGSEIIKKSRYSAFEKTNLEELLHNKGVKQIIITGIMSHLCCETTARDAFMKDFEVIYIVDATATYTEKLHLGTIRAISHGFGRCESTEEIVNG

SEQ ID NO: 92470 - protein, 181 aa, Hydrogenedentes sp.
  misc_feature (1)..(181): tr|A0A1V6EP52|A0A1V6EP52_9BACT Putative isochorismatase OS=Candidatus Hydrogenedentes bacterium ADurb.Bin101 O X=1852847 GN=phzD PE=4 SV=1
MLVKENSVVVVIDIQDVLMPKSEEVARAYIAQAAKLIRVARALDIPVVVTEQNPERLGGTHATIRDALGEVPALPKLEFGCMANPGFREALARTGRKQMLLIGMETHVCVMQTALEAMASGYEVFLVRDAVVSARKPDYKAGIHRMIQEGVTCVCCEMVIFEWLRKAGTPEFRQVLPLIKS

SEQ ID NO: 92471 - protein, 95 aa, Micropelagos sp.
  misc_feature (1)..(95): tr|U2XUD0|U2XUD0_9PROT Isochorismatase protein OS=Candi datus Micropelagos thuwalensis OX=1397666 GN=RS24_01319 PE=4 SV=1
MNLTNSEEPPKIQKEEVPTTSNSDKEGSFKELEDNNRHKTTMWTETWLRRTMVGLWMIGIIVCFFAEVCLIYLMIKYTVYVGSDNEILEKFMGLA

SEQ ID NO: 92472 - protein, 208 aa, Protochlamydia sp.
  misc_feature (1)..(208): tr|A0A0U5JDM2|A0A0U5JDM2_9BACT Isochorismatase family h ydrolase OS=Candidatus Protochlamydia naegleriophila OX =389348 GN=PNK_1646 PE=4 SV=1
MASFKYKRLDKNDAAVLLVDHQSGLINMIQDYSPSEFKNNVLALANIAKFFNLPTILTTSFENGPNGPLVPELKEILPNAAYIPRPGQINAWDNEDFVRAVKATGKKQLIIAGVVTDVCVAFPTLSAIEDGYDVFVVVDASGTFNQAVRDAALMRVTHAGAQLMNWFSVACELHRDWRNDIEGLGTLLASHLPAYRNLITSYIAKSKS

SEQ ID NO: 92473 - protein, 225 aa, Rhodobacter sp.
  misc_feature (1)..(225): tr|A0A0J9EB09|A0A0J9EB09_9RHOB Isochorismatase OS=Candi datus Rhodobacter lobularis OX=1675527 GN=AIOL_000111 P E=4 SV=1
MPAIESTPYAWPYNGDLRPQNTALIVIDMQTDFCGKGGYVDAMGYDLSMTQAPIEPIKAVLAAMRAKGYHIIHTREGHRPDLSDLPANKRWRSQQIGAGIGDPGPCGKILIRGEAGWDIIPELYPEQGEIIIDKPGKGSFCATDLEMILRTRGIENLIICGITTDVCVSTTMREANDRGFECVVLSDCCGATDKGNHDAALKMVTMQGGVFGAVADSKTLIAGLV

SEQ ID NO: 92474 - protein, 179 aa, Capnocytophaga sp.
  misc_feature (1)..(179): tr|F1ZRP0|F1ZRP0_9FLAO Isochorismatase OS=Capnocytophag a sp. oral taxon 338 str. F0234 OX=888059 GN=HMPREF9071 _1491 PE=4 SV=1
MLSVNDTQLVILDIQGKLSQIVYKSEEILRQSHLLIQGCKLLNIPIIWVEQTPEKLGDTNSIIATSLSELSPIKKYTFSAYRNKDFAERVKANLRPQILLIGIETHICIYQTAYDLVNAGYEVFVVADAVSSRTVENRNIGLQMIIQTQGKIISVEGALFSLLKDSQHEKFRDIAKLIK

SEQ ID NO: 92475 - protein, 189 aa, Castellaniella defragrans
  misc_feature (1)..(189): tr|W8X002|W8X002_CASDE Isochorismatase OS=Castellaniell a defragrans 65Phen OX=1437824 GN=BN940_14666 PE=4 SV=1
MEDAMKYVDVNQALLTAGTSALLIVDMQEKLLPAIRDTDALCGRVARLAQAARLLSVPVWATEHWPGKIGPTHPELLAHVDRVVTKTHFDACREAGFLADWPAGRTRVLLTGTEAHICVLQTGLGLAQAGFQPVLVADGAGSRRESDWAAACERWRHHGLETVTSEMAIYEWLETPAHPAFRDVLALVK

SEQ ID NO: 92476 - protein, 201 aa, Catenulispora acidiphila
  misc_feature (1)..(201): tr|C7PW82|C7PW82_CATAD Isochorismatase OS=Catenulispora acidiphila (strain DSM 44928 / NRRL B-24433 / NBRC 102 108 / JCM 14897) OX=479433 GN=Caci_4467 PE=4 SV=1
MSASGIEPIEPYRLPAEGELPVQRVAWTPEPGRAVLLIHDMREHFLRFFPAGRDPLATLVANTVRLREACAAAGIPVVFAAQPGGEELEPDRAIVPELAPRPGDKVLTKRRHSAFHRTPPADVLWQTGRDQVIVCGVYAHIGCLTSCVEAFSRDVQAFLVADAVADFSPEKHRAALMLAAEVCAMTPTTDQLLRALAEAAR

SEQ ID NO: 92477 - protein, 214 aa, Chlorobi bacterium
  misc_feature (1)..(214): tr|A0A136K8R3|A0A136K8R3_9BACT Isochorismatase OS=Chlor obi bacterium OLB4 OX=1617411 GN=entB PE=4 SV=1
MLKENYFNRDNSIEKIKLWQTEFSGFSKKFKKFSVIDSALIVIDMQNFFLDEKSHAFVPSSEIIVNHINRLISFYDKKNLPVIFTYFAVAPGDDDPILRRWGNSVSENSYNSIIPESVLRNSNHKVIRKNTYDSFYRTNLEEALNALNVKQLVITGVLTNLCCETTARSAFVRNFDVFIGIDCTAAFNEEMHVASLRNLMYGFASPVTINEITT

SEQ ID NO: 92478 - protein, 179 aa, Chloroflexi bacterium
  misc_feature (1)..(179): tr|A0A1V6DC93|A0A1V6DC93_9CHLR Vibriobactin-specific is ochorismatase OS=Chloroflexi bacterium ADurb.Bin120 OX= 1852856 GN=vibB PE=4 SV=1
MLNTEESVLVLVDFQERLAEIVLRRELVVPNALRLIKGCQALGVPILPTLQVPEKLGPMPPELVEVLGDVKVISKAVFSALREPDFLLALRQSGRNQVLLTGIEAHVCVLQTGLDLLDAGYQVHAISDAVFSRTAENQQVALARLHDAGATVSSVEIALFELIRTSTHPQFKTISTLIK

SEQ ID NO: 92479 - protein, 169 aa, Chondromyces crocatus
  misc_feature (1)..(169): tr|A0A0K1E9W7|A0A0K1E9W7_CHOCO Isochorismatase OS=Chond romyces crocatus OX=52 GN=entB PE=4 SV=1
MKLGLLVIDMQNEFFADGSPATPSLHAAVEYINGAIALFRKAEAPVVIVSDVEEPRVPGTEAFALHPSIAARPDDLRIDKRSGNAFWKTDLDRQLRDRGVDMLILCGFCAEFCVLDTFRGAREWGWPAALLRGGIASPHPDRIRLVQEICDVVSYGALEGWMGLLHKPS

SEQ ID NO: 92480 - protein, 292 aa, Chromobacterium violaceum
  misc_feature (1)..(292): tr|Q7NXZ3|Q7NXZ3_CHRVO Isochorismatase OS=Chromobacteri um violaceum (strain ATCC 12472 / DSM 30191 / JCM 1249 / NBRC 12614 / NCIMB 9131 / NCTC 9757) OX=243365 GN=ent B PE=4 SV=1
MSIPKLNAYPLPQAADFPANKTAWRVDPKRAALLIHDMQRYFLAFYGEDSALVNELVSKVEALRRWADSHGVPVIYTAQPTEQKPEDRALLNDMWGPGLTTADPAVQAVTPRLAPRERDTVLVKWRYSAFQRSDLQEKMKAWGRDQLVICGVYAHIGCMMTACDAFMRDIQAFMVGDAVADFSEEEHKMALRYVATRCGAVIAQSDLAAAGGDAALTREWLKAQVLTVLEDGDDSLAGDDNLLDYGLDSIRVMELVAQWQKLGLEIGFEDLAQDLTLDGWWTAIQAKLPQEA

SEQ ID NO: 92481 - protein, 75 aa, Citreicella sp.
  misc_feature (1)..(75): tr|D0DCJ8|D0DCJ8_9RHOB Vibriobactin-specific isochorism atase OS=Citreicella sp. SE45 OX=501479 GN=CSE45_4535 P E=4 SV=1
MTLSLDRMRADIAAALDIGPDEVATDEHLGDLGLDSIALMRLLMGWEELQPTLPSERLYECETLDEFWAIARAAQ

SEQ ID NO: 92482 - protein, 285 aa, Citrobacter amalonaticus
  misc_feature (1)..(285): tr|A0A381G4H2|A0A381G4H2_CITAM Isochorismatase OS=Citro bacter amalonaticus OX=35703 GN=entB PE=4 SV=1
MAIPKLQAYALPTALDIPVNKVNWTFEPDRAALLIHDMQDYFVSFWGENCPMMEQVIANIAALRNYCKAHNIPVYYTAQPKDQSDEDRALLNDMWGPGLTRSPEQQKVVAALAPDEADNVLVKWRYSAFHRSPLELMLKETGRDQLIITGVYAHIGCMTTATDAFMRDIKPFMVADALADFSREEHLMSLKYVAGRSGRVVMTQELLPAPVPTSKDELRALILPLLDESDEPMDDENLIDYGLDSVRMMALAARWRKVHGDIDFVMLAKNPTIDAWWALLSREVR

SEQ ID NO: 92483 - protein, 285 aa, Citrobacter freundii
  misc_feature (1)..(285): tr|A0A336QJJ6|A0A336QJJ6_CITFR Isochorismatase OS=Citro bacter freundii OX=546 GN=entB PE=4 SV=1
MAIPKLQAYALPTALDVPVNKVDWAFDPERAALLIHDMQDYFIGFWGDNCPMMEQVVANIAALRQYCKEHNIPVYYTAQPKEQSDEDRALLNDMWGPGLTRSPEQQKIVEALAPDEADTILVKWRYSAFHRSPLEQMLKETGRNQLIITGVYAHIGCMTTATDAFMRDIKPFMVADALADFSRDEHLMSLKYVAGRAGRVVMTQELLPTPVPASKDALRSVILPLLDESEEPMDDENLIDYGLDSVRMMALAARWRKVHGDIDFVMLAKNPTIDAWWTLLSREVK

SEQ ID NO: 92484 - protein, 135 aa, Citrobacter koseri
  misc_feature (1)..(135): tr|A0A2X2UXN1|A0A2X2UXN1_CITKO Isochorismatase OS=Citro bacter koseri OX=545 GN=entB_2 PE=4 SV=1
MAGVTFTDLKEKERWQFRNCRRTRCLARLDIPPNKVNWAFEPERAALLIHDMQDVFCQLLGDNCPMMEQVIANIAALRQYCKEHNIPVYYTAQPKDQSDEDRALLNDMWGPGLTRSPSSKRLSMRWRRTRRTPCW

SEQ ID NO: 92485 - protein, 286 aa, Citrobacter pasteurii
  misc_feature (1)..(286): tr|A0A0A1RCW4|A0A0A1RCW4_9ENTR Isochorismatase [enterob actin] siderophore / Apo-aryl carrier domain of EntB OS =Citrobacter pasteurii OX=1563222 PE=4 SV=1
MAIPKLQAYALPTALDVPANKVDWAFEPERAALLIHDMQDYFIGFWGENCPMMEQVVANIAALRQYCKAHNIPVYYTAQPKEQSDEDRALLNDMWGPGLTRSPEQQKIVDALAPDEADTILVKWRYSAFHRSPLEQMLRDTGRNQLIITGVYAHIGCMTTATDAFMRDIKPFMVADALADFSRDEHLMSLKYVAGRSGRVVMTQELLPTPVPDSKDALRGVILPLLDESEEPMDDENLIDYGLDSVRMMALAARWRKVHGDIDFVMLAKNPTIEAWWKLLSREVKS

SEQ ID NO: 92486 - protein, 285 aa, Citrobacter rodentium
  misc_feature (1)..(285): tr|D2TMN4|D2TMN4_CITRI Isochorismatase OS=Citrobacter r odentium (strain ICC168) OX=637910 GN=entB PE=4 SV=1
MAIPKLQAYALPDAQDIPTNKVSWAFDPERAALLIHDMQDYFVSFWGENCPMMEQVIANIAALRDYCKAHHIPVYYTAQPKAQSDEDRALLNDMWGPGLTRSPEQQKVVESLTPDEADTVLVKWRYSAFHRSPLEQMLKETGRNQLIITGVYAHIGCMTTATDAFMRDIKPFMVADALADFSREEHLMALNYVAGRAGRVVMTQDLLPAPVPASKEDLRALILPLLDESEEPMDDENLIDYGLDSVRMMALAARWRKVHGDIDFVMLAKNPTIDGWWKLLSREVK

SEQ ID NO: 92487 - protein, 285 aa, Citrobacter youngae
  misc_feature (1)..(285): tr|D4BCN0|D4BCN0_9ENTR Isochorismatase OS=Citrobacter y oungae ATCC 29220 OX=500640 GN=entB PE=4 SV=1
MAIPKLQAYALPTALDVPANKVDWAFEPERAALLIHDMQDYFIGFWGDNCPMMEQVVANIAALRQFCKEHNIPVYYTAQPKEQSDEDRALLNDMWGPGLTRSPEQQKIVEALAPDEADTLLVKWRYSAFHRSPLEQMLKDTGRNQLIITGVYAHIGCMTTATDAFMRDIKPFMVADALADFSRDEHLMSLKYVAGRSGRVVMTQELLPTPVPTSKEALRSVILPLLDESEEPMDDENLIDYGLDSVRMMALAARWRKVHGDIDFVMLAKNPTIDAWWTLLSREVK

SEQ ID NO: 92488 - protein, 173 aa, Clostridioides difficile
  misc_feature (1)..(173): tr|Q181N3|Q181N3_CLOD6 Putative isochorismatase (2,3 di hydro-2,3 dihydroxybenzoate synthase) OS=Clostridioides difficile (strain 630) OX=272563 GN=CD630_36320 PE=4 S V=1
MVLLIVDAQKLITNERLYKFNEFVVNVENLIDTARKNNIEVIYVRHDDGVENELTKGKNGFEIYEKFKPCNGEKIFDKKVNSAFKETGLLEYLTNNGEKDIIIAGLQTDYCIDATIKCGFEHGFNIIVPAYSNTTVDNFFMSAEQSYKYYNEFIWNERYAKCISLEETLRKMK

SEQ ID NO: 92489 - protein, 231 aa, Clostridium beijerinckii
  misc_feature (1)..(231): tr|A0A1S8PP90|A0A1S8PP90_CLOBE Isochorismatase OS=Clost ridium beijerinckii OX=1520 GN=entB PE=4 SV=1
MGIKKIKEYNLPVTEELPQNKVPWELNKNDAILLIHDMQQYFLDAYDSKNSLYKTLVQNIKYLKEFCIRNNIPVIYSAQPKGQTDEQRGLLLDFWGKGIPQEGASKEIVEQLQPDKNDFIITKWRYSAFENTDLYEIIKQLNKSQLIICGVYAHIGCLSTTITAFSRGIKPFFVADAMGDFSREKHLMALEYVSQLAGKVVTIRDIVGKDEEKRSKRDAMSEHCHMEGLLV

SEQ ID NO: 92490 - protein, 198 aa, Clostridium ljungdahlii
  misc_feature (1)..(198): tr|D8GP39|D8GP39_CLOLD Isochorismatase OS=Clostridium l jungdahlii (strain ATCC 55383 / DSM 13528 / PETC) OX=74 8727 GN=phzA PE=4 SV=1
MENLKLNENEFINVGKSALVLIDLQNGITAREVSPSPYTSEEVIQNASKLVNAFSEKGAFIVLVRVSTIDGKDMVRPKTDLKVTGMKYPEGWDNLVPEIADTKDAHIVTKRQWGAFYGTDLDLQLRRRGIDTIILGGISTNIGVDTTAREAYQHGYNQIFAEDAMTAVTKEEHEYVCRYIFPRIGKIRTTKEIVSLLK

SEQ ID NO: 92491 - protein, 237 aa, Clostridium putrefaciens
  misc_feature (1)..(237): tr|A0A381J4G1|A0A381J4G1_9CLOT Isochorismatase EntB OS= Clostridium putrefaciens OX=99675 GN=entB PE=4 SV=1
MEEKYKDNGGKYEFDQELLDRAFTEARKIYKQRGFQTRMGYGKVPAITTVDMAKAWMSEGHPFTCENCGEVCENALKVLEAARKSGVPIFHTTTGYTGEKQWDLPRWDEKIPMHTLDIDSEWMQIDPKLKPRPEEPVIHKKYASNFFGTHLAQTLNYLGVDTLIVMGATACACVRHTVMDSTGYGFKTIIPEGTIGDRVPGVIAWNLFDMDAKFADVEPLENVVKYLEGIDSKVYNR

SEQ ID NO: 92492 - protein, 198 aa, Clostridium saccharoperbutylacetonicum
  misc_feature (1)..(198): tr|M1M9U1|M1M9U1_9CLOT Isochorismatase PhzA OS=Clostrid ium saccharoperbutylacetonicum N1-4(HMT) OX=931276 GN=p hzA PE=4 SV=1
MENLELNENKFINAEKSALVLIDLQSGITAREIQPSPYTSEEVIHNASKLVNAFSEKGTFIVLVRVSTIDDKDMVKPKTDSKVVGMKYPEGWDNLVPEIANTKNAHIITKRQWGAFYGTDLDLQLRRRGIDTIILGGISTNIGVDTTAREAYQHGYNQIFVEDAMTAVTKEEHDYVCKYIFPRIGKIRTTKEIISSLR

SEQ ID NO: 92493 - protein, 177 aa, Clostridium sp.
  misc_feature (1)..(177): tr|A0A0F4W7L5|A0A0F4W7L5_9CLOT Isochorismatase OS=Clost ridium sp. IBUN125C OX=1523154 GN=ClosIBUN125C_CONTIG19 g01301 PE=4 SV=1
MREVLILIDIQNMYFCEGDYKLYEPERAGKKAAEILEKFRMENKPIIHVKHNFKVDAMENGEYLLDFNECVKPKKKEIIVSKNYPSAFLKTDLKKQLDKLKVDKLVIVGMMTHMCIDTTVRAAQNYGYKVTVIHDACTTKDLKWNGQTIDAQTVHDSIMASLQGTFGEVISCEVFME

SEQ ID NO: 92494 - protein, 232 aa, Clostridium symbiosum
  misc_feature (1)..(232): tr|A0A174HGL0|A0A174HGL0_CLOSY Isochorismatase hydrolas e OS=Clostridium symbiosum OX=1512 GN=dhbB PE=4 SV=1
MNVNDRYCSFYYENDDDYGTIEIEPEKTALLIIDAEYACVKRPQPENPSPAELENIARWEPFYEKYDKVIIPNLQRLISLCRRTGIEVTYAKIQGFKSNGRDRSLDQKVSGFNQFLVTSGDHRGDIIQEIAPQKEDIVVTKTTDSALTGTNLRLILHNMGIDTVIVTGTMTDQCVSGTVRDLADESFKVWLIEDACLAATKRLHETELEILNNIYCHVITTQELIDAVNQTR

SEQ ID NO: 92495 - protein, 177 aa, Collimonas arenae
  misc_feature (1)..(177): tr|A0A0A1FF77|A0A0A1FF77_9BURK Isochorismatase OS=Colli monas arenae OX=279058 GN=LT85_2344 PE=4 SV=1
MKSALLVIDVQHGLFEETPRPFEADTVIERINTLATKARTVGAPVVFIQHETPDDELAYNSPNWQLQPGLQVKNSDIKLRKKTSDSFLRTGLQELLAAQNVDQLVICGYASEFCVDTTVRSAAALGYPVTLAADAHTTHDKPHATGQQIRIHENATLQNVDSFDGKIKAVATVELHF

SEQ ID NO: 92496 - protein, 179 aa, Collimonas fungivorans
  misc_feature (1)..(179): tr|G0AGA8|G0AGA8_COLFT Isochorismatase OS=Collimonas fu ngivorans (strain Ter331) OX=1005048 GN=CFU_0161 PE=4 S V=1
MSYLCDASRATLIIVDLQEKLMPVIDDGALVLQRAVLLAQAAGLLGIPVIGTAQQPLRLGRTVAPIDALLDRTIEKTSFDACAQAPFMAALCNGRDELVVLGCEAHVCVLQTVLGLLHRQRRVKLVSDAIGSRRGSDKQAAIGRACAAGAEIVSSEMLMFEWMGNSDHPEFRKILKLIK

SEQ ID NO: 92497 - protein, 48 aa, Comamonas testosteroni
  misc_feature (1)..(48): tr|A0A1Y1IUR1|A0A1Y1IUR1_COMTE Rubredoxin OS=Comamonas testosteroni OX=285 GN=CTR2_0594 PE=4 SV=1
MTCGWLYDEAQGCPEHGIAPNTRWEDVPMNWTCPECGARKEDFEMVEI

SEQ ID NO: 92498 - protein, 199 aa, Conexivisphaera calidus
  misc_feature (1)..(199): tr|A0A4P2VDV8|A0A4P2VDV8_9ARCH Isochorismatase OS=Conex ivisphaera calidus OX=1874277 GN=NAS2_0633 PE=4 SV=1
MSSAGGRNRIYRTLEEMVSPEHTALIAWDVQRALVGMAFNRDEFLANMNRLIEAARGAGVPVIYTMIDPLPPRFASPVQAALGRSWGNVDRSMFELALQPRGDEVVVRKNTASAFVGTNVELMLRNAGIDTVVIGGISTEYGVESTARDGVNRGFYMVVAGDASSSSDRAAHERSLENMRRLGLIVVARTDEIVRAWRR

SEQ ID NO: 92499 - protein, 218 aa, Corynebacterium epidermidicanis
  misc_feature (1)..(218): tr|A0A0G3GZI0|A0A0G3GZI0_9CORY Nicotinamidase-like amid ase OS=Corynebacterium epidermidicanis OX=1050174 GN=CE PID_11920 PE=4 SV=1
MLKLAPEPIRDQQDDHLLTPENCAIVFIDFQEGQYATVGSATSKEINLGAVTLAKLATAYEIPTVVTTVAVDMGVNEATVPEIMRELPGVEQIDRTGVNSWEDADFRAAIEATGKKKIVMAGLWTEVCLAFPTLDMLREGYEIYPVIDAVGGVSSVTHETAIQRMLQAGAQPITSLALGCELMRNWAREDADKYRVIINDYFRRKRAIGAASGDLFHN

SEQ ID NO: 92500 - protein, 224 aa, Corynebacterium geronticis
  misc_feature (1)..(224): tr|A0A3G6J330|A0A3G6J330_9CORY Vibriobactin-specific is ochorismatase OS=Corynebacterium geronticis OX=2079234 GN=vibB PE=4 SV=1
MPIPPINGYPLCPSNPLALLENRNTAEHWRIDPTRAALLVHDMQQYFIDAYCREQEPIATVIPAIQKLIAAADAAEVPVFYSVQPPEQKSPRRGLLREFWGEGMQTEQEAAIIPELSPVAHHHIVTKWRYSAFARTDLRHALAFEGRDQLIITGVYGHMGCQVSAVDAFMNDIQPFLVGDAIADFSEEDHARTLNWVASRCGKVIASQEALDHLGAKARAGAAS

SEQ ID NO: 92501 - protein, 185 aa, Corynebacterium glyciniphilum
  misc_feature (1)..(185): tr|X5DPQ2|X5DPQ2_9CORY Isochorismatase hydrolase OS=Cor ynebacterium glyciniphilum AJ 3170 OX=1404245 GN=CGLY_0 0970 PE=4 SV=1
MSSFQDRPNTALLVIDLQNLVVDGAFRRDEVVGTVKDLVDRAHEENVPVVWVQHEAEHLLPNTHEWEFVPELQQEDGDRLVPKTYGDAFEGTILNEVLEDLGVGHIVVTGAETDACIRSTIHGGFTRGYDVTLVADAHTAGDKTEWGAPPVEQVIDHTNLYWQFQGGVGKTAAVETADQVSFVTG

SEQ ID NO: 92502 - protein, 74 aa, Corynebacterium jeikeium
  misc_feature (1)..(74): tr|Q4JT59|Q4JT59_CORJK Putative isochorismatase OS=Cory nebacterium jeikeium (strain K411) OX=306537 GN=dhbB PE =4 SV=1
MEPITEDQLRGCVAETMKMEPAEIEVSEELYDQGMNSLQLVTVLTWLQEKGYDVSFADLAEDTRLTAWIELLDI

SEQ ID NO: 92503 - protein, 209 aa, Corynebacterium kroppenstedtii
  misc_feature (1)..(209): tr|C4LL29|C4LL29_CORK4 Isochorismatase OS=Corynebacteri um kroppenstedtii (strain DSM 44385 / JCM 11950 / CIP 1 05744 / CCUG 35717) OX=645127 GN=entB PE=4 SV=1
MAIPPIAPYTIPALTTTPTVSWALHADRAALLVHDMQNYFISAYTPDDEPASTMVANIRELIALADEVGVPVFYTAQPPEQKEYRRGLLRELWGQGIQTDAEADIIPELTPRKHHHVITKWRYSAFARTDLRESLAFAKRDQLIITGVYGHMGCGVSAVDAFMNDIQPFLVRDAIADFTRDDHAATINWVARRCGRVVDAEEVLGVLGS

SEQ ID NO: 92504 - protein, 309 aa, Corynebacterium lowii
  misc_feature (1)..(309): tr|A0A0Q0YEJ6|A0A0Q0YEJ6_9CORY Isochorismatase OS=Coryn ebacterium lowii OX=1544413 GN=dhbB PE=4 SV=1
MSRDLPTSIAYEMPLEDTAHPAVEWSLDPQRSALLIHDMQRHFLRPFVAGEQPVTALVENTRRLVEAARAAGIPVFYTAQPADQPTDKRGLLTDLWGPGMTGDSQGAEIIAELAPQEGEVVLTKWRYSAFARSDFEEQLRATGRDQLVISGVYARIGCSVTAVDAFMRDVQPFLVADAVADFCREDHHQAVQWVAACVGEVTDTAAVLSAWGGAGAAPDSVPEAEAGAADLRAVGLRAVDLRALLAELLEEDLTDLDEEGDRLDDWGLDSVRLMTMITRLREQGIDVSFEDVPEDATFAELREIVEEGA

SEQ ID NO: 92505 - protein, 207 aa, Corynebacterium matruchotii
  misc_feature (1)..(207): tr|A0A3S4XW57|A0A3S4XW57_9CORY Isochorismatase OS=Coryn ebacterium matruchotii OX=43768 GN=entB PE=4 SV=1
MAIPQLSPYEIPPLPTNQAAHWQLDPKRAALLVHDMQEYFIAAYDRNANPMSMVLSNIQSIISFADSHGMPVFFSAQPPAQHWSRRGLLNDVWGTGIVTDAQAAIIPELEPAAAHHQVITKWRYSAFERTDLEQALAFTRRNQLIITGVYGHMGCQVTAVDAFMKDIQPFMVGDAIADFSATEHAEAMSWVAKRSGMVISTAEVLSA

SEQ ID NO: 92506 - protein, 207 aa, Corynebacterium mustelae
  misc_feature (1)..(207): tr|A0A0G3H388|A0A0G3H388_9CORY Isochorismate hydrolase OS=Corynebacterium mustelae OX=571915 GN=CMUST_14535 PE =4 SV=1
MTDIPKISYSIADIPIVDSQRRWELKPSQAALLVHDYQNYFLNFLSPLLQQELLDATNRIIKAARNYEMPIIFSGQAGYGDRAERGIIRDLWGKGMASSGTEIELDPRLSRSSTDYTVTKQRYSAFASTNLASILSATRRNQLVLCGIYGSVGIIATAYDCVNRDLESFLIPDAIADFTSVDHELTVNLLSAYSSDLLYSSEFGDDG

SEQ ID NO: 92507 - protein, 78 aa, Corynebacterium oculi
  misc_feature (1)..(78): tr|A0A0Q0YQ01|A0A0Q0YQ01_9CORY Isochorismatase OS=Coryn ebacterium oculi OX=1544416 GN=dhbB_2 PE=4 SV=1
MATVDEVIHNITAKVADMLGVTPESIDPEEELFDQGLDSVRLMDLVTEIRNQGFDVDFADLAEDSRLSAWRAELEEAA

SEQ ID NO: 92508 - protein, 79 aa, Corynebacterium pelargi
  misc_feature (1)..(79): tr|A0A410WB12|A0A410WB12_9CORY Vibriobactin-specific is ochorismatase OS=Corynebacterium pelargi OX=1471400 GN= vibB PE=4 SV=1
MNDTSPQALQQDRIVADIAAMLQIEAAELDLDALLSEQGLDSLRMITLIESWRAAGADIDFHRMMALPTAREWIAELNA

SEQ ID NO: 92509 - protein, 227 aa, Corynebacterium provencense
  misc_feature (1)..(227): tr|A0A2Z3YN39|A0A2Z3YN39_9CORY Isochorismatase OS=Coryn ebacterium provencense OX=1737425 GN=dhbB_1 PE=4 SV=1
MATDLPGLISYPLPTDLPDPVVDWTPDPGRCALLVHDMQRHFLRPFDPSTQPLTSLVPNTVTLAEQARRCGVPVFYTAQPADQPPEKRGLLNDYWGPGLTGSPEGARIIDELTPEDGDRVLTKWRYSAYAYTDFADQLAELGRDQLVITGVYASIGCSVTAVESFMAGVQPFLVADALGDFSRREHELALQWTGHRAGVVTDTAAVTAHWAGPGKDAGISPRPADPS

SEQ ID NO: 92510 - protein, 223 aa, Corynebacterium pseudopelargi
  misc_feature (1)..(223): tr|A0A3G6IWI2|A0A3G6IWI2_9CORY Isochorismatase OS=Coryn ebacterium pseudopelargi OX=2080757 GN=dhbB PE=4 SV=1
MPIPAIAPYPLSSSEPLALLSTPNTAEHWNIDLNRCALLVHDMQNYFIEAYDRNQAPMATVLPNIQALISAADDAEVPVFYSVQPPEQKTARRGLLSDFWGKGMQTTQDAQVVEELTPLPHHHLLTKWRYSAFERTDLRQALAFEGRDQLIITGVYGHMGCQVSAVDAFMNDIQPFLVADGIADFSAEDHQRTLNWVAARCGKVVAANEALNALQARTHEVRL

SEQ ID NO: 92511 - protein, 175 aa, Corynebacterium variabile
  misc_feature (1)..(175): tr|G0HGL1|G0HGL1_CORVD Enterobactin isochorismatase OS= Corynebacterium variabile (strain DSM 44702 / JCM 12073 / NCIMB 30131) OX=858619 GN=entB PE=4 SV=1
MQRHFLKPFDPASEPLASLVPNTARLIARSRAAGIPVFYTAQPSDQPVEKRALLNDWWGPGLTGNPEGAQIIDEVAPVDGDRVLTKWRYSAYAYSDFDEQLAALGRDQLVITGVYASIGCSVTAVESFMGGVQPFLVADALGDFSGTEHRLALQWTGRRAGVVLDTDAVLQHWAD

SEQ ID NO: 92512 - protein, 177 aa, Cronobacter condimenti
  misc_feature (1)..(177): tr|K8A366|K8A366_9ENTR Isochorismatase OS=Cronobacter c ondimenti 1330 OX=1073999 GN=BN137_3756 PE=4 SV=1
MSVPRVVMVIDMQNGVFATPRFDREGRVARINQLMAQARQVIIVQHAEAGGLEEGSTGFAVLPDLNVPENALRVTKTACDAFYRTPLEALLREHGITEFVVCGCASDYCVDTTIKQAASRGFRLTIASDAHTTADRTAAAAPILITHYNEVWANLTVPDNAPGVLPTADILSAWQAN

SEQ ID NO: 92513 - protein, 177 aa, Cronobacter dublinensis
  misc_feature (1)..(177): tr|K8ALX9|K8ALX9_9ENTR Isochorismatase OS=Cronobacter d ublinensis 1210 OX=1208656 GN=BN134_2009 PE=4 SV=1
MSVPQVVMVIDMQNGVFATPRFDREGRTARINALMAGAEQVIIIQHAEAGGLEEDSPGFALLPALNVPEHALRVTKTACDAFWNTPLEALLRERNIEAFVVCGCASDYCVDTTIKQAASRGFRVTIAGDAHTTANRTAATAPVLIEHYNEVWANLTVPGNPLRVLSTASILTAWQAN

SEQ ID NO: 92514 - protein, 166 aa, Cronobacter sakazakii
  misc_feature (1)..(166): tr|K8CZ37|K8CZ37_CROSK Isochorismatase OS=Cronobacter s akazakii 696 OX=1208664 GN=BN128_4061 PE=4 SV=1
MQNGVFATPRFDRDGRVARINQLMAGAEQVIIIQHTEPGGLEEDSPGFAFLPELNVPQNALRVTKTACDAFYRTPLEALLREHNINAFVVCGCASDYCVDTTIKQAASRGFQVTVAGDAHTTADRRAAAAPVLIDHYNDVWSTLTIPGNPLRVMKTDAILDAWQAN

SEQ ID NO: 92515 - protein, 289 aa, Cronobacter turicensis
  misc_feature (1)..(289): tr|C9XXI3|C9XXI3_CROTZ Isochorismatase OS=Cronobacter t uricensis (strain DSM 18703 / LMG 23827 / z3032) OX=693 216 GN=entB PE=4 SV=1
MAIPKLNAYTLPTAADLPQNKVSWALEPPRAALLIHDMQEYFLNFWGENCPMIEQVVANIAALRKYCKAQGIPVYYTAQPNNQSDADRALLNDMWGPGLNNHPDKQKVVAALAPDADDTVLVKWRYSAFHRSPLEHTLKETGRDQLIICGVYAHIGCMITATDAFMRDIKPFMVADALADFSRDEHLMALNYVAGRAGRVVMTADLLPANDSDAPGSKAALRALVLPLLDESDEPEDDENLIDYGLDSVRMMALAARWRKVHGDIDFVMLAKNPTIDAWWALLSREPQA

SEQ ID NO: 92516 - protein, 289 aa, Cronobacter universalis
  misc_feature (1)..(289): tr|A0A376EPY7|A0A376EPY7_9ENTR Isochorismatase OS=Crono bacter universalis NCTC 9529 OX=1074000 GN=entB PE=4 SV =1
MAIPKLNAYTLPTAADLPQNKVSWALEPSRAALLIHDMQEYFLNFWGENSPMIEQVVANIAALRAYCKAQGIPVYYTAQPNNQSDADRALLNDMWGPGLNNHPDKQKVVAALAPDADDTVLVKWRYSAFHRSPLEHALKETGRDQLIICGVYAHIGCMITATDAFMRDIQPFMVADALADFSRDEHLMALNYVAGRAGRVVMTADLLPASEPDAPGSKAALRALVLPLLDESDEPEDDENLIDYGLDSVRMMALAARWRKAHGDIDFVMLAKNPTIDAWWALLSREPQA

SEQ ID NO: 92517 - protein, 176 aa, Cupriavidus basilensis
  misc_feature (1)..(176): tr|A0A0C4YNE2|A0A0C4YNE2_9BURK Isochorismatase OS=Cupri avidus basilensis OX=68895 GN=RR42_s0478 PE=4 SV=1
MLHNAAESVLVLVDFQGRLMPAIHEGDRVAKEAVRLGNIARVLDVPVIGTEQSPGSLGGNIDDIKRLCDRTLAKDYFDGCRDGLLDLLPEGRKNVVVAGCEAHVCVLQTVAGLLGHGLKVTVVLDAIGSRQARSREAAIDRMRNSGATAATVEMVAFEWMRTSQHERFREVLGFVK

SEQ ID NO: 92518 - protein, 202 aa, Cupriavidus necator
  misc_feature (1)..(202): tr|F8GSN8|F8GSN8_CUPNN Isochorismatase hydrolase OS=Cup riavidus necator (strain ATCC 43291 / DSM 13513 / N-1) OX=1042878 GN=CNE_2c08360 PE=4 SV=1
MNHPTIRTMAGAPAPTAIEAASSALLVIDFQNEYFSGKMPIPDGARALGNAQRLIAHADAAGIPVVHIQHVTPAGSPIFAEQSASVKFHSDLQPAAHHTVLQKTSVSVFPTTDLDQRLKAAGIKTLIITGLMTHACVSGAARDAVPLGYGVIVAEDACATRDLDTAGGVVPHRDLHRAALATIDDTFGDILTTEQVLKLPIA

SEQ ID NO: 92519 - protein, 202 aa, Cupriavidus sp.
  misc_feature (1)..(202): tr|A0A388RPL5|A0A388RPL5_9BURK Isochorismatase OS=Cupri avidus sp. P-10 OX=2027911 GN=CTP10_4284 PE=4 SV=1
MTHPTIRTLAGASAPTAIAAASTALLVIDFQNEYFDGKLPIPDGAAALGNARRLVAHADAAGIPVFHVQHLAPAGSPVFAEQGASAAFHQDLQPAGHHTVVQKTSVSVFPTTDLDQRLKAAGIKTPVITGLMTHACVAGAARDAVPLGYGVIVAEDACATRDLDRAGGVVRHRDLHQAALASIEDTFGDVLTTEQVLRLPVA

SEQ ID NO: 92520 - protein, 202 aa, Cupriavidus taiwanensis
  misc_feature (1)..(202): tr|B3R8I8|B3R8I8_CUPTR Putative Isochorismatase hydrola se OS=Cupriavidus taiwanensis (strain DSM 17343 / BCRC 17206 / CIP 107171 / LMG 19424 / R1) OX=977880 GN=RALTA _B0726 PE=4 SV=1
MHHPTLRKIAGAPARAAIDAASTAVLVIDFQNEYFSGKLPIPDGAAALGNARRLVGHADAAGMPVFHIQHVTPAGSPVFAEHGATVAFHGDLQPAPHHTVLQKTSVSAFPTTDLDQRLKAAGIQTLIITGLMTHACVTGAARDAVPLGYGVIVAADACATRDLDTVAGTIAHQDLHRAALAALDDTFGDILTTEQVLKLPLA

SEQ ID NO: 92521 - protein, 182 aa, Deferribacter desulfuricans
  misc_feature (1)..(182): tr|D3PC35|D3PC35_DEFDS Isochorismatase hydrolase OS=Def erribacter desulfuricans (strain DSM 14783 / JCM 11476 / NBRC 101012 / SSM1) OX=639282 GN=DEFDS_0678 PE=4 SV=1
MYSLKRDDAVLVVVDIQKKLVKIMPEKVYEKILKNNQILIKAAKILNIPVIYTQQYTKGLGETVDELKELLTDEHVEKLTFSCCKEQSFLEKLKSLGRKSVILTGMEAHICVLQTAIDLLENGYNVFTVADAVCSRFKDNWKFGLEYMRDAGAKITVVETVLFQLLERSDAKEFKEVQALIK

SEQ ID NO: 92522 - protein, 192 aa, Defluviimonas aquaemixtae
  misc_feature (1)..(192): tr|A0A2R8BJX5|A0A2R8BJX5_9RHOB Putative isochorismatase OS=Defluviimonas aquaemixtae OX=1542388 GN=phzD PE=4 S V=1
MSDLLFDRRQSVLAVIDVQARFLDKLPPQQREPLVGRIAWLIGVARHLSVPVVAMAEDVEQNGPPVGEVTDALPPETRVFDKRVFGLAGQGDILDAVRASGRTEAVLLGLETDVCVSQSALGLLAAGYRVVAVSDATASPGEHHAAGLARMKQAGVTITTVKGIFYEWARDLETLGHTRSAMGAILPAGLTL

SEQ ID NO: 92523 - protein, 175 aa, Dehalobacter sp.
  misc_feature (1)..(175): tr|K4LIJ7|K4LIJ7_9FIRM Isochorismatase OS=Dehalobacter sp. CF OX=1131462 GN=DCF50_p2455 PE=4 SV=1
MQKKALVIIDIQNDITKNYKDIIDNINKAIDWAVHNNIHVIYIRHENLSAGTRTFKTNTYGSELASDLKIVSKNVFTKYKGNALSSEEFADFISKNEICDFYITGADAIACVKSTCYNLCKANYGVNVLSDCITSYDKRKIDEMLRYYESKGSKIIRLNDLLPKRDPGYSQCFVD

SEQ ID NO: 92524 - protein, 179 aa, Dehalogenimonas sp.
  misc_feature (1)..(179): tr|A0A0F7CTR6|A0A0F7CTR6_9CHLR Isochorismatase OS=Dehal ogenimonas sp. WBC-2 OX=943347 GN=DGWBC_0714 PE=4 SV=1
MLRIDDTLLVVIDVQEKLFRVIPDKDILLAHLQKLIRGCAILEIPVIVTEQNPAGLGATVAELAGLLSDSSRITKFTFSCCAESSFMDQLAATGRKQILICGIESHICVFQTTSDLLSQGYETHVITDCVASRTHDNKELALNRLNAEGAKLTGVEMALFELLRTAKAEQFKSISSLIK

SEQ ID NO: 92525 - protein, 290 aa, Deinococcus maricopensis
  misc_feature (1)..(290): tr|E8U3H6|E8U3H6_DEIML Isochorismatase OS=Deinococcus m aricopensis (strain DSM 21211 / LMG 22137 / NRRL B-2394 6 / LB-34) OX=709986 GN=Deima_0183 PE=4 SV=1
MIPRIATYPMPTESDLPRSRVPWTPDAARTVLLVHDLQQYFLDFYDAAHAPIPELFAHVNALLERCRALGIPVVYTAQPGDQAPADRALLTDFWGPGLRDDPAQVRVHPAVAPQGGDTVLTKWRYSAFVRTPLREQLRAWGRDQLLICGVYANIGCLLTAADAFMHDTQAFLIGDAVADFTRAQHDQALTYAAGRCASVLSTRQVLDALPAPAAALSPARVRADLAAHVGLSADDLRDDDDLLLLGLDSIRLMLLVEAWTGAGATITYADVVADPTVGGVLRRLSAGVGA

SEQ ID NO: 92526 - protein, 179 aa, Deltaproteobacteria bacterium
  misc_feature (1)..(179): tr|A0A1V6ISI5|A0A1V6ISI5_9DELT Vibriobactin-specific is ochorismatase OS=Deltaproteobacteria bacterium ADurb.Bi n022 OX=1852863 GN=vibB PE=4 SV=1
MLNRLEAVLVIVDIQEKLFRVMERQESLIGNTIKLIQGFQALDIPILVTEQIPAKIGPTIPEISEKLAGVSPVAKESFSCWGEPAFRSRLESLNRRQVVLTGIECHVCVYQTALDLMANGYSVHPVTDTVSSRTSANRKIGLSSMKSAGAHLTSTEMVLFELLRTAACPQARNIFKIVK

SEQ ID NO: 92527 - protein, 378 aa, Dermatophilus congolensis
  misc_feature (1)..(378): tr|A0A239VD89|A0A239VD89_9MICO Isochorismatase OS=Derma tophilus congolensis OX=1863 GN=dhbB PE=4 SV=1
MPLPKIARYSYDSRTALALNGTNWKVDPERAVLLIHDMQRHYIDAFEPGGQASIATARIIDLLDIAREHEIPVIYTAQDPYANDDEDTTDEAIAPTDEADTADVEQEDVEQAETGDEEPSTAENTDDQDAADQPAPESEAAEEHITDAGSSNEEETSEEELDNIGPVLGASHDETPPATDNGEEETHPEDPEEPHDDDLDGADILDHLAPEENDTVLTKWQYSDFHDSELRERMRQEGRDQLIITGIYAHVNCLATALVASAEKLQPFFVADAMADHSREEHEMAARSVASSCGQVVTTADILHALMPQLDEEENTTTNHEVIGSVLSETKPLSELFADLDAAASLAPDPEPIAAPVIETEDAKVIPFTAAPEPAPQA

SEQ ID NO: 92528 - protein, 95 aa, Desmospora sp.
  misc_feature (1)..(95): tr|F5SDX5|F5SDX5_9BACL Isochorismatase OS=Desmospora sp . 8437 OX=997346 GN=pncA PE=4 SV=1
MEGVFREGPATFVVTGDCTDLCIYQNATGIRLLANEHDADVRVVVSAEHTRTFDTPVETAKSIGAHAHDGEFMDHVFLYHMKLNGVEVVRTIHVD

SEQ ID NO: 92529 - protein, 196 aa, Desulfovibrio sp.
  misc_feature (1)..(196): tr|A0A388SLL3|A0A388SLL3_9DELT Isochorismatase OS=Desul fovibrio sp. HK-II OX=2009266 GN=RVX_2281 PE=4 SV=1
MSSSAATAPASATAAAPVTALVLVDIQRDYFPGGRMALPDAENAGRRAADLLARCRAASMPVIHVRHESIRPGSTFFLPGTEGADIHPLAAPLPGEAVLTKNFPNSFRDTTLLQHLRDLGATDIIVVGMMTHMCIDTTVRAAFDLGFRCRVAGDATASPPLSYGGRTVDADTVRATFLAALHGVFAEVTDAADLAV

SEQ ID NO: 92530 - protein, 184 aa, Desulfurella amilsii
  misc_feature (1)..(184): tr|A0A1X4XUI4|A0A1X4XUI4_9DELT Isochorismatase OS=Desul furella amilsii OX=1562698 GN=DESAMIL20_743 PE=4 SV=1
MSFLSRENCVLCVIDMQDKLAKVMKKLDNTTKNISLLIKASKELDVPIFYTEQYPKGLGETIEPLKSLLADTQRFDKMSFSALEIPEIKTFIVDSSKTTVVLCGIESHICVLSTTIDLIEKGYNVIIAKDAVTSREEEFYNTAVDFYNSIGAKVIPSESIVFYWLKFAGTESFKKLQKVILSKE

SEQ ID NO: 92531 - protein, 290 aa, Dickeya aquatica
  misc_feature (1)..(290): tr|A0A375A8F5|A0A375A8F5_9GAMM Isochorismatase [enterob actin] siderophore / Apo-aryl carrier domain of EntB OS =Dickeya aquatica OX=1401087 GN=cbsB PE=4 SV=1
MAIPMLNSYPLPTKAELPVNKVKWQVESHRAALLIHDMQNYFLNFWETSSPLTAQLIANIVRIRQLCHQLGIPVFYTAQPNAQSDKDRALLNDMWGPGLNRHPDQQQITAALTPDECDTVLVKWRYSAFHRSDLEQRLHTAGRDQLIICGVYAHIGCLTTATDAFMRDIQPFMVADALADFSREEHMMALRYTAGRCGRVLDSEQLLSELTAQPDNSLTRLRAELLPLLDGDADPADDENLLDYGLDSVSIMSLVTRWRQQGHDVDFVTLVKKPTLRHWHQLLMQVREEA

SEQ ID NO: 92532 - protein, 291 aa, Dickeya chrysanthemi
  misc_feature (1)..(291): tr|C6CQI6|C6CQI6_DICC1 Isochorismatase OS=Dickeya chrys anthemi (strain Ech1591) OX=561229 GN=Dd1591_1316 PE=4 SV=1
MAIPKLNAYPLPGEEHLPVNKVNWPVDATRAALLIHDMQNYFLNFWGENSPLTEQLIANVARIRQACRRQGIPVFYTAQPNQQSDADRALLNDMWGPGLNRHPEQQQITPALTPDANDTVLVKWRYSAFHRSDLEQRLNAAGRDQLIICGVYAHIGCLTTATDAFMRDIKPFMVADALADFSQEEHLMALRYTAGRCGRVLTSAQLLDALAPQTDDGLARLRAELLPLLDDDDEIGDDDNLLDYGLDSVRIMSLVTRWRQQGHDLDFVALVKNPTLRHWHQLLSQRQPEEA

SEQ ID NO: 92533 - protein, 174 aa, Dickeya dadantii
  misc_feature (1)..(174): tr|E0SN14|E0SN14_DICD3 Isochorismatase OS=Dickeya dadan tii (strain 3937) OX=198628 GN=Dda3937_01697 PE=4 SV=1
MRVLIVVDMQNGVFATPRYQQDMVVERINRLIDSADQTIFIQHADADMLPGSEAWQLLPSLYRPANAISVTKTACDAFYRTELADVLNRLDVRHFTVCGCATDYCVDATIKNAASRGYAQTVAGDAHTTAERRAVSAAQLIAQHNDVWRDFIIPGNTLRVEDTEVILREWLAQV

SEQ ID NO: 92534 - protein, 291 aa, Dickeya paradisiaca
  misc_feature (1)..(291): tr|C6C323|C6C323_DICP7 Isochorismatase OS=Dickeya parad isiaca (strain Ech703) OX=579405 GN=Dd703_1488 PE=4 SV= 1
MSIPSLNDYSLPTDDQLPANKVNWPLDADRAALLIHDMQCYFLNFWGQDSQLTQQLIANIVRLKQICRQRGIPVFYTAQPDRQSPADRALLNDMWGPGLNRHPDQQKITDALAPDPEDTVLVKWRYSAFQRSDLEQRLKQSGRDQLIICGVYAHIGCLTTATDAFMRDVKPFMVADALADFSQEEHMMALRYTAGRCGRVVTTDQSLSALAPATGYTLTQLRADLLPLLDDDSDDICDDENLLDYGLDSVRIMSLVARWRQQGHDLDFVALVKQPTLRHWHRLLNPLREGA

SEQ ID NO: 92535 - protein, 180 aa, Dickeya solani
  misc_feature (1)..(180): tr|A0A2K8VU08|A0A2K8VU08_9GAMM Isochorismatase OS=Dicke ya solani RNS 08.23.3.1.A OX=1240086 GN=D083_0389 PE=4 SV=1
MPRALLIIDMQRFVTDSIQQGMGYYPATCIENMTRVLEQFRTTGATVIHVRHESAAGTPMQPGAPLAMPMEAFDALPEEPVFIKNTSSAFSSTALLPYLQSKQIAEVVVIGAVAGFCVNSTVRMGSDLGLNMVVVNDAVISFELQPANLTAKEIFDVTLALLGTSFARSISTEAFLKESQ

SEQ ID NO: 92536 - protein, 200 aa, Dinoroseobacter shibae
  misc_feature (1)..(200): tr|A8LQF0|A8LQF0_DINSH Isochorismatase OS=Dinoroseobact er shibae (strain DSM 16493 / NCIMB 14021 / DFL 12) OX= 398580 GN=entB PE=4 SV=1
MSAPLDPKRTALLTIDLQNDFLHPEGAYGRAGQTAPHLVALPDRIAPLRDRLREKGGTFISAQFTLVPDRDGNPLIAEHLQRLRPFLGRGDFRPGGWGHGLVDTLAPADFTIEKVAYSAFYQTRLEYILRALEIDTLIIGGIVTNGGVASTVRDAHLRNIHTVLLGDGSGAFDPAVHDATLTSLGTVTEIRSCAEAEAML

SEQ ID NO: 92537 - protein, 205 aa, Duganella sp.
  misc_feature (1)..(205): tr|A0A1E7WZ48|A0A1E7WZ48_9BURK Vibriobactin-specific is ochorismatase OS=Duganella sp. HH101 OX=1781066 GN=vibB PE=4 SV=1
MTATPRRALIVIDVQNEYFTGKMKIEYPPVETSLPNIGRAMDAAREAGIPVVVVQHDAPEASPIFALGSDGWKVHPVVAQRVHDHFINKGMASVFAGTDLADWLKERGVDTLTIAGYMTHNCNASTIFEAKHRGLQVEVLEDATGALPYENAAGKVSAEEIHRVFNTVFHSNFGAVVSTEDWQVAVRDGRKLESDNIYLSNQRTR

SEQ ID NO: 92538 - protein, 217 aa, Dyella sp.
  misc_feature (1)..(217): tr|A0A2N7QNA0|A0A2N7QNA0_9GAMM Putative isochorismatase OS=Dyella sp. AD56 OX=1528744 GN=phzD PE=4 SV=1
MSITATPTPGKQLITPTDHTLILIDFQSQMSFATHSIDPTVLRNNAALVANAAASFKVSTILTTVAEKTFSGPMYSEITDPFPGQALLDRTSMNTWEDAAVIKRVNAIGKSRLVLAGLWTSVCIVGPALSALDQGFEVYVIADACGDVSAEAHNRAIERMIQAGARPMTSLQYLLELQRDWARTESYDSTTDIARRFGGSYGLGITYAKSMFGAHEG

SEQ ID NO: 92539 - protein, 222 aa, Edwardsiella anguillarum
  misc_feature (1)..(222): tr|A0A076LSW9|A0A076LSW9_9GAMM Isochorismatase OS=Edwar dsiella anguillarum ET080813 OX=667120 GN=ETEE_3355 PE= 4 SV=1
MTQQAFQAQPFALPFDPQSTALVMIDMQRDFVEAGGFGEALGNDVSLVRSAIAPCQKVLAAARAHQLLVIHTREGHRADLSDCPAAKLTRGGKTFIGEPGPMGRILVRGEPGHDIIPELYPIAGEPVVDKPGKGAFYQTDLQLILQNHGIKTLIVCGVTTEVCVNTTVREANDRGYQCIIPADCVGSYFPEFQKSALEMIKAQGAIFGWVSDADSIIAGLQG

SEQ ID NO: 92540 - protein, 183 aa, Empedobacter falsenii
  misc_feature (1)..(183): tr|A0A376G823|A0A376G823_9FLAO Isochorismatase OS=Emped obacter falsenii OX=343874 GN=dhbB PE=4 SV=1
MSKKALIIIDIQNDYFEGGAIELVNPVEASLNARKVLNYFRENNLPIAHIQHVSANHEVMPIFVEGTKGFDIHENVKPLDGEKVFRKYFPNSFRGTGLLEYLKENEVTEVVITGMMTHMCVDATTRAAFDFEYKCTVIGDACASRDLEIKGSSVKSTDVHNAFLSALEFFYAEIKNTDEFLSA

SEQ ID NO: 92541 - protein, 263 aa, Enterobacter agglomerans
  misc_feature (1)..(263): tr|A0A379AMF0|A0A379AMF0_ENTAG Isochorismatase OS=Enter obacter agglomerans OX=549 GN=entB PE=4 SV=1
MKWMLEPDRAALLIHDMQRYFLNFWGENSPLVEQVVDNIARLRRYCKAQGIPVFYTAQPNAQSDEDRALLNDMWGPGLNKHPDQQKIVDALAPDEDDQVLTKWRYSAFHRSPLESILQEMGRDQLIITGVYAHIGCLTTATDAFMRNIQPFMVADALADFSREEHMMALTYTAGRSGKVVMTADLMPVPLSKDDLRALILPLLEDDEVPEDDENLIDYGLDSVRVMALAARWRQVHRDIDFVSLAKNPSIDGWWALLTREPAK

SEQ ID NO: 92542 - protein, 191 aa, Enterobacter asburiae
  misc_feature (1)..(191): tr|A0A376F519|A0A376F519_ENTAS Isochorismatase OS=Enter obacter asburiae OX=61645 GN=entB PE=4 SV=1
MWGPGLTRSPEQQRIVAELTPDEADTVLVKWRYSAFHRSPLEQMLKETGRNQLLITGVYAHIGCMTTATDAFMRDIKPFFIADALADFTRDEHLMSLNYVAGRSGRVVMTDELLPFVPATKAALRELILPLLDESDEPMDDENLIDYGLDSVRMMALAARWRKVHGDIDFVMLAKNPTIDAWWALLSREVK

SEQ ID NO: 92543 - protein, 284 aa, Enterobacter cancerogenus
  misc_feature (1)..(284): tr|D2ZGJ6|D2ZGJ6_9ENTR Isochorismatase OS=Enterobacter cancerogenus ATCC 35316 OX=500639 GN=entB PE=4 SV=1
MAIPKLTAYALPTAADLPNNKVNWAFEPERAALLIHDMQEYFLNFWGENSAMMAQVVANIARLRDYCKEHNIPVYYTAQPKEQSDEDRALLNDMWGPGLTRSPEQQRIVAELTPDEADTVLVKWRYSAFHRSPLEQMLKETGRNQLLITGVYAHIGCMTTATDAFMRDIKPFFIADALADFTRDEHLMSLRYVAGRSGRVVMTDELLPSVPASKAALRELILPLLDESDEPMDDENLIDYGLDSVRMMALAARWRKVHGDIDFVMLAKNPTLDAWWALLSREVK

SEQ ID NO: 92544 - protein, 824 aa, Enterobacter cloacae
  misc_feature (1)..(824): tr|A0A377M4K1|A0A377M4K1_ENTCL 2,3-dihydroxybenzoate-AM P ligase OS=Enterobacter cloacae OX=550 GN=entB PE=4 SV =1
MTIPFTRWPEEFARRYREKGYWQDLPLTHILTDHAEKDTVAIIDGERHLTWRAFNQAVNNLASALQGQGVRRGETALVQLGNVAEFYITFFALLQVGVAPVNALFSHQRNELNAYAAQIKPALLIADREHALFAGDDFLNRFVDEHRSVRVVLLRGDNGAHALEAAIAHPATHFIPNPTPADEVAFFQLSGGSTGTPKLIPRTHNDYDYSIRRSNEICGITADTRYLNALPAAHNYAMSSPGSLGVFMAGGCVVLAHDPSATICFPLIERHQINVTSLVPPAVSLWLQAIADGAGNAQLKSLKLLQVGGARLSATLAARIPAEIGCQLQQVFGMAEGLVNYTALDDTPERIIHTQGRPMCPDDEVWVADEQGNPLPRGETGRLMTRGPYTFRGYFNSPEHNASAFDANGFYCSGDLIAIDEQGYITVQGREKDQINRGGEKIAAEEIENLLLRHEAVIHAALVSMEDSLLGEKSCAFLVVKQPLRAVEVRRFLREQGVAEFKLPDRVESVDALPLTPVGKVDKKQLRLWIAERARPEEQSMAIPKLTAYALPTAAELPTSKVNWAFEPERAALLIHDMQEYFLNFWGENSAMMQQVVANIARLRTYCKAHNIPVYYTAQPKEQSDEDRALLNDMWGPGLTRSPEQQRIVAELTPDEADTVLVKWRYSAFHRSPLELMLKETGRNQLLITGVYAHIGCMTTATDAFMRDIKPFFIADALADFTREEHLMSLNYVAGRSGRVVMTDDLLPSVPASKAALRELILPLLDETDEPMDDENLIDYGLDSVRMMALAARWRKVHGDIDFVMLAKNPTLDAWWALLSREVQ

SEQ ID NO: 92545 - protein, 225 aa, Enterobacter hormaechei
  misc_feature (1)..(225): tr|F5RT72|F5RT72_9ENTR Isochorismatase family hydrolase OS=Enterobacter hormaechei ATCC 49162 OX=888063 GN=yca C PE=4 SV=1
MSTPANFNGARPVIDVNDAVMLLIDHQSGLFQTVGDMPMPELRARAAALAKIASLAKIPVITTASVPQGPNGPLIPEIHANAPHAQYVARKGEINAWDNPEFVAAVKATGRKTLIIAGTITSVCMAFPSISAVADGYKVFAVIDASGTYSKMAQEITLARVVQAGVVPMDTAAVASEIQRTWNREDAGEWAEVYTHIFPAYQLLIESYSKAQDVVKNSEVLDSQR

SEQ ID NO: 92546 - protein, 284 aa, Enterobacter kobei
  misc_feature (1)..(284): tr|A0A5E0UWA3|A0A5E0UWA3_9ENTR Isochorismatase OS=Enter obacter kobei OX=208224 GN=entB_1 PE=4 SV=1
MAIPKLTAYALPTAAELPTSKVNWAFEPERAALLIHDMQEYFLNFWGENSDMMQQVVANIAKLRAYCKEHNIPVYYTAQPKDQSDEDRALLNDMWGPGLTRSPEQQRIVAELTPDEADTVLVKWRYSAFHRSPLEQMLKETGRNQLLITGVYAHIGCMTTATDAFMRDIKPFFIADALADFTRDEHLMSLKYVAGRSGRVVMTDELLPSVPATKAALRELILPLLDESDEPMDDENLIDYGLDSVRMMALAARWRKVHGDIDFVMLAKNPTLDAWWALLSREVK

SEQ ID NO: 92547 - protein, 283 aa, Enterobacter lignolyticus
  misc_feature (1)..(283): tr|E3G5C1|E3G5C1_ENTLS Isochorismatase OS=Enterobacter lignolyticus (strain SCF1) OX=701347 GN=Entcl_3200 PE=4 SV=1
MAIPKLQAYALPTAADLPSNKVNWPFEPARAALLIHDMQDYFLNFWGDNSPLMATVVANIAALRQYAKQHHIPVYYTAQPKTQSDEDRALLNDMWGPGLTRSPEQQRIIAALAPDEADTVLVKWRYSAFHRSPLEQALKETGRDQLVITGVYAHIGCMTTATDAFMRDIKPFFVADALADFSREEHLMSLNYVAGRSGRVVMTDELLPLPGSKAALRALILPLLDESDEPMDDENLVDYGLDSVRMMALAARWRKVHGDIDFVMLAKNPTLDAWWALISREVK

SEQ ID NO: 92548 - protein, 284 aa, Enterobacter soli
  misc_feature (1)..(284): tr|A0A198GQ94|A0A198GQ94_9ENTR Isochorismatase OS=Enter obacter soli ATCC BAA-2102 OX=1354262 GN=M987_02264 PE= 4 SV=1
MAIPKLTAYALPTAADLPNNKVNWAFEPERAALLIHDMQEYFLNFWGENSPMMAQVVANIAKIRAYCKEHNIPVYYTAQPKEQSDEERALLNDMWGPGLTRSPEQQRIVAELAPDEADTVLVKWRYSAFHRSPLELMLKETGRNQLLITGVYAHIGCMTTATDAFMRDIKPFFIADALADFTREEHLMSLNYVAGRSGRVLMTEELLPSIPASKEALRAMILPLLDESDEPMDDENLIDYGLDSVRMMALAARWRKVHGDIDFVMLAKNPTLDAWWALLSREVK

SEQ ID NO: 92549 - protein, 284 aa, Enterobacter sp.
  misc_feature (1)..(284): tr|A4W7X8|A4W7X8_ENT38 Isochorismatase OS=Enterobacter sp. (strain 638) OX=399742 GN=Ent638_1127 PE=4 SV=1
MAIPKLTGYALPTAAELPNNKVSWAFEPDRAALLIHDMQEYFLNFWGENCPMMEQMVANIAQLRDYCKKHNIPVYYTAQPKEQSHEDRALLNDMWGPGLTRSPEQQRIVSELTPDEADTVLVKWRYSAFHRSPLEQMLKETGRNQLLITGVYAHIGCMTTATDAFMRDIKPFFIADALADFSREEHLMSLNYVAGRTGRVVMTDELLPSVPASKAALRAVILPLLDESDEPMDDENLIDYGLDSVRMMALAARWRKVHGDIDFVMLAKNPTLDAWWALLSREVK

SEQ ID NO: 92550 - protein, 167 aa, Enterococcus casseliflavus
  misc_feature (1)..(167): tr|A0A4V0GKD6|A0A4V0GKD6_ENTCA Isochorismatase OS=Enter ococcus casseliflavus OX=37734 GN=NCTC7179_00664 PE=4 S V=1
MLVIVDMQNQILDEANEAYVPDSAALVKRIAKRLEQARVNGEYILHTRDIPIEVKGTPDEEAAALQLIPELKPLENEKVVKKYYYSIPPEVLIDIKKNLFKPEEEKKIEITGVETNICVLSNTIEIQSAFPDADFTINKTLVAGKNHESQGLDILRDFNVQIIDGTK

SEQ ID NO: 92551 - protein, 163 aa, Enterococcus durans
  misc_feature (1)..(163): tr|A0A377L3E2|A0A377L3E2_9ENTE Isochorismatase OS=Enter ococcus durans OX=53345 GN=NCTC8130_01638 PE=4 SV=1
MLVIIDMQNQVLDPTSDFYVPGSEELVDRIAQRLAKARENNELVLFTRDIPIEKKGVEEEIPALQLIPKLAPLPNERVIKKYYFTLPPEKLIELKKQLFDRKDEQKSIEVVGIETNLCVLSNTIALQSAFPEADFFLDPGLLSENQHGKMVIELLKDFNVSIL

SEQ ID NO: 92552 - protein, 208 aa, Enterococcus faecium
  misc_feature (1)..(208): tr|Q3Y2B2|Q3Y2B2_ENTFD Isochorismatase OS=Enterococcus faecium (strain ATCC BAA-472 / TX0016 / DO) OX=333849 G N=entB2 PE=4 SV=1
MFNNKNTAVVLTDPQVEFLKPAGGGFGLTKDILEKYNTIENMIEMVKQAKEKGYKLFISPHYFYPHDHKWQFGGAGEHMMLEQQMFARKSQYESVEEGSGADFIEELKPYLDENTIISSPHKIFGPESNDLALQLRKNGIDTVILGGMNGNLCSDSHMRELVESGFNVVVATDAIGAPGQEAMDAALTNFGFIADQVMTTEEVLEQLS

SEQ ID NO: 92553 - protein, 169 aa, Enterococcus gallinarum
  misc_feature (1)..(169): tr|A0A376H7B1|A0A376H7B1_ENTGA Isochorismatase OS=Enter ococcus gallinarum OX=1353 GN=NCTC12360_03625 PE=4 SV=1
MLVVIDMQNQIRDENSQSFISDSPALIKRIAKRLQQARAEGEYILFTRDIPIDCKDTPDEEQEALQIVPELQPLPNEKVIKKYYFSIPPEVLLEIKEQLFNDKNEQKHIEVTGVETNICVLSNTIEIQSAFPEADFLINQQLVSGRNHESSGLKILQDFNVEVVDRTDN

SEQ ID NO: 92554 - protein, 165 aa, Enterococcus hirae
  misc_feature (1)..(165): tr|A0A4U9QUG2|A0A4U9QUG2_ENTHR Isochorismatase OS=Enter ococcus hirae OX=1354 GN=NCTC12367_01957 PE=4 SV=1
MLVIIDMQNHILDPNSEFYIPESDQLAERIAQRLAKARQNNEYILFTRDIPVELKDKEEEREDLQLIPLLSPQENERVIKKYYFTIPPETLAEIQETLFESKEEQKEIEVVGIETNLCVLSNLIGLQSAFPEADFFVDPMLVSSRKHGESALELLKDFNVSIVES

SEQ ID NO: 92555 - protein, 169 aa, Enterococcus saccharolyticus
  misc_feature (1)..(169): tr|A0A449EXY1|A0A449EXY1_9ENTE Isochorismatase OS=Enter ococcus saccharolyticus OX=41997 GN=NCTC8741_02398 PE=4 SV=1
MLVVIDMQNQIRDENSQSFISDSPALITRIAKRLQQARAEGEYILFTRDIPIDCKDTPDEEQEALQIVPELQPLPNEKVIKKYYFSIPPEVLLEIKEQLFNDKNEQKHIEVTGVETNICVLSNTIEIQSAFPEADFLINQQLVSGRNHESSGLKILQDFNVEVVDRTDN

SEQ ID NO: 92556 - protein, 173 aa, Enterococcus sp.
  misc_feature (1)..(173): tr|T0VD30|T0VD30_9ENTE Isochorismatase OS=Enterococcus sp. HSIEG1 OX=1316414 GN=HSIEG1_2116 PE=4 SV=1
MQDILIIVDLQKGVCSNNGTKLDHLDSLLLFANQRIQTYRHAQRPVLFVQHEEEELGYQTDEWLLHPDLAVQATDLFLRKTHANSFFNTSLQSLLTKHHVRSIEWIGAQTEFCMDGTIKFAHGLGYQNVLYQQATTTYASEGWSAAEIIHWYERIWQDRYAQILALPKNSEKK

SEQ ID NO: 92557 - protein, 284 aa, Erwinia gerundensis
  misc_feature (1)..(284): tr|A0A0U5KYZ4|A0A0U5KYZ4_9GAMM Isochorismatase OS=Erwin ia gerundensis OX=1619313 GN=entB PE=4 SV=1
MTIPKLADYALPDAADLPQNKVQWAFEPPRAALLIHDMQDYFLNFWGENSPMIQQVVENIACLRRYCKAQGVPVFYTAQPNEQSDADRALLNDMWGPGLNKHPEQQKVAAALAPDADDHVLVKWRYSAFHRSPLEETLHEMGRDQLIICGVYAHIGCLTTATDAFMRNIKPFMVADALADFTREEHMMALTYTAGRSGRVVMTRDLMPLPLDKAELRAMVLPLLEDDDQPEDDDNLIDYGLDSVRVMTLAARWRQVHADIDFVSLAKDPSINGWWALLSREPQP

SEQ ID NO: 92558 - protein, 284 aa, Erwinia piriflorinigrans
  misc_feature (1)..(284): tr|V5Z339|V5Z339_9GAMM Isochorismatase OS=Erwinia pirif lorinigrans CFBP 5888 OX=1161919 GN=cbsB PE=4 SV=1
MTIPKLDNYALPTAAELPKNKVSWAFEPARAALLIHDMQEYFLNFWGEDSPLIKQVVANIAQLRQYCKSQNIPVFYTAQPNQQSDEDRALLNDMWGPGLNKHPAQQNVVTALAPDEQDQVLVKWRYSAFHRSPLESMLKEAGRDQLIICGVYAHIGCLTTAIDAFMRNIKPFMVADALADFSREEHMMSLTYAAGRCGRVVMSETLLPVPQSKQQLRALVLPLLDDDADDLDDSENLIDYGLDSVRMMALAARWHQVHSDIDFVTLAKNPSINGWWSLLSGDAA

SEQ ID NO: 92559 - protein, 272 aa, Erythrobacter citreus
  misc_feature (1)..(272): tr|A0A0L1KEE0|A0A0L1KEE0_9SPHN Isochorismatase OS=Eryth robacter citreus LAMA 915 OX=1306953 GN=J121_2456 PE=4 SV=1
MTCDTITRQRLAAAALASVATIALTVASAVPATAQPRAVSATQPPVDDGLPMPGFDVEPGRTALVITDPQNDFLSPDGVTWGVVGESITANRTVENIENLFLAADRHGMPIFISPHYYFEHDHRWQFEGTLETLMHGIGMFDRPHALTLEGFAGSGADWLERYKPIIENGRTVVTSPHKVYGPDSNDLVLQLRKAGISKVILGGMSSNLCTESHMRALIEAGFEVMVVTDATAGAITEHYDGYAASLVNFRMIASKVDNTASTLRSIATAYE

SEQ ID NO: 92560 - protein, 227 aa, Erythrobacter gangjinensis
  misc_feature (1)..(227): tr|A0A0G9MRS1|A0A0G9MRS1_9SPHN Isochorismatase OS=Eryth robacter gangjinensis OX=502682 GN=AAW01_11355 PE=4 SV= 1
MAEQVGTKMVDDGRTAREIFEEVMANPARKKFGFGEKLAIVNVDPQQAYTRLDMFKTSYETDPRQIEYINTISRLARERGMPVIWSHVAYKNDAGDAGVWGTRTDTEDSLQNIKYGSDRHAFDPRCDIHDDDMQFTKRMPSAFFETPLASYLVWNKVDTVVVTGGSTSGCVRATAVDALSHGYRTIVPIETCSDKHASFHFANLTDLQLKYADVEPVQTVIDWFEAR

SEQ ID NO: 92561 - protein, 285 aa, Escherichia albertii
  misc_feature (1)..(285): tr|B1EKD7|B1EKD7_ESCAT Isochorismatase OS=Escherichia a lbertii (strain TW07627) OX=502347 GN=entB PE=4 SV=1
MAIPKLQAYALPESHDIPKNKVDWAFEPQRAALLIHDMQDYFVSFWGENCPMMEQVIANIAALRDYCKQSNIPVYYTAQPKEQSDEDRALLNDMWGPGLTRSPEQQKVVERLTPDADDTVLVKWRYSAFHRSPLEQMLKESGRNQLIITGVYAHIGCMTTATDAFMRDIKPFMVADALADFSRDEHLMSLKYVAGRSGRVVMTEELLPAPIPASKEALREVILPLLDESDEPFDDDNLIDYGLDSVRMMSLAARWRKVHGDIDFVMLAKNPTIDAWWKLLSREVK

SEQ ID NO: 92562 - protein, 285 aa, Escherichia coli
  misc_feature (1)..(285): tr|B7L8H8|B7L8H8_ECO55 EntB protein OS=Escherichia coli (strain 55989 / EAEC) OX=585055 GN=entB PE=4 SV=1
MAIPKLQAYALPESHDIPQNKVDWAFEPQRAALLIHDMQDYFVSFWGENCPMMEQVIANIAALRDYCKQHNIPVYYTAQPKEQSDEDRALLNDMWGPGLTRSPEQQKVVDRLTPDADDTVLVKWRYSAFHRSPLEQMLKESGRNQLIITGVYAHIGCMTTATDAFMRDIKPFMVADALADFSRDEHLMSLKYVAGRSGRVVMTEELLPAPVPASKAALREVILPLLDESDEPFDDDNLIDYGLDSVRMMALAARWRKVHGDIDFVMLAKNPTIDAWWKLLSREVK

SEQ ID NO: 92563 - protein, 285 aa, Escherichia fergusonii
  misc_feature (1)..(285): tr|B7LLK5|B7LLK5_ESCF3 Isochorismatase OS=Escherichia f ergusonii (strain ATCC 35469 / DSM 13698 / CDC 0568-73) OX=585054 GN=entB PE=4 SV=1
MAIPKLQAYALPESHDIPHNKVNWTFEPQRAALLIHDMQDYFVSFWGENCPMMEQVIANIAALRNYCKQHNIPVYYTAQPKEQSDEDRALLNDMWGPGLTRSPEQQKVVDRLTPDADDTVLVKWRYSAFHRSPLEQMLKESGRNQLIITGVYAHIGCMTTATDAFMRDIKPFMVADALADFSRDEHLMSLKYVAGRSGRVVMTEELLPAPIPSTKAALREVILPLLDESDEPFDDDNLIDYGLDSVRMMALAARWRKVHGDIDFVMLAKNPTIDAWWKLLSREVK

SEQ ID NO: 92564 - protein, 285 aa, Escherichia marmotae
  misc_feature (1)..(285): tr|A0A2B7MIA6|A0A2B7MIA6_9ESCH Isochorismatase OS=Esche richia marmotae OX=1499973 GN=entB PE=4 SV=1
MAIPKLQAYALPESHDIPQNKVDWAFEPQRAALLIHDMQDYFVSFWGDNCPMMEQVIANIAALRDYCKQHNIPVYYTAQPKEQSDEDRALLNDMWGPGLTRSPEQQKVVDRLTPDADDTVLVKWRYSAFHRSPLEQMLKESGRNQLIITGVYAHIGCMTTATDAFMRDIKPFMVADALADFSRDEHLMSLKYVAGRSGRVVMTEELLPAPIPASKAELREVVLPLLDESDEPFDDDNLIDYGLDSVRMMALAARWRKVHGDIDFVMLAKNPTIDAWWKLLSREVK

SEQ ID NO: 92565 - protein, 229 aa, Ewingella americana
  misc_feature (1)..(229): tr|A0A085GMT7|A0A085GMT7_9GAMM Isochorismatase OS=Ewing ella americana ATCC 33852 OX=910964 GN=GEAM_0560 PE=4 S V=1
MSEFTINADPYRWPFDGSLSAANTALIVIDMQTDFCGKGGYVDTMGYDIALTRAPIAPIASVLAAMRAQGFTIIHTREGHRPDLSDLPANKRWRSKQIGAEIGFAGPCGRILVRGEPGWEIIPELAPLANETIIDKPGKGSFYATDLELVLHTRGIKNLIITGITTDVCVHTTMREANDRGFECMVLSDCCAATEQKHHEAALSMIKMQGGIFGAVTDSATLLDALATA

SEQ ID NO: 92566 - protein, 181 aa, Ferroplasma sp.
  misc_feature (1)..(181): tr|T0NG32|T0NG32_9EURY Isochorismatase (2,3 dihydro-2,3 dihydroxybenzoatesynthase) OS=Ferroplasma sp. Type II OX=261388 GN=AMDU4_FER2C00014G0015 PE=4 SV=1
MAVENKSCILVVDMINDFVTGKFGNQNAIDAVKMAENTLKKLKGHLPIIFARDAHMVNDPEFRVWGEHAVEGTEGSEIVKSLSEFPDFILKKRHYDAFFGTDLDSLLRALEIKNIYIFGISTDICVEHTCAGAFYRYYNVKVVSDLCACIDQSRQISSLNNIKINYGYMPVKSEELLKEAL

SEQ ID NO: 92567 - protein, 186 aa, Firmicutes bacterium
  misc_feature (1)..(186): tr|A0A1V6A520|A0A1V6A520_9FIRM Putative isochorismatase OS=Firmicutes bacterium ADurb.Bin153 OX=1852883 GN=phz D PE=4 SV=1
MVKKLKADPLSSVLVAVDMQDKVIDITWDRDIVRPRAAALASIARALGVPVIKLEHVPEKMGRTTPTLEEVMSDIDPIAKSSFSAFGCEEFVDALKAANKKQVIIYGVEAHVCLCQTVLDALEEGYSVFVVADASSSTSPYHRDIAYDRMRHAGAIVATAQSIAFELIGRADRPEFRQLLPYIKQL

SEQ ID NO: 92568 - protein, 192 aa, Francisella hispaniensis
  misc_feature (1)..(192): tr|F4BKE0|F4BKE0_9GAMM Isochorismatase OS=Francisella h ispaniensis OX=622488 GN=FN3523_0777 PE=4 SV=1
MKNTFVIVADFINEIIDERGALGVHNAQRIKDGKTMQKANKLIAWARDNNIQIAHVKVGFSKGYKECSKVSPMFAKAPEYGILQLNTWSTEFHHEMDVQEHDIIITKHRVSALYGTDLELILRANNIEHVVICGVSTSYVVESTARDLHDRDFKVTVIADACNAATQQAHEASLANLSRIANIINIDDFISC

SEQ ID NO: 92569 - protein, 197 aa, Francisella noatunensis
  misc_feature (1)..(197): tr|I2AZW9|I2AZW9_FRANT Isochorismatase hydrolase family protein OS=Francisella noatunensis subsp. orientalis ( strain Toba 04) OX=1163389 GN=OOM_1301 PE=4 SV=1
MKNKIVIVADFINEIVDEKGVFGAHNAKRVKDDKTMEKANQLITWARENNIMIAHVKVGFSKDYKECSKVSPMFKQVPEYGVFQLGTWATDFHPSMDVQEHDIIITKHRVSALYGTNLEVVLRANNVQDVIICGVSTSYVVESTARELHDRDYRVMVVADACNASSQETHEASLSNLNKIARIVCVDNLLKGECFGN

SEQ ID NO: 92570 - protein, 197 aa, Francisella sp.
  misc_feature (1)..(197): tr|F8G940|F8G940_FRAST Isochorismatase OS=Francisella s p. (strain TX077308) OX=573569 GN=F7308_1603 PE=4 SV=1
MKNKIVIVADFINEIVDEKGVFGAHNAKRVKDDKTMEKANQLIAWARENNIMIAHVKVGFSKDYKECSKVSPMFKQAPEYGVLQLDTWATDFHPDMDVQEHDVIITKHRVSALYGTNLEVVLRANSIQDIIICGVSTSYVIESTVRELHDRDYSVTVVADACNASSQESHEASLSNLNKIAKITCVDNLLKGECFGN

SEQ ID NO: 92571 - protein, 235 aa, Frankia alni
  misc_feature (1)..(235): tr|Q0RCA2|Q0RCA2_FRAAA Isochorismatase OS=Frankia alni (strain ACN14a) OX=326424 GN=dhbB PE=4 SV=1
MSARPYDFTFDPATTALVVIDMQRDFLEPGGFGESLGNDVSQLRSTIEPLQAVLAAVRAAGLTVIHTREGHLPDLSDLPPAKLHRGDAALRIGDLGPKGRILIRGEYGQDIIDELAPVDGEYVIDKPGKGAFYATAFGDVLAEKGITSLVVAGVTTEVCVHTTVREANDRGFECLVLSDCVGSYFPEFQRVALEMVAAQGGIFGWVAPSADFLAALAASTPAADSTLPAPAVTAS

SEQ ID NO: 92572 - protein, 251 aa, Frankia sp.
  misc_feature (1)..(251): tr|A8L0C2|A8L0C2_FRASN Isochorismatase OS=Frankia sp. ( strain EAN1pec) OX=298653 GN=Franean1_3619 PE=4 SV=1
MGITPIESYPMPTPADLPANIASWRVEPERAVLLIHDMQHYFLAPFARGAQPHTDLVHNVRALRERCAQLGIPVMYSAQPGGMSSRDRGLLADFWGPGMTAQARDRGIPDELAPAPADTVLTKWRASAFHRSPLLELMRDAGRDQLIVCGVYAHVGVLLTAADAFANDIQAFVVADAVADFTPEFHRMALDYVAIRCGAAVVAADVLGWLGASGAASAASASASTATATATAAGSPAGVFAVANGGGEERR

SEQ ID NO: 92573 - protein, 83 aa, Frigoribacterium sp.
  misc_feature (1)..(83): tr|A0A1R4GMW3|A0A1R4GMW3_9MICO Isochorismatase of sider ophore biosynthesis OS=Frigoribacterium sp. JB110 OX=14 34829 GN=CZ774_17120 PE=4 SV=1
MRLSTEQVIADVADVLYLDPAAVDYEVSLRDQGMDSVRLMDLVERWRSAGVERIDFITLAENSKLGEWIEVLETLQDGGEVAP

SEQ ID NO: 92574 - protein, 206 aa, Fuerstia marisgermanicae
  misc_feature (1)..(206): tr|A0A1P8WM09|A0A1P8WM09_9PLAN Vibriobactin-specific is ochorismatase OS=Fuerstia marisgermanicae OX=1891926 GN =vibB PE=4 SV=1
MSMPEQTANPTFHARSPELLSVPRSQLLIVDVQEKLLPVIAEGDPLLATIGFLLDVANILQVPAFVSEQYPKGLGKTVPAIAGHDIQSTTFEKLRFSAAEGLRAARSASDERSSRDQVVVVGIEAHICVLQTTLDLIAAGLRVFVVADGVGSRNVADRDTALKRIRDCGGVVCTAESVAFEWCEVAGTDQFKSISRLVRDRTHVAT

SEQ ID NO: 92575 - protein, 162 aa, Fusibacter sp.
  misc_feature (1)..(162): tr|A0A1B6BHX8|A0A1B6BHX8_9FIRM Isochorismatase OS=Fusib acter sp. 3D3 OX=1048380 GN=F3D3_3968 PE=4 SV=1
MSKVAFLIVDMQNNVKESTPCKATFEKAVEYINEISQFFRQKNLPVIIIQDVEAGGAETEGFKCVAELVVSDTDFFVHKSYSNAFWKTELDTLLKNAGVDCTVISGFAAEHCVLFTYNGAIERGYDAFLLQNGIAGFDDDEIKRIQLLRSVISYEALEYFLK

SEQ ID NO: 92576 - protein, 183 aa, Unknown
  misc_feature (1)..(183): tr|A0A126QFL8|A0A126QFL8_9GAMM Isochorismatase OS=gamma proteobacterium 10BT OX=1778877 GN=iscM PE=4 SV=1
MLIDPHKATLLVVDIQEKLIDAMSDPEGTRARARWLLAATAELELPTVISEQYPKGLGHTLAPLLAAAPAAEVVEKSHFSCVAAGCLPASLMAREQVIVCGMETHVCVLQTVLGLLALGKQVFVVEDACDSRTAASKAAGLARMREAGAQVVTREMVLFELMGSAGHPLFRHISKTYLVGEQP

SEQ ID NO: 92577 - protein, 262 aa, Gemmata sp.
  misc_feature (1)..(262): tr|A0A142X8H0|A0A142X8H0_9BACT Vibriobactin-specific is ochorismatase OS=Gemmata sp. SH-PL17 OX=1630693 GN=vibB PE=4 SV=1
MNVAVVDEGANLVAFVRMDGAWQGSIEIALNPETTAKGHHLLLSSGYAALLRWEQLPEERVMPGMSENLHGSAPDRSPVALVLVDVINPLDFPEADQLLRFAIPAADRLAELKQRAKRAGVPVVYANDNFGRWRSDLSTVVECCREPGCKGAALVERLRPERDDYFVLKPKHSAFFSTTMNTLLRYLGVRTVVLGGFAADICVLFTANDAYMRDFRIVIPSDGVASNDSADRDAVLALMRRVLKAETPKVDEIDFVALAKEP

SEQ ID NO: 92578 - protein, 306 aa, Geobacillus sp.
  misc_feature (1)..(306): tr|A0A0F6BHX1|A0A0F6BHX1_GEOS0 Isochorismatase OS=Geoba cillus sp. (strain Y4.1MC1) OX=581103 GN=GY4MC1_0170 PE =4 SV=1
MAIPAIPAYPMPVSSELPKNKVSWTPAAKRAALLIHDMQNYFLDAFPSNASPFVELVRNIQRLKKECKEMGIPVIYSAQPGGQTLEQRGLLQDFWGNGIADDPYQKGIIDELAPDAKDIVLTKWRYSAFKKTNLLEILEGHGRDQLIICGVYAHIGCLLTASDAFMQDIQVFFVADAVADFSLEHHKMALHYAASRCAFITPTQHLIEALKKEPVPDCQNILPMSLHDVRNQVAELIQESPADLSDHENLVNRGLDSIRMMSLVEKWRRAGAEVTFAALAARPTLFAWWNLLSSQSEKVLSAQDSQ

SEQ ID NO: 92579 - protein, 300 aa, Geobacillus thermodenitrificans
  misc_feature (1)..(300): tr|A0A1W6VMC9|A0A1W6VMC9_GEOTD Vibriobactin-specific is ochorismatase OS=Geobacillus thermodenitrificans OX=339 40 GN=vibB PE=4 SV=1
MGIPAIPAYPMPSLSELPKNKVLWKLDPKRAVLLIHDMQNYFLDAFTPNASPLVELVSHIQQIKRECKKLGIPVVYSAQPGGQTPEERGLLQDFWGKGIADDSYQKGIIDDLAPDDDDIVLTKWRYSAFKKTPLSEILKEQGRDQLIICGVYAHIGCLLTASDAFMQDIQVFFIADAVADFSREHHQMAIQYAASRCAFTMSTQQLLDVLKRTQNPLPLSLEDVRRQVAELLQAEAADLSDQENLIDRGLDSIRIMSLVEKWRRAGAKVTFADLAARPTLSDWWNLLYFPREKVLSNQDA

SEQ ID NO: 92580 - protein, 187 aa, Gilliamella apicola
  misc_feature (1)..(187): tr|A0A066T5E4|A0A066T5E4_9GAMM Isochorismatase OS=Gilli amella apicola OX=1196095 GN=A9G32_08255 PE=4 SV=1
MKQGLIIIDVQNDYFPTGKFTLNNTELTLQNTLKLQKHFRAQQLPIFYIQHIKSDPHADFFANGSLGAEIHPSLLPLGNLHEYLVKKTFPNSFYQTELQKKLQQEQIQQMVICGMMSHMCVDSTTRHASELGYQPILIHDACTTCDLEFDGKTIPSQVVHNNFMSALTNFASVVSCEMFVQTKLAIL

SEQ ID NO: 92581 - protein, 221 aa, Gluconobacter cerinus
  misc_feature (1)..(221): tr|A0A1B6VFX0|A0A1B6VFX0_9PROT Hydrolase OS=Gluconobact er cerinus OX=38307 GN=A0123_03248 PE=4 SV=1
MLLLECLLNLLTFPRVPDNGPGWRSNVNREGLAMISLPATRTALVLIDLQKGITGLPLAPTPGTAIVKRSKELAARFRAAGAPVILVNVAFAPDFADAVHATVDRSFSPPGGFAPDWAELVDGLAEPTDLRVTKRQWGAFYGTDLDLQLRRRDITTIVLGGIATNLGVESTARAAHEHGYNVVLAADVMSTFTEEMQRFACEEIFPRLGRVTTSDAIALDA

SEQ ID NO: 92582 - protein, 188 aa, Gluconobacter japonicus
  misc_feature (1)..(188): tr|A0A177FXD3|A0A177FXD3_GLUJA Hydrolase OS=Gluconobact er japonicus OX=376620 GN=A0J51_02984 PE=4 SV=1
MISLPATKTALVLIDLQKGIVGLPLAPTPGATIVERSKELAMRFRAAGAPVILVNVAFAPDFADAVHAVVDRNFSPPGGFAPDWAELVDGLAEPTDLRVTKRQWGAFYGTDLDLQLRRRGITTIVLGGIATNLGVESTARAAHEHGYNVVLAEDVMSTFTDQMQRFACEEIFPRLGRVTTSEAIALDA

SEQ ID NO: 92583 - protein, 188 aa, Gluconobacter oxydans
  misc_feature (1)..(188): tr|Q5HXW1|Q5HXW1_GLUOX Putative isochorismatase OS=Gluc onobacter oxydans (strain 621H) OX=290633 GN=GOX2578 PE =4 SV=1
MISLQATKTALVLIDLQKGITGLPLAPTPGALIVERSKELTARFRAAGAPVILVNVAFSPDFADAVHAVVDRSFSPPGGFAPDWAELVDGLAEPTDLCVTKRQWGAFYGTDLDLQLRRRGISTIVLGGIATNLGVESTARAAHEHGYNVVLATDVMSTFTEEMQRFACEEIFPRLGRVTTSDAIALDA

SEQ ID NO: 92584 - protein, 218 aa, Glutamicibacter arilaitensis
  misc_feature (1)..(218): tr|E1W0T7|E1W0T7_GLUAR Isochorismatase OS=Glutamicibact er arilaitensis (strain DSM 16368 / CIP 108037 / IAM 15 318 / JCM 13566 / Re117) OX=861360 GN=dhbB PE=4 SV=1
MGLPTIPGYRLPDGQLPEPRVTWKADAQRAVLLIHDMQRYFIEAFDHEDPRSQIRVTLKNIRALRDAADDAGVPVVYTAQPPNQKPADRALLTDFWGTGLTNDGREEITQELAPRTGDLVLTKWRYSAFAKTELQEWMRQAGRDQLLITGVYAHIGCLTTALDAFMRDIQPFFIADAQADFSLEEHQMAINYGYGRCASVVNSATVLKQMQAALVATR

SEQ ID NO: 92585 - protein, 266 aa, Glycine soja
  misc_feature (1)..(266): tr|A0A0B2P977|A0A0B2P977_GLYSO Peroxyureidoacrylate/ure idoacrylate amidohydrolase RutB OS=Glycine soja OX=3848 GN=D0Y65_016621 PE=4 SV=1
MVKTVVWSTFVRPQYKPAHFNHSPLPFLKLSTPNLSFRGTNTVHNKRSNWPKPLSLRSKSVLAVAGADPLEMAEDWNRTALLVIDMQKDFIEDGGPMLVKGGKDIVPNVIKAVDVARQRGILIVWVVREHDPLGRDVELFRRHLYAAGKVGPTSKGSEGAELVDGLVIKEGDYKLVKTRFSAFFATHLHSVLQGAGINSLVVTGVQTPNCIRQTVYDAVALDYQPVTVIVDATAAATPDIHLANVFDMENIGVATPTLQEWSEPKA

SEQ ID NO: 92586 - protein, 216 aa, Gordonia bronchialis
  misc_feature (1)..(216): tr|D0L278|D0L278_GORB4 Isochorismatase OS=Gordonia bron chialis (strain ATCC 25592 / DSM 43247 / JCM 3198 / NCT C 10667) OX=526226 GN=Gbro_0639 PE=4 SV=1
MPIPPIRPYEIPDPADLPPRRDGWSTDPQRSILLIHDMQSYFVDAFEGAPLPDVVANIRAIRDTCDRLSIPTVYSAQPPRQDPEVRGLLTERWGTGIATDDEAAIVAPLAPRPDDLHTVKWRYSAFVRSDLGQTMQELGRDHLIITGIYAHIGCMLTAADAFMRDIRPFLVSDAVADFSAAEHRHTVKYVNEACGAALTTAELLKDLGGTTVDPAC

SEQ ID NO: 92587 - protein, 228 aa, Gordonia polyisoprenivorans
  misc_feature (1)..(228): tr|H6N1R7|H6N1R7_GORPV Isochorismatase OS=Gordonia poly isoprenivorans (strain DSM 44266 / VH2) OX=1112204 GN=G POL_c23560 PE=4 SV=1
MSIPPIAPYQIPVGPFPARVEWTLQPERAALLIHDMQRYFIDAYRLDHEPMATALPNMIAIREACSAAGVPVVYTAQPGDQHPSRRGILSDFWGKGLSSGRDEEIIEQLTPRDGDICVTKWRYSGFQRTDLRQLLAHHGRDQLIIVGVYAHMGCMISATDAFMSDVAPFFVVDAMGDFSRDEHRMAAEYIGKRAGRVVRAAQVLRAVQVAATEHASDGVGTDRSGVTA

SEQ ID NO: 92588 - protein, 192 aa, Gordonia sp.
  misc_feature (1)..(192): tr|A0A3G8JGU5|A0A3G8JGU5_9ACTN Isochorismatase OS=Gordo nia sp. MMS17-SY073 OX=2420509 GN=dhbB_1 PE=4 SV=1
MQRYFIDAYQVDREPMATALPNMIRIREACRRAGVPVVYTAQPGDQHPSRRGILADFWGTGLEAGRDEEVIPELAPDAGDITVTKWRYSGFQRTDLRQLLAHHGRDQLIVVGVYAHMGCMISAAEAFMSDVAPFFVVDGMGDFTRDEHQMAAEYIGKRAGLVVTSDHVVKSLAMTAATASDHPDVVATGSTR

SEQ ID NO: 92589 - protein, 196 aa, Gottschalkia acidurici
  misc_feature (1)..(196): tr|K0B2T5|K0B2T5_GOTA9 Isochorismatase EntB OS=Gottscha lkia acidurici (strain ATCC 7906 / DSM 604 / BCRC 14475 / CIP 104303 / NCIMB 10678 / 9a) OX=1128398 GN=entB PE =4 SV=1
MSKNNLHKIKKEECALIIIDMQNDFIREGAPIECPGGRDIIPNIQKAKRWAKENDIPVFYTQEMHRFQKVDYGLELERDEPQHCLEGTEGVEIIEELKPEDDDYVIIKRRYSGYYLTDLEVLMRSFNKKALILTGAATNVCVYATALDAVQRDVKSVVLSDGVAGTSIELHEAFLKNIDYVIGDVVTVDELIKELN

SEQ ID NO: 92590 - protein, 179 aa, Grimontia hollisae
  misc_feature (1)..(179): tr|D0I9X5|D0I9X5_GRIHO Isochorismatase OS=Grimontia hol lisae CIP 101886 OX=675812 GN=VHA_002550 PE=4 SV=1
MLSRKNTGLVVVDVQGKLARLVHDSERVIANCETLVKGARALGLPIILLEQNPDKLGCTVDELKAHLDGVDPISKFTFNACEAPEFLEAVKAMKADTWLICGIEAHICVYQTARGLVDAGFNVELVSECVSSRTLSNVQLGINRSKDNGVTITGLEMCLYELVQDCRHPVFKQILSLVR

SEQ ID NO: 92591 - protein, 290 aa, Gynuella sunshinyii
  misc_feature (1)..(290): tr|A0A0C5V5U2|A0A0C5V5U2_9GAMM Isochorismate hydrolase OS=Gynuella sunshinyii YC6258 OX=1445510 GN=YC6258_0276 7 PE=4 SV=1
MSIPSLTDYSMPTTESLPANKVNWSLEPAKAVLLIHDMQDYFLKFYPHDSRLIRQLIENIDTLKTFCRQHEIPVVYTAQPDNQSPRDRALLNDMWGAGVNDHAGLKKICAALTPDSHDTVLVKWRYSAFQRSILENMMKELGRDQLIICGIYGHIGCMITAVDAFMRDIKPFMVADAIADFSEQDHRMALNYVATRAGTVISTTAIVESGEKRSQLTLAQLKAQLLSAIDENEDDFDADENLVDYGLDSVQMMSMVNDWRKQGIEINFAELAKNPSLNAWWKLIGEKQAG

SEQ ID NO: 92592 - protein, 327 aa, Haliangium ochraceum
  misc_feature (1)..(327): tr|D0LFW3|D0LFW3_HALO1 Isochorismatase OS=Haliangium oc hraceum (strain DSM 14365 / JCM 11303 / SMP-2) OX=50202 5 GN=Hoch_2020 PE=4 SV=1
MGIPRITPYPLPQPSALPENRVSWSLAPARAVLLIHDMQEYFLDYYDASASPAREMVAHIDQLRTRCAALGIPVVYSVQPAEQTPEERGLLTDMWGPGLVAKPHKQAVVSALAPRAGDVTLTKWRYSAFQRTDLRELLRRWGRDQLIICGVYAHIGCLMTAGEAFMSDVQPFLVSDATADFDREKHLMAIEWVAQRCGVALSTGDALAALAEQAPTQTATPVETGQASASGISLERLRSDIAEILEEPAEDIADDDNLLDLGLDSIRLMSLVERWRAQGAELSFVELAERPSIADWWTILSAPMPLAADAVASARAEAGTAPQAEER

SEQ ID NO: 92593 - protein, 221 aa, Haliea sp.
  misc_feature (1)..(221): tr|A0A455R701|A0A455R701_9GAMM Isochorismatase OS=Halie a sp. ETY-M OX=1055105 PE=4 SV=1
MEHSDKTAREIYQDIKANPARKRFGFGSKAALVNVDPQKAYTRTDLFKTAYETDPRQLEYVDTLATKFRALGWPVVWTHVAYMESGEDAGIWGTRTDTEDSLQNIKFGSERSEFDDRLNIDRERDVIYLKKMPSAFFETPLQSLLVWHQVDTLVITGGSTSGCIRATAVESLSRGYRTIVPEECVADKHESYHFANLTDLSLKYADVLEVQEVFDWLDGQG

SEQ ID NO: 92594 - protein, 190 aa, Haloarcula hispanica
  misc_feature (1)..(190): tr|G0HRF2|G0HRF2_HALHT Isochorismatase OS=Haloarcula hi spanica (strain ATCC 33960 / DSM 4426 / JCM 8911 / NBRC 102182 / NCIMB 2187 / VKM B-1755) OX=634497 GN=entB2 P E=4 SV=1
MELDPAQTALVVVDMQNGFCHPDGSLYAPDSEAAIEPCAELVDRAREAGAKVVFTRDVHPPDQFEDTHYYDEFDRWGEHVVEGSWETELVEDLDPQDEDLTVVKHTYDAFYQTELEGWLDAHGVTDLAICGTLANVCVLHTASSAGLRDYRPILVEDAVGYIEDDHREYALDHADWLFGELTDRGELAFA

SEQ ID NO: 92595 - protein, 185 aa, Haloarcula marismortui
  misc_feature (1)..(185): tr|Q5V0K2|Q5V0K2_HALMA Cysteine hydrolase OS=Haloarcula marismortui (strain ATCC 43049 / DSM 3752 / JCM 8966 / VKM B-1809) OX=272569 GN=entB1 PE=4 SV=1
MVVLPETPVLVLVDFQQGFDESQWGTRNNPDAEANAARLLTAWRERSLPVAHVRHNSTEPDSPLRRGEPGFAFKRELSPEAGEATFEKRVNGAFIDTGLADWLRDTASETLVICGLTTDHCVSTTTRMAENRGFDVVVPGDATATFDRTLDGEHFDPDLVHRTALAQLRGEFATIATTDDVVASL

SEQ ID NO: 92596 - protein, 204 aa, Haloferax mediterranei
  misc_feature (1)..(204): tr|I3R714|I3R714_HALMT Cysteine hydrolase OS=Haloferax mediterranei (strain ATCC 33500 / DSM 1411 / JCM 8866 / NBRC 14739 / NCIMB 2177 / R-4) OX=523841 GN=pncA PE=4 SV=1
MTDDNATPTRTLELPADAVLDLPDDTALVCIDMQVGFDDPAWGDRNNPGMEARVSDLLTAWRETDRPVVHVRHDSTEPDSPLRSDGEGFGWKPESEPVGDEPTFTKHVNSGFIGTDLEAWLRERDYDTLVICGLTTDHCVSTTTRMAENLGFDVYLPADATATFDREGHDGQSYTADEMHRTALAHLHGEFATIVESAALLPTR

SEQ ID NO: 92597 - protein, 56 aa, Halomonas elongata
  misc_feature (1)..(56): tr|A0A1B8P1K7|A0A1B8P1K7_HALEL Isochorismatase OS=Halom onas elongata OX=2746 GN=entB PE=4 SV=1
MAADENLLDYGLDSLQVMNLVAELKTLGVTLSFEELTRTPTLEAWWTLIEQKRLAA

SEQ ID NO: 92598 - protein, 199 aa, Halomonas sp.
  misc_feature (1)..(199): tr|A0A0P7Y2S3|A0A0P7Y2S3_9GAMM Amidase OS=Halomonas sp. HL-48 OX=1479235 GN=HLUCCA13_09395 PE=4 SV=1
MTTSITLRELLGLGHTPNKLSESALVLIDCQNTYREGVMQLEGVEDALLEAQKLLEKAREAGIPIIHIQHDTGEGTPYDIKAPIGQIADIVKPLNGEPVITKQFPNAFVQTDLEAQLREMGCNKLVLGGFMTHMCVNSTAHGAFNLGFDVTVVASATATRALEADNGKALSAQAVHEGALASTRDLYAAVVDNVDELPV

SEQ ID NO: 92599 - protein, 198 aa, Haloplasma contractile
  misc_feature (1)..(198): tr|U2DQN5|U2DQN5_9BACT Amidase nicotinamidase Secondary metabolites biosynthesi protein OS=Haloplasma contract ile SSD-17B OX=1033810 GN=HLPCO_003081 PE=4 SV=1
MLNKNETALLIIDMQYGGGAPDGSLVQMLNVDVAKQEDIVTPMVKLKDFFNNNDMLVVNVKTEYEEDFSDWKMLDKRFEVKKYKHFVKGSADAEIIPPLAPREGEELIVKNRWNAFFNTNLDELLKSKDIKNLIIVGAATDVCVLETCSYAFSLNYNCIVPKETTASFNPERKHMGLELLNFGRSQVVSVDDVYSMFK

SEQ ID NO: 92600 - protein, 190 aa, Halorhabdus tiamatea
  misc_feature (1)..(190): tr|F7PJ06|F7PJ06_9EURY Isochorismatase / nicotinamidase family protein OS=Halorhabdus tiamatea SARL4B OX=10338 06 GN=entB PE=4 SV=1
MEFDPDTTAVVVVDMQNGFCHQEGSLYAPASEDAIDPCVELIDRAGEMGASVVYTRDVHTDEQFEDAHYYDEFDRWGEHVLEGTWDAELVAKLKSRDADLIVEKHTYDAFHETQLDGWLTAHGIDDLLICGTLANVCVLHTAGSAGLRDYRPLLVEDAVGYLEEDHREYALEHADWLFGEVMDRESIAFA

SEQ ID NO: 92601 - protein, 217 aa, Hartmannibacter diazotrophicus
  misc_feature (1)..(217): tr|A0A2C9D1D7|A0A2C9D1D7_9RHIZ Putative isochorismatase OS=Hartmannibacter diazotrophicus OX=1482074 GN=phzD P E=4 SV=1
MPTASPIPGKALIAPDNHMLIMIDFQSQMSFATKSIDAVALRNNAALVARSAAGFKVPTILTTVAEKSFSGPMFTEITDAFPGQAMLDRTSMNTWEDGPVIGEVNRIGKDRVVLCGLWTSVCIVGPALSALHQGFEVYVIADACGDVSDEAHERAMQRMIHAGVRPMTSLQYLLELQRDWARTETYDMTTGIAKEYGGAYGLGIIYAKTMFGASESH

SEQ ID NO: 92602 - protein, 172 aa, Helicobacter ailurogastricus
  misc_feature (1)..(172): tr|A0A0K2XFT1|A0A0K2XFT1_9HELI Isochorismatase OS=Helic obacter ailurogastricus OX=1578720 GN=HAL011_11470 PE=4 SV=1
MANTLENPGVVLLIDVQERLFQAMAGADALLENSLRFLKIAKELAIPIVATEQNPQKLGATLEQLRPFCQQIYTKESFSARPALSLPKAPLFVLGIEAHVCVYQSVKDFLKEGFCVSVIAEGTSSRKPKDCALALEDLRAQGARIASVEMCAFEWLKTYTHPQFKTISKLIK

SEQ ID NO: 92603 - protein, 167 aa, Helicobacter bizzozeronii
  misc_feature (1)..(167): tr|F8KRS9|F8KRS9_HELBC Isochorismatase OS=Helicobacter bizzozeronii (strain CIII-1) OX=1002804 GN=HBZC1_04820 PE=4 SV=1
MSCVLVVDIQEKLFPVMADKDLLLKNCTRFLKMARALEFPIYATEQNPAKLGPTLAPLKEYFTQEAWIKESFSAYPVFSAPHKPPLILLGIEAHVCVYQSAKDFLKHGYEVTLLADCTSSRDVQNKHLALEELKRLGARILSAEIVAFECMQTYTHPQFKTISQIIK

SEQ ID NO: 92604 - protein, 197 aa, Helicobacter canis
  misc_feature (1)..(197): tr|A0A377J4K9|A0A377J4K9_9HELI Isochorismatase hydrolas e OS=Helicobacter canis OX=29419 GN=yecD PE=4 SV=1
MEHFSYGLFRLDSSALVVIDVQEKLVPAMWESSRIIHKTNTLLAGAAALQIPILITEQYPKGLGSTDPRIHFHPTLAPHPAESNTPQALVLEKVSFSIFGDEQITAHIQSLGVRNLLICGIESHICVLQSVLHARKLGFEVWVANDALSSRDPANHHNALQLMADSGAKITNVESILFGAMHTAKHPSFKTLSALIK

SEQ ID NO: 92605 - protein, 181 aa, Helicobacter cinaedi
  misc_feature (1)..(181): tr|I7HE76|I7HE76_9HELI Isochorismatase hydrolase OS=Hel icobacter cinaedi CCUG 18818 = ATCC BAA-847 OX=537971 G N=HCBAA847_2182 PE=4 SV=1
MRTVLKAKKMLFVCVDIQERLLELMAHKESVVKNANILLQATQILQAPLLVTEQYPKGLGKTHSAIKIPANTPILEKTSFGIFGSEGIKNHIAKSKCKTLVFFGIESHICMLQSIVEARNLGYECYFVADASSSRNALNHDLALEFFRTIGVNVLPTEAILFRMLGDSKHEHFKAVSNLVK

SEQ ID NO: 92606 - protein, 259 aa, Helicobacter fennelliae
  misc_feature (1)..(259): tr|T1DUN6|T1DUN6_9HELI Isochorismatase OS=Helicobacter fennelliae MRY12-0050 OX=1325130 GN=HFN_1646 PE=4 SV=1
MQYIQSSAQTYHVNNGLLIPQETLFVCVDIQTKLLGAMSYKERVLKNARTLLQGAKILNIPILITEQYPKGLGSTDESLGFKEFLIANNHSSDSNHNSPSQNLESSLNPNANSLDSRTNLDSRNLDSQAPNPQISNLKNPRATHLEIPQCTLMEKTSFSIFGDKSIADFIRQSKRTTLVFFGIETHVCVLQSVWHSVTLGLDVWVAEDALSSRNSDNHDNAIWLMRQKGAKITNTESILFGAMKDSKHPSFKAISALIK

SEQ ID NO: 92607 - protein, 169 aa, Helicobacter heilmannii
  misc_feature (1)..(169): tr|A0A0K2XM37|A0A0K2XM37_HELHE Isochorismatase OS=Helic obacter heilmannii OX=35817 GN=HHE03_06780 PE=4 SV=1
MQTLEKPLVLLIDLQERLFSAMHQKEALLENCLRFLQIAKELHIPTIATEQNPAKLGETLQELRPFCEEIYTKQSFSAYPVLKLKGPLFVLGIEAHVCVYQSVLDFLKAGFSVSVVAECVRSRKPTDCHLALEDLRAQGARVRSLEMCAFGWLQTYTHPQFKAISKLIK

SEQ ID NO: 92608 - protein, 185 aa, Helicobacter muridarum
  misc_feature (1)..(185): tr|A0A377PVK9|A0A377PVK9_9HELI Isochorismatase family p rotein OS=Helicobacter muridarum OX=216 GN=LS73_000575 PE=4 SV=1
MFNMNKEKALLLVVDIQERLSASMHKDEFALMLKKCNILINGCVALQVPIMQSLQYTKGLGNSVSGLFDSNTKKIDFEKRAFSCCYQDSPFLSYLQENKQISQIIICGMETHVCILQSARDLVSLGYNVIIPDDAVISRDYKNKKNALSLMQSMDITIANVESILFDMLKTSLSPEFKAISSLVK

SEQ ID NO: 92609 - protein, 189 aa, Helicobacter pullorum
  misc_feature (1)..(189): tr|A0A3S4Y1E8|A0A3S4Y1E8_9HELI Isochorismatase hydrolas e OS=Helicobacter pullorum OX=35818 GN=yecD PE=4 SV=1
MPSYIPKQQARLNPKECVFICIDIQEKLFNVMQNKDKMLKNANKLLEGAKTLGANSIVLEQYPQGLGKALLRNQENPKESLIEKISFSAFGEQNFCKALEKLQATTLILFGIETHICVKESAFDAKEKGFKVLIAEDACSSRELHSHSLAIQEMRDLKIQISSTESILFSFLLHAKETNFKAISTLIKN

SEQ ID NO: 92610 - protein, 181 aa, Helicobacter typhlonius
  misc_feature (1)..(181): tr|A0A099UDB0|A0A099UDB0_9HELI Isochorismatase OS=Helic obacter typhlonius OX=76936 GN=BN2458_PEG1949 PE=4 SV=1
MRSILKTKRTLFVCVDVQEKIIEHMAYKDKVIKNTNILLESATQLGIPTLVTEQYPKGLGKTHSTITIPKNARVLEKTSFGIFGDEKIASFIAQSKAKTLIFFGIETHICVLQSIIEARNLGYECLLAADACSSRDEQSHQLALNFFNTQGVVMLPTESILFRILGDCKHSSFKAISALIK

SEQ ID NO: 92611 - protein, 176 aa, Herbaspirillum seropedicae
  misc_feature (1)..(176): tr|D8IX19|D8IX19_HERSS 2,3-dihydro-2,3-dihydroxybenzoat e synthetase (Isochorismatase) protein OS=Herbaspirillu m seropedicae (strain SmR1) OX=757424 GN=entB PE=4 SV=1
MPTALLIIDIQHALCHGPDAVENSAAVIDRVNQLADQARAAGAPVIFVQHEDEDALQRGSEGWQLMPGLHQQPEDLHLPKRGSDAFHHTELQAMLKMRHISALVICGMQTEYCVESTVRRALALGYPVMLAADAHTTAPNGVLTVAQVIAHHHATLAGLGSYGVRASIRPVADIRF

SEQ ID NO: 92612 - protein, 285 aa, Herpetosiphon aurantiacus
  misc_feature (1)..(285): tr|A9B7R9|A9B7R9_HERA2 Isochorismatase OS=Herpetosiphon aurantiacus (strain ATCC 23779 / DSM 785 / 114-95) OX= 316274 GN=Haur_1804 PE=4 SV=1
MALPSIAAYAIPTELPTNRANWAAEPQRVALLIHDLQNYFIDAFPAGEEPISSVLRSIASLRDHAHALGIPVFYSAQPGDQAPEDRGLLSTFWGKGLSTGTPPEIVAPLAPQAGDQVITKWRYSAFQRTPLRELLREAGRDQLIVCGVYAHLGCLLTACDAFMQDIQPFFVADAVADFTLDEHRMALQYAAGRCAVVTTTEQLVRELGYNQLRSELHDLLDDVESIGADDNLLDWGLDSVRLMTLAERWRAAGCEVGFAELAETPTLAEWWQRRFAAPLLEQAHG

SEQ ID NO: 92613 - protein, 206 aa, Hoeflea phototrophica
  misc_feature (1)..(206): tr|A9D950|A9D950_HOEPD Amidase OS=Hoeflea phototrophica (strain DSM 17068 / NCIMB 14078 / DFL-43) OX=411684 GN =HPDFL43_07889 PE=4 SV=1
MADSTRLDPARTALLTIDLQNDFLHPDGAYGRANQTAESITALPERIVPLRNALKAKGGTYFSAQFTLIPGPDGEPLIAPHLKQLRPFLAKGDFAPGNFGHDLVDPLKPANYTIEKVAYSAFYQTRLEYIMRALGIDTLLIGGIVTNGGVASTLRDAHLRNIDTILLTDGCAAFKDAVHQATLLSLSSLGSQMTCAQATALVECAA

SEQ ID NO: 92614 - protein, 187 aa, Unknown
  misc_feature (1)..(187): tr|A0A0W8G9Q4|A0A0W8G9Q4_9ZZZZ Isochorismatase OS=hydro carbon metagenome OX=938273 GN=ASZ90_000290 PE=4 SV=1
MEKKTLLLIDIQNDYFPGGAFELDGAEAAGGNARLLLDHFRNAGRPVVHIRHESLRPGSTFFLPGTPGADIHPLVAPAPGEPVIRKHYPNSFRETGLQNELNRLEARRLVVAGMMTLMCVDATVRAAFDLGFELDVVHDACAAHALRFGDMDIPAQAVHGAFLAALGMVYARTPSTREFLGQDVPLG

SEQ ID NO: 92615 - protein, 302 aa, Hydromonas sp.
  misc_feature (1)..(302): tr|A0A345DB61|A0A345DB61_9BURK Isochorismatase OS=Hydro monas sp. F02 OX=2268024 GN=dhbB PE=4 SV=1
MSIPRISSYPMPSASNVPQAKLNWRCDAKRAVLLIHDMQSYFVNFFDASKSPIPELLSNIARIKSVCKALGVPVVYSAQPAQQSLLERGILQEWWGNGVTAFPEQVDIVPELSPSEGDVVLTKWRYSAFSKSTLASDMQAQQRDQLIICGVYAHIGCQTTAVEAFMRDMQVFFVADGVADFSFTQHEEALAYVSRCCGIVQSTAQLLSVLQPETETDALPRNLVQLTAQVARLIEIPVADLEAEDNLIFAGLDSIRLMSLVERWKRSGSRLDFVDLAQKTTLNEWWALLQGQSVQQFERNEN

SEQ ID NO: 92616 - protein, 191 aa, Unknown
  misc_feature (1)..(191): tr|A0A3B1BNP1|A0A3B1BNP1_9ZZZZ Isochorismatase OS=hydro thermal vent metagenome OX=652676 GN=MNBD_GAMMA26-1006 PE=4 SV=1
MSKTALIIVDLQNDYFPGGKWELEGTEAAATKAATLLKNFRAKGLPIVHVRHEFPTTDAPFFVPNSDGAKVHSSVQELEDEPVVLKQQINSFRDTNLKEILDGLDVDSVLICGAMSHMCIDAVTRAAHDFGYNCAIAHDACATLGLEFKGITVPANQVHAAFMAALDFAYANVASTDELLTKMQSAKSPYQ

SEQ ID NO: 92617 - protein, 199 aa, Hyphomicrobium sp.
  misc_feature (1)..(199): tr|F8JIP1|F8JIP1_HYPSM Putative Isochorismatase hydrola se OS=Hyphomicrobium sp. (strain MC1) OX=717785 GN=HYPM C_0552 PE=4 SV=1
MPVSRTLRDITGMGYTPASVAHSALILIDCQNTYREGVMQLEGVEPALIECQSLLSRYRNAGRPVIHIQHDAGPGTPYDVRDSIGAIADIVAPRDGEPVVVKNYPSSFEKTNLDDLLKGYGVEEVALVGFMTHVCVNSTARAAFNHGYRATVIGHATATRSLPNPSGGAVSAKDLHEASLAALNDIFAVVVPTIDKIAD

SEQ ID NO: 92618 - protein, 200 aa, Hyphomicrobium sulfonivorans
  misc_feature (1)..(200): tr|A0A109BAD2|A0A109BAD2_HYPSL Isochorismatase OS=Hypho microbium sulfonivorans OX=121290 GN=APY04_2883 PE=4 SV =1
MTEARPTLRSLLAMPSTPEPLSKSALVLIDCQNTYREGIMQLEGVEPALKECAKLLQRARDAGAPVIHIQHDAGPGSPYDVRDRIGAIADVVAPIEGETVITKSFPSSFEQTNLDAELKKLGVTDLVLAGFMTHVCVNSTARAAFNHGYRPTVVGNATATRALANPLGGTLSADAVHTGALTALTDMFAIVVPSSEAVPD

SEQ ID NO: 92619 - protein, 422 aa, Ichthyophthirius multifiliis
  misc_feature (1)..(422): tr|G0QMD9|G0QMD9_ICHMG Clathrin heavy chain, putative O S=Ichthyophthirius multifiliis (strain G5) OX=857967 GN =IMG5_047880 PE=4 SV=1
MQISTKYGQLFILTKFGFLQIYELTTNQLIYSNKITESSIFIGQQDSKEDGVYSISRNGSVQLIQIDQNSFLNYLMNNCQQIPNVVQLAFKLAGRYRLPGVDGMFTEQFNKFLMSGDYAKAAQIAASAPGELLRNAQTISKFKTFQGTPSPLLIYFQSLLQKGGLNALESVELCNLVLSQGRKQFVEAWLKENKLECTEQLGDLVSQHDQNSALEIYKRANAGPKVLQTLVALGRQDEANKYAQQSGINVDYMSMIKSCVFTNPVNAVQMAKTMFAQNNGNNIHAVAELFVQAQKFKELSALLVDCMKQNKPEDGPWQTKILEWNIINEPNIVEPIFQLTKWNQYNRLRIAQLCEQKQLFQKALENYSDIKDIKRVCLNTQFIPHPYLVSFFGNLQPDWALTCIYSSQKCIKIQYFALYKNF

SEQ ID NO: 92620 - protein, 195 aa, Ideonella sakaiensis
  misc_feature (1)..(195): tr|A0A0K8NXS5|A0A0K8NXS5_IDESA Isochorismatase OS=Ideon ella sakaiensis (strain NBRC 110686 / TISTR 2288 / 201- F6) OX=1547922 GN=ISF6_5438 PE=4 SV=1
MSADDPLRRLDADRAVLVLVDYQQRLLPALDGGEAALADALALADLARALAVPVLGTEQNPDGLGPNHPALRERCARTLPKQHFDACEDGLGAAIADARPLPPGGGPADVVIAGCEAHVCLLQTALGLRRAGHAVWAVASACASRRAEDRALGLQRLQAAGVGLVAWEMVAFEWLQHARHPRFKAVLPLIKGRPA

SEQ ID NO: 92621 - protein, 185 aa, Ignavibacteria bacterium
  misc_feature (1)..(185): tr|A0A1V5TS02|A0A1V5TS02_9BACT Putative isochorismatase OS=Ignavibacteria bacterium ADurb.Bin266 OX=1852898 GN =phzD PE=4 SV=1
MKRNSIILKKESTALLIIDLQERILPVIRNYESVLENTVKLIRGFKAMQLPIYFTEQYPKGLGPTSQKILDELSGYTAYQKMTFSCSGAENLFEEFHKKKLTQIVVCGVESHVCVQQTVLDLIANDFQVDLAADAASSRKEIDYTIALDRMRTLGAEITTTESILFELLEVCGTPVFKEVSKIVK

SEQ ID NO: 92622 - protein, 180 aa, Unknown
  misc_feature (1)..(180): tr|A0A484H579|A0A484H579_9ZZZZ Isochorismatase OS=inver tebrate metagenome OX=1711999 GN=RIEGSTA812A_PEG_599 PE =4 SV=1
MQMIANDSCLLIVDVQERLISVVHSPRSVLVGCATLIQAANLIGIPIVVSEQYVRGLGQTVMDLRALAPPDSFREKTAFGCAADASIMARLGGFGRRQVITAGIETHVCVLQSALGLREKGFEVFVVAEACSSRRPESERAALARMGICGVHVVTTEMVLFEWLGSKEHLAFKAVQQLVK

SEQ ID NO: 92623 - protein, 286 aa, Iodobacter fluviatilis
  misc_feature (1)..(286): tr|A0A377STI2|A0A377STI2_9NEIS Isochorismatase OS=Iodob acter fluviatilis OX=537 GN=dhbB PE=4 SV=1
MAIPKISTYPMPTEFPANRVSWQPDAKRAVLLIHDMQDYFVDFYDKSAAPIPELIGNTRRILDLAAKLGIPVVYTAQMPDQTLAERGLLQDMWGAGLVAQPARKGIVQELTPQPQDTVLPKWRYSAFQRSNLLESMRSQGRDQLIICGVYAHIGCMMTACDAFMNDIQAFFVGDALADFSAKEHQMALDYVAQRCGYTTSTTALIQQLQGGSLPASLDELRKIIASSLQIPASDLHEDDNLIDWGLDSIRVMSLQESWRRAGVELSFTQLAEQATLAAWWALLAKS

SEQ ID NO: 92624 - protein, 205 aa, Ixodes scapularis
  misc_feature (1)..(205): tr|B7QGS5|B7QGS5_IXOSC Isochorismatase domain-containin g protein 2, putative (Fragment) OS=Ixodes scapularis O X=6945 GN=8041026 PE=4 SV=1
QIMAAAAACNVGRLSSQKTAIFLCDMQDKFRNTIRYFPEIVSVSQRLLKAGKSLDMPVIVTEQYPKGLGRTVPELGLSAYPDLCPVEKTQFSMVTSDVAQRLTDTKADSVVLCGVETHVCVQNTALALLEKGFNVHVVVDACSSRTMVDRFFGFERMKASGAWLTTSESVILGLLGGSAHPKFKELQKLIMEPAPDSGLLGFLKM

SEQ ID NO: 92625 - protein, 74 aa, Janthinobacterium agaricidamnosum
  misc_feature (1)..(74): tr|W0V4J2|W0V4J2_9BURK Isochorismatase hydrolase OS=Jan thinobacterium agaricidamnosum NBRC 102515 = DSM 9628 O X=1349767 GN=entB PE=4 SV=1
MAIAIAQPGKSLLDKIVLAGLWTSACIVGPALSALKQGFEVYVIADACGDVSDEAHQRAMERMIQAGTQPMSAL

SEQ ID NO: 92626 - protein, 177 aa, Janthinobacterium sp.
  misc_feature (1)..(177): tr|A0A0S4K5Z8|A0A0S4K5Z8_9BURK Isochorismatase OS=Janth inobacterium sp. CG23_2 OX=1706231 GN=BN3177_6809 PE=4 SV=1
MNTLLIIDMQNAWLNNPAQPCFDSAAIVGRINHAARQVRAQGGKVIFVQHSDADAPIGSAPWQVITALEKDPADSTLLKLAGDSFAATDLAAQLAASATSTLYISGFATEFCIDTAVRAAASRGLNVVALSDAHTTADRPHLDAPAIIAHHNWVWSGLPVPAGSSLAVRTTAEAFPA

SEQ ID NO: 92627 - protein, 217 aa, Kibdelosporangium sp.
  misc_feature (1)..(217): tr|A0A0K3BT03|A0A0K3BT03_9PSEU Isochorismatase of sider ophore biosynthesis OS=Kibdelosporangium sp. MJ126-NF4 OX=703222 PE=4 SV=1
MSGIPSIEPYSLPTAADLPPNTAAWVPDPRRVVLLVHDMQRYFLRPFPAELRERLVGNVDELRRTCAALGVPVGFTAQPGSMTAEQRGLLKDFWGPGMRVDDADRAIVEPLEVSDEDWTFTKWRYSAFFQSDLLARMRAHGRDQLLVCGVYAHVGILMTAIEAFTNDIETFVAADAIADFSAEYHEQAVHYAATRCAVVATTSELTSRLDAAREARV

SEQ ID NO: 92628 - protein, 178 aa, Kingella kingae
  misc_feature (1)..(178): tr|F5S5G6|F5S5G6_9NEIS Isochorismatase family hydrolase OS=Kingella kingae ATCC 23330 OX=887327 GN=HMPREF0476_ 0449 PE=4 SV=1
MLNQQNTLVLVIDIQERLLPALHQADAFVAACKKFITASTHLSLPIILTEQYPKGLGKTVADITALFPDVTTFEKTQFSAYTAEVQAALAAHSTQNMILLGCETHICVLQTALDLRQNGLNIWIPQECVTSRTDANKQNGLQQMRDAGIVVSNVESLLFQLLRDAKHPQFKTISKLIV

SEQ ID NO: 92629 - protein, 283 aa, Klebsiella aerogenes
  misc_feature (1)..(283): tr|A0A0F1TFJ7|A0A0F1TFJ7_KLEAE Isochorismatase OS=Klebs iella aerogenes OX=548 GN=entB PE=4 SV=1
MAIPKLQAYALPEASDIPANKVNWAFEPSRAALLIHDMQEYFLNFWGENSAMMEKVVANIAALRDFCKQNGIPVYYTAQPKEQSDEDRALLNDMWGPGLTRSPEQQQVIAALAPDEQDTVLVKWRYSAFHRSPLEEMLKETGRDQLIITGVYAHIGCMTTATDAFMRDIKPFFVADALADFSREEHLMALKYVAGRSGRVVMTEELLPLPASKAALRALILPLLDESDEPLDDENLIDYGLDSVRMMALAARWRKVHGDIDFVMLAKNPTIDAWWALLSREVK

SEQ ID NO: 92630 - protein, 283 aa, Klebsiella grimontii
  misc_feature (1)..(283): tr|A0A285B0T0|A0A285B0T0_9ENTR Isochorismatase OS=Klebs iella grimontii OX=2058152 GN=entB PE=4 SV=1
MAIPKLQAYALPEASDIPANKVNWAFEPSRAALLIHDMQEYFLNFWGENSPMMERVVANIAALREFCKQNHIPVFYTAQPKEQSDEDRALLNDMWGPGLTRSPEQQQVIAALAPDDSDTVLVKWRYSAFHRSPLEEMLKEAGRDQLIITGVYAHIGCMTTATDAFMRDIKPFFVADALADFSREEHLMALNYVAGRSGRVVMTEELLPLPASKAALRALVLPLLDESDEPMDDENLIDYGLDSVRMMALAARWRKVYGDIDFVVLAKNPTIDAWWALLSREVK

SEQ ID NO: 92631 - protein, 286 aa, Klebsiella oxytoca
  misc_feature (1)..(286): tr|A0A168QQ80|A0A168QQ80_KLEOX Isochorismatase OS=Klebs iella oxytoca OX=571 GN=entB PE=4 SV=1
MAIPKLNDYALPTADELPQNKVTWQVEPQRAALLIHDMQQYFLNFWGEDSALIKQVVENIANLRRYCKQQGIPVFYTAQPNQQSDEDRALLNDMWGPGLNKHPEQQAVTAALAPDEDDTVLVKWRYSAFHRSPLQEILQESGRDQLIICGVYAHIGCLTTAIDAFMRNIQPFMVADGLADFSRDEHLMALRYTAGRCGRVVTTASLLPAAGIASIDALRQQILPLLDEDSEDMGNDENLIDYGLDSVRIMELATRWRKIRGDIDFIALARNPTIDSWWALLSEEKA

SEQ ID NO: 92632 - protein, 283 aa, Klebsiella pneumoniae
  misc_feature (1)..(283): tr|B5XZX8|B5XZX8_KLEP3 Isochorismatase OS=Klebsiella pn eumoniae (strain 342) OX=507522 GN=entB PE=4 SV=1
MAIPKLQAYALPEASDIPANKVNWAFEPSRAALLIHDMQEYFLNFWGENSAMMEKVVANIAALRDFCKQNGIPVYYTAQPKEQSDEDRALLNDMWGPGLTRSPEQQQVIAALAPDEDDTVLVKWRYSAFHRSPLEEMLKEAGRDQLIITGVYAHIGCMTTATDAFMRDIKPFFVADALADFSREEHQMALKYVAGRSGRVVMTEELLPLPASKAALRALILPLLDESDEPLDDENLIDYGLDSVRMMALAARWRKVHGDIDFVMLAKNPTIDAWWALLSREVK

SEQ ID NO: 92633 - protein, 283 aa, Klebsiella variicola
  misc_feature (1)..(283): tr|A0A0B7G9I0|A0A0B7G9I0_KLEVA Isochorismatase OS=Klebs iella variicola OX=244366 GN=entB PE=4 SV=1
MAIPKLQAYALPEASDIPANKVNWAFEPSRAALLIHDMQEYFLNFWGENSAMMEKVVANIAALRDFCKQNGIPVYYTAQPKEQSDEDRALLNDMWGPGLTRSPEQQQVIAALAPDEQDTVLVKWRYSAFHRSSLEEMLKETGRDQLIITGVYAHIGCMTTATDAFMRDIKPFFVADALADFSREEHLMALKYVAGRSGRVVMTEELLPLPASKAALRALILPLLDESDEPLDDENLIDYGLDSVRMMALAARWRKVHGDIDFVMLAKNPTIDAWWALLSREVK

SEQ ID NO: 92634 - protein, 284 aa, Kluyvera ascorbata
  misc_feature (1)..(284): tr|A0A378GNH2|A0A378GNH2_9ENTR Isochorismatase OS=Kluyv era ascorbata OX=51288 GN=entB PE=4 SV=1
MAIPKLQGYALPTALDLPENKVNWAFEPSRAALLIHDMQEYFLNFWGDDSEMMETVVANIAALRDFCKKNGIPVYYTAQPKEQSDEDRALLNDMWGPGLTRSPEQQRVIAALAPDTQDTVLVKWRYSAFHRSPLEQMLKETGRNQLIITGVYAHIGCMTTATDAFMRDIKPFFVADALADFSRDEHLMSLKYVAGRSGRVVMTDELLPSVPTSKEALRALVLPLLDESDEPLDDDNLIDYGLDSVRMMALAARWRKVHGDIDFVMLAKNPSIDAWWALLSREVK

SEQ ID NO: 92635 - protein, 284 aa, Kluyvera cryocrescens
  misc_feature (1)..(284): tr|A0A2X3DTM7|A0A2X3DTM7_KLUCR Isochorismatase OS=Kluyv era cryocrescens OX=580 GN=entB PE=4 SV=1
MAIPKLQGYALPTALDLPENKVDWAFEPARAALLIHDMQEYFLNFWGDDSEMMDTVVANIAALRDFCKKNGIPVYYTAQPKEQSDEDRALLNDMWGPGLTRSPEQQRVIAALAPDEADTVLVKWRYSAFHRSPLEQMLKESGRNQLIITGVYAHIGCMTTATDAFMRDIKPFFVADALADFSRDEHLMSLKYVAGRSGRVVMTDELLPSIPASKEALRALVLPLLDESDEPFDDDNLIDYGLDSVRMMALAARWRKAHGDIDFVMLAKNPSIDAWWALLSREVK

SEQ ID NO: 92636 - protein, 180 aa, Kluyvera georgiana
  misc_feature (1)..(180): tr|A0A1B7JX52|A0A1B7JX52_9ENTR Isochorismatase OS=Kluyv era georgiana ATCC 51603 OX=1354264 GN=M989_02437 PE=4 SV=1
MQALLIIDMQGFVPDRIERGMSYFPTRSIDNMRTAIGAFRAAGKPILHVRHQTLEAGSPLHRDSAHFQPVAGFEEQVGEPVFIKTTSSAFSSTDLHGWLQRAQISEIAVIGAVAGYCVNSTVRMGADLGLSITVIRDAVLSFPLESAEISAEDVYRVTLGLLVNGFARGINTAELQLNSN

SEQ ID NO: 92637 - protein, 284 aa, Kluyvera intermedia
  misc_feature (1)..(284): tr|A0A447MJX6|A0A447MJX6_KLUIN Isochorismatase OS=Kluyv era intermedia OX=61648 GN=entB PE=4 SV=1
MAIPKLQGYALPTALDLPENKVNWAFEPARAALLIHDMQEYFLNFWGDDSEMMEKVVANIAALRDFCKKNGIPVFYTAQPKEQSDEDRALLNDMWGPGLTRSPEQQQVIAALAPDEDDTVLVKWRYSAFHRSPLEEMLKENGRNQLIITGVYAHIGCMTTATDAFMRDIKPFFVADALADFSRDEHLMSLKYVAGRSGRVVMTDELLPSVPVSKEALRALVLPLLDESDEPFDDDNLIDYGLDSVRMMALAARWRKVHGDIDFVMLAKNPSIDAWWALLSREVK

SEQ ID NO: 92638 - protein, 191 aa, Kocuria rosea
  misc_feature (1)..(191): tr|A0A378GY51|A0A378GY51_KOCRO Probable isochorismatase OS=Kocuria rosea OX=1275 GN=phzD PE=4 SV=1
MPQHPAQGRTALLVIDMQNSYFDFPELEEQREPVTEKVNELIRAARDGGCPIVLIRTQHERDGSTWTVNMHDDGQGFAFPGTEQSEYVAGLDTEGGTGLVKTRDSAFFDTDLAARLRNLGATHLMLCGISTHSCVAQTAIDAFAHDFRAAVARDAVASENSELSRALLAFLEDEMRQDILHQDEAVARLRS

SEQ ID NO: 92639 - protein, 283 aa, Kosakonia radicincitans
  misc_feature (1)..(283): tr|A0A5E8BFC4|A0A5E8BFC4_9ENTR Isochorismatase ) OS=Kos akonia radicincitans OX=283686 GN=UYSO10_2134 PE=4 SV=1
MAIPKLEGYALPAAADIPQNKVSWPFEPERAALLIHDMQDYFVSFWGDNCPMMQQVIANIAALRAFCKQHHIPVYYTAQPKAQSDEDRALLNDMWGPGLTRSPEQQKIVAELAPDEADTVLVKWRYSAFHRSPLEQMLKETGRNQLLITGVYSHIGCMTTATDAFMRDIKPFMVADALADFSREEHLMSLKYVAGRSGRVVLTQELLPVPGSKAALRAVVLPLLDESDEPLDDDNLIDYGLDSVRMMALAARWRKVHGDIDFVMLAKNPTIDAWWALLSREVK

SEQ ID NO: 92640 - protein, 186 aa, Kuenenia stuttgartiensis
  misc_feature (1)..(186): tr|Q1PZS5|Q1PZS5_KUEST Strongly similar to isochorismat ase (2,3 dihydro-2,3-dihydroxybenzoate synthase) OS=Kue nenia stuttgartiensis OX=174633 GN=entB PE=4 SV=1
MEQEKILVKTKNLNSANTALLICDMLNDFVKKGASLEVPAARDIIPGIKKEILSARKSGIPVIYCCDAHIKNDPEFSLWPEHAVEGTEGACIVKELAPGKDDFLVTKKRYSCFYKTSLQKVLKQFGATHLIITGVVTNICVLYTVCDAYMRGYAVTIPQNCVAALTKKDHVYALQQMKRIFNAKIR

SEQ ID NO: 92641 - protein, 298 aa, Kushneria phyllosphaerae
  misc_feature (1)..(298): tr|A0A2R8CJL9|A0A2R8CJL9_9GAMM Isochorismatase OS=Kushn eria phyllosphaerae OX=2100822 GN=dhbB PE=4 SV=1
MAIPAIASYSLPTTSELPDNRVNWQVDPARAVLLIHDMQRYFLAKYDVSAAPVPEVIHHLATLIKAARAAGVPVVYTAQPTDQPDSDRALLNDFWGPGLPAHPEQYPVVDELAPQNGDVVLTKWRYSAFQRSDLRERMRTWGRDQLIIGGVYAHIGCMATALEGFMQDVQCFMLTDGVADFSRERHDMALEYVAGRCGVVTTSARALEALESGQGSQQAEVAMTQAALTERVATLAGVSAEEIPADDNLLFYGLDSMRMMTFVEELRREGFDVSFMDLVEAPTIVDWVALLNRQGVSA

SEQ ID NO: 92642 - protein, 288 aa, Labrenzia aggregata
  misc_feature (1)..(288): tr|A0A0M6YAC7|A0A0M6YAC7_9RHOB Isochorismatase OS=Labre nzia aggregata OX=187304 GN=entB PE=4 SV=1
MTIPTISDYPMPKDFPANKTGWKPDAARAVFLIHDMQDYFLRYYNADGELMTQLIANLQRVRNWAYANNVPVIYTAQPHDQPPEDRALLNDMWGPGLTVADPALQQVVKGLEPGENDVVLTKWRYSAFQRSDLKARMASLGRDQLIVGGIYAHIGCLMTVADAFMNDIQAFMIGDAVADFSEAEHKMALKYVATRCGAVTDTASLTGAARKSEPMRDWLHSRVLELIEDDADLDPEENLIFYGLDSIQVMKLASELKERGIVVGFDELARVPTLNGWWALIESKRLAA

SEQ ID NO: 92643 - protein, 216 aa, Labrenzia alexandrii
  misc_feature (1)..(216): tr|A0A5E8GWU0|A0A5E8GWU0_LABAD Amidase OS=Labrenzia ale xandrii (strain DSM 17067 / NCIMB 14079 / DFL-11) OX=24 4592 GN=SADFL11_1747 PE=4 SV=1
MSKHEMISPENAALVLIDFQPAMYQGVESHDRLSVMHNVQILAKGAKLFNVPTVISTVAKDSFSGPFMPEVTDLFPEVEVVDRTSINSWVDENFRKAVAATGRKKIVLAGLWTEACVMFPTLDLLREGYEVYIPADACGDITPEAHERAMNRLMQAGAVPMNALQFIFELQQDWARGETYDGVMDILKTHTPYGIQVRFSKWALGEHASEAGIAAE

SEQ ID NO: 92644 - protein, 171 aa, Lactobacillus brevis
  misc_feature (1)..(171): tr|A0A0C1MDG7|A0A0C1MDG7_LACBR Isochorismatase OS=Lacto bacillus brevis OX=1580 GN=LbDm2_0286 PE=4 SV=1
MAQALIVIDMQQALAKIDRRNQVVATINQRIDRYREAQRPIIFIQHTEPGMEVASAGWQLFPDLHAAGSDVYYNKTRPDSFYQTGLEAFLKMNQLRTIEICGAQVEYCVDTTIRVAYHLGFQIELLMAGISTLDSDLLTATQIKQHHAHIWEHRFAEFVTADTDLDGEYQK

SEQ ID NO: 92645 - protein, 205 aa, Lactobacillus buchneri
  misc_feature (1)..(205): tr|J9W2T8|J9W2T8_LACBU Isochorismatase OS=Lactobacillus buchneri CD034 OX=1071400 GN=LBUCD034_0237 PE=4 SV=1
MTSFDKRGADDRLLSPDNAVLTIIDYQPVQIGSIGSMRHADLLKNAEMVVEAAKLFKLPIVLSTVNAHNQRNSDTVKPLKDLVGDIPSYDRSSINAWEDKDYNDAIKATGRKKIIILALWTEACLTFPTIDAIAEGFDVYPVVDAVGGTSTIAHETALRRVEQAGAHLITIPQLVCELQRDWNRQDTVPGFVKLLQENGAFTNLQ

SEQ ID NO: 92646 - protein, 167 aa, Lactobacillus casei
  misc_feature (1)..(167): tr|K6QDI3|K6QDI3_LACCA Isochorismatase OS=Lactobacillus casei 21/1 OX=1051651 GN=LCA211_2497 PE=4 SV=1
MLKDGLVVIDVQYGLSAAHHYKQLLANINQRIDAYHAADHPIIFMQHTDESMPYNGHDWQLDTQLHRAPSDRVILKYHSDSFFQTGLAATLHGLHVQTIEVAGLQTEYCIDTAIRVGHDLGFKAATIHGLNSTFDTPDLSAQQIIAHHEGIWDGSFAEVVRDEGVKL

SEQ ID NO: 92647 - protein, 168 aa, Lactobacillus curieae
  misc_feature (1)..(168): tr|A0A401FHT6|A0A401FHT6_9LACO Isochorismatase OS=Lacto bacillus curieae OX=1138822 GN=NBRC111893_70 PE=4 SV=1
MIIFREDKRALIVIDLQNGVGPLVNNADLIKRVNKRINYYHSHNKPIIFIRHSDQGLEKNSYDWQLVDDLETNSQDYYVDKTHADSFHNTNLQTVLDELKVNELEICGAEIPYCIDATIKAAFDRGYKLFMSRGTVSSENDESIPFPILVEHYEKIWNHRFVEFIDEE

SEQ ID NO: 92648 - protein, 184 aa, Lactobacillus delbrueckii
  misc_feature (1)..(184): tr|F0HWV9|F0HWV9_LACDL Isochorismatase OS=Lactobacillus delbrueckii subsp. lactis DSM 20072 OX=888027 GN=pncA PE=4 SV=1
MENEALLIIDYTNDFVDDKGALTCGAPAQALAGQIVSLADQFLAAGKWVILPTDKHFKGNPYHPETKLFPPHNLPNTWGREFYGPLQTWYNKHQDDKHVLVLDKSRYSAFCATGLDLFLRERKVSRVHLAGVCTDICVLHTAMDAYNHGYDITVHEKAVAALNDAGQEWALNHFKSCLGAEVVD

SEQ ID NO: 92649 - protein, 183 aa, Lactobacillus hominis
  misc_feature (1)..(183): tr|I7LAN5|I7LAN5_9LACO Isochorismatase transposase OS=L actobacillus hominis DSM 23910 = CRBIP 24.179 OX=142375 8 GN=BN55_04625 PE=4 SV=1
MTQEALLIIDYTNDFVSDKGSLTCGKPAQEIENEIVNLADSFLKQNKWVIIPTDLHFPGNKYHPETKLFPPHNLPNTWGRQLYGKLQPWYDKNKTNDHVIFMDKTRYSAFAGTNLDLILRERKIDTLHLTGVCTDICVLHTAMDAYNRCYNLVIHQDGVASFDENGHKWALNHFKSCLGATIL

SEQ ID NO: 92650 - protein, 167 aa, Lactobacillus paracasei
  misc_feature (1)..(167): tr|S2N9U6|S2N9U6_LACPA Isochorismatase OS=Lactobacillus paracasei subsp. paracasei Lpp225 OX=1256225 GN=Lpp225 _1688 PE=4 SV=1
MLKDGLVVIDVQYGLSAAHHYKQLLANINQRIDAYHAADHPIIFMQHTDESMPYNGHDWQLDTQLHRAPSDRVILKYHSDSFFQTGLAATLHGLHVQTIEVAGLQTEYCIDTAIRVGHDLGFKAATIHGLNSTFDTPDLSAQQIIAHHEGIWDGSFAEVVRDESVKL

SEQ ID NO: 92651 - protein, 165 aa, Lactobacillus rhamnosus
  misc_feature (1)..(165): tr|K8QFP5|K8QFP5_LACRH Isochorismatase OS=Lactobacillus rhamnosus LRHMDP2 OX=1203258 GN=LRHMDP2_1221 PE=4 SV=1
MLRDTLIVIDVQNGLNTAANYDQLVTAINHRIDAYHAAGRPILFIQLTDDELPYGSAAWQLEARLHRLENDQVMLKYHSDSFYHTGLETTLHGLGASTIEIAGLQTEYCIDTAIRVSHDLGFKPTIIHGLNSTFNSPILSASQIIAHHESIWNGTFAEVLQTPED

SEQ ID NO: 92652 - protein, 193 aa, Lactococcus lactis
  misc_feature (1)..(193): tr|A2RLE6|A2RLE6_LACLM Putative isochorismatase OS=Lact ococcus lactis subsp. cremoris (strain MG1363) OX=41687 0 GN=llmg_1538 PE=4 SV=1
MEENLKDFLITKREAMQNSALIIIDLQAFIKKLAKKAEPYGWDKIIENNRALIAAFDQANQPVYLVTVEPKILWKSAKEAFSRMILQDELDNNSRSHKLVKFGPSAFKQSDDDLADELKKLSVSKIYVTGVSMSNGVVKTAKDGAESAFESFIIEDACADRKLKNYQKTLTEIPEFGKVIKTKEIIEELNKNV

SEQ ID NO: 92653 - protein, 179 aa, Lactococcus piscium
  misc_feature (1)..(179): tr|A0A1C3SY39|A0A1C3SY39_9LACT Putative isochorismatase OS=Lactococcus piscium OX=1364 GN=LP2241_50532 PE=4 SV =1
MKQGLLVIDVQNDYFAGGKMALAGADEVLLKINALEERFLAEKLPIIYIQHIKYASGADFFEVGTVGADLHPQLKHDASSITVEKQFPNSFQGTDLQHQLEQNGVEQLVICGMMTHMCIRATTPVAESLGYTPFVISDATATRDLTVNGELMPAKQVQETMLAELSAVASLMTTNEFLA

SEQ ID NO: 92654 - protein, 284 aa, Leclercia adecarboxylata
  misc_feature (1)..(284): tr|A0A4V6JI18|A0A4V6JI18_9ENTR Isochorismatase OS=Lecle rcia adecarboxylata OX=83655 GN=entB PE=4 SV=1
MAIPKLTGYALPGAADLPSNKVSWTMEPARAALLIHDMQEYFLNFWGDNCPMMAQVVANIARLRDYCKQQGIPVYYTAQPKEQSDEDRALLNDMWGPGLTRSPEQQRIVAELTPDEADTVLVKWRYSAFHRSPLEQMLKDSGRDQLIITGVYAHIGCMTTATDAFMRDIQPFFVADALADFTRDEHLMSLKYVAGRSGRVVTTDELLPSVPASKAALREAILPLLDESDEPMDDENLIDYGLDSVRMMGLAARWRKVHGDIDFVMLAKNPTLDAWWALLSREVK

SEQ ID NO: 92655 - protein, 201 aa, Leifsonia rubra
  misc_feature (1)..(201): tr|S7W3K6|S7W3K6_9MICO Isochorismatase OS=Leifsonia rub ra CMS 76R OX=1348338 GN=ADILRU_1401 PE=4 SV=1
MTTALIVVDVQLGFDDADYWGERNNPDCDSNIGMLIGYWRRQGWPIVYVRHDSADAASPLHPSSPGNQFKDVLSGTPDLLVSKTVNSSFHGSPDLDAWLTASRINSIAICGITTNHCCETTARVGGNLGYDVTFVVDATHTFDRVGPFGEEITADELSTITGVNLHGEFARVVVTHDLLGAAPDGFDAEPSAPSRSVRFQR

SEQ ID NO: 92656 - protein, 190 aa, Leminorella grimontii
  misc_feature (1)..(190): tr|A0A085HKL9|A0A085HKL9_9GAMM Isochorismatase OS=Lemin orella grimontii ATCC 33999 = DSM 5078 OX=1005999 GN=GL GR_1690 PE=4 SV=1
MSSALIVIDLIEEIIGERGRSNGSAGQTKDRNVVAKTNLAVAAARAKSIPIVWVKVGFADDYSDIPPYSPMFNAAKQNGALRLSDPGCDWVEGLDVQPQDEVVVKKAVSAFAGNALLSWLTDRGYDHVLLAGVSSAMAIQNTARQAHDLGFRVTVLEDLCAAATADLHQQSMDMLRPMAEITTSDVFFKS

SEQ ID NO: 92657 - protein, 227 aa, Leptolyngbya sp.
  misc_feature (1)..(227): tr|A0A0P4UUJ6|A0A0P4UUJ6_9CYAN Isochorismatase OS=Lepto lyngbya sp. NIES-2104 OX=1552121 GN=NIES2104_36770 PE=4 SV=1
MFVKADPYPYPFNGDLRPENTALIIIDMQTDFCGKGGYVDKMGYDLSLTRAPIEPIRQVMNVMRSLNFHIIHTREGHRPDLSDLPENKRWRSQQIGAGIGDLGPCGRILVRGEPGWEIIPELAPLPGEVIIDKPGKGSFYATDLDLILNRKGIQNLILTGITTDVCVHTTMRDANDRGYECLLLSDCTGATDYGNYLAALNMIKMQGGVFGSVSDSIELITALKSGL

SEQ ID NO: 92658 - protein, 175 aa, Listeria monocytogenes
  misc_feature (1)..(175): tr|A0A3Q0NC11|A0A3Q0NC11_LISMG Isochorismatase OS=Liste ria monocytogenes serotype 1/2a (strain EGD / Mackaness ) OX=1334565 GN=LMON_0630 PE=4 SV=1
MILLVIDTQKLIMTNNLYNFDSLVPNIEQLIATARKNKIEIVYIRHDDGPNTELTEGKEGFDIYKKFQPTTHERIFDKTVNSAFKGTGLVEYLKEKGTKKIVVAGLQTDFCIDATVKCGFEHGFHMIVPAHANSTEDNHFMSGENSYKYYNEWMWPGRYATCISMEETIKEMEHN

SEQ ID NO: 92659 - protein, 241 aa, Luminiphilus syltensis
  misc_feature (1)..(241): tr|B8KRB9|B8KRB9_9GAMM Isochorismatase hydrolase OS=Lum iniphilus syltensis NOR5-1B OX=565045 GN=NOR51B_1347 PE =4 SV=1
MRISTHFSRWILSALLVLGTGQVIASTATPTPAGGLLTPENHALILIDHQPQMAFATHSIDIVELRNNVTGLAKAAKAFSVPTILTTVAEESFAGPLFPELKAVFPEQSPIDRTTMNTWEDPRIAERVNEIDRKKIVVAALWTEVCGVGPVLSAIDQGYDVYFVTDASGGVSKEAHDMAVQRMVLAGAQPITWLQYMLELQRDWSRTDTYEAVTGIAKQHGGGYGLGIIYAKEMFGAKEGN

SEQ ID NO: 92660 - protein, 298 aa, Luteococcus japonicus
  misc_feature (1)..(298): tr|A0A1R4KG66|A0A1R4KG66_9ACTN Isochorismatase of sider ophore biosynthesis OS=Luteococcus japonicus LSP_Lj1 OX =1255658 GN=FM114_14120 PE=4 SV=1
MGLPSLIDYTLPTASELPDPVVNWALDPTRCALLVHDLQAHFLRPYAPALREELVGNAASVLQACRQHGIPVAHTHQPDDQSPEERGLLTDFWGPGPSSTGRAAPTGDDPLAAVDGEAVIVRRRYNAFLGTELDQWLRENGRDQLIVCGIYAHIGCLMTSAHAFMTERQPFMVADATADFSAQEHRMALEYVACRLGRSLTTHDVLQALPHGADQDGADQDGHSLDSLRGRVAELVELPVEQVRPDDDLASLGLDSMRRMKLVEDLAQTGTHLDFMAVALAETCTDLHALATPDQAAA

SEQ ID NO: 92661 - protein, 199 aa, Lutibaculum baratangense
  misc_feature (1)..(199): tr|V4RHD6|V4RHD6_9RHIZ Isochorismatase OS=Lutibaculum b aratangense AMV1 OX=631454 GN=N177_2092 PE=4 SV=1
MTTPKTLLELAGATPAPAALSESAVVVIDAQREYEEGPIALPAVHAAIAEISALVARARRQGRPVLHVVHRGKAGGLFDPEAGGRIIEALKPHDGERVIEKTLPNAFAGTELHEAVKALGVQKLVVCGFMTHMCVSSTVRAALDLGLSSTVVANATATRDLPSQVGGENIGWEALQLASLAALADRFATVVAAEGEVPN

SEQ ID NO: 92662 - protein, 185 aa, Lysinibacillus sphaericus
  misc_feature (1)..(185): tr|A0A2X0XTA3|A0A2X0XTA3_LYSSH Isochorismatase OS=Lysin ibacillus sphaericus OX=1421 GN=NCTC7582_03652 PE=4 SV= 1
MKQALVVIDAQQELIEGNQDEQAVYRKDELLKTINAVIQKAIEAEAYIIFVRDQDVAGGEGEGFQVHQAIQVPTTAVYFDKLATNAFYRTGLLDYLQANEVEHLVMMGCKTEHCVDTAVRAATIQGFDVTLVGDGHSTNGSDYLSPEDTVAHHNDILHGHYNVDHFSLVRNADEALFEPTHNSYR

SEQ ID NO: 92663 - protein, 292 aa, Lysobacter antibioticus
  misc_feature (1)..(292): tr|A0A0S2FB00|A0A0S2FB00_9GAMM Isochorismatase OS=Lysob acter antibioticus OX=84531 GN=dhbB PE=4 SV=1
MTIPTIASYPMPGAARLPANRVDWRPDPSRAVLLIHDMQDYFLAFYDRAQAPVPELLANIRALRDACDDAGVPVVYTAQPTEQSAAQRGLLQPWWGPGITAKPELAPVALEIAPRPQDVVLTKWRYSAFVSSDLRERMREQGRDQLIVCGIYAHIGCMMTLADAFMHDIQPFMVADAVADFSAEEHAMALDYVSRRCGVVIDRAACIEALGTGLGLPRSLIALRTELAQIMEVPLDDIAASDNPFEAGLDSIRLMTLLERWSSRGERIGLVELAERGSVSEWWQLIDSRRAA

SEQ ID NO: 92664 - protein, 187 aa, Lysobacter capsici
  misc_feature (1)..(187): tr|A0A108U918|A0A108U918_9GAMM Isochorismatase OS=Lysob acter capsici AZ78 OX=1444315 GN=AZ78_2334 PE=4 SV=1
MIDPQRTALIPIDVQRGFDYPPWGPRNNPRMEANGQRLLQLWRAKGLPLIHVRHDSIIDASTLHPSHPGNAFRPGFEPLAGEAVVGKSVNAAFIGTDLDLRLRRRGIDTLVLFGISTDMCVSTTARVASNLGYRTLVIADACFCFDLVDADGSVIAADAVSRAHLATLRAEFAEVMNVDEIVAMIGV

SEQ ID NO: 92665 - protein, 185 aa, Lysobacter enzymogenes
  misc_feature (1)..(185): tr|A0A0S2DB35|A0A0S2DB35_LYSEN Cysteine hydrolase OS=Ly sobacter enzymogenes OX=69 GN=FE772_02730 PE=4 SV=1
MTNVAPPQIALLIVDMFNFLDFADGQALLKQALPAARRIAALKRRFRRVGAPVIYANDNFGQWHADFRELVAVCRHESCRGAPIADLLAPEADDFYVLKPKQSAFHSTPLAVLLEHCGCREVAITGISTDVCIAATAIDAHMRDLTVRIPADCVAAPSRRRTAVALAVLKQSVHARCAQSPSLHP

SEQ ID NO: 92666 - protein, 224 aa, Lysobacter sp.
  misc_feature (1)..(224): tr|A0A0D0S7K4|A0A0D0S7K4_9GAMM NODE_22, whole genome sh otgun sequence OS=Lysobacter sp. A03 OX=1199154 GN=TI01 _1577 PE=4 SV=1
MAVMETSDLTARQYWAQVKANRNRAKFGFGSRPAIVNIDVQRAYTDMDAFKTAYETDPRQIEHINTLSALVRERGLPVIWTYVAYLENGEDAGVWGTRTNTPDSLQNIKHGSERAQIDPRADVQPGDIVMHKRMASPFFETNLWSLLTFHRIDTLIITGGSTSGCVRACSVDSLSRGFRTIVVEECVADKHEIPHFANLADIMLKYADVEAVDEVAAQLKKIAP

SEQ ID NO: 92667 - protein, 222 aa, Magnetospira sp.
  misc_feature (1)..(222): tr|W6KBU1|W6KBU1_MAGSQ Putative Isochorismatase OS=Magn etospira sp. (strain QH-2) OX=1288970 GN=MGMAQ_2604 PE= 4 SV=1
MPVIANALPFAFEFDPATTALVVIDMQRDFLEPGGFGEALGNDVSQLAPVVPATEKLLAACRAAGLEIVHTRESHLPDLSDCPPAKRNRGSCKLRIGDPGPMGRILVRGEPGNDIVPSLAPLPGETIIDKPGKGAFYKTGLTHRLADDGITHLIFAGVTTEVCVQTSMREANDRGFDCLLVADCTGSYFPEFKQATLEMVRAQGGIVGWTADLYAVLEALDG

SEQ ID NO: 92668 - protein, 176 aa, Marinobacter excellens
  misc_feature (1)..(176): tr|A0A137SBN1|A0A137SBN1_9ALTE Isochorismatase OS=Marin obacter excellens LAMA 842 OX=1306954 GN=J122_2126 PE=4 SV=1
MLMKAEQSTLLLVDVQERLMPAISQGEEVVDRCTLLATIAGVLEVPVVGTEQLPEKLGPNVESVRELCNVTVGKHHFDACPDGLIDQLPEGRQQIVIGGCETHVCMLQTALSLLDAGYKVWVVADATGSRNDFDRDVALDRLHQSGARIVTTEMVAFEWMVHCRHPRFRDIQALIK

SEQ ID NO: 92669 - protein, 178 aa, Marinobacterium sp.
  misc_feature (1)..(178): tr|A0A081FUW6|A0A081FUW6_9GAMM Isochorismatase OS=Marin obacterium sp. AK27 OX=1232683 GN=ADIMK_3461 PE=4 SV=1
MTPSSNTTSRRALIVIDLQNDYFHDGHYPLWNSETTLDHVTYAIRNAQAVGDTVILVQHVAKGPSPLFNPGTSGVQIHPTVLKQVPNATIITKSHADSFIDTDLQQQLSERGINELLICGMMTQNCITHTALSPLAGHYHVSVVGDCCTSVDEIIHKVALRALSDRISVVDLKEVFQG

SEQ ID NO: 92670 - protein, 301 aa, Marinomonas mediterranea
  misc_feature (1)..(301): tr|F2JZ73|F2JZ73_MARM1 Isochorismatase OS=Marinomonas m editerranea (strain ATCC 700492 / JCM 21426 / NBRC 1030 28 / MMB-1) OX=717774 GN=Marme_2828 PE=4 SV=1
MAIPSIATYPMPTVNDFPKGKVDWQLDPKRAVFLIHDMQDYFLRFYDQGSDLIQTLKQNLVDIKAFCHQQGIPVVYTAQPNDQAPEDRALLNDMWGSGLNDYPELQPVISELTPSEIDTVLVKWRYSAFHRSNLQELMQGWGRDQLIIGGIYAHIGCMISAADAFMRDIQPFMVGDALADFSEDEHKMALSYTAGRTGRVVSTEDVLLSAKHSEGATSEEPSMTFDLLKAQVLELIDEDDLSEFESDDELIDYGLDSIQIMSFVTKWRTLGVEVTFAELVQAASLNGWWALIERKQQKVAN

SEQ ID NO: 92671 - protein, 299 aa, Marinomonas posidonica
  misc_feature (1)..(299): tr|F6CU82|F6CU82_MARPP Isochorismatase OS=Marinomonas p osidonica (strain CECT 7376 / NCIMB 14433 / IVIA-Po-181 ) OX=491952 GN=Mar181_2163 PE=4 SV=1
MSIPTIPSYPMPTADHFPQQKVTWALEPNRAVFLIHDMQAYFLRFYDADSELIKTLKQNLSAIKAYCHAHGIPVVYTAQPKDQKPEDRALLNDMWGSGLNDFPELQQVVDELTPGEQDTVLVKWRYSAFHRSNLQELMSNWGRDQLLIGGIYAHIGCMMTAVDAFMRDIQPFMIGDALADFSESEHYQALTYTAGRAGRVISTNEVLLATSVSTSGLHYEQFKTQILSLLDEEDLDDFQADDELIDYGLDSIQIMNLVSQWKEMGVEISFQELASAATLNAWWDLLQTKMTTKQVDLVE

SEQ ID NO: 92672 - protein, 299 aa, Marinomonas sp.
  misc_feature (1)..(299): tr|A6VVT1|A6VVT1_MARMS Isochorismatase OS=Marinomonas s p. (strain MWYL1) OX=400668 GN=Mmwyl1_1633 PE=4 SV=1
MTIKKISDYPMPNSADYPANKVDWEIDPKRAVLLIHDMQRYFVNFYDTQGPLITSLIQNLVRLREWAYANNVPVVYTAQPYEQPDADRALLNAMWGPGLPASTKDQQLIIDQLTPNEHDVVLTKWRYSAFARSDLRERLQEWGRDQLIVGGVYAHIGCMITCVDAFMGDVQPFLVGNAVADFSEDEHFLALKYVSSRCGKVIDVESLSQSSTKALTQEWLYARVQQLIEEDEELDPDENLIVYGLDSLKIMQFASDLKAYNIAISFEEIARNPTLSNWWALIQERQINVSDTNETPEPA

SEQ ID NO: 92673 - protein, 205 aa, Massilia sp.
  misc_feature (1)..(205): tr|A0A085FXL9|A0A085FXL9_9BURK Isochorismatase OS=Massi lia sp. LC238 OX=1502852 GN=pncA2 PE=4 SV=1
MSAIVLGKGDALLIVDLQNDFLPGGALAVPRGDLVIAPINALIDLYHERGLPIYASRDWHPEDHCSFTAQGGPWPPHCVAATEGALFSEVLQLPEEAIVISKALTAAEDAYSAFNGTGLARSMLADGITRLAVCGLATDYCVLNTVLDGVEAGFEVLLALEATRAVEVKPGDGDRAIARMLAKGAVPVRLSAGQLVADVALGARL

SEQ ID NO: 92674 - protein, 94 aa, Melissococcus plutonius
  misc_feature (1)..(94): tr|F3YAH5|F3YAH5_MELPT Isochorismatase OS=Melissococcus plutonius (strain ATCC 35311 / CIP 104052 / LMG 20360 / NCIMB 702443) OX=940190 GN=MPTP_1047 PE=4 SV=1
MNAKRALIVIDLQIGLGYELYNFKHVLEKVNQRIAFYRKMNQPIIFIQHSDKSLLRGSTDWNFFPELNYYKDDWLIEKHHANAFYHTSLSNIAF

SEQ ID NO: 92675 - protein, 233 aa, Mesorhizobium delmotii
  misc_feature (1)..(233): tr|A0A2P9ADX8|A0A2P9ADX8_9RHIZ Putative isochorismatase family protein OS=Mesorhizobium delmotii OX=1631247 GN =BQ8482_111264 PE=4 SV=1
MNARAEVTQRYIDADPYPWPYNGELRPDNTALIIIDMQTDFCGPGGYVDHMGYDLSLVRAPIEPIRSVLSAMRAKGYTIIHTREGHRPDLADLPANKRWRSRRINAGIGDPGPCGRILVRGEPGWDIIPDLYPAEGEPIIDKPGKGSFCATDLELILNQRGIENIVLTGITTDVCVHTTMREANDRGFECVMLEDCCGATDYGNHLAAIKMIKMQGGVFGAVSNSASFVAQLP

SEQ ID NO: 92676 - protein, 231 aa, Mesorhizobium metallidurans
  misc_feature (1)..(231): tr|M5FA23|M5FA23_9RHIZ Putative isochorismatase family protein OS=Mesorhizobium metallidurans STM 2683 OX=1297 569 GN=MESS2_790053 PE=4 SV=1
MNARAGQRYIEADPYPWPYNGDLRSDNTALIIIDMQTDFCGPGGYVDHMGYDLSLVRAPIEPIKSVLSAMRAKGYTIIHTREGHRPDLADLPANKRWRSRRINAGIGDPGPCGRILVRGEPGWDIISDLYPAEGEPIIDKPGKGSFCATDLELILNQRGIENIVLTGITTDVCVHTTMREANDRGFECVMLEDCCGATDYGNHLAAIKMIKMQGGVFGAVSNSVALVAQLP

SEQ ID NO: 92677 - protein, 252 aa, Mesorhizobium plurifarium
  misc_feature (1)..(252): tr|A0A0K2W6N1|A0A0K2W6N1_MESPL Putative isochorismatase family protein OS=Mesorhizobium plurifarium OX=69974 G N=MPL1032_80022 PE=4 SV=1
MTAHHAPPLESLERPEFFAMNARAEITERYIDADPYPWPYNGDLRPDNTALIIIDMQTDFCGPGGYVDHMGYDLSLVRAPIEPIKAVLSAMRAKGYTIIHTREGHRPDLADLPANKRWRSRRINAGIGDPGPCGRILVRGEPGWDIIPDLYPAEGEPIIDKPGKGSFCATDLELILNQRGIENIVLTGITTDVCVHTTMREANDRGFECVMLEDCCGATDYGNHLAAIKMIKMQGGVFGAVSNSAALVAQLP

SEQ ID NO: 92678 - protein, 233 aa, Mesorhizobium prunaredense
  misc_feature (1)..(233): tr|A0A1R3VF03|A0A1R3VF03_9RHIZ Putative isochorismatase family protein OS=Mesorhizobium prunaredense OX=163124 9 GN=BQ8794_50618 PE=4 SV=1
MNARAEVTQRYIDADPYPWPYNGELRPDNTALIIIDMQTDFCGPGGYVDHMGYDLSLVRAPIEPIRSVLSAMRAKGYTIIHTREGHRPDLADLPANKRWRSRRINAGIGDPGPCGRILVRGEPGWDIIPDLYPAEGEPIIDKPGKGSFCATDLELILNQRGIENIVLTGITTDVCVHTTMREANDRGFECVMLEDCCGATDYGNHLAAIKMIKMQGGVFGAVSNSVSFVAQLP

SEQ ID NO: 92679 - protein, 233 aa, Mesorhizobium sp.
  misc_feature (1)..(233): tr|A0A090E336|A0A090E336_9RHIZ Putative isochorismatase family protein OS=Mesorhizobium sp. ORS 3324 OX=408180 GN=MPLB_390046 PE=4 SV=1
MNARAEITERYIDADPYPWPYNGNLRPDNTALIIIDMQTDFCGPGGYVDHMGYDLSLVRAPIEPIKSVLAAMRVKGYTIIHTREGHRPDLADLPANKRWRSRRINAGIGDPGPCGRILVRGEPGWDIIPDLYPAAGEPIIDKPGKGSFCATDLELILNQRGIENIVLTGITTDVCVHTTMREANDRGFECVMLEDCCGATDYGNHLAAIKMIKMQGGVFGAVSNSAALVSQLP

SEQ ID NO: 92680 - protein, 179 aa, Methanocella arvoryzae
  misc_feature (1)..(179): tr|Q0W799|Q0W799_METAR Isochorismatase OS=Methanocella arvoryzae (strain DSM 22066 / NBRC 105507 / MRE50) OX=3 51160 GN=entB PE=4 SV=1
MRTALLLIDIQNDYFPGGKSELTGAVEASMNARRLLDAFRLNKQPVIHVQHMSTRPGASFFIPGTAGSEIHDNVKPAAGEITIVKHYPNSFRETTLLDKLKQLEIEQLVVCGMMTHMCVDSTVRAAYDYGFKCILASDACATKDLQFKDQIVDAIDVHNAFVSALSGMFAVVKCTDELL

SEQ ID NO: 92681 - protein, 180 aa, Methanosarcina barkeri
  misc_feature (1)..(180): tr|A0A0E3SJ33|A0A0E3SJ33_METBA Isochorismatase OS=Metha nosarcina barkeri 3 OX=1434107 GN=MSBR3_0973 PE=4 SV=1
MKEALLLIDIQNDYFPGGKMELVSMEEAAKKAAKLLKAFRTASKPVFFIKHMSTKSDATFFVPGTRGTDIHSSVSPLSDETVIEKHFPNSFLQTELLLVLKESEVTDLIICGAMSHMCIDTTVRAAKELGFKCTLIADACATRNLKFGEEILPAQTVHASFMAALDGMFATIMTAEEYLN

SEQ ID NO: 92682 - protein, 180 aa, Methanosarcina horonobensis
  misc_feature (1)..(180): tr|A0A0E3SHH7|A0A0E3SHH7_9EURY Isochorismatase OS=Metha nosarcina horonobensis HB-1 = JCM 15518 OX=1434110 GN=M SHOH_3469 PE=4 SV=1
MKEALLLIDIQNDYFPAGRMELAGMEDAAKKVSALLELFRNAGKPIFFIRHLSTKSGAAFFIPGTSGADIHVSVQPLQGETVIEKHFPNSFFQTELLSRLKEADVTYLVVCGAMSHMCIDTTVRAAKELGFTSTLIADACATRDLKLKDEILPAYVVHSVFMAALDGMFANVMTTNEYIS

SEQ ID NO: 92683 - protein, 180 aa, Methanosarcina mazei
  misc_feature (1)..(180): tr|Q8PVQ5|Q8PVQ5_METMA Isochorismatase OS=Methanosarcin a mazei (strain ATCC BAA-159 / DSM 3647 / Goe1 / Go1 / JCM 11833 / OCM 88) OX=192952 GN=MM_1907 PE=4 SV=1
MKETLLLIDIQNDYFPGGRMELAGMEDASKKAAGLLKAFRASGKPVFFIKHLSTRPGASFFIPGTPGAEIHDSVQPLSEETVIEKHFPNSFFQTELLSRLNEENVTDLVICGAMSHMCIDTTVRAAKELGFTSTLIADACATRDLKFKDELLPASTVHASFMAALDGMFAKVMTTEEYLV

SEQ ID NO: 92684 - protein, 168 aa, Methanosarcina sp.
  misc_feature (1)..(168): tr|A0A0E3NZ28|A0A0E3NZ28_9EURY Isochorismatase OS=Metha nosarcina sp. MTP4 OX=1434100 GN=MSMTP_1659 PE=4 SV=1
MIENTKKATEKARVKGIPVIYIVMGLRLKVLPDMGLWKDIKKINFKEISPGGSGPGRSLAEELTIVEELTPHPKDFVVTKYNTMDAFHNTDLELILKGLKCDTLILTGDATNLCFETTVRSAFNRGYKCIVLSDCTATINEEFQKFAIEVIFPMLGEVIMVEELEIIP

SEQ ID NO: 92685 - protein, 188 aa, Unknown
  misc_feature (1)..(188): tr|A0A1D3RLX4|A0A1D3RLX4_9BACT Isochorismatase OS=metha notrophic endosymbiont of Bathymodiolus azoricus (Menez Gwen) OX=343232 GN=BAZMOX_00299_2 PE=4 SV=1
MTTHPNLLDSQNSLLLIVDIQDKLTGAMPEGNAEDMLENSSRLITAANLLNVPIIITEQYPKGLGATVASIREKLNASTTHFEKTGFSCLAADNFSATLEKKARKQIIIVGQETHVCILQTALELMQQGYQVHIVEDAVCSRKAENKFYALQRLQTQGATISNFESVLFEWLKNSQHEHFPAIAALLR

SEQ ID NO: 92686 - protein, 199 aa, Methyloceanibacter caenitepidi
  misc_feature (1)..(199): tr|A0A0A8JZS3|A0A0A8JZS3_9RHIZ Isochorismatase OS=Methy loceanibacter caenitepidi OX=1384459 GN=GL4_0379 PE=4 S V=1
MSNPTLRDLTGMSPDPAPISTSALVLIDCQQTYREGVMQLEGVEPALEEAAELLRRFREAGRPVIHIMHDAGEGTPYDVGAPIGQIADVVAPIDGETVIIKRFPSAFEQTELDWELKKHGVDNVVYGGFMTHMCVSSTARSAFNKGYANTVVAGATATRALPNPAGGEAVPAEQLQTASLSALADMFAVVVPATKNLPD

SEQ ID NO: 92687 - protein, 223 aa, Methyloglobulus morosus
  misc_feature (1)..(223): tr|V5C4X5|V5C4X5_9GAMM Isochorismatase OS=Methyloglobul us morosus KoM1 OX=1116472 GN=MGMO_89c00140 PE=4 SV=1
MSTIEINAEPEAIAIEIAKTAVVMIDMQRDFLEPGGFGESLGNDVSLLSAAIEPCKALLDAARQHEMLVIHTREGHLPDLSDAHKAKVERGDPSLRIGQLGPMGRILIRGEPGQDIIPELYPQLGEPVIDKPGKGAFYATDLQSILETNGIENLIVCGVTTEVCVHTTVREANDRGYRCIVPGDCCGSYIPEFHEVGLRMIKAQSGIFGWVTDSHTILTAMNI

SEQ ID NO: 92688 - protein, 184 aa, Methyloligella halotolerans
  misc_feature (1)..(184): tr|A0A1E2RXC9|A0A1E2RXC9_9RHIZ Putative isochorismatase OS=Methyloligella halotolerans OX=1177755 GN=A7A08_021 78 PE=4 SV=1
MLMDKERSQLLIVDMQERLLPAMSDADDVTKACERLVRGAQALDLPITVSEQYPKGLGPTAEPLRQTLGNSATVMEKVEFSCFRNAAIRHRLEELRRKGRPQVVVAGIEAHICVLQTALDLAAQGFETFVAADAIGSRLDESRRLAMGRMLHADVSVVNAEMVLFEWVGKAGSPEFKEIQALVK

SEQ ID NO: 92689 - protein, 199 aa, Methylophaga frappieri
  misc_feature (1)..(199): tr|I1YH20|I1YH20_METFJ Isochorismatase OS=Methylophaga frappieri (strain ATCC BAA-2434 / DSM 25690 / JAM7) OX= 754477 GN=Q7C_1054 PE=4 SV=1
MTQSTTLREIVGLGHKPANLADAALIMIDCQNTYRQGVMQLTDVEPALVQAQKLLARARDMQVPIIHIQHDAGPGSPYDLETDLGQIADEVAPQPGEIVITKHFPNAFIQTELDERLKTLGIDQIVLAGFMTHMCINSTAHGGFNLGYQVTVVASATATRDLPDASGQIVPAEQVQHAALASTRDLYAAVINSIADLPA

SEQ ID NO: 92690 - protein, 183 aa, Methylophaga nitratireducenticrescens
  misc_feature (1)..(183): tr|I1XH47|I1XH47_METNJ Isochorismatase OS=Methylophaga nitratireducenticrescens OX=754476 GN=Q7A_874 PE=4 SV=1
MMANSENSVLVIIDVQQKLAQAMPQGVHERLNKQINILLTAAKVLSIPVIVTEQYPKGLGPTEADLQNNLPVGTKTIEKTCFSCLQSEDFRFQLAATHRQQVILVGMETHICVLQTALALKAENYNVHVAEDGVCSRSKSNQYNAIQRMRHAGVIISNVESILFEWLGDASHAEFKTLAKLIV

SEQ ID NO: 92691 - protein, 188 aa, Methylophaga thiooxydans
  misc_feature (1)..(188): tr|A0A0A0BHR7|A0A0A0BHR7_9GAMM Isochorismatase OS=Methy lophaga thiooxydans OX=392484 GN=LP43_0811 PE=4 SV=1
MHTNMSVADSQTSTLMVIDIQERLTSSMPAGVRDRVIEQVSVLLTAAESLAIPVLVTEQYPKGLGPTEKALLNKLPNNTPVIEKTSFSLVKAESVIESLQQSGRKQVFLVGMETHICVLQTALDLLKQGYEVFVVEDAVSSRAKGNQFNALQRLRLAGAVITNVESLLFEWLGDAKHPAFKQLAKLIV

SEQ ID NO: 92692 - protein, 203 aa, Methylorubrum extorquens
  misc_feature (1)..(203): tr|C5AXZ9|C5AXZ9_METEA Putative Isochorismatase hydrola se OS=Methylorubrum extorquens (strain ATCC 14718 / DSM 1338 / JCM 2805 / NCIMB 9133 / AM1) OX=272630 GN=MexAM 1_META1p1183 PE=4 SV=1
MARKDGLKFGDLGPRAAHLCVDAQRMFSEETDWHTPWLARILPNIERIAAAHPERTVFTRFVPLRSPEEGRGAWRRYYEHWPKMTLEALGPEMVDLVPSVTRFVPPAKVVDKLVYSPWLKPELAGLLEAEAIDTLVVTGGETDVCVLATILGAVDRGYRVIVACDAVCSSADQTYDAMMFLYQSRFGEQIETASTDEILGAWS

SEQ ID NO: 92693 - protein, 189 aa, Microbacterium hydrocarbonoxydans
  misc_feature (1)..(189): tr|A0A077AY47|A0A077AY47_9MICO Isochorismatase (Fragmen t) OS=Microbacterium hydrocarbonoxydans OX=273678 PE=4 SV=1
MTRALIVIDMQRGFDDLAFWGPTANPECEANVAALIERWGREGEPIVIVRHDSPKEGSPLHPSAPGNALVSAVAAVEPDVLVSKSVNSAFYGDPDLQAWLEERGIRDLVICGIQTNMCVETTARMAGNLGYDVTVALDATRTFDLTGEVAGVGTVSRTAAELMAETALVLQQGGFARIVRTADLLKLAL

SEQ ID NO: 92694 - protein, 190 aa, Microbacterium oleivorans
  misc_feature (1)..(190): tr|A0A031FVA8|A0A031FVA8_9MICO Isochorismatase OS=Micro bacterium oleivorans OX=273677 GN=BW34_01169 PE=4 SV=1
MQIPPRQLTLDRAALVVIDVQRGFDDSAYWGERDNPDCEANVAALIKRWRERGWPVVFVRHDSTSPASPLRPGQAGNDLKPEATGIPDLLVTKSVNSSFHGTPDLDAWLRANGIEQIVVTGVSTNHCCETTARVGGNLGYDVYFALDATHSFDRTAPDGTVIPAATLAAITATNLDGEFATVVSTADLIR

SEQ ID NO: 92695 - protein, 303 aa, Microlunatus phosphovorus
  misc_feature (1)..(303): tr|F5XI91|F5XI91_MICPN Isochorismatase OS=Microlunatus phosphovorus (strain ATCC 700054 / DSM 10555 / JCM 9379 / NBRC 101784 / NCIMB 13414 / VKM Ac-1990 / NM-1) OX=1 032480 GN=dhbB PE=4 SV=1
MPLPRTPIPSTISYQTPPLPATSRGPWTLDRDRVALLVHDMQGYFLRAYEPACPALLQARTQLAELLRVARVARVPIVYTAQPGDQPASTRGLLTPIWGPGIGGSDEDAAVVADLAPEPDDRVLVKHRYSAFVGTDLGDWLTDVGRDQLLVTGVYAHIGVLATATDALMRDVEPFVAGDAVVDFSPADHERALVQLASVGAAVIDSATALAALAPPATATADDSWQDWLAGRLGTLLGSESLGQQLVAQPELDLFEAGLDSLRCFELIDDLAAVGVDVDFSVLASEGTSAYLLSQLEQARPAA

SEQ ID NO: 92696 - protein, 38 aa, Micromonospora sp.
  misc_feature (1)..(38): tr|A0A385ARD4|A0A385ARD4_9ACTN Isochorismatase OS=Micro monospora sp. B006 OX=2201999 GN=MicB006_2220 PE=4 SV=1
MHKAYGDSFEDTNLYWSFQTAPGRTAGTVEAADVDFAA

SEQ ID NO: 92697 - protein, 180 aa, Unknown
  misc_feature (1)..(180): tr|A0A1J5R1M6|A0A1J5R1M6_9ZZZZ Putative isochorismatase OS=mine drainage metagenome OX=410659 GN=phzD_4 PE=4 S V=1
MLLTAAQSGLLIVDVQEKLAPVMSEPRRVLQNCGLLLRAAARLGVPALVSEQYPRGIGPTVVDLRQWIGPEAIAEKIHFSCADEPALLERLGAWNRPQLVVAGIEAHICVLQTALGLAARGFRPFVVADACASRQPSSEALAMDRLRQAGVAVVSTEMVLFEWLNRAGTPEFKELSPLIR

SEQ ID NO: 92698 - protein, 190 aa, Moellerella wisconsensis
  misc_feature (1)..(190): tr|A0A0N0IA06|A0A0N0IA06_9GAMM Isochorismatase OS=Moell erella wisconsensis ATCC 35017 OX=1354267 GN=M992_1662 PE=4 SV=1
MSQVLIIIDLIEDIIGEQGLSNSSAAETKTRDIINKSNKTAQYARAHQIPVIWVKVGFSDDYHDIPAGSPMFKNAQKLGALKLSGSGCQWVKGLDVQPQDHIFIKKGVSAFTSNKLDQWLKQHNCQHLVIGGVSSLMAIQSTARLAHDLGYQVTVLEDLCAAANEELHRQSMQALQGMATISCSTEWQQS

SEQ ID NO: 92699 - protein, 252 aa, Monoraphidium neglectum
  misc_feature (1)..(252): tr|A0A0D2M6N8|A0A0D2M6N8_9CHLO Isochorismatase hydrolas e OS=Monoraphidium neglectum OX=145388 GN=MNEG_8904 PE= 4 SV=1
MPANMMPRSALALALLLSAVLSGLGAASAQATGILSKPAQQVKENRISAKNAVLLLLDHQTGLFQLVRDSSVTDFKTNVLALAATAKLYGVPTILTTSLEGGPNGPILPEIRAIFPNATLIPRPGEINAWDNTDFVKAATGRKKLLIAGIVTDVCVLFPTLSALAEGYEVYIVTDASGTFSAPVRDAALARATGAGAVLINWFAVACELQRDWRLGPNSGLGLAKLLSVYLPEYGNLISSHSAAVAVGKTSG

SEQ ID NO: 92700 - protein, 188 aa, Moraxella catarrhalis
  misc_feature (1)..(188): tr|D5VB16|D5VB16_MORCB Isochorismatase hydrolase OS=Mor axella catarrhalis (strain BBH18) OX=1236608 GN=MCR_059 8 PE=4 SV=1
MIAKNTALLLIDLQQGFYDEAYWGGHRNNPHCEQVCFELLSHWREQDLPIFHIRHSSTTPQSRLHPTHQGFNWIELTKPLPCEHVITKHVNSGFIGTDLQQQLTKAGIDTLVLVGLTTNHCVSTTARMAANLGFTTFVVSDGTATFDRMGATGERFDSQLVHEISLANLHGEFATVLTSAELLHKYTL

SEQ ID NO: 92701 - protein, 187 aa, Moritella sp.
  misc_feature (1)..(187): tr|A0A137SAV0|A0A137SAV0_9GAMM Isochorismatase OS=Morit ella sp. JT01 OX=756698 GN=AKG98_1157 PE=4 SV=1
MSNTALLLIDFQNDYYSTYADAKWALSGTETAASNAATLLAAFRKQSLPVIHVRHEFPSNDAPFFLPESEGAKIHTSVAPIKGEPVILKHQINSFRDTELNNILKELNVEKLIIVGAMSHMCIDAVTRAAVDFGYECHVAHDACATLDLEFNGVTVPAIHVHSAFMAALNFGYCNVDSTDKLLDLVR

SEQ ID NO: 92702 - protein, 221 aa, Mycetocola reblochoni
  misc_feature (1)..(221): tr|A0A1R4IC42|A0A1R4IC42_9MICO Isochorismatase of sider ophore biosynthesis OS=Mycetocola reblochoni REB411 OX= 1255698 GN=FM119_00930 PE=4 SV=1
MPLPRISPYELPPVDTTQNRTSWRIEPDRAVLLVHDMQRHFVDAFVDAPEAQISTAITAIRALLRRCRAQGIPVVYTAQPPGQDQADRGLLTDLWGPGLATPESARIVDELEPAASDDVLTKWRYSAFHRSDLAHRMRNRRRDQLIVTGVYAHIGCLTTALDAFMQNIEVFFAADAQADFSLEEHEMAIRYVAGRCGQVTTAAGLLDDLDPQPAQAAGAAL

SEQ ID NO: 92703 - protein, 205 aa, Mycobacterium sp.
  misc_feature (1)..(205): tr|A0A0A1FSM2|A0A0A1FSM2_9MYCO Isochorismatase OS=Mycob acterium sp. VKM Ac-1817D OX=1273687 GN=G155_10845 PE=4 SV=1
MKPNLTDLVAPGHTAIVTQECQGAVIGPDAGLAALADEARREALPNITKLLPAARAASVKVVHCLVQRRPDGLGSNHNAKIFTIGRNDVGILPGSPGATLLPELGPEPDDLVLSRWHGLGPMGGTDLDAILRNLGVRTIVAVGVSVNIAITNLVMDAVNAGYRVVLPRDAVAGIPSAYADAVIDNTLSLLATVTTTDRLLHAWQR

SEQ ID NO: 92704 - protein, 72 aa, Mycobacterium ulcerans
  misc_feature (1)..(72): tr|X8F9D2|X8F9D2_MYCUL Isochorismatase family protein O S=Mycobacterium ulcerans str. Harvey OX=1299332 GN=I551 _4902 PE=4 SV=1
MGYDLSLVRVPLGPAQTVLETARKLGLLIVHTREASPEVSRDGRSSRRWRRCQEKWSWTNLAREASTPPIWS

SEQ ID NO: 92705 - protein, 211 aa, Mycobacteroides abscessus
  misc_feature (1)..(211): tr|A0A0U1B2H7|A0A0U1B2H7_9MYCO Probable isochorismatase (Phenazine biosynthesis) PhzD OS=Mycobacteroides absce ssus OX=36809 GN=phzD_2 PE=4 SV=1
MTTATRGIPMIAEYDLPTVDLLPSNTATWRIDPDRAVLLIHDMQRYFLEPLPVSLRQALVRNVAAIRDRSVAAGIPIAYTAQPGSMTQEQRGLLKDFWGPGMRVDEEHRQIVDPIAPDAGDWVFTKWRYSAFHRSALLERMHAAGRDQLVICGVYAHVGVLMTAVDAFTHDIETFLVADAIADFDDESHWMALEYAARRCAVLTVTGEVLT

SEQ ID NO: 92706 - protein, 242 aa, Mycobacteroides franklinii
  misc_feature (1)..(242): tr|A0A4R8R4Y7|A0A4R8R4Y7_9MYCO Isochorismatase family p rotein OS=Mycobacteroides franklinii OX=948102 GN=phzD_ 1 PE=4 SV=1
MRRRTFLRSSSVALPAAALALAVPGSAHADVRPTGSITYPFSAIHVPATSAPWTLEPDRAVLLVHDMQHYFIKAYAPQSDPIATVLENIKSLLDTAHAHQVPVYYSAQPGGMTKEQRGLFGQLYGPGMPDDDAERAIVDPLGPTAADTVLTKWKYSEFFRSDLLEILRNTDRDQLIIVGVYAFSGITATSTDAVQNDIQAFIVSDAVADYTSTGHDQALAWCAERTARILTTQSALSALNNS

SEQ ID NO: 92707 - protein, 242 aa, Mycobacteroides salmoniphilum
  misc_feature (1)..(242): tr|A0A4R8RVS9|A0A4R8RVS9_9MYCO Putative isochorismatase OS=Mycobacteroides salmoniphilum OX=404941 GN=phzD_2 P E=4 SV=1
MRRRTFLRTGSVALPVAALGLTAAGSATADVRPTGSITYPFSAIDVPAKGAPWSLETDRAVLLVHDMQHYFVKAYTPQADPIATVLRNIKSLLDTAHAHGVPVLYSAQPGGMTPEQRGLFGQLYGPGMPDDDAERAIVDPIAPLATDTVLTKWKYSEFFRSELLEILSNANRDQLIIVGVYAFSGITVTSTDAVQNDIQAFIVSDAVADYTSTGHGQALTWCAERTARILNTRSALAALDNS

SEQ ID NO: 92708 - protein, 198 aa, Mycolicibacterium fortuitum
  misc_feature (1)..(198): tr|A0A0N9Y4W9|A0A0N9Y4W9_MYCFO Cysteine hydrolase OS=My colicibacterium fortuitum OX=1766 GN=A5751_11825 PE=4 S V=1
MTRPTLRELASLPAAPARLADSTLVLIDCQNTYTQGIMELEGVQAALEQTAELLDRARSAGIPIIHIQHSDGPGSLYDIEGESGAIVASVAPREGEPVVVKQFPNSFVQTDLDHRLKGHNASNLVLAGFMTHMCVNSTARGAFNLGYAPTVVAAATATRTLAGPDGAPVPAADMQSASLAAMSDLFAVVVPDVAGIPD

SEQ ID NO: 92709 - protein, 211 aa, Mycolicibacterium phlei
  misc_feature (1)..(211): tr|A0A448GZV6|A0A448GZV6_MYCPH Isochorismatase (Phenazi ne biosynthesis) PhzD OS=Mycolicibacterium phlei OX=177 1 GN=phzD_1 PE=4 SV=1
MTTATRGIPIIAEYDLPTVDLLPANTATWQIDPARAVLLIHDMQRYFLAPLPVSLRDQLVSNVAAIRDRSVAAGIPIAYTAQPGSMTQEQRGLLKDFWGPGMRVDEEHRQIVDPIAPDAGDWVFTKWRYSAFHRSALLERMHAAGRDQLVICGVYAHVGVLMTAVDAFTHDIETFLVADAIADFDDESHWMALEYAARRCAVLTVTDEVLT

SEQ ID NO: 92710 - protein, 252 aa, Mycolicibacterium smegmatis
  misc_feature (1)..(252): tr|I7FGE6|I7FGE6_MYCS2 Isochorismatase hydrolase OS=Myc olicibacterium smegmatis (strain ATCC 700084 / mc(2)155 ) OX=246196 GN=MSMEI_4027 PE=4 SV=1
MLDIIRLPRCQREDLHVPRKPWSGVIPDEDLASFSREFDNEDRPLSAGTKPALLIIDMTRAFVDSTYPTGWSPTGAPAVQANAELLSAARRAHLPIFFTRGYPGPDDPATPSERGRWKRAANPRPLPPGTPPGDVIAEPLTPHAGEVVIDKGAKPSGFFGTALSSYLIYEGCDTVIVTGMTTSGCVRATVLDAFQYNFHVVVPHECCADRSQISHKVSLFDMHMKYGDVIDLSETIAYIESLSSQQHALSAS

SEQ ID NO: 92711 - protein, 299 aa, Myxococcus xanthus
  misc_feature (1)..(299): tr|Q1D692|Q1D692_MYXXD Isochorismatase OS=Myxococcus xa nthus (strain DK 1622) OX=246197 GN=MXAN_3644 PE=4 SV=1
MALPAIAPYPMPGTTDLPKNKVSWTPDPSRAVLLIHDMQRYFVEAFTQGQSPVTELVANIQRLRQHCTALGIPVVYSAQPGGQTPEQRGLLLDFWGGGINGGPDQKRIIDALTPAEGDIQLTKWRYSAFRKTDLMDQMKKLGRDQILISGIYAHIGCLQTASDAFMSDVRPFLIADALGDFSLAHHQLALSYAAQLCAVTTTTQQVLDALGPVSTSSTLTREQVRAEVAELLQESPEALGDDDNLLERGMDSIRLMTLVEKWRAAGAETTFVELAERPTLADWFTLLSLGNTPASRNAA

SEQ ID NO: 92712 - protein, 187 aa, Nanobsidianus stetteri
  misc_feature (1)..(187): tr|R1G3E4|R1G3E4_NANST Amidase related to nicotinamidas e OS=Nanobsidianus stetteri OX=1294122 GN=Nst1_373 PE=4 SV=1
MEWYNKDEMKKLINKKNSVLVVWDVQEALVNSIFNKDEFLTKLKELINSARQYNIPIVYTKITPLPERFQPPYLKRRFNPGDIVKEVYPKESDIILNKNTTSIFVGTNFELMLRNAGINVIVFTGIATDIGVETSARHAQALGFLPVIAREAVSSSDKQAHERSLANMSKLMLVLDNKEIIERWSSE

SEQ ID NO: 92713 - protein, 224 aa, Neisseria bacilliformis
  misc_feature (1)..(224): tr|F2B9U5|F2B9U5_9NEIS Isochorismatase OS=Neisseria bac illiformis ATCC BAA-1200 OX=888742 GN=pncA PE=4 SV=1
MPPCLQARKAGRVIVSIDVDAQKTFTPLCPAELPVVGGDTIAAELNAQAALADLRVMTKDAHSQKAAWLVDNSVDMLKPTGLKNADLTWVAHAMIGSEGYGLLDGLPDLDGYDYCVWKGVDPALHPYGACYHDIEERLSTGLIEWLAAKQARFVLVGGLATDYCVKHTVLQLCRGGNWQVIVNRAACRGIAPETVAKAWQEMEAAGALLLSDAAEIEKYFKSNG

SEQ ID NO: 92714 - protein, 217 aa, Neisseria macacae
  misc_feature (1)..(217): tr|F9F0Q0|F9F0Q0_9NEIS Isochorismatase OS=Neisseria mac acae ATCC 33926 OX=997348 GN=pncA PE=4 SV=1
MTIVAIDIQPQFRFTCMAANATHFLLRPENMVNELNRQAALADKRVLIENVSIDPESICATVVNRNGVMFGRPSGFFSQCAGGCRGTHLLQGLPSPADYDHALELSGKHVHGACFHEANEANSTGLLEWLHEQKADTVIIGGLAIEETVANTAKQLSWYSDNLHIIVNLGACHGYAPESTIETIYQMRKMGITVASNAEAIPELMRRFSGINQVKVS

SEQ ID NO: 92715 - protein, 211 aa, Neisseria meningitidis
  misc_feature (1)..(211): tr|A0A125WG25|A0A125WG25_NEIME Isochorismatase transpos ase OS=Neisseria meningitidis NM2795 OX=1069620 GN=entB PE=4 SV=1
MIVSIDVDAQKTFTPLCPKELPVNEGHLIVEELNAQAALADLRVMTKDAHHAAAKWLVDNPVDMLKPTGLPDADLTWVAHAMVGTRGYELLDGLPCAKEYDYCVWKGVDPELHPYGACFHDIEEKLSTGLIEWLRCQNTDMVIVGGLATDYCVKTTVLQLLKGSNWQVIVNEAACRGIAPDTIETAWQEMRSAGVIILKNAEEIKKYINNQ

SEQ ID NO: 92716 - protein, 205 aa, Neisseria shayeganii
  misc_feature (1)..(205): tr|G4CF72|G4CF72_9NEIS Isochorismatase OS=Neisseria sha yeganii 871 OX=1032488 GN=pncA PE=4 SV=1
MWVVEQPEQMGQKLGYPNVDQTWVRHAEVGTPGFLPLPGLPEPEEYDFLVHQGLDINMHPYGCCFHDTAETLSTGLLEWLQVRQADCLIVGGLATDYSVKETVLQLCRYGNWQVLVNLAACRGMGEDTVAAALQKMREVGAILLDDANAVADWLKQHHCPSSLRHLSDAHRFVPHLPCAKYAPNHPEKCTHRINGCIDGLGCESE

SEQ ID NO: 92717 - protein, 212 aa, Neisseria wadsworthii
  misc_feature (1)..(212): tr|G4CM73|G4CM73_9NEIS Isochorismatase OS=Neisseria wad sworthii 9715 OX=1030841 GN=HMPREF9370_0182 PE=4 SV=1
MIVSIDVDAQKTFTPLCPQELPVAEGDKIVDELNAQAALADLRVMTKDAHSPAARWLVDNSVDMLKPTGLKNADLTWVAHAMVGTEGFELLDGLPDLNGYDYCVWKGVDPQLHPYGACFHDIEERLSTGLIEWLTLQNTNTVIVGGLATDYCVKTTVLQLLKGRKWRVIVNAAACRGIAPETVEAAWQEMKAQGAVVLENAESIEKYLKSIA

SEQ ID NO: 92718 - protein, 185 aa, Neosartorya fumigata
  misc_feature (1)..(185): tr|Q4X1N3|Q4X1N3_ASPFU Isochorismatase family protein O S=Neosartorya fumigata (strain ATCC MYA-4609 / Af293 / CBS 101355 / FGSC A1100) OX=330879 GN=AFUA_2G09355 PE=4 SV=1
MTKSALLVLDIQNGIVERLDDPDTYLASLAPVIKAARKSVVKVIYVKTAFREGYPDTHPRSTMGTRVRESQSFHEGDISVEIPSIVSPDANEPIITKRRVSAFTATDLDLVLRCLGAEHLVVVGLITSGAVLSTVRQAADLDYQLTVLEDLCMDRDQEVHDVLMKKVLSRQARVVSSAEWLAELD

SEQ ID NO: 92719 - protein, 181 aa, Nitrincola lacisaponensis
  misc_feature (1)..(181): tr|A0A063Y3B1|A0A063Y3B1_9GAMM Isochorismatase OS=Nitri ncola lacisaponensis OX=267850 GN=ADINL_2390 PE=4 SV=1
MLIDRKLSRLLVVDLQEKLMPAIHDGEKLLQNCRWMTQVASTLDVPILVSEQYPKGLGPTVEPIRSLLRDDAFMEKTYFSCLSDDGCRTTLLDKHYPQVVIIGTEAHVCVMQTALEMKEAGIHVFVVEDCIGSRDPHNKHLAIERMRQAGITLVAREMVAFEWLRRANTHVFRYVNRTFIA

SEQ ID NO: 92720 - protein, 203 aa, Nocardia africana
  misc_feature (1)..(203): tr|A0A378X6N6|A0A378X6N6_9NOCA Probable isochorismatase OS=Nocardia africana OX=134964 GN=phzD PE=4 SV=1
MTEFPSPSVSKAPRRVCLDAERAGLMVIDVQNGFVNSSSALVVPPIVDLVERWTTNNRPVLMSRYRNYSGSPYERLLGWRELHRAPDIDIIDALVGFLDHPMTTVIDKTGYTALTVEAVEHWHGAGVTDLILCGIATDGCVFKTALDVFEAGFTPWVVVDAVASNTTRHRAQEIHESALLLLARLIGADQLILAADIISALIR

SEQ ID NO: 92721 - protein, 84 aa, Nocardia brasiliensis
  misc_feature (1)..(84): tr|A0A379BUT5|A0A379BUT5_9NOCA Isochorismatase OS=Nocar dia brasiliensis OX=37326 GN=dhbB_4 PE=4 SV=1
MTEPVTIGREDVIADIAAALGVAPHEVPEDGDLTDAGLDSVRLMSLVEKWRASGATEADFATLAAEPVLGVWLDVLVPGHADRT

SEQ ID NO: 92722 - protein, 196 aa, Nocardia cerradoensis
  misc_feature (1)..(196): tr|A0A231GUH2|A0A231GUH2_9NOCA Vibriobactin-specific is ochorismatase OS=Nocardia cerradoensis OX=85688 GN=vibB PE=4 SV=1
MTIQMDKAALLVVDAQNGFVNQHSKHVIPAIVDLASRWMVTGRPTVFTRYWNYEGSPYENLIGWRALYGPPDTDIVADLIPFTTKAGAHLLDKTTYTALTKEGLALLAELDVTDLVICGIATDACVLKTALDAFELGFTPWVLRDAVASNATRHRAAEIHASALLHISRLVGAGQIIDSAELLPLLSVVGPAARES

SEQ ID NO: 92723 - protein, 217 aa, Nocardia cyriacigeorgica
  misc_feature (1)..(217): tr|A0A2L2JSC4|A0A2L2JSC4_9NOCA 2,3-dihydro-2,3-dihydrox ybenzoate synthetase OS=Nocardia cyriacigeorgica OX=135 487 GN=dhbB PE=4 SV=1
MPIPPIAPYDLPTADEVAPNEVAWTVTPERSALLIHDMQQYFLSAYDVARDPARTLLVNIARLRDRCHELGIPVIYTMQPGNQHPSRRGILADFWGTGMSHGPDTEVVPELRPHASDIQVTKWRYSAFQRTDLRELLGYYNRDQLMITGVYTHMGCMLSAAEAFMSDVRPFLALDATADFSRDEHLMALNYTARRCGAVLSTADLLEQLSEVPARAG

SEQ ID NO: 92724 - protein, 79 aa, Nocardia otitidiscaviarum
  misc_feature (1)..(79): tr|A0A379JIG2|A0A379JIG2_9NOCA Isochorismatase OS=Nocar dia otitidiscaviarum OX=1823 GN=dhbB_2 PE=4 SV=1
MTNENTIVAERARVIADVAAALGVEPAELTDETNLLDAGLDSVRIMSLVETWRSAGFEHIDFPTLASDPVLGSWIEALG

SEQ ID NO: 92725 - protein, 1330 aa, Nocardia seriolae
  misc_feature (1)..(1330): tr|A0A1I9ZIZ6|A0A1I9ZIZ6_9NOCA Isochorismatase OS=Nocar dia seriolae OX=37332 GN=entB PE=4 SV=1
MESPQGPSASIARDEVRTAIATHLGLDPSAIGDHDDLIQLGLDSIRTMKLAGAWRKRGLPVNFAQLAAEPTLAAWHRILGGAEMDVPAGTGLAGAMNHMAVQDDSRDLGSAAAESTAAAVTPVADGGDPVVDDGSPFALAPMQHAYWVGRAEGQELGAVAAHLYVEFDGAGVDPERLGAAVEGLVRRHPMLRTRFLPDGTQQTLERPGREVWSVTDLRGAGADAAERVLEELRDRRTHQLMAVAEGQVVDIALTLLPQGRTRLHLDVDMLAADAMSYRILVADLARLYHGEQLPVQDYTFRQYLAEHAGPAQEHAADREWWQGRLANLPGAPELPRAPEAAVNSGAAARSGAPVHSEAAAYSEAAAHSGPPVHSGRGPGEAGGERVARTVRLHHWLSPEAKGRMFAAAHARGITPAMALASVFAETIGGWSAQRRFLLNLPLFHREPVHPRVDGVVGDFTSSVLLEVDVTEPVTVTERARALQRELHAAGAHSGYTGLEVLRDLGRLRAEPVLAPIVYTSAINLGELFADQVTATFGDPVWIISQGPQVLLDAQVTEVRGGLLLNWDIRADAFPANMVETMFTRYIDAILRLAGGDGSAADEPGTLRDDAARDIGAPVANPDAGHGLTAAVSSGADCAPDPSGPDRVAVGPRPKSVVSARAEAGGAEVRAAGWDAEAAVRIPVEQAVVRARVNATDGAVSGRALHSGLFEFAATNPGAPAVIWESDRTDGVVTASPAEEVAQQSASSTRVLSYAELAGQALAVAGALRAAGVGPGDAVAVQLPKGPDQIVATAGVLAAGGVYVPIGFDQPAARRAEILRTGAVVAAVTAGARVPEVPTLVLSEARVYPEPLAEAVVPDPEAIAYVLFTSGSTGKPKGVEVPHRAAMNTIDDLNERFGIGAADRALALSALEFDLSVYDIFGLLSAGSAVVALDEGQRGEPGRWVEMIRRLGISVVNCVPSLLDMLLEAAAGKPVDSLRMVILGGDWVDVALPGRLAAVAPGCRFAGLGGATETAIHSTIREVVNAEVPEEWSAVPYGTPLRNVRCRVVGPSGQDCPDWVTGELWIGGAGVAAGYRGDAERTADRFVTHKGLRWYRTGDLARYLPDGCLEFLGRADHQVKIRGYRVELGEVESALRTLPGVRHAIAAVIGSAAPKLTAVVVADAGAALEVPALLDAAADLLPAYMIPGRVELLAELPFTSNGKPDRKAIASLLAAGEGDGEFVAPRTDVERAVADIVATVLGRERVGVTDDFFALGGDSVLATAVIARVRDWLDSPDTVVADFFAARTVEGLSRRLVERERRAGVAGRLEEVARLYLEVAALSDEEILALS

SEQ ID NO: 92726 - protein, 221 aa, Nocardiopsis alba
  misc_feature (1)..(221): tr|J7L9R5|J7L9R5_NOCAA Isochorismatase OS=Nocardiopsis alba (strain ATCC BAA-2165 / BE74) OX=1205910 GN=dhbB P E=4 SV=1
MSLPTIAPYPLPTSEELPENRAHWPLEPERALLLVHDMQRYFVRPYAEGSQPIVGAVANIAALRSACRAAGVPVVYTAKPGDMTSEQRGLERDFWGAGMKAVAEHTDIVPELAPDGEDLLLTKWRYSAFAQTDLAERMAAQGRDQIVVTGVYAHIGCQLTAADAFMRDIRPFLIADALADFSADHHRSALNYAAGRCATVLSTRDALGFLDRGADSTGARP

SEQ ID NO: 92727 - protein, 207 aa, Nocardiopsis dassonvillei
  misc_feature (1)..(207): tr|D7B8A3|D7B8A3_NOCDD Isochorismatase OS=Nocardiopsis dassonvillei (strain ATCC 23218 / DSM 43111 / CIP 10711 5 / JCM 7437 / KCTC 9190 / NBRC 14626 / NCTC 10488 / NR RL B-5397 / IMRU 509) OX=446468 GN=Ndas_5030 PE=
MPGIPVIEPYALPAAGDLPENTAQWVPDPSRAVLLVHDMQRFFLKPFPEQVRDELVGNIALLRERGARLGVPVGYTAQPGSMSDEQRGLLKDFWGPGMRRSPEDRLVVDELAPSPDDWMFTKLRYSAFHKSDLLERMRAAGRDQLVVCGVYAHVGVLMTAVEAYTNDIQTFLVADAVADFNADYHRMAVRYAAERCAVVLPAKEVFA

SEQ ID NO: 92728 - protein, 224 aa, Nocardiopsis sp.
  misc_feature (1)..(224): tr|A0A1R3UQC4|A0A1R3UQC4_9ACTN Isochorismatase of sider ophore biosynthesis OS=Nocardiopsis sp. JB363 OX=143483 7 GN=BQ8420_19985 PE=4 SV=1
MTIRRGLHYPMPDDPPTNTVSWSPDPRRAALLIHDMQNYFVDFFRAGSSPVTELVANCVRLREAADRWGIPVFYTAQPGSMTSEERGLLHDFWGPGMSAEGTGPGTPRAVIPELALRDGDTLLTKWRYSAFVRSDLDARLRAAGRDQLIICGVYAHVGCLMTASDAFARDVEPFLVSDAVADFSEKEHRMALDYGALRCAAVLPTDRVLTDLDAAVLQMTAGER

SEQ ID NO: 92729 - protein, 200 aa, Nonomuraea gerenzanensis
  misc_feature (1)..(200): tr|A0A1M4EKR7|A0A1M4EKR7_9ACTN Isochorismatase OS=Nonom uraea gerenzanensis OX=93944 GN=BN4615_P8978 PE=4 SV=1
MTVSTTLRDVIGLDNALPALSASTLILIDLQNTYRTGVMALPDAERALDSAARLLERARAAGTSVIHVINDGGEGTPYDIRAEIGQIAPQVAPQDGEPVVVKGFPNSFHETSLLETLRGLEAGPDLVLAGFMTHMCVQFTAQGAFNLGYRPTVVAEACATRSLPGVEGTTIAAEALHAAALTTIGDLFGPVAANVADLPA

SEQ ID NO: 92730 - protein, 219 aa, Novosphingobium sp.
  misc_feature (1)..(219): tr|A0A158RYN4|A0A158RYN4_9SPHN Putative Isochorismatase family protein OS=Novosphingobium sp. KN65.2 OX=147813 4 GN=SPHV1_2170006 PE=4 SV=1
MTITATATPGKSLISPSNHMLVLIDFQSQMSFATKSIAPELLRNNAALISRGAKSFDVPTILTTVAEKSFSGPMFDEIVDAFEGQPMLDRTSMNTWEDEAVIGEVNRIGKSRVVFAGLWTSVCIVGPVASAIDQGFEAYVITDACGDISEEAHERAVQRMIQLGAVPMTSLQYLLELQRDWARTETYDSTTGIARKWGGAYGIGINYAKTMFGASEGGH

SEQ ID NO: 92731 - protein, 182 aa, Oceanibacterium hippocampi
  misc_feature (1)..(182): tr|A0A1Y5TZM6|A0A1Y5TZM6_9PROT Putative isochorismatase OS=Oceanibacterium hippocampi OX=745714 GN=phzD PE=4 S V=1
MLIDPARSLLLIVDMQEKLLPAMSGTDRQSVLDNCVKLMTAARELGCPILVTEQYPQGLGPTVEAIRALVGEENVIAKTAFSALGEERVRDRLADSGLDQVVIAGIEAHVCVAQTALGLAELEVPTFVVADATTAREPANRERAEARLRAAGVDIVSTEMVIFEWLRDSANPSFKALSPLIR

SEQ ID NO: 92732 - protein, 231 aa, Oceanicaulis sp.
  misc_feature (1)..(231): tr|A0A0P7V559|A0A0P7V559_9RHOB Isochorismatase OS=Ocean icaulis sp. HLUCCA04 OX=1666904 GN=HLUCCA04_06600 PE=4 SV=1
MIQRFEPTMIRSEQTAREIFEEVRANPARARFGFGQKLAILNVDPQNAYTRPDLFPKTAYVTDPDQLSHINRISKAARAKGLPVIWTHVAYMDNAADAGVWGTRTDTPDSLQNIKYGSDRHAFDARLEIDEAVDAVYTKRMPSAFFETPLASFLTWHRVDTVVITGGSTSGCVRATAVDALSHGYRAIVPVECVADKHESYHFASLTDLQLKYADVVEVREVDDWIAGYGG

SEQ ID NO: 92733 - protein, 294 aa, Oceanobacillus iheyensis
  misc_feature (1)..(294): tr|Q8CV00|Q8CV00_OCEIH Isochorismatase (2,3 dihdro-2,3 dihydrobenzoate synthase) OS=Oceanobacillus iheyensis ( strain DSM 14371 / CIP 107618 / JCM 11309 / KCTC 3954 / HTE831) OX=221109 GN=dhbB PE=4 SV=1
MSIPSIASYTLPTENELPKSKVDWKAEASRSVLLIHDMQQYFLDFYGQDSPLIQQLIQNISTIKETCTKLGIPTIYTAQPGDQNQEDRALLTDFWGPGLDDDIEQTKITDQLAPTEDDMVQTKWRYSAFKKSQLLEWMQENGKDQLIICGVYANIGCIVTAVEAFMSDIQPFIVADAMADFSKEQHEEALVFGAGRCARPLMMKQLIEDISSEETITVQSIKVQVAEMLEVSPDQLNEQDDLIESGLDSIRIMMLAEDWSSKGIDISFIEMIESPTLEAWYQKLVPEYETIQVK

SEQ ID NO: 92734 - protein, 190 aa, Ochrobactrum haematophilum
  misc_feature (1)..(190): tr|A0A2P9HBZ2|A0A2P9HBZ2_9RHIZ Isochorismatase OS=Ochro bactrum haematophilum OX=419474 GN=OHAE_4406 PE=4 SV=1
MTLKSMLLVMDMMNDLVHPDGAGAKTYVPLMRERDVYGATKRAIARARAGKVPVGYVRVGFSPDYREVSDRSPVFTGARKAGIFKLGSWGTEVYADFAPEAGDADIVKHRVSPFYGTALCPLLSAREIGRLVLAGVSTNGVVSAAVREGHDRDYECVVLEDCCAGSTSEEHEFALAGLRRFSKIMTSADF

SEQ ID NO: 92735 - protein, 86 aa, Oerskovia enterophila
  misc_feature (1)..(86): tr|A0A163T4M0|A0A163T4M0_9CELL Isochorismatase OS=Oersk ovia enterophila OX=43678 GN=entB PE=4 SV=1
MTATTRPPVPTREQALADLVDVLGVGGSAAHEIGLDDDLTDHGLDSVRLMALLERWRAAGWPVEFAQVAVEPTLRGALRALGVPTP

SEQ ID NO: 92736 - protein, 189 aa, Oleispira antarctica
  misc_feature (1)..(189): tr|R4YKI9|R4YKI9_OLEAN Isochorismatase OS=Oleispira ant arctica RB-8 OX=698738 GN=OLEAN_C07660 PE=4 SV=1
MTTENTTALLLIDFQNDYFSTYNGAKNPLVGTEAAAEQGAKLLAKFRQQGLPVVHVRHEFPTDEAPFFLPGSDGAKIHPSVAAQEGEAVVLKHQINSFRDTDLKKVLDDAGIKKLVIVGAMTHMCIDAVTRAAEDLGYECAVAHDACATLDLEFNGITVPAAQVHAAFMSALSFAYANVASADELIAGL

SEQ ID NO: 92737 - protein, 71 aa, Oligella ureolytica
  misc_feature (1)..(71): tr|A0A378XHY8|A0A378XHY8_9BURK Isochorismatase OS=Olige lla ureolytica OX=90244 GN=dhbB PE=4 SV=1
MQEELINIVAKALEIAPEEIAVEDNLMVVGLHSLALMTITEQIAQRYNRPVSFAALMQNPTIQAWEQLLNS

SEQ ID NO: 92738 - protein, 186 aa, Orrella dioscoreae
  misc_feature (1)..(186): tr|A0A1C3K554|A0A1C3K554_9BURK Isochorismatase OS=Orrel la dioscoreae OX=1851544 GN=ODI_01886 PE=4 SV=1
MPAWLDAEDSVFLIVDMQERLMPAIAGQAEQLATADRLARAARLLDIPVVATAHQAAKLGGTVAPLAASVRRTFPKTHFSAAREPGFVAWLPAARRTVLVAGAEAHVCVLQTVLGLLAEGLRVAMVEDAVGSRHAADKAAALRRAAAAGADIVTAEMVLFEWLGHCEHPQFPAVLALIKERAAPGV

SEQ ID NO: 92739 - protein, 317 aa, Paenibacillus alvei
  misc_feature (1)..(317): tr|K4ZMQ1|K4ZMQ1_PAEA2 Isochorismatase DhbB OS=Paenibac illus alvei (strain ATCC 6344 / DSM 29 / NBRC 3343 / NC IMB 9371 / NCTC 6352) OX=1206781 GN=dhbB PE=4 SV=1
MGLPTILPYRMPSEAELPENRVDWSPDPSRAVLLIHDMQQYFVDAYQAGESPLVELIANIKELRERCTELGIPVVYSAQPGGQTPEQRGLLQDFWGAGINDGPYQKKFIDELAPRVNDILMTKWRYSAFQKTNLLEILRERGRDQLLVCGIYAHIGCLMTSCEAFMQDVQPFLIADAVADFSLDKHHMALTYAAERCAVVATTERVLNALNRHAAEQESEETAGAEAGCSVTLQSVRETVAELLQEEPSAIGDQDNLITQWGMDSIRIMSLVERWRRSSIAVSFVELAERPTVASWWELLSAKLSSNSVPNYDYYSI

SEQ ID NO: 92740 - protein, 192 aa, Paenibacillus illinoisensis
  misc_feature (1)..(192): tr|A0A2W0CQC8|A0A2W0CQC8_9BACL Isochorismatase OS=Paeni bacillus illinoisensis OX=59845 GN=PIL02S_05250 PE=4 SV =1
MKEHLYQFSKTALIVIDLQKWIGNQYAPHSAEQVVERASAMVQTFREAGAFVGLVRVSSKDFKDMPRPLLDQEPPAINLVPGWDEIVAEIGVTANDHLITKRQWGAFYGTDLDQQLRRRGITTIVLCGIASGIGVDTTAREAYSHGYQVIFAIDAMTGFSEAEHEHVRQIIFPRIGRIRTTDEILACAALQS

SEQ ID NO: 92741 - protein, 308 aa, Paenibacillus larvae
  misc_feature (1)..(308): tr|V9W645|V9W645_9BACL Isochorismatase DhbB OS=Paenibac illus larvae subsp. larvae DSM 25430 OX=697284 GN=dhbB PE=4 SV=1
MAIPAISAYSMPSISDLPNNKVTWKADPKRSVLLIHDMQEYFLDAYRTGESPKVELIENIQFLRNQCKQFGIPVIYTAQPGGQTLQQRGLLQDFWGPGIPDGPYKKRIVEELSPDENDIFLTKWRYSAFKKTNLLDILHEHGRDQLIICGVYAHIGCLLTACDAFMEGIEPFFVADAVADFSLDHHKMAMKYASERCAVTTTTHLLFKEQKSSQASVKKDCSLTLELVRKQVAELLYESLEGISDYEDLIHRGLDSVRIMSLVEKWRLIGADITFARLAERPTISDWWSLLSSQAQSTMSQTDYVIKG

SEQ ID NO: 92742 - protein, 185 aa, Paenibacillus pasadenensis
  misc_feature (1)..(185): tr|A0A2N5N1M2|A0A2N5N1M2_9BACL Isochorismatase OS=Paeni bacillus pasadenensis OX=217090 GN=B8V81_2668 PE=4 SV=1
MAQALLVIDVQKDLVEGNGGEVPIFEPERLFAAIGKAVEQAERAGARIVFVRDKSIGGGEGEGFDVHPALRIPPDAVLFDKTAVSSFHETGLLEHLREHDVTHCVIAGCMTQYCIDTAVRAATLHGFDVTLVRDGHSTSDSPVLPAEQIIAHHNATLHGYANNGPFALARPADDPLFEPPHDKYR

SEQ ID NO: 92743 - protein, 176 aa, Paenibacillus polymyxa
  misc_feature (1)..(176): tr|A0A378XWH9|A0A378XWH9_PAEPO Amidase OS=Paenibacillus polymyxa OX=1406 GN=NCTC10343_01243 PE=4 SV=1
MGQTVLLLIDVQQAMFMYDEKLYREQEVVAHLQQLLTEARASGTPVIFVQHTDEADEDFRENSLGWAIADVVRPLPHERIVRKSSWDSFYQTELRHVLQGLGASQLIIAGMQTEFCLDTTCRSAYSLGYQNNVLVSDAHSTFDSKVLSGEQIVAHHNAVLGNRFARLLTTADVHFS

SEQ ID NO: 92744 - protein, 328 aa, Paenibacillus sp.
  misc_feature (1)..(328): tr|A0A2M9N4D4|A0A2M9N4D4_9BACL Isochorismatase OS=Paeni bacillus sp. GM2FR OX=2059268 GN=dhbB PE=4 SV=1
MALPKILPYPMPGEADLPKNKVAWTADPNRAVLLIHDMQQYFIDAFTPDQSPVVELLTHIQKLRSCCAELGIPVIYSAQPGGQAPEQRGLLQDFWGSGINDGPYQKKFVDAVAPSEQDMLLTKWRYSAFQKTNLHDIMREQGRDQLMICGIYAHIGCLLTASEAFMKDIQPFFIADALADFSEEKHRLALVYAAERCAVTLTTERLVASLITQEQRFVSEHSKAPSGEANTVDAAKGQSLLTLQTLRENVAELLQEQPLSIGEDDHLIEYWGLDSIRIMSLAERFRREGLDISFVELAEQPTLAGWWGLLSDKQNVCVSPPNYDYYTV

SEQ ID NO: 92745 - protein, 326 aa, Paenibacillus thiaminolyticus
  misc_feature (1)..(326): tr|A0A378X817|A0A378X817_PANTH Isochorismatase OS=Paeni bacillus thiaminolyticus OX=49283 GN=dhbB PE=4 SV=1
MALPSILPYPMPAESELPANKVAWTPDPKRAVLLIHDMQQYFVDAFNADESPVPELVENIRELRAQCAALGIPVVYSAQPGGQSPERRGLLCDFWGPGMNDGPDQKKIVEPLAPGEQDIVVTKWRYSAFQKTELLDILRQQGRDQLIVCGIYAHIGCLMTACEAFMQDVQPFFVADAVADFSADKHRMALAYAAERCAVTITTRHLVEDLARLGDSASISESAPASEPSLQAPPEGEPLPLTRQAVRVEVAGLLQEHPSRIADDDNLIHIWGLDSIRIMSLIERWRRGGTEVSFSELAERPTLADWWQLISSRMSRSLPNGDYFTV

SEQ ID NO: 92746 - protein, 162 aa, Paenibacillus xylanexedens
  misc_feature (1)..(162): tr|A0A3N6EKI9|A0A3N6EKI9_9BACL Isochorismatase OS=Paeni bacillus xylanexedens OX=528191 GN=EDO6_00202 PE=4 SV=1
MKVGLLIVDMQESIVRKKMDQTSIDHACEYINHVAGVLRTNNHVVIHVQDVEGMEEAAPDEYRIIPEVDVNEKDITVTKEASNAFWQTDLEQVLKSHGIELVIIAGFAAEECVLFTYNGAMERGFRPVMLQNGILSTHHEAVISTYRDRNVISYPVVDYLIH

SEQ ID NO: 92747 - protein, 64 aa, Paeniclostridium sordellii
  misc_feature (1)..(64): tr|T0CQG4|T0CQG4_PAESO Isochorismatase family domain pr otein OS=Paeniclostridium sordellii ATCC 9714 OX=129203 6 GN=entB PE=4 SV=1
MYLSVCSTLKAYFNQNNIDKNIIVPMNLVDTYHIDNIHNAEIMNIVFLNSMIQNGVEVIKEIEL

SEQ ID NO: 92748 - protein, 229 aa, Paeniglutamicibacter gangotriensis
  misc_feature (1)..(229): tr|M7N5J7|M7N5J7_9MICC Isochorismatase OS=Paeniglutamic ibacter gangotriensis Lz1y OX=1276920 GN=ADIAG_03558 PE =4 SV=1
MCGSPVGADPAVCFGNKTGRGIPPRARSDPATVQECHTADMDEHLEGSKTALIIVNMQQGVLDHCVHPKKVLTRIADLVSRARDTGTPIYWVQDDREFERHSAGWRLAAGLEAQDDEHRIFKSYRDAFTGTGLHASLIAEDVGHLVVCGAQSDYALRTAAGRAASMGYDVTVVRDAHTTGAETFEGQTLTGDQIIAHTNAYFATLDYPNQDFLLKHTHEVVFQPVSVHD

SEQ ID NO: 92749 - protein, 220 aa, Palleronia marisminoris
  misc_feature (1)..(220): tr|A0A1Y5THF8|A0A1Y5THF8_9RHOB Isochorismatase OS=Palle ronia marisminoris OX=315423 GN=dhbB PE=4 SV=1
MALPTIPDYDLPADDLPAARVPWQLEPGRATLLIHDMQRYFCAAYGDGAVDRPDTPIGQAARGIAAIAQAARSAGIPVFYTAQKGNQLPADRGLQADFWGPGMKATPEHEEIVAPLSPAAGDLVLHKHRYSAFQRSNLETLMRARGRDQIIVTGIYAHIGCLATAAEAFQRDIQPFFVADALADFDRARHDMAVAWVAGCCGVPLTAADVVGAIGTGTGA

SEQ ID NO: 92750 - protein, 284 aa, Pantoea sp.
  misc_feature (1)..(284): tr|E6WIM0|E6WIM0_PANSA Isochorismatase OS=Pantoea sp. ( strain At-9b) OX=592316 GN=Pat9b_0483 PE=4 SV=1
MAIPKLTSYPLPTTTELPANKVKWTLEPQRAALLIHDMQAYFLNFWGENSPLVNQVVENIARLRAYCKAQGIPVFYTAQPNQQSDEDRALLNDMWGPGLNKHPDQQKIVDALAPDQDDHVLTKWRYSAFHRSPLESILQEMGRDQLIITGVYAHIGCLTTATDAFMRNIQPFMVADALADFTREEHMMALTYTAGRSGKVVMTADLMPLPLSKDELRALILPLLEDDDVPEDDENLIDYGLDSVRVMALAARWRQVHSDIDFVSLAKNPSIDGWWALLSRESAK

SEQ ID NO: 92751 - protein, 284 aa, Pantoea vagans
  misc_feature (1)..(284): tr|E1SC63|E1SC63_PANVC Isochorismatase OS=Pantoea vagan s (strain C9-1) OX=712898 GN=entB PE=4 SV=1
MAIPQLTSYPLPDATELPNNKVKWTLEPGRAALLIHDMQRYFLNFWGDNSPLVKQVVDNIVRLRRYCKAQGIPVFYTAQPNAQSDEDRALLNDMWGPGLNKHPDQKKIVEALTPDEHDQVLTKWRYSAFHRSPLEAILQEMGRDQLIITGVYAHIGCLTTATDAFMRNIQPFMVADALADFSREEHMMALTYTAGRSGKVVMTADLMPVPLSKDELRMLILPLLEDDEVPDDDENLIDYGLDSVRVMALAARWRQVHRDIDFVSLARNPSIDGWWALLSREPAE

SEQ ID NO: 92752 - protein, 218 aa, Paracoccus denitrificans
  misc_feature (1)..(218): tr|A1B4M9|A1B4M9_PARDP Isochorismatase OS=Paracoccus de nitrificans (strain Pd 1222) OX=318586 GN=Pden_2383 PE= 4 SV=1
MALPGIAPYAPPTEAELPKARGPWQPDRDRLALLVHDMQRYFCRVYPEGAPLAPVIGNIARLIHAARAAGVPVFYTAQKGNQFRPDRGLQADLWGPGMSATPEHEEILPELASATGDIVLVKHRYSAFQRSNLEQLMRARGRDQLMICGVYAHIGCLATAVEAFQRDIEAFAVADAQADFSREKQDMAMEWIAATCGVPLSTRQALEALGTHGVKSCA
